United States Patent Application Publication US 2025/0333808 A1 - sequence listing, part 8

SEQ ID NO: 123564 - DNA, 80 bp, synthetic construct
  source 1..80: mol_type = other DNA
gatccgcttgtggcagaggaggatgagcgggaggtctccgtgcccgcagagatactgcggaagtctcggaaattcacccc

SEQ ID NO: 123565 - DNA, 80 bp, synthetic construct
  source 1..80: mol_type = other DNA
tgtggatgaacagtaccgggttcaccaaaacctgtggcgcccctccatgcgaggttaacaccaataatgggacctggcac

SEQ ID NO: 123566 - DNA, 80 bp, synthetic construct
  source 1..80: mol_type = other DNA
gatccgccggaacgttttcacgtagccggcgtagtgcccgtactcccgcgcgagcccgaacacgttcgcccccgcaaggg

SEQ ID NO: 123567 - DNA, 80 bp, synthetic construct
  source 1..80: mol_type = other DNA
aaaggagccagtctcatttgtctcgcgttggcgtcaacaggacagttcaatcccctcattttggtggcgggattactagc

SEQ ID NO: 123568 - DNA, 80 bp, synthetic construct
  source 1..80: mol_type = other DNA
ggcggcgtagtttcccagcacgtcgcagtcgctgtacatgctgttcatggtcccgaagacgccgatggctccgcgggcgg

SEQ ID NO: 123569 - DNA, 80 bp, synthetic construct
  source 1..80: mol_type = other DNA
agtgttatacactgaaaatgtagatttggaaactccagatacacatgtggtgtacaaaccaggcaaagaggatgaaagtt

SEQ ID NO: 123570 - DNA, 80 bp, synthetic construct
  source 1..80: mol_type = other DNA
agtcggcccgcgcacatgcagcaacgtgtggcacggcacctttcccatcaacgcaacgacgactggtccgagcattccca

SEQ ID NO: 123571 - DNA, 80 bp, synthetic construct
  source 1..80: mol_type = other DNA
aaccaggcgaccgcctgcacgtcaagctcgcgcgccttctccgtctggtccaacagaatttcgacctgatccgcgatctc

SEQ ID NO: 123572 - DNA, 80 bp, synthetic construct
  source 1..80: mol_type = other DNA
cctggaatttttgcatctttaaatttgggccaccactcatttttccaggaaattgtgatcaaaaacttagatttttcttc

SEQ ID NO: 123573 - DNA, 80 bp, synthetic construct
  source 1..80: mol_type = other DNA
aggcttttcatccagatatagtactgcttccaggttgcggggttgactttacagagagcagattaagcaatatactaggt

SEQ ID NO: 123574 - DNA, 80 bp, synthetic construct
  source 1..80: mol_type = other DNA
ctgaacaatgggctccagcgagcaggagctggccgccatcgtgcgtgacctgggttgcggaccctactttctaggcacct

SEQ ID NO: 123575 - DNA, 80 bp, synthetic construct
  source 1..80: mol_type = other DNA
tgctgggtgacgtggttacagatacggtccgccaggcggcgggcgatcgtcgccccctggttcgccgtcacacacagttc

SEQ ID NO: 123576 - DNA, 80 bp, synthetic construct
  source 1..80: mol_type = other DNA
caggggggtcctgagcgggacgtacctgcgtcaggttcacggcctgattgacccggcgccgacgcaccatcgtatcgtcg

SEQ ID NO: 123577 - DNA, 80 bp, synthetic construct
  source 1..80: mol_type = other DNA
tggggtatgtccccgtcctaggcggccccttggtgggcgtcgcggctgccctcgcccatggcgtgagggtactcgaggac

SEQ ID NO: 123578 - DNA, 80 bp, synthetic construct
  source 1..80: mol_type = other DNA
cgaccgcgggctcgtaggcgcgactaacgcccaacccaacggcacacaccccccaccccgcgcgtaaccccatttctttc

SEQ ID NO: 123579 - DNA, 80 bp, synthetic construct
  source 1..80: mol_type = other DNA
ttattaggagttttgccccgcggcgcagggttcagtggaaagggcgacgggtacaacgcgttttgaggccgggcaccgcg

SEQ ID NO: 123580 - DNA, 80 bp, synthetic construct
  source 1..80: mol_type = other DNA
cttgtcggccaggctgaggcagccctggaaaacctgatattactcaatgctacctctgctgccagcaactcggggatagt

SEQ ID NO: 123581 - DNA, 80 bp, synthetic construct
  source 1..80: mol_type = other DNA
agaattttgcaggaccagtgtcacaacacaattacagaccaggctatcatacacaaacggcaggaccctggcatctaggc

SEQ ID NO: 123582 - DNA, 80 bp, synthetic construct
  source 1..80: mol_type = other DNA
aaagacagcttaggagaacaagagctgggagtggtcatggtgactacttctaaaggaaaggggggcggtccccctaagcg

SEQ ID NO: 123583 - DNA, 80 bp, synthetic construct
  source 1..80: mol_type = other DNA
ggtcatgagtggcgaggtccctaccaccgaggacttggtcaatctactgcccgccattctctcgccgggggccctggtcg

SEQ ID NO: 123584 - DNA, 80 bp, synthetic construct
  source 1..80: mol_type = other DNA
aatctccgatgccaccgatctggaggccgccggttcggaccacacgctcgcgtcccagtccgacacggaggatgccccct

SEQ ID NO: 123585 - DNA, 80 bp, synthetic construct
  source 1..80: mol_type = other DNA
attaagtatatgagcaattcaagtaactctacaagcttgtctaatttttctggaattggggtcggggttgtccttactct

SEQ ID NO: 123586 - DNA, 80 bp, synthetic construct
  source 1..80: mol_type = other DNA
gctgtgaagtgggagtacgtagtcttagcttttctggtgttggccgatgcgcgcatttgtgcctgcttgtggttaatgtt

SEQ ID NO: 123587 - DNA, 80 bp, synthetic construct
  source 1..80: mol_type = other DNA
ggaggaacaaatattacaaaccagggtttgttaattggaactgaagaaacagccgataatcctccaaaggaaatctttgc

SEQ ID NO: 123588 - DNA, 80 bp, synthetic construct
  source 1..80: mol_type = other DNA
taccaagcccttcactttgtggatatggccgggcataacttccaacgacgcgataatgtgttaatccacgggagacccgt

SEQ ID NO: 123589 - DNA, 80 bp, synthetic construct
  source 1..80: mol_type = other DNA
aagaaagtgacattcgatcgagtgcaactgctcgatcaacattaccaagatgtcctaaaggagattaaggctcgggcctc

SEQ ID NO: 123590 - DNA, 80 bp, synthetic construct
  source 1..80: mol_type = other DNA
gcttattgccagcaaacacgtggtctgctgggcaccatagtcaccagtctcacgggtcgggacaagaatgaggttgaggg

SEQ ID NO: 123591 - DNA, 80 bp, synthetic construct
  source 1..80: mol_type = other DNA
agtctcttgaaaccaccatgagatccccggtcttttctgacaactcaacgcctcctgctgtgccccagacatatcaagtt

SEQ ID NO: 123592 - DNA, 80 bp, synthetic construct
  source 1..80: mol_type = other DNA
cagcggccatggatcgtattatggctttaacggcgcgcagtcctgaggcttttcgccagcagccgcaagctaatcgattt

SEQ ID NO: 123593 - DNA, 80 bp, synthetic construct
  source 1..80: mol_type = other DNA
cccgtaagaagaatccaggtgatattttgttatgtttacaattaggtccccatctaaaccctttcttgtctcattggtcc

SEQ ID NO: 123594 - DNA, 80 bp, synthetic construct
  source 1..80: mol_type = other DNA
atagaaccactggatctacctccaatcattcaaagactccatggcctcagcgcattttcactccacagttactctccagg

SEQ ID NO: 123595 - DNA, 80 bp, synthetic construct
  source 1..80: mol_type = other DNA
cctcctgctcaacatcctggggggctgggtcgcttcccaactcgcaaaccccacagcgtctactgcatttgtagtgagcg

SEQ ID NO: 123596 - DNA, 80 bp, synthetic construct
  source 1..80: mol_type = other DNA
ttaaggtagttaagtttttacgatctacccagaaaattccagctaaacattttattcagatatgggaacccctgcattct

SEQ ID NO: 123597 - DNA, 80 bp, synthetic construct
  source 1..80: mol_type = other DNA
tggtcgcgaaaggccttgtggttctgcctgatagggaggttgcgagtgcccctggaggcagcaagcgtctagccatggcg

SEQ ID NO: 123598 - DNA, 80 bp, synthetic construct
  source 1..80: mol_type = other DNA
ctggtgaaaggggtggtctacggcaagtattgtcaaatggctatactcaaagtgggcgctttgactggtacctacatcta

SEQ ID NO: 123599 - DNA, 80 bp, synthetic construct
  source 1..80: mol_type = other DNA
actgatgcagcgtcgctggccgaggaagaaggggacagtgggtcagaagtggattcgttctcctccatgccacccctaga

SEQ ID NO: 123600 - DNA, 80 bp, synthetic construct
  source 1..80: mol_type = other DNA
ttgatcaaggagaagcggagtgcggcagcaaaaaagaagggagccagcctcatatgcctagccctagtgtcaactggcat

SEQ ID NO: 123601 - DNA, 80 bp, synthetic construct
  source 1..80: mol_type = other DNA
agctttattaaaccagttaatgttactgaagggagcaatgtgacactggtaggtgtagagggtgctaaaaacaccacctg

SEQ ID NO: 123602 - DNA, 80 bp, synthetic construct
  source 1..80: mol_type = other DNA
cgcgggcgcccccaggacccggaggccgcggcatcccccgctcccttcgttgcggtgacaaacatcggagccggcagcga

SEQ ID NO: 123603 - DNA, 80 bp, synthetic construct
  source 1..80: mol_type = other DNA
ggagatataccaatgctgtgaccttgagccggaggctcggaaggcaatcagcgctctcacggagcggctgtacatcggag

SEQ ID NO: 123604 - DNA, 80 bp, synthetic construct
  source 1..80: mol_type = other DNA
gctgcctgaaccgaaaacaccgttgcctttactgtaagtacaaaactaaaatttatatttgcgtgcgtattttgtaacat

SEQ ID NO: 123605 - DNA, 80 bp, synthetic construct
  source 1..80: mol_type = other DNA
cagtagaaggggagctcaacgcaatcctggaagagaatggagttcaactgacggtcgttgtgggatctgtaaaaaacccc

SEQ ID NO: 123606 - DNA, 80 bp, synthetic construct
  source 1..80: mol_type = other DNA
tgaaattcggtttgaggaatgcccgggcactaaggtccacgtggaggaaacatgtggaacaagaggaccatctctgagat

SEQ ID NO: 123607 - DNA, 80 bp, synthetic construct
  source 1..80: mol_type = other DNA
tctgggagtgcgcgtgtgcgagaagatggccttgtacgatgtggtaaggaaactgccatatgctgtgatgggggcttcct

SEQ ID NO: 123608 - DNA, 80 bp, synthetic construct
  source 1..80: mol_type = other DNA
gtatgcgccaccgacgccctcatgactggttataccggtgactttgacagcgtcatcgactgcaatgtatcagtgacaca

SEQ ID NO: 123609 - DNA, 80 bp, synthetic construct
  source 1..80: mol_type = other DNA
ggggcgggagagttcactcggcacgcatgcacgtgtaaccgccagtccgtgcttgcctagcgaactcacccgtcccggct

SEQ ID NO: 123610 - DNA, 80 bp, synthetic construct
  source 1..80: mol_type = other DNA
ggccaatcaacttccagatttgtagggtttttttcatcaggcccagcccagaaattgcagttggttaacaccaatgggtc

SEQ ID NO: 123611 - DNA, 80 bp, synthetic construct
  source 1..80: mol_type = other DNA
cccatgccaggtcccatcgcccgaatttttcacagagctggacggggtgcgcctgcacaggtttgcgcccccttgcaagc

SEQ ID NO: 123612 - DNA, 80 bp, synthetic construct
  source 1..80: mol_type = other DNA
ttgggcggtacgcaccaagaccaatctcactccactgccagccgctggccaactggatttatccagctggtttacggttg

SEQ ID NO: 123613 - DNA, 80 bp, synthetic construct
  source 1..80: mol_type = other DNA
acctgttcatgggaagcgacgtgactcggatagaatctgagtccaaagtgcttgtcttggactcgctggactccatgacc

SEQ ID NO: 123614 - DNA, 80 bp, synthetic construct
  source 1..80: mol_type = other DNA
caacacccacactaccggctctatcgcggccgggcttacgggcggccttgtaagcttgctcacaccagggcctaagcaga

SEQ ID NO: 123615 - DNA, 80 bp, synthetic construct
  source 1..80: mol_type = other DNA
tccagaagtcagagacggggccgcaccggtcgtggcaaaagtggcatttaccgctacgttgcgcccggtgaacggccatc

SEQ ID NO: 123616 - DNA, 80 bp, synthetic construct
  source 1..80: mol_type = other DNA
ggccgccggccccccgcccccccggcgggcccaccccgaacggaattccattatgcacgaccccgccccgacgccggcac

SEQ ID NO: 123617 - DNA, 80 bp, synthetic construct
  source 1..80: mol_type = other DNA
aaatgcaccacagaacatgaaaaacttattattcgccacaaagacaaagttggcaagtacgctgtctatgctatctggca

SEQ ID NO: 123618 - DNA, 80 bp, synthetic construct
  source 1..80: mol_type = other DNA
aagtgatgtaccaacaatatgatgagatggaggaatgttccaagcacatcccctatcttgctgagggccaactcatagca

SEQ ID NO: 123619 - DNA, 80 bp, synthetic construct
  source 1..80: mol_type = other DNA
cagtgtgacaacgccccaccccaacatcgaggaggtggccctgccttcggaggtggaaatccccttctacggcagggcta

SEQ ID NO: 123620 - DNA, 80 bp, synthetic construct
  source 1..80: mol_type = other DNA
accgtactggtcggatgtacgtgaagatgtggtctgttatgggggggcctggggcttagacaaaaaatggtgaggtgaag

SEQ ID NO: 123621 - DNA, 80 bp, synthetic construct
  source 1..80: mol_type = other DNA
cccaaacaaagcaggcgggggataactacccctacctgacggcgtaccaggctaccgtgtgcgccagagcagccgctcca

SEQ ID NO: 123622 - DNA, 80 bp, synthetic construct
  source 1..80: mol_type = other DNA
atcatgctcatccaatgtctccgtcgcccacgacggcaatgggaagagatattactacctcacacgtgactgtaccactc

SEQ ID NO: 123623 - DNA, 80 bp, synthetic construct
  source 1..80: mol_type = other DNA
gtctctcaggcgttggctgacttggctacaaagactttcagccagcccggagttgacgccgactccgggacggggctcac

SEQ ID NO: 123624 - DNA, 80 bp, synthetic construct
  source 1..80: mol_type = other DNA
cggaggaagcggatgatggtcctcactgaatcaaccgtatctactgccttggccgagcttgccactaagagctttggcag

SEQ ID NO: 123625 - DNA, 80 bp, synthetic construct
  source 1..80: mol_type = other DNA
aagatcgtgaccgcagcgagctacatccattgctccactcaacaactgaactcgccatactgccatgctcgtttacgccc

SEQ ID NO: 123626 - DNA, 80 bp, synthetic construct
  source 1..80: mol_type = other DNA
ccgccgggcccgcgcggcggtggccggccgcgacgccacgggccgcttcacggccggtcggccccggcgtgtcgagctgg

SEQ ID NO: 123627 - DNA, 80 bp, synthetic construct
  source 1..80: mol_type = other DNA
ggacagggcacatcagaaactttttctatggggctgttatgtctgaccttgttcgtggaagaatgcttaaggagaagagt

SEQ ID NO: 123628 - DNA, 80 bp, synthetic construct
  source 1..80: mol_type = other DNA
aatgtacaacggacatgcaggcggatgtacaacggacatgcaggcggatgtacaacggacatgcaggcggatgtacaacg

SEQ ID NO: 123629 - DNA, 80 bp, synthetic construct
  source 1..80: mol_type = other DNA
cagcgggggggacgtttatcacagcacgccccgggctcgaccccgcatgttactcctgtgcctactcctactttctgtgg

SEQ ID NO: 123630 - DNA, 80 bp, synthetic construct
  source 1..80: mol_type = other DNA
gttacaatctcctagagggagataaaaataacactgcctaccgcagctggtttttggcctacaactacggagatgcagag

SEQ ID NO: 123631 - DNA, 80 bp, synthetic construct
  source 1..80: mol_type = other DNA
tatatgcggtaagtacctctttaactgggcagtgaagaccaagctaaaactcactccattggtctccgcgagcaagcttg

SEQ ID NO: 123632 - DNA, 80 bp, synthetic construct
  source 1..80: mol_type = other DNA
ctcgacgtcgcggagacaaccgcgccagtcttcttagtccgaggccgataagtactctcaaaggatcatctggtggtccg

SEQ ID NO: 123633 - DNA, 80 bp, synthetic construct
  source 1..80: mol_type = other DNA
ttgcctcttgcaaacggctggatgactttgatcaagggtggggcaggctcggcgtatctaacatcttcggctcatctgac

SEQ ID NO: 123634 - DNA, 80 bp, synthetic construct
  source 1..80: mol_type = other DNA
gcaatagatgttggctacatgtgtgaagacacaataacctatgaatgcccagtcttgagccccggcaacgatcctgaaga

SEQ ID NO: 123635 - DNA, 80 bp, synthetic construct
  source 1..80: mol_type = other DNA
gcagatctcgagatcatgacaagcacgtgggtccttgcggggggagttttggcagctttggctgcctattgcctggctac

SEQ ID NO: 123636 - DNA, 80 bp, synthetic construct
  source 1..80: mol_type = other DNA
tttatttaggtatgctggaggttctccctggatgcccaccccacccccccgtgggtctagccgggccttagggatagcgt

SEQ ID NO: 123637 - DNA, 80 bp, synthetic construct
  source 1..80: mol_type = other DNA
gaaatcaccagcgtgagtcgggctcttggtcagcaagacaccagtagcttggaagccacgctgaactttttgctaaccaa

SEQ ID NO: 123638 - DNA, 80 bp, synthetic construct
  source 1..80: mol_type = other DNA
tagagcacggggggtgtgtgaccaccatggctaagaacaagcccacgctggatatagagcttcagaagaccgaggccacc

SEQ ID NO: 123639 - DNA, 80 bp, synthetic construct
  source 1..80: mol_type = other DNA
gacaacattacagcccccataggaggtataacaaaattaataggagagaaaaacacataaacacctgaaaaaccctcctg

SEQ ID NO: 123640 - DNA, 80 bp, synthetic construct
  source 1..80: mol_type = other DNA
tacatagtgctttccttcctgttgctggccgatagccgtatttgtgcatgcctgtggatcatgtttttggtcgtccaggc

SEQ ID NO: 123641 - DNA, 80 bp, synthetic construct
  source 1..80: mol_type = other DNA
gtcgccctgactatcctgacactgtccccacgatacaagcactggctggcaatgacaatgtggtggttgcaatacttcat

SEQ ID NO: 123642 - DNA, 80 bp, synthetic construct
  source 1..80: mol_type = other DNA
cagcactatccactggcctattgcacctccaccaaaacatcgtggacgtgcagtacctttacggactttctccggctctg

SEQ ID NO: 123643 - DNA, 80 bp, synthetic construct
  source 1..80: mol_type = other DNA
gcactatgtgcctgagagcgacgccgcagcgcgtgttactcagatcctctccagccttaccatcactcaactgctgaaga

SEQ ID NO: 123644 - DNA, 80 bp, synthetic construct
  source 1..80: mol_type = other DNA
gggagtctctactgagggcaatgctagagtgagacactgctcttccatggagacgggctgcttctgcctggtgaagggca

SEQ ID NO: 123645 - DNA, 80 bp, synthetic construct
  source 1..80: mol_type = other DNA
atatgggcacgacctgactacaaccccccgctactacaaccatggcaaaagcccgattacgaaccccctgtagtgcatgg

SEQ ID NO: 123646 - DNA, 80 bp, synthetic construct
  source 1..80: mol_type = other DNA
cccctgaagccagacaggctataaggtcgctcacagagcggctttatatcgggggtcccctgactaattcaaaagggcag

SEQ ID NO: 123647 - DNA, 80 bp, synthetic construct
  source 1..80: mol_type = other DNA
ggcgggatggggtttagcggcggggggcggcgcgccggacgggactcttgagataaaggcccccgggtaacgggggaccg

SEQ ID NO: 123648 - DNA, 80 bp, synthetic construct
  source 1..80: mol_type = other DNA
agacgttgttttaacatctggtattacataattttccttagcgtgtgtaaatatctcagggttgtttattaagtttaaat

SEQ ID NO: 123649 - DNA, 80 bp, synthetic construct
  source 1..80: mol_type = other DNA
agtatttcattgcactcactgaggcccaacttcatcagtgggtaccatccctgctggttaggggcggacgtgacgccgtc

SEQ ID NO: 123650 - DNA, 80 bp, synthetic construct
  source 1..80: mol_type = other DNA
caaaaacaactgcgcgtttatcaaccgcacctccagggccctggtcgacctgctgttttacgacgataccgtctccggag

SEQ ID NO: 123651 - DNA, 80 bp, synthetic construct
  source 1..80: mol_type = other DNA
ggcgaggagttcgagaagctgtacgagcacctcgaggccatggggttcggcgaaacgatccccatccaggacctggcgta

SEQ ID NO: 123652 - DNA, 80 bp, synthetic construct
  source 1..80: mol_type = other DNA
attaccccgctctatgcctggagatttgggcgtgcccccgcgagactgctagccgagtagtgttgggtcgcgaaaggcct

SEQ ID NO: 123653 - DNA, 80 bp, synthetic construct
  source 1..80: mol_type = other DNA
tgaaggagatagctgcgtaaccattatgtctaaggataaacccacaattgatgttaagatgatgaacatggaagctacca

SEQ ID NO: 123654 - DNA, 80 bp, synthetic construct
  source 1..80: mol_type = other DNA
atcccgctgtcgccacactgatgtcctttactgcagcagtgacctcccctttgagcactcaacaaacccttctctttaat

SEQ ID NO: 123655 - DNA, 80 bp, synthetic construct
  source 1..80: mol_type = other DNA
ggtgctccggcggagcgtatgatgtcatcatatgtgatgagtgccattcccaggacgctacaaccatcctgggtatagga

SEQ ID NO: 123656 - DNA, 80 bp, synthetic construct
  source 1..80: mol_type = other DNA
cccggggggggaaaatagggcggaacccgcccagtcgtaaaggggatttccgcctcaatgtacggggggggcggcgctgc

SEQ ID NO: 123657 - DNA, 80 bp, synthetic construct
  source 1..80: mol_type = other DNA
tctgaaacctggggcggcctggacagtctatgtgggaatcgtgacgatgttgtctcccatgttacaccattggataaaag

SEQ ID NO: 123658 - DNA, 80 bp, synthetic construct
  source 1..80: mol_type = other DNA
tctaggaaagaccaaagaggcagtggacaggtgggaacttatggtctgaatacatttaccaacatggaagcccagttagt

SEQ ID NO: 123659 - DNA, 80 bp, synthetic construct
  source 1..80: mol_type = other DNA
ggggggcggacaccgcggcctgtggagacatcattaacgggctgcctgtctccgctcggaggtggagagaggtgctgctg

SEQ ID NO: 123660 - DNA, 80 bp, synthetic construct
  source 1..80: mol_type = other DNA
agctgctggcctcaaagatctggccgtcgccttggaacctgtggtgttctcccccatggaaaagaaggtgatcgtttggg

SEQ ID NO: 123661 - DNA, 80 bp, synthetic construct
  source 1..80: mol_type = other DNA
ccttaccggacatggcaatactggggcagttatcgcactccggccaccggatcagcggcatccctgatcaatggagtggt

SEQ ID NO: 123662 - DNA, 80 bp, synthetic construct
  source 1..80: mol_type = other DNA
ctgctgacaacctgaaatgcccctgccaagtgccctctccagaattcttcaccgaggtcgatggcgtacgattacaccgg

SEQ ID NO: 123663 - DNA, 80 bp, synthetic construct
  source 1..80: mol_type = other DNA
tctgaacacttttgccaaagtggctcttcgcccggacactatttataccattaagaagactgttaatatacgtaaatgtg

SEQ ID NO: 123664 - DNA, 80 bp, synthetic construct
  source 1..80: mol_type = other DNA
ggctctaagacgttggccggcccgaaagggccggtctgccaaatgtacaccaatgtggagcaggatctggtaggttggcc

SEQ ID NO: 123665 - DNA, 80 bp, synthetic construct
  source 1..80: mol_type = other DNA
ccaggggcgatttaggggcgccgggggggaggcgcccaagcgtccggcctcagcccgggaggacgaagagaggacagggg

SEQ ID NO: 123666 - DNA, 80 bp, synthetic construct
  source 1..80: mol_type = other DNA
tctccattgagactaccaccttaccccaggactcagtgtcccggagccagcggcgaggccggactggcaggggaaggttg

SEQ ID NO: 123667 - DNA, 80 bp, synthetic construct
  source 1..80: mol_type = other DNA
acggcaagttcctcgctgacggaggctgctcagccggagcttatgacatcataatttgtgatgaatgccactccatcgat

SEQ ID NO: 123668 - DNA, 80 bp, synthetic construct
  source 1..80: mol_type = other DNA
cagggcgcccactagggtgccctggtcgaacagcatgttccccacggaggtcatccagaggctgttccactccgacgcgg

SEQ ID NO: 123669 - DNA, 80 bp, synthetic construct
  source 1..80: mol_type = other DNA
aaatggggctagcggcgggtgcggctcaagactattctactaaaatgaattggttaagcgccggcccacatatgatttcc

SEQ ID NO: 123670 - DNA, 80 bp, synthetic construct
  source 1..80: mol_type = other DNA
ggatcgagtcggaaaccaaggtggtaacattggactctttcgagccaattgtggctgaatcagatgacagggaggtctcc

SEQ ID NO: 123671 - DNA, 80 bp, synthetic construct
  source 1..80: mol_type = other DNA
cgtatgatcgacaacgttagatatacacgtaaacttttaatggaccacacggaagatatatttcaaggcctggggtatgt

SEQ ID NO: 123672 - DNA, 80 bp, synthetic construct
  source 1..80: mol_type = other DNA
ggggcagtgttgacacataatgggaaaagactggaaccaaattgggctagcgtgaaaaaagatctgatttcatacggagg

SEQ ID NO: 123673 - DNA, 80 bp, synthetic construct
  source 1..80: mol_type = other DNA
ggaggtacagtacgcagggacagatggaccttgcaaggttccagctcagatggcggtggacatgcaaactctgaccccag

SEQ ID NO: 123674 - DNA, 80 bp, synthetic construct
  source 1..80: mol_type = other DNA
gtccgggggtcgttcactatcgggatggtgctgaacgacccgctggcggtcacgcccactatcaggtacgccaccggagt

SEQ ID NO: 123675 - DNA, 80 bp, synthetic construct
  source 1..80: mol_type = other DNA
gccgcgcccagcacggcgttcagcccgctggtggcgagcaggcggcgcgccgcggtgtcgcccagcgcctcgtgctcggc

SEQ ID NO: 123676 - DNA, 80 bp, synthetic construct
  source 1..80: mol_type = other DNA
aatgaacaacaaaaaatatatctatataatctaacacaatcaccacagtcagtacaaccactgagacaactacccacact

SEQ ID NO: 123677 - DNA, 80 bp, synthetic construct
  source 1..80: mol_type = other DNA
gatggggaaatggatgcggattatttggaaagggaggtatcgtgacctgtgcaatgttcacatgcaaaaagaacatggaa

SEQ ID NO: 123678 - DNA, 80 bp, synthetic construct
  source 1..80: mol_type = other DNA
gatgatgctggaactggatccaccatttggggactcttacattgtcataggagtcggggaaaagaagatcacccaccact

SEQ ID NO: 123679 - DNA, 80 bp, synthetic construct
  source 1..80: mol_type = other DNA
atcccggataatctgacgttccggatatagggggcggggggtagtgggagagtgtgtcgacaaactgccgcttcttaaaa

SEQ ID NO: 123680 - DNA, 80 bp, synthetic construct
  source 1..80: mol_type = other DNA
caagatccttcctcagatcataagggaagccattaacaagagattgcggacagctgtactggcccccacacgggtggtgg

SEQ ID NO: 123681 - DNA, 80 bp, synthetic construct
  source 1..80: mol_type = other DNA
acggtgttgagtgacttcaagacctggctccagtccaagctcctgccgcggttgccgggggtccctttcctctcctgcca

SEQ ID NO: 123682 - DNA, 80 bp, synthetic construct
  source 1..80: mol_type = other DNA
gctggcctgtggacattggcgtatgcatttaaagcctaccagatttttccacgcaaaccaaccgccaatgccgcattcat

SEQ ID NO: 123683 - DNA, 80 bp, synthetic construct
  source 1..80: mol_type = other DNA
ttggtcagcagctggcgtccgacgtccagcagtacctggagcgcctcgagaaacagaggcaacttaaggtgggcgcggac

SEQ ID NO: 123684 - DNA, 80 bp, synthetic construct
  source 1..80: mol_type = other DNA
gctcaaaacctccttccgggcctccagcctcacggagaccacgggcccccccaaaaaacgggccaaggtggacgtggcca

SEQ ID NO: 123685 - DNA, 80 bp, synthetic construct
  source 1..80: mol_type = other DNA
gacgccatcatcctgctcacgtgtgctttccacccgagtctggggtttgaggtaacaaagatcttgctagcattaatagg

SEQ ID NO: 123686 - DNA, 80 bp, synthetic construct
  source 1..80: mol_type = other DNA
tgtcatcctacacccacgccttgtgtttgagatcacgaaatggttgttagcggttctggggtctgcctacttcctcaaag

SEQ ID NO: 123687 - DNA, 80 bp, synthetic construct
  source 1..80: mol_type = other DNA
caggtgactatcttggacttgctgaagctcacagtggcggttggactgcactttcatgagatgaataatggaggggatgc

SEQ ID NO: 123688 - DNA, 80 bp, synthetic construct
  source 1..80: mol_type = other DNA
ggcttcccatccgcgatccaaccactcgaccagcgaccgcggctttgcggtaccaggggtaagggttagaacgtcgttca

SEQ ID NO: 123689 - DNA, 80 bp, synthetic construct
  source 1..80: mol_type = other DNA
tggctcactgagcacggatgtaacagactgaagaggatggcggtgagtggagacgactgtgtggtccggcccatcgatga

SEQ ID NO: 123690 - DNA, 80 bp, synthetic construct
  source 1..80: mol_type = other DNA
tatgtacataggtgacttgtgtggtggtgtcttcctagtcgggcagcttttcacattccagcctcgggtgcatcacacag

SEQ ID NO: 123691 - DNA, 80 bp, synthetic construct
  source 1..80: mol_type = other DNA
tacattcaacgttaaccaacacggttgcactggaccctagatgtagttacagcgaggttgatccttggcatgcggttcta

SEQ ID NO: 123692 - DNA, 80 bp, synthetic construct
  source 1..80: mol_type = other DNA
cagattttactgattggagtcagcgcggcggcattgttagtcaacccgtgtgttacaactgttcgggaagccggcatcct

SEQ ID NO: 123693 - DNA, 80 bp, synthetic construct
  source 1..80: mol_type = other DNA
acatgggaattttacacgaaaaccgcctggggcaaaacgttctccattgcactttgcaaggtgaggcccgccgcgactac

SEQ ID NO: 123694 - DNA, 80 bp, synthetic construct
  source 1..80: mol_type = other DNA
tgatccaaccggaaaatgttaagtatgaagtgggaatcttcatacatggttctaccagctctgacactcacggcaactat

SEQ ID NO: 123695 - DNA, 80 bp, synthetic construct
  source 1..80: mol_type = other DNA
caatgccatcatgccagaatatgcgctgcatccgtctatcctgcccacccccggctaccggggagtgacgtatcgcccgt

SEQ ID NO: 123696 - DNA, 80 bp, synthetic construct
  source 1..80: mol_type = other DNA
gtacatcgccacgtccatgcaagccgaccttgagatcatgacaagcacgtgggtccttgcggggggggtcttggccgctg

SEQ ID NO: 123697 - DNA, 80 bp, synthetic construct
  source 1..80: mol_type = other DNA
cttatgcacggtgagagcaatggacgtggggttcatgtgtgatgacaccatcacatatgaatgcccggccctggctgcag

SEQ ID NO: 123698 - DNA, 80 bp, synthetic construct
  source 1..80: mol_type = other DNA
ccatccaagttctaatgcaagttgtaaggcatgtttgacaagattgtcatccccagacagtttcatcaccagcataaatg

SEQ ID NO: 123699 - DNA, 80 bp, synthetic construct
  source 1..80: mol_type = other DNA
aggggtgagaccgtccaggtgcacgcatttccaccagggagaccccaagagacacaccaatgtcagccgggagaactcat

SEQ ID NO: 123700 - DNA, 80 bp, synthetic construct
  source 1..80: mol_type = other DNA
gctaaggtcttgattgtgatgctactctttgccgtcgttgacggaaaaacccacgtgacgggggggcaggcggcccagag

SEQ ID NO: 123701 - DNA, 80 bp, synthetic construct
  source 1..80: mol_type = other DNA
tatatctcaggctgaggcggctctagagaacttgatcgtcctcaatgccgcctctgccgccagctgtaatgggtggctgt

SEQ ID NO: 123702 - DNA, 80 bp, synthetic construct
  source 1..80: mol_type = other DNA
agccaagggaagccgagcaatctggtacatgtggctgggagcgcggtttctggaatttgaagccctgggctttctgaatg

SEQ ID NO: 123703 - DNA, 80 bp, synthetic construct
  source 1..80: mol_type = other DNA
aaaggacgcagaccacctttggttacggacccctttctccgccccttccgaacaaaaagcagcgggcgcgaggccggggt

SEQ ID NO: 123704 - DNA, 80 bp, synthetic construct
  source 1..80: mol_type = other DNA
cgctcgccatagcatacagtcccccgttccccgcgggcgacgagggactgtattcggagttggcgtggcgcgatcgcgta

SEQ ID NO: 123705 - DNA, 80 bp, synthetic construct
  source 1..80: mol_type = other DNA
gatggcgctactcacatatccggtgacgaagcagggtatgccgccaaggggctcgctactcttttcaccctaggctccaa

SEQ ID NO: 123706 - DNA, 80 bp, synthetic construct
  source 1..80: mol_type = other DNA
ggaccccgggccaccgtcccccccgccaccccaacgatcccaggggccgccggccgatgaggtcgcaccggccgtggtag

SEQ ID NO: 123707 - DNA, 80 bp, synthetic construct
  source 1..80: mol_type = other DNA
cgtggtaaaagggtgcccgactggggtataatggtcccgtctggacctggggcgtagttaccctcgcagatttgcatctc

SEQ ID NO: 123708 - DNA, 80 bp, synthetic construct
  source 1..80: mol_type = other DNA
agcttgggagactgcccgacacactccagtaaactcatggttggggaacatcataatgtatgctcctgcgatttgggtcc

SEQ ID NO: 123709 - DNA, 80 bp, synthetic construct
  source 1..80: mol_type = other DNA
tcaaagatgtttggatgacctgaaactttctggggatggactttggtgggtttatgaaaatacatattggcagtatctca

SEQ ID NO: 123710 - DNA, 80 bp, synthetic construct
  source 1..80: mol_type = other DNA
acgctcaggtggggtttgtccgctcaatggtggttgcggacaatggtgagctgctcagtgagggaggagtccccgggata

SEQ ID NO: 123711 - DNA, 80 bp, synthetic construct
  source 1..80: mol_type = other DNA
acttggggcaaaaaccttgtgttctccccaggaagaaagaatggaagcttcatcatagatgggaagtccaggaaagagtg

SEQ ID NO: 123712 - DNA, 80 bp, synthetic construct
  source 1..80: mol_type = other DNA
gcgctcgcggttaaagaaaaagagggcaaagaaggtgttcggtggcaaccgcagcgccttggggcgcgtcagatacagaa

SEQ ID NO: 123713 - DNA, 80 bp, synthetic construct
  source 1..80: mol_type = other DNA
gatatctgggattgggtttgcgtcgtcctgagcgacttcaaggagtggctcaaaggcaagctgacgcctgccctcccggg

SEQ ID NO: 123714 - DNA, 80 bp, synthetic construct
  source 1..80: mol_type = other DNA
ggagatgaaggcgaaggcgtccacagttaaggccaaacttctatctgtagaagaagcctgcaagctgacgcccccacatt

SEQ ID NO: 123715 - DNA, 80 bp, synthetic construct
  source 1..80: mol_type = other DNA
ctgagcaactctcttttgcgtcaccacaacctggtgtacgccacgacctcccgctctgccactgcccggcagaagaaggt

SEQ ID NO: 123716 - DNA, 80 bp, synthetic construct
  source 1..80: mol_type = other DNA
tcaatgagtttcctactggcgggaggcctggtcctaaccatgacgcttggagtggtggctgacgttggatgtgctgtaga

SEQ ID NO: 123717 - DNA, 80 bp, synthetic construct
  source 1..80: mol_type = other DNA
cgaacaggacatatatttgtcttgccagctcgatccagaagcccaaaaagccatcaaatccctcacagagagactctaca

SEQ ID NO: 123718 - DNA, 80 bp, synthetic construct
  source 1..80: mol_type = other DNA
ggtcatagaatggcgtgggacatgatgatgaattggtcgcctaccgtaggatatgtcatctctagcgtcctgcgagtccc

SEQ ID NO: 123719 - DNA, 80 bp, synthetic construct
  source 1..80: mol_type = other DNA
cagtacttcctcaccaggacagaagcaatcctacaagtgtgggtgcctcccctcaaccctcgggggtggcgtgatggcgt

SEQ ID NO: 123720 - DNA, 80 bp, synthetic construct
  source 1..80: mol_type = other DNA
cttccatgcccccccttgaggtggagcctggagacccagacctggagcctgagcaggtagagcaccccgcccccccacaa

SEQ ID NO: 123721 - DNA, 80 bp, synthetic construct
  source 1..80: mol_type = other DNA
ggccatgccggtgtccactgacctacaatattttagaactgcatgcaatcctagaggtcgagcatctggaatgttatata

SEQ ID NO: 123722 - DNA, 80 bp, synthetic construct
  source 1..80: mol_type = other DNA
catcgtctatgaggccgaacaggtcatcctgcacctccccgggtgcgtgccgtgcgtcaggacggagaatcagtcccggt

SEQ ID NO: 123723 - DNA, 80 bp, synthetic construct
  source 1..80: mol_type = other DNA
catggcatatgttttcaggggtcgatgccaccacacacgttaccggtggcactgcaggtctcactgccttcaggctcacc

SEQ ID NO: 123724 - DNA, 80 bp, synthetic construct
  source 1..80: mol_type = other DNA
ttcgcgcacccgccgctgtgtagggcgccaggatttgggacttaccaacagaacgtctggacggaccccggttctgccgt

SEQ ID NO: 123725 - DNA, 80 bp, synthetic construct
  source 1..80: mol_type = other DNA
ccgcaacacggcccgggctgcgcacgccagccgggacgggtgagttcgctaggcaagcacggactggcggttacacgtgc

SEQ ID NO: 123726 - DNA, 80 bp, synthetic construct
  source 1..80: mol_type = other DNA
aaagcgaaaaataccggtcccgcccagggcggaatatttaccgagggccaacagactttgaccgattacgtggggtttcg

SEQ ID NO: 123727 - DNA, 80 bp, synthetic construct
  source 1..80: mol_type = other DNA
ggttggccaaagcggtcgagtggctgaggaagaatggacctgaacgattgagcagaatggcagtgagtggggacgactgt

SEQ ID NO: 123728 - DNA, 80 bp, synthetic construct
  source 1..80: mol_type = other DNA
gcttatgcaagtcaaggatataaggtccttgtacttaatccatctgtggctgctaccctatcctttggcgcttatttaag

SEQ ID NO: 123729 - DNA, 80 bp, synthetic construct
  source 1..80: mol_type = other DNA
agtccgatggagaagaaggtcatcgtctggggagcggagacggctgcatgtggggacattctacatggacttcccgtgtc

SEQ ID NO: 123730 - DNA, 80 bp, synthetic construct
  source 1..80: mol_type = other DNA
cacgggactgatcttgaagtaccccgccatgagcgcgtaggtcagcgcgttctccccggccgcgctctcgcggacgtgct

SEQ ID NO: 123731 - DNA, 80 bp, synthetic construct
  source 1..80: mol_type = other DNA
actgttctggatcttcatcccggtgccggtaaaacaaggaggattctgccacagatcatcaaagaggccataaatagaag

SEQ ID NO: 123732 - DNA, 80 bp, synthetic construct
  source 1..80: mol_type = other DNA
ataggaggacagacccacctagccatcatggcagtgttcaagatgtcaccaggatacgtgctgggtgtgtttttaaggaa

SEQ ID NO: 123733 - DNA, 80 bp, synthetic construct
  source 1..80: mol_type = other DNA
atgaaacgtagctatgacgaggtgtacggcgacgacgacatcctggaccaggcggcggagcgggcgggcgagttcgccta

SEQ ID NO: 123734 - DNA, 80 bp, synthetic construct
  source 1..80: mol_type = other DNA
ggcatataaacaggactgctctgaactgcaatgattccctccagacggggttcataacgtcactcttttatgccaagaac

SEQ ID NO: 123735 - DNA, 80 bp, synthetic construct
  source 1..80: mol_type = other DNA
ctccaacgatagcatcacttggcagctcgagagtgccgtactgcacgttgctgggtgcgtcccttgcgagcgtgtcggta

SEQ ID NO: 123736 - DNA, 80 bp, synthetic construct
  source 1..80: mol_type = other DNA
ttccagatgaaacgagccagatttgaagatgacttcaaccccgtctacccttacgaacactacaatccccttgacattcc

SEQ ID NO: 123737 - DNA, 80 bp, synthetic construct
  source 1..80: mol_type = other DNA
ccggaggccacataccagcggtgtggatcgggaccctggttaacacctaggtgtctggtggactatccttacaggctgtg

SEQ ID NO: 123738 - DNA, 80 bp, synthetic construct
  source 1..80: mol_type = other DNA
tatttagtcccatggaaattaaggtcatcacctggggcgcggacacagcggcttgcggagatattctttgcgggctgccg

SEQ ID NO: 123739 - DNA, 80 bp, synthetic construct
  source 1..80: mol_type = other DNA
ttttattaatcttggctactgtttttactttgccttcttatctgatccgcctatgccaccgtgccagaaaaaacccttaa

SEQ ID NO: 123740 - DNA, 80 bp, synthetic construct
  source 1..80: mol_type = other DNA
cagtgaagtgggagtacgtcgttctcatgttcctggtcctggctgacgcgcgcatctgtgcatgtctatggctgatgctg

SEQ ID NO: 123741 - DNA, 80 bp, synthetic construct
  source 1..80: mol_type = other DNA
tgcctgtcaactgggttcccacagggcgtaccacctggtcgatccacgcaaaaggagaatggatgacaaccgaagacatg

SEQ ID NO: 123742 - DNA, 80 bp, synthetic construct
  source 1..80: mol_type = other DNA
ggggcgcaccgcctggtttgtcccttcgattgcaaagggtggtgctatagctcgcaccttgagacagaaggcgaaaagtg

SEQ ID NO: 123743 - DNA, 80 bp, synthetic construct
  source 1..80: mol_type = other DNA
tgcgcttgctgtcaccagttagggttccaaattacaacttgataataatggatgaggcccatttcacagacccagccagt

SEQ ID NO: 123744 - DNA, 80 bp, synthetic construct
  source 1..80: mol_type = other DNA
tccgagccggatcccgacactgtggatgatcgatctgacgacgggtcgtactcatcgatgcctccacttgaaggggaacc

SEQ ID NO: 123745 - DNA, 80 bp, synthetic construct
  source 1..80: mol_type = other DNA
cctgaaaaaccctcctgcctaggcaaaatagcaccctcccgctccagaacaacatacagcgcttccacagcggcagccat

SEQ ID NO: 123746 - DNA, 80 bp, synthetic construct
  source 1..80: mol_type = other DNA
aaactcactccaatccctgcagcgtcccagctggacttgtccggctggttcgttgctggttacagcgggggagacatata

SEQ ID NO: 123747 - DNA, 80 bp, synthetic construct
  source 1..80: mol_type = other DNA
aagaacgaagtgttctgcgtcgcccccgaaaaggggggcaagaagccggctcgcctcatcgtataccctgatctgggtgt

SEQ ID NO: 123748 - DNA, 80 bp, synthetic construct
  source 1..80: mol_type = other DNA
gggcggcggccccctcgtctcccatcagcagtttcctaaactgggacatgatgtccaccacgcggacccgcaggcccaac

SEQ ID NO: 123749 - DNA, 80 bp, synthetic construct
  source 1..80: mol_type = other DNA
ggactccatcatcctcctcatttgtatactgcacccatcactcagcttcgaggtcactaaatacctgcttgcaattatag

SEQ ID NO: 123750 - DNA, 80 bp, synthetic construct
  source 1..80: mol_type = other DNA
tgcgatggaagtactgtgcatcacaaagagcttaaacataaatgtaataagcaaaatattacattaatcaaagtcaatca

SEQ ID NO: 123751 - DNA, 80 bp, synthetic construct
  source 1..80: mol_type = other DNA
cttggtttcggatgggaggcaactgtgctatccccatcacggtcatggagtacaccgaatgctcctacaacaagtctctg

SEQ ID NO: 123752 - DNA, 80 bp, synthetic construct
  source 1..80: mol_type = other DNA
tctgcaccttcattaaaggccacttgcactacaggtgccaatcaccctgacgtcgagctgatcgacgcgaatcttctttg

SEQ ID NO: 123753 - DNA, 80 bp, synthetic construct
  source 1..80: mol_type = other DNA
tgtgacccaaccccaggaggactgggatatcaaagccatggagcgatccacgtaagccctcaataccgtttcggaacgag

SEQ ID NO: 123754 - DNA, 80 bp, synthetic construct
  source 1..80: mol_type = other DNA
gccagctgtctgctccatctttgaaggccacgtgcaccacaagcggcccacacccagacgccgagctcatcgaggccaac

SEQ ID NO: 123755 - DNA, 80 bp, synthetic construct
  source 1..80: mol_type = other DNA
agaggctagcaacctagcagttgtgaggaactactgttactcagccactatcacggaggtatcaacagtgtccaattgtc

SEQ ID NO: 123756 - DNA, 80 bp, synthetic construct
  source 1..80: mol_type = other DNA
gtacaccacagacactgacctcctgttgatgggctgtgatattgtgttggatattagcgcctgctacattcccacgatca

SEQ ID NO: 123757 - DNA, 80 bp, synthetic construct
  source 1..80: mol_type = other DNA
ttcatggaatatgttactatatgactagttatgatagaagtctagttcccttaaacatttccataatgctaaacagccat

SEQ ID NO: 123758 - DNA, 80 bp, synthetic construct
  source 1..80: mol_type = other DNA
gcctgggatcctgtctccgggagccctggtggtgagggtcatctgcgcggccattctgcgccgccacgtgggaccggtga

SEQ ID NO: 123759 - DNA, 80 bp, synthetic construct
  source 1..80: mol_type = other DNA
acatgttactgcagagacagctaggcgacgcctggcacgggggtccccgccctcattggcaagctcatcggccagtcagt

SEQ ID NO: 123760 - DNA, 80 bp, synthetic construct
  source 1..80: mol_type = other DNA
gagaatgaatggatggaagacaaaaccccagtagagaaatggagtgacgtcccatactcaggaaaacgggaggacatctg

SEQ ID NO: 123761 - DNA, 80 bp, synthetic construct
  source 1..80: mol_type = other DNA
acgaccttgtggccatctgcgagagccaagggacacacgaggacgaagcgagcctgagagcctttacggaggctatgacc

SEQ ID NO: 123762 - DNA, 80 bp, synthetic construct
  source 1..80: mol_type = other DNA
ttactccttttcctcctgccccaaagggctttagccctggactcaagcgatggcgggactgtgggttgtcttgtgttaac

SEQ ID NO: 123763 - DNA, 80 bp, synthetic construct
  source 1..80: mol_type = other DNA
gggtgcagacttgcaatggcagccaagtgcccgggctctagaggcggttggataccgcaacgcaatgcaggaggaggatg

SEQ ID NO: 123764 - DNA, 80 bp, synthetic construct
  source 1..80: mol_type = other DNA
agtgggaacagaaaaaggccaatgctggagaacaaaaggaaacacatacttatggtgtagctcctatgggtggagaaaac

SEQ ID NO: 123765 - DNA, 80 bp, synthetic construct
  source 1..80: mol_type = other DNA
ggatcatctccttatcaagcgggtcgaacctttagattcagatcagcccgaacaaaactccgaggacggccagcccgtgg

SEQ ID NO: 123766 - DNA, 80 bp, synthetic construct
  source 1..80: mol_type = other DNA
aggctcgcgaactgccgcctcagctcggccgccctgtcgtccaggtcagacccgcgcgcctccgcgtgaaggcgcgtccc

SEQ ID NO: 123767 - DNA, 80 bp, synthetic construct
  source 1..80: mol_type = other DNA
tgcctagtcgattacccatacagactgtggcactacccatgcaccataaattacaccatctttaagatcaggatgtacgt

SEQ ID NO: 123768 - DNA, 80 bp, synthetic construct
  source 1..80: mol_type = other DNA
gctggcagccggacctgcgggggcgccccaccgcacgcacctgtacgtacgccgcctttgcagagctcggcatgatgccc

SEQ ID NO: 123769 - DNA, 80 bp, synthetic construct
  source 1..80: mol_type = other DNA
tgcgtgccaaaggcagaagaaagtcacatttgacagactacaggtcctggataaccactaccaggacgtgcttaaggagg

SEQ ID NO: 123770 - DNA, 80 bp, synthetic construct
  source 1..80: mol_type = other DNA
agccgacctccccgaagttagaagatccaagctgcgaagacggcggtactgagtctccctgttgttattagcccaacatg

SEQ ID NO: 123771 - DNA, 80 bp, synthetic construct
  source 1..80: mol_type = other DNA
gacatcatttttggcggccattggggcatcttgggcgctctactgtactacagtatggctgccaattgggccaaagtcat

SEQ ID NO: 123772 - DNA, 80 bp, synthetic construct
  source 1..80: mol_type = other DNA
atattggagaatcggcctcaagcgcggaagtggaggagcacagaaccgtgcgcgtccttgagatggtggaagattggctg

SEQ ID NO: 123773 - DNA, 80 bp, synthetic construct
  source 1..80: mol_type = other DNA
ggtcgatgccactacctacacaactggaagtgtggctggccgaaatgttggagccctcgctggcctcttttctcctgggt

SEQ ID NO: 123774 - DNA, 80 bp, synthetic construct
  source 1..80: mol_type = other DNA
tggaggaggcccttagagggcttccagtgcgttatatgacaacagcagtcaatgtcacccactctggaacagaaatcgtc

SEQ ID NO: 123775 - DNA, 80 bp, synthetic construct
  source 1..80: mol_type = other DNA
acattatgacttgcatgtccgctgacctggaggtcatcaccagcacttgggtaattgcaggggggatcctcgccgcgttg

SEQ ID NO: 123776 - DNA, 80 bp, synthetic construct
  source 1..80: mol_type = other DNA
aagtaggcccgcccatccgcggcccctcccggcagccacgcccccagcgtcgggtgtcacggggaaagagcagagtggag

SEQ ID NO: 123777 - DNA, 80 bp, synthetic construct
  source 1..80: mol_type = other DNA
gggggatatggagaggcgacggagtcagccacactacgtgcccatgcggcgcggaaatagcgggccacgtaaagaacgtg

SEQ ID NO: 123778 - DNA, 80 bp, synthetic construct
  source 1..80: mol_type = other DNA
agaacatgaaaagcttattattcgccacaaagacaaaattggcaagtatgctgtatatgctatttggcagccaggtgaca

SEQ ID NO: 123779 - DNA, 80 bp, synthetic construct
  source 1..80: mol_type = other DNA
aaccaataccggaaccataggcgccgtatctctggacttttcccctggaacgtcaggatctccaattgtcgacagaaaag

SEQ ID NO: 123780 - DNA, 80 bp, synthetic construct
  source 1..80: mol_type = other DNA
gttttgcggggcatgcaagtcgacacaccgcgcgcgtgcctacctttccctagcggccccggcccccggcccgtttcctt

SEQ ID NO: 123781 - DNA, 80 bp, synthetic construct
  source 1..80: mol_type = other DNA
acctaggggtccgggtttgcgagaagagagcgctttatgaccccgtccgacaactctccacggccattatgggtcgttcc

SEQ ID NO: 123782 - DNA, 80 bp, synthetic construct
  source 1..80: mol_type = other DNA
ccatccaatggataaaaatcccactatggacctgcttactggggtgcctaattgtatgctacaaagtcctcaggtagtgg

SEQ ID NO: 123783 - DNA, 80 bp, synthetic construct
  source 1..80: mol_type = other DNA
ggtcgagcgcacagaacggctctggaggagcttcccgacgcgctccagactgtaacactgattgctttgctaggcgtgat

SEQ ID NO: 123784 - DNA, 80 bp, synthetic construct
  source 1..80: mol_type = other DNA
gcgtggaaactgtttggctccgcggaggccccgcgggcgtttatcggggccgcgttgggcctgagccccctccaaaagct

SEQ ID NO: 123785 - DNA, 80 bp, synthetic construct
  source 1..80: mol_type = other DNA
ggcctggtccgggaggatcgatgccttggcgggtccggaggccccgccacgcccggcgggcgctccgcggccgtcctcca

SEQ ID NO: 123786 - DNA, 80 bp, synthetic construct
  source 1..80: mol_type = other DNA
tgtgcgccagagccaaagctccccccccttcgtgggacacaatgtggaagtgtcttatcagacttaaacctactttgact

SEQ ID NO: 123787 - DNA, 80 bp, synthetic construct
  source 1..80: mol_type = other DNA
cggatgcgaccacccacatcgcagcaggtaaggccgcccgcgatacctacggctttaccagcttgttctcaacgggtgcc

SEQ ID NO: 123788 - DNA, 80 bp, synthetic construct
  source 1..80: mol_type = other DNA
ttccaaaactttccccctggtgtgctgtcactcaaattggctgacccaatcactatcagtaatggcgatgtctcactcaa

SEQ ID NO: 123789 - DNA, 80 bp, synthetic construct
  source 1..80: mol_type = other DNA
ggcgccggcgctgtacaacagcagacagagatggacttggaagagggcgaagggctggcaagactggtggcaccgtcccc

SEQ ID NO: 123790 - DNA, 80 bp, synthetic construct
  source 1..80: mol_type = other DNA
actcagaaagggattatcttcattttgttaatgctggttacaccatccatggccatgcgatgcgtgggaataggcagcag

SEQ ID NO: 123791 - DNA, 80 bp, synthetic construct
  source 1..80: mol_type = other DNA
gatttccgtacccgcagaaattctgctgaagtcccggaaatttagcccggccctgcccatttgggcacggccggattaca

SEQ ID NO: 123792 - DNA, 80 bp, synthetic construct
  source 1..80: mol_type = other DNA
cctaggtccctgcgggggttcatgttatgaaggaccaccagcacggtgtagccggtgcacttggggaacttgtcatgcag

SEQ ID NO: 123793 - DNA, 80 bp, synthetic construct
  source 1..80: mol_type = other DNA
gtctgcacccggggagttgcaaaggcggtcgaattcgtgcccgtcgaggcactagaaaccacccagagatcgcctatttt

SEQ ID NO: 123794 - DNA, 80 bp, synthetic construct
  source 1..80: mol_type = other DNA
ttccttgacaccgtgcacctgcggcagctcggacctttacttgatcacgaggcatgctgacgtcattccggtgcgccggc

SEQ ID NO: 123795 - DNA, 80 bp, synthetic construct
  source 1..80: mol_type = other DNA
tgtggatctcatggtcggtgccgctgctctttgctcatctatgtacattggggatctgtgtggcggcgtatttctagtag

SEQ ID NO: 123796 - DNA, 80 bp, synthetic construct
  source 1..80: mol_type = other DNA
atgggagacagcccgacacactccagtcaactcctggttagggaatataatcatgtacgctcccacaatttgggtgcgta

SEQ ID NO: 123797 - DNA, 80 bp, synthetic construct
  source 1..80: mol_type = other DNA
acctggctcaagacaaaactcgttccggcactgccaggagtccctttcttctcgtgtcagcgaggattcagggggctctg

SEQ ID NO: 123798 - DNA, 80 bp, synthetic construct
  source 1..80: mol_type = other DNA
acaagtaacacctaatgtggctgtaaaacaccgcggcgcgctcacccacaacctgcgaacgcatgtcgatatgatcgtaa

SEQ ID NO: 123799 - DNA, 80 bp, synthetic construct
  source 1..80: mol_type = other DNA
tcgaggccctgcaccgatttcagctacaatggggagcggggcttgtgagagtccctttctcacggaattccacacatgaa

SEQ ID NO: 123800 - DNA, 80 bp, synthetic construct
  source 1..80: mol_type = other DNA
tgaggatcgttgggccgaagacatgcagtaacacctggcatggaaccttccccatcaatgcttacaccacaggccccggc

SEQ ID NO: 123801 - DNA, 80 bp, synthetic construct
  source 1..80: mol_type = other DNA
tccaataagatatcaaaccccagctatcagagctgagcatactggacgggagattgtggatctaatgtgtcatgccacat

SEQ ID NO: 123802 - DNA, 80 bp, synthetic construct
  source 1..80: mol_type = other DNA
accgcgatattaagaccgagaacatcctcatcaacacccccgagaacatctgtctgggggactttggtgcggcgtgcttt

SEQ ID NO: 123803 - DNA, 80 bp, synthetic construct
  source 1..80: mol_type = other DNA
cttcttgctcttggtccttgagatggggataccggagatgaaccttggacacctctgggaatgggctgatgcactggcca

SEQ ID NO: 123804 - DNA, 80 bp, synthetic construct
  source 1..80: mol_type = other DNA
gatggtttgaatcgggtaatacaacaaccaaagttttcgggcgattgtggtggtagctttcacgccttccgtgccttcgt

SEQ ID NO: 123805 - DNA, 80 bp, synthetic construct
  source 1..80: mol_type = other DNA
tgcgcacgggctaaggcccctcccccgtcttgggacaccatgtggaagtgcctcatacggctaaagcccatgctcacggg

SEQ ID NO: 123806 - DNA, 80 bp, synthetic construct
  source 1..80: mol_type = other DNA
attgcccgaggcgagccgcctagatttatccgggtggttcaccgtgggcgccggcgagggcgacatctttcacagcgtgt

SEQ ID NO: 123807 - DNA, 80 bp, synthetic construct
  source 1..80: mol_type = other DNA
acgagggtacaagggagtctggcggggggacggcatcatgcaaaccacctgcccatgtggagcacagatctctggacatg

SEQ ID NO: 123808 - DNA, 80 bp, synthetic construct
  source 1..80: mol_type = other DNA
gtgtggatctcgctgacgcaggtgcttgggctccggcgccgccttcacaaggacccagacgccgggccctgggcggccgc

SEQ ID NO: 123809 - DNA, 80 bp, synthetic construct
  source 1..80: mol_type = other DNA
acgatttggtcatagtagctgagagctgcggcgttgaggaggatagagcggccctgagagccttcacggaggctatgacc

SEQ ID NO: 123810 - DNA, 80 bp, synthetic construct
  source 1..80: mol_type = other DNA
gatggtgttgcttattccagagccggacagacagcgcactccacaagacaaccagctagcatacgtggtgataggtctgt

SEQ ID NO: 123811 - DNA, 80 bp, synthetic construct
  source 1..80: mol_type = other DNA
gggcgtggcgcggggacggcgtaatgcacactacgtgcccctgcggcgcagtgctggctggccacatcaaaaatggctcg

SEQ ID NO: 123812 - DNA, 80 bp, synthetic construct
  source 1..80: mol_type = other DNA
agaatatggagaagtgacagtggactgtgaaccacggtcagggattgacaccaatgcttactacgtgatgactgttggaa

SEQ ID NO: 123813 - DNA, 80 bp, synthetic construct
  source 1..80: mol_type = other DNA
catgctggatgtctggaacagggtatggatcctggacaatcccttcatgcatagcaaagaaaaggttgcggaatggaggg

SEQ ID NO: 123814 - DNA, 80 bp, synthetic construct
  source 1..80: mol_type = other DNA
aacctcgcagatgtgcgcagctactgttacctagcttcggtcagtgacttgtcaacgagagccgcgtgtccaaccatggg

SEQ ID NO: 123815 - DNA, 80 bp, synthetic construct
  source 1..80: mol_type = other DNA
ctgccattgtaatatgtgaccctttagatggctttatttttaccctctcttcccgtaaccgtttcagctctccttctttg

SEQ ID NO: 123816 - DNA, 80 bp, synthetic construct
  source 1..80: mol_type = other DNA
cttggtagctgtagctctaggctggatgcttggtagcaacaaggctcagaaagtaatatttacagtattgctgctattgg

SEQ ID NO: 123817 - DNA, 80 bp, synthetic construct
  source 1..80: mol_type = other DNA
tggagagcccaggactcgtaaccatggatcatcatgctcgtcatgatatcaatgttggcacaacacaggcacacgtgcat

SEQ ID NO: 123818 - DNA, 80 bp, synthetic construct
  source 1..80: mol_type = other DNA
taacgcagaagctgcccgtggccgtaatgggagcagcgtatggcttccaatactcgcccaaacaacgggtggagcagctc

SEQ ID NO: 123819 - DNA, 80 bp, synthetic construct
  source 1..80: mol_type = other DNA
cctcctatttaacatcttagggggatgggtcgcttcacaaatagcaacccccacggcctccacagctttcgttgtgagtg

SEQ ID NO: 123820 - DNA, 80 bp, synthetic construct
  source 1..80: mol_type = other DNA
cctggtcttgcgtgacgagagcctcctccgggccggggacgcgcccgggcgcgaagtatcgcacgctgggcttcgggatc

SEQ ID NO: 123821 - DNA, 80 bp, synthetic construct
  source 1..80: mol_type = other DNA
cgcaggggcccacgattgggtgtgcgcacgacgcgtaaaacttccgagcggtcacaacctcgcggacgacggcagcctat

SEQ ID NO: 123822 - DNA, 80 bp, synthetic construct
  source 1..80: mol_type = other DNA
cggggttagtgcaaagcttctgtctgtcgaagaggcgtgtgcgttgacccctccacattcggcccggtccaaatttggat

SEQ ID NO: 123823 - DNA, 80 bp, synthetic construct
  source 1..80: mol_type = other DNA
ctgggaacatagtgtcatcagtgaacatgatttcaaggatgttgatcaacagattcacaatgagacacaagaaagccact

SEQ ID NO: 123824 - DNA, 80 bp, synthetic construct
  source 1..80: mol_type = other DNA
acggtggttgtggatagaagggatcctagtgactacaggggaggcaaagtggggatcttaaagcggtcaggcaaggagat

SEQ ID NO: 123825 - DNA, 80 bp, synthetic construct
  source 1..80: mol_type = other DNA
cttgggcgcaagaaagaccgattcgggggcgaaagcgtccgctccgcagtgggcgcagacggtctcgcactcaacgagcc

SEQ ID NO: 123826 - DNA, 80 bp, synthetic construct
  source 1..80: mol_type = other DNA
aactggagcctttcggtcagatcgctgttcacatccttgagaccctcaatggttttgaataaattattcacataaccctc

SEQ ID NO: 123827 - DNA, 80 bp, synthetic construct
  source 1..80: mol_type = other DNA
tggtcagtgcatgccacaggtgaatggatgacaactgatgacatgttggaagtgtggaacaaagtgtggatccaagacaa

SEQ ID NO: 123828 - DNA, 80 bp, synthetic construct
  source 1..80: mol_type = other DNA
tgcctcaaaggctcttctggaggccctataatgtgtcccgcgggacatgttgcggggatctttagagcagctgtctgcac

SEQ ID NO: 123829 - DNA, 80 bp, synthetic construct
  source 1..80: mol_type = other DNA
tatggttatgctaaaggcagttctacgcttcccaactactttacaaccagctttaatgtttcaggtatcactaaaacatt

SEQ ID NO: 123830 - DNA, 80 bp, synthetic construct
  source 1..80: mol_type = other DNA
ttaacgtcgacaactttgcctcgttggaaataaccacagcagtaatcggagactatagcctagtaacattaaatacgtat

SEQ ID NO: 123831 - DNA, 80 bp, synthetic construct
  source 1..80: mol_type = other DNA
cctgcatgttgccgcgacggtgacgaccatcggccgcgagatgctgctcgcgacccgcgagtacgtccacgcgcgctggg

SEQ ID NO: 123832 - DNA, 80 bp, synthetic construct
  source 1..80: mol_type = other DNA
acccccctcctttacaggctgggggccgtacaaaatgaggtggtactcacacacccaatcacaaagtacatcatggcttg

SEQ ID NO: 123833 - DNA, 80 bp, synthetic construct
  source 1..80: mol_type = other DNA
gctgtcagctggggtggacgcgtccacgtactccactggggctcaagctggcagggctgcgtccggcttcgccggcctct

SEQ ID NO: 123834 - DNA, 80 bp, synthetic construct
  source 1..80: mol_type = other DNA
tttggaggggtctcatggatgattagaatcctaattgggttcttagtactgtggattggcacgaattcaagaaatacttc

SEQ ID NO: 123835 - DNA, 80 bp, synthetic construct
  source 1..80: mol_type = other DNA
aggtggtgtgggccggcactggcatcatgacaacgcggtgtccctgcggcgccagcatctcaggcaatgtccgtctgggc

SEQ ID NO: 123836 - DNA, 80 bp, synthetic construct
  source 1..80: mol_type = other DNA
tgtgctcttcccccccgtgttacagccccaacgcccccacccaggaggcgacgggcgttagtcctgagtcagagcaatgt

SEQ ID NO: 123837 - DNA, 80 bp, synthetic construct
  source 1..80: mol_type = other DNA
gctccaaagcctgtccacgtatgccgtgccgccggaaccgcagacccggcggtcgcggcgccgggtcgccgcgaccgcca

SEQ ID NO: 123838 - DNA, 80 bp, synthetic construct
  source 1..80: mol_type = other DNA
ctaaggcactcgagttcatacccgttgagaacatggaaacaaccatgcgatccccctctttcactgacaactcttcgcca

SEQ ID NO: 123839 - DNA, 80 bp, synthetic construct
  source 1..80: mol_type = other DNA
cacaaggaaatgaggaggaggttcgcgatacaacggccagccaagcgtagccgcagcacctggagcgagatcttccaaca

SEQ ID NO: 123840 - DNA, 80 bp, synthetic construct
  source 1..80: mol_type = other DNA
tacccgtataggttatggcattatccatgtactatcaactttaccatccataaggtacgcctctacgtgggcggagtcga

SEQ ID NO: 123841 - DNA, 80 bp, synthetic construct
  source 1..80: mol_type = other DNA
tacacatggggggagaacgatacagatgtgctgctccttaacaacaccaaaccacctgcgggaaactggttcggctgcac

SEQ ID NO: 123842 - DNA, 80 bp, synthetic construct
  source 1..80: mol_type = other DNA
gggcatacttgcccgggctatacagacccgcgagccgtacgtggttcgcgggtggtgcgtggtgtccgtggctcccggtg

SEQ ID NO: 123843 - DNA, 80 bp, synthetic construct
  source 1..80: mol_type = other DNA
ggcataaggagggtagttcaattggcaaagccttcagcacaaccttgaagggagcacagagattggcagctcttggagac

SEQ ID NO: 123844 - DNA, 80 bp, synthetic construct
  source 1..80: mol_type = other DNA
ttgcttctttccaccacacaatggcaggtcctcccctgctctttcacaactcttcccgctctgtccactggcttaatcca

SEQ ID NO: 123845 - DNA, 80 bp, synthetic construct
  source 1..80: mol_type = other DNA
tcaccgtctgagcgagtagatttcctggtaaaagcctggaagggcaagaagactccgatggggttttcgtatgacactcg

SEQ ID NO: 123846 - DNA, 80 bp, synthetic construct
  source 1..80: mol_type = other DNA
atcttgcacattaccacccctaagatacagaggtgaggatgggtgctggtacgggatggaaatcagaccattgaaagaga

SEQ ID NO: 123847 - DNA, 80 bp, synthetic construct
  source 1..80: mol_type = other DNA
atcccgacgaaagtacggtccagcaagtctgttgatgcccaattatgttgtacatccatctattattcctactcctggtt

SEQ ID NO: 123848 - DNA, 80 bp, synthetic construct
  source 1..80: mol_type = other DNA
cctgttgactacaagaacaacatagtgaagttgacatcagggcatctgaaatgccgagtgaaaatggaaaagctgaagct

SEQ ID NO: 123849 - DNA, 80 bp, synthetic construct
  source 1..80: mol_type = other DNA
acaccgctgtgctgtaagacccgtcggtaaatgaaaacgtaatagattcgccttttacatgatccacgtaatttgcccca

SEQ ID NO: 123850 - DNA, 80 bp, synthetic construct
  source 1..80: mol_type = other DNA
ccaaaacgtgcggtgcgccaccgtgccgcatcaggcgggatttcaatgccagcgaggacctgctgtgccccacagactgc

SEQ ID NO: 123851 - DNA, 80 bp, synthetic construct
  source 1..80: mol_type = other DNA
actctgggacagaaatcgtcgatttgatgtgccatgccaccttcacttcacgcctactacaacccatcagagtccccaac

SEQ ID NO: 123852 - DNA, 80 bp, synthetic construct
  source 1..80: mol_type = other DNA
gatgcgaatatacgaatcgtgtctgtatcacccgcagctcccagagtgtctgtccccggccgacgcgccgtgcgccgcga

SEQ ID NO: 123853 - DNA, 80 bp, synthetic construct
  source 1..80: mol_type = other DNA
cctgatttcatgagccaaagcatgctgcacaattttcgctcttttattttggagcgatctggcatgcttcctagcatgtg

SEQ ID NO: 123854 - DNA, 80 bp, synthetic construct
  source 1..80: mol_type = other DNA
attggtccacgccgtgctccagctcgtggttgcgcgacatttgggattgggtgtgtgaggtgctctctgatttcaagacc

SEQ ID NO: 123855 - DNA, 80 bp, synthetic construct
  source 1..80: mol_type = other DNA
ctcattataacacaatatgtgaatttctcattgacggctattgccactcaagccggtgtgttgctaggtctgaccaatgg

SEQ ID NO: 123856 - DNA, 80 bp, synthetic construct
  source 1..80: mol_type = other DNA
gtaggcctcgttctgttacctaacaggtagacagaacctctccctcaaacctccattttagggtctgttttttttttttt

SEQ ID NO: 123857 - DNA, 80 bp, synthetic construct
  source 1..80: mol_type = other DNA
ttccaatttatcccaaccatacaaacaagcagttggattcatgcctagtaagactgcttatcctaagcaaaccaaacccg

SEQ ID NO: 123858 - DNA, 80 bp, synthetic construct
  source 1..80: mol_type = other DNA
ctcggcgtccctacatacaactggggggacaacgagacagacgtgctcatccttaactcgaccaggcctccacaaggcgc

SEQ ID NO: 123859 - DNA, 80 bp, synthetic construct
  source 1..80: mol_type = other DNA
cggcgaccgcggcctgggacgacggagacgccgacggaggcgcggcgcccgcggacgccggggcgagcggcccgtggccg

SEQ ID NO: 123860 - DNA, 80 bp, synthetic construct
  source 1..80: mol_type = other DNA
cagggccgagcagaagttggccaacacggttcgatagctctcctcccgcgcccgtagctcggcgtggaagaaacgagaga

SEQ ID NO: 123861 - DNA, 80 bp, synthetic construct
  source 1..80: mol_type = other DNA
gcaccatgaaaataacaggcccgaagacctgcttgaacctatggcatgggaccttccccatcaattgttacacagaaggg

SEQ ID NO: 123862 - DNA, 80 bp, synthetic construct
  source 1..80: mol_type = other DNA
cggcagaacctgcagcttataaactccaatggaagctggcatatcaatagaaccgccttaaactgtaatgacagcttaca

SEQ ID NO: 123863 - DNA, 80 bp, synthetic construct
  source 1..80: mol_type = other DNA
ataccgaacaggccctggacaagatcctgcgaggcaccatgcgcgggggggcggccctgatcggctccccgcgccatcat

SEQ ID NO: 123864 - DNA, 80 bp, synthetic construct
  source 1..80: mol_type = other DNA
ccagagtacgacctggagcttataacatcatgctcctccaacgtgtcagtcgcctacgatggagcaaacaagaggactta

SEQ ID NO: 123865 - DNA, 80 bp, synthetic construct
  source 1..80: mol_type = other DNA
ctggaccctccgtcggaagaggagctggattgaatcagaaagaagtggccagtgtttgagaataacctgctgatcaagtg

SEQ ID NO: 123866 - DNA, 80 bp, synthetic construct
  source 1..80: mol_type = other DNA
ctcatgtctgtggcccagtctattgtttcaccccgagtccagtcgtggtaggaaccactgacaagcttgggtaccccacc

SEQ ID NO: 123867 - DNA, 80 bp, synthetic construct
  source 1..80: mol_type = other DNA
agagagatactactagagttcgaagagccccatgccacaaagcaatcagttgtggcgcttggttcccaggaaggtgcttt

SEQ ID NO: 123868 - DNA, 80 bp, synthetic construct
  source 1..80: mol_type = other DNA
gcgacgggccgaacactcgtgctggcttttgtaaaaacgtgcgcagtactggcagcggtgcacgggctgtacatcctgca

SEQ ID NO: 123869 - DNA, 80 bp, synthetic construct
  source 1..80: mol_type = other DNA
ccttttcaattgggcggtacgcacaaaaatcaaactcactccattgccagccgccggcaaactggacttgtccagttggt

SEQ ID NO: 123870 - DNA, 80 bp, synthetic construct
  source 1..80: mol_type = other DNA
agtttctgatcaagccgagacggctgggttcaagctgactgtgccatggccggctacgcctcgcggttcattcacaaccc

SEQ ID NO: 123871 - DNA, 80 bp, synthetic construct
  source 1..80: mol_type = other DNA
tctcagtgggaagcgggtccggttccattcaccagcggtcagcgatcagcaggttggaggggcgatagttgatgtgatgt

SEQ ID NO: 123872 - DNA, 80 bp, synthetic construct
  source 1..80: mol_type = other DNA
cgtccagtagtgtatggggaagttgggggctataaagttcttagtggtagacaaaaatatcccacatttattcggaaacg

SEQ ID NO: 123873 - DNA, 80 bp, synthetic construct
  source 1..80: mol_type = other DNA
atggtgctgcacagacggaacagctcccagacgggggcgacgtttagggtgtggtgtagggccacaagctccagctctcc

SEQ ID NO: 123874 - DNA, 80 bp, synthetic construct
  source 1..80: mol_type = other DNA
caccccaaaatgatttttgacatcaccaagttgctgctggccgtcttcggccccctttggattcttcaagccagtctgct

SEQ ID NO: 123875 - DNA, 80 bp, synthetic construct
  source 1..80: mol_type = other DNA
tccctggaaccttgcacctgcggggcagttgacctctaccttgtcactcgaaacgccgacgtcatcccggcccgaagacg

SEQ ID NO: 123876 - DNA, 80 bp, synthetic construct
  source 1..80: mol_type = other DNA
tccatgcgagcccgaacctgacgttcaagtggtctcgcaactcctaactgacccctcgcacatttctgcagaggccgccg

SEQ ID NO: 123877 - DNA, 80 bp, synthetic construct
  source 1..80: mol_type = other DNA
caagggcttccgtcgggcatcatgagcggccccgacaccggaggaattatcggggttctggatcgcggcagggaaaatga

SEQ ID NO: 123878 - DNA, 80 bp, synthetic construct
  source 1..80: mol_type = other DNA
tgagaagggaggaaaagcccaccgcatggcccttgaagagttgccggacgctcttgaaaccataacactcattgtggctt

SEQ ID NO: 123879 - DNA, 80 bp, synthetic construct
  source 1..80: mol_type = other DNA
ttcttgtccctccgcacccactatcttcatattgttgcagatgaaacgcgccagaccgtctgaagacaccttcaaccccg

SEQ ID NO: 123880 - DNA, 80 bp, synthetic construct
  source 1..80: mol_type = other DNA
tggaaaaactcccatacactttgatagggcgttttctgaagaactcggatctctggatgcaattgatagtattttggttg

SEQ ID NO: 123881 - DNA, 80 bp, synthetic construct
  source 1..80: mol_type = other DNA
cgaacatgagccgcgacaggaaccggtaggcgaactccaccgaggtctccccctgggtcttcacgaagctgtcgtcgcgc

SEQ ID NO: 123882 - DNA, 80 bp, synthetic construct
  source 1..80: mol_type = other DNA
ggcatgtcggcacgtattcggacagacttaagcacacacgggggagcgctcttgtctcagggcaatgtttttattggtca

SEQ ID NO: 123883 - DNA, 80 bp, synthetic construct
  source 1..80: mol_type = other DNA
tccctttgtactcgagcgatatttgaagttggaaatccatcccacccggagcacgtactacgcgtaccccgggatgcatc

SEQ ID NO: 123884 - DNA, 80 bp, synthetic construct
  source 1..80: mol_type = other DNA
agtgatgcgcccggctgctgatggaagaaccatcatggatgttatctccagagaagatcagagggggagtggacaagttg

SEQ ID NO: 123885 - DNA, 80 bp, synthetic construct
  source 1..80: mol_type = other DNA
accattactgtacttgggcgcatgtgtctcccgccaatttccttagtgtcaatgtggaatacgctgcaaccggaggaatt

SEQ ID NO: 123886 - DNA, 80 bp, synthetic construct
  source 1..80: mol_type = other DNA
ggtcatcgtatggcctgggacatgatgatgaactggtctccatccgtgaccttaattgtttccagcatcctgcggatccc

SEQ ID NO: 123887 - DNA, 80 bp, synthetic construct
  source 1..80: mol_type = other DNA
ggctcgggcctgggtgttgtgcagcagctggccgtcgttgcggttgaagtccgcggtcgccacgttacatgccgccgcgt

SEQ ID NO: 123888 - DNA, 80 bp, synthetic construct
  source 1..80: mol_type = other DNA
gtcatcgtgccgcagtctcgactccttccgcaaaggatggggcccgttggaccatgaacacaacgtcaccaatgacggag

SEQ ID NO: 123889 - DNA, 80 bp, synthetic construct
  source 1..80: mol_type = other DNA
aagtcaaacaaaagttaatgacaggcgaaaagcagcaactattgaggcaatgcttgttacagtaactgctggttctaact

SEQ ID NO: 123890 - DNA, 80 bp, synthetic construct
  source 1..80: mol_type = other DNA
ttcctattacttggtaattgtgggaatagtgatggtctgctcctgcactttctttgctattatgatctacccctgttttg

SEQ ID NO: 123891 - DNA, 80 bp, synthetic construct
  source 1..80: mol_type = other DNA
atcctctaagcaactccctcatccgtcaccataacttggtatattccacttcatctagaagcgcggcgacccggcagaag

SEQ ID NO: 123892 - DNA, 80 bp, synthetic construct
  source 1..80: mol_type = other DNA
ctgtgacacccttttgtgcgacattggagagtcgtcttcaagtccggaaatcgaggaacaccggaccctcaaggttttgg

SEQ ID NO: 123893 - DNA, 80 bp, synthetic construct
  source 1..80: mol_type = other DNA
ggcgggagacgcggccgccgcctacgtgcgcgcgcgcacgtatgccccggcggccctcacgcccgcccccgcgtactgcg

SEQ ID NO: 123894 - DNA, 80 bp, synthetic construct
  source 1..80: mol_type = other DNA
cagttgattgggtcccaaccagccgcaccacctggtcgatccatgcccaccatcaatggatgacaacagaagacatgttg

SEQ ID NO: 123895 - DNA, 80 bp, synthetic construct
  source 1..80: mol_type = other DNA
ctgcttcaggaaacatcccgatgccaactatgttaagtgtggagcaggcccttggcttacccctcggtgccttgtacact

SEQ ID NO: 123896 - DNA, 80 bp, synthetic construct
  source 1..80: mol_type = other DNA
agcacagcctcgaaggtccgaaacgtcccgtcgaacccaaacaccatctttcggaggcgcgcggtcaccgcgacctggct

SEQ ID NO: 123897 - DNA, 80 bp, synthetic construct
  source 1..80: mol_type = other DNA
ttttttccttacagtatggtgacggttcttcttatattcttatgcctgccaatcattttttcttcttcaacttttgcagc

SEQ ID NO: 123898 - DNA, 80 bp, synthetic construct
  source 1..80: mol_type = other DNA
aatctggcccaacagccgcttttgcgggtccagagggcaacgcgggactatgccggggtgtacgtgttacgcgtatgggt

SEQ ID NO: 123899 - DNA, 80 bp, synthetic construct
  source 1..80: mol_type = other DNA
tggggacgacctggtcgttatttcggagagtgtgggagtcgccgaggacgccgcaaacctgagagccttcactgaggcta

SEQ ID NO: 123900 - DNA, 80 bp, synthetic construct
  source 1..80: mol_type = other DNA
tctcagacaattcaactcctcctgctgtcccacaaagctatcaagtaggatatctccatgccccgactggcagtggtaag

SEQ ID NO: 123901 - DNA, 80 bp, synthetic construct
  source 1..80: mol_type = other DNA
ctatggctacatgctgcctggatggcaggctgaagctttgagggcggctcaacggagaacagcggccggaatcatgaaaa

SEQ ID NO: 123902 - DNA, 80 bp, synthetic construct
  source 1..80: mol_type = other DNA
caacaatccttggcataggcacggtcttagaccaggcagaaaccgctggagttcgcctcgtcgtactcgcgactgccacg

SEQ ID NO: 123903 - DNA, 80 bp, synthetic construct
  source 1..80: mol_type = other DNA
acagttgtcattgaactttcctactctgggagtgatggcccttgcaaaattccgattgtctccgttgcgagcctcaatga

SEQ ID NO: 123904 - DNA, 80 bp, synthetic construct
  source 1..80: mol_type = other DNA
tggaattacaacgcatatttccgctgtacaccgctacgggtgcagcgcgcaaattaacccccgaggcagttcagagactc

SEQ ID NO: 123905 - DNA, 80 bp, synthetic construct
  source 1..80: mol_type = other DNA
tgctgaagaagaagcagctaactgtcttagacttgcatcctggagctgggaaaaccaggagagtccttcctgaaatagtc

SEQ ID NO: 123906 - DNA, 80 bp, synthetic construct
  source 1..80: mol_type = other DNA
tttgtctcgggcggcctgggaaaccgcccggcacactccagtcaattcctggttgggaaacatcattgcatatgcgccca

SEQ ID NO: 123907 - DNA, 80 bp, synthetic construct
  source 1..80: mol_type = other DNA
ctctccacgggttctcgcctctgttgtagtctgccaacgtaaacgggcagtaccgctccatcaagccccgcagtaatccc

SEQ ID NO: 123908 - DNA, 80 bp, synthetic construct
  source 1..80: mol_type = other DNA
ttataggggttactgctgacaatctcaaatgcccctgccaggtccctgccccagagtttttcacggaggtggatggcgtg

SEQ ID NO: 123909 - DNA, 80 bp, synthetic construct
  source 1..80: mol_type = other DNA
ggtcggcggcgcttgggaaggccggccgagtagcgtgcccggtgccgaccaaccgggacgacgcccatctccaggacccg

SEQ ID NO: 123910 - DNA, 80 bp, synthetic construct
  source 1..80: mol_type = other DNA
tccagtcaattcctggttgggaaacatcatagtctacgcccccacaatatgggtgcgcatggtattgatgacccactttt

SEQ ID NO: 123911 - DNA, 80 bp, synthetic construct
  source 1..80: mol_type = other DNA
aaagaaaaagtggacacaaaggcccaggaaccacagccaggcaccagagtgatcatgagagcggtgagtgactggctgct

SEQ ID NO: 123912 - DNA, 80 bp, synthetic construct
  source 1..80: mol_type = other DNA
ggcacgcacaaccactgagagtgggaagctcattacagactggtgctgcagaagctgcaccctccctccactgcgcttcc

SEQ ID NO: 123913 - DNA, 80 bp, synthetic construct
  source 1..80: mol_type = other DNA
agtgtttatggtggcatcgtttctcaaagcaagatggaccaaccaggagaatatcttgttgatgttggcggctgttttct

SEQ ID NO: 123914 - DNA, 80 bp, synthetic construct
  source 1..80: mol_type = other DNA
cttcttccgctgctccgccgacatcgcctccgaccggggtgtgcggggggtcttcttcttcttcaggtgcggcagtgagg

SEQ ID NO: 123915 - DNA, 80 bp, synthetic construct
  source 1..80: mol_type = other DNA
tattgtgtatgaggctgatgacgttattctgcacacacccggctgtataccttgtgtccaggaaggtaatagatcaacat

SEQ ID NO: 123916 - DNA, 80 bp, synthetic construct
  source 1..80: mol_type = other DNA
cggcgcggccgtacgggtaggtggaagccaggggtgtacaggtacgtctcgcaaggtgaacgaccatcgggcacatttga

SEQ ID NO: 123917 - DNA, 80 bp, synthetic construct
  source 1..80: mol_type = other DNA
gatgagaatcaccgggccgaaaacctgcagcaacacatggcatggtaccttccccatcaatgcttacaccacaggccctg

SEQ ID NO: 123918 - DNA, 80 bp, synthetic construct
  source 1..80: mol_type = other DNA
tttacttgctccagtatagcttgcttaagactccctattttgtgcgagcgcacattcttctgcgagcttgcatgaccctc

SEQ ID NO: 123919 - DNA, 80 bp, synthetic construct
  source 1..80: mol_type = other DNA
acgcacgcggaaggaggccagggtgtgccggcacgacggtggccagaagctcccccaccgcatccgcgggcacgtaggcg

SEQ ID NO: 123920 - DNA, 80 bp, synthetic construct
  source 1..80: mol_type = other DNA
ttctacttaagctaggggcccttactggtacctacatctatgaccacctttctcccttgtcccattgggccgccgacggc

SEQ ID NO: 123921 - DNA, 80 bp, synthetic construct
  source 1..80: mol_type = other DNA
caggtagtagacttcagcttggaccctacattcaccatagagaccaccactgtgccccaagacgccgtatcacggagtca

SEQ ID NO: 123922 - DNA, 80 bp, synthetic construct
  source 1..80: mol_type = other DNA
gggcaacattcccgccctactggataccaaaaaatatctggatagcaagaaggaacttgaggatgctgccaaggaagctg

SEQ ID NO: 123923 - DNA, 80 bp, synthetic construct
  source 1..80: mol_type = other DNA
cgtgatattgctgaagagcttggcggcgaatgggctgaccgcttcctcgtgctttacggtatcgccgctcccgattcgca

SEQ ID NO: 123924 - DNA, 80 bp, synthetic construct
  source 1..80: mol_type = other DNA
aacatctgggtcgcccggcccaactggggccggtggttgggtctggctcatctcgagagccacggagtggaaccaccctc

SEQ ID NO: 123925 - DNA, 80 bp, synthetic construct
  source 1..80: mol_type = other DNA
gcgtacatgacccagccttgaacggatctaggtgttgggaacctgttacacctacgctggcggttaagtaccggggtgcc

SEQ ID NO: 123926 - DNA, 80 bp, synthetic construct
  source 1..80: mol_type = other DNA
cccttgatgaaagccaaaagcagcgccctgaggacgcccagcccgtggttagcgacgaaatgcttgcgcgctggctcgga

SEQ ID NO: 123927 - DNA, 80 bp, synthetic construct
  source 1..80: mol_type = other DNA
cgtcgcaggtcaggtgtggactggacttggacttttttgacgatggcgttgatgactatggccatggcaaccaccatcca

SEQ ID NO: 123928 - DNA, 80 bp, synthetic construct
  source 1..80: mol_type = other DNA
atccagctaaacagaaagtcgtacgagacagagtatccaaaatgcaagaacgatgattgggactttgtcgtcacaacaga

SEQ ID NO: 123929 - DNA, 80 bp, synthetic construct
  source 1..80: mol_type = other DNA
gccgctgtgctggtggaaacagacagccaggtcaaaacccactctattttcaaggtgctcgactgtggcttcgagcagtg

SEQ ID NO: 123930 - DNA, 80 bp, synthetic construct
  source 1..80: mol_type = other DNA
tcggaatggtgagcattttagccagttccctcctaaaaaatgatattcccatgacaggaccactagtggctggagggctc

SEQ ID NO: 123931 - DNA, 80 bp, synthetic construct
  source 1..80: mol_type = other DNA
ctgcttgtcagtgggcagcgtggtgattgtcgggagggttgtcttatcgggccagcccgccatagtccctgatcgagagg

SEQ ID NO: 123932 - DNA, 80 bp, synthetic construct
  source 1..80: mol_type = other DNA
atctcaggttcgcgatggtgcagcaacatctggcacggcaccttccccataaacgcgtccacgactggccccagcgtgcc

SEQ ID NO: 123933 - DNA, 80 bp, synthetic construct
  source 1..80: mol_type = other DNA
gcttaaccagccttttctccccggggtcccaacagaagatacagctgattaacaccaacggaagctggcacatcaacagg

SEQ ID NO: 123934 - DNA, 80 bp, synthetic construct
  source 1..80: mol_type = other DNA
atcacatcaggttatatccagcaactctgaacgtgacggagcagctgcgcacggaccatcagatgttgtcgtgtcttcgc

SEQ ID NO: 123935 - DNA, 80 bp, synthetic construct
  source 1..80: mol_type = other DNA
ccactctcgcaaggccattaaccacatcaactccgtgtgggaggacttgctggaggactctgtcaccccaatcccgacta

SEQ ID NO: 123936 - DNA, 80 bp, synthetic construct
  source 1..80: mol_type = other DNA
tgtcgttagcggcttggtcggagctgccgtggggagtataggcctggggaagatattagtggatgtcctagctggatacg

SEQ ID NO: 123937 - DNA, 80 bp, synthetic construct
  source 1..80: mol_type = other DNA
catcgtttggtatagcctgcagattatccgacatgcagtcaatttcaacgtcgcttaacgttaattggcgacttgccggt

SEQ ID NO: 123938 - DNA, 80 bp, synthetic construct
  source 1..80: mol_type = other DNA
agtgaaaacatgtctgtggcccaaaacccacacgctgtggagcaatggagtgctggaaagtcagatgctcattccaagat

SEQ ID NO: 123939 - DNA, 80 bp, synthetic construct
  source 1..80: mol_type = other DNA
caggcattgtagctcccaccatgttggtatggggcgacgacctagtcgtcatctcagagagtcaaggggttgaggaggac

SEQ ID NO: 123940 - DNA, 80 bp, synthetic construct
  source 1..80: mol_type = other DNA
gagaatggagcaagctctgtttggaatgcaacaactgccatcggactctgccacatcatgcgtgggggttggttgtcatg

SEQ ID NO: 123941 - DNA, 80 bp, synthetic construct
  source 1..80: mol_type = other DNA
cgtgggaatggggagaggggcggggcgaggcgaggttcgcaggcgagcgtggagaggcgcttagcttttgcgtatgcgta

SEQ ID NO: 123942 - DNA, 80 bp, synthetic construct
  source 1..80: mol_type = other DNA
gagcattccgctcactgttcggaggtatgtcctggataacgcaaggattgctgggggctcttctgttgtggatgggcatc

SEQ ID NO: 123943 - DNA, 80 bp, synthetic construct
  source 1..80: mol_type = other DNA
ttgcaccagtgcaaaaagggtatcttttgtctggtaaagcaggccaaagtcacctacgacagtaataccaccggacaccg

SEQ ID NO: 123944 - DNA, 80 bp, synthetic construct
  source 1..80: mol_type = other DNA
tgtggagctatggaatttcttagactgctatgatgttaaaatggatatgccatcctattacttggtgattgtggggatag

SEQ ID NO: 123945 - DNA, 80 bp, synthetic construct
  source 1..80: mol_type = other DNA
aggttgtggcattacccgtgcaccgtcaattataccatacacaaggtcagaatgttcgtggcaggcgtggaacacaggtt

SEQ ID NO: 123946 - DNA, 80 bp, synthetic construct
  source 1..80: mol_type = other DNA
agttggccaggcggaagccgcgttggagaacgttattgtccttaacgcggcctccgcggccagctgtcaggggttgctat

SEQ ID NO: 123947 - DNA, 80 bp, synthetic construct
  source 1..80: mol_type = other DNA
ctgctcctggttctagcgttgccccagcgggcttacgctcaagatcgggagcaggtggcatccatcggggtggtcgtcat

SEQ ID NO: 123948 - DNA, 80 bp, synthetic construct
  source 1..80: mol_type = other DNA
aaggtggagttggtggaagtgtcaatagcgtagaggagaccttgtcctcgggaggctacaatggttcctcggaggcggaa

SEQ ID NO: 123949 - DNA, 80 bp, synthetic construct
  source 1..80: mol_type = other DNA
actcctggggtgagaatgccacagatgtgtttctactggacagcctgcgccccccgcgcggcggttggtttggatgcacg

SEQ ID NO: 123950 - DNA, 80 bp, synthetic construct
  source 1..80: mol_type = other DNA
ggcttttctggactgtcatcacctgactttgaacagcgcctgttccgcggagttaatcctgcccagccttctgagatgac

SEQ ID NO: 123951 - DNA, 80 bp, synthetic construct
  source 1..80: mol_type = other DNA
cggcacggccgctcgcgcggcagaacagcgacgccacaaaatcaaaatcaaaatcaaggtataacccacccccttccctc

SEQ ID NO: 123952 - DNA, 80 bp, synthetic construct
  source 1..80: mol_type = other DNA
atgggatacgaggataaccaaggccgatttggaaaatgaggcgaaggtgctggaactattggaaggtgaacatcgacgct

SEQ ID NO: 123953 - DNA, 80 bp, synthetic construct
  source 1..80: mol_type = other DNA
gatagctggaggccattacgtgcagatggctatcatcaaggtgggggcgcttactggcacatatgtttacaaccacctca

SEQ ID NO: 123954 - DNA, 80 bp, synthetic construct
  source 1..80: mol_type = other DNA
tgtgaggcagtgcaggctgggacagccgccctccatgttgcgaaaagcctggtttctgagacttcccacctcagagtaaa

SEQ ID NO: 123955 - DNA, 80 bp, synthetic construct
  source 1..80: mol_type = other DNA
atccgacgcagcagcccgcgtaacagctatactatcatccctcactgtgacttccctactcaggcgcctccacaagtgga

SEQ ID NO: 123956 - DNA, 80 bp, synthetic construct
  source 1..80: mol_type = other DNA
ggcatgtttgattcctcggtcctgtgcgagtgctatgacgcgggctgtgcttggtatgagctcacgcccgctgagacttc

SEQ ID NO: 123957 - DNA, 80 bp, synthetic construct
  source 1..80: mol_type = other DNA
gcgagggagcttctggggcctgttgcccatgggacaccgattatggctcaagacaactggaacacgcagaggaggtgccg

SEQ ID NO: 123958 - DNA, 80 bp, synthetic construct
  source 1..80: mol_type = other DNA
tagcggcggctcatggccacggcggccgccacgtgcgccaggccccagccgaagcggcccgccgccatggcgtaccccag

SEQ ID NO: 123959 - DNA, 80 bp, synthetic construct
  source 1..80: mol_type = other DNA
catagtccttacctgcttgttccacccgtccctggggtttgaagtcaccaaagtgctgctagcgctcataggcccgctct

SEQ ID NO: 123960 - DNA, 80 bp, synthetic construct
  source 1..80: mol_type = other DNA
ataagacccaatgtcccaaggatagatatcacaccaattataactgctacaacggaaaatgtagtggcgtaggtagatgc

SEQ ID NO: 123961 - DNA, 80 bp, synthetic construct
  source 1..80: mol_type = other DNA
cgtcgtgcacgggtgcgccctgcctcctagcacggcccccgtccccccctcccccggacggaagcgggcgatcgtgctgg

SEQ ID NO: 123962 - DNA, 80 bp, synthetic construct
  source 1..80: mol_type = other DNA
tgccctgatatccagtaggaaccagcacactcacttttaggtgaagcaataccaccccatgcggaggaatgtggaaagat

SEQ ID NO: 123963 - DNA, 80 bp, synthetic construct
  source 1..80: mol_type = other DNA
ccgccccaaccagaatacgacttggaattgataacatcatgttcctccaacgtgtcggtcgcgcacgacgcatctggcaa

SEQ ID NO: 123964 - DNA, 80 bp, synthetic construct
  source 1..80: mol_type = other DNA
aggacaaggtttggattcaaaaataaaaaaagaacagaaaagccttcctaaaagaaagccaaaagataaagtaaaagagg

SEQ ID NO: 123965 - DNA, 80 bp, synthetic construct
  source 1..80: mol_type = other DNA
tggtgggcccgataattcggacacgcaatccacgtcctccatgcctcccctcgaaggggagcctggagaccccgatttgg

SEQ ID NO: 123966 - DNA, 80 bp, synthetic construct
  source 1..80: mol_type = other DNA
gggaaaaaaacgtgggggaccgattcgagaaggacgcccaggccctccgagccttcacggaggcgacgaggtactccgct

SEQ ID NO: 123967 - DNA, 80 bp, synthetic construct
  source 1..80: mol_type = other DNA
gtgaggaccggcaacaactcgcggtgctgggtggcgttaacccccactgtggcggctccttacctcaatgctccagttga

SEQ ID NO: 123968 - DNA, 80 bp, synthetic construct
  source 1..80: mol_type = other DNA
ccctggctaaagaaaataaatgtgccttggttcttatgacggcaacgccacctgggaagagtgaacccttcccagagtcc

SEQ ID NO: 123969 - DNA, 80 bp, synthetic construct
  source 1..80: mol_type = other DNA
ggcttgcaacggcctacgtgacctggccgtcgctgtcgagccagtggtgttctctcctatggagaggaagattatcactt

SEQ ID NO: 123970 - DNA, 80 bp, synthetic construct
  source 1..80: mol_type = other DNA
cataccttgacattggctggaatgccatagatgccatgaaccaccctactttcccagtgcccgctgtcataccactgcaa

SEQ ID NO: 123971 - DNA, 80 bp, synthetic construct
  source 1..80: mol_type = other DNA
gtggacgtggccacccacggccggacgtacggcacgctggagctgttccaaaaaatgatccttatgcacgccacctactt

SEQ ID NO: 123972 - DNA, 80 bp, synthetic construct
  source 1..80: mol_type = other DNA
ggccctgggcttattggcatgagtggggtaacttttatgaatgtgagatttgtagtggagggatttaatggcacagtgtt

SEQ ID NO: 123973 - DNA, 80 bp, synthetic construct
  source 1..80: mol_type = other DNA
ataccttaatactcccggactccctgtttgtcaggaccacctggagttctgggagggggtgtttactggcctcacccaca

SEQ ID NO: 123974 - DNA, 80 bp, synthetic construct
  source 1..80: mol_type = other DNA
cttcgccagaagaaagtcacatttgatcggctccaagtagttgatcaacactaccaggatgttctgaaggagattaagct

SEQ ID NO: 123975 - DNA, 80 bp, synthetic construct
  source 1..80: mol_type = other DNA
agggacagaagccagctgaacccgctgctccattccaccacggagtgggccattttgccttgcacatactcagacctacc

SEQ ID NO: 123976 - DNA, 80 bp, synthetic construct
  source 1..80: mol_type = other DNA
cccccgggcgacgacccgcacccggagtatgacctcgagctgataacatcgtgctcatcaaacgtctccgtagcccagga

SEQ ID NO: 123977 - DNA, 80 bp, synthetic construct
  source 1..80: mol_type = other DNA
ggctgaaactccgagaggtgtacacccaaatgtgtgaccataggctaatgtcggcagccgtcaaggacgagagggccgtg

SEQ ID NO: 123978 - DNA, 80 bp, synthetic construct
  source 1..80: mol_type = other DNA
ggcaccaggccctgcggggtcttaagcacctacggattggcccccccgcgctcgttttggcggcgggactcgtcctggtg

SEQ ID NO: 123979 - DNA, 80 bp, synthetic construct
  source 1..80: mol_type = other DNA
tcccccaggaatgggtgctgcacttttaccaggaagcagctccagcacaatccgatgtggctctactaagatttgtgaat

SEQ ID NO: 123980 - DNA, 80 bp, synthetic construct
  source 1..80: mol_type = other DNA
ccgggctgatacacctacaccaaaacatagtggacatccagtacctgtatggcctgtcctcctcagtggtgaactgggcc

SEQ ID NO: 123981 - DNA, 80 bp, synthetic construct
  source 1..80: mol_type = other DNA
gcacgctgggtaaagccttctcaacaactttgaaaggggctcagagactagcagcgctaggcgacacagcttgggacttc

SEQ ID NO: 123982 - DNA, 80 bp, synthetic construct
  source 1..80: mol_type = other DNA
cggggccggattggtgggacactaacccccccgcgctcagtaacggcacggccgcggccccgacgggacgcaacgccgtg

SEQ ID NO: 123983 - DNA, 80 bp, synthetic construct
  source 1..80: mol_type = other DNA
ggtccctggctcacaccgaggtgcttggttgactacccataccggttgtggcactacccatgtactgtaaacttcaccat

SEQ ID NO: 123984 - DNA, 80 bp, synthetic construct
  source 1..80: mol_type = other DNA
tttggcagaaaaagaaacagagatctggagtgttatgggacacacctagccctccagaagtggaaagagcagttcttgat

SEQ ID NO: 123985 - DNA, 80 bp, synthetic construct
  source 1..80: mol_type = other DNA
ctacattgcccaggaataaagaatcgtgaatctgttgcatgttatgtttcaacgtgtttattttttaattgcaaaaaaat

SEQ ID NO: 123986 - DNA, 80 bp, synthetic construct
  source 1..80: mol_type = other DNA
acggctcgatgagaatcaccgggccgaaaacctgcagcaacacatggcatggaaccttccccatcaatgcctacaccaca

SEQ ID NO: 123987 - DNA, 80 bp, synthetic construct
  source 1..80: mol_type = other DNA
ttattgcaacaagcacgcttgatgccctttcggcaacaatagctttgtcttttgatacacggggaatacagcaagccttg

SEQ ID NO: 123988 - DNA, 80 bp, synthetic construct
  source 1..80: mol_type = other DNA
tgtgcggcttggtacctgaaaggcaagtgggcccctggactcgcctattccatctacggaatgtggccattgctcctgct

SEQ ID NO: 123989 - DNA, 80 bp, synthetic construct
  source 1..80: mol_type = other DNA
gtcctttggacttgcctgccgtaattgagaggcttcacggcctcgacaccctctcgctgcactcatactctccccacgag

SEQ ID NO: 123990 - DNA, 80 bp, synthetic construct
  source 1..80: mol_type = other DNA
gcacgcaaccgcgcccaggcggcgggtacagtggaaacccaggcggcgggtacagtggaaaggtcgacgcgtaagacgtg

SEQ ID NO: 123991 - DNA, 80 bp, synthetic construct
  source 1..80: mol_type = other DNA
cacggcagatacacttgctgatgcggtgctgattacgaccgctcacgcgtggcagcatcaggggaaaaccttatttatca

SEQ ID NO: 123992 - DNA, 80 bp, synthetic construct
  source 1..80: mol_type = other DNA
tctggtgcaggtgcagaccccagaccgggtggctttcaattgcggcatgcagagtttgggccccggggtgataggtttga

SEQ ID NO: 123993 - DNA, 80 bp, synthetic construct
  source 1..80: mol_type = other DNA
tgtgtgtggccctgtttactgctttacacctagtcctgtggtaataggtactacagacgccagaggagtgcccacgtact

SEQ ID NO: 123994 - DNA, 80 bp, synthetic construct
  source 1..80: mol_type = other DNA
cctccaaaagctggccgtttactactatatcatccaccgagagaggcgcctgtcccccttccccgcgctagtccggctcg

SEQ ID NO: 123995 - DNA, 80 bp, synthetic construct
  source 1..80: mol_type = other DNA
cgtgatacaaaaactgtcaactgttacaatgggagccgcttatgggtttcaatactctcccaagcagcgagtggaacaac

SEQ ID NO: 123996 - DNA, 80 bp, synthetic construct
  source 1..80: mol_type = other DNA
tattcttagcgacaagtgtgcaggccgattcggggtgtgcaattgacttgcagcgccgtgaattgaaatgcgggtgaggc

SEQ ID NO: 123997 - DNA, 80 bp, synthetic construct
  source 1..80: mol_type = other DNA
ccgttcccacgccccgccacacgtcacaaactccaccccctcattatcatattggcttcaatccaaaataaggtatatta

SEQ ID NO: 123998 - DNA, 80 bp, synthetic construct
  source 1..80: mol_type = other DNA
cctttaatgactctgccgttttgcagatggctctgacttgccgcgtgcgccttcccgttccgcactatcgaggaagatct

SEQ ID NO: 123999 - DNA, 80 bp, synthetic construct
  source 1..80: mol_type = other DNA
tagccgcacgcttgttgggctcttcagccccgggtcttcccaaaacttgcagcttatcaactctaatggcagctggcaca

SEQ ID NO: 124000 - DNA, 80 bp, synthetic construct
  source 1..80: mol_type = other DNA
aactgcggttatcgccggtgccgcgcaagcggtgtactgacgactagctgtggcaataccctcacatgttacttgaaggc

SEQ ID NO: 124001 - DNA, 80 bp, synthetic construct
  source 1..80: mol_type = other DNA
cgtggcgctggtcatttggtaccgaaggttaaggcttctgaccctcttgcaatggatcctggggcgggttcttcaacagc

SEQ ID NO: 124002 - DNA, 80 bp, synthetic construct
  source 1..80: mol_type = other DNA
atcggtttgatgccgcctgcaattggacgcggggggagcgctgcgagctcgacgacagggataggattgagatgagtcct

SEQ ID NO: 124003 - DNA, 80 bp, synthetic construct
  source 1..80: mol_type = other DNA
actcccctggcgcgagctgcgtgggagacagtccgacacactccagtcaattcctggttgggaaacatcataatctacgc

SEQ ID NO: 124004 - DNA, 80 bp, synthetic construct
  source 1..80: mol_type = other DNA
acaccccaatatcgaggaggtggccctatctaacaccggggaggtcccattctatggcaaagccatccccattgaggcca

SEQ ID NO: 124005 - DNA, 80 bp, synthetic construct
  source 1..80: mol_type = other DNA
aaatctcactgctggtatcccgccacgcccacgttggctattcctaacgccacagtccccgtgaacgggttccgcaggca

SEQ ID NO: 124006 - DNA, 80 bp, synthetic construct
  source 1..80: mol_type = other DNA
cgcgtatttcaacacgcccggcctacccgtatgtcaagaccatcttgaattctgggagggagtcttcaccggacttacac

SEQ ID NO: 124007 - DNA, 80 bp, synthetic construct
  source 1..80: mol_type = other DNA
ggagacagctagacacactccagtcaattcctggctaggcaacatcattatgtatgcgcccactttgtgggcaaggatga

SEQ ID NO: 124008 - DNA, 80 bp, synthetic construct
  source 1..80: mol_type = other DNA
ctagagtaaagattgtatgcatgcgattgctatcgcactttgtagcaaaacattgttgtgcaagcgaaatacacaaacgg

SEQ ID NO: 124009 - DNA, 80 bp, synthetic construct
  source 1..80: mol_type = other DNA
gcctactgcttatcggtgggatgcgtggtcatctgcggcagggtatgcaccactggtaagcctgtgcccattcctgacag

SEQ ID NO: 124010 - DNA, 80 bp, synthetic construct
  source 1..80: mol_type = other DNA
cgaggacggcagcgtgcagctcgccgaccactaccagcagaacacccccatcggcgacggccccgtgctgctgcccgaca

SEQ ID NO: 124011 - DNA, 80 bp, synthetic construct
  source 1..80: mol_type = other DNA
ggcccgtctcagcgaggttgggctccctcttatgtctagggccagctgatggactgcaggaccaaggatggaggttgctt

SEQ ID NO: 124012 - DNA, 80 bp, synthetic construct
  source 1..80: mol_type = other DNA
gctgtcggatcgacgaaaagtagttggcccccagagccggggggaccaggtggacctgccgcgacaggtcgcgcagggcc

SEQ ID NO: 124013 - DNA, 80 bp, synthetic construct
  source 1..80: mol_type = other DNA
accaagtatattgtcaaatgggaatgggtggtcctcttgtttctgctcctcgcggacgccagagtctgcgcgtgcttgtg

SEQ ID NO: 124014 - DNA, 80 bp, synthetic construct
  source 1..80: mol_type = other DNA
ccagcctcccctccaggtgcgcctttcagtttcatggccacgacgggtccgacgagtcgtttcccatcgagtatgtactg

SEQ ID NO: 124015 - DNA, 80 bp, synthetic construct
  source 1..80: mol_type = other DNA
caaagttagaaatggaggtgagattggggcagttgccttggactatcctagcgggacctctggttcacccattgtgaatc

SEQ ID NO: 124016 - DNA, 80 bp, synthetic construct
  source 1..80: mol_type = other DNA
cccaagtcgacgaccgggagatgtcagtggctgctgagtgtcatagaccaccaagacctaagtttcctccggcacttcca

SEQ ID NO: 124017 - DNA, 80 bp, synthetic construct
  source 1..80: mol_type = other DNA
gcggcccagtgtactgtttcaccccaagcccagtggtcgtggggaccaccgatcgacgggtggtccccacctaccgcttt

SEQ ID NO: 124018 - DNA, 80 bp, synthetic construct
  source 1..80: mol_type = other DNA
gttttggaccaggcggagacggctggagcgcggcttgtcgtgctcgccactgctacgcccccgggatcggtcaccgtacc

SEQ ID NO: 124019 - DNA, 80 bp, synthetic construct
  source 1..80: mol_type = other DNA
accagatccaccacggatagcgggaaagttattcctgaatggtgttgccgctcctgcacaatgccgcctgtgagcttcca

SEQ ID NO: 124020 - DNA, 80 bp, synthetic construct
  source 1..80: mol_type = other DNA
agatttggctcaagcgttgacgtttttaaatcgaacgtgcggcctgacccacctagatgtgaaatgtggcaatatttttc

SEQ ID NO: 124021 - DNA, 80 bp, synthetic construct
  source 1..80: mol_type = other DNA
aacatcagcggaccatccaacgataagccatattgttggcattacccgccccgaccctgtgacatcgttccagcacgatc

SEQ ID NO: 124022 - DNA, 80 bp, synthetic construct
  source 1..80: mol_type = other DNA
cgctcccggcggcaacggcggttccggccccatgggcaggagcggcagaggcacgtcggcgtggcgctcgggcaggtccc

SEQ ID NO: 124023 - DNA, 80 bp, synthetic construct
  source 1..80: mol_type = other DNA
ggctctggatgtaaccgaggagctgaggcccgaccacctggtgatggcctgtaccgggaccgagttcagctccagcggtg

SEQ ID NO: 124024 - DNA, 80 bp, synthetic construct
  source 1..80: mol_type = other DNA
ccgcgcgtaaccactcccctggggttccgggttatgctaattgcttttttggcggaacacacggcccctcgcgcattggc

SEQ ID NO: 124025 - DNA, 80 bp, synthetic construct
  source 1..80: mol_type = other DNA
tggaggcgacggggtggcgcccccgggtctggccgtcgcggagatggaggtccagatcgtgcgcaacgacccgccgctac

SEQ ID NO: 124026 - DNA, 80 bp, synthetic construct
  source 1..80: mol_type = other DNA
accatgtcaccaatgactgcccgaattcaagcatagtgtatgaggccgaccatcacatcatgcaccttccaggttgcgtg

SEQ ID NO: 124027 - DNA, 80 bp, synthetic construct
  source 1..80: mol_type = other DNA
agtgatgtgtaaataaagttgtgcaataaaagtatgtgtgacgcatgcaaggtgtggtttatgactcatgggcggggctt

SEQ ID NO: 124028 - DNA, 80 bp, synthetic construct
  source 1..80: mol_type = other DNA
cagctcggcttatcgtgtacccggacctgtcagtgcgggtgtgtgagaagcgagctttgtatgatatcacccaaaagctg

SEQ ID NO: 124029 - DNA, 80 bp, synthetic construct
  source 1..80: mol_type = other DNA
ccgtgtagtgccgaggaggagaaactgcccatcagcccactcagcaactccttgctgagacaccataacctagtctattc

SEQ ID NO: 124030 - DNA, 80 bp, synthetic construct
  source 1..80: mol_type = other DNA
gtagtttttaccccgggagaacggtcggccgttaggggtttcaaaaggcagtacgacgaggtgtacggcgacgaggacat

SEQ ID NO: 124031 - DNA, 80 bp, synthetic construct
  source 1..80: mol_type = other DNA
caaaactctcaagtttgatgccctgtcgggctctcaggaagctgagttcactggatacgggagggccacactggagtgcc

SEQ ID NO: 124032 - DNA, 80 bp, synthetic construct
  source 1..80: mol_type = other DNA
ggctaaaatccggcatgaacagctgcaacgggtacacgggtatgcggtgcacctccgccccgcctatggttaccttgtcc

SEQ ID NO: 124033 - DNA, 80 bp, synthetic construct
  source 1..80: mol_type = other DNA
ggaactggggctggccatattagtaattatatccatctttactcttaccccagcatacaagatcctcctgagccgttcag

SEQ ID NO: 124034 - DNA, 80 bp, synthetic construct
  source 1..80: mol_type = other DNA
atgtacatagctggcagtgagcataggttcacggctgcctgcaactggaccaggggggaacggtgcgatttggcagatcg

SEQ ID NO: 124035 - DNA, 80 bp, synthetic construct
  source 1..80: mol_type = other DNA
cataaagaacatggacaaaccagggctaaaaagaggtggggcaaaaggacgcaccttgggagaggtttggaaagaaagac

SEQ ID NO: 124036 - DNA, 80 bp, synthetic construct
  source 1..80: mol_type = other DNA
tcctcggaacaaccatctcggaggttttgtggactgtttaccacggagctggcaacaagactctagccggcttacggggt

SEQ ID NO: 124037 - DNA, 80 bp, synthetic construct
  source 1..80: mol_type = other DNA
ggaaaattttggaacaccacgatagcggtttccatggcaaacattttcagaggaagttatctagcaggagcaggtctggc

SEQ ID NO: 124038 - DNA, 80 bp, synthetic construct
  source 1..80: mol_type = other DNA
cccccgctgtgcctcagacctaccaggtggggtacctgcatgcccctactggcagcgggaagagcaccaaagtccctgca

SEQ ID NO: 124039 - DNA, 80 bp, synthetic construct
  source 1..80: mol_type = other DNA
tgtagcaacacgtggcacggaacatttcccatcaacgcgcacaccacagggccctgcacaccctccccggcgccaaacta

SEQ ID NO: 124040 - DNA, 80 bp, synthetic construct
  source 1..80: mol_type = other DNA
ataggaagtggatataaccgcaggcgacgggactaaccaatccccgggggggcaacggacagacacgccccgaacaggcc

SEQ ID NO: 124041 - DNA, 80 bp, synthetic construct
  source 1..80: mol_type = other DNA
ggtggctatcccaatagacttacctcgtggaacttcaggcagcccaatcatcaacgcacaaggggttgtgttgggtctct

SEQ ID NO: 124042 - DNA, 80 bp, synthetic construct
  source 1..80: mol_type = other DNA
gtttgatggcgcgactgcggggtccctaggttgtggcaccctgcttttgataaccatcttgacattgtccccttggtaca

SEQ ID NO: 124043 - DNA, 80 bp, synthetic construct
  source 1..80: mol_type = other DNA
cagcgagtagtcgttcacgaacgccgcgcatcgcgtgttgttccagtagctggtgatgcactgagtcacgagccgcgcca

SEQ ID NO: 124044 - DNA, 80 bp, synthetic construct
  source 1..80: mol_type = other DNA
acatatcacggtgctggataccggtttcaccaaacgtggctgtgcagcggcctggcgccctcacgcagggcttgcgggcg

SEQ ID NO: 124045 - DNA, 80 bp, synthetic construct
  source 1..80: mol_type = other DNA
gaacggaaaacgggtaatccaattgagcagaaaaacctttgacactgagtatcagaaaacaaaaaacaatgactgggact

SEQ ID NO: 124046 - DNA, 80 bp, synthetic construct
  source 1..80: mol_type = other DNA
ggaggtggggcgggggccccgcccggggagcggaacgaggaggagtttggaagagccggcctcggcaccacgtgtataag

SEQ ID NO: 124047 - DNA, 80 bp, synthetic construct
  source 1..80: mol_type = other DNA
actgagtaatgaggacgtgggacgaactttggacttttgtgtttatggaggaaaaactgctgattattactgaactttgg

SEQ ID NO: 124048 - DNA, 80 bp, synthetic construct
  source 1..80: mol_type = other DNA
ctgggcaaaggtaatactcatcatgctactcatgtccggcgtcgacgcggaaaccatggccgtcggggctagggccgctc

SEQ ID NO: 124049 - DNA, 80 bp, synthetic construct
  source 1..80: mol_type = other DNA
tgtcttagcctcgagcagtccacccagaccgtgcaggggcccgactccgccgcctgcggactcttttgttgcatgttctt

SEQ ID NO: 124050 - DNA, 80 bp, synthetic construct
  source 1..80: mol_type = other DNA
agagcccgaagcccgcaaggtgatatccgccctcacagagagactctatgtgggcggccccatgtacaacagcaggggag

SEQ ID NO: 124051 - DNA, 80 bp, synthetic construct
  source 1..80: mol_type = other DNA
gtgcttagtggactatccctatagattgtggcactacccatgcaccgtgaatttcaccatccacaaggtgcggatgtatg

SEQ ID NO: 124052 - DNA, 80 bp, synthetic construct
  source 1..80: mol_type = other DNA
gtgctgtttctcaataacacgcgtccgccgcgaggcaactggttcggctgcacatggatgaatagcactgggtataccaa

SEQ ID NO: 124053 - DNA, 80 bp, synthetic construct
  source 1..80: mol_type = other DNA
ccgtggccagcgccgaggacagcagcggagggcgggcgcgtcgcccgccccacgccacggagttctcgtaggagacgacg

SEQ ID NO: 124054 - DNA, 80 bp, synthetic construct
  source 1..80: mol_type = other DNA
cataaccagcgagcgcgtgagggatggatgtcttattccaacgcccggcgaggctttggagacggcggtaaaggctttat

SEQ ID NO: 124055 - DNA, 80 bp, synthetic construct
  source 1..80: mol_type = other DNA
cacatacagagcctgtaaagcagccataatgccttaccagaaaaaacagtacaaatcccaggcacagcgaacacaatctg

SEQ ID NO: 124056 - DNA, 80 bp, synthetic construct
  source 1..80: mol_type = other DNA
cacatgaccagcaggtcgctgtctgcgggactcatccatccttcggccaggtcgccgtctccccacagagaagcgttggt

SEQ ID NO: 124057 - DNA, 80 bp, synthetic construct
  source 1..80: mol_type = other DNA
agctggctaagcagttgcgcacccttggtcttaatgctgttgcattctacaggggcgttgatgtggcagtgatccccacc

SEQ ID NO: 124058 - DNA, 80 bp, synthetic construct
  source 1..80: mol_type = other DNA
attattcttgcggtcctggcctgtccacatttggtttttgacatcacaaaatatctcctggccatcatagggcccctcta

SEQ ID NO: 124059 - DNA, 80 bp, synthetic construct
  source 1..80: mol_type = other DNA
tagaaaggaagccatcaccgaagttgaccggacagaagcgaggaaagccagaagagatgggaacaagacaggcgggcacc

SEQ ID NO: 124060 - DNA, 80 bp, synthetic construct
  source 1..80: mol_type = other DNA
ggttttaagtcttaaatgtgttaatccacttaccactgcaagcggctccctccaacttaaagtgggaagtggtcttacag

SEQ ID NO: 124061 - DNA, 80 bp, synthetic construct
  source 1..80: mol_type = other DNA
gttgaaaaacagaacgggatgtacaaagctgcaccaaagcggctaactgccacgactgaaaagctggaaatgggatggaa

SEQ ID NO: 124062 - DNA, 80 bp, synthetic construct
  source 1..80: mol_type = other DNA
catcaccacctggtgttttgtctccaccatcggcctgacagagctgtattgtattctgcggcggggcccggcccccaaga

SEQ ID NO: 124063 - DNA, 80 bp, synthetic construct
  source 1..80: mol_type = other DNA
gatcgcgtgcgtgcagctggagcgcgtcctcgagacggccgccagcgccgctatttttgagcgccgcggacccgcgctct

SEQ ID NO: 124064 - DNA, 80 bp, synthetic construct
  source 1..80: mol_type = other DNA
gtgtgtgccaagatgactcatactttccgtgggactaggccttttcctactccccgctcgatagagcggcacacattagc

SEQ ID NO: 124065 - DNA, 80 bp, synthetic construct
  source 1..80: mol_type = other DNA
gcttgtccgcttgatggaggctgagggggtcattggaccacaacacttggaacagctgcccagaaaaaacaagattgctg

SEQ ID NO: 124066 - DNA, 80 bp, synthetic construct
  source 1..80: mol_type = other DNA
cttctcctacttcttttggcgttgccccatcgagcatacgccatggacggggaggtggccgcgtcgtgcggaggcgtcgt

SEQ ID NO: 124067 - DNA, 80 bp, synthetic construct
  source 1..80: mol_type = other DNA
aactatgctacctgtgagccccgtccaaggacgttaaaagaagtcaggccattataaaaatgccacagcttgagcaaact

SEQ ID NO: 124068 - DNA, 80 bp, synthetic construct
  source 1..80: mol_type = other DNA
tgtatgtgttgaatgaggtgcacctgacgaccgcgcaccaaaaagcgcatgggaaaatggatgccacttcttggcagttg

SEQ ID NO: 124069 - DNA, 80 bp, synthetic construct
  source 1..80: mol_type = other DNA
ggttgaagatccaaaattctgggaaatggtggatgaagagcgtgaggcgcacttacgcggagaatgtcatacttgcattt

SEQ ID NO: 124070 - DNA, 80 bp, synthetic construct
  source 1..80: mol_type = other DNA
gtacctgctggcccttgtcggacccatgtggctcctgcaagccggactggtcagagtgccgtactttgtgcgcgcgcatg

SEQ ID NO: 124071 - DNA, 80 bp, synthetic construct
  source 1..80: mol_type = other DNA
ttatatctataaccacctaacaccaatggtggactgggcccacaatggcttgcgagatcttgctgtggctgtggagcctg

SEQ ID NO: 124072 - DNA, 80 bp, synthetic construct
  source 1..80: mol_type = other DNA
gccaggacaaacttgcgggtgcggtcaaagatcagcagcgggcacgcgtttttgccgcccagcaggctggcccagttccc

SEQ ID NO: 124073 - DNA, 80 bp, synthetic construct
  source 1..80: mol_type = other DNA
gccacctggacggcgagaagaacgtcacatggaccctgttcgaccgggacaccagcatgtcgctcgccgactttcacggg

SEQ ID NO: 124074 - DNA, 80 bp, synthetic construct
  source 1..80: mol_type = other DNA
ggcattgccatcttgcttaccgtcataacattgtccccatattacaagttgtggctggctaggggagtgtggtggcttca

SEQ ID NO: 124075 - DNA, 80 bp, synthetic construct
  source 1..80: mol_type = other DNA
gccaacacccctgctatacagactgggcgctgttcagaatgaagtcaccctgacgcacccaatcaccaaatacatcatga

SEQ ID NO: 124076 - DNA, 80 bp, synthetic construct
  source 1..80: mol_type = other DNA
gtatgtgcagatggcactgcttgcccttggtaggtggctcggcatatacatctacgaccacctcacccccatgtcggact

SEQ ID NO: 124077 - DNA, 80 bp, synthetic construct
  source 1..80: mol_type = other DNA
acatggaacaattgcaactataacacctcaagctcctacgtcggaaatacagctgaccgactacggagcccttacattgg

SEQ ID NO: 124078 - DNA, 80 bp, synthetic construct
  source 1..80: mol_type = other DNA
atgatttgttgcgtaggaactccgcgcaaggagctgagtgtgtccatatccaccggatcagaaaatttttcaaggaaggc

SEQ ID NO: 124079 - DNA, 80 bp, synthetic construct
  source 1..80: mol_type = other DNA
agtcgttcgtctgcgtgagctctactacttagtattgtttttggaggatcgtgagattaacacagtgccggcagtttctt

SEQ ID NO: 124080 - DNA, 80 bp, synthetic construct
  source 1..80: mol_type = other DNA
agctggggtttgaggtcactaagatcctactagctatcctagctcctctatacatcttgcagtacagtttgctcaaagtg

SEQ ID NO: 124081 - DNA, 80 bp, synthetic construct
  source 1..80: mol_type = other DNA
ctacggagcctgctactccattcagccattagatctacctcaaatcattgaaagactccatggcattggcgcgttctcac

SEQ ID NO: 124082 - DNA, 80 bp, synthetic construct
  source 1..80: mol_type = other DNA
gttagagcagtcgaggatgggatcaactatgcaacagggaatttacccggttgctctttctctatcttcctcttggcact

SEQ ID NO: 124083 - DNA, 80 bp, synthetic construct
  source 1..80: mol_type = other DNA
agtctgtctgcggtccggtctactgttttactccatcgccagtagtggttggcaccaccgacaagcgcggcgtgccgact

SEQ ID NO: 124084 - DNA, 80 bp, synthetic construct
  source 1..80: mol_type = other DNA
ttacttgaacaacttttaacattagcagtctggtacgacgagcgcaacagcgcatgcgtatctcacttaagtctttacaa

SEQ ID NO: 124085 - DNA, 80 bp, synthetic construct
  source 1..80: mol_type = other DNA
ctcgaccccgcgtcagaaccgcgcgcgtccctgactcaaacacgtgcaccacctgtgccgcgtccggcagcgcgctcgtt

SEQ ID NO: 124086 - DNA, 80 bp, synthetic construct
  source 1..80: mol_type = other DNA
cgggggccctatgtttaacagcaagggggcccaatgtggttatcgccgttgccgtgccagtggagttctgcctactagct

SEQ ID NO: 124087 - DNA, 80 bp, synthetic construct
  source 1..80: mol_type = other DNA
cgtcacttctgcctggccgaagattgagcaattctggcacaagcacatgtggaacttcatcagcggaatacagtatctgg

SEQ ID NO: 124088 - DNA, 80 bp, synthetic construct
  source 1..80: mol_type = other DNA
ttatcatatgcgatgagtgtcactccacggacgcaacaacggtcctaggaattggcaccgtcttggatcaggctgagacg

SEQ ID NO: 124089 - DNA, 80 bp, synthetic construct
  source 1..80: mol_type = other DNA
ccaccagaccgtggtcccgggcgtcgggacgctccacgactgctgcgagcactcgccgctcttctcggccgtggcgcggc

SEQ ID NO: 124090 - DNA, 80 bp, synthetic construct
  source 1..80: mol_type = other DNA
cataggagttccacttctcgccttagggtgctattcccaggtgaacccattgacactgacggcggcggtgttgatgttag

SEQ ID NO: 124091 - DNA, 80 bp, synthetic construct
  source 1..80: mol_type = other DNA
accgatgccagtgactgtggccagtgccgcccagaggagaggaagaattggaaggaaccacaataaggaaggtgatcagt

SEQ ID NO: 124092 - DNA, 80 bp, synthetic construct
  source 1..80: mol_type = other DNA
tacggatatcttttacctggttggcaagcagaggctttgagggctgcacagaagcgcacagccgctggtatcatgaaaaa

SEQ ID NO: 124093 - DNA, 80 bp, synthetic construct
  source 1..80: mol_type = other DNA
gcgctcttactgcgcttttgcgtattagtgtattatggcgaaaggaagagtggcgggatggtttaaatggaaccgcagct

SEQ ID NO: 124094 - DNA, 80 bp, synthetic construct
  source 1..80: mol_type = other DNA
acgttccacccttggtagtgcgtgggccacgggattctatcatcatccttatggctatcatccacccccaactagtcttt

SEQ ID NO: 124095 - DNA, 80 bp, synthetic construct
  source 1..80: mol_type = other DNA
tacaccaccgggggggttgcggcccacacagcaagcgggttcacaagtttgtttaaagcagggtcgcggcagaacatcca

SEQ ID NO: 124096 - DNA, 80 bp, synthetic construct
  source 1..80: mol_type = other DNA
tgcacggctaatcgtgtacccagacctaggggttcgggtgtgcgagaagagggccctcttcgacatcactcgcaaattgc

SEQ ID NO: 124097 - DNA, 80 bp, synthetic construct
  source 1..80: mol_type = other DNA
aagttgcccgtggccattatgggagccgcttacggtttccagtactcacctaatcagagagtggaatatctcctcaaggt

SEQ ID NO: 124098 - DNA, 80 bp, synthetic construct
  source 1..80: mol_type = other DNA
tgatgcggactacatgggccttgtgcgaatccatcacactagccactggacctctgaccacgctttgggagggatctcca

SEQ ID NO: 124099 - DNA, 80 bp, synthetic construct
  source 1..80: mol_type = other DNA
gggcaggcctttacattcaggcctcgtcgtcatacgactgtccagacctgcaactgctcgttgtacccaggccatatcac

SEQ ID NO: 124100 - DNA, 80 bp, synthetic construct
  source 1..80: mol_type = other DNA
tttcccggtgccgggattccgaggaagaatgcaccgtaggagaggcatggccggccacggcctgacgggcggcatgcgtc

SEQ ID NO: 124101 - DNA, 80 bp, synthetic construct
  source 1..80: mol_type = other DNA
aattccatcaactactgtggcaatcgtggtgggagtgattgcgggcttcgtaactctgatcattgtctttatctgctaca

SEQ ID NO: 124102 - DNA, 80 bp, synthetic construct
  source 1..80: mol_type = other DNA
gatcaattacgcaacagggaatttgcctggttgctctttctctatctttctcttggctcttctatcatgcatctctatac

SEQ ID NO: 124103 - DNA, 80 bp, synthetic construct
  source 1..80: mol_type = other DNA
tatgttgctcataggccaggcggaagcggctctcgagaacctcatagtcctcaatgctgcttccgccgccagcatgcagg

SEQ ID NO: 124104 - DNA, 80 bp, synthetic construct
  source 1..80: mol_type = other DNA
gcgatgagctcgcagcggcccttcggggcctgggtgtcaatgccgttgcctactacaggggtctcgacgtctccgttata

SEQ ID NO: 124105 - DNA, 80 bp, synthetic construct
  source 1..80: mol_type = other DNA
gcgcaggggtcgcactggcaggggaaggttgggaatctatcggtatgtcaccccaggagaacggccatccggtatgtttg

SEQ ID NO: 124106 - DNA, 80 bp, synthetic construct
  source 1..80: mol_type = other DNA
gtttgatgcggcctgcaattggactcggggcgaacggtgtgagcttgatgatagggatagggtcgagatgagccctcttc

SEQ ID NO: 124107 - DNA, 80 bp, synthetic construct
  source 1..80: mol_type = other DNA
gatacgctcgacgtgtactgttcgcactcgtcgtccccaatgggacgcccggcccccagaggatcccccgactccgcgcc

SEQ ID NO: 124108 - DNA, 80 bp, synthetic construct
  source 1..80: mol_type = other DNA
atagctcagttacattttctatgccatctcgatccagcaaacttcctcgttgcgggggtttggctggctgttgctgtaag

SEQ ID NO: 124109 - DNA, 80 bp, synthetic construct
  source 1..80: mol_type = other DNA
gctgcttgttgttgggttggtggctgcaaatgaatatgggatgttggaaaggacaaaaactgacataagaaacctatttg

SEQ ID NO: 124110 - DNA, 80 bp, synthetic construct
  source 1..80: mol_type = other DNA
tcttggagtcatgacagcaggatttttcttggtgatgatgcagagaaaaggaataggcaagcttggattgggaacactgg

SEQ ID NO: 124111 - DNA, 80 bp, synthetic construct
  source 1..80: mol_type = other DNA
ctggtggacatccttgcagggtatggtgcaggcgtggcgggagctctcgtggcatttaagatcatgagcggcgaggttcc

SEQ ID NO: 124112 - DNA, 80 bp, synthetic construct
  source 1..80: mol_type = other DNA
ctagctgaacttgccaagaagaccttcagcccctccactcaggataccgattctggagcgggcctcacctccccaactga

SEQ ID NO: 124113 - DNA, 80 bp, synthetic construct
  source 1..80: mol_type = other DNA
tcgctgaatacgacgatagggagatctccgtgccggccgaatgccacagaccacctaggccgaagtacccacctgcgctg

SEQ ID NO: 124114 - DNA, 80 bp, synthetic construct
  source 1..80: mol_type = other DNA
tgccaggaacaagaagggtcatggggatcacagcggagtggctctggagaaccttgggaaggaacaaaaaacccaggtta

SEQ ID NO: 124115 - DNA, 80 bp, synthetic construct
  source 1..80: mol_type = other DNA
ctgaaacgcacactttgtggggtgaaggaatcctcgagagtgacttgataataccagtcacactggcgggaccacgaagc

SEQ ID NO: 124116 - DNA, 80 bp, synthetic construct
  source 1..80: mol_type = other DNA
aagacgccacgttggccctgctgagggtgctaaccagtggatgaacaggctaatagcctttgcatcaagaggcaaccacg

SEQ ID NO: 124117 - DNA, 80 bp, synthetic construct
  source 1..80: mol_type = other DNA
tgcgagaagaaggcgctttatgacgctctccaaaaacttcccagtgctgtgatgggagccgcttacggcttccaatactc

SEQ ID NO: 124118 - DNA, 80 bp, synthetic construct
  source 1..80: mol_type = other DNA
ccaggtgaaggctgagctcctctcaactgaggacgcttgtgatctcacccccccacactcggctcgttccaagtttgggt

SEQ ID NO: 124119 - DNA, 80 bp, synthetic construct
  source 1..80: mol_type = other DNA
gtccgacctggtctactcaggacagggaggccaagaacgtggcgacaggccttttgaggtcaaggatggagtttacagaa

SEQ ID NO: 124120 - DNA, 80 bp, synthetic construct
  source 1..80: mol_type = other DNA
tatccgccgtggaggtcaagaacaccagtcagacctacatggccaccaatgattgctccaacagcagcatcacgtggcaa

SEQ ID NO: 124121 - DNA, 80 bp, synthetic construct
  source 1..80: mol_type = other DNA
gctaatgtgagcgggagctcggaagataagccctactgctggcactacccgccaagaccatgtggggtagtgccggcctc

SEQ ID NO: 124122 - DNA, 80 bp, synthetic construct
  source 1..80: mol_type = other DNA
gggccgcagcagcacgtgaaggctggggtcgcagtcgcccacggggtcctcggtgacgtccaggccgctgggcaccaccg

SEQ ID NO: 124123 - DNA, 80 bp, synthetic construct
  source 1..80: mol_type = other DNA
cgaggtccgaagactcatttggatccggcgggagccacctgacaacagcccccgggtttccccacgccagacgccggtcc

SEQ ID NO: 124124 - DNA, 80 bp, synthetic construct
  source 1..80: mol_type = other DNA
gtctcaattgccatgtgagccagagcccgacgtgacagtcctaacatcacttctaactgatccatctcacataaccgctg

SEQ ID NO: 124125 - DNA, 80 bp, synthetic construct
  source 1..80: mol_type = other DNA
tgagtccaggaagaccttcgtggaactcatgaggaggggtgacctcccagtttggctagcccataaagtagcctcagaag

SEQ ID NO: 124126 - DNA, 80 bp, synthetic construct
  source 1..80: mol_type = other DNA
gaaaacatccattggcttgctctgtgtgacggcctcaagcgcactgttatggatggccagtgtagagccccattggatag

SEQ ID NO: 124127 - DNA, 80 bp, synthetic construct
  source 1..80: mol_type = other DNA
catcccaataacacctacgcctccgtggaggatgtgctgcgcgaatgtcactggacccccccgagtcgctctcagacccg

SEQ ID NO: 124128 - DNA, 80 bp, synthetic construct
  source 1..80: mol_type = other DNA
ctatataggcttgggccggtacaaaatgacatcattactacgcaccccataaccaaatacatcatgacctgcatgtcagc

SEQ ID NO: 124129 - DNA, 80 bp, synthetic construct
  source 1..80: mol_type = other DNA
agcgcttctttgctaaccctcaaacactgcgcaaagtcgaggagtccctgcactatgccttccgtcatggctacgttcgt

SEQ ID NO: 124130 - DNA, 80 bp, synthetic construct
  source 1..80: mol_type = other DNA
tccggcccccaactacaagtttgccttgtggagggtaggcgctgcggactacgccgaggtgcgccgcgtggtggactacc

SEQ ID NO: 124131 - DNA, 80 bp, synthetic construct
  source 1..80: mol_type = other DNA
acatgcagggcaccctccccttctcctaccgcgtcaggaggggcgacatccgcggctgacgcggcggcagatggtgatta

SEQ ID NO: 124132 - DNA, 80 bp, synthetic construct
  source 1..80: mol_type = other DNA
ttgatgagattaactacaaggattacaaggccgttgctgtgcccttgcagcacaacaactcgggcttcaccggctacctc

SEQ ID NO: 124133 - DNA, 80 bp, synthetic construct
  source 1..80: mol_type = other DNA
acggggcgaaagaggtccgaggccttgccagcaaagccgtcaaccacatcaactccgtgtgggaggacttgctggaagac

SEQ ID NO: 124134 - DNA, 80 bp, synthetic construct
  source 1..80: mol_type = other DNA
cgcaaagacatccaggaatggaaaccctcgacagggtggtatgactggcagcaggtcccattctgttcaaaccatttcac

SEQ ID NO: 124135 - DNA, 80 bp, synthetic construct
  source 1..80: mol_type = other DNA
gtgcaccacggcagcacgccagtgagagtggcgacgggagaatggtcgatcccgacgtggggcactctgcaaaatttgcg

SEQ ID NO: 124136 - DNA, 80 bp, synthetic construct
  source 1..80: mol_type = other DNA
gtgtcaactgtttcacagttggcgaagagattctcaaaaggattgctttcaggccaaggacccatgaaattggtgatggc

SEQ ID NO: 124137 - DNA, 80 bp, synthetic construct
  source 1..80: mol_type = other DNA
cttatccataacatggacactcataaagaacatggaaaaaccaggactaaaaagaggtggggcaaagggacgcaccttgg

SEQ ID NO: 124138 - DNA, 80 bp, synthetic construct
  source 1..80: mol_type = other DNA
agggtcccgtcatccagatgtacaccaatgtggacaaggaccttgtgggctggcccgccccgcaaggtacccgctcattg

SEQ ID NO: 124139 - DNA, 80 bp, synthetic construct
  source 1..80: mol_type = other DNA
cggccgatggtatggtctccaagggatggaggctcttggcgcccatcaccgcctacgcccaacaaacacgaggcctgctg

SEQ ID NO: 124140 - DNA, 80 bp, synthetic construct
  source 1..80: mol_type = other DNA
gagatggctctcacttgccgcctgcgcattcccgtcccgaattaccgaggaagatcccgccgcaggagaggcatggcagg

SEQ ID NO: 124141 - DNA, 80 bp, synthetic construct
  source 1..80: mol_type = other DNA
gtgagtgctacgacgcaggagctgcgtggtatgagctcacaccatcagagactaccgtcaggcttagagcgtacttcaac

SEQ ID NO: 124142 - DNA, 80 bp, synthetic construct
  source 1..80: mol_type = other DNA
ctcaagggtacaatgtcctagtgttgaatccatcggtcgcagctaccctgggatttggagcctatatgtccaaagcacat

SEQ ID NO: 124143 - DNA, 80 bp, synthetic construct
  source 1..80: mol_type = other DNA
ggatctcagtattgtggttgagaagcaagaggggatgtacaaagccgctcccaagagactgaaagcaacgacagagaagc

SEQ ID NO: 124144 - DNA, 80 bp, synthetic construct
  source 1..80: mol_type = other DNA
agattttcttgcacgtgtgtgcggacactttagtcagtgtccgcggcgttcctttgaacgtgagtgtgttgaggaaaaga

SEQ ID NO: 124145 - DNA, 80 bp, synthetic construct
  source 1..80: mol_type = other DNA
gtggctcacttgcatgcgccgacagggagcggcaagagcaccaaggtccccgccgcgtacgcggctcagggttacaaagt

SEQ ID NO: 124146 - DNA, 80 bp, synthetic construct
  source 1..80: mol_type = other DNA
actccgtgtgggaggacttgctggaagacaacaataccccaataccaacaacaatcatggccaaaaatgaggttttcgct

SEQ ID NO: 124147 - DNA, 80 bp, synthetic construct
  source 1..80: mol_type = other DNA
gaccagattacaatccacctctcactgagacgtggaagcaacaggactacgagcctccgaccgtccacgggtgtgctctg

SEQ ID NO: 124148 - DNA, 80 bp, synthetic construct
  source 1..80: mol_type = other DNA
gcgtcccggcggacatgctgggcctaccgtggactccatttccgagacgacgtgggtggagcggtggttgagcgcgccgc

SEQ ID NO: 124149 - DNA, 80 bp, synthetic construct
  source 1..80: mol_type = other DNA
acctgcttgaacacctggcagggggcatttcccatcaactgttacacggagggctcatgcgtgcctaaacccgctcccaa

SEQ ID NO: 124150 - DNA, 80 bp, synthetic construct
  source 1..80: mol_type = other DNA
ctcttacttgaaaggttcctcagggggcccactgttgtgccccgcgggacacgccgtaggcatattcagggctgcggtgt

SEQ ID NO: 124151 - DNA, 80 bp, synthetic construct
  source 1..80: mol_type = other DNA
tcgccgcctactgcttgacagtgggcagcgtagtcatctgcgggaggatcaccacctcaggaaaacctgccgttgtgcca

SEQ ID NO: 124152 - DNA, 80 bp, synthetic construct
  source 1..80: mol_type = other DNA
tcatcgtcggcaccgctctcatctcccggggcgcctgcgcgatcacataccccctgtttctaacaatcaccacctggtgt

SEQ ID NO: 124153 - DNA, 80 bp, synthetic construct
  source 1..80: mol_type = other DNA
acggctaaagcctacgctgcacgggccaacacccctgctgtacaggctaggagccgtccaaaatgaggtcatcctcacac

SEQ ID NO: 124154 - DNA, 80 bp, synthetic construct
  source 1..80: mol_type = other DNA
cacaatttgatgatcacagttgatgatgatggaacaatgagaataaaggatgatgagactgagaacatcctaacagtgct

SEQ ID NO: 124155 - DNA, 80 bp, synthetic construct
  source 1..80: mol_type = other DNA
gggcttctcaaggcctgcgtgaccttgccatcgccgtggagcccataactttcagcccgatggagaggaaaatcatcgtg

SEQ ID NO: 124156 - DNA, 80 bp, synthetic construct
  source 1..80: mol_type = other DNA
atctatgcggcgataaaccaggttagagctgtcattgggaaagaaaattatgttgactacatgacctcactcaggagata

SEQ ID NO: 124157 - DNA, 80 bp, synthetic construct
  source 1..80: mol_type = other DNA
ctcttttatattagagcgttctggaatgcttcctagcatgtgttgtgcacttccttcagattttgtgcctatatatttta

SEQ ID NO: 124158 - DNA, 80 bp, synthetic construct
  source 1..80: mol_type = other DNA
tggaaaattggttgaacaataacacccaattttgcataaaggttctcaacccatatatgccctcagtcatagaaaaaatg

SEQ ID NO: 124159 - DNA, 80 bp, synthetic construct
  source 1..80: mol_type = other DNA
ggatgtgtgtgggccagtttactgcttcacacctagtcccgtggttgttggcactactgacagaaagggcaaccccacat

SEQ ID NO: 124160 - DNA, 80 bp, synthetic construct
  source 1..80: mol_type = other DNA
cacgagatgcacgcatcttgagaacagagatttcgtgacaggaactcaagggaccactagagtgtccctagtcttggaac

SEQ ID NO: 124161 - DNA, 80 bp, synthetic construct
  source 1..80: mol_type = other DNA
ttttttttttccctctttcttcccttctcatcttattctactttctttcttggtggctccatcttagccctagtcacggc

SEQ ID NO: 124162 - DNA, 80 bp, synthetic construct
  source 1..80: mol_type = other DNA
gtgttccaacaaccagttacaaatcaataattccaaatggagacaatgcacctaattggaaggaacctgaagtaaatgga

SEQ ID NO: 124163 - DNA, 80 bp, synthetic construct
  source 1..80: mol_type = other DNA
gtcttctgttcaaaacagaggatggtgtgaacatgtgcaccctcatggctatggaccttggtgaattgtgtgaagacaca

SEQ ID NO: 124164 - DNA, 80 bp, synthetic construct
  source 1..80: mol_type = other DNA
aaataccaacgggagctggcatatcaatagtactgcccttaactgtaatgacagcctccagaccgggtttatagccggcc

SEQ ID NO: 124165 - DNA, 80 bp, synthetic construct
  source 1..80: mol_type = other DNA
taccattaactgcaccaactcggtgtatccaaacaaagttcagtttaataatgtcactcgattctactatggatacgcca

SEQ ID NO: 124166 - DNA, 80 bp, synthetic construct
  source 1..80: mol_type = other DNA
agctatcagctccttcactcaaagcaacctgcaccgtccacgctgacgatccggatgccgaattgatcagcgcaaacctt

SEQ ID NO: 124167 - DNA, 80 bp, synthetic construct
  source 1..80: mol_type = other DNA
atgatgatgcttatggcccaggctgaagccgctctggagaacttgatccacctcaacgcggccagccttgcgggaaccca

SEQ ID NO: 124168 - DNA, 80 bp, synthetic construct
  source 1..80: mol_type = other DNA
tgcagtaccaccaccactgcgtcgcggccgcatcctgacaacgacacggcctccgacgccggatcctgcagttcgatgcc

SEQ ID NO: 124169 - DNA, 80 bp, synthetic construct
  source 1..80: mol_type = other DNA
acaaggttgcagcagcagggatctcctaccatgacagaaagtggtgttttgatggcccaaaagtcaacacagttctggaa

SEQ ID NO: 124170 - DNA, 80 bp, synthetic construct
  source 1..80: mol_type = other DNA
aagccttcggccccctactggaggatggtttgggtgcacgtggatgaactctacgggcttcaccaagacctgtggtgccc

SEQ ID NO: 124171 - DNA, 80 bp, synthetic construct
  source 1..80: mol_type = other DNA
gtttctacaaaaagagacccttcccaacaattctgtttctttttccaccctgtcctactgctgttctccctctggttact

SEQ ID NO: 124172 - DNA, 80 bp, synthetic construct
  source 1..80: mol_type = other DNA
ataagctacagcttgtcctagctcctccatttgaggtaaaagacggaaaactttcattaaaaacaggcaatggattaaaa

SEQ ID NO: 124173 - DNA, 80 bp, synthetic construct
  source 1..80: mol_type = other DNA
ggtcgccgtgttagggtgcgtggtccccactgactcatacacaggacccccttagtcacacgcatctagggtggtgtgga

SEQ ID NO: 124174 - DNA, 80 bp, synthetic construct
  source 1..80: mol_type = other DNA
aagaaccaacgcatccccctatcatgtcgtgccaaccgcacccaaggagaccgcattttgcatctcaaagccggcgctca

SEQ ID NO: 124175 - DNA, 80 bp, synthetic construct
  source 1..80: mol_type = other DNA
ttggaggtccaccgctaggtctcgcgcggcggtcaccagaggcttatctccgccgaacttcatgaccagcatgaagggca

SEQ ID NO: 124176 - DNA, 80 bp, synthetic construct
  source 1..80: mol_type = other DNA
ggtgggaggggggctcactgtggaacaagatagtggaaagttaattgtgaatcctaaggctcccttgcaagttgcaaatg

SEQ ID NO: 124177 - DNA, 80 bp, synthetic construct
  source 1..80: mol_type = other DNA
tacctcctctttgccctgctaacctgcacctgcgtctgcagcattgtctgcctggtcatcaccttcctgcagctcatcga

SEQ ID NO: 124178 - DNA, 80 bp, synthetic construct
  source 1..80: mol_type = other DNA
tatccttggcccctctacggaaatgagggttgcggctgggcaggttggctcctgtccccccgcgggtctcgtcctagttg

SEQ ID NO: 124179 - DNA, 80 bp, synthetic construct
  source 1..80: mol_type = other DNA
ttggactttgtgccggtggagagtatgcaaactacccagcggtctccgtccttcactgataattcatcaccacctgctgt

SEQ ID NO: 124180 - DNA, 80 bp, synthetic construct
  source 1..80: mol_type = other DNA
gaactagcaagaaaaggagctggccactaaatgaggctattatggcagtcgggatggtgagcattttggccagttctttc

SEQ ID NO: 124181 - DNA, 80 bp, synthetic construct
  source 1..80: mol_type = other DNA
gggtggatggagcacagatttaatgcagcctgcaactggacccgcggggatcgatgcgagctcgacgacagagatagggt

SEQ ID NO: 124182 - DNA, 80 bp, synthetic construct
  source 1..80: mol_type = other DNA
ttgtgccaaggttatcctggtcttgtttctctttgctggagtcgacgctgagactgtagtctccgggggtcgtgcgggac

SEQ ID NO: 124183 - DNA, 80 bp, synthetic construct
  source 1..80: mol_type = other DNA
agctgtctccagtgctgtgctactgcggaccgcttggggatggggggaggctggggctctgatcacagcagcaaccttca

SEQ ID NO: 124184 - DNA, 80 bp, synthetic construct
  source 1..80: mol_type = other DNA
ggcgtagtggaggaagacctgcttattctcggggagcttcgctttgtgggggaccaggtcccccacaccacctactacga

SEQ ID NO: 124185 - DNA, 80 bp, synthetic construct
  source 1..80: mol_type = other DNA
tcgagggcgcggcggacggcagcgcggctccggacccggccgtcccccgggtccccgaggccagagaggtgccgcgtcgg

SEQ ID NO: 124186 - DNA, 80 bp, synthetic construct
  source 1..80: mol_type = other DNA
ggctgtgcctactagcaaagcacctggtttatggcaagtacgtgcaggcggccttgctccaccttggtaggctgaccgga

SEQ ID NO: 124187 - DNA, 80 bp, synthetic construct
  source 1..80: mol_type = other DNA
acagccgctcgggcttttcccccacatacaacatgatcgtatgcctcggatgcaccggtccaacactccgccgagaaggg

SEQ ID NO: 124188 - DNA, 80 bp, synthetic construct
  source 1..80: mol_type = other DNA
cccccactctcgcggcgcgggacctaagcttctccaccaaggacatcagacaccatgtcgacctgctggtggggactgct

SEQ ID NO: 124189 - DNA, 80 bp, synthetic construct
  source 1..80: mol_type = other DNA
acttggcgatccatagcgatctatcctactggattgaaagcaggtttaatgacacgtggaagctcgaaagggcggtccta

SEQ ID NO: 124190 - DNA, 80 bp, synthetic construct
  source 1..80: mol_type = other DNA
tcatcccgaccagtggcgatgtcgtcgttgtggcaactgatgctctcatgaccggctacaccggcgacttcgactcggtg

SEQ ID NO: 124191 - DNA, 80 bp, synthetic construct
  source 1..80: mol_type = other DNA
tcatccccgcgaggcgtaggggtgacacccgcgctggcctgcttagcccgaggcccctgagcacgctcaaagggtcatca

SEQ ID NO: 124192 - DNA, 80 bp, synthetic construct
  source 1..80: mol_type = other DNA
cgtcgtgtgttgttccatgtcttacagctggacaggagcccttgtcacaccatgcgcagccgaagaggagaagctgccta

SEQ ID NO: 124193 - DNA, 80 bp, synthetic construct
  source 1..80: mol_type = other DNA
ccctggacgtgtgcacctgcggagcctccgacttgtacctcgtcacgcggaatgcagaagtcatcccagtccggcggcgt

SEQ ID NO: 124194 - DNA, 80 bp, synthetic construct
  source 1..80: mol_type = other DNA
ggacccatcccacattacggcagaggcagcggctaggcgcttagcgcgaggctcgcctccatccgaggccagctcttctg

SEQ ID NO: 124195 - DNA, 80 bp, synthetic construct
  source 1..80: mol_type = other DNA
acccagaagctacttacaccaagtgtgggtcggggccctggctgaccccccgctgcttagttgactatccttataggctg

SEQ ID NO: 124196 - DNA, 80 bp, synthetic construct
  source 1..80: mol_type = other DNA
aagggaaaaggcagtgtgaagaagaacttaccatttgtcatggccctgggactaaccgctgtgaggctggtcgaccccat

SEQ ID NO: 124197 - DNA, 80 bp, synthetic construct
  source 1..80: mol_type = other DNA
tatgaaggggacggctctccatgtaagatcccttttgagataatggatttggaaaaaagacacgtcttaggtcgcctgat

SEQ ID NO: 124198 - DNA, 80 bp, synthetic construct
  source 1..80: mol_type = other DNA
gaccctgcgtggcctctttttctccgtctacgcattggggtttgcggcggtggtgctggtgcggccgcggatggcggcga

SEQ ID NO: 124199 - DNA, 80 bp, synthetic construct
  source 1..80: mol_type = other DNA
agtgtgattgggtctccttatgaaaatgccgttccttttatgcctaactccacagcttatcctaaaatcatcaataatgg

SEQ ID NO: 124200 - DNA, 80 bp, synthetic construct
  source 1..80: mol_type = other DNA
aatggaaagccaggaatccagacgctgctgctgttttcaaggtgttggccccgtacagaccagaagtgctcgaggcccta

SEQ ID NO: 124201 - DNA, 80 bp, synthetic construct
  source 1..80: mol_type = other DNA
tgccaccggcggaattaatataacaaaccagggtctgttactaggaactgacgaaaccgctgagaatggcaaaaaagaca

SEQ ID NO: 124202 - DNA, 80 bp, synthetic construct
  source 1..80: mol_type = other DNA
gtgccgccccaggagcccggcctcgtcgatgacgataatgttgctgcgggtgaaagccggcagcgccccgtgtgtgaccg

SEQ ID NO: 124203 - DNA, 80 bp, synthetic construct
  source 1..80: mol_type = other DNA
gtgggacatgatgatgaactggtctcctacggttaccctcattatttccagcatattgagagtaccgcagactctgattg

SEQ ID NO: 124204 - DNA, 80 bp, synthetic construct
  source 1..80: mol_type = other DNA
cccaatcaatgctggattcgagccattgacattggatttatgtgtgatgacaccatcacttatgaatgcccgaaattgga

SEQ ID NO: 124205 - DNA, 80 bp, synthetic construct
  source 1..80: mol_type = other DNA
ctctcgcagactaagcagggaggagagaacttcgcatatctcgtagcttaccaagcaacggtttgcgcgagagcgaaagc

SEQ ID NO: 124206 - DNA, 80 bp, synthetic construct
  source 1..80: mol_type = other DNA
cgtcgaccgtgagcgcgagactcctcagcgtggaggaagcttgcgacctcacgccagctcactcggcacgttccaaattc

SEQ ID NO: 124207 - DNA, 80 bp, synthetic construct
  source 1..80: mol_type = other DNA
tttagctgcgtactgcttgtccgtgggttctgtcgtcatcgtgggccgtattgagttgggaaaccggcccgctgtaatac

SEQ ID NO: 124208 - DNA, 80 bp, synthetic construct
  source 1..80: mol_type = other DNA
gggcccattgacagatgctaacatttctggcccctctgaagacaagccgtactgctggcactacgcacctagaccttgcg

SEQ ID NO: 124209 - DNA, 80 bp, synthetic construct
  source 1..80: mol_type = other DNA
taaacctgcccggctcatcgtataccctgacctgggagtaagggtgtgcgagaagcgggcactttacgacgtcacgcgca

SEQ ID NO: 124210 - DNA, 80 bp, synthetic construct
  source 1..80: mol_type = other DNA
ggatctatttcccttatgtgcttggccttagggggagtgttgatcttcttatccacagccgtctctgctgatgtgtggtg

SEQ ID NO: 124211 - DNA, 80 bp, synthetic construct
  source 1..80: mol_type = other DNA
gctacgactgaatcccaatggtgcgtccgtgactgtgtggctgcaacatctacatcggcgccgtaatccttgctactttg

SEQ ID NO: 124212 - DNA, 80 bp, synthetic construct
  source 1..80: mol_type = other DNA
cccagaaaaagtttctttgcgatcgcaccctttggcgcatcccattctccagtaactttatgtccatgggcgcactcaca

SEQ ID NO: 124213 - DNA, 80 bp, synthetic construct
  source 1..80: mol_type = other DNA
ccccaaaagactgtcagcagccattggaaaggcatgggaggagggcgtatgtgggattcgatcagccacgcgtcttgaga

SEQ ID NO: 124214 - DNA, 80 bp, synthetic construct
  source 1..80: mol_type = other DNA
tgacaccgtcgtcctgtgcgaggcgtacgatacaggttgtgcgtggtatgaactgaccccagcggaaacaaccgtcaggt

SEQ ID NO: 124215 - DNA, 80 bp, synthetic construct
  source 1..80: mol_type = other DNA
tgttatgcgtggaagctggatagcgggagcttcaatagcctggactctcataaaaaatgcagaaaaaccagcgttcaaaa

SEQ ID NO: 124216 - DNA, 80 bp, synthetic construct
  source 1..80: mol_type = other DNA
caaacggaaacggtaatcctcaaaactggaccaaaaatgacgattttgcggcacgtaatgaaataggtgtgggaaacaac

SEQ ID NO: 124217 - DNA, 80 bp, synthetic construct
  source 1..80: mol_type = other DNA
cctggcccctatctccacctgggccagcgatggcctgcgcgacctcactgtcgccgtggaaccgatcaccttttcgccta

SEQ ID NO: 124218 - DNA, 80 bp, synthetic construct
  source 1..80: mol_type = other DNA
ggaggggccggactggtaggggaaagccggtggtgtacaggtttgtctcgcaagaggaacggccgtctggcatgttcgac

SEQ ID NO: 124219 - DNA, 80 bp, synthetic construct
  source 1..80: mol_type = other DNA
ctccacggtgcctggttgactatccctataggctgtggcactacccttgcactcagaattacaccattcacaaggtccgt

SEQ ID NO: 124220 - DNA, 80 bp, synthetic construct
  source 1..80: mol_type = other DNA
atgaccagcacgtgggtcctagctggaggagtcctggcagccgtcgccgcatattgcctggcgactggatgcgtttccat

SEQ ID NO: 124221 - DNA, 80 bp, synthetic construct
  source 1..80: mol_type = other DNA
gctggcatctcgggggctcttgtcgcctttaagatcatgtccggcgagaagccctcagttgaggacatcgtcaacctgct

SEQ ID NO: 124222 - DNA, 80 bp, synthetic construct
  source 1..80: mol_type = other DNA
tgggccttctggtagtgttcttggccacccaggaggtccttcgcaagaggtggacggccaagatcagcgttccagcgata

SEQ ID NO: 124223 - DNA, 80 bp, synthetic construct
  source 1..80: mol_type = other DNA
agccataaaggcgccaacaaaccgaggatcttgggtgctgacgccctcccggtgcagctgcagggtctggtccttgtaaa

SEQ ID NO: 124224 - DNA, 80 bp, synthetic construct
  source 1..80: mol_type = other DNA
tgttcccagcgtcaagcttggcaatgagatagctctctgcttgcagagggctggaaagagagttatccaactcaacagaa

SEQ ID NO: 124225 - DNA, 80 bp, synthetic construct
  source 1..80: mol_type = other DNA
aaaaccgccatctggagagtagcggcgacagaatacgcggaaataacacagcacggcccacacgcgtatgtgactggatt

SEQ ID NO: 124226 - DNA, 80 bp, synthetic construct
  source 1..80: mol_type = other DNA
accgattgaaggcaaagtggtgcagtatgaaaacctgaaatataccgtgattattaccgtgcataccggcgatcagcatc

SEQ ID NO: 124227 - DNA, 80 bp, synthetic construct
  source 1..80: mol_type = other DNA
gctctaaatgacatgggaaaggttaggaaagacatacaacaatgggaaccctcaagaggatggaacgattggacacaggt

SEQ ID NO: 124228 - DNA, 80 bp, synthetic construct
  source 1..80: mol_type = other DNA
tgtgtattgcttcacccctagccctgtggttcttgggactacggataggctggtggctcccacttacaccttcggggaaa

SEQ ID NO: 124229 - DNA, 80 bp, synthetic construct
  source 1..80: mol_type = other DNA
atgagcccgaggacgccccgatcgtccacacggagcgcggctgccgacacggatccacgacccgacgcgggaccgccaga

SEQ ID NO: 124230 - DNA, 80 bp, synthetic construct
  source 1..80: mol_type = other DNA
tcccgggcatgtcagtgtgttgctgcttgctcatccagcttcccatttttgcgtggaagatggcgtcaatgacgccaacc

SEQ ID NO: 124231 - DNA, 80 bp, synthetic construct
  source 1..80: mol_type = other DNA
cggagcagcgcacgatggacccccgacctgggctacatgcgccagtgtatcaatcagctgtttcgggtcctgcgggtcgc

SEQ ID NO: 124232 - DNA, 80 bp, synthetic construct
  source 1..80: mol_type = other DNA
taccaattacggcagcagcatggtacctgtgggaagtgaaaaaacaacgggctggagtgttgtgggacgtcccttcaccc

SEQ ID NO: 124233 - DNA, 80 bp, synthetic construct
  source 1..80: mol_type = other DNA
tagcctgggggcgaggtgctggaggaccgagtagaggatcgagaaaacgtctcggtcgtagaccacgaccgaccggtggc

SEQ ID NO: 124234 - DNA, 80 bp, synthetic construct
  source 1..80: mol_type = other DNA
tcaaatgggagtatgtcgtgttgctcttcctcctcctggcagacgcgcgtgtttgtgcgtgcttgtggatgatgctgctg

SEQ ID NO: 124235 - DNA, 80 bp, synthetic construct
  source 1..80: mol_type = other DNA
tcgggcgcttggcctctggttttgccgacggaccggccgtcccccgggatgtctcggaggccctgtcgtcgcgacgggcc

SEQ ID NO: 124236 - DNA, 80 bp, synthetic construct
  source 1..80: mol_type = other DNA
aaagttagaggacaagcaccccttataggaacaaacatagacaaagacaatgggattcagataggaacagacgcaacgaa

SEQ ID NO: 124237 - DNA, 80 bp, synthetic construct
  source 1..80: mol_type = other DNA
aaaggagtacaaaaagggggacacgaccaccggcgtctacaggatcatgactcgtgggctgctcggcagttatcaagcag

SEQ ID NO: 124238 - DNA, 80 bp, synthetic construct
  source 1..80: mol_type = other DNA
gtcggtgggcgtccagtggagcaagggtaatgtctttccagggtcgcagggttcgcgttaggttggtttcggtgacggta

SEQ ID NO: 124239 - DNA, 80 bp, synthetic construct
  source 1..80: mol_type = other DNA
cgccatcctcttcatctgcattgtctggcatgtcaagggccggttcccagctgctgctgcctacgcagcctgcgggctgt

SEQ ID NO: 124240 - DNA, 80 bp, synthetic construct
  source 1..80: mol_type = other DNA
ctcttgtggaggcaggaagtgggtggtgacatcacgagggtggagtctgagaacaaggtcatcgtgatcgactcctttga

SEQ ID NO: 124241 - DNA, 80 bp, synthetic construct
  source 1..80: mol_type = other DNA
catggagctaaaatattcatggaaaacatggggaaaggcaaaaatagtgacagctgaaacacaaaattcctctttcataa

SEQ ID NO: 124242 - DNA, 80 bp, synthetic construct
  source 1..80: mol_type = other DNA
cagggacgcacgggcttctctctttccttgtgttcttctgtgccgcgtggtacatcaaaggtaggctggtccccggaatg

SEQ ID NO: 124243 - DNA, 80 bp, synthetic construct
  source 1..80: mol_type = other DNA
gctgatgggggttgctcgggaggggcgtatgacatcattatatgtgacgagtgccactcaatagatgctactactatctt

SEQ ID NO: 124244 - DNA, 80 bp, synthetic construct
  source 1..80: mol_type = other DNA
ttatcaacggcttatgcgagtcgtccgataaacacaatctttcatgaatttggttttcgcggaaatcacattcaggctca

SEQ ID NO: 124245 - DNA, 80 bp, synthetic construct
  source 1..80: mol_type = other DNA
gggcgctcagagcttcacggcgcggtcgtttgcaaacctcttctctcatggctcgcagcaaaaaatccagctggtgaaca

SEQ ID NO: 124246 - DNA, 80 bp, synthetic construct
  source 1..80: mol_type = other DNA
ttggcctactcctactctgtgtaggggtaggcatcttcctactccccgcccggtagggcggcacatttagctacactcca

SEQ ID NO: 124247 - DNA, 80 bp, synthetic construct
  source 1..80: mol_type = other DNA
tgacaagcctgggctggaacctgatcaagttcagagcgggaatggatgtgttcagtatgcaaccacaccgagctgatacc

SEQ ID NO: 124248 - DNA, 80 bp, synthetic construct
  source 1..80: mol_type = other DNA
ggatgcgggcgtctggatgcggggtcaggcgctgcacgaatagcatggaatctgctgcgttctgaaacgcacgggtgagg

SEQ ID NO: 124249 - DNA, 80 bp, synthetic construct
  source 1..80: mol_type = other DNA
ggacaactccatgtgccacttcttggctaagagacatttgggactgggtttgcactgtcctgagtgacttcaagacatgg

SEQ ID NO: 124250 - DNA, 80 bp, synthetic construct
  source 1..80: mol_type = other DNA
cgtgatgtgcgttgttggaatggtggcagccaatgagtttggcatgttggagaaaacaaaggaagaccttagacatcttt

SEQ ID NO: 124251 - DNA, 80 bp, synthetic construct
  source 1..80: mol_type = other DNA
ccgaagcagtaatgggggccgcgtatggcttccagtactcgcccaagcagcgggtagaccacctcctcaagatgtggcgc

SEQ ID NO: 124252 - DNA, 80 bp, synthetic construct
  source 1..80: mol_type = other DNA
gaccctatcactcctttcgccagggctgcctgggaaacagtgaagcactcccctgtcaattcatggctgggaaacatcat

SEQ ID NO: 124253 - DNA, 80 bp, synthetic construct
  source 1..80: mol_type = other DNA
atggacatgatgaggtccaaatgattgtcgtggagccaggaaaaaatgtgaaaaacgtccagactaagcccggagtgttt

SEQ ID NO: 124254 - DNA, 80 bp, synthetic construct
  source 1..80: mol_type = other DNA
cttactgtggagacaagagatggggagtaacatcacaagggtagaatcagaaactaaggtggtgatccttgactctttcg

SEQ ID NO: 124255 - DNA, 80 bp, synthetic construct
  source 1..80: mol_type = other DNA
atttaatggcaatgcaacagtggatggatactctctaacatttatgtggacaggtgtgtcaaactatctaaaccaacagt

SEQ ID NO: 124256 - DNA, 80 bp, synthetic construct
  source 1..80: mol_type = other DNA
cttgtcgcggtggttctggccgggaccgcggtagtgtacctcacccacgcctcctcggtgcgctatcgtcggctgcggta

SEQ ID NO: 124257 - DNA, 80 bp, synthetic construct
  source 1..80: mol_type = other DNA
cattcagccactacagctacctcaaataattcagagactccatggccttagcgcgttctcactccatagttactctccag

SEQ ID NO: 124258 - DNA, 80 bp, synthetic construct
  source 1..80: mol_type = other DNA
agcatcatccaggcccacaacctgtgcttcagcacgctctccctgagggccgacgcagtggcgcacctggaggcgggcaa

SEQ ID NO: 124259 - DNA, 80 bp, synthetic construct
  source 1..80: mol_type = other DNA
ggttacaactggctgagcagttcaagcagaaggccttaggtctcctaaatttcgctggcaagcaagcccaagaggcaaca

SEQ ID NO: 124260 - DNA, 80 bp, synthetic construct
  source 1..80: mol_type = other DNA
catttgtttcacacgttttttcggccacgcataattcagggggattgattttatcattgcctgtttatcttagccccggt

SEQ ID NO: 124261 - DNA, 80 bp, synthetic construct
  source 1..80: mol_type = other DNA
ctactaacggtaggggtaggcatctttctcctgccagctcggtgagctggtaggataacactccattctttttttttttt

SEQ ID NO: 124262 - DNA, 80 bp, synthetic construct
  source 1..80: mol_type = other DNA
tggctatggctctaaaggtgtcctacacacgatgtggcatgtgacgagaggggcggcgttgtccattgatgacgccgtcg

SEQ ID NO: 124263 - DNA, 80 bp, synthetic construct
  source 1..80: mol_type = other DNA
ggaacagagtgtggatagaagacaaccccaatatgattgacaaaactccagtccactcatgggaagacataccttaccta

SEQ ID NO: 124264 - DNA, 80 bp, synthetic construct
  source 1..80: mol_type = other DNA
atatgatagccggtgcccactggggtgtcctagcgggcctggcgtattattccatggtgtggaactgggctaaggttgtg

SEQ ID NO: 124265 - DNA, 80 bp, synthetic construct
  source 1..80: mol_type = other DNA
tcccgggagcgcggtgctgtacccctttttcctgctcaacaaacagaagacgcccgcctttgaacactttattaaaaagt

SEQ ID NO: 124266 - DNA, 80 bp, synthetic construct
  source 1..80: mol_type = other DNA
ttccagtactctcctggacagcgggtcgagttcctggtgaacgcctggaaatcaaagaaaagccctatgggcttcgcata

SEQ ID NO: 124267 - DNA, 80 bp, synthetic construct
  source 1..80: mol_type = other DNA
ctgtgtacgtgcgaaagcaccccctcccagctgggacacaatgtggaagtgcatgctccgtctcaaaccgactttaactg

SEQ ID NO: 124268 - DNA, 80 bp, synthetic construct
  source 1..80: mol_type = other DNA
tctacaccaaccgctttaactcgtcagggtgtccagggcgcctgtccgcctgccgcaacatcgaggctttccggataggg

SEQ ID NO: 124269 - DNA, 80 bp, synthetic construct
  source 1..80: mol_type = other DNA
actaccattggctccagcgccggtcgcacggcaggaggcctcacatcgctctttagccccggctctaagcaaaaccttca

SEQ ID NO: 124270 - DNA, 80 bp, synthetic construct
  source 1..80: mol_type = other DNA
cgcggggtgctcatgttgcacggtctacgagacctcccggggcactcgcaagcaccctagccatggcgttagtacgagtg

SEQ ID NO: 124271 - DNA, 80 bp, synthetic construct
  source 1..80: mol_type = other DNA
acactgtggagtcctcgcgagcgacttgtaatggcatttggagcagccatggttgagattgccttaggtggaatgatggg

SEQ ID NO: 124272 - DNA, 80 bp, synthetic construct
  source 1..80: mol_type = other DNA
atcagagtctcgactttgagatgtacggcgctgtgtactcagtctctcctctggacctcccagctataattgaaaggtta

SEQ ID NO: 124273 - DNA, 80 bp, synthetic construct
  source 1..80: mol_type = other DNA
ctttactgtggtggtcctatgttcaacagcaaaggacaacactgcggttaccgccgctgccgtgctagtggggtgttacc

SEQ ID NO: 124274 - DNA, 80 bp, synthetic construct
  source 1..80: mol_type = other DNA
gaattttggctagatggagctcattcaagaagaatggagcgatcaaagtgttacggggtttcaaaaaagagatctcaagc

SEQ ID NO: 124275 - DNA, 80 bp, synthetic construct
  source 1..80: mol_type = other DNA
ccaatgtgatcctgggctccaccgagacgacggggctgtccctcggcgacctggacaccatcaaggagcggctcggcctg

SEQ ID NO: 124276 - DNA, 80 bp, synthetic construct
  source 1..80: mol_type = other DNA
gggcaagaaggaagggggagcgatgtatgccgatgatacagcaggatgggacacaagaatcacactagaagacttaaaaa

SEQ ID NO: 124277 - DNA, 80 bp, synthetic construct
  source 1..80: mol_type = other DNA
ggtaggcgccaaccaatacctaaagcgcgccaccagacgggccggtcctgggctcaacccgggtacccatggccccttta

SEQ ID NO: 124278 - DNA, 80 bp, synthetic construct
  source 1..80: mol_type = other DNA
ggctttggcgtgcttgtaagtttgggcggatgaggaagtggggcgcggcgtgggagccgggcgcgccggatgtgacgttt

SEQ ID NO: 124279 - DNA, 80 bp, synthetic construct
  source 1..80: mol_type = other DNA
gccttgcgtttaatgtcgtgtttattcaagggagtgggatagggttcgacggttcgaaacttaacacaccaaataatcga

SEQ ID NO: 124280 - DNA, 80 bp, synthetic construct
  source 1..80: mol_type = other DNA
agtgaagccacgcttgcttaccacagaggaagcttgcgacctgacgcccccccactcagccagatcaaagttcggctacg

SEQ ID NO: 124281 - DNA, 80 bp, synthetic construct
  source 1..80: mol_type = other DNA
gctactaaacaattccttcctggacccagaatattggaactttagaaatggagatcttactgaaggcacagcctatacaa

SEQ ID NO: 124282 - DNA, 80 bp, synthetic construct
  source 1..80: mol_type = other DNA
actggcgacctatggccattttttctggggtgatgcagtagaaggtaagcgggtcttgttcccagcggtcccatccaagg

SEQ ID NO: 124283 - DNA, 80 bp, synthetic construct
  source 1..80: mol_type = other DNA
ggaaaagctaaaggaagcagggccatttggttcatgtggcttggagcacggtatctagagtttgaagctttggggttcct

SEQ ID NO: 124284 - DNA, 80 bp, synthetic construct
  source 1..80: mol_type = other DNA
gcccggagcaaagtcattaacaccatgcagctgtggcgcaagcgacctctacctagtgacccgaaatgctgacatcatcc

SEQ ID NO: 124285 - DNA, 80 bp, synthetic construct
  source 1..80: mol_type = other DNA
gctgacgcgcgcgactatgccagacgcaagagccggcggcgacgcattgccaggcgccaccggagcacgcccgccatgcg

SEQ ID NO: 124286 - DNA, 80 bp, synthetic construct
  source 1..80: mol_type = other DNA
actcctagtgttcttctgtgctgcctggtacatcaagggcaggctagtccctggggtggcgtatgctttctatggcgtat

SEQ ID NO: 124287 - DNA, 80 bp, synthetic construct
  source 1..80: mol_type = other DNA
ttataagcctggaaaaagtgatgaaaattctaaggcaatgttgggtcaacaatctatgccaaacagacccaattacatag

SEQ ID NO: 124288 - DNA, 80 bp, synthetic construct
  source 1..80: mol_type = other DNA
aaactccttgaccgacacgaacgtaagcacggggagggtaaacacgacgaactccccctcacgggtcaccttcaggtagg

SEQ ID NO: 124289 - DNA, 80 bp, synthetic construct
  source 1..80: mol_type = other DNA
ggcaccgccggctggtggtgggcggtgctcttcctgtgctgtgcttggtacgtgaaaggccgccttgtgcctgcgtgtac

SEQ ID NO: 124290 - DNA, 80 bp, synthetic construct
  source 1..80: mol_type = other DNA
gccatggaagctgtacgcatggtgtagtggactagtggttagaggagacccctcccttcaaaatcgcagcaaaacgggtg

SEQ ID NO: 124291 - DNA, 80 bp, synthetic construct
  source 1..80: mol_type = other DNA
ataattagttaaaatcatatcccatggtattggccattcttgcaatacagtaaaccctacacatgaaggaatacctctta

SEQ ID NO: 124292 - DNA, 80 bp, synthetic construct
  source 1..80: mol_type = other DNA
aaatccattatgtactatttaaaaaacacaaacttttggatgttcggtttattctttttcttttacttttttatcatggg

SEQ ID NO: 124293 - DNA, 80 bp, synthetic construct
  source 1..80: mol_type = other DNA
ggagtggcagggcccccgttcgccgcctgggtcgcggccgcgaccccaggcgtgccggtggaactcggagccgccgacgc

SEQ ID NO: 124294 - DNA, 80 bp, synthetic construct
  source 1..80: mol_type = other DNA
tattgaatgtgacggaggagctgaggagtgaccaccttaccttatcttgcctgcgaactgactacgaatccagtgatgaa

SEQ ID NO: 124295 - DNA, 80 bp, synthetic construct
  source 1..80: mol_type = other DNA
atgtggacctgatcgctggcgcagccgtggtatgctccggtctctacatcggagatatttgtgggggagtcttccttgtg

SEQ ID NO: 124296 - DNA, 80 bp, synthetic construct
  source 1..80: mol_type = other DNA
gcttgattggaacccggacccgcgccacatgggcagaaaacatccaagttgccattggtcaggtccgttcgataatcgga

SEQ ID NO: 124297 - DNA, 80 bp, synthetic construct
  source 1..80: mol_type = other DNA
aaataatgtcctgatcaagtgccatgtgcacctgggagccagaaggggtaccttccagccgtaccagtgcaactttagcc

SEQ ID NO: 124298 - DNA, 80 bp, synthetic construct
  source 1..80: mol_type = other DNA
cgccaggggtctaacgtccctcttcacacatgggtcgaaccagagaatccaacttataaataccaacggcagctggcaca

SEQ ID NO: 124299 - DNA, 80 bp, synthetic construct
  source 1..80: mol_type = other DNA
gggccccaccgacccccggcacaaatcacgcaatctaggtaaagtcatcgataccgttacgtgtggttttgccgacctca

SEQ ID NO: 124300 - DNA, 80 bp, synthetic construct
  source 1..80: mol_type = other DNA
ataaccagacctttctcattgatggccccgaaacagcagaatgtcccaacacaaacagagcttggaactcactagaagtt

SEQ ID NO: 124301 - DNA, 80 bp, synthetic construct
  source 1..80: mol_type = other DNA
gtatgctatagagatgcgattgtatattaagatacattggcataagaccgtctttagggtgaaggtagcaccactgtagg

SEQ ID NO: 124302 - DNA, 80 bp, synthetic construct
  source 1..80: mol_type = other DNA
aaaccgcaaagggtcgcttacgtcagcaggatcccgagatcaaagacacccgggttcttgcacaaacaccacccgggttg

SEQ ID NO: 124303 - DNA, 80 bp, synthetic construct
  source 1..80: mol_type = other DNA
atgggaagggagagtggatgaccacagaagacatgcttgaggtgtggaacagagtgtggataaccaacaatccacacatg

SEQ ID NO: 124304 - DNA, 80 bp, synthetic construct
  source 1..80: mol_type = other DNA
gcgccttacataggagactctatcagtaaagacggcattcaagttgggacaaacactgccaatccccagcaagcagtata

SEQ ID NO: 124305 - DNA, 80 bp, synthetic construct
  source 1..80: mol_type = other DNA
taaaggggaaaccatctccttctcgtttccggacgggtcgcgcagtaccatcgtgtttgcctccagccacaacacaaacg

SEQ ID NO: 124306 - DNA, 80 bp, synthetic construct
  source 1..80: mol_type = other DNA
catgtctcatgcccgaccccgctatttactcctgtgcctactcctactttcagtaggggtaggcattttcctgctgcctg

SEQ ID NO: 124307 - DNA, 80 bp, synthetic construct
  source 1..80: mol_type = other DNA
tgaccaggtattcagcacctcctggtgacgaaccacaaccggaatatgacctcgagctaataacatcatgctcatcaaac

SEQ ID NO: 124308 - DNA, 80 bp, synthetic construct
  source 1..80: mol_type = other DNA
taccccactcacagactgggcccataacagcctacgcgatctcgcagtggctgtggaaccggttgtcttctcccagatgg

SEQ ID NO: 124309 - DNA, 80 bp, synthetic construct
  source 1..80: mol_type = other DNA
tacgattagtctgtaaaaaaagcacaaaaaaattacatcatgctagcctggcgaacggatggataaatcactctctccaa

SEQ ID NO: 124310 - DNA, 80 bp, synthetic construct
  source 1..80: mol_type = other DNA
tcggagcaatctatggggctgcttttagtggggtctcatggactatgaaaatcctcataggagtcgtcatcacatggata

SEQ ID NO: 124311 - DNA, 80 bp, synthetic construct
  source 1..80: mol_type = other DNA
aaataggacagcactcaattgcaatgacaccctccacactggcttccttgccggcctgttcgctcaccacaggttcaact

SEQ ID NO: 124312 - DNA, 80 bp, synthetic construct
  source 1..80: mol_type = other DNA
cgcttccagctccccaaagaacgtggccccccgggcgtccggggaggcgtccggagacgggccgctttgcggcccgtgcg

SEQ ID NO: 124313 - DNA, 80 bp, synthetic construct
  source 1..80: mol_type = other DNA
ccgcgtgtcatccccacaagggatgatgaagagattctcaataggcttgttctcaggacgagggcctctaagaatggtgt

SEQ ID NO: 124314 - DNA, 80 bp, synthetic construct
  source 1..80: mol_type = other DNA
ctgtgcggcataagaaagcttttaccaatgaattaaataaatcacttacctgaaatttaaaaatacattgtggtctccat

SEQ ID NO: 124315 - DNA, 80 bp, synthetic construct
  source 1..80: mol_type = other DNA
accagcttttgcttgattccattggtgatagaaccaggtacttttctatgtggaatcaggctgttgatagctatgatcca

SEQ ID NO: 124316 - DNA, 80 bp, synthetic construct
  source 1..80: mol_type = other DNA
gaagaaaatcatcgtctggggcgctgacaccgctgcgtgtggcgacatcataggtggcctgcctgtctcggctaggttgg

SEQ ID NO: 124317 - DNA, 80 bp, synthetic construct
  source 1..80: mol_type = other DNA
acccggcactccgccatgaactcacgcagaaagcgtctagccatggcgttagccgacactccgccatgaatcactcccct

SEQ ID NO: 124318 - DNA, 80 bp, synthetic construct
  source 1..80: mol_type = other DNA
ctggacaccgcatggcatgggacatgatgatgaactggtcgcccacggccaccatgatcctggcgtacgtgatgcgcgtc

SEQ ID NO: 124319 - DNA, 80 bp, synthetic construct
  source 1..80: mol_type = other DNA
cccagattccagacgcgcggtcagaagggcgtcgaaactgtcatactctgtgtagtcgtccggaaacatgcaggtccaaa

SEQ ID NO: 124320 - DNA, 80 bp, synthetic construct
  source 1..80: mol_type = other DNA
agggaaccttgttctgcttgggccggctgatgacgcgaagagcaaaggctggtcgctgttatcgcctatcacagcctacg

SEQ ID NO: 124321 - DNA, 80 bp, synthetic construct
  source 1..80: mol_type = other DNA
agggatatatggtcatgcgagctagcggaagagatgccgcaagccaagttagagttcaaaacggaacatgcgtcattttg

SEQ ID NO: 124322 - DNA, 80 bp, synthetic construct
  source 1..80: mol_type = other DNA
aggcgcctctgcttcttcctccggctcctcctcttccaggggcacaggttcctccgccagctctgcgacgtggacgtggc

SEQ ID NO: 124323 - DNA, 80 bp, synthetic construct
  source 1..80: mol_type = other DNA
ttcgcgaacacgaggcccagctaatgatcctggcccaggccctgaacccctacgactgtctgatccacagcaccccgaac

SEQ ID NO: 124324 - DNA, 80 bp, synthetic construct
  source 1..80: mol_type = other DNA
gtccactgctgcactccaccaccgaatgggcggtgttgccatgctccttctccgacctaccagcactatccactggcctg

SEQ ID NO: 124325 - DNA, 80 bp, synthetic construct
  source 1..80: mol_type = other DNA
agtactcaccagcgcagcgggtcgacttcctgctcaaagcatggaactcaaagaggaccccaatggggttcgcctatgac

SEQ ID NO: 124326 - DNA, 80 bp, synthetic construct
  source 1..80: mol_type = other DNA
tgtgctgatggaaattgtcacactttgaaaactgttcatattgtgagtcatgctagatattgttggcctgtgtgtgacca

SEQ ID NO: 124327 - DNA, 80 bp, synthetic construct
  source 1..80: mol_type = other DNA
actataatggacaggaaagtaatcttttttattatttaacaacaagcgctggtaacggtaaacagttacctgattatttt

SEQ ID NO: 124328 - DNA, 80 bp, synthetic construct
  source 1..80: mol_type = other DNA
ggtgctggacacgaagaaccaatgctgatgcagagctacggatggaatatagtgtcactgaagagcggagtggatgtgtt

SEQ ID NO: 124329 - DNA, 80 bp, synthetic construct
  source 1..80: mol_type = other DNA
aagttctcattagtgcgggaactggacttggggtttataatccacacagtttcctggcgagccaaacggtggtcggtgat

SEQ ID NO: 124330 - DNA, 80 bp, synthetic construct
  source 1..80: mol_type = other DNA
cgatgtggagaaggcctagttgtgtggaaagaggtatcggagtggtatgatggctatgcttaccatccggaatcaccaga

SEQ ID NO: 124331 - DNA, 80 bp, synthetic construct
  source 1..80: mol_type = other DNA
aaacccggccggatgccccagggctagggcggagcgcacggactcgtcccacacggcaacctgaggggccagtcgatcca

SEQ ID NO: 124332 - DNA, 80 bp, synthetic construct
  source 1..80: mol_type = other DNA
tctctaactttcaagggaaagttatgatgacggtaaatgctactgacgtcacagatgtcatcacgattccaacagctgct

SEQ ID NO: 124333 - DNA, 80 bp, synthetic construct
  source 1..80: mol_type = other DNA
taaagactatgacatgttggtgtgcggagacgatttggtggtcatttccgagagtgctggcgtcccagaggatgaggccg

SEQ ID NO: 124334 - DNA, 80 bp, synthetic construct
  source 1..80: mol_type = other DNA
tgtccgagctcttgaggacggaatcaattttgcaacagggaacttacctggttgctctttctctatcttcctcctggctt

SEQ ID NO: 124335 - DNA, 80 bp, synthetic construct
  source 1..80: mol_type = other DNA
ctgcccaactgattgcttccggaaacatccagaggcgacctatagcaagtgtggttctgggccttggctcacaccacgat

SEQ ID NO: 124336 - DNA, 80 bp, synthetic construct
  source 1..80: mol_type = other DNA
tccaccacccagtggcaggtccttccttgctcctttgcacctctccctgccctctccaccggcctgatccatctccatca

SEQ ID NO: 124337 - DNA, 80 bp, synthetic construct
  source 1..80: mol_type = other DNA
cctttcttgtgttcttctgcgccgcctggtacattaagggcaggctggctcctggggcggcgtatgctttttatggcgta

SEQ ID NO: 124338 - DNA, 80 bp, synthetic construct
  source 1..80: mol_type = other DNA
caaggtcttaaactttcttggagcgcccccctagcagtaaaggctagtgccctcacacttaacacaagagcgcccttaac

SEQ ID NO: 124339 - DNA, 80 bp, synthetic construct
  source 1..80: mol_type = other DNA
cgtcgtgtgctgctccatgtcatacagctggaccggagctttaattacaccatgtgcggccgaggaggagaagctgccca

SEQ ID NO: 124340 - DNA, 80 bp, synthetic construct
  source 1..80: mol_type = other DNA
ctcacctatcttctcacgcgggtcgaggccatgctgcagatttgggtcccacccctggcagtgcgaggaggtcgggacgg

SEQ ID NO: 124341 - DNA, 80 bp, synthetic construct
  source 1..80: mol_type = other DNA
ccatcacgaatgtcaccaccatggccatgactgacacaactcccttcggacagcagcgggtgttcaaagagaaggtggac

SEQ ID NO: 124342 - DNA, 80 bp, synthetic construct
  source 1..80: mol_type = other DNA
tttcgggtccgcagactcaattcgcttggactctgtaggactggaaattgttttccctttaaccatcccccagaccttaa

SEQ ID NO: 124343 - DNA, 80 bp, synthetic construct
  source 1..80: mol_type = other DNA
ccttggcctactcctacttagcgtaggggtaggcctctttttactccccgctcggtagagcggcacaccttagctacact

SEQ ID NO: 124344 - DNA, 80 bp, synthetic construct
  source 1..80: mol_type = other DNA
gccatcattttaggaggtcttacatggatggacttattgcgtgcccttatcatgctgggggacaccatgtctggtagaat

SEQ ID NO: 124345 - DNA, 80 bp, synthetic construct
  source 1..80: mol_type = other DNA
gaaaaaggaggcaaagcgcatagaatggctcttgaagaactacctgatgctctggaaaccataacactcattgcagcgtt

SEQ ID NO: 124346 - DNA, 80 bp, synthetic construct
  source 1..80: mol_type = other DNA
cggctttgaccaagcttgaagcatggctcgctgagcatggctgcgacaggcttaagaggatggcagtgagtggagatgac

SEQ ID NO: 124347 - DNA, 80 bp, synthetic construct
  source 1..80: mol_type = other DNA
gcgccgcgggcgcacaggtagaggaagacagggcacttataggtatgtttccactggtgaacgagcctcaggaatgtttg

SEQ ID NO: 124348 - DNA, 80 bp, synthetic construct
  source 1..80: mol_type = other DNA
acaggctgatcgcctttgcgtccagagggaaccacgtcgcccccactcattacgtggtggagtcagatgcttcacgacgc

SEQ ID NO: 124349 - DNA, 80 bp, synthetic construct
  source 1..80: mol_type = other DNA
ggctctaataactccctgtagccccgaagaggaaaagttgccaatcaaccctttgagtaactcgctgttgcgataccata

SEQ ID NO: 124350 - DNA, 80 bp, synthetic construct
  source 1..80: mol_type = other DNA
cctcgtcgaccagatctcgatccaccagaggaaggtcatcccgcatggtcatggggtgtgcggtggaggtgtggagaccg

SEQ ID NO: 124351 - DNA, 80 bp, synthetic construct
  source 1..80: mol_type = other DNA
agtgatgcctctgctctgtggcatagggtgcgccatgctccactggtctctcattttacctggaatcaaagcgcagcagt

SEQ ID NO: 124352 - DNA, 80 bp, synthetic construct
  source 1..80: mol_type = other DNA
gcccttatggggccctcgtacgggtttcagtactctccagcgcagcgggttgaatttttattgaagacgtggaggtctaa

SEQ ID NO: 124353 - DNA, 80 bp, synthetic construct
  source 1..80: mol_type = other DNA
ctccgagcgaaatcaatagggtggccagttgcctcaggaagcttggggtaccccctttgagagcttggagacatcgggct

SEQ ID NO: 124354 - DNA, 80 bp, synthetic construct
  source 1..80: mol_type = other DNA
ggggtcactatcttcaccctgtcccccgcttataagagtatgctcatacacctgatttggtggctacagtatttcatcgc

SEQ ID NO: 124355 - DNA, 80 bp, synthetic construct
  source 1..80: mol_type = other DNA
ccatttggtaaacaaaggaagtaaaaaagaggcaaactgtcaggccaccttaagccacagtacggaagaagctgtgcagc

SEQ ID NO: 124356 - DNA, 80 bp, synthetic construct
  source 1..80: mol_type = other DNA
catcgcggagtgcttcgctcagggccaagaaagtgacttttgacagagtgcagatcttagacaaacattatgagtctgca

SEQ ID NO: 124357 - DNA, 80 bp, synthetic construct
  source 1..80: mol_type = other DNA
gggtgcaaatccgatgccggtttcccaactccacccgcacggagttccgcctccagatctggcgttatgccacggcgacg

SEQ ID NO: 124358 - DNA, 80 bp, synthetic construct
  source 1..80: mol_type = other DNA
tcttgttggtgacacctcttttgtgtctgccatatcccaaactgaggtgaaagaggaggggaaagaggagctacaggaaa

SEQ ID NO: 124359 - DNA, 80 bp, synthetic construct
  source 1..80: mol_type = other DNA
gaggggtgaagcaaggaaaacgtttgtggagcttatgagaagaggagatctacctgtctggctatcctacaaagttgcct

SEQ ID NO: 124360 - DNA, 80 bp, synthetic construct
  source 1..80: mol_type = other DNA
gaaatgaatttgttatacaagtatacatttgaacagctgaagacacattggctggaggcttgggaggattttgagttagc

SEQ ID NO: 124361 - DNA, 80 bp, synthetic construct
  source 1..80: mol_type = other DNA
atgaacggacaagcacacctggcaatcatggcgatgtttagaatgtcaccagggtacatcctagggatgtttctgagaaa

SEQ ID NO: 124362 - DNA, 80 bp, synthetic construct
  source 1..80: mol_type = other DNA
cgaccgtcttgggcatcggcactgtcttggaccaagctgagtcagcaggggtgcgcctcactgtcttagctacggcaacg

SEQ ID NO: 124363 - DNA, 80 bp, synthetic construct
  source 1..80: mol_type = other DNA
cggtatcacaacaaggtgtatagtacaacatcacgcagtgcttcacaacgggctaaaaaggtgacctttgacagggtgca

SEQ ID NO: 124364 - DNA, 80 bp, synthetic construct
  source 1..80: mol_type = other DNA
acaaacagggaagttgattggtataaccttgggccgggtatacagctaagtgacattttagattctgtctttatttagat

SEQ ID NO: 124365 - DNA, 80 bp, synthetic construct
  source 1..80: mol_type = other DNA
gtcgcagggttatactctggattacatggcaatggctctgtggagaaccttgctacggaggaagagggtcttaggttgct

SEQ ID NO: 124366 - DNA, 80 bp, synthetic construct
  source 1..80: mol_type = other DNA
aaggagcttcttgtgacattcaaaaacgcacatgcgaaaaaacaagaagtagttgttcttggatcgcaagagggagcaat

SEQ ID NO: 124367 - DNA, 80 bp, synthetic construct
  source 1..80: mol_type = other DNA
ggcggcgtacactggctggccctggcctggaacccaaagaaccgtacctgctacctcttcgacccatttggcttttcgga

SEQ ID NO: 124368 - DNA, 80 bp, synthetic construct
  source 1..80: mol_type = other DNA
gaaagagtgtggtggtgctaaacaggaaaacctttgagaaagaataccccacaattaaacagaaaaaacctgatttcatc

SEQ ID NO: 124369 - DNA, 80 bp, synthetic construct
  source 1..80: mol_type = other DNA
gctaatctcctgtggagacaggagattgggggcaacatcacgcgggttgaatctgaaaataagaccatagttttggactc

SEQ ID NO: 124370 - DNA, 80 bp, synthetic construct
  source 1..80: mol_type = other DNA
cgcccctataaggggcgacactccaccatgatcactcccctgtgaggaactactgtcttcacgcagaaagcgtctagcca

SEQ ID NO: 124371 - DNA, 80 bp, synthetic construct
  source 1..80: mol_type = other DNA
gcgaggtccaagtgctgtctaccaccacgcaatcctttctggggactgctgttaacggtgtcatgtggaccgtttaccac

SEQ ID NO: 124372 - DNA, 80 bp, synthetic construct
  source 1..80: mol_type = other DNA
ggctggtccgaaagggccggtcacacagatgtactctagtgccgagggagacctcgtggggtggccttccccccccggtg

SEQ ID NO: 124373 - DNA, 80 bp, synthetic construct
  source 1..80: mol_type = other DNA
ccacttccgcgctccctggggcgcttacaagcgcgggcggactcccgccgctgccgtgcgcaccaccgttgacgacgtca

SEQ ID NO: 124374 - DNA, 80 bp, synthetic construct
  source 1..80: mol_type = other DNA
agccggtcagcagctcgcagccccggaagatgacattgtccacgtaggtgctgaagggggcgctctcaaacacatccccg

SEQ ID NO: 124375 - DNA, 80 bp, synthetic construct
  source 1..80: mol_type = other DNA
gcgcaataccaggcatagcttccgtggcggttcaggcctcgcaacgacattgacattggaaaaaaaaaaaacgtataaat

SEQ ID NO: 124376 - DNA, 80 bp, synthetic construct
  source 1..80: mol_type = other DNA
tagctgctgtggccctgaacaggaccgcggcggcgatgactgaggccggtgcagtggccgtggccgctctgggacagttg

SEQ ID NO: 124377 - DNA, 80 bp, synthetic construct
  source 1..80: mol_type = other DNA
actgtggcaatcgtggtgggagtgattgcgggcttcataactctgatcattgtcattctgtgctacatctgctgccgcaa

SEQ ID NO: 124378 - DNA, 80 bp, synthetic construct
  source 1..80: mol_type = other DNA
ttgcccccatgaaggattgggcagcgtccgggctgcgcgacttagcagtggccacggagcccatcatattctcccctatg

SEQ ID NO: 124379 - DNA, 80 bp, synthetic construct
  source 1..80: mol_type = other DNA
tgaccgccgaaactgctcgccggcgcctggctagagggtctccaccctcactagccagctcatcggcgagccagctgtcg

SEQ ID NO: 124380 - DNA, 80 bp, synthetic construct
  source 1..80: mol_type = other DNA
gcgattggtccaccccgtgtagtgggtcgtggctacgagacatccgggactgggtgtgtacggtgctcactgatttcaaa

SEQ ID NO: 124381 - DNA, 80 bp, synthetic construct
  source 1..80: mol_type = other DNA
ggtgggagggggactcgccttgcaagaaggaagtggacagctaacagtcaatactaaagctccattgcaagttgcaaatg

SEQ ID NO: 124382 - DNA, 80 bp, synthetic construct
  source 1..80: mol_type = other DNA
gtctccggttccccgggggtgtagtggcagtaaaacacgtcgagctgttgttcgtccagccccgcgaaaataacgtcgag

SEQ ID NO: 124383 - DNA, 80 bp, synthetic construct
  source 1..80: mol_type = other DNA
tttggcgctcgaagaagacacctatgggattttcctatgacaccaggtgctttgattcaacagtgactgagcgtgacatt

SEQ ID NO: 124384 - DNA, 80 bp, synthetic construct
  source 1..80: mol_type = other DNA
tgtctgggtaccatctttgcaaatccggggtggccgcgatgctgtcatacttcttgcttgcttgttacatccacaattgg

SEQ ID NO: 124385 - DNA, 80 bp, synthetic construct
  source 1..80: mol_type = other DNA
tttggggactcttacattgtcataggagtcggggagaagaagatcacccaccactggcacaggagtggcagcaccattgg

SEQ ID NO: 124386 - DNA, 80 bp, synthetic construct
  source 1..80: mol_type = other DNA
gtactccacctacggcaagttccttgccgacggtggttgctccgggggcgcctatgacatcataatatgtgatgagtgcc

SEQ ID NO: 124387 - DNA, 80 bp, synthetic construct
  source 1..80: mol_type = other DNA
aaagggatatattagcatactcagcaaataacacaagtttatttgactgtatcgaacctgtaatcaatgcatggagccta

SEQ ID NO: 124388 - DNA, 80 bp, synthetic construct
  source 1..80: mol_type = other DNA
agactcctggcacccatcacggcttacgcacaacaaacgcgtggcctccttggctgtatcatcaccagccttactggccg

SEQ ID NO: 124389 - DNA, 80 bp, synthetic construct
  source 1..80: mol_type = other DNA
gttgtgactcgaacaatgctattttgtattacggcgtattatactctttttatagacacccgggtgttctttttgattac

SEQ ID NO: 124390 - DNA, 80 bp, synthetic construct
  source 1..80: mol_type = other DNA
cgacgaggaagacttccgaacggtcccagcctagaggcaggcgccagcccataccaaaggcgcgccagccgataggccgt

SEQ ID NO: 124391 - DNA, 80 bp, synthetic construct
  source 1..80: mol_type = other DNA
cggagtcacatatatcactacgcgggatatgccggcaatcattcaaagaatccatggcttaagcgcattcacactgcacg

SEQ ID NO: 124392 - DNA, 80 bp, synthetic construct
  source 1..80: mol_type = other DNA
tgtcaacaggacggcgctgaactgcaatgatagtctcaacactgggttcatagcagggcttctctactcccgtaatttta

SEQ ID NO: 124393 - DNA, 80 bp, synthetic construct
  source 1..80: mol_type = other DNA
ccgtcgaaggttggccggacgaacgacgaccggggtacccaggggttctgatgccaaaatgcggcactgcctaagcagga

SEQ ID NO: 124394 - DNA, 80 bp, synthetic construct
  source 1..80: mol_type = other DNA
gacccacgacttctgggcctggcttaaagccaagactctaccgctgctcccaggcattcccctgttctcctgtcaaaagg

SEQ ID NO: 124395 - DNA, 80 bp, synthetic construct
  source 1..80: mol_type = other DNA
gcttggtgcggagctcccgggagctccgcggaagacccaggccgcctcgggtgtaacgttagaccgagttcgccgggccg

SEQ ID NO: 124396 - DNA, 80 bp, synthetic construct
  source 1..80: mol_type = other DNA
cctgaagtcattcaaggagtttgccgctgggaaaagaggagcggcttttggagtgatggaagccctgggaacactgccag

SEQ ID NO: 124397 - DNA, 80 bp, synthetic construct
  source 1..80: mol_type = other DNA
gtcccgcacccgaacatcacagagacggccttgcccagtacgggagaggtccccttttatgggaaagccatccccctgga

SEQ ID NO: 124398 - DNA, 80 bp, synthetic construct
  source 1..80: mol_type = other DNA
gatgctggagagaacaaaagatgacataaaaaacttgtttggcaagccattcattgaagaaactgaggcccacatttccc

SEQ ID NO: 124399 - DNA, 80 bp, synthetic construct
  source 1..80: mol_type = other DNA
gaaaattctaaagctatgttgggtcaacaatctatgccaaacagacccaattacattgctttcagggacaattttattgg

SEQ ID NO: 124400 - DNA, 80 bp, synthetic construct
  source 1..80: mol_type = other DNA
gcccccctttcgacatgggccagcagcgggttgcgtgaccttgccgtagcggttgagccggtcatcttttccccgatgga

SEQ ID NO: 124401 - DNA, 80 bp, synthetic construct
  source 1..80: mol_type = other DNA
ttgtaggtagaattgcttctatttccgggggaattaaattttcaaaccaaacggaaagagtaaaggtgctatcagcagga

SEQ ID NO: 124402 - DNA, 80 bp, synthetic construct
  source 1..80: mol_type = other DNA
caagtaaatggaattcgcgcccggcgaaaccaaatgctactacaacaagccgctctcaccgctacaccgcgtaaccagct

SEQ ID NO: 124403 - DNA, 80 bp, synthetic construct
  source 1..80: mol_type = other DNA
gttagctcgttgatgtctcctagggcctcaagacggtccatggcctcgtagaagtccaccgcaaagctgaaaaactggga

SEQ ID NO: 124404 - DNA, 80 bp, synthetic construct
  source 1..80: mol_type = other DNA
agccagatgttgacctcggaagcggaacccgcaacatcggaattgaaagtgagacaccaaacctagacataattggaaaa

SEQ ID NO: 124405 - DNA, 80 bp, synthetic construct
  source 1..80: mol_type = other DNA
aattgccttaaaagggtcaggggacaggtcgtgaattccatcgcccaaagggcctcacactatgtgcactgtctgaagtc

SEQ ID NO: 124406 - DNA, 80 bp, synthetic construct
  source 1..80: mol_type = other DNA
atttcttcctcgaccacaggtggtgggggttgtcttcttcgacgccggcgaacgggcagcctgtctacaaatctttcaat

SEQ ID NO: 124407 - DNA, 80 bp, synthetic construct
  source 1..80: mol_type = other DNA
ccgcgaattctgtcatcggcgggccatgatttcgccttggggttgaagtcttccggattgcttttactgatttctaaacc

SEQ ID NO: 124408 - DNA, 80 bp, synthetic construct
  source 1..80: mol_type = other DNA
agacctccggtgttacgaggaaggttttcctcccagcgattcagaggacgaacagggtgagcgagagatggctattctat

SEQ ID NO: 124409 - DNA, 80 bp, synthetic construct
  source 1..80: mol_type = other DNA
ccccttggagtttgtgcaggaacttctcccgggcgtcgtgggccaccttggcgcgctcccgcgcgtcgttgagcatcgcc

SEQ ID NO: 124410 - DNA, 80 bp, synthetic construct
  source 1..80: mol_type = other DNA
ccaatgggtcaaggtgatcctgatcctgtttctgtttgccggtgtggatgctaccacgagcaccataggggtggctgcgg

SEQ ID NO: 124411 - DNA, 80 bp, synthetic construct
  source 1..80: mol_type = other DNA
agcgcagggttacttctggtatctgattgtcttctgcgctgcttggcatgtgcgggggaaacttgttccactagtgacat

SEQ ID NO: 124412 - DNA, 80 bp, synthetic construct
  source 1..80: mol_type = other DNA
cttgatcggaacgcgaacaagagctacctgggcagagaacatctatgcagcaatcaaccaagtgagggcaataattggaa

SEQ ID NO: 124413 - DNA, 80 bp, synthetic construct
  source 1..80: mol_type = other DNA
cgccccgcgtagccggtgaggtgcaaaacatgtccttggggccgtagtaaccttttcccttaaaaccgactcgacgctgt

SEQ ID NO: 124414 - DNA, 80 bp, synthetic construct
  source 1..80: mol_type = other DNA
gtcatcctgctcacttgcctattgcatccgcaattggggtttgatgtcactaagattgtgttggccctggcgggtcctct

SEQ ID NO: 124415 - DNA, 80 bp, synthetic construct
  source 1..80: mol_type = other DNA
cctactcctggcacttccccaacaggcctatgccctcgatacaacggaacaggggcaaatgggcttggtccttctagtgg

SEQ ID NO: 124416 - DNA, 80 bp, synthetic construct
  source 1..80: mol_type = other DNA
caccgccacaccaccaggatcgatcactgtgccgcacccaaacattgaagaggtcgccttgtccactacgggggaaattc

SEQ ID NO: 124417 - DNA, 80 bp, synthetic construct
  source 1..80: mol_type = other DNA
aagtcgtacactcgcgcgtgtacaacatcatccagctggtgcttttccacaacaacgaccaggcgcgccgcgagtacgtg

SEQ ID NO: 124418 - DNA, 80 bp, synthetic construct
  source 1..80: mol_type = other DNA
tgaacatcataactggcagaaacagggtgggcaaaaacagggtgggcaaaaaacaaatcaaacaaaagttaatgacagga

SEQ ID NO: 124419 - DNA, 80 bp, synthetic construct
  source 1..80: mol_type = other DNA
agaaaataaaataagcagtgctaaaaacaaaattgtaagcaacttctactttggagggcaggcatatcaacctgggacaa

SEQ ID NO: 124420 - DNA, 80 bp, synthetic construct
  source 1..80: mol_type = other DNA
ggtcggctttcgctgtacggcagtagtcggtgctcgtccagacgggccagggtcatgtctttccacgggcgcagggtcct

SEQ ID NO: 124421 - DNA, 80 bp, synthetic construct
  source 1..80: mol_type = other DNA
gcggcggcaagtgctattgcaaacttagctgctcctcggcgaggaaatgtatattgggtgcgcgactcagtaaccggaat

SEQ ID NO: 124422 - DNA, 80 bp, synthetic construct
  source 1..80: mol_type = other DNA
gttcaaatgcagcctaccaaggtgttaagccaaaagatggcggcaacggcggatgggatgcaaatgctaatgctgcaagg

SEQ ID NO: 124423 - DNA, 80 bp, synthetic construct
  source 1..80: mol_type = other DNA
gacagcagacaatctaaaggtcccctgccagctgccatgcccggagttcttctcctgggtggacggggtccagatccatc

SEQ ID NO: 124424 - DNA, 80 bp, synthetic construct
  source 1..80: mol_type = other DNA
gctctaccggcagttcgacgagatggaggagtgctcacagcgtattccatacctcgccgaaggccagcagatcgctgaac

SEQ ID NO: 124425 - DNA, 80 bp, synthetic construct
  source 1..80: mol_type = other DNA
atgaccaccttactcccatgtcagactgggctgcaagcggtctgcgagatctagcagtcgccgtggaacccattatcttc

SEQ ID NO: 124426 - DNA, 80 bp, synthetic construct
  source 1..80: mol_type = other DNA
ggtgaagtcaaatcatgtacgtggcctgagacgcataccttgtggggcgatggaatccttgagagtgacttgataatacc

SEQ ID NO: 124427 - DNA, 80 bp, synthetic construct
  source 1..80: mol_type = other DNA
ccgcctcttcctctgcgggcgtggctggtgggagcgtcgcgtccgcgtccggcgctggggagagacgagaaacctccctc

SEQ ID NO: 124428 - DNA, 80 bp, synthetic construct
  source 1..80: mol_type = other DNA
gaccctcaaacaccaattccaacaaccatcatggcaaagaatgaggttttctgtgtggacgcagcaaaagggggccgcaa

SEQ ID NO: 124429 - DNA, 80 bp, synthetic construct
  source 1..80: mol_type = other DNA
ctttgctggtagttaaaggaaaattttccatgataaataacaaagtaaatggaactgatgattataaaaaatttacaata

SEQ ID NO: 124430 - DNA, 80 bp, synthetic construct
  source 1..80: mol_type = other DNA
tctactctggaatccagtgtcgtcataatcgcaccgagaccattaactttaccacccaggaacaggtgaactttacctgc

SEQ ID NO: 124431 - DNA, 80 bp, synthetic construct
  source 1..80: mol_type = other DNA
gcttgtaaggcgtctggcggggggcaaatacgcccaagctgtgctgttgaagatcgggtcttggactggcacttacatct

SEQ ID NO: 124432 - DNA, 80 bp, synthetic construct
  source 1..80: mol_type = other DNA
gagacagaagaaagtcacctttgagaggacacaggtcttagacgatcattatcgagatgtgctcaaggaagcaaaggcta

SEQ ID NO: 124433 - DNA, 80 bp, synthetic construct
  source 1..80: mol_type = other DNA
aaaagaaggactcccagtaggtttggaagtttcagatgaagaaagtaaaccgatttatgctgataaaacatatcagccag

SEQ ID NO: 124434 - DNA, 80 bp, synthetic construct
  source 1..80: mol_type = other DNA
acatgtgaccgctgagaccgcggcgcgacgcttggggcgcggttcgcccccctcgctggcaagctcatcggcgagtcagc

SEQ ID NO: 124435 - DNA, 80 bp, synthetic construct
  source 1..80: mol_type = other DNA
aatggagtgttggagagtgaaatgataataccaaaaaatttaggtggaccagtatcacaacacaattatagacctggcta

SEQ ID NO: 124436 - DNA, 80 bp, synthetic construct
  source 1..80: mol_type = other DNA
ccggcggctctgcagcccgctctaccctcgggtttacgagcttgttctccgtgggcccgaaacagaacctgcacttggtg

SEQ ID NO: 124437 - DNA, 80 bp, synthetic construct
  source 1..80: mol_type = other DNA
aacacaacgacagaatcgcgttgcccaacacaaggggaacccagtctaaacgaagagcaggacaaaaggttcatctgcaa

SEQ ID NO: 124438 - DNA, 80 bp, synthetic construct
  source 1..80: mol_type = other DNA
cgacccccgggtctcaggcccccccttttccccggaccacccggctgcgggttggcggtggtcgcgtgcggtgagctcgg

SEQ ID NO: 124439 - DNA, 80 bp, synthetic construct
  source 1..80: mol_type = other DNA
tgtacttaacccctctgtagcggctaccctgggctttggcgcttacatggccaaggctcatgggataaacccaaatatcc

SEQ ID NO: 124440 - DNA, 80 bp, synthetic construct
  source 1..80: mol_type = other DNA
agatatggggggggagtgcgttgaggatcgccgacgccgaccaaatagggtcggggtccgggggaccggggctgcagccc

SEQ ID NO: 124441 - DNA, 80 bp, synthetic construct
  source 1..80: mol_type = other DNA
gcgaagtggttaaatcgaccgtgatgctttattgtctgtccgaacgcggccggagtcgctactcgagggggcggcgggga

SEQ ID NO: 124442 - DNA, 80 bp, synthetic construct
  source 1..80: mol_type = other DNA
atcaaggggggacggcaccttattttctgccactcaaagaagaaatgcgacgagctgtccaaccaactcagatctcttgg

SEQ ID NO: 124443 - DNA, 80 bp, synthetic construct
  source 1..80: mol_type = other DNA
cacctttaaaaaaagcggcgcgattaaagtgctgaaaggctttaaaaaagaaattagcaacatggaaaccctgagcatta

SEQ ID NO: 124444 - DNA, 80 bp, synthetic construct
  source 1..80: mol_type = other DNA
tggctgaggaatggctaaagaaaggagccattgagttttgtgtaaaagtcttgtgcccatacacgcccaaaatcattgag

SEQ ID NO: 124445 - DNA, 80 bp, synthetic construct
  source 1..80: mol_type = other DNA
acaaggcatgcggacgttgtgcctgtacgtaggagtggagacacccggggcgccctattaagcccccggccaatatccac

SEQ ID NO: 124446 - DNA, 80 bp, synthetic construct
  source 1..80: mol_type = other DNA
aagaatcaggggtgggagcctctattccctcctctgagtcaggacctgtctctgacgaggtggatgcacaatctgacgca

SEQ ID NO: 124447 - DNA, 80 bp, synthetic construct
  source 1..80: mol_type = other DNA
gagcaggaactcgacatgtcaatgcggaaccagaaacacccaacatggacgtcattggagaaagaataaaaaggatcaag

SEQ ID NO: 124448 - DNA, 80 bp, synthetic construct
  source 1..80: mol_type = other DNA
tgtttgattttcctgaaccttctcaggcttttgaagagatttcgcttcacaatctttttgatgtggagctggatgagtct

SEQ ID NO: 124449 - DNA, 80 bp, synthetic construct
  source 1..80: mol_type = other DNA
cctctccatcagcgccctcagcagtctttgccgccggggctcggtgcggctgctgcagatgggatctggatcgcaagtct

SEQ ID NO: 124450 - DNA, 80 bp, synthetic construct
  source 1..80: mol_type = other DNA
cactgtgatggacaggtattcggttgacgctgacctccaaccaggagagctcatctgagaccagccattgtgaattaacc

SEQ ID NO: 124451 - DNA, 80 bp, synthetic construct
  source 1..80: mol_type = other DNA
gggggagcggtttctgttgtaccgcccctcgaccaccaccaacagcggcctcatggcccccgatttgtacgtgtacgtgg

SEQ ID NO: 124452 - DNA, 80 bp, synthetic construct
  source 1..80: mol_type = other DNA
agccctcaactgcaacgactccctgcacaccgggttcatagctgggctattttatgctaacaagttcaactccacggggt

SEQ ID NO: 124453 - DNA, 80 bp, synthetic construct
  source 1..80: mol_type = other DNA
caggaccttggcatctaggtaagcttgagatggactttgatttctgcgaaggaactacagtggtggtgactgaggactgt

SEQ ID NO: 124454 - DNA, 80 bp, synthetic construct
  source 1..80: mol_type = other DNA
ggcagctccagaagattgaaagatggctggttaggaatccattttttgcggtcacagcattggcaatagcctatctggtg

SEQ ID NO: 124455 - DNA, 80 bp, synthetic construct
  source 1..80: mol_type = other DNA
ctggccaatgctcctcctcgtcttggcgctgccccggagggcttacgcctacgatcaggagcaagccgcgtccatcggtg

SEQ ID NO: 124456 - DNA, 80 bp, synthetic construct
  source 1..80: mol_type = other DNA
ctactgtcggacatgctatcggccgcagtgtgagtagctttacaacgctcttcagttatggtcccaagcagaaccttcac

SEQ ID NO: 124457 - DNA, 80 bp, synthetic construct
  source 1..80: mol_type = other DNA
ctttctatatttcctattctttactatcttcttccttttctggtggctccatcttagccctagtcacggctagctgtgaa

SEQ ID NO: 124458 - DNA, 80 bp, synthetic construct
  source 1..80: mol_type = other DNA
ccgcgatcatatgtgccctgctggccagagacccggcctgtttatggaccggacccccggggttagtgttgtttccgcca

SEQ ID NO: 124459 - DNA, 80 bp, synthetic construct
  source 1..80: mol_type = other DNA
attcacaagttaacccactgaccctgactgcttcccttttacttttaatagggcactatgcaataataggaccgggtctg

SEQ ID NO: 124460 - DNA, 80 bp, synthetic construct
  source 1..80: mol_type = other DNA
gcagcatcactgtgccacactctaacatcgaagaagtggccctgggctctgagggtgagatccctttctacggtaaggct

SEQ ID NO: 124461 - DNA, 80 bp, synthetic construct
  source 1..80: mol_type = other DNA
tcttgtcatgcctgacagtgcctgcttctggtctggaatatcggaattcttctggcttgtacgtcgttaccaacgactgt

SEQ ID NO: 124462 - DNA, 80 bp, synthetic construct
  source 1..80: mol_type = other DNA
caatgaaatcttgctcggaccagccgatacagaaacatcaaaggggtggagactccttgctcccatcactgcttatgccc

SEQ ID NO: 124463 - DNA, 80 bp, synthetic construct
  source 1..80: mol_type = other DNA
cgccatttgctccgctgtccctgtgaattgggtccctaccggaagaaccacgtggtccatccatgccggaggggagtgga

SEQ ID NO: 124464 - DNA, 80 bp, synthetic construct
  source 1..80: mol_type = other DNA
acgaccaaccaaactatgttcttcaacatactcggggggtgggttgctacccatttggcagggccccagagctcttccgc

SEQ ID NO: 124465 - DNA, 80 bp, synthetic construct
  source 1..80: mol_type = other DNA
agcaggaacatcgtgagacaaagtcagaagtcaggtcggattaagccatagtacggaaaaaactatgctacctgtgagcc

SEQ ID NO: 124466 - DNA, 80 bp, synthetic construct
  source 1..80: mol_type = other DNA
gaacaataggtgccgtatctctggacttttcccctggaacgtcaggatctccaatcattgataaaaaagggaaagttgtg

SEQ ID NO: 124467 - DNA, 80 bp, synthetic construct
  source 1..80: mol_type = other DNA
ggcggacctggcgatccagattccaaagtgccccgaccccgagaggtacttctacacctcccagtgtcccgacattaacc

SEQ ID NO: 124468 - DNA, 80 bp, synthetic construct
  source 1..80: mol_type = other DNA
gctcgcccgagccataattgaactgacttacaggcacaaagtggtcaaggtcatgagacctgcagcagaaggaaagaccg

SEQ ID NO: 124469 - DNA, 80 bp, synthetic construct
  source 1..80: mol_type = other DNA
atcaggaccggagttaggactgtcaccaccggagctgctatcacatactctacttacggcaagttcctcgctgacgggtg

SEQ ID NO: 124470 - DNA, 80 bp, synthetic construct
  source 1..80: mol_type = other DNA
gctacggcgccggcgtggcgggcgctgtggtcactttcaagatcatgagcggcgaaatgccgtcgacagaggacttggta

SEQ ID NO: 124471 - DNA, 80 bp, synthetic construct
  source 1..80: mol_type = other DNA
ccactgataatacatcagattctggaataccgctggccagcgtgtcatcatccgagcctgcaggcgacgacgacgtcgtg

SEQ ID NO: 124472 - DNA, 80 bp, synthetic construct
  source 1..80: mol_type = other DNA
agcagttctgggccaagcacatgtggaatttcatcagcggcatccagtacctcgcgggactgtcgacgctaccagggaac

SEQ ID NO: 124473 - DNA, 80 bp, synthetic construct
  source 1..80: mol_type = other DNA
atcaacttgggcagcccagggtttgcgggacctggcagttgccgtggagcccgtgacgtttagcccaatggagaagaggg

SEQ ID NO: 124474 - DNA, 80 bp, synthetic construct
  source 1..80: mol_type = other DNA
tatttacggggtcacgtatagcatcactccacttgacctacctcaaatcattcaacgcctacacggcatggctgcctttt

SEQ ID NO: 124475 - DNA, 80 bp, synthetic construct
  source 1..80: mol_type = other DNA
gtcagggcactcgaagacggggtaaattatgcaacagggaatttacccggttgctccttttctatcttcattttggcact

SEQ ID NO: 124476 - DNA, 80 bp, synthetic construct
  source 1..80: mol_type = other DNA
cgctcgcccgcgcggcgtgggagaccgccagacacacaccagtcaactcttggttgggcaacatcatcatgtacgcccca

SEQ ID NO: 124477 - DNA, 80 bp, synthetic construct
  source 1..80: mol_type = other DNA
ttccttctcaatgtggaattgaggccagaattacttccctatttgccccatcttgataaaatgcataatgggaatgcagg

SEQ ID NO: 124478 - DNA, 80 bp, synthetic construct
  source 1..80: mol_type = other DNA
acagaaaacgtaaccatacccaaaccgactctgggggttgtttgtggggtcgggactataggataaacaaacagaccacc

SEQ ID NO: 124479 - DNA, 80 bp, synthetic construct
  source 1..80: mol_type = other DNA
cacggcacagtgcgccgatataggtggctggtggtgcaagctcaacagggtcttctttccccgctgattccgccaagccc

SEQ ID NO: 124480 - DNA, 80 bp, synthetic construct
  source 1..80: mol_type = other DNA
gaaacctggagagttcggaaaggctaagggaagcagagccatatggttcatgtggctcggagctcgctttctggagttcg

SEQ ID NO: 124481 - DNA, 80 bp, synthetic construct
  source 1..80: mol_type = other DNA
ccctgtcgcatgtgagggtagtcggccaacataaaagcctcaatttgcctaaaagccatttgagccttcgttccttctga

SEQ ID NO: 124482 - DNA, 80 bp, synthetic construct
  source 1..80: mol_type = other DNA
tagccgacgatggcggccaggatacaggccggcgccaccacccttccggtcagcccgtaatacatgcccgctgccaccat

SEQ ID NO: 124483 - DNA, 80 bp, synthetic construct
  source 1..80: mol_type = other DNA
ccctcataatcattgcaaccatgaggccacaacgcacagcctgtacattcccaattatggtgggcgatctgagaaaaaga

SEQ ID NO: 124484 - DNA, 80 bp, synthetic construct
  source 1..80: mol_type = other DNA
taagcccattaaggttactcagcaatccggcccagttgagggaagcattctttgtcagtgtaccaatcctgaatgcatgt

SEQ ID NO: 124485 - DNA, 80 bp, synthetic construct
  source 1..80: mol_type = other DNA
tatgtcgggggccccctgacaaattctcgaggggagaactgcggctaccgtcgatgccgcgcaagcggcgtcttgacgac

SEQ ID NO: 124486 - DNA, 80 bp, synthetic construct
  source 1..80: mol_type = other DNA
cccgtggagaacatggaaacaaccatgcgctcgcctgtgtttaccgacaactcaacaccgccggttgtgccacagacata

SEQ ID NO: 124487 - DNA, 80 bp, synthetic construct
  source 1..80: mol_type = other DNA
ctatgaccatctctcccccatgtcagactgggctgcaaagggcctgcgggacctagcggttgccgtggagcctatcatct

SEQ ID NO: 124488 - DNA, 80 bp, synthetic construct
  source 1..80: mol_type = other DNA
atgaactctacggggttcgtcaagacatgcggagcacccccctgtaaattggggcctggtaccaacaactccttggtctg

SEQ ID NO: 124489 - DNA, 80 bp, synthetic construct
  source 1..80: mol_type = other DNA
actccacgggttgcccggaccgcatgtcgtcatgcaaatcactgcggtcttttgaccaagggtggggtccgcttgcatat

SEQ ID NO: 124490 - DNA, 80 bp, synthetic construct
  source 1..80: mol_type = other DNA
cgatcggggcgatccccggcattgcttccgtggcggtgcaggcctctcagcgccactgagacacacacttggaaattgta

SEQ ID NO: 124491 - DNA, 80 bp, synthetic construct
  source 1..80: mol_type = other DNA
aattacaagaccgcaatttggagggtggcagcatcagagtacgttgaggtcacgcagcatggctctttctcgtacgtaac

SEQ ID NO: 124492 - DNA, 80 bp, synthetic construct
  source 1..80: mol_type = other DNA
cttatcaagccaatgagtctgacacaagaccctactgctggaactacacgcctcgaccctgctggacggtgcctgcgtcc

SEQ ID NO: 124493 - DNA, 80 bp, synthetic construct
  source 1..80: mol_type = other DNA
tggagtggaaggagaaggactgcacaaacttggatacatacttagagacatatcaaagattccagggggaaatatgtatg

SEQ ID NO: 124494 - DNA, 80 bp, synthetic construct
  source 1..80: mol_type = other DNA
gtgcctactcctacttacggtaggggtaggcatcttcctgctccccgcccgatagacgggcggccttaagcaacactccg

SEQ ID NO: 124495 - DNA, 80 bp, synthetic construct
  source 1..80: mol_type = other DNA
atgaggaaaacagactggcttccaatgacagtggcagctatgggagtcccacccctaccactctttatttttagcttgaa

SEQ ID NO: 124496 - DNA, 80 bp, synthetic construct
  source 1..80: mol_type = other DNA
ctaccgacggagcccgcgttcccccccgccgccaccggatcccaaccggaggcatccaacgcggaggccggggcccttgt

SEQ ID NO: 124497 - DNA, 80 bp, synthetic construct
  source 1..80: mol_type = other DNA
cgtatccacgggatggccaaagagaagcggacacaggctagcatccccctggaccgccagggtacactgggccatcttgg

SEQ ID NO: 124498 - DNA, 80 bp, synthetic construct
  source 1..80: mol_type = other DNA
accgatgccaccactgtgctcggtataggcaccgtcctggaccaggccgaaactgcgggagtcagactcacggtcttggc

SEQ ID NO: 124499 - DNA, 80 bp, synthetic construct
  source 1..80: mol_type = other DNA
tgccatagacatcagccggcaagagctgagatgtggaagtggagtgttcatacacaatgatgtggaggcttggatggacc

SEQ ID NO: 124500 - DNA, 80 bp, synthetic construct
  source 1..80: mol_type = other DNA
cggcctcacgcacattgatgcccatttcctctctcaaacaaaacaggcgggggaaaattttgcttaccttgtggcctacc

SEQ ID NO: 124501 - DNA, 80 bp, synthetic construct
  source 1..80: mol_type = other DNA
gtccaggcagggtttgcaaaccgtaaacttaactcaggcttttaaaaatttgcaaggtttgtggggggttcgtgctccag

SEQ ID NO: 124502 - DNA, 80 bp, synthetic construct
  source 1..80: mol_type = other DNA
gcgtgagaacggaggccacgccgcgggtctgttgtgccatgacgtccgccgggatgtcggatcgggtggccatggccagc

SEQ ID NO: 124503 - DNA, 80 bp, synthetic construct
  source 1..80: mol_type = other DNA
gtacgtccagatggcactgttgaccttgggccgttggacaggcacttacatttatgaccatctctctcccatgtccacat

SEQ ID NO: 124504 - DNA, 80 bp, synthetic construct
  source 1..80: mol_type = other DNA
agtcatctccacggcaacccagaccttcctaggcactactataaatggtgtcctgtggacggtttaccacggtgctgggt

SEQ ID NO: 124505 - DNA, 80 bp, synthetic construct
  source 1..80: mol_type = other DNA
ttcctccaacgtcaccgtagcccacgacaacaacggacagagatattactacctctcgcgtgacccaaccatccccttcg

SEQ ID NO: 124506 - DNA, 80 bp, synthetic construct
  source 1..80: mol_type = other DNA
tccggtgtcagaggatgagtcatcaccctcagaagaagaccacccgtctccccctgagctgtcaggcgaaacgcccctgc

SEQ ID NO: 124507 - DNA, 80 bp, synthetic construct
  source 1..80: mol_type = other DNA
caaacaaaacataccagccagaacctcaagtaggagaggagaactggcaagaaaatgaagtcttctatggcggcagagct

SEQ ID NO: 124508 - DNA, 80 bp, synthetic construct
  source 1..80: mol_type = other DNA
ttgcacagtcaactataccatcttcaaaattaggatgtacgtggggggggttgagcacagactcacggccgcgtgcaatt

SEQ ID NO: 124509 - DNA, 80 bp, synthetic construct
  source 1..80: mol_type = other DNA
tcttgaggaagaggtggacggccagaatgactattccagcagtagtagcggctttcctagtgatgatcttgggaggtatt

SEQ ID NO: 124510 - DNA, 80 bp, synthetic construct
  source 1..80: mol_type = other DNA
agtatgtgttaacatatacacggacagtaaacgagaccgaaaaacggtatgaaacgctattacccgccttaggattacca

SEQ ID NO: 124511 - DNA, 80 bp, synthetic construct
  source 1..80: mol_type = other DNA
gtggccagcgcggtgggcttcggcacaaatacctggtacgtcttgaaggtgtagatgagggcccgcagggctatacagac

SEQ ID NO: 124512 - DNA, 80 bp, synthetic construct
  source 1..80: mol_type = other DNA
acttcaactactgcgagggcaccaccgtggtgatcaccgagaactgcggcaccagaggccccagcctgagaaccaccacc

SEQ ID NO: 124513 - DNA, 80 bp, synthetic construct
  source 1..80: mol_type = other DNA
gaggaggagttgaaggcttaggactgcagaagcttgggtacatcttgaaggaagtcggaacaaggcctggaggaaagatc

SEQ ID NO: 124514 - DNA, 80 bp, synthetic construct
  source 1..80: mol_type = other DNA
agtaggtctgttgtgtttgctgggaactcgcccgccgttggggatacggggccgggtggtgtggtcgggctgacgtccag

SEQ ID NO: 124515 - DNA, 80 bp, synthetic construct
  source 1..80: mol_type = other DNA
gtaaaacttttgacaccgaatacatcaaaacacgcaacaatgactgggactttgtcgtcacaacagacatatctgagatg

SEQ ID NO: 124516 - DNA, 80 bp, synthetic construct
  source 1..80: mol_type = other DNA
actgggtgctgtccagaatgaagtcaccctgacacacccgataaccaaatacatcatggcttgcatgtcggcggacttgg

SEQ ID NO: 124517 - DNA, 80 bp, synthetic construct
  source 1..80: mol_type = other DNA
gtcagctgtcagccccgtccctcaaggctacatgcaccactcacgccgaccatccggacgctgagctcttggaagccaac

SEQ ID NO: 124518 - DNA, 80 bp, synthetic construct
  source 1..80: mol_type = other DNA
gctccctggggcgcccttaagggccgcgtgcggtcgcgcaccaccgtcgacgacgtgatcgaccaggtggtggccgacgc

SEQ ID NO: 124519 - DNA, 80 bp, synthetic construct
  source 1..80: mol_type = other DNA
aacgccacgcagccagaactcgccccggaagaccccgaggattcggccctcttggaggaccccgtggggacggtggcgcc

SEQ ID NO: 124520 - DNA, 80 bp, synthetic construct
  source 1..80: mol_type = other DNA
ttgctagtgcggcgcgtagctggagggaagtacgtccaagcaatgctcttaaagttgggagcatggacgggcacttacat

SEQ ID NO: 124521 - DNA, 80 bp, synthetic construct
  source 1..80: mol_type = other DNA
ttcgtgcccgtagagagcatggagaccactatgagatcaccggtcttcactgataattcaaccccaccggccgtaccgca

SEQ ID NO: 124522 - DNA, 80 bp, synthetic construct
  source 1..80: mol_type = other DNA
cgtttttcgatgatgtgtggatgggacgtgaagagtcgtatacaattataactgtagactcaacgggaatggccatctat

SEQ ID NO: 124523 - DNA, 80 bp, synthetic construct
  source 1..80: mol_type = other DNA
gcagtgttcgttgatgaaaatcaatggaactcagcaaaagaggcagtggaagatgaacggttctgggaccttgtgcacag

SEQ ID NO: 124524 - DNA, 80 bp, synthetic construct
  source 1..80: mol_type = other DNA
tccgtggtcctctgtgagtgctatgacgcgggttgtgcttggtatgagcttacacccgccgagaccacggttaggttacg

SEQ ID NO: 124525 - DNA, 80 bp, synthetic construct
  source 1..80: mol_type = other DNA
ttagaccccaccttcacaataaccacacaaactgttccacaagactcagttgctcgtagtcagcgcagagggaggactgg

SEQ ID NO: 124526 - DNA, 80 bp, synthetic construct
  source 1..80: mol_type = other DNA
ttcaaatccaaaagcaaccaaatgagcaaaacgctgggctcgaggaccatgactacctaaacgagggagatgtcctgttt

SEQ ID NO: 124527 - DNA, 80 bp, synthetic construct
  source 1..80: mol_type = other DNA
acaaacggcaggaccctggcatctaggcaagcttgagatggactttgatttctgtgaaggaaccacagtggtggtgactg

SEQ ID NO: 124528 - DNA, 80 bp, synthetic construct
  source 1..80: mol_type = other DNA
caagatgaacttgtaggtagggccagagtatcacaaggcgccggatggagcttgagagaaactgcatgcctaggcaagtc

SEQ ID NO: 124529 - DNA, 80 bp, synthetic construct
  source 1..80: mol_type = other DNA
tctccgactcagcaaccgtggaccgacaagaacagtttcgactcggaagcttgcttaacgtagtgctaacagttttttat

SEQ ID NO: 124530 - DNA, 80 bp, synthetic construct
  source 1..80: mol_type = other DNA
atggtaacaaatctggcttgtactaccttaccaatgactgcccaaacagcagcattgtctaccaagcccatgacgtgatt

SEQ ID NO: 124531 - DNA, 80 bp, synthetic construct
  source 1..80: mol_type = other DNA
ggtttgacagaactctgcaatggtaaccctattttaagacacacgtgtgatgggcaaaatatcacacttattaatgttaa

SEQ ID NO: 124532 - DNA, 80 bp, synthetic construct
  source 1..80: mol_type = other DNA
aacaccttctgagttttaagaaagaactagggaccttgaccagtgctattaatcggcggagctcaaaacaaaagaaaaga

SEQ ID NO: 124533 - DNA, 80 bp, synthetic construct
  source 1..80: mol_type = other DNA
gaggacagggcctctcagatgctgacctgctcggacggcaactgtcacctgctgaagaccattcacgtagccagccactc

SEQ ID NO: 124534 - DNA, 80 bp, synthetic construct
  source 1..80: mol_type = other DNA
gcgggggcgtgggcggtgacgcccgacggtgagggacaaggaggagtttcggaaagccggccccggtcgtgctggtataa

SEQ ID NO: 124535 - DNA, 80 bp, synthetic construct
  source 1..80: mol_type = other DNA
ctcgtgcgctccgtgacgggggggaaatactttcagatggtcatactgagcgttggcagatggttcaacacctacctata

SEQ ID NO: 124536 - DNA, 80 bp, synthetic construct
  source 1..80: mol_type = other DNA
cagctggccatggaacgcgcgggaggatgtcgtgcggatggctatgactgacaccacagcctttggacagcagcgcgtgt

SEQ ID NO: 124537 - DNA, 80 bp, synthetic construct
  source 1..80: mol_type = other DNA
cctcaataccatcagagtacttgcttcctaaatgcaaatttccaccggcactgccaccctgggcgcggcctgattataat

SEQ ID NO: 124538 - DNA, 80 bp, synthetic construct
  source 1..80: mol_type = other DNA
ccagtgttgtgacctggaaccagagacccgcaaggtgataaccgcgctcacagagagactctatgtgggcggccccatgt

SEQ ID NO: 124539 - DNA, 80 bp, synthetic construct
  source 1..80: mol_type = other DNA
aaaagggaccacttacggagtgtgctcgaaagccttccaattccatggacatccagcggatactgggcatggtactgtcg

SEQ ID NO: 124540 - DNA, 80 bp, synthetic construct
  source 1..80: mol_type = other DNA
tcgtccctgcgaggcgcagaggcgataatcgggcggctctcctcagtccacggcccattagcacccttaaagggtcctcg

SEQ ID NO: 124541 - DNA, 80 bp, synthetic construct
  source 1..80: mol_type = other DNA
gaggaggagaagttgcctataagtccattgagcaactcccttatacgccaccacaatctggtgtattccaccacgtcgcg

SEQ ID NO: 124542 - DNA, 80 bp, synthetic construct
  source 1..80: mol_type = other DNA
cgtttgaggtgggtggtgttgcggggatgatcccgaaaacgccaacgcggcgggctgttgtaaagcagactgatcggcgc

SEQ ID NO: 124543 - DNA, 80 bp, synthetic construct
  source 1..80: mol_type = other DNA
gacttctgaaccggacccccccgaggcggacagccagtctgatgacgggtcttactcgtcaatgcctccgctcgaaggtg

SEQ ID NO: 124544 - DNA, 80 bp, synthetic construct
  source 1..80: mol_type = other DNA
cgaccgcgagctccggcgcgcaacagcggaggccctggagcgccagcagcgcgcggccgacctggcggccgagtccgtga

SEQ ID NO: 124545 - DNA, 80 bp, synthetic construct
  source 1..80: mol_type = other DNA
cctatgctagtcaaggctataaagtattggtgctcaatccatctgtagccgccaccctgtccttcggtgcctatatgagt

SEQ ID NO: 124546 - DNA, 80 bp, synthetic construct
  source 1..80: mol_type = other DNA
gatacctcttctttcaccttctcttacattgctcaagaatgaagacaaagaacaataaagtgttttgaactgaatttatg

SEQ ID NO: 124547 - DNA, 80 bp, synthetic construct
  source 1..80: mol_type = other DNA
ggctttacagagtgggaggaagtccctttctgttcacatcactttcatgaacttgtgatgaaggacggacgctccctcat

SEQ ID NO: 124548 - DNA, 80 bp, synthetic construct
  source 1..80: mol_type = other DNA
actgatggagtttgaagaacctcatgccaccaaacaatctgttgtggctctagggtcgcaggaaggtgcattgcaccaag

SEQ ID NO: 124549 - DNA, 80 bp, synthetic construct
  source 1..80: mol_type = other DNA
ccttctacgggaaggcgatacctctaaatgtgatcaagggaggccgacatctcatattctgccactccaagaagaagtgt

SEQ ID NO: 124550 - DNA, 80 bp, synthetic construct
  source 1..80: mol_type = other DNA
ggcaggcggccaggcactcgacggccacgcggccggcctgggcgcggcgcccggcgtcgtcgtcggcgtcggcgtggcgt

SEQ ID NO: 124551 - DNA, 80 bp, synthetic construct
  source 1..80: mol_type = other DNA
actccacccaagtaggtgcaaaccaagcagcaaagtttaccatatctccgaacgctccagcaatcacagtgaaattggga

SEQ ID NO: 124552 - DNA, 80 bp, synthetic construct
  source 1..80: mol_type = other DNA
cccggggactctgctagacttgcttgcaggaggccactggggtgtcctcgtgggaatagcctactacagcatgcaggcta

SEQ ID NO: 124553 - DNA, 80 bp, synthetic construct
  source 1..80: mol_type = other DNA
cttcttggccaagaaaggtggagaggcggtggatactatcagcgtgcttttgcactctgaggaaggttccagagcttacc

SEQ ID NO: 124554 - DNA, 80 bp, synthetic construct
  source 1..80: mol_type = other DNA
ttgtgacggaagtacagttaagaatccgcagataagacatacttgtaatgatcaaaacttaactctgattcatgttaaca

SEQ ID NO: 124555 - DNA, 80 bp, synthetic construct
  source 1..80: mol_type = other DNA
gacctggagcctgacgcacgcaaggtaatatccgccctcacggagagactctatgtgggcggccccatgtttaacagcag

SEQ ID NO: 124556 - DNA, 80 bp, synthetic construct
  source 1..80: mol_type = other DNA
gctggcgctgtggtcactttcaagatcatgagcggcgagatgccgtccacagaggacttggtaaacttgctcccagccat

SEQ ID NO: 124557 - DNA, 80 bp, synthetic construct
  source 1..80: mol_type = other DNA
taatcagacgacaaccgcaggttttgtaatgtatgtgctcgtgtttattgtggatacgaaccggtgacgggaggggaaaa

SEQ ID NO: 124558 - DNA, 80 bp, synthetic construct
  source 1..80: mol_type = other DNA
ctggttgactacccgtacaggctttggcactacccatgcactgtcaacttcaccctacacaaggtccgcttgtatgtggg

SEQ ID NO: 124559 - DNA, 80 bp, synthetic construct
  source 1..80: mol_type = other DNA
aagacctggcagtagctactgaacctgtaatatttagtcccatggaaattaaggttattacttggggcgcagacacagca

SEQ ID NO: 124560 - DNA, 80 bp, synthetic construct
  source 1..80: mol_type = other DNA
atcgtatatgggcccgccggggtggaatgtggcgtttataacacccgcgttgggtaatttagactccaccccattaacgt

SEQ ID NO: 124561 - DNA, 80 bp, synthetic construct
  source 1..80: mol_type = other DNA
ggttaacatcggtcagtgctaaaaagcgaccgaaatagcccgggggaatacatacccgcaggcgtagagacaacattaca

SEQ ID NO: 124562 - DNA, 80 bp, synthetic construct
  source 1..80: mol_type = other DNA
atacaggccgccctactaaccttaggcagatggtcgggcacctatatataccaccacctcacgcccattgatacctgggc

SEQ ID NO: 124563 - DNA, 80 bp, synthetic construct
  source 1..80: mol_type = other DNA
ccagggtgtccgtcggaagcggggggcgaatgcatgccgcctcgggacacatcagcagcgcgccgagcttgtcggtcacg

SEQ ID NO: 124564 - DNA, 80 bp, synthetic construct
  source 1..80: mol_type = other DNA
tgaagcccggatcatgcttgacaacatcaacatgccgaatggcctgatagcccaactgtaccaaccagagagagaaaagg

SEQ ID NO: 124565 - DNA, 80 bp, synthetic construct
  source 1..80: mol_type = other DNA
tcatgcgcggaggctggttatcgtgtttatccataacatggactcttgtaaaaaacatggaaaaaccagggctgaagaga

SEQ ID NO: 124566 - DNA, 80 bp, synthetic construct
  source 1..80: mol_type = other DNA
ggacgggcgccctaatcacgccctgtaccgcagaggaaaccaaactacccatcaacgcactgagcaactcgctgctgcgt

SEQ ID NO: 124567 - DNA, 80 bp, synthetic construct
  source 1..80: mol_type = other DNA
gcttcaaaaaggaattaggaacaatgatcaacgtggtcaacaatcggggcacaaaaaagaagagaagcaacaatggacca

SEQ ID NO: 124568 - DNA, 80 bp, synthetic construct
  source 1..80: mol_type = other DNA
ggaaacccagtggctacaactattagttttaatgaagaaattgatgatacatgtgcttattctatcagatttgattttgc

SEQ ID NO: 124569 - DNA, 80 bp, synthetic construct
  source 1..80: mol_type = other DNA
cggagaggtagaaccggcagagggaggtatgggacctacagatttgtgactcctggagagcgaccatctggcatgtttga

SEQ ID NO: 124570 - DNA, 80 bp, synthetic construct
  source 1..80: mol_type = other DNA
ggctaaccttctgtggaggcaggagatgggcggtaatatcaccagggttgagtcagagaacaaagtggtgatcctggact

SEQ ID NO: 124571 - DNA, 80 bp, synthetic construct
  source 1..80: mol_type = other DNA
gcaatgagatcttgctcgggcctgccgactcagaaacatcaaaggggtggagactccttgcccccatcacagcgtacgcg

SEQ ID NO: 124572 - DNA, 80 bp, synthetic construct
  source 1..80: mol_type = other DNA
tactgaagttccacaaagcgaagtgtatcagtctggtcctgattatttctttcaaacttccaggcaggggttgcaaaccg

SEQ ID NO: 124573 - DNA, 80 bp, synthetic construct
  source 1..80: mol_type = other DNA
ccacaattggataactgaggactgccccatcccatgctccggatcctggctccgcgacgtgtgggactgggtttgcacca

SEQ ID NO: 124574 - DNA, 80 bp, synthetic construct
  source 1..80: mol_type = other DNA
ccgtttgcctggctcgcgcccagcacggccagtctgtgtgagatatcccaataaagtgcagtcgttttctaacccacgga

SEQ ID NO: 124575 - DNA, 80 bp, synthetic construct
  source 1..80: mol_type = other DNA
ccccaggtggtcattgacatcattgccggggcccactgggaggtcttgttcgccgccgcatactacgcgtcggcggctaa

SEQ ID NO: 124576 - DNA, 80 bp, synthetic construct
  source 1..80: mol_type = other DNA
tttgggcgcggccggactacaaccccccgctagtagagacgtggaaaaagcctgactacgaaccacctgtggtccatggc

SEQ ID NO: 124577 - DNA, 80 bp, synthetic construct
  source 1..80: mol_type = other DNA
actgacttttaggtaaaccaataccaccccatgcggaaaaatataaaaagaatcaggacaaaaaaaggtatatttattgc

SEQ ID NO: 124578 - DNA, 80 bp, synthetic construct
  source 1..80: mol_type = other DNA
gtgggcgaaagtcgttgtcatccttctgttggccgccggggtggacgcgcgcacccatactgttggtggttctgccgcgc

SEQ ID NO: 124579 - DNA, 80 bp, synthetic construct
  source 1..80: mol_type = other DNA
gaaaatgtcaccacctcggcagacatgaggccgtattgctggcactacccaccaagacagtgcggcatagtccccgcgag

SEQ ID NO: 124580 - DNA, 80 bp, synthetic construct
  source 1..80: mol_type = other DNA
caccaccggacgagcctgatgattcggagacgggatctatgtcttccatgcccccccttgagggggagcctggagaccca

SEQ ID NO: 124581 - DNA, 80 bp, synthetic construct
  source 1..80: mol_type = other DNA
ctgacaattcagagccagggctaagcgtgggactggcaagcgtgagtgagtactttaatgctccaaagctagcacccaaa

SEQ ID NO: 124582 - DNA, 80 bp, synthetic construct
  source 1..80: mol_type = other DNA
tcccacacgaggggtggcagcagcgccgggtctcgcattaggtgattcagctcggcttgcgcctgcccgcccagctccgg

SEQ ID NO: 124583 - DNA, 80 bp, synthetic construct
  source 1..80: mol_type = other DNA
ggcggacaaaaggcccacggcctggtttcttccatccatcagggcagcaaatgtcatggcagcctctttgcgcaaagctg

SEQ ID NO: 124584 - DNA, 80 bp, synthetic construct
  source 1..80: mol_type = other DNA
tttcattgcctcgccgcaacaccacaatttcgtgcaggaatgcaattgctctctctatccgggccacataacgggtcatc

SEQ ID NO: 124585 - DNA, 80 bp, synthetic construct
  source 1..80: mol_type = other DNA
gtgccatggacacatcccccgccgcgagcgttcccgcgccgcaggtcgccgtccgtgcgcgtcaagtcgcgtcgtcgtcg

SEQ ID NO: 124586 - DNA, 80 bp, synthetic construct
  source 1..80: mol_type = other DNA
tcaccaacgactgttccaactcgagcattgtgtacgaaacgagtgatgctgtgctccacaccccggggtgtgtaccttgc

SEQ ID NO: 124587 - DNA, 80 bp, synthetic construct
  source 1..80: mol_type = other DNA
ggtcgccagggccgtgtgcagcgcgtacaccgcagcgcccagcacggcgttgagcccgctgttggcgagcagccggcgcg

SEQ ID NO: 124588 - DNA, 80 bp, synthetic construct
  source 1..80: mol_type = other DNA
gccatggggtccgggtacgccccgcggaccgcggacgtcgtctccggtccgcggacccagcggcccgcgtcgcggtcgtc

SEQ ID NO: 124589 - DNA, 80 bp, synthetic construct
  source 1..80: mol_type = other DNA
atctacgacggccagcagatccgcgtctttacgtgcctgctgcgcctggccgaccagaagggctttattctgccggacac

SEQ ID NO: 124590 - DNA, 80 bp, synthetic construct
  source 1..80: mol_type = other DNA
gtcctgtatgaggcttttgatgagatggaggaatgcgcctctagggcggctctcatcgaagaggggcagcggatagccga

SEQ ID NO: 124591 - DNA, 80 bp, synthetic construct
  source 1..80: mol_type = other DNA
caggtgcgcggcggccgcgatggcatcgcgtgggccgtcactatattctgcccgggtgtggtgtttgacattaccaaatg

SEQ ID NO: 124592 - DNA, 80 bp, synthetic construct
  source 1..80: mol_type = other DNA
attccccatcaacgcgtacaccacgggcccctgcacgccttccccggcgccaaactattccaaggcgctgtggcgtgtgg

SEQ ID NO: 124593 - DNA, 80 bp, synthetic construct
  source 1..80: mol_type = other DNA
aggaagagaagctgcccatcagtccattaagcaattctctcattagacaccacaacatggtgtactctaccaccactcgc

SEQ ID NO: 124594 - DNA, 80 bp, synthetic construct
  source 1..80: mol_type = other DNA
ccttggtctcggccgtgtcctgccgggtcacgaaggcgacatactcggcgtacgccgtgttcttcacggggctctggtcc

SEQ ID NO: 124595 - DNA, 80 bp, synthetic construct
  source 1..80: mol_type = other DNA
ccagagcttccaggtggcccacctgcatgctcccaccggcagcggtaagagcaccaaggtcccggctgcgtacgcagccc

SEQ ID NO: 124596 - DNA, 80 bp, synthetic construct
  source 1..80: mol_type = other DNA
aaacaacggatggagaaccggactccacactgaataggctataaacgtcagcccaggatccaaaattttattatgggtct

SEQ ID NO: 124597 - DNA, 80 bp, synthetic construct
  source 1..80: mol_type = other DNA
cccaacgtcgacatgacttcgtccaggacgagcacgtcgtagttgttcaacaggttcgggcccacgcgatgaagactttc

SEQ ID NO: 124598 - DNA, 80 bp, synthetic construct
  source 1..80: mol_type = other DNA
acaggcttgagatggccatgtggagaagctcggtcacagagctgaatctggctctggcggaaggggaggcaaatctcaca

SEQ ID NO: 124599 - DNA, 80 bp, synthetic construct
  source 1..80: mol_type = other DNA
agctcccctctctgactgggccagcgacggattgagagatcttgccgttgcggtggaaccggtcgtcttctccccgatgg

SEQ ID NO: 124600 - DNA, 80 bp, synthetic construct
  source 1..80: mol_type = other DNA
ctcatggagtacatccccgtcgttggcgcaccgctcggtggcgtcgccagggctctcgcgcatggcgtgagagtcctgga

SEQ ID NO: 124601 - DNA, 80 bp, synthetic construct
  source 1..80: mol_type = other DNA
ttcgggaagcggccgaggtgggcgcgacggcgggatcgggatttcgggtagcggccgaggtatataattcagttatactt

SEQ ID NO: 124602 - DNA, 80 bp, synthetic construct
  source 1..80: mol_type = other DNA
catcaagggcgtggatctggtgcgcaaaaacaactgcgcgtttatcaaccgcacctccagggccctggtcgacctgctgt

SEQ ID NO: 124603 - DNA, 80 bp, synthetic construct
  source 1..80: mol_type = other DNA
gagagatgtcagtagcggctgaatgtcaccgaccgcctcggccaaagtatccaccagccctccctatttgggctcgaccg

SEQ ID NO: 124604 - DNA, 80 bp, synthetic construct
  source 1..80: mol_type = other DNA
aacccccctcagcgtccaggagctgtgtcgggcctacgagctcaacctcttctcgccgcgcgtgccccccaaacgccagc

SEQ ID NO: 124605 - DNA, 80 bp, synthetic construct
  source 1..80: mol_type = other DNA
tgtggcccttgctcctgctagtattggctctgcctcgtagggcatatgctggcaacggagaggaggccgcatcttttggg

SEQ ID NO: 124606 - DNA, 80 bp, synthetic construct
  source 1..80: mol_type = other DNA
ggccctcctaggccccctatacctgtttcaagcctgcttactgcgcgtgccctactttgtacgcgcccatgcgcttttgc

SEQ ID NO: 124607 - DNA, 80 bp, synthetic construct
  source 1..80: mol_type = other DNA
ctacccggagacaccgggggcccttgcatcagccataaaggagacatttgaggagggaagctgtggcgtagtcccccaga

SEQ ID NO: 124608 - DNA, 80 bp, synthetic construct
  source 1..80: mol_type = other DNA
gttaagactaagctcaaactcactccactgcgtggcgcttcctccctggatctttcagggtggtttgcgtcaggctacag

SEQ ID NO: 124609 - DNA, 80 bp, synthetic construct
  source 1..80: mol_type = other DNA
tatacagggtgacctttctatgcccgtaccgtaccaaatacagtacaactatggaccaactggctactcctttaaattta

SEQ ID NO: 124610 - DNA, 80 bp, synthetic construct
  source 1..80: mol_type = other DNA
gtcagctcgttgatgtcacctaaggcttcaagacgttccatggcttcgtaaaagtctactgcaaaattgaaaaactggga

SEQ ID NO: 124611 - DNA, 80 bp, synthetic construct
  source 1..80: mol_type = other DNA
tgtgaatgttgggcgttggctgcgggatcgggctttcgggaagcggccgaggtgggcgcgacggcgtgatcgggctttcg

SEQ ID NO: 124612 - DNA, 80 bp, synthetic construct
  source 1..80: mol_type = other DNA
cgggatccgagaacttctctaggaaagcgtctatccaatcgcaatcgcaaggtaagctgaggacggtgggccgctggtgg

SEQ ID NO: 124613 - DNA, 80 bp, synthetic construct
  source 1..80: mol_type = other DNA
cggggagagtcttcgcgaaaagcgtacgatcataactcaccttatatatggccacgtaatgattatgatggatttttaga

SEQ ID NO: 124614 - DNA, 80 bp, synthetic construct
  source 1..80: mol_type = other DNA
gagatcactaacgtgagccgggccctgggtcaggaagatatcggcagcctggaagccacgttgaactttttgctaaccaa

SEQ ID NO: 124615 - DNA, 80 bp, synthetic construct
  source 1..80: mol_type = other DNA
ccagttgatcgtcgacatatttgtgggcggtcattggggggtgttggccggaatactatactacagcatggtagccaact

SEQ ID NO: 124616 - DNA, 80 bp, synthetic construct
  source 1..80: mol_type = other DNA
attttcatgcattgcaataggaatcatcacactctatttgggagccgtggtacaagctgacatggggtgtgtcataaact

SEQ ID NO: 124617 - DNA, 80 bp, synthetic construct
  source 1..80: mol_type = other DNA
tgtacaactcaagaggccagtcatgcggctaccgcaggtgtcgtgctagcggcgtgctcactaccagtctgggcaacacc

SEQ ID NO: 124618 - DNA, 80 bp, synthetic construct
  source 1..80: mol_type = other DNA
atcgcatataacagcagagactgcaggtcggcgtctggctcgtggatctcctccttcgctcgccagctcatcggcgagcc

SEQ ID NO: 124619 - DNA, 80 bp, synthetic construct
  source 1..80: mol_type = other DNA
tagcgtttagtttagcattcgctctcgcctttccgcccgccccccgaccgttgcgcctttttttttttcgtccaccaaag

SEQ ID NO: 124620 - DNA, 80 bp, synthetic construct
  source 1..80: mol_type = other DNA
ctgaccgcgaggtgatgtatcaacaatatgatgagatggaagaatgctctgcccatctcccatacctcgtggaggcccaa

SEQ ID NO: 124621 - DNA, 80 bp, synthetic construct
  source 1..80: mol_type = other DNA
ccgcagcttatccaggagggccgttaaccacatcaagtccgtgtgggaggaccttctggaagactcaaacacaccaatat

SEQ ID NO: 124622 - DNA, 80 bp, synthetic construct
  source 1..80: mol_type = other DNA
cggtcgtgggcgtaatacgtcaggtacgggtacacgtcgcccgcccgcaccttggcgataaacgcgggcgttcccgcggg

SEQ ID NO: 124623 - DNA, 80 bp, synthetic construct
  source 1..80: mol_type = other DNA
aagccaagtccgccctgaaagatgggtccaaaatcaagcatgcagtatctagagggtccagtaagatcagatggattgtt

SEQ ID NO: 124624 - DNA, 80 bp, synthetic construct
  source 1..80: mol_type = other DNA
actatgaggcttgtgggtccgcgattgtgcgcgaacacgtggcacggtaccttccctatcaatgagtacaccactggtcc

SEQ ID NO: 124625 - DNA, 80 bp, synthetic construct
  source 1..80: mol_type = other DNA
ccaacctatccaggtcatctatgcgaatggtagcgggcgtgtgaacagaacagcactcaactgttttgactccatccaaa

SEQ ID NO: 124626 - DNA, 80 bp, synthetic construct
  source 1..80: mol_type = other DNA
gatgctagcggcgcagtggggcgcccccaggcatttggcacagagaaacgcgtaatcggccacccactgaggcgagaggc

SEQ ID NO: 124627 - DNA, 80 bp, synthetic construct
  source 1..80: mol_type = other DNA
gaaggaacgacaaaaaaagaaacaaacgcgacaccgctcgtacgtgtaatggggcgcagtgttttttattagcatcggtg

SEQ ID NO: 124628 - DNA, 80 bp, synthetic construct
  source 1..80: mol_type = other DNA
ttgcttttgtggtttttctggttgacaaatggagccaggacacccaactgagcaggggctacatcctggacttcgcagcc

SEQ ID NO: 124629 - DNA, 80 bp, synthetic construct
  source 1..80: mol_type = other DNA
ccatgtcaccggccacaggatggcgtgggatatgatgatgaactggtcaccaactgtaactctcgtggtctctagcgtct

SEQ ID NO: 124630 - DNA, 80 bp, synthetic construct
  source 1..80: mol_type = other DNA
cacaggccatcgtatggcctgggatatgatgatgaactggtcccccactctggccctggtgacggcgcagctcctccgag

SEQ ID NO: 124631 - DNA, 80 bp, synthetic construct
  source 1..80: mol_type = other DNA
ggatgcgccgccgcactcaaaaagccccaaagcgcatacgcctcccccacatccgggaagacgaccagccgtcctcgcac

SEQ ID NO: 124632 - DNA, 80 bp, synthetic construct
  source 1..80: mol_type = other DNA
ggtccgcggggcgtacccggaccccatggccagcctgtcgccgcgacccccggcgccccgccgacaccaccaccaccacc

SEQ ID NO: 124633 - DNA, 80 bp, synthetic construct
  source 1..80: mol_type = other DNA
ggaagagcgcaccgaatggcattggaggaactgccagatgcgttacagacagttgtcctgatagcgctgctgagcatcat

SEQ ID NO: 124634 - DNA, 80 bp, synthetic construct
  source 1..80: mol_type = other DNA
atcgcgatggatgctacagtaaactctcagtttattgatttaatctccggattgcgtggagatgaaaacatacacacaat

SEQ ID NO: 124635 - DNA, 80 bp, synthetic construct
  source 1..80: mol_type = other DNA
attctgcggggctgacgcgcgtgctgttggccgggacggttcgcgaaccctttggtgggtttacgcgggcacgcacgctc

SEQ ID NO: 124636 - DNA, 80 bp, synthetic construct
  source 1..80: mol_type = other DNA
taacaatgttggaagtgcatatgaagaagctgttggttttatgccaagtacaacagcttatcctaaaccacctactcctc

SEQ ID NO: 124637 - DNA, 80 bp, synthetic construct
  source 1..80: mol_type = other DNA
tctccaaggtcccgtttgggacgtgccagcatttcctcgccgcgaatcgctacctcgaaacccgggacattatgcctatc

SEQ ID NO: 124638 - DNA, 80 bp, synthetic construct
  source 1..80: mol_type = other DNA
cacctctcggcagattatgaccatactcagctccctcaccgtgaccagcctcttgcggaagctgcacgaatggatcaaca

SEQ ID NO: 124639 - DNA, 80 bp, synthetic construct
  source 1..80: mol_type = other DNA
ttagagagggtgttataacagtctgtcaggcggggtatattctacataatacaaggatcggctttaactttgtcaacatt

SEQ ID NO: 124640 - DNA, 80 bp, synthetic construct
  source 1..80: mol_type = other DNA
tatgggttccaatactctcccgcagaacgggtcgattttctcctcaaggcttggagaggtaaaaaggacccaatggggtt

SEQ ID NO: 124641 - DNA, 80 bp, synthetic construct
  source 1..80: mol_type = other DNA
aacattccagccagaacctcaagtaggagaagaaaactggcaggaaacagaagccttctatggaggaagggctcttaaaa

SEQ ID NO: 124642 - DNA, 80 bp, synthetic construct
  source 1..80: mol_type = other DNA
aagtagcctctaatggacacagttaccaagaccgctcatggtgttttacaggacaaaccaacaacacaatcctggaagac

SEQ ID NO: 124643 - DNA, 80 bp, synthetic construct
  source 1..80: mol_type = other DNA
gggagtcatggtgcaggccgatagtggttgcgttgtgagctggaaaaacaaagaactgaaatgtggcagtgggattttca

SEQ ID NO: 124644 - DNA, 80 bp, synthetic construct
  source 1..80: mol_type = other DNA
gctcgtggtatgatttgcagcccgctgagaccacagtcagactgagagcttacttgtccacgccagggctacctgtctgc

SEQ ID NO: 124645 - DNA, 80 bp, synthetic construct
  source 1..80: mol_type = other DNA
cgtgccccaccgactgcttccggaaacatccagataccacctacgcccgatgcggtgcagggccttggcttacgccacga

SEQ ID NO: 124646 - DNA, 80 bp, synthetic construct
  source 1..80: mol_type = other DNA
gactccgtcgtcctctgcgaggcgtatgatacgggttgcgcgtggtatgaattaactccagctgagaccacggttcgact

SEQ ID NO: 124647 - DNA, 80 bp, synthetic construct
  source 1..80: mol_type = other DNA
cagtcgcaatcgcaagaattattatattgtttcaatcaaataccactaacactatcaatgtgcagactactttaaatcat

SEQ ID NO: 124648 - DNA, 80 bp, synthetic construct
  source 1..80: mol_type = other DNA
cgctcaagggtggggtcctatcacatatgccaacgtgagtggctcctcggaggataagccatattgctggcactatgcac

SEQ ID NO: 124649 - DNA, 80 bp, synthetic construct
  source 1..80: mol_type = other DNA
tacccttgatctgttgtgccccacggactgttttaggaagcacccagataccacctatcttaagtgtggagcagggccct

SEQ ID NO: 124650 - DNA, 80 bp, synthetic construct
  source 1..80: mol_type = other DNA
taccgacttatacattcatccggctaacggcatttgatgaataccgcaaattaacgggacaacccggactttctgttgaa

SEQ ID NO: 124651 - DNA, 80 bp, synthetic construct
  source 1..80: mol_type = other DNA
tcaaaagcattcagcacctgacagccacagaagaaatcgctgtacagaactggttagcgagagtggggcgtgaaagacta

SEQ ID NO: 124652 - DNA, 80 bp, synthetic construct
  source 1..80: mol_type = other DNA
cttgggacttcaatttctggagtcctttgggctgttttccacggtgctggaaacaagacgctggcaggctctcgtggccc

SEQ ID NO: 124653 - DNA, 80 bp, synthetic construct
  source 1..80: mol_type = other DNA
catccctgcaaggcgtaggggcgacacccgtgcagcacttcttagtccaagaccaataagcaccttgaaagggtcatctg

SEQ ID NO: 124654 - DNA, 80 bp, synthetic construct
  source 1..80: mol_type = other DNA
cccactcctctcctctaccgattgggggccgtgcaaaatgaagtgacactcacccatcctataaccaaatacatcatggc

SEQ ID NO: 124655 - DNA, 80 bp, synthetic construct
  source 1..80: mol_type = other DNA
atatacggagtcacatattctatctctccattagacctacctccaattattcaacgcctccatggcatggctgctttttc

SEQ ID NO: 124656 - DNA, 80 bp, synthetic construct
  source 1..80: mol_type = other DNA
tgcgctgcaaagtaacgcgctcactctttcttacaacgctcccttaaacgtagtaaataacaatttagctctaaatgtgt

SEQ ID NO: 124657 - DNA, 80 bp, synthetic construct
  source 1..80: mol_type = other DNA
tggactacacggaggtccagcgccgcaaccagctgcacgacctgcgctttgccgacatcgacacggtcatccgcgccgac

SEQ ID NO: 124658 - DNA, 80 bp, synthetic construct
  source 1..80: mol_type = other DNA
gcttggccgaagcttgaacagttttggcaaaaacatctgtggaattttgtgagcggtatacagtacctggctggcctttc

SEQ ID NO: 124659 - DNA, 80 bp, synthetic construct
  source 1..80: mol_type = other DNA
gcgtccgcgggcagttgggaggtgatgctgctgatgatgtaattaaagtaggcggtcttcaggcgacggatggtggcgag

SEQ ID NO: 124660 - DNA, 80 bp, synthetic construct
  source 1..80: mol_type = other DNA
acatcaagtgcccatgccaggtcccatcacctgaattcttcacagaggtggacggggtgcgcctgcacaggtttgccccc

SEQ ID NO: 124661 - DNA, 80 bp, synthetic construct
  source 1..80: mol_type = other DNA
tatcaatcgcggcctccaaaagagcctggacccgcacttccacaaacaccagcaaagcaaaagcgttattatcaaactct

SEQ ID NO: 124662 - DNA, 80 bp, synthetic construct
  source 1..80: mol_type = other DNA
ctatcccccttgtcctcttgggcgagtgacgggctccgggaccttactgtcgccgttgagcctgttattttctcgcctat

SEQ ID NO: 124663 - DNA, 80 bp, synthetic construct
  source 1..80: mol_type = other DNA
gagagtgttactacaaatctaccaatggaactctctttccactaaaagttactgtcacactaaacagacgtatgtcagct

SEQ ID NO: 124664 - DNA, 80 bp, synthetic construct
  source 1..80: mol_type = other DNA
acaaccagacgcgggaggaaagtctgccccgtgggcactgatttttattcgggatcgcttgaggaggcccgggcaacggc

SEQ ID NO: 124665 - DNA, 80 bp, synthetic construct
  source 1..80: mol_type = other DNA
acgtacacgggccgcagcggcgcgcccaggccccagcgcgcgcaggcgcggtgcgagtgggcctcctcctcgcagaagtc

SEQ ID NO: 124666 - DNA, 80 bp, synthetic construct
  source 1..80: mol_type = other DNA
gctttggcagcttactgcttaacagtgggcagcgctgtcatctgtggcaggatcgtaacctcaggaaaacccgcagtagt

SEQ ID NO: 124667 - DNA, 80 bp, synthetic construct
  source 1..80: mol_type = other DNA
ccatgatagcacgtgatggcccacatcccgtcgatcagcctgttcataattatatggttaagcggatacacaagcgttcg

SEQ ID NO: 124668 - DNA, 80 bp, synthetic construct
  source 1..80: mol_type = other DNA
gtctgtatacccccgtagcgatgggcatcaatctcgccgccagctcacaacctttggatccggaaggcccgatcgccgtt

SEQ ID NO: 124669 - DNA, 80 bp, synthetic construct
  source 1..80: mol_type = other DNA
gctaacacctaggtgcctcgtgcactacccctaccggctgtggcattatccgtgcacagtcaactttaccatcttcaagg

SEQ ID NO: 124670 - DNA, 80 bp, synthetic construct
  source 1..80: mol_type = other DNA
gcccttcctatctgggctaggccagactataaccctccactgttggaccgctggaaagcaccggattatgtgccaccaac

SEQ ID NO: 124671 - DNA, 80 bp, synthetic construct
  source 1..80: mol_type = other DNA
ggctagaagcagcatgcaacttcactcgcggggaccgctgcaatctggaggacagggataggggtcagcttagcccactg

SEQ ID NO: 124672 - DNA, 80 bp, synthetic construct
  source 1..80: mol_type = other DNA
cggggccgtccccgcgggcggcctcacgcgctacctgcccatctcggtggtctctagcgtggtcgccctgtcgccttacg

SEQ ID NO: 124673 - DNA, 80 bp, synthetic construct
  source 1..80: mol_type = other DNA
gctgtcaagggaaaggaagctgcacacagtgatctaggctattggattgagagtgaaaagaatgacacatggaggctgag

SEQ ID NO: 124674 - DNA, 80 bp, synthetic construct
  source 1..80: mol_type = other DNA
acaccgttgtcttgtgcgaagcatacgacaccggatgcgcatggtacgagctgactccatcagagactaccgtgcgattg

SEQ ID NO: 124675 - DNA, 80 bp, synthetic construct
  source 1..80: mol_type = other DNA
agtatccccgctcccgtgtacctctgggcccgtgtgggagtgtggctggggtatttgggttggacttggactccgcataa

SEQ ID NO: 124676 - DNA, 80 bp, synthetic construct
  source 1..80: mol_type = other DNA
caggaagggtgttaaaaagcactacgcccatgtatccgtgctatgggtcttatgcacgagcaacaaatgaaaaaggaggt

SEQ ID NO: 124677 - DNA, 80 bp, synthetic construct
  source 1..80: mol_type = other DNA
ttggtgttggaattgggtggctgtgtcactctcacggctgaaggcaaaccatccgtggatgtctggctcgatgacataca

SEQ ID NO: 124678 - DNA, 80 bp, synthetic construct
  source 1..80: mol_type = other DNA
atacgcgaacccagcgtgccgtccttgcattcagacaacgaggacaaagagagcattgcttccttctcgtccatgccccc

SEQ ID NO: 124679 - DNA, 80 bp, synthetic construct
  source 1..80: mol_type = other DNA
aaattccaccaagtgtccgtgcggagcgacgatatctggccacgtgaaaaacggaaccatgaggatcgtcggcccgaagc

SEQ ID NO: 124680 - DNA, 80 bp, synthetic construct
  source 1..80: mol_type = other DNA
ccttttccaggcaagtctgctacatgtgccgtattatgttcgagcacacgctctgttacgagcgtgtatgctgtttcggc

SEQ ID NO: 124681 - DNA, 80 bp, synthetic construct
  source 1..80: mol_type = other DNA
gcacatcaataggaccgctctaaactgcaatgatagtttacaaacaggatttattacggcacttttctaccgcaagcagg

SEQ ID NO: 124682 - DNA, 80 bp, synthetic construct
  source 1..80: mol_type = other DNA
agtccaggtgctggcactggagcctggaaaaaatccaagagccgtccaaacaaaacctggtcttttcaaaaccaacaccg

SEQ ID NO: 124683 - DNA, 80 bp, synthetic construct
  source 1..80: mol_type = other DNA
catgtggcattgtgccagcgcagaacgtctgcggaccggtgttctgcttcacccccagccctgtggtggtggaggtaact

SEQ ID NO: 124684 - DNA, 80 bp, synthetic construct
  source 1..80: mol_type = other DNA
ccttacgccatgcacctgcggggcgtccgacctctacctggtcactcggaatgccgatgtcatccctgctcgccgcaggg

SEQ ID NO: 124685 - DNA, 80 bp, synthetic construct
  source 1..80: mol_type = other DNA
ctgatgtgctgctgctatttgccggcgtcgacgcggcaacccacgtcagcgggggaagcgtcgcccatgccacacatgga

SEQ ID NO: 124686 - DNA, 80 bp, synthetic construct
  source 1..80: mol_type = other DNA
tcttgctggtggtgggagtggtggctgccaatgaatacggaatgttagagagaacaaaaagtgaccttgggaaaatattc

SEQ ID NO: 124687 - DNA, 80 bp, synthetic construct
  source 1..80: mol_type = other DNA
cctccactcactaacgctaacaacaaacttgcactggtctatagggaacctttagcagtaaagcgcaacagcctaacctt

SEQ ID NO: 124688 - DNA, 80 bp, synthetic construct
  source 1..80: mol_type = other DNA
cgcggacccgggggggctgcttgctatcacacggcccgttcgcacgttcgattttttcagccttgtttggttggctaggt

SEQ ID NO: 124689 - DNA, 80 bp, synthetic construct
  source 1..80: mol_type = other DNA
gtccatacaaggtggttgggtattttattttaggggtggtcctgggtgggtggaaatcaatctttatctgctgtgttaga

SEQ ID NO: 124690 - DNA, 80 bp, synthetic construct
  source 1..80: mol_type = other DNA
gccggatacgcccgatcgagcagcaggtgcatcacatcgccgacgccctggaggcgctggagaccgcggcggccgcggcc

SEQ ID NO: 124691 - DNA, 80 bp, synthetic construct
  source 1..80: mol_type = other DNA
agcgcctccccttagagcgtggaagagtcgggcacgtgcggtgagggcgtccctcattgtccgaggtgggaaagcggcca

SEQ ID NO: 124692 - DNA, 80 bp, synthetic construct
  source 1..80: mol_type = other DNA
tcgggtacttacatgccccaactggcagtggaaagagcaccaaagtccctgtcgcatatgccgcccagggttacaaggta

SEQ ID NO: 124693 - DNA, 80 bp, synthetic construct
  source 1..80: mol_type = other DNA
tgtgtgcaaaggcattcagattctcaaacactccggctgacacgggccatggaacggtggtgatggaactccaatacaca

SEQ ID NO: 124694 - DNA, 80 bp, synthetic construct
  source 1..80: mol_type = other DNA
aggtgcccaagatctttgaagggcttggtcgggacgagacgcgcgcggcgaacgctctaaaagaaacagcagaggaaaag

SEQ ID NO: 124695 - DNA, 80 bp, synthetic construct
  source 1..80: mol_type = other DNA
ggcgcgcttcgtgaggtccaaaatcacctcccagtagtacgtcagatctcgtcgctgcaggtcctccagcgaggcggagt

SEQ ID NO: 124696 - DNA, 80 bp, synthetic construct
  source 1..80: mol_type = other DNA
cacccccgggaacataaaacttccagaaaacaaaaacacctacgagtacatgaacgggcgcgtgactgttcccggtctgg

SEQ ID NO: 124697 - DNA, 80 bp, synthetic construct
  source 1..80: mol_type = other DNA
ccttcactgaggctatgaccaggtactccgctcccccgggtgatcccccggttccagcttatgacctggagctcgtaaca

SEQ ID NO: 124698 - DNA, 80 bp, synthetic construct
  source 1..80: mol_type = other DNA
gccggcgcgcagatacgcctcgccccggcggcgcagcagctgcgggtcgacctcgtggccctcggtggaagaagaggccc

SEQ ID NO: 124699 - DNA, 80 bp, synthetic construct
  source 1..80: mol_type = other DNA
tatataaaaataacaagacaacatttgaagattctggaaattatgagtatcagaaattatctttttataatctgacaatt

SEQ ID NO: 124700 - DNA, 80 bp, synthetic construct
  source 1..80: mol_type = other DNA
acgcggggacgcgctttcccccagacccatggacaggtgggccgcagcctccttcgcggccggcggtgcggcgacgccaa

SEQ ID NO: 124701 - DNA, 80 bp, synthetic construct
  source 1..80: mol_type = other DNA
tcggaaggaggcggtcggccaagacgtccaagacccaggcaaaaatgtggtacaagtccccgttgggtgccagcagctcg

SEQ ID NO: 124702 - DNA, 80 bp, synthetic construct
  source 1..80: mol_type = other DNA
gccccacctgtgccgcctccacggaggaagaggactgttgtcctcacagagtccactgtctcttctgctttggctgagct

SEQ ID NO: 124703 - DNA, 80 bp, synthetic construct
  source 1..80: mol_type = other DNA
ccttgatctattgtgccccactgactgttttaggaaacatccagacactacctatttcaagtgcggggctggcccttggt

SEQ ID NO: 124704 - DNA, 80 bp, synthetic construct
  source 1..80: mol_type = other DNA
aacttgctccccgccctcctatcacctggggcactcgtagtggaggtcgtgtgtgcggccgtcctgcggcgccatgtggg

SEQ ID NO: 124705 - DNA, 80 bp, synthetic construct
  source 1..80: mol_type = other DNA
cagacctaccaggtgggttacctgcatgccccgactgggagcggcaagagcacaagggtccccgcggcatacgctgcgca

SEQ ID NO: 124706 - DNA, 80 bp, synthetic construct
  source 1..80: mol_type = other DNA
ccataggtggcggcgtcctggccctcttggccattctgacgctgtctccacagtacaagcggtggctggcgtggtggtta

SEQ ID NO: 124707 - DNA, 80 bp, synthetic construct
  source 1..80: mol_type = other DNA
ctgaaagtcggccaagtagcattttaacatgagatcatagttgagggtttcggcagcgtgtcctttggcgcgaagcttgc

SEQ ID NO: 124708 - DNA, 80 bp, synthetic construct
  source 1..80: mol_type = other DNA
ctgcttatgacaatgcagtgcctttcatgcctaataccacagcttatccaaaaattatcgatagcacaactaatcctgca

SEQ ID NO: 124709 - DNA, 80 bp, synthetic construct
  source 1..80: mol_type = other DNA
ggcggaggtaagatcctactgctatgaggcatcaatatcggacatggcttcggacagccgctgcccaacacaaggtgaag

SEQ ID NO: 124710 - DNA, 80 bp, synthetic construct
  source 1..80: mol_type = other DNA
caaatcctggggaaagccaggatacccttggcccctgtatgggaatgagggcctaggctgggcaggatggctcctgtccc

SEQ ID NO: 124711 - DNA, 80 bp, synthetic construct
  source 1..80: mol_type = other DNA
atgatgacgttgtgtcggcagcagcagggccgcgccccggagaacgcgaggcccataacttggcgagcgtatcgtcgaag

SEQ ID NO: 124712 - DNA, 80 bp, synthetic construct
  source 1..80: mol_type = other DNA
caccttcggctggtaccgtctcaaaccgggccggaacaacacgctagcccagccgcgggccccgatggccttcgggacat

SEQ ID NO: 124713 - DNA, 80 bp, synthetic construct
  source 1..80: mol_type = other DNA
tctgctggcgcagaagtattccatagagcagctaaccacttactggctgcagccaggggatgattttgaggaggctatta

SEQ ID NO: 124714 - DNA, 80 bp, synthetic construct
  source 1..80: mol_type = other DNA
gaattttgggaaggcgtgtttactggcttgactcacatagacgcccactttctgtctcacacgaagcaggcgggtgagaa

SEQ ID NO: 124715 - DNA, 80 bp, synthetic construct
  source 1..80: mol_type = other DNA
tgccactctgcggagagtgcagtctccgatagtgccccaggtggactgggtcaacaaagccaaaacatcgccccacgcga

SEQ ID NO: 124716 - DNA, 80 bp, synthetic construct
  source 1..80: mol_type = other DNA
tcactgccttcaccttgtctcccatgtacaggaccttactcgccaacctaatctggtggctccagtactttatagcccgg

SEQ ID NO: 124717 - DNA, 80 bp, synthetic construct
  source 1..80: mol_type = other DNA
atggctggagggagacactatacggtctcacttcacccgagttgaaagctgggtgtggaagaataaatcactcacgctgg

SEQ ID NO: 124718 - DNA, 80 bp, synthetic construct
  source 1..80: mol_type = other DNA
ttgcgtccgccacgttttgctctgccttgtatgtgggcgatgcctgcggtgcgctgatgatagtctcccaggccttcatc

SEQ ID NO: 124719 - DNA, 80 bp, synthetic construct
  source 1..80: mol_type = other DNA
aaatctacggagcctgctactccatagaaccactggacctacctctaatcattcaaagactccacggccttagcgcattc

SEQ ID NO: 124720 - DNA, 80 bp, synthetic construct
  source 1..80: mol_type = other DNA
acgacagtttttacagtaacgggggcggcaccaactcacgtttctaatgtaacagcgtttgacatagcaactacggctat

SEQ ID NO: 124721 - DNA, 80 bp, synthetic construct
  source 1..80: mol_type = other DNA
gtgttctcagaccggcgaacaccgacgagagaaacgttccgtggcactggccccacacgtgggacttggtctagaaacaa

SEQ ID NO: 124722 - DNA, 80 bp, synthetic construct
  source 1..80: mol_type = other DNA
cagacacatgtggaacttcattagcggcatccaatacctcgcaggattgtcaacactgccagggaaccccgcggtggctt

SEQ ID NO: 124723 - DNA, 80 bp, synthetic construct
  source 1..80: mol_type = other DNA
ggcgacgtcgtcgtctgaccggcaggcggtccacgaagcgctcgatcatttcgccgcgccggcgacgcatggtctcggtg

SEQ ID NO: 124724 - DNA, 80 bp, synthetic construct
  source 1..80: mol_type = other DNA
actcctctgtgctctgtgagtgctatgactccgggtgtgcctggtatgagctgacacctgcggaaaccacaaccaggctg

SEQ ID NO: 124725 - DNA, 80 bp, synthetic construct
  source 1..80: mol_type = other DNA
ccattacagccttcgaccagggatggggtcccatcacatatgccaacattactggatcctcggaggacaagccctactgc

SEQ ID NO: 124726 - DNA, 80 bp, synthetic construct
  source 1..80: mol_type = other DNA
ggcactgggcgggggtcgggcgtgggtcgggcgtgggtccgtctcagtagggcgtgggtcgggcactgggcggaggtcgg

SEQ ID NO: 124727 - DNA, 80 bp, synthetic construct
  source 1..80: mol_type = other DNA
attccacgtgtggccaaaacagtttgtagatcgacgtgccatggttctatgtaaacacaaactccagttggtcgttcaca

SEQ ID NO: 124728 - DNA, 80 bp, synthetic construct
  source 1..80: mol_type = other DNA
attaccaagtacatcatggcttgcatgtcggctgacctagaggttatcaccagcacctgggtagtagccggcgggatact

SEQ ID NO: 124729 - DNA, 80 bp, synthetic construct
  source 1..80: mol_type = other DNA
gcccgcaaggccgttaaccacatcaactccgtgtgggaggacttgctgggagacaatattacccccattccaactacaat

SEQ ID NO: 124730 - DNA, 80 bp, synthetic construct
  source 1..80: mol_type = other DNA
atggagttctaactcttaaatgtgttaatccgctcactaccgccagcggacccctccaacttaaagttggaagcagtctt

SEQ ID NO: 124731 - DNA, 80 bp, synthetic construct
  source 1..80: mol_type = other DNA
cccagcctataaacaactacttgtaagtgtgctttggtggttacagtacttcatagcacgcgtagaggctgccattcatg

SEQ ID NO: 124732 - DNA, 80 bp, synthetic construct
  source 1..80: mol_type = other DNA
ggctataaggtgctcgtgctgaacccttcggttgctgctacactggggttcggggcctacatgtcaaaagcatacggcat

SEQ ID NO: 124733 - DNA, 80 bp, synthetic construct
  source 1..80: mol_type = other DNA
ggaccagacgctgctgcgggcgaccgccaacaccattacggccctggccgtgcttcggcggctcctcgcgaacggcaacg

SEQ ID NO: 124734 - DNA, 80 bp, synthetic construct
  source 1..80: mol_type = other DNA
gtggtcactctcagctgctaacctgtgcagatggaaactgtcaggctctaagagtgtttcacgtagtatctcatccccgc

SEQ ID NO: 124735 - DNA, 80 bp, synthetic construct
  source 1..80: mol_type = other DNA
cgggccgtctggggcgagaagcggagcgggctggagctcgaggtcgctcggtggtgcgcgacgccgcagaacgccctcga

SEQ ID NO: 124736 - DNA, 80 bp, synthetic construct
  source 1..80: mol_type = other DNA
gggacaccagggtcaccaatgcggatctggaagatgaagagcagatcctgcgttacatggaaggtgaacacaaacagctg

SEQ ID NO: 124737 - DNA, 80 bp, synthetic construct
  source 1..80: mol_type = other DNA
cactgtcggtatccgttctccaaaacctgctggctcggggcatccgcggccctacaacaccttcgctctataagctcaag

SEQ ID NO: 124738 - DNA, 80 bp, synthetic construct
  source 1..80: mol_type = other DNA
gacttctcaaagaaggagacgagatgcggtacaggggtgttcgtctataacgacgttgaagcctggagggacaggtacaa

SEQ ID NO: 124739 - DNA, 80 bp, synthetic construct
  source 1..80: mol_type = other DNA
gcgctattgtcacctggcgccttggtggtgggcgtggtctgtgccgccgttttacggcggcatgttggcccctcggagtg

SEQ ID NO: 124740 - DNA, 80 bp, synthetic construct
  source 1..80: mol_type = other DNA
ccaatattaccagagcgtgtgcgctgaagtgaaagcccgggcttctacagtagaggccaagcttctcaccttggaagatg

SEQ ID NO: 124741 - DNA, 80 bp, synthetic construct
  source 1..80: mol_type = other DNA
cctagctatgtggaggtcgaagaagaccccgttggggttttcgtatgacactcgttgttttgactcaacggtcaccgaac

SEQ ID NO: 124742 - DNA, 80 bp, synthetic construct
  source 1..80: mol_type = other DNA
cccatggcttgctgtacttcttcctgttctttgtggcagcctggtacatcaaaggtcgggtggtcccttccgccacttac

SEQ ID NO: 124743 - DNA, 80 bp, synthetic construct
  source 1..80: mol_type = other DNA
cgcgggcgccgcccctccgcccctccccccgcgcgccgcgggcccgcttccccgcggccgcccccgcgcgccttttttcc

SEQ ID NO: 124744 - DNA, 80 bp, synthetic construct
  source 1..80: mol_type = other DNA
tagcacggagtgaggccttgattcagcagtgggtcccgagtctccgggtccggggaggtcgtgatgctgtgatcctgctc

SEQ ID NO: 124745 - DNA, 80 bp, synthetic construct
  source 1..80: mol_type = other DNA
agcatccttgatggcatttacagctgccgtcactagcccgcttacaacacaacaaaccctcctatttaacatcttggggg

SEQ ID NO: 124746 - DNA, 80 bp, synthetic construct
  source 1..80: mol_type = other DNA
ttgcaggtggtagttcaaggacatgcagctgccgtcgttccggaggaggggggccacctcgttgagcatgtctctgactt

SEQ ID NO: 124747 - DNA, 80 bp, synthetic construct
  source 1..80: mol_type = other DNA
ttttggtggttggaaacatcatagttttgctctagagtgagctcatcataggccatcttaacaaagcggggtaggagggt

SEQ ID NO: 124748 - DNA, 80 bp, synthetic construct
  source 1..80: mol_type = other DNA
tccaaccatgaaaacagcattagtttttttctttatgttaatcccagtttgggctagttcttgtcaactacataaaccat

SEQ ID NO: 124749 - DNA, 80 bp, synthetic construct
  source 1..80: mol_type = other DNA
tcgatcgcttgcaagtggtcgatcaatactaccatgacacacttaaggagataaagctccgagcgtctaaggtgagtgca

SEQ ID NO: 124750 - DNA, 80 bp, synthetic construct
  source 1..80: mol_type = other DNA
aggccattttgatgaagcgtggtaaaagggtgcccgactggggtataatggtcccgtctggacctggggcgtagttaccc

SEQ ID NO: 124751 - DNA, 80 bp, synthetic construct
  source 1..80: mol_type = other DNA
ctacaccacgggcccctgtaccccccttcctgcgccgaactatacgttcgcgttatggagggtgtctgcagaggaatacg

SEQ ID NO: 124752 - DNA, 80 bp, synthetic construct
  source 1..80: mol_type = other DNA
ctccgctggtgctgtagtagtcaaacgcgtagtgggcgtcggagtcggcgaagcgggcgtggatgtcgtcgctgagaggg

SEQ ID NO: 124753 - DNA, 80 bp, synthetic construct
  source 1..80: mol_type = other DNA
cgaacagggccaccggcccggtctggcgctccagggccgccaggacgcacgcgtacagcgcccgccacagagtcgggttc

SEQ ID NO: 124754 - DNA, 80 bp, synthetic construct
  source 1..80: mol_type = other DNA
acaacgattggtccactccctgcagcgggtcgtggttgcgtgacatctgggactgggtgacttcagtcctggcagacttc

SEQ ID NO: 124755 - DNA, 80 bp, synthetic construct
  source 1..80: mol_type = other DNA
tgttggctgggcagtaaaatgggaatttgtcatcctgatcttcttgctcttggcggacgcccgggtttgtgtttgcatct

SEQ ID NO: 124756 - DNA, 80 bp, synthetic construct
  source 1..80: mol_type = other DNA
gcagaagtattccatagagcagctgaccacttactggctgcagccaggggatgattttgaggaggctattagggtatatg

SEQ ID NO: 124757 - DNA, 80 bp, synthetic construct
  source 1..80: mol_type = other DNA
ggcaaacactcctaatgtgccaaaagccgttctttacgctgagaatgtggctattgaagcgcccgacacccatttggtgt

SEQ ID NO: 124758 - DNA, 80 bp, synthetic construct
  source 1..80: mol_type = other DNA
tgcgagaaatcatcgccaaagtggttgcacgggccgttgagcgcacggccgcgggtgctcaaattttaccccacgaagtt

SEQ ID NO: 124759 - DNA, 80 bp, synthetic construct
  source 1..80: mol_type = other DNA
ccctggaccacctgtcgcggtcgttgaggactttgtggatgttttccaagacccggtacaaatgggcttggatgtttaga

SEQ ID NO: 124760 - DNA, 80 bp, synthetic construct
  source 1..80: mol_type = other DNA
gaaaagagcctggtgctggccgctaggtactacctactccaggctccgcgcttggggggcgccggagccacgtacgatct

SEQ ID NO: 124761 - DNA, 80 bp, synthetic construct
  source 1..80: mol_type = other DNA
tgtctccatggcccgccgccgccgccatcgcggcccccgccgcccccggccgcccgggcccacgggcgccgtcccaaccg

SEQ ID NO: 124762 - DNA, 80 bp, synthetic construct
  source 1..80: mol_type = other DNA
ggactttcggcaggggtggggccaaatcacctacaaagtcaacatctcgggcccctctgacgaccgtccctactgttggc

SEQ ID NO: 124763 - DNA, 80 bp, synthetic construct
  source 1..80: mol_type = other DNA
cagaagtgcgaggatacacaaaaggcggcccaggacacgaagaaccagtacctatgtctacatacggatggaacatagtc

SEQ ID NO: 124764 - DNA, 80 bp, synthetic construct
  source 1..80: mol_type = other DNA
cactcttcgctgcagttttttttccacacatctcacctggacctttaacggaaaacacgttaccaatacagatataaagt

SEQ ID NO: 124765 - DNA, 80 bp, synthetic construct
  source 1..80: mol_type = other DNA
aaccacaaaaatgccaaataaggcaaaaattcaaatggttagcgcattagaacatcttacatatcccaccacacccgatg

SEQ ID NO: 124766 - DNA, 80 bp, synthetic construct
  source 1..80: mol_type = other DNA
attgtctgcctggtcatcaccttcctgcagctcatcgactggtgctgcgcgcgctacaattacctgcatcacagtcccga

SEQ ID NO: 124767 - DNA, 80 bp, synthetic construct
  source 1..80: mol_type = other DNA
aacgcacgccccagtgtcccctcaccccagccccctggtgggctttgccgtccccctcgtagtcggtgggctgtgcgccg

SEQ ID NO: 124768 - DNA, 80 bp, synthetic construct
  source 1..80: mol_type = other DNA
agtcgaggctggcttgcgtgtgtgggtccctagccttcaagtcaggtggggccgcgacgccgtcatcctcctcatgtgtg

SEQ ID NO: 124769 - DNA, 80 bp, synthetic construct
  source 1..80: mol_type = other DNA
atgtatatgtcgaaggcctatgggattgaccctaatatccgcactgggaacagaaccattacaactggtgctaaactcac

SEQ ID NO: 124770 - DNA, 80 bp, synthetic construct
  source 1..80: mol_type = other DNA
ccgctccacttcaacgtaacaccgcacgaagatttctattgttcctgaaggcatattcaaatcgttttcgttaccgcttg

SEQ ID NO: 124771 - DNA, 80 bp, synthetic construct
  source 1..80: mol_type = other DNA
tcaatcctattgcatccacaaatgatgatgaagttctgattgaggtcaatcccccttttggggatagctacatcatagtt

SEQ ID NO: 124772 - DNA, 80 bp, synthetic construct
  source 1..80: mol_type = other DNA
ctctagcgatgaagatacagattgaggtactgaaatgtgtgggcgtggcttaagggtgggaaagaatatataaggtggtg

SEQ ID NO: 124773 - DNA, 80 bp, synthetic construct
  source 1..80: mol_type = other DNA
tgccttccttaagatttctggccataccaccaacggggaggaggttttgggcccgatggggaaaccttcaagaaggcgtg

SEQ ID NO: 124774 - DNA, 80 bp, synthetic construct
  source 1..80: mol_type = other DNA
ttgcctaccagctttggcaacacaatcacttgttacatcaaggccacggcggccgccagggccgcaggcctccggaatcc

SEQ ID NO: 124775 - DNA, 80 bp, synthetic construct
  source 1..80: mol_type = other DNA
tcttgggtgctgacgccctcccggtgcagctgcagggtctggtccttgtaaatctcggctcggaggtgcgtctcggccag

SEQ ID NO: 124776 - DNA, 80 bp, synthetic construct
  source 1..80: mol_type = other DNA
ccgccctggccgcggcggtgttggcgggcccggtggcgaccaccgccagggactgcttttccagggcttgccccgaccac

SEQ ID NO: 124777 - DNA, 80 bp, synthetic construct
  source 1..80: mol_type = other DNA
gcgggtgctggacgaggatgcccccccggagaagcgcgccggggtgcacgacggtcacctcaagcgcgcccccaaggtgt

SEQ ID NO: 124778 - DNA, 80 bp, synthetic construct
  source 1..80: mol_type = other DNA
cacctggcgcgttcgaaataatgaacgttttgacatcccctgttgctcattttcttatgtaacagaacaataaaatattg

SEQ ID NO: 124779 - DNA, 80 bp, synthetic construct
  source 1..80: mol_type = other DNA
gcgtccaccgtcgccgcgggacttgccgtcgcgacggcggcgctcccggcgttgatggcgtttgacacggctttggcgat

SEQ ID NO: 124780 - DNA, 80 bp, synthetic construct
  source 1..80: mol_type = other DNA
tccggaacctatccagcagggccattaaccacatccgctccgtgtggaaggacctgctggaagacactgcaacaccaatt

SEQ ID NO: 124781 - DNA, 80 bp, synthetic construct
  source 1..80: mol_type = other DNA
gacccaacgacggtgcttggcatcggcactgtcctagaccaggcagaaaccgcgggggtccgcctcacggtgctcgctac

SEQ ID NO: 124782 - DNA, 80 bp, synthetic construct
  source 1..80: mol_type = other DNA
agagccttgtctgctgctccatgtcgtactcgtggacaggggcgctaatcaccccgtgcgctgccgaggaggagaaacta

SEQ ID NO: 124783 - DNA, 80 bp, synthetic construct
  source 1..80: mol_type = other DNA
ctggcttaatccatctccatcagaacatcgtggatatacagtacctgtacggcatagggtcagcggctgtctccttcgct

SEQ ID NO: 124784 - DNA, 80 bp, synthetic construct
  source 1..80: mol_type = other DNA
atgccggcgcgccgcggcacctgggcgcagccaaagaccgggagtggctgggccggccccagccggtttcccgccacgac

SEQ ID NO: 124785 - DNA, 80 bp, synthetic construct
  source 1..80: mol_type = other DNA
gaaaaaagacattgttgatgaggttcaagttaaatcaggcaataatcaaactcttattggaccacctggaaaaaatgttg

SEQ ID NO: 124786 - DNA, 80 bp, synthetic construct
  source 1..80: mol_type = other DNA
acaaggaggaaaagcctatagacacgccatggaagaactaccagacaccatagaaacgttaatgctcctagctttgatag

SEQ ID NO: 124787 - DNA, 80 bp, synthetic construct
  source 1..80: mol_type = other DNA
ttgtgcgcatgccccgcgtgcagctcgcgtttcggttcatgggccccgaagatgccggacggacgagacggatcctgtgc

SEQ ID NO: 124788 - DNA, 80 bp, synthetic construct
  source 1..80: mol_type = other DNA
cctgtgcattgtcagagctatggatgtggggcacatgtgtgatgatactatcacctatgaatgtccagtgttgtcggccg

SEQ ID NO: 124789 - DNA, 80 bp, synthetic construct
  source 1..80: mol_type = other DNA
atgaataccattacgggggggccaccagtgaagatgacagcaacttagcccactggacagaggcaaaaattatgctagac

SEQ ID NO: 124790 - DNA, 80 bp, synthetic construct
  source 1..80: mol_type = other DNA
tagaggacgaccccagcgcggatgccgcggacgatgtcgacgaggacgccccggacgacgtggcctatccggaggaatac

SEQ ID NO: 124791 - DNA, 80 bp, synthetic construct
  source 1..80: mol_type = other DNA
actcttgaaaacaaatgtaaatagtagtaattgtttagtgtaaatagtgtaaataaataaatttagataggaagtcaggc

SEQ ID NO: 124792 - DNA, 80 bp, synthetic construct
  source 1..80: mol_type = other DNA
ttcgccttctatcacgccgcctagcgcgttcagtgtggtaattgaagtacagccattcccgtagattggtcaaaagttcc

SEQ ID NO: 124793 - DNA, 80 bp, synthetic construct
  source 1..80: mol_type = other DNA
cattgtgtatcctgacctaggggtgagggtatgcgaaaagagagccctttatgacgtcacgcagaaattacccatcgcag

SEQ ID NO: 124794 - DNA, 80 bp, synthetic construct
  source 1..80: mol_type = other DNA
tctcagctccgtcattgaaggccacgtgcaccacgcatggcccacaccctgacgctgagttgattgaagcgaacttgctg

SEQ ID NO: 124795 - DNA, 80 bp, synthetic construct
  source 1..80: mol_type = other DNA
aaatgtacaaaaccctatatccggggcgtactcattccagtatatatcgaacatgttcttgtattggtcatttgggttac

SEQ ID NO: 124796 - DNA, 80 bp, synthetic construct
  source 1..80: mol_type = other DNA
gacgcctcccgggtcgactaccgtcccgcatccaaacataacagagacagcgcttcccctgaccggggaggtgccctttt

SEQ ID NO: 124797 - DNA, 80 bp, synthetic construct
  source 1..80: mol_type = other DNA
catttgatacatcttctctaactttttcatatattgcccaagaaaatgaggacgaagacaaataaagtattttgaatgaa

SEQ ID NO: 124798 - DNA, 80 bp, synthetic construct
  source 1..80: mol_type = other DNA
caccaacgcactatgtccccgagagcgacgctgcagtgaaagtcactacattgctgagttccctaactgtcacaagtctg

SEQ ID NO: 124799 - DNA, 80 bp, synthetic construct
  source 1..80: mol_type = other DNA
acttctctcgtgcctgactgtccccgcttcggccatcaactatcgcaacgtttcgggtatttaccacgtcaccaatgact

SEQ ID NO: 124800 - DNA, 80 bp, synthetic construct
  source 1..80: mol_type = other DNA
cccgcgggcaccaggtcgctcacgccatgcacctgtggtgccagcgacctctatctagtgacaaggaatgcagatgtgat

SEQ ID NO: 124801 - DNA, 80 bp, synthetic construct
  source 1..80: mol_type = other DNA
ggtgggtggcctctcaactggccgccccaggtgcagccacggcctttgtaggcgcaggcataacaggcgcggtcgttggc

SEQ ID NO: 124802 - DNA, 80 bp, synthetic construct
  source 1..80: mol_type = other DNA
catggctgcgccctgccttccccgactacgacccctattcctcctcctcggaggaaaaaggtggttcagctcgacacacc

SEQ ID NO: 124803 - DNA, 80 bp, synthetic construct
  source 1..80: mol_type = other DNA
gggtggctccggacccgccgggagaggtggcaggggcacgtcggcgccgcgcgcgggcaggagctggtgctgcgctcgga

SEQ ID NO: 124804 - DNA, 80 bp, synthetic construct
  source 1..80: mol_type = other DNA
cagctccgtctttaagggccacatgcaccacagctggtgctcatcccgacgcagagctgatagaagctaatctcctgtgg

SEQ ID NO: 124805 - DNA, 80 bp, synthetic construct
  source 1..80: mol_type = other DNA
gaaattgggctgcttttcggtggtggagttttactagactaaaaactaaagaaaccccctctttggggtccgggtttgat

SEQ ID NO: 124806 - DNA, 80 bp, synthetic construct
  source 1..80: mol_type = other DNA
agagttccacaaatcggggtgttccctgtagtttgggggccttttttaactcctcgtaagtaagattatcaggagaaaat

SEQ ID NO: 124807 - DNA, 80 bp, synthetic construct
  source 1..80: mol_type = other DNA
aaaggcagctcaaactcagcttgtcattgagcccatcaagcaagatgatagcaagagaagttacaacctcatcgagggaa

SEQ ID NO: 124808 - DNA, 80 bp, synthetic construct
  source 1..80: mol_type = other DNA
gtgcttattcaacgctctttgggatttgaatcatcgtaaacgtagcgtccctaccagttgagcgcgtaattttcgtaagc

SEQ ID NO: 124809 - DNA, 80 bp, synthetic construct
  source 1..80: mol_type = other DNA
attgaggtactgaaatgtgtgggcgtggcttaagggtgggaaagaatatataaggtggtggtctcatgtagttttgtatc

SEQ ID NO: 124810 - DNA, 80 bp, synthetic construct
  source 1..80: mol_type = other DNA
gcgcgcggcgtaagcggttaggctggaaagcgaaagcattaagtggctcgctccctgtagccggagggttattttccaag

SEQ ID NO: 124811 - DNA, 80 bp, synthetic construct
  source 1..80: mol_type = other DNA
cgcagcacacccggggccaccgacacgatgctcaccccaaaggatgaccccggtgcgtccccgtcgtccccgcccgcctc

SEQ ID NO: 124812 - DNA, 80 bp, synthetic construct
  source 1..80: mol_type = other DNA
tgggctcagaattggcggtcctttgcaagtggccgactcacatgcactaacactaggtactggtcaggggattgcagttc

SEQ ID NO: 124813 - DNA, 80 bp, synthetic construct
  source 1..80: mol_type = other DNA
atggtggctgagctacctgctggtattggcggaagcccaaatccaggagtgggtcccgcctttgcaagcacgcggcggcc

SEQ ID NO: 124814 - DNA, 80 bp, synthetic construct
  source 1..80: mol_type = other DNA
ctgtgagtgctacgacgccggcgcggcctggtacgagctcaccccggcagaaaccaccgtcaggctgcgggcatacttca

SEQ ID NO: 124815 - DNA, 80 bp, synthetic construct
  source 1..80: mol_type = other DNA
gtctcatgtagttttgtatctgttttgcagcagccgccgacatgagcaccaactcgtttgatggaagcattgtgagctca

SEQ ID NO: 124816 - DNA, 80 bp, synthetic construct
  source 1..80: mol_type = other DNA
ttgccacctttttgggattacaaatctacggatgccttcacctgggctggatgcatcctcccaacaacctacccagattt

SEQ ID NO: 124817 - DNA, 80 bp, synthetic construct
  source 1..80: mol_type = other DNA
cgggggtcgggacgggttcattctgtgcttcgccctggtatattcatcactggtttttgaggtcaccaaatggatactag

SEQ ID NO: 124818 - DNA, 80 bp, synthetic construct
  source 1..80: mol_type = other DNA
ggagccgcttatggcttccaatactcaccagcgcagcgggtcgattatcttttgactgcgtggagacaaaagaagagccc

SEQ ID NO: 124819 - DNA, 80 bp, synthetic construct
  source 1..80: mol_type = other DNA
ctcggaaactgcctccaccgggcccacgatcaccgcgggagcggtgacgaacgcgagcgaggcccccacatcggggtccc

SEQ ID NO: 124820 - DNA, 80 bp, synthetic construct
  source 1..80: mol_type = other DNA
tccgcgcgctcggcgcccttggcgcccaggacgccctggtacctggcggaaaggcgctcgtaggccggctgggcccgcag

SEQ ID NO: 124821 - DNA, 80 bp, synthetic construct
  source 1..80: mol_type = other DNA
tcccctgtatatactccaggcctcactcctgcgcgtcccttactttgtgagggctcacgtgttggttaagatctgcagct

SEQ ID NO: 124822 - DNA, 80 bp, synthetic construct
  source 1..80: mol_type = other DNA
acgccacggtgtatcatccattatccgtaccggttgtggcattatccctgcacagtcaacttcaccgtgtttaaggtcag

SEQ ID NO: 124823 - DNA, 80 bp, synthetic construct
  source 1..80: mol_type = other DNA
gtggatgaactccacggggtttgttaagacgtgcggagctcccccttgtaacatctatgtggatgggagagatgcccaaa

SEQ ID NO: 124824 - DNA, 80 bp, synthetic construct
  source 1..80: mol_type = other DNA
ggtggtgccagtatttcatagctcgtgtggaggctatgctccaggtgtgggtcccaagcctgtcagtccggggtggtcgt

SEQ ID NO: 124825 - DNA, 80 bp, synthetic construct
  source 1..80: mol_type = other DNA
gcgggcgatcgtcgccccctggttcgccgtcacacacagttcctcgaaacagaccgcgcaggggtgtgacgggtcgctaa

SEQ ID NO: 124826 - DNA, 80 bp, synthetic construct
  source 1..80: mol_type = other DNA
catattaggttatatccagcaactctgaacgtgaccgagcagctgcgtacggaccaccagatgatgtcgtgtctgcgtac

SEQ ID NO: 124827 - DNA, 80 bp, synthetic construct
  source 1..80: mol_type = other DNA
ctgaccaatcggcggcagaagatcccctcgttgcacagtttaaacagcgaggaggagcgcatcttgcgctatgtgcagca

SEQ ID NO: 124828 - DNA, 80 bp, synthetic construct
  source 1..80: mol_type = other DNA
gcccaagacttgcagcaatacctggcatgggactttccccatcaatgcttacaccacgggtcctagcgtgcccatccctg

SEQ ID NO: 124829 - DNA, 80 bp, synthetic construct
  source 1..80: mol_type = other DNA
cgcccgagatccggaagcaggcctggtccagcgccacgtccccggggaccacgcgcgggttctggagccaccccatggcc

SEQ ID NO: 124830 - DNA, 80 bp, synthetic construct
  source 1..80: mol_type = other DNA
aaccagagtaatgtgggagaggcgctcatggagctagctgtcaaaagctttggtcaggcacccaccagcggtgattctgg

SEQ ID NO: 124831 - DNA, 80 bp, synthetic construct
  source 1..80: mol_type = other DNA
gtccagataaaaacaaacatgactaagagaaaagaaaagaggctgagcaacggctccaaatgaccagaccgtctacacca

SEQ ID NO: 124832 - DNA, 80 bp, synthetic construct
  source 1..80: mol_type = other DNA
cctactttcttttgctggtcctggaattggggctgccgggtgcgagccttgaggatttctggaaatggggtgatgcactg

SEQ ID NO: 124833 - DNA, 80 bp, synthetic construct
  source 1..80: mol_type = other DNA
ctaggaaaaccttatgcctccctttatacccgctgccccgtcttaccgcgacaaagcacacagaacaaaacacactacac

SEQ ID NO: 124834 - DNA, 80 bp, synthetic construct
  source 1..80: mol_type = other DNA
gtgaaaatggaaagcctaccgaagagctagatatcgatcttgctttctttgatctcagacaaaatgacactggtggaaat

SEQ ID NO: 124835 - DNA, 80 bp, synthetic construct
  source 1..80: mol_type = other DNA
tctgggcgaggccagactacaatccaccagtcgtagagacctggaagagaccagattatgacccaccaacagtatccggg

SEQ ID NO: 124836 - DNA, 80 bp, synthetic construct
  source 1..80: mol_type = other DNA
ggccccggcaatatgagacggttcagaattgtaattgctccatctactcggggcatgtcacaggccaccgtatggcctgg

SEQ ID NO: 124837 - DNA, 80 bp, synthetic construct
  source 1..80: mol_type = other DNA
tccgagcggtcacaacctcgcggaaggcgtcagcctattcccaaggcccgccgacccgagggcaggtcctgggcgcagcc

SEQ ID NO: 124838 - DNA, 80 bp, synthetic construct
  source 1..80: mol_type = other DNA
gctgatgtcatccctgtgcgccggaaaggagatcgacgcggggcgctactctctccaaggcccctttctactttgaaggg

SEQ ID NO: 124839 - DNA, 80 bp, synthetic construct
  source 1..80: mol_type = other DNA
ctgcatgttggtgcgctcggtggtgggggggaaatacatccaaatggttctgctcactgttggacgctggttcaacactt

SEQ ID NO: 124840 - DNA, 80 bp, synthetic construct
  source 1..80: mol_type = other DNA
atctattgtgacccggcatatcacggcccctgatatcgccgacaggtttctggagcagctgcggacccaggcccccccac

SEQ ID NO: 124841 - DNA, 80 bp, synthetic construct
  source 1..80: mol_type = other DNA
cgctgaaacagacgacagggagatgtctgtgagtgccgagtgctttgtccctcctcggccaaagtttccgcccgcattgc

SEQ ID NO: 124842 - DNA, 80 bp, synthetic construct
  source 1..80: mol_type = other DNA
tcgggaggagcttatgggcgtggcgggcctcccagcccggtcgcgcgcctccccgacacgtgcgcccgcagggcgacggc

SEQ ID NO: 124843 - DNA, 80 bp, synthetic construct
  source 1..80: mol_type = other DNA
tgtgtccgtcattcccacctcgggcgatgtcgtcgtctgcgcgacagacgcccttatgaccggctacacaggtgatttcg

SEQ ID NO: 124844 - DNA, 80 bp, synthetic construct
  source 1..80: mol_type = other DNA
ccactttgtggtgggcgcaaccaatcaggacttaaaatgtccatgccaggtgcccgccccagagtttttcacggaagttg

SEQ ID NO: 124845 - DNA, 80 bp, synthetic construct
  source 1..80: mol_type = other DNA
cggttggaattgattgcgaaagttgcgcccctcgaccgactgcccggcgaacaccccgtggcactggctcagggccaggt

SEQ ID NO: 124846 - DNA, 80 bp, synthetic construct
  source 1..80: mol_type = other DNA
cgctgccgaggaatatgtagaggttttgaaacaccaagataaccactacattgtgggggtcacatcagacaacctgaaat

SEQ ID NO: 124847 - DNA, 80 bp, synthetic construct
  source 1..80: mol_type = other DNA
gataaacgggatcgtgtaccactgccaatgtcggtatccgttctcaaaaacatgctggatgggggcctccgcggccctac

SEQ ID NO: 124848 - DNA, 80 bp, synthetic construct
  source 1..80: mol_type = other DNA
ggcagaggctctgatccaggagtaggccccccctttggtagtgaggtgggggcgtgacggtgtgatctggcccatggtca

SEQ ID NO: 124849 - DNA, 80 bp, synthetic construct
  source 1..80: mol_type = other DNA
ccggcgccaaattattcgagggcgctgtggcgggtggctgctgaggagtacgtggaggttacgcggttggtggatttcca

SEQ ID NO: 124850 - DNA, 80 bp, synthetic construct
  source 1..80: mol_type = other DNA
cgatccagagcaacctgggctgagaacatctatgcggcgataaaccaggttagagctgtcattgggaaagaaaattatgt

SEQ ID NO: 124851 - DNA, 80 bp, synthetic construct
  source 1..80: mol_type = other DNA
gggtggcggccagatcgtcggtggagtctacttgctaccgcgcaggtgccctagattgggtgtgcgcgcaacgaggaaga

SEQ ID NO: 124852 - DNA, 80 bp, synthetic construct
  source 1..80: mol_type = other DNA
agattttcttgcacgtgcgtgcgtttgcttcggatagcaacagcagcgacagttttgagagagatactctttcgtttgat

SEQ ID NO: 124853 - DNA, 80 bp, synthetic construct
  source 1..80: mol_type = other DNA
tgggccagaggaggaaaaattgcccataaatcctttgagcaattccctgttgcgatatcacaacaaagtgtgctccacaa

SEQ ID NO: 124854 - DNA, 80 bp, synthetic construct
  source 1..80: mol_type = other DNA
cagcacgccctgtgcgcccagcgccgacacgtcgggggcgccggtccagttgcccgcccaggcggccgtgtccggcccgc

SEQ ID NO: 124855 - DNA, 80 bp, synthetic construct
  source 1..80: mol_type = other DNA
gttcgctagtagcattaaacgcttttttgagtactcagccggctaatgttccgcgtggtcaggaagattatacaaacttc

SEQ ID NO: 124856 - DNA, 80 bp, synthetic construct
  source 1..80: mol_type = other DNA
ccgacggatgcgtgtgtccttactccgtcttggtgtgtgggtgtctgtgtatcgcgtcccatctgtgcggagagggggtg

SEQ ID NO: 124857 - DNA, 80 bp, synthetic construct
  source 1..80: mol_type = other DNA
ctcttctcatgcttgacttgccccgccaccggactggagtacaggaactcatctggtctctacacactcaccaacgactg

SEQ ID NO: 124858 - DNA, 80 bp, synthetic construct
  source 1..80: mol_type = other DNA
cccaggtgttgatgatgagaacgacatgggctatgtgtgaagcattaacaatagcaacgggccctatatcaacattatgg

SEQ ID NO: 124859 - DNA, 80 bp, synthetic construct
  source 1..80: mol_type = other DNA
cctacagcctgacgggactttggtccctggcactactcgttctcctgctcccccaacgggcgtatgcttggtcgggtgag

SEQ ID NO: 124860 - DNA, 80 bp, synthetic construct
  source 1..80: mol_type = other DNA
cgtacttagtgactttaagacctggctttcggccaagatcatgcccaaggtgccaggcataccctttctctcatgtcaaa

SEQ ID NO: 124861 - DNA, 80 bp, synthetic construct
  source 1..80: mol_type = other DNA
ggatcaacgaggactcatccaccccctgcgcatccggttggctccgtgaggtgtgggagtgggtgtgtaccgtgttgtcc

SEQ ID NO: 124862 - DNA, 80 bp, synthetic construct
  source 1..80: mol_type = other DNA
caacaatttttgcaggacacctgaaatgcagattaaaaatggataaactgattttaaaagggatgtcatatgtaatgtgc

SEQ ID NO: 124863 - DNA, 80 bp, synthetic construct
  source 1..80: mol_type = other DNA
ggggcgcggttcctggaatttgaagccctgggttttttgaatgaagatcattggtttagcagagaaaactcatggagtgg

SEQ ID NO: 124864 - DNA, 80 bp, synthetic construct
  source 1..80: mol_type = other DNA
tgctcctgctcgtcactcaggctgaggcagccttggagaacctagtggtgctcaacgccgtttctgcggccggtacccac

SEQ ID NO: 124865 - DNA, 80 bp, synthetic construct
  source 1..80: mol_type = other DNA
gttccgcggcggcgcgcacgtccgcccaaaatttggcgagggtggtccgcgcgtacaggtgctgggtcgcgcggaggacg

SEQ ID NO: 124866 - DNA, 80 bp, synthetic construct
  source 1..80: mol_type = other DNA
tgatcggtgcggtggtgacgagcaccccgtcgaccggccgcccgcgcgtgtcggcatgcgtcagacggggcacggccacg

SEQ ID NO: 124867 - DNA, 80 bp, synthetic construct
  source 1..80: mol_type = other DNA
gaggcctggctacccctggcccctttacgggaatgagggctgcgggtgtgcaggatggctcctgtccccccggggctctc

SEQ ID NO: 124868 - DNA, 80 bp, synthetic construct
  source 1..80: mol_type = other DNA
ccttgtgtgccaaaaccccctcctaattataagaccgcaatttggagggtggcagcgtcagagtacgttgaggtcacgca

SEQ ID NO: 124869 - DNA, 80 bp, synthetic construct
  source 1..80: mol_type = other DNA
gtgctgatgactcacttcttcagtatactccagtcccaagaaacactccacagagtgcttgacttcgacatatacggagt

SEQ ID NO: 124870 - DNA, 80 bp, synthetic construct
  source 1..80: mol_type = other DNA
taggcaacattattatgtatgcccccaccttgtgggcgaggatgatcctcatgacccactttttctccatcctcttaagc

SEQ ID NO: 124871 - DNA, 80 bp, synthetic construct
  source 1..80: mol_type = other DNA
gcgggccatccgccgggaacacaccagctcgcgctccacggaaaccaggccccctttgccgccggccgccggcggcaccg

SEQ ID NO: 124872 - DNA, 80 bp, synthetic construct
  source 1..80: mol_type = other DNA
tgacaggagggcaagcagctcgaaccacccagggccttacaagccttttctcaccaggggcatctcagaacatccaactt

SEQ ID NO: 124873 - DNA, 80 bp, synthetic construct
  source 1..80: mol_type = other DNA
acacttgtgggccctacacccctgttatatcgcctaggctcggtcactaatgaggtcaccctcacccaccccgtaaccaa

SEQ ID NO: 124874 - DNA, 80 bp, synthetic construct
  source 1..80: mol_type = other DNA
gatggatacttggtagcatggaacccaaagtatgacacgcgcacactttggacaacaccagacacatctccaaactgcac

SEQ ID NO: 124875 - DNA, 80 bp, synthetic construct
  source 1..80: mol_type = other DNA
cgtgtgccagttcgtacgcgtccacctcacccttagaagacaaagagtgactcaatgtctgttatgtatgcccagcatga

SEQ ID NO: 124876 - DNA, 80 bp, synthetic construct
  source 1..80: mol_type = other DNA
gaacgtgcattaaaagaggatatagagtttgaagatatattaatagacaaacttaaaaaatcgtcttacgtagaagcagc

SEQ ID NO: 124877 - DNA, 80 bp, synthetic construct
  source 1..80: mol_type = other DNA
agacctaccggccataattgaaaggctacatgggctcgatgccttctcactgcacacatactctccccacgaactctcaa

SEQ ID NO: 124878 - DNA, 80 bp, synthetic construct
  source 1..80: mol_type = other DNA
taataattaagtttaatgaggaaatagatgagacatgtgcatactctatcacctttaactttggttggggcaaggtatat

SEQ ID NO: 124879 - DNA, 80 bp, synthetic construct
  source 1..80: mol_type = other DNA
catctaaccgatcggaggtgacagtagacgccagttgggctttaaaccttctgccaccctcatcctccccattggataat

SEQ ID NO: 124880 - DNA, 80 bp, synthetic construct
  source 1..80: mol_type = other DNA
gtctcgtagaccgtgcaacatgagcacacttcctaaaccacaaagaaaaaccaaaagaaacaccaaccgccggccacagg

SEQ ID NO: 124881 - DNA, 80 bp, synthetic construct
  source 1..80: mol_type = other DNA
cgaacccgtatcgacccgcgagcttagaaataggatttttcccactctgtatgctatatttcaacaaagcaggggccaag

SEQ ID NO: 124882 - DNA, 80 bp, synthetic construct
  source 1..80: mol_type = other DNA
accacctctaagatacagaggtgaggatggatgctggtacgggatggaaatcagaccattgaaagagaaagaggagaatt

SEQ ID NO: 124883 - DNA, 80 bp, synthetic construct
  source 1..80: mol_type = other DNA
caatcccattcctgatggagagccaaagccagccttgtatgaaagaaagatgagcttgctccttgccgttggcttgtgca

SEQ ID NO: 124884 - DNA, 80 bp, synthetic construct
  source 1..80: mol_type = other DNA
agggcccactcccctgttgtacaggctaggggctgtacaaaatgaggtctgcaccacccaccccatcactaagtacatca

SEQ ID NO: 124885 - DNA, 80 bp, synthetic construct
  source 1..80: mol_type = other DNA
taacatgtttatgcgctgcacaatacatttgggtctccggcggggtgtgtttagaccttcccagtgtaactttagtcatt

SEQ ID NO: 124886 - DNA, 80 bp, synthetic construct
  source 1..80: mol_type = other DNA
gcccttgcgaaagcatgtggacctgatggtgggcgctgctactatgtgctctgccctctacatcggcgacttgtgtggtg

SEQ ID NO: 124887 - DNA, 80 bp, synthetic construct
  source 1..80: mol_type = other DNA
gtgtgctagagcgcaggcccctcctccatcctgggaccagatgtggaagtgcctaatacggctcaaacccactctccatg

SEQ ID NO: 124888 - DNA, 80 bp, synthetic construct
  source 1..80: mol_type = other DNA
gcaattccatttatgccaaatttagtggcttatccaagacctaacacgccagactctaaaatttatgctagaagcaaaat

SEQ ID NO: 124889 - DNA, 80 bp, synthetic construct
  source 1..80: mol_type = other DNA
ccgagcctccacggtggtagccaaacccctccccgtcgaggaggcttgtgatctcacgcccccacattcggctcgctcta

SEQ ID NO: 124890 - DNA, 80 bp, synthetic construct
  source 1..80: mol_type = other DNA
tggttgtggggctgtatgggaacggactgaagaccaatgaaacctacgtcagcagcattgctcagggtgaggcggaaaag

SEQ ID NO: 124891 - DNA, 80 bp, synthetic construct
  source 1..80: mol_type = other DNA
cctctcaaccttgcctggtaatcctgcagtggcctctctgatgtcattctctgccgccctcaccagtccgctgtcgactt

SEQ ID NO: 124892 - DNA, 80 bp, synthetic construct
  source 1..80: mol_type = other DNA
agtgacgcaggtagtcgactttagcctagaccccaccttctcaatcgaaactactaccgtcccccaggatgctgtgtcca

SEQ ID NO: 124893 - DNA, 80 bp, synthetic construct
  source 1..80: mol_type = other DNA
ataggccaggcgcaggtggatgagcagaccttccaggagatcactagcgtaagccgcgcgctgggtcagaacgacaccga

SEQ ID NO: 124894 - DNA, 80 bp, synthetic construct
  source 1..80: mol_type = other DNA
ccacttacacctttggtgagaatgagacagatgtggttttgctgacgtcccgaagaccaccccatggacgttggttcggg

SEQ ID NO: 124895 - DNA, 80 bp, synthetic construct
  source 1..80: mol_type = other DNA
cggccagaaagggaaacctcgtcctgcttggtcctggcgacgcaatgggagaggcgtggtggagactgctagcccccata

SEQ ID NO: 124896 - DNA, 80 bp, synthetic construct
  source 1..80: mol_type = other DNA
gtaagaactgggaaccaatccagatgctgggtggcactgacccccactgtggcagcgccctacgctaatgctccgcttga

SEQ ID NO: 124897 - DNA, 80 bp, synthetic construct
  source 1..80: mol_type = other DNA
actgcgtcactgcgagcattcacggatgctatgaccaggtactcagctccccctggagacgctccgcaacctacgtatga

SEQ ID NO: 124898 - DNA, 80 bp, synthetic construct
  source 1..80: mol_type = other DNA
cgggattgaagcgggcgagcagggccccggtggccaggtacgtcatgcggccggcatagcgggcggccacgcgacagtcg

SEQ ID NO: 124899 - DNA, 80 bp, synthetic construct
  source 1..80: mol_type = other DNA
cttgcaccagaatatagtggacgtgcagtacctctacggagtgtcctcgaacatcgtgtcttgggctgtgaggtgggagt

SEQ ID NO: 124900 - DNA, 80 bp, synthetic construct
  source 1..80: mol_type = other DNA
gtttctgcgcggttgggtcgtgaggtgttgttggggcctgccgacgaccatcggaagatgggttggcacttgttggcccc

SEQ ID NO: 124901 - DNA, 80 bp, synthetic construct
  source 1..80: mol_type = other DNA
tgccccaccgattgcttcaggaagcatccggagactacctacgccaagtgcggatcagggccttggatcacaccgcgctg

SEQ ID NO: 124902 - DNA, 80 bp, synthetic construct
  source 1..80: mol_type = other DNA
gtaatgacccagaagacatcgactgctggtgcactaaagctgctgtctatgtcagatatgggaggtgtacgaaaaccaga

SEQ ID NO: 124903 - DNA, 80 bp, synthetic construct
  source 1..80: mol_type = other DNA
attttctatgtttgttacggcggttgtgtcggtctctccaagctcgttttatgagagtttacaagtagagcccacacaat

SEQ ID NO: 124904 - DNA, 80 bp, synthetic construct
  source 1..80: mol_type = other DNA
ccgtcgcccgatttacagcccccagatgcccacgggcatctcatgcgcggtgaacgaagcggccatggcccgcctcggag

SEQ ID NO: 124905 - DNA, 80 bp, synthetic construct
  source 1..80: mol_type = other DNA
gtactttgttgggggaatggagcacagactgaccgcagcgtgcaactggactaggggagaaaaatgtgaccttgaggaca

SEQ ID NO: 124906 - DNA, 80 bp, synthetic construct
  source 1..80: mol_type = other DNA
tatcgatttattgtgccccacagactgttttaggaagcaccccgatgctacctatcttaagtgtggagcagggccttggt

SEQ ID NO: 124907 - DNA, 80 bp, synthetic construct
  source 1..80: mol_type = other DNA
ggagccgggagacccggatctgagcaccggctcatggtccactgtgagtgaggaggagggcgacagcgttgtctgctgct

SEQ ID NO: 124908 - DNA, 80 bp, synthetic construct
  source 1..80: mol_type = other DNA
cgttgctccagcaaatcagcctcccccaccttctcctacccccactgagattagctactttaatctaacaggcggagatg

SEQ ID NO: 124909 - DNA, 80 bp, synthetic construct
  source 1..80: mol_type = other DNA
tcggcgccgatttccggcccggcgcgtccccgcggggccggtccagatcgcggtcgcccggaagaactgcgcgaggcgca

SEQ ID NO: 124910 - DNA, 80 bp, synthetic construct
  source 1..80: mol_type = other DNA
ggggccgcacgggccggggtaggcaaggcacataccggtttgtcaccccaggagagcgaccgtccggcatgtttgactca

SEQ ID NO: 124911 - DNA, 80 bp, synthetic construct
  source 1..80: mol_type = other DNA
taaaacctacccttcacgggcccacacccctcctgtacaggctgggtgctgtccaaaatgagatcactttgacacaccca

SEQ ID NO: 124912 - DNA, 80 bp, synthetic construct
  source 1..80: mol_type = other DNA
tcacaaaaatcatatggtggctccagtacttcctcacgagatcggaagcagagctgcgagtctgggtcccctcccttgaa

SEQ ID NO: 124913 - DNA, 80 bp, synthetic construct
  source 1..80: mol_type = other DNA
tcagcgtctgcccagattccagacgcgcggtcagaagggcgtcgaaactgtcatactctgtgtagtcgtccggaaacatg

SEQ ID NO: 124914 - DNA, 80 bp, synthetic construct
  source 1..80: mol_type = other DNA
gcagcagtcggaagcacgccacggcgtccacgacctcggtgctctccaaggggctgtcctccgcaaacaggcccgtggtg

SEQ ID NO: 124915 - DNA, 80 bp, synthetic construct
  source 1..80: mol_type = other DNA
cagcaggggaagcttactttccccccggccaatctcatacttgaagggatcctcgggcgtgccgctgctctgccccatgg

SEQ ID NO: 124916 - DNA, 80 bp, synthetic construct
  source 1..80: mol_type = other DNA
gaacgaaaaaactaatgaaaatcacagcagaatggctctggaaagaactaggaaggaaaaagacacctaggatgtgcacc

SEQ ID NO: 124917 - DNA, 80 bp, synthetic construct
  source 1..80: mol_type = other DNA
tccggcatcacgggcgacaatacaacaacgtcctccgagcccaccccttctgtttgccccccagactccgacgctgagtc

SEQ ID NO: 124918 - DNA, 80 bp, synthetic construct
  source 1..80: mol_type = other DNA
tgtggatgcgcgcgagggacaggatgtgcgagggtggcgacggtggcgaggtcatggccgtctcggacctgcgtaggtgc

SEQ ID NO: 124919 - DNA, 80 bp, synthetic construct
  source 1..80: mol_type = other DNA
ttgtagcgccacatcttctctttcttcctcgctgtccacgatcacctctggtgatggcgggcgctcgggcttgggagaag

SEQ ID NO: 124920 - DNA, 80 bp, synthetic construct
  source 1..80: mol_type = other DNA
cggtacgttttcgtctgtctcgttctttatttctcacacacgcgcgcggccatcgccgcgtctgtcttaaaggcgcacag

SEQ ID NO: 124921 - DNA, 80 bp, synthetic construct
  source 1..80: mol_type = other DNA
agtcgacgggagcacgcatgtgacaggcgggtccgcagcttttggtaccagaggcctcgtcagcgtcttcagtccggtgg

SEQ ID NO: 124922 - DNA, 80 bp, synthetic construct
  source 1..80: mol_type = other DNA
cgactggcctaatccatctacaccagaatgttgtggacgtgcagtacctctacggattgtccacggcagttgtgtcgtgg

SEQ ID NO: 124923 - DNA, 80 bp, synthetic construct
  source 1..80: mol_type = other DNA
cagcaaacgcgttccccgcgctccatagacccgcgtcgggttgcgccgcctccgaagccatggatgcgccccaaagccac

SEQ ID NO: 124924 - DNA, 80 bp, synthetic construct
  source 1..80: mol_type = other DNA
aggtacgctccggcgtgcaagcctctcctacgggaagaggtctcattccaggtcgggctcaaccagtatttggtcgggtc

SEQ ID NO: 124925 - DNA, 80 bp, synthetic construct
  source 1..80: mol_type = other DNA
caggttgtcgacttcagcctagaccccacattttcaattgagaccacaactgtaccccaggatgcggtatcgcgcagcca

SEQ ID NO: 124926 - DNA, 80 bp, synthetic construct
  source 1..80: mol_type = other DNA
ccccgggtgatcccccggttcctgcttatgacctagagctcgtaacatcttgctcctcaaatgtgtccgtcgcccacgat

SEQ ID NO: 124927 - DNA, 80 bp, synthetic construct
  source 1..80: mol_type = other DNA
gtcacatttactgtgaaccaaacatcccgcctcctgatgaggagaatgaggcgtccaactggaaaagtgaccctggaggc

SEQ ID NO: 124928 - DNA, 80 bp, synthetic construct
  source 1..80: mol_type = other DNA
gcggcggaccagatccccggagctccaggacacgggggagatggtgtggcgtccgaggtcggaggcgccaaacagaagca

SEQ ID NO: 124929 - DNA, 80 bp, synthetic construct
  source 1..80: mol_type = other DNA
agtcgcactttttaaaagtgttataacatgtcaattttgatttcgccaagtaataacacagggtggggcttaggttccac

SEQ ID NO: 124930 - DNA, 80 bp, synthetic construct
  source 1..80: mol_type = other DNA
gaaccaacgcgaggatctcctcgttctcctgcgcgatggacacgtcctgggccgcggtcgtgtcgccgccgggtgccgtc

SEQ ID NO: 124931 - DNA, 80 bp, synthetic construct
  source 1..80: mol_type = other DNA
attttgatgggtttggctctcacgtcaacggggcaattttctgcttcagtgatggccgctggactgatggcatgcaaccc

SEQ ID NO: 124932 - DNA, 80 bp, synthetic construct
  source 1..80: mol_type = other DNA
gagaggctgcagctatctttatgactgcaacccctcctggaacgacagatcccttcccccagagcaacagcccaatagaa

SEQ ID NO: 124933 - DNA, 80 bp, synthetic construct
  source 1..80: mol_type = other DNA
tggccagatcgttggcggagtttacttgttgccgcgcaggggccctagaatgggtgtgcgcgcagcgaggaagacttccg

SEQ ID NO: 124934 - DNA, 80 bp, synthetic construct
  source 1..80: mol_type = other DNA
agagttgagctgggggaggcagctgcaatattcatgactgccaccccaccaggtacctcagacccatttccagagtccaa

SEQ ID NO: 124935 - DNA, 80 bp, synthetic construct
  source 1..80: mol_type = other DNA
atgttgtttctcagcagctgttggatctgcgccagcaggtttctgccctgaaggcttcctcccctcccaatgcggtttaa

SEQ ID NO: 124936 - DNA, 80 bp, synthetic construct
  source 1..80: mol_type = other DNA
tggaaaaagaaattaaatcaattatcccggaaagagtttgacctttacaagaaatctggaatcactgaagtggatagaac

SEQ ID NO: 124937 - DNA, 80 bp, synthetic construct
  source 1..80: mol_type = other DNA
gcttggcaggagtccgtgactattgctatttggctgcagtaagtgatttgtcaacaaaggcagcttgccccacgatgggt

SEQ ID NO: 124938 - DNA, 80 bp, synthetic construct
  source 1..80: mol_type = other DNA
ttgcaatgaaatacaagcgctcgaaactggaactgattttactccaattttcattgctgccattgttgtgagcttaatta

SEQ ID NO: 124939 - DNA, 80 bp, synthetic construct
  source 1..80: mol_type = other DNA
cagagaagcgttggtcgctgcctcctcgagttgctcctcctggtccgcaagacgatcgtccacggcgtccaggcgctcac

SEQ ID NO: 124940 - DNA, 80 bp, synthetic construct
  source 1..80: mol_type = other DNA
gccttggccagcagccgccgcgtccgacgagcacagcaccgcacagaaagctcatccaagtttttacaataggtacagcc

SEQ ID NO: 124941 - DNA, 80 bp, synthetic construct
  source 1..80: mol_type = other DNA
cagctgcttggctcgcttaccatcaccagcctactcaagaggcttcatgcctgggtttccggggactaccccgtcccgtg

SEQ ID NO: 124942 - DNA, 80 bp, synthetic construct
  source 1..80: mol_type = other DNA
agcaacacgtggcatggaacatttcccatcaacgcatacaccacgggcccctgctcaccttccccagcgccgaactactc

SEQ ID NO: 124943 - DNA, 80 bp, synthetic construct
  source 1..80: mol_type = other DNA
accccccgttgctggagacgtggaaaaaaccggactacgaaccacctgtggtccatggctgcccacttccacctccacag

SEQ ID NO: 124944 - DNA, 80 bp, synthetic construct
  source 1..80: mol_type = other DNA
ggcagctcttcacgttccggcctcggctgcatcacacggtccaagactgcaactgctccgtgtatgtgggccacataaca

SEQ ID NO: 124945 - DNA, 80 bp, synthetic construct
  source 1..80: mol_type = other DNA
cgctgtcaataactatgacatcatagtcatgagcaacagtttcaatggccagtcggagcatcaggtgtggatcggtgggc

SEQ ID NO: 124946 - DNA, 80 bp, synthetic construct
  source 1..80: mol_type = other DNA
cgatctcagcgacggttcttggtctaccgtgagcgaggaggctagtgaggacgtcgtctgctgctcgatgtcctatacat

SEQ ID NO: 124947 - DNA, 80 bp, synthetic construct
  source 1..80: mol_type = other DNA
aaaaggtcaggtgcagaaattttgaaatcacagttgggaccttggccaccacgggagttgcggtatacggggttagcgca

SEQ ID NO: 124948 - DNA, 80 bp, synthetic construct
  source 1..80: mol_type = other DNA
tcaatacttcattgctcgtattgaagctctcctgcacgtatgggtgcctccactgctggtccgaggaggccgagacgcag

SEQ ID NO: 124949 - DNA, 80 bp, synthetic construct
  source 1..80: mol_type = other DNA
ccttggagggggagccgggcgatcctgacttgacatcagactcgtggtccacagtaagcggatcggaggacgtcgtgtgc

SEQ ID NO: 124950 - DNA, 80 bp, synthetic construct
  source 1..80: mol_type = other DNA
ggggacggacatcgccgatcctgcgggacaggccccccccgatgacactcctgactcagaaacgggctccatctcctcca

SEQ ID NO: 124951 - DNA, 80 bp, synthetic construct
  source 1..80: mol_type = other DNA
tgtccagacaaatttcgtgagaccctccggccggtagaggaggaagccggccggggaaaaaacccccccccagagtgcac

SEQ ID NO: 124952 - DNA, 80 bp, synthetic construct
  source 1..80: mol_type = other DNA
ctgttcatacggccctcgctggagctttggaggctgagatggatggtgcaaagggaaggctattctctggccatttgaaa

SEQ ID NO: 124953 - DNA, 80 bp, synthetic construct
  source 1..80: mol_type = other DNA
gactactccacgccctgcgatggcacatggctaagggccatttgggactgggtctgcacggcactgacagacttcaaagc

SEQ ID NO: 124954 - DNA, 80 bp, synthetic construct
  source 1..80: mol_type = other DNA
gacgtggtcgtctgtgccacagacgcgctcatgacagggtatacgggcgatttcgactccgtcatcgactgcaatgtagc

SEQ ID NO: 124955 - DNA, 80 bp, synthetic construct
  source 1..80: mol_type = other DNA
cccctcccggcgatcctcccaaagcagaatatgacctggagctgataacatcttgctcttccaatgtatccgtggcgtta

SEQ ID NO: 124956 - DNA, 80 bp, synthetic construct
  source 1..80: mol_type = other DNA
acgtataggtaggcgaggtgggaaagggtggaggtgaatgacgttggagtcgaaggttggagagtggcgcggcggaagtg

SEQ ID NO: 124957 - DNA, 80 bp, synthetic construct
  source 1..80: mol_type = other DNA
ctgtcaacaggccttattcatctccaccagaacattgtggacgttcaatacctgtatggcattacatccaactttgcatc

SEQ ID NO: 124958 - DNA, 80 bp, synthetic construct
  source 1..80: mol_type = other DNA
agcgtgctcttgcactctgaggaaggttccagagcttaccgcaatgcattgtcaatgatgcctgaggcaatgacaacagt

SEQ ID NO: 124959 - DNA, 80 bp, synthetic construct
  source 1..80: mol_type = other DNA
gctttggtggtagggagtcatctgcgcggcaatctgcgcgtcacgtggggacgcgggaaggcgcgtcaatgatgacaggc

SEQ ID NO: 124960 - DNA, 80 bp, synthetic construct
  source 1..80: mol_type = other DNA
gagcacaggttcgatgcagcgtgcaactggacccggggggagcgctgcgagctcgaggacagagatcggatcgaaatgag

SEQ ID NO: 124961 - DNA, 80 bp, synthetic construct
  source 1..80: mol_type = other DNA
aggccagcggagagattcaagtcctttctactgccacccaaactttcttaggcacaaccatctccggtgtgctgtggact

SEQ ID NO: 124962 - DNA, 80 bp, synthetic construct
  source 1..80: mol_type = other DNA
atagcctgagaagaaaccccaactaaatccgctgcttcacctattctccagcgccgggttattttcctcgcttccgggct

SEQ ID NO: 124963 - DNA, 80 bp, synthetic construct
  source 1..80: mol_type = other DNA
cagacaccactcctttcggtcaacaacgagtgttcaaggaaaaggtggacacaaaggctccagagcctccagaaggggtc

SEQ ID NO: 124964 - DNA, 80 bp, synthetic construct
  source 1..80: mol_type = other DNA
actggtacaagaagggaagctcgattgggaagatgtttgaggccactgccagaggtgcaaggcgcatggccatcttggga

SEQ ID NO: 124965 - DNA, 80 bp, synthetic construct
  source 1..80: mol_type = other DNA
tcaacggagagtggtctacaccatgtggcacgacctggttgcgggaggtttgggactgggtctgcacagtgttggctgac

SEQ ID NO: 124966 - DNA, 80 bp, synthetic construct
  source 1..80: mol_type = other DNA
ggtaggcagaggagaacaacagatcaatcaccattggcataagtctggaagcagcattggcaaagcctttacaaccactc

SEQ ID NO: 124967 - DNA, 80 bp, synthetic construct
  source 1..80: mol_type = other DNA
acaaggtgctcgtactcaacccctctgtcgctgcaaccctagggtttggcgcatacatgtccaaggcacatgggatagat

SEQ ID NO: 124968 - DNA, 80 bp, synthetic construct
  source 1..80: mol_type = other DNA
cctatgtacaacagcaagggtctcaagtgcggttaccggcgttgtcgcgccagtggcgtactgcctaccagcttcggcaa

SEQ ID NO: 124969 - DNA, 80 bp, synthetic construct
  source 1..80: mol_type = other DNA
acagcgcgtggacgggcaggacgtagaagtattcgccattttggatggtgtggtccaggtgctgggaggccatgagcagc

SEQ ID NO: 124970 - DNA, 80 bp, synthetic construct
  source 1..80: mol_type = other DNA
ggacagggggcctacttttaagccctactccggcactgcctacaacgctctagctcccaagggcgctcctaactcctgtg

SEQ ID NO: 124971 - DNA, 80 bp, synthetic construct
  source 1..80: mol_type = other DNA
aattcagacaccagcaaaatcaagaacaggattgaacgactcaggtgtgagtacagttcgacgtggcaccacgatgagaa

SEQ ID NO: 124972 - DNA, 80 bp, synthetic construct
  source 1..80: mol_type = other DNA
acaagacagttattagatgctgcatgatggatatgtggcctggagtagtcggtatggaagcagtcacttttgtaaatgtt

SEQ ID NO: 124973 - DNA, 80 bp, synthetic construct
  source 1..80: mol_type = other DNA
gctcaacgacgaggcagtcacatcgtcactgggtctcagaccagacggagtatttcagctcggaggatccggtcgctcct

SEQ ID NO: 124974 - DNA, 80 bp, synthetic construct
  source 1..80: mol_type = other DNA
gtactccaggccggcataactagggtgccgtactttgtgcgcgctcaggggctcattcgtgcatgcatgctggtgcggaa

SEQ ID NO: 124975 - DNA, 80 bp, synthetic construct
  source 1..80: mol_type = other DNA
atccatgcctcaattttgatccagacaactgcacactcacttttgctccagaggctggccgctgtggagttcttattagg

SEQ ID NO: 124976 - DNA, 80 bp, synthetic construct
  source 1..80: mol_type = other DNA
aaacaaggcgaccctgcgggccatcaccagcaacgtcagtgccatcctcgcccgcaacgggggcatcgggctatgcgtgc

SEQ ID NO: 124977 - DNA, 80 bp, synthetic construct
  source 1..80: mol_type = other DNA
gctggggagggctgggtggatgaggaacaggagtcgttgttgcgcggtgaggtgttgcgagctgccggtgtgccagtgag

SEQ ID NO: 124978 - DNA, 80 bp, synthetic construct
  source 1..80: mol_type = other DNA
gcggcggcaacgcccggggccgggcacacgaacaccagcagcgcctccgcagcgaaaacgcccgccaccacaccagcccc

SEQ ID NO: 124979 - DNA, 80 bp, synthetic construct
  source 1..80: mol_type = other DNA
gaaaaagaccatggcgaaaaagaaaggagctgtactcttgggcttagcgctcacatccactggatggttctcgcccacaa

SEQ ID NO: 124980 - DNA, 80 bp, synthetic construct
  source 1..80: mol_type = other DNA
gattggccatctccacgcacctaccgggagcggaaagagtaccaaagtcccagccgcatacgcggcccagggctataagg

SEQ ID NO: 124981 - DNA, 80 bp, synthetic construct
  source 1..80: mol_type = other DNA
tcagcatcactcctgcggcgccttcatacacactaaaacttggagagtatggagaggtgacggtggactgtgaaccacga

SEQ ID NO: 124982 - DNA, 80 bp, synthetic construct
  source 1..80: mol_type = other DNA
ttaactgtttgggaatggggaatcgggacttcatagaaggagccagcggagccacttgggtggatctggtgttagaagga

SEQ ID NO: 124983 - DNA, 80 bp, synthetic construct
  source 1..80: mol_type = other DNA
agtggtgcggcggctcgcggtaaaggggccagcgaagtgtggcgggcgtaccggaggccaggtcctccagcataaggcga

SEQ ID NO: 124984 - DNA, 80 bp, synthetic construct
  source 1..80: mol_type = other DNA
gggcggctcgtcgcccgccatctcctccagagcctctagctcgctgtcgtcatccccgcggaacaccgcacgcaggtacc

SEQ ID NO: 124985 - DNA, 80 bp, synthetic construct
  source 1..80: mol_type = other DNA
gcccagagaagaggaagaattggaaggaaccaaaacaaggaaggtgatcagtatgtttacatgggacagcctttaaataa

SEQ ID NO: 124986 - DNA, 80 bp, synthetic construct
  source 1..80: mol_type = other DNA
acggaacggcgcctcggatgaccttatggtcgccgtcattatggccatctaccttgcggcccaggccggacctccgcaca

SEQ ID NO: 124987 - DNA, 80 bp, synthetic construct
  source 1..80: mol_type = other DNA
aagtcgccgggggtcattatgtccaaatggtcttcatgaagctgggcgcgctgacaggtacgtacgtttataaccatctt

SEQ ID NO: 124988 - DNA, 80 bp, synthetic construct
  source 1..80: mol_type = other DNA
ataacatcatgctcctccaacgtgtcggtcgcgcacgatgcatccggcaagagggtgtactacctcacccgtgaccccac

SEQ ID NO: 124989 - DNA, 80 bp, synthetic construct
  source 1..80: mol_type = other DNA
ttgctcctgtgcctactcctactttctgggggcattttcctgctgcctgcccgggcagctcctcgaaaccctgggagaaa

SEQ ID NO: 124990 - DNA, 80 bp, synthetic construct
  source 1..80: mol_type = other DNA
gaccagggggcggctgtagcacgtccccggccgcgagctgacgcgcatcgagttctgcacgatcacgttgtccgtggcga

SEQ ID NO: 124991 - DNA, 80 bp, synthetic construct
  source 1..80: mol_type = other DNA
tgagagaggctgagtgcttaacacatcactgtgtattgcttgaacagctgtgctaagtgtggtttatttttgttactagg

SEQ ID NO: 124992 - DNA, 80 bp, synthetic construct
  source 1..80: mol_type = other DNA
ccgcgacaaagcacacagaacaaaatacactacgcaaacgcacacaatatttatacactccctttatcgtcaaaagtcca

SEQ ID NO: 124993 - DNA, 80 bp, synthetic construct
  source 1..80: mol_type = other DNA
ggtaccgatcgttactaattaaagggttggaactttccaaggtgtgtaagcacatatcctcttcttcagcatctatgaat

SEQ ID NO: 124994 - DNA, 80 bp, synthetic construct
  source 1..80: mol_type = other DNA
ttcaattttcgtgaccttcgagcgtgaagcttccctttcatctgctctcttacagagggactttacctcgaaggccctat

SEQ ID NO: 124995 - DNA, 80 bp, synthetic construct
  source 1..80: mol_type = other DNA
aataagccagatattgtcatgtatgcagaaaatgtaaatttagaagctcctgacacacatgtagtttacaaaccaggcaa

SEQ ID NO: 124996 - DNA, 80 bp, synthetic construct
  source 1..80: mol_type = other DNA
ggcactgtccttgatcaagcggagaccgcgggggcgagactggttgtgctcgccaccgctacccctccgggctccgtcac

SEQ ID NO: 124997 - DNA, 80 bp, synthetic construct
  source 1..80: mol_type = other DNA
tctagggcgtcgaagcgccgcagctcggccagacccgagctgcggcgcgcctgttggtcgttaatgtcgcggatgctgcg

SEQ ID NO: 124998 - DNA, 80 bp, synthetic construct
  source 1..80: mol_type = other DNA
ctcgccgatgggggctgcgctagcggcgcctatgacatcatcatatgcgatgaatgccacgctgtggatgctacctccat

SEQ ID NO: 124999 - DNA, 80 bp, synthetic construct
  source 1..80: mol_type = other DNA
gtggccaaatctattgacttcatccctgttgaatctctcgatatcgccgctcggtcgcccagtttctctgacaacagcac

SEQ ID NO: 125000 - DNA, 80 bp, synthetic construct
  source 1..80: mol_type = other DNA
cgttaaccccgacggcgtggcgcaccacgacgacataaaccgcgccgccgccgcgttcctcagccggggccacaacctat

SEQ ID NO: 125001 - DNA, 80 bp, synthetic construct
  source 1..80: mol_type = other DNA
ggccttttgtgcagttgtgtggatggtcacagacagcttaccgacaaggttcattgtcataacagtggccctttgtctgg

SEQ ID NO: 125002 - DNA, 80 bp, synthetic construct
  source 1..80: mol_type = other DNA
gctgtgaagtgggaatacatcgtcttagcgttcttggtgttagctgttgcaagggtgtgcgcttgtctgtggttaatgtt

SEQ ID NO: 125003 - DNA, 80 bp, synthetic construct
  source 1..80: mol_type = other DNA
tatcgctgggagatgggttaataacaaaaaatgatgtactatgtgccaaactaggacatggtcttgtgtttgactcttcc

SEQ ID NO: 125004 - DNA, 80 bp, synthetic construct
  source 1..80: mol_type = other DNA
tcagtttcccatgattcagtacttagaagagccccctccacgacccccttccactgttagctactttcacataaccggcg

SEQ ID NO: 125005 - DNA, 80 bp, synthetic construct
  source 1..80: mol_type = other DNA
gggtcctttcttggataaacccactctgtgcccggccatttgggcgtgcccccgcaagactgctagccgagtagcgttgg

SEQ ID NO: 125006 - DNA, 80 bp, synthetic construct
  source 1..80: mol_type = other DNA
ttttaagtttacaccaatatctcttacacatcaactacgaacgggatttcaccccgggattgcctttaccgtagtgcgcc

SEQ ID NO: 125007 - DNA, 80 bp, synthetic construct
  source 1..80: mol_type = other DNA
taaggcgacgagcaagacaaacaacaggcccgcccgacagacccttctgggggggcccatcgtccctaacaggaagatga

SEQ ID NO: 125008 - DNA, 80 bp, synthetic construct
  source 1..80: mol_type = other DNA
gagtcgtccccatcatcagtgaccgaaggggaaagaaccatgagagttcttgacactgttgagaaatggttgagctgtgg

SEQ ID NO: 125009 - DNA, 80 bp, synthetic construct
  source 1..80: mol_type = other DNA
ccaaagtgtggctagttttagtaaaatgcaacggcatggttaacgggaccatatccattaaagctcaaaaaggcacttta

SEQ ID NO: 125010 - DNA, 80 bp, synthetic construct
  source 1..80: mol_type = other DNA
ccgcctacactcagcagacccgtggcctgctgggtactatagtggtgagcctgacagggcgcgacagaaccgcgcaggcc

SEQ ID NO: 125011 - DNA, 80 bp, synthetic construct
  source 1..80: mol_type = other DNA
cagcatggtacctgtgggaagtgaagaaacaacgggctggagtactgtgggatgttccttcacccccacctgtgggaaag

SEQ ID NO: 125012 - DNA, 80 bp, synthetic construct
  source 1..80: mol_type = other DNA
gcgcacttacctgaacactccaggtcttcctgtctgccaagaccatcttgagttttgggagggtgtctttacgggtctaa

SEQ ID NO: 125013 - DNA, 80 bp, synthetic construct
  source 1..80: mol_type = other DNA
attctaccggctttacaaaaacgtgtggcgctccaccttgccgcatcagaagagacttcaatgcaagcgccgatcttctt

SEQ ID NO: 125014 - DNA, 80 bp, synthetic construct
  source 1..80: mol_type = other DNA
cacacaacccccacccgggtagtatccgcggatgcgagtgcctggcgaagtcacgtcccagcaggatataaacctcggcc

SEQ ID NO: 125015 - DNA, 80 bp, synthetic construct
  source 1..80: mol_type = other DNA
cccacccccctgctatacaggttgggggccgtgcagaacgaagtgtcgcttacccaccccataacaaaatacatcatggc

SEQ ID NO: 125016 - DNA, 80 bp, synthetic construct
  source 1..80: mol_type = other DNA
gtgggtaacaactttgccatggaaattaacctaaatgccaacctatggagaaatttcctttactccaatattgcgctgta

SEQ ID NO: 125017 - DNA, 80 bp, synthetic construct
  source 1..80: mol_type = other DNA
gcgaggggttgtacttgaggtcggtggtgtgccacccccggctcgtgcgcgtggcgaccttcgccggcttgagctccatg

SEQ ID NO: 125018 - DNA, 80 bp, synthetic construct
  source 1..80: mol_type = other DNA
tggctctattggaggggttttcaactccatagggaaagccgttcaccaagtgtttggtggtgccttcagaacactcttcg

SEQ ID NO: 125019 - DNA, 80 bp, synthetic construct
  source 1..80: mol_type = other DNA
ggtctactgttttactcctagccccgttgtcgtgggcaccactgacaggcagggcgcacccacctacggctggggagaaa

SEQ ID NO: 125020 - DNA, 80 bp, synthetic construct
  source 1..80: mol_type = other DNA
cccaggacgtcgctgaccgccgccctgagcgccatgcactgcatggagccggtcgtgccgctgggaccccggtccagatg

SEQ ID NO: 125021 - DNA, 80 bp, synthetic construct
  source 1..80: mol_type = other DNA
ggtcggtcaaagtattttccttatgtaaaaggacacgatctaaagccgtaaactcgtacacaaacactggtaccaacgga

SEQ ID NO: 125022 - DNA, 80 bp, synthetic construct
  source 1..80: mol_type = other DNA
ccaaactaagtgttggctgccggcctctccgacattggcggtgcagaatgcgtcggtgcctgtcagggggatccgcgagc

SEQ ID NO: 125023 - DNA, 80 bp, synthetic construct
  source 1..80: mol_type = other DNA
cgcctctattgtggtggcccgatgtttaactccaaaggggaatcatgtggctatcgcagatgccgtgccagtggggtgct

SEQ ID NO: 125024 - DNA, 80 bp, synthetic construct
  source 1..80: mol_type = other DNA
atacggcaatattgggggcgtgtatacgaatacctgaagcgttggaagcatttgacgtatttcaaaaaatatacacgcac

SEQ ID NO: 125025 - DNA, 80 bp, synthetic construct
  source 1..80: mol_type = other DNA
aggcgtgtcggaggcactcgtagcatttaagatcatgagcggcgagtgtccgactggggaggacatggtcaacatgctgc

SEQ ID NO: 125026 - DNA, 80 bp, synthetic construct
  source 1..80: mol_type = other DNA
agtagtcatatccatctttactcttaccccagcatacaagattctcctaagccgctcattgtggtggctgtcctacatgc

SEQ ID NO: 125027 - DNA, 80 bp, synthetic construct
  source 1..80: mol_type = other DNA
cgaagtttcaatctttgtgcatggcccaactaccctggagtcacatggaaatttttcaacccaaagaacagcaacacaag

SEQ ID NO: 125028 - DNA, 80 bp, synthetic construct
  source 1..80: mol_type = other DNA
agtatgatgacagggagatatctgtggcagccgaatgtcatagacctccgaggccccgattccctcctgcacttcctata

SEQ ID NO: 125029 - DNA, 80 bp, synthetic construct
  source 1..80: mol_type = other DNA
cactggggcccactggggcgtgatggcgggcctcgcctacttctccatgcaaggcaactgggccaaagtcggcatcgtgc

SEQ ID NO: 125030 - DNA, 80 bp, synthetic construct
  source 1..80: mol_type = other DNA
tatcgccgcttattgtctggcgactggctgcgtgtccataattggacgggtacatatcaatcagaggactgtagttgccc

SEQ ID NO: 125031 - DNA, 80 bp, synthetic construct
  source 1..80: mol_type = other DNA
tagctggggaagcatagctgtctcacctactaccactacccctaccaccctatggaccaccgcggacccgtctcctaacg

SEQ ID NO: 125032 - DNA, 80 bp, synthetic construct
  source 1..80: mol_type = other DNA
tttgtagcaccataattgcactagccatatacccctacctggatattggatggaacgccatagacgccatgaaccattcc

SEQ ID NO: 125033 - DNA, 80 bp, synthetic construct
  source 1..80: mol_type = other DNA
gtacccactgggtggcccttgcggacatacaaaaatcggtccgtgtgattaaaaagcagcacagtaagttcctgtcttct

SEQ ID NO: 125034 - DNA, 80 bp, synthetic construct
  source 1..80: mol_type = other DNA
gtgatccacatggtacttctccatcagcatagccattgcctccatgcctttttcccaagctgatatcagaggctcgctcg

SEQ ID NO: 125035 - DNA, 80 bp, synthetic construct
  source 1..80: mol_type = other DNA
aacgtatggtaagttcctggctgatggaggttgcagcggaggggcatacgacataatcatctgtgacgagtgctattcca

SEQ ID NO: 125036 - DNA, 80 bp, synthetic construct
  source 1..80: mol_type = other DNA
acaacgtggtctgtccacggaagaggggagtggatgacaactgaggacatgctagatgtctggaacagggtgtgggtgtt

SEQ ID NO: 125037 - DNA, 80 bp, synthetic construct
  source 1..80: mol_type = other DNA
tgacttcaagacttggctatcagccaagctcatgcctgcccttcctggcatacccttcttgtcatgtcagaagggattca

SEQ ID NO: 125038 - DNA, 80 bp, synthetic construct
  source 1..80: mol_type = other DNA
atggaacagctgagaagtatggtggtagagctctaaagccagaaactaaaatgaaaccctgctatggatcttttgctaaa

SEQ ID NO: 125039 - DNA, 80 bp, synthetic construct
  source 1..80: mol_type = other DNA
cttctgggccaagcacatgtggaacttcgtcagcggaatacaatacctggcgggcctgtcaacgctgcccgggaaccctg

SEQ ID NO: 125040 - DNA, 80 bp, synthetic construct
  source 1..80: mol_type = other DNA
agacaccgggcccggagccttcgcgctaagctactgtccaggggaggcaaagctgccatatgtggcaagtacctcttcaa

SEQ ID NO: 125041 - DNA, 80 bp, synthetic construct
  source 1..80: mol_type = other DNA
caaaacgtgggcttaccacggatcctatgaagtcaaggccacaggctcagcctcctccatgataaatggagtcgtaaaac

SEQ ID NO: 125042 - DNA, 80 bp, synthetic construct
  source 1..80: mol_type = other DNA
tgccatgccagaaaggccgtaaaccacatcaactccgtgtgggaggaccttctggaagacagtgtaacaccaatagatac

SEQ ID NO: 125043 - DNA, 80 bp, synthetic construct
  source 1..80: mol_type = other DNA
tcagcctatccccaaggcacgtcggcccgagggcaggacctgggctcagcccgggtatccttggcccctctatggtaatg

SEQ ID NO: 125044 - DNA, 80 bp, synthetic construct
  source 1..80: mol_type = other DNA
cgctgctcggctgcggccgcgggctccggtggctccgcactctgcccggctcgccctgtcccccctcttgctgcttttcc

SEQ ID NO: 125045 - DNA, 80 bp, synthetic construct
  source 1..80: mol_type = other DNA
ggatggcggagatgcttaaatctaagatactaggcctcctacaacaggccacaaaacaggcccaggacatacagccagcc

SEQ ID NO: 125046 - DNA, 80 bp, synthetic construct
  source 1..80: mol_type = other DNA
gggacaagccttcacgttcacacctcgtcgtcaccaaacggtccagacttgtaactgctcgctgtacccaggccacctca

SEQ ID NO: 125047 - DNA, 80 bp, synthetic construct
  source 1..80: mol_type = other DNA
gaggggggaagggcttaccagcacgcaatcagtgaactcccagaaacactagaaacactattgttgctctgcctactggc

SEQ ID NO: 125048 - DNA, 80 bp, synthetic construct
  source 1..80: mol_type = other DNA
gcatgacttgcactgggagctcaaactggagagctcaataatctaaaaccagactgtgactgagcaaaacctggagtgct

SEQ ID NO: 125049 - DNA, 80 bp, synthetic construct
  source 1..80: mol_type = other DNA
ggaaaaggaagcattgatacgtgcgcaaagttcacatgcaaaaacaaggcaacagggaagacaatcctgagggaaaacat

SEQ ID NO: 125050 - DNA, 80 bp, synthetic construct
  source 1..80: mol_type = other DNA
gtctggtcgtaaagctcagggaaaaaccctgggcgtcaatatggttcgacgaggagtccgctccttgtcaagcaaaataa

SEQ ID NO: 125051 - DNA, 80 bp, synthetic construct
  source 1..80: mol_type = other DNA
gggcgaaggttatcggcatcctcctcttgttcgccggtgttgacgccaccacatacaccactggaggcgtcacggcggca

SEQ ID NO: 125052 - DNA, 80 bp, synthetic construct
  source 1..80: mol_type = other DNA
cgcccgcgacccagggaatgtattacttggcctggggccggatggacagcccgcacgagtacgggacgtgggtgcgcgtc

SEQ ID NO: 125053 - DNA, 80 bp, synthetic construct
  source 1..80: mol_type = other DNA
atatttgactccgttgtgctctgtgaagcgtatgacacgggatgcgcgtggtatgaactaacaccatcggagaccacagt

SEQ ID NO: 125054 - DNA, 80 bp, synthetic construct
  source 1..80: mol_type = other DNA
aggtggacttgagcataggttcgaagcagcatgcaattggacccgtggggataggtgtgagcttgatgacagggacagga

SEQ ID NO: 125055 - DNA, 80 bp, synthetic construct
  source 1..80: mol_type = other DNA
cgcccggacactatttataccattaagaagactgttaatatacgtaaatgtgcctatgtgctggggaatggagctgtggt

SEQ ID NO: 125056 - DNA, 80 bp, synthetic construct
  source 1..80: mol_type = other DNA
gtacgtggacgtctcgcctggccgtccgcagctacgcggggtgttccagaacaaaccccccgccgcgctgttcggccgag

SEQ ID NO: 125057 - DNA, 80 bp, synthetic construct
  source 1..80: mol_type = other DNA
caggtgatgtttgtgtgggagactttggagcagcgtgtttccccgtggatattaatgccaacaggtattatggctgggct

SEQ ID NO: 125058 - DNA, 80 bp, synthetic construct
  source 1..80: mol_type = other DNA
cttgctctgtccaacagactgctttcggaagcatccgggggctacttacagcaagtgtgggtccgggccctggctcaccc

SEQ ID NO: 125059 - DNA, 80 bp, synthetic construct
  source 1..80: mol_type = other DNA
gttccttggaggcgtcaaacccactcacatctcctatatcatgctcatattctttgtcctgatggtggttgtgatccccg

SEQ ID NO: 125060 - DNA, 80 bp, synthetic construct
  source 1..80: mol_type = other DNA
ggtggaaccaatacttgatagcgcgcgctgaggccgtgctgcaagtgtgggtcccggtgttagtcgtgcgaggtggccgg

SEQ ID NO: 125061 - DNA, 80 bp, synthetic construct
  source 1..80: mol_type = other DNA
cctatcgtgtctgggtgtgctctgcctcctgccaagccagcgccgattccgccaccaaggcgaaagaagcttgtacagct

SEQ ID NO: 125062 - DNA, 80 bp, synthetic construct
  source 1..80: mol_type = other DNA
gccccagtggatagcagcttcaatcatactggagttttttcttatggtgctgttgataccagaaccagaaaaacaaagga

SEQ ID NO: 125063 - DNA, 80 bp, synthetic construct
  source 1..80: mol_type = other DNA
cgactcagcggcggcagcagcacttgctgagctggcccgcaaggccttcccgccaaccccaacagctcctagtggagact

SEQ ID NO: 125064 - DNA, 80 bp, synthetic construct
  source 1..80: mol_type = other DNA
aaaagtgacgtcacaacaagatgagtaaagatattcccacgccttacatgtggagctttcaaccgcaaatgggactggcg

SEQ ID NO: 125065 - DNA, 80 bp, synthetic construct
  source 1..80: mol_type = other DNA
acgtcacacgcaaattgcccgtagccgtgatgggagcagcatatggctttcagtactcacctgctcaacgggtagagtac

SEQ ID NO: 125066 - DNA, 80 bp, synthetic construct
  source 1..80: mol_type = other DNA
cacctacaattggggggaaaacgagacagatgtcttcctgctcaacagcacccgcccaccgaagggtgcttggtttgggt

SEQ ID NO: 125067 - DNA, 80 bp, synthetic construct
  source 1..80: mol_type = other DNA
cagacaggcgtggctttgttgatactgattaccctcttcacacttaccccggggtataagatccttctcagccggtctct

SEQ ID NO: 125068 - DNA, 80 bp, synthetic construct
  source 1..80: mol_type = other DNA
attgtaagaaccaccccgtgcagagtttcttgtagacgacgcccagctgttgagtgcatagaagatttacttgaggaaga

SEQ ID NO: 125069 - DNA, 80 bp, synthetic construct
  source 1..80: mol_type = other DNA
ggtagatcctggcggccgcgtcggtagccgcgctccgtgtggacgatcgccccgtcgcctggctgatatagtcctcggtg

SEQ ID NO: 125070 - DNA, 80 bp, synthetic construct
  source 1..80: mol_type = other DNA
gggtagagttccttctgcgagcgtggaaggataagaagagccctatgggcttttcatatgacacccggtgttttgactca

SEQ ID NO: 125071 - DNA, 80 bp, synthetic construct
  source 1..80: mol_type = other DNA
gaaagcttctgatgaccatcaacaacacggacattgcggacgtcatcgtgatccccacctcaaaaggtgaaaacagatgt

SEQ ID NO: 125072 - DNA, 80 bp, synthetic construct
  source 1..80: mol_type = other DNA
gcagtagtacttttatgtctcgtaatatttttaatctgtacggctaaacgaatgagggttaaagcctatagggtagacaa

SEQ ID NO: 125073 - DNA, 80 bp, synthetic construct
  source 1..80: mol_type = other DNA
aagtctcatagggaccaggaccagggcaacatgggctgagaacatctacgccgccatcaaccaagtgaggtcagtcatag

SEQ ID NO: 125074 - DNA, 80 bp, synthetic construct
  source 1..80: mol_type = other DNA
gaaatagggcccggacttggcgtgcagacggtggatatccaaatccccgtgcgtgcgtcttcgtccaccgttagcactgc

SEQ ID NO: 125075 - DNA, 80 bp, synthetic construct
  source 1..80: mol_type = other DNA
ggtctccctcagtcccaccgttgccgctaaggatcggagcgtccccgtcagtgagattcgacgtcatgtcgacttgattg

SEQ ID NO: 125076 - DNA, 80 bp, synthetic construct
  source 1..80: mol_type = other DNA
aagaaggtgacctttgaccgtgtgcaagtgttagaccagcactactatgatgttcttaaggagattaaggccaaagcctc

SEQ ID NO: 125077 - DNA, 80 bp, synthetic construct
  source 1..80: mol_type = other DNA
gccgacgttatccccgcaaggcgcaggggtgacaaccgtgccgccctcctttctcctaggcccataagcaccttgaaagg

SEQ ID NO: 125078 - DNA, 80 bp, synthetic construct
  source 1..80: mol_type = other DNA
tccctggcagatgtggatgtatataaccccatatccgttgtttatttaagcaaggatacttgcgtgtctgaacatggtgt

SEQ ID NO: 125079 - DNA, 80 bp, synthetic construct
  source 1..80: mol_type = other DNA
tgttaagtttccgcgaccgcctgcccgcccggactgacctggcctctggccgccacaaagagcggggggggttaactaca

SEQ ID NO: 125080 - DNA, 80 bp, synthetic construct
  source 1..80: mol_type = other DNA
gcaacaaaagcctccagatgtttgtgttgtgcaaacgcgcccacgccgctcgagtgcgagagcagcttcgggtcgttatt

SEQ ID NO: 125081 - DNA, 80 bp, synthetic construct
  source 1..80: mol_type = other DNA
tcggccccctcccttaaggctacttgcactacacaaggtcaccatccagacgcagacctcatagaggctaatctgctatg

SEQ ID NO: 125082 - DNA, 80 bp, synthetic construct
  source 1..80: mol_type = other DNA
ctccactgtcactgagcaggacatcagggtagaactttccatctttcaggcctgtgacctcaaggacgaggctaggaggg

SEQ ID NO: 125083 - DNA, 80 bp, synthetic construct
  source 1..80: mol_type = other DNA
acgtcgcgcaggctctgctagacctcgctacaaagagctttcctcctgaggagagctctagcagtggcatccccgagtct

SEQ ID NO: 125084 - DNA, 80 bp, synthetic construct
  source 1..80: mol_type = other DNA
ccccctagaacacataaaggggggcagacacttgatattctgccattccaaaaagaaatgcgacgagctagccaaacagt

SEQ ID NO: 125085 - DNA, 80 bp, synthetic construct
  source 1..80: mol_type = other DNA
ccccaccgcgggccaggcccccaggagcgcggcgtaagcggccgcggccccgcgcaccaggtcccgtgccgactcggccg

SEQ ID NO: 125086 - DNA, 80 bp, synthetic construct
  source 1..80: mol_type = other DNA
aagacgtggcaaaagaaggtcggcagtagactggacaggttggttgctggttgctgtcctgttgggagtgacacttgcag

SEQ ID NO: 125087 - DNA, 80 bp, synthetic construct
  source 1..80: mol_type = other DNA
taaggttttggttgtgatgctactctttgccggcgtcgacggggacacccatgtgacagggggaacggctgctcactctg

SEQ ID NO: 125088 - DNA, 80 bp, synthetic construct
  source 1..80: mol_type = other DNA
actggattgacccacatagatgcccacttcctatctcagacaaagcagcagggcctgaacttcccatacttgacagcata

SEQ ID NO: 125089 - DNA, 80 bp, synthetic construct
  source 1..80: mol_type = other DNA
ggacgggataaactatgcaacagggaatctgcccggttgctccttttctatcttcctactggccttgttctcttgcatca

SEQ ID NO: 125090 - DNA, 80 bp, synthetic construct
  source 1..80: mol_type = other DNA
gggcgacatggcatatacaggtacgtatccagtggcgagcgaccgtccggtatgttcgacaccagcgtgctctgtgagtg

SEQ ID NO: 125091 - DNA, 80 bp, synthetic construct
  source 1..80: mol_type = other DNA
acccccccaggctcggtcacagtgccacatccaaacatatctgaggttggcctctcaaccaccggtgaggtaccctttta

SEQ ID NO: 125092 - DNA, 80 bp, synthetic construct
  source 1..80: mol_type = other DNA
cacagcgtggtaaaggggccctcaaatgagggtccatgatgtacggatgatgtctgtgacatgacgtcgatcgtgcacgc

SEQ ID NO: 125093 - DNA, 80 bp, synthetic construct
  source 1..80: mol_type = other DNA
tgccctacggactgcttccggaagcaccccgaggccacttataccaagtgcggatcggggccttggctgacacccaggtg

SEQ ID NO: 125094 - DNA, 80 bp, synthetic construct
  source 1..80: mol_type = other DNA
acagagtaatgactcgtagactgctaggttcaacacaagttggagtgggagttatgcaagagggggtctttcacactatg

SEQ ID NO: 125095 - DNA, 80 bp, synthetic construct
  source 1..80: mol_type = other DNA
cacggtgctgggaacaaaacgctggccggctcgcgagggccggtcactcaaatgtattccagcgctgagggagacctcgt

SEQ ID NO: 125096 - DNA, 80 bp, synthetic construct
  source 1..80: mol_type = other DNA
accagtttcaaacgagaacttggaacactcatcgacgccgtgaacaagcggggcaaaaaacaaaacaaaagaggagggaa

SEQ ID NO: 125097 - DNA, 80 bp, synthetic construct
  source 1..80: mol_type = other DNA
gcagcacgcgcccggctccgggggggtcttcgcggggaccagatacgcgccatccagctcgccgaccactggctcctccg

SEQ ID NO: 125098 - DNA, 80 bp, synthetic construct
  source 1..80: mol_type = other DNA
cctagcacaccttgcccggcacccaactacactcgcgcactgtggcgtgtggctgccaacagctacgttgaagtgcgtca

SEQ ID NO: 125099 - DNA, 80 bp, synthetic construct
  source 1..80: mol_type = other DNA
ggagtgggcaagttggcacatatggattaaacacctttaccaacatggaagtccagctaattcgacagatggaagctgaa

SEQ ID NO: 125100 - DNA, 80 bp, synthetic construct
  source 1..80: mol_type = other DNA
gcatcaatcccaacattaggactggagtcaggaccgtgatgaccggggaggccatcacgtactccacatatggcaaattt

SEQ ID NO: 125101 - DNA, 80 bp, synthetic construct
  source 1..80: mol_type = other DNA
tgctggctcaagtcaaaactcgtccctgctttgcccggagtccccttcctctcgtgccaacgaggcttcagaaggacctg

SEQ ID NO: 125102 - DNA, 80 bp, synthetic construct
  source 1..80: mol_type = other DNA
tcgtgcctgaccgggaggtaatgtatcaacagtacgacgagatggaggaatgctctcgtcacctcccgtacctggtagag

SEQ ID NO: 125103 - DNA, 80 bp, synthetic construct
  source 1..80: mol_type = other DNA
taatcatacatgcaatgaacagaacctcacattgctgtttgttaactacactttctggggagcatactttggatttaaca

SEQ ID NO: 125104 - DNA, 80 bp, synthetic construct
  source 1..80: mol_type = other DNA
aggagacgagatgcggtacaggggtgttcgtctataacgacgttgaagcctggagggacaggtacaagtaccatcctgac

SEQ ID NO: 125105 - DNA, 80 bp, synthetic construct
  source 1..80: mol_type = other DNA
catatctgaaatgggggctaacttcaaggcgagcagggtgattgacagccggaagagtgtgaaaccaaccatcataacag

SEQ ID NO: 125106 - DNA, 80 bp, synthetic construct
  source 1..80: mol_type = other DNA
ttctagaacttaaatacacaggaacagacggaccctgcaaggtgccaatatcatctgtggcctccttgaatgacctcacc

SEQ ID NO: 125107 - DNA, 80 bp, synthetic construct
  source 1..80: mol_type = other DNA
cgggatacagtacttagccggcctttcaacgttgccggggaatcccgcgatagcttcattgatggcgtttacagccgccg

SEQ ID NO: 125108 - DNA, 80 bp, synthetic construct
  source 1..80: mol_type = other DNA
ctggtagcataccaagctacagtgtgcgccagggcccaggctccacctccatcgtgggaccaaatgtggaagtgtctcat

SEQ ID NO: 125109 - DNA, 80 bp, synthetic construct
  source 1..80: mol_type = other DNA
tttttttttttgttttatactgctggatgatgtgtgggggttaacgtgcttttttgtgcttactaggtccgatttcagat

SEQ ID NO: 125110 - DNA, 80 bp, synthetic construct
  source 1..80: mol_type = other DNA
acgctcggcctgaatgctgtcgccttctacaggggcgtagatgtgtcagtgatccctacctcgggtgatgtcgtcatctg

SEQ ID NO: 125111 - DNA, 80 bp, synthetic construct
  source 1..80: mol_type = other DNA
ataaatggcgccctttctgcacacatatcaacgagatcctcttgctcatattcaaacgctgttttatattttaagagtgg

SEQ ID NO: 125112 - DNA, 80 bp, synthetic construct
  source 1..80: mol_type = other DNA
gcaggtcatagcccaacagttcaaagacaaggttctcggcttgctacagcgggctggccaacaacaagctgacattcagc

SEQ ID NO: 125113 - DNA, 80 bp, synthetic construct
  source 1..80: mol_type = other DNA
tggctctaagctcttctctaagttcaagttgtaaaaactccttcaaatcatcgccaaactgcttggccataggtccgcca

SEQ ID NO: 125114 - DNA, 80 bp, synthetic construct
  source 1..80: mol_type = other DNA
tctatcctcggcttgtggtcctttctcctcctagtcctagccttaccacagcaggcttatgccctggacgcagcagagca

SEQ ID NO: 125115 - DNA, 80 bp, synthetic construct
  source 1..80: mol_type = other DNA
tatcccagtggcagcagagaaaaacagtaatagttttgtaatccccgggctcgtatcaaaaccagtacgaccactttggt

SEQ ID NO: 125116 - DNA, 80 bp, synthetic construct
  source 1..80: mol_type = other DNA
aactgggccaaggtggtggtcgtgctgttgctcttcgctgtggtggatgcacggacaaccatcacgggcgacgtcgccgg

SEQ ID NO: 125117 - DNA, 80 bp, synthetic construct
  source 1..80: mol_type = other DNA
cgatcccgcaatttgggtaaggtcatcgataccctaacgtgtggtttcgccgatctcatggggtacatccccgtcgtagg

SEQ ID NO: 125118 - DNA, 80 bp, synthetic construct
  source 1..80: mol_type = other DNA
gcatggcgttagggctcttgaggacggaataaattttgcaacagggaatttgcctggttgcgccttttctatctttctcc

SEQ ID NO: 125119 - DNA, 80 bp, synthetic construct
  source 1..80: mol_type = other DNA
gatgcggtgaatggctgcgagcggagggagcatggggtggcgttggttctcgtgggtgtatgggttaaacgcaagagcca

SEQ ID NO: 125120 - DNA, 80 bp, synthetic construct
  source 1..80: mol_type = other DNA
gaatccagaggctcaaagaagaacacaaagaaacctggcattatgataatgaaaatccataccggacatgggcatatcat

SEQ ID NO: 125121 - DNA, 80 bp, synthetic construct
  source 1..80: mol_type = other DNA
tggctcagactgcgacagttcgagtttgaagcgaaagctagcaacagtatcaacaggttttattttggatttggaaacga

SEQ ID NO: 125122 - DNA, 80 bp, synthetic construct
  source 1..80: mol_type = other DNA
gtgagaaccaagctcaaactcactccattgcgcggcgcagccaacctcgacttatctgggtggtttgtgtcgggcggaag

SEQ ID NO: 125123 - DNA, 80 bp, synthetic construct
  source 1..80: mol_type = other DNA
gcacgcccagagggcgtatctggttaacccctttctctttgcggcgggatttttggaggacttgagtcactctgtgtttc

SEQ ID NO: 125124 - DNA, 80 bp, synthetic construct
  source 1..80: mol_type = other DNA
gaggacctgttgtgccccacggactgcttcaggaaacacccaggggcgacctacatcaaatgtggtgctgggccgtggtt

SEQ ID NO: 125125 - DNA, 80 bp, synthetic construct
  source 1..80: mol_type = other DNA
atacctgtccaccccaggactacccgtttgtcaagatcatctagacttctgggagagcgtgttcaccggactgactcata

SEQ ID NO: 125126 - DNA, 80 bp, synthetic construct
  source 1..80: mol_type = other DNA
ccgtgcatggacgtaaaatttaaaaacgcctcgtccctgaaccgcacggcgggtctggccccgggctgctgtgggtgcgg

SEQ ID NO: 125127 - DNA, 80 bp, synthetic construct
  source 1..80: mol_type = other DNA
aaacttgagcttgcttacggtgagccttttgaaataaagaatggcaaacttgcaataaaaacaggtcatggattaaaggt

SEQ ID NO: 125128 - DNA, 80 bp, synthetic construct
  source 1..80: mol_type = other DNA
aaagataccttccagccatagtcagagaagctataaaacggggtttgagaacattaatcttggcccccactagagttgtg

SEQ ID NO: 125129 - DNA, 80 bp, synthetic construct
  source 1..80: mol_type = other DNA
gagcttgcggagaagtcctttggccagtcaaccacctcgggggtctccagcggtacgccgccctcggcgccagaggagga

SEQ ID NO: 125130 - DNA, 80 bp, synthetic construct
  source 1..80: mol_type = other DNA
ggcggtcacagaaggactcgcccgggccgtgtttgcatcgtcgcgcacctttgggccagcgagttttgctcgtatcgaga

SEQ ID NO: 125131 - DNA, 80 bp, synthetic construct
  source 1..80: mol_type = other DNA
acctgatacagctgttgctggtacaaacgacaaatggaaagtaaatgctaaagtcgctcagcataatcagatcgccaagg

SEQ ID NO: 125132 - DNA, 80 bp, synthetic construct
  source 1..80: mol_type = other DNA
cgtcagcgtagtctgggtcacggtgaaggggtgcgctccgggctgcgcgctggccagggtgcgcttgaggctggtcctgc

SEQ ID NO: 125133 - DNA, 80 bp, synthetic construct
  source 1..80: mol_type = other DNA
atggcgctagtggcgctggtcagttggtaccggaggttaatgcttctgaccctcctgcaatggatcctgcagcaggctct

SEQ ID NO: 125134 - DNA, 80 bp, synthetic construct
  source 1..80: mol_type = other DNA
tgacgattgcgtggtcaaaccactggatgatcgattcgccacttctcttcacttcctcaatgccatgtcaaaagtgagga

SEQ ID NO: 125135 - DNA, 80 bp, synthetic construct
  source 1..80: mol_type = other DNA
gacccggcagttgcggggcgcccccctccgagaggacggtggagcgacgagggcgacgtgtgcgccgtgtgcacggatga

SEQ ID NO: 125136 - DNA, 80 bp, synthetic construct
  source 1..80: mol_type = other DNA
aatggcaatgacgtgcatagctgttggagggatcactctgtttctaggtttcacagttcaagcagacatgggttgtgtgg

SEQ ID NO: 125137 - DNA, 80 bp, synthetic construct
  source 1..80: mol_type = other DNA
tcaatgaagatcattggttttccagggagaattcactcagtggagtagaaggagaagggctgcacaaactgggatacatc

SEQ ID NO: 125138 - DNA, 80 bp, synthetic construct
  source 1..80: mol_type = other DNA
tggtgggggtaactgacatcagtggcaatcccaccttcaactctggagccaatgacaccgatttcttcctgctcaacaac

SEQ ID NO: 125139 - DNA, 80 bp, synthetic construct
  source 1..80: mol_type = other DNA
tgatggggaagtggcgggagcattgggtggcggcgttgtcatcttgctcgctgtcctaaccttatctccctattacaagc

SEQ ID NO: 125140 - DNA, 80 bp, synthetic construct
  source 1..80: mol_type = other DNA
acgggtgcgccctgccccccgcagggcagcctccagtcccaccgcccaggaggaagaaagtggtgcacttggacgactcc

SEQ ID NO: 125141 - DNA, 80 bp, synthetic construct
  source 1..80: mol_type = other DNA
gtgtaatctcggtatacctgaggcgcgagtaggctctggattcaaaaacgtagtcgttgcaggtgcgaaccaagtactgg

SEQ ID NO: 125142 - DNA, 80 bp, synthetic construct
  source 1..80: mol_type = other DNA
ctgcgtcggcatggtgatcgcctgtctcctcgtggccgttctgtcgggcggattcggggcgctcctgatgtggctgctcc

SEQ ID NO: 125143 - DNA, 80 bp, synthetic construct
  source 1..80: mol_type = other DNA
ggtgatggtggctaggaagcacccacagggggtagcagaaacagatttaagcaaggatatcttagagtatgattggtttg

SEQ ID NO: 125144 - DNA, 80 bp, synthetic construct
  source 1..80: mol_type = other DNA
gaagggccttgtgtgccaaaaccctctcctaattacaagaccgcaatttggagggtggcagcgtcggagtacgtcgaggt

SEQ ID NO: 125145 - DNA, 80 bp, synthetic construct
  source 1..80: mol_type = other DNA
gggtaacatcatagtctacgcgcccaccatatgggtgcgcatgatattgatgacccatttcttctcagtactccagaccc

SEQ ID NO: 125146 - DNA, 80 bp, synthetic construct
  source 1..80: mol_type = other DNA
gtccccgatctcagcatacgcccagcaaactcggggactatttggaactattgtcaccagcctgacaggtagggataaga

SEQ ID NO: 125147 - DNA, 80 bp, synthetic construct
  source 1..80: mol_type = other DNA
ctgttgcttctgacacaatcaaacccagttgaaaattattttttagtttatctccgtatacgttcccgttccataataag

SEQ ID NO: 125148 - DNA, 80 bp, synthetic construct
  source 1..80: mol_type = other DNA
cggccttcgaacagctcctggccgatttcccggaggcggccgacatgcgcgcccccgggccctattccatgcgcatcatc

SEQ ID NO: 125149 - DNA, 80 bp, synthetic construct
  source 1..80: mol_type = other DNA
gatgttcaagttctagctatagaaccaggaaaaaatccgaaacatgtccaaacgaaacccggccttttcaaaacccttac

SEQ ID NO: 125150 - DNA, 80 bp, synthetic construct
  source 1..80: mol_type = other DNA
tgcccccggatcactgaggcggaaccagatgacgttgactgctggtgcaatgccacagacacatgggtgacctatgggac

SEQ ID NO: 125151 - DNA, 80 bp, synthetic construct
  source 1..80: mol_type = other DNA
gactgaacgcgacattaaaattgaagcatcaatctaccagagttgccaattagacccacaggccaggaaggctataacat

SEQ ID NO: 125152 - DNA, 80 bp, synthetic construct
  source 1..80: mol_type = other DNA
cgctcgctcactccgtgcacttgcggatcggcggacctgtacctggttaccaggcatgcagacgtcgttccagctcgtag

SEQ ID NO: 125153 - DNA, 80 bp, synthetic construct
  source 1..80: mol_type = other DNA
ctgatacatgtgtacgtcccatcactggaggtcaggggtcctcgagatgctattatcatccttacagctcttttccaccc

SEQ ID NO: 125154 - DNA, 80 bp, synthetic construct
  source 1..80: mol_type = other DNA
ggtccctgcgagaggcacagatgcttacggtcaggtgctccgggtcgggtgcgtctggtatgcggttggtatatgtacac

SEQ ID NO: 125155 - DNA, 80 bp, synthetic construct
  source 1..80: mol_type = other DNA
aaccggagggggaagttgagacgggggcttggtggagcggcatccccttcgccttggcggttggagtctgcgtctgcgcc

SEQ ID NO: 125156 - DNA, 80 bp, synthetic construct
  source 1..80: mol_type = other DNA
tcgcgatgagtatgcacacaattttcgctttacaatgaaaacactttctaccacgtttataagtgaaacaaacgagttta

SEQ ID NO: 125157 - DNA, 80 bp, synthetic construct
  source 1..80: mol_type = other DNA
ggatttggttctcgaaggcgacagctgcgtgactatcatgtctaaggacaagcctaccattgatgtgaagatgatgaata

SEQ ID NO: 125158 - DNA, 80 bp, synthetic construct
  source 1..80: mol_type = other DNA
ctaagacgttggccggcccgaaagggccggtttgccagatgtacaccaatgtagaccaagacttggtggtgtggccggct

SEQ ID NO: 125159 - DNA, 80 bp, synthetic construct
  source 1..80: mol_type = other DNA
aacgcctgaccccggtggggtccgtctcgcccgagcacgtcatgtacctcggcgcgttcctgggcgtgttgtacgccggc

SEQ ID NO: 125160 - DNA, 80 bp, synthetic construct
  source 1..80: mol_type = other DNA
agggcccacccccttgttatacaggcttggtgcggtacaaaatgagatcactacaactcacccaatcacaaagtacatca

SEQ ID NO: 125161 - DNA, 80 bp, synthetic construct
  source 1..80: mol_type = other DNA
caacagttgacattgaggaagctcctgaaatgcctgccctttatgagaagaaactggctctatatctccttcttgctctc

SEQ ID NO: 125162 - DNA, 80 bp, synthetic construct
  source 1..80: mol_type = other DNA
taagccatagtacggtaagagctatgctgcctgtgagccccgtctaaggacgtaaaatgaagtcaggccgaaagccacgg

SEQ ID NO: 125163 - DNA, 80 bp, synthetic construct
  source 1..80: mol_type = other DNA
accagtggcctcaccggcctcttcaccccaggtgccaggcagaacatccagctgatcaacaccaacggcagttggcatat

SEQ ID NO: 125164 - DNA, 80 bp, synthetic construct
  source 1..80: mol_type = other DNA
ggcggaaacgcaagagtctggtattcgcgcgcaaatagcgcggttccggtggtgatgttaacggtcagcgaagcggcgga

SEQ ID NO: 125165 - DNA, 80 bp, synthetic construct
  source 1..80: mol_type = other DNA
gtgacacagcctgggactttggatccctaggaggagtgtttacatccataggaaaagctctccaccaagtctttggagca

SEQ ID NO: 125166 - DNA, 80 bp, synthetic construct
  source 1..80: mol_type = other DNA
agggcatatgccttccagggagacgaggcagcgtctctggggttgctggtaatcatcatcatcactttgttcaccctcac

SEQ ID NO: 125167 - DNA, 80 bp, synthetic construct
  source 1..80: mol_type = other DNA
tgattactactacgtgagaattgtttaccgcagacaccacccccgttaccaaaaccctcaaattgcagctcttttgcagc

SEQ ID NO: 125168 - DNA, 80 bp, synthetic construct
  source 1..80: mol_type = other DNA
ggtttggattcaaaaaataaagaacaaaaaatacctcctaaaagaaaatcaaaagataaagtcaaagaagttaactttcc

SEQ ID NO: 125169 - DNA, 80 bp, synthetic construct
  source 1..80: mol_type = other DNA
tagcggcctactgcttgacggtgggctcggtggccatagtcggtagaatcatcctatctgggagacctgccatcattccc

SEQ ID NO: 125170 - DNA, 80 bp, synthetic construct
  source 1..80: mol_type = other DNA
tgtccagacaaaacaaaactgaaatgaccaaaaacaatgaagagaggctgagcaaaaggtcccaatgtaccagaacgctt

SEQ ID NO: 125171 - DNA, 80 bp, synthetic construct
  source 1..80: mol_type = other DNA
gttgtggcacttctaaatttaaccactaacagaagatttaaagcagagagttttaccagtaacgatggttatgaaactac

SEQ ID NO: 125172 - DNA, 80 bp, synthetic construct
  source 1..80: mol_type = other DNA
ggggcacattggtctgacattgctattggtcatgactctccttacactctctccagcttataagaccctcctcagccggt

SEQ ID NO: 125173 - DNA, 80 bp, synthetic construct
  source 1..80: mol_type = other DNA
tttggagaacctcgtagtgcttaatgcagcatccttggctgggacgcgtggtcttgtgcccttcctcgtgttcttctgct

SEQ ID NO: 125174 - DNA, 80 bp, synthetic construct
  source 1..80: mol_type = other DNA
gtacaccggaatcgccgggttgaccgggtcctttcttggaaccacccgctcaatgcccggaaatttgggcgtgcccccgc

SEQ ID NO: 125175 - DNA, 80 bp, synthetic construct
  source 1..80: mol_type = other DNA
tattaacacgggcagaggcttagttataactaacaatgccgtagcagttaatcctaccggagcgttaggctttaacaaca

SEQ ID NO: 125176 - DNA, 80 bp, synthetic construct
  source 1..80: mol_type = other DNA
gaagtggttgtccttggatcgcaagacagagcaatacaaattccaagcaaagtaaccacagattcccaagcttcaagagg

SEQ ID NO: 125177 - DNA, 80 bp, synthetic construct
  source 1..80: mol_type = other DNA
cacacctggcaataaaatgggagttttgtgtgagtcacgtataataaactgtttgcgtgttttatttgggcgtggttagt

SEQ ID NO: 125178 - DNA, 80 bp, synthetic construct
  source 1..80: mol_type = other DNA
cgatcttccacgcgctcctcaacgccaccacttaccgggacctcgaggcggactggctctgccacgtggcggcccgcggt

SEQ ID NO: 125179 - DNA, 80 bp, synthetic construct
  source 1..80: mol_type = other DNA
ggaggcgctgttgcacgttccaccaacgtgattgccggcgtgttcagccatggccctcagcagaacattcagctcattaa

SEQ ID NO: 125180 - DNA, 80 bp, synthetic construct
  source 1..80: mol_type = other DNA
cgggccacagaatggcttgggacatgatgatgaactggagcccaactgcaacgctcgttctcgcccaggtcatgaggatc

SEQ ID NO: 125181 - DNA, 80 bp, synthetic construct
  source 1..80: mol_type = other DNA
cctgacaattagagggcgaggtattcagctcaacgacgagtcggtgagctcctcgcttggtctccgtccggacgggacat

SEQ ID NO: 125182 - DNA, 80 bp, synthetic construct
  source 1..80: mol_type = other DNA
aaaaaggacatatcatgactgaatcctttgcaatcatgtgccgcctcactgcgtcctctgagttggacgcagttgtagcc

SEQ ID NO: 125183 - DNA, 80 bp, synthetic construct
  source 1..80: mol_type = other DNA
ggaatgctagtgcgaaatccactttcaagaaattctactcatgaaatgtattgggtttcatgtggaacaggaaacattgt

SEQ ID NO: 125184 - DNA, 80 bp, synthetic construct
  source 1..80: mol_type = other DNA
cggcttgatccacctccaccaaaatatcgtggacgtccagtacctctatggtgttgggtctgcagtggtatcttgggccc

SEQ ID NO: 125185 - DNA, 80 bp, synthetic construct
  source 1..80: mol_type = other DNA
cagcgggaagatcattcctgaatggtgttgccgctcatgcacaatgccaccagtgagcttccacgggagtgatggttgct

SEQ ID NO: 125186 - DNA, 80 bp, synthetic construct
  source 1..80: mol_type = other DNA
ggcccacgtacattcgcgtggccgacagcgagctgtacgcggactggagctcggacagcgagggggaacgcgaccaggtc

SEQ ID NO: 125187 - DNA, 80 bp, synthetic construct
  source 1..80: mol_type = other DNA
cttcctcctggctttgctgtcttgcttgacggtcccagcttctgcccatgagacgcgcaacgcttccgggatctaccacg

SEQ ID NO: 125188 - DNA, 80 bp, synthetic construct
  source 1..80: mol_type = other DNA
gtgcggttaacgccgcctgggatctgcgcaggggcgtgcggttcagtttggccgccgtaccgggcgtctcggtggacgcg

SEQ ID NO: 125189 - DNA, 80 bp, synthetic construct
  source 1..80: mol_type = other DNA
ttaccgaggactatgctacgccatgtggatcaacatggcttagagacatctgggactgggtgtgtactgtcctgtcagac

SEQ ID NO: 125190 - DNA, 80 bp, synthetic construct
  source 1..80: mol_type = other DNA
taaggggctagagttcggaaccagtagtacagaaacaggagttaataatgcttatccaatccaagttaaacttggctctg

SEQ ID NO: 125191 - DNA, 80 bp, synthetic construct
  source 1..80: mol_type = other DNA
ttcaactcctcggggtgccctgagcgaatgtccagctgtaagcccatcacatatttcaatcaggggtgtggcccattgac

SEQ ID NO: 125192 - DNA, 80 bp, synthetic construct
  source 1..80: mol_type = other DNA
acattcgtcgcgctgagcgtcggggccaacaaccgcctgtgcgtgtccttgtgtcagcagtgctttgccgccaaatgcga

SEQ ID NO: 125193 - DNA, 80 bp, synthetic construct
  source 1..80: mol_type = other DNA
acagaggagaaccaatgggacagtgcgaaagctgctgttgaggatgaagaattttggaaacttgtggacagagaacgtga

SEQ ID NO: 125194 - DNA, 80 bp, synthetic construct
  source 1..80: mol_type = other DNA
ccctcctacttaacatcttgggggggtgggtggcctcacagttggcaacccctactgcttccacagcttttgtggtgagc

SEQ ID NO: 125195 - DNA, 80 bp, synthetic construct
  source 1..80: mol_type = other DNA
tggagcggcccttgttctgtggagtctcggggagcccggcacgcagccggaggccccggccccgggcccggccacccagt

SEQ ID NO: 125196 - DNA, 80 bp, synthetic construct
  source 1..80: mol_type = other DNA
acagttctgaagctaacttagcgcagcagtccatgcccaacagaccaaactacattggcttcagagacaattttgtgggg

SEQ ID NO: 125197 - DNA, 80 bp, synthetic construct
  source 1..80: mol_type = other DNA
tggacgatcgcgaccgggtcgtgatgtctcccctccttttctccacaacgcagatgtctatcctgccgtgctccttcacg

SEQ ID NO: 125198 - DNA, 80 bp, synthetic construct
  source 1..80: mol_type = other DNA
ccgccccgcggtgggcctgcctcccctgggacgcgcggccattggaggaatcgtcactgccgcccctttggggagaggaa

SEQ ID NO: 125199 - DNA, 80 bp, synthetic construct
  source 1..80: mol_type = other DNA
gaggaagccacaaaatgcaaatgggatacatggaaggaacacacccccgtgactcaggacatcggcgtgtccttttgggt

SEQ ID NO: 125200 - DNA, 80 bp, synthetic construct
  source 1..80: mol_type = other DNA
cactgtttcatcctattctttatagcggcctggtacatcaaaggccgggtggttccgttcaccgcttactccttgcttgg

SEQ ID NO: 125201 - DNA, 80 bp, synthetic construct
  source 1..80: mol_type = other DNA
aattactgtttgatgaaaatgggattcttaaagacttatcaaatcttgacaagaactattggaactatagaaacggaaat

SEQ ID NO: 125202 - DNA, 80 bp, synthetic construct
  source 1..80: mol_type = other DNA
ccggaggcttttttggattcccggccggaggtcccgggtagccgcccggcgccgggcggaaggcgtcccccgcccggcgg

SEQ ID NO: 125203 - DNA, 80 bp, synthetic construct
  source 1..80: mol_type = other DNA
gagggccgtcgagaccgaggggtttgttgtgcgcagggacgccagttggccgatatacttaccgaggtccatgtcgtacg

SEQ ID NO: 125204 - DNA, 80 bp, synthetic construct
  source 1..80: mol_type = other DNA
gatggccgctttctccctacatgggtattccccgggcgaactcaatcgagttggagcatgcctcaggaaacttggggccc

SEQ ID NO: 125205 - DNA, 80 bp, synthetic construct
  source 1..80: mol_type = other DNA
gtccctaacccacggggcccgtggctatggcagggcttgccgccccgacgttggctgcgagccctgggccttcacccgaa

SEQ ID NO: 125206 - DNA, 80 bp, synthetic construct
  source 1..80: mol_type = other DNA
ggcccagtgtattgcttcaccccaagtcctgttgtggtgggtaccacagacaggaaaggcttccccaccttcacctgtgg

SEQ ID NO: 125207 - DNA, 80 bp, synthetic construct
  source 1..80: mol_type = other DNA
tatgccaaaggtgattgaaaagatggaggttcttcagcgtcggtatggaggtggccttgttagaaacccgctatcacgca

SEQ ID NO: 125208 - DNA, 80 bp, synthetic construct
  source 1..80: mol_type = other DNA
tggccactacccagaccagtttattcctaactttgacgcggtaaaggactcggcggacggctacgattgaatgtccagtg

SEQ ID NO: 125209 - DNA, 80 bp, synthetic construct
  source 1..80: mol_type = other DNA
ctccagtcaattcctggctaggcaacataatcatgtttgcccctacattgtgggcgagaatgatactgatgacccacttt

SEQ ID NO: 125210 - DNA, 80 bp, synthetic construct
  source 1..80: mol_type = other DNA
ttcataagaaaggtcaggtcaaatgcggcaataggagcagtgttcgttgatgaaaaccaatggaactcagcaaaagaagc

SEQ ID NO: 125211 - DNA, 80 bp, synthetic construct
  source 1..80: mol_type = other DNA
gcattcgcctcgcggggaaatcacgtttcccccacgcactatgtgccagagagcgatgccgcagcccgcgtcactcagat

SEQ ID NO: 125212 - DNA, 80 bp, synthetic construct
  source 1..80: mol_type = other DNA
taaccaagccacagtgctaatgggtcttgggagaggatggccattgtcaaagatggacattggagttcccctccttgcca

SEQ ID NO: 125213 - DNA, 80 bp, synthetic construct
  source 1..80: mol_type = other DNA
cgcaaacattagcggtccttcagatgatagaccgtactgttggcactacgcacctagaccgtgcaacattgtgccggcct

SEQ ID NO: 125214 - DNA, 80 bp, synthetic construct
  source 1..80: mol_type = other DNA
gggcaccctagtgggcgccctggacttccgcagcctgcggtctcggcacccgtggtccggggagcaggtggcgtcgaccc

SEQ ID NO: 125215 - DNA, 80 bp, synthetic construct
  source 1..80: mol_type = other DNA
gcgctcgggctgctgcaaacagctaccaagcaagcggaggccgctgctcccgtggtggagtccaaatggcgagcccttga

SEQ ID NO: 125216 - DNA, 80 bp, synthetic construct
  source 1..80: mol_type = other DNA
agggatatggccctattacatatgccaacatcagcggcccctcgactgacaaaccatactgctggcactatgcaccgcgc

SEQ ID NO: 125217 - DNA, 80 bp, synthetic construct
  source 1..80: mol_type = other DNA
tggttctcatcccagaaccggaaaaacagaggtcacagacagataaccaactggcggtgtttctcatctgtgtcttgacc

SEQ ID NO: 125218 - DNA, 80 bp, synthetic construct
  source 1..80: mol_type = other DNA
cataacagcggaggcggctgcgagacggttggggagagggtcgcccccctccgaggccagctcttcagctagccagctgt

SEQ ID NO: 125219 - DNA, 80 bp, synthetic construct
  source 1..80: mol_type = other DNA
ccacccatcggggacctgcggccaacacaacggaccccttaacgcacgccccagtgtcccctcaccccagccccctgtgg

SEQ ID NO: 125220 - DNA, 80 bp, synthetic construct
  source 1..80: mol_type = other DNA
ttgtaaaattgagcaagacaaagactcaaaacttactttggttcttacaaaatgcggtagccagatattggctactatgg

SEQ ID NO: 125221 - DNA, 80 bp, synthetic construct
  source 1..80: mol_type = other DNA
gcccctcgcaggacagaccatactgctggcattatccacctagaccatgcgaggtccggccagctgccgatgtttgcggc

SEQ ID NO: 125222 - DNA, 80 bp, synthetic construct
  source 1..80: mol_type = other DNA
ggatcttccagccataattcagagactccacggcttgagcgcgttcacgctgcacggatactctccacacgaactcaatc

SEQ ID NO: 125223 - DNA, 80 bp, synthetic construct
  source 1..80: mol_type = other DNA
tggcagctgaaatggaagaagcgctcagggggttgccaatacgttaccagaccccggcaatcagagccgagcatacaggc

SEQ ID NO: 125224 - DNA, 80 bp, synthetic construct
  source 1..80: mol_type = other DNA
ccccacctgacctggcctccaatgacggcgacaaagaatccgacgttgagtcgtactcctccatgcccccccttgaggtg

SEQ ID NO: 125225 - DNA, 80 bp, synthetic construct
  source 1..80: mol_type = other DNA
tgcagcctcatacaagagctagatgcaaaactcaccctgtgcttaacaaaaaacggatctattgttaatggcattgtaag

SEQ ID NO: 125226 - DNA, 80 bp, synthetic construct
  source 1..80: mol_type = other DNA
ttccacgggatgtcccgaacggttagcggcgtgtaaggaccttagacggttcccccaggggtgtggccctatcacatacg

SEQ ID NO: 125227 - DNA, 80 bp, synthetic construct
  source 1..80: mol_type = other DNA
tcaacctgggcagcccagggtttgcgggacttggcggtcgccgtggagcctgtggtgttcagcccaatggagaagaaggt

SEQ ID NO: 125228 - DNA, 80 bp, synthetic construct
  source 1..80: mol_type = other DNA
caccaagcaggcggaggctgccgctcccgtggtggagtccaagtggcgagctttggagaccttctgggcaaagcacaagt

SEQ ID NO: 125229 - DNA, 80 bp, synthetic construct
  source 1..80: mol_type = other DNA
agctggccacggtcgcggaggccgcggagcgcgccggccccgggttttttgagctggcgctggccttcgactccacgcgc

SEQ ID NO: 125230 - DNA, 80 bp, synthetic construct
  source 1..80: mol_type = other DNA
gcacagcaccgcatcctgatctctgccatgttctcacagtaagtgcagcacattatcaccatgttattcagcagcccata

SEQ ID NO: 125231 - DNA, 80 bp, synthetic construct
  source 1..80: mol_type = other DNA
ctccgcccggccggcagaccgagcgactggccgaggcctggggccagctcctggaggcctccgccctggcgtccgtgcgg

SEQ ID NO: 125232 - DNA, 80 bp, synthetic construct
  source 1..80: mol_type = other DNA
tgcctgtcaacaggctgcgtggtcatagtgggcaggattgtcttgtccgggaagccggcaattatacctgacagggaggt

SEQ ID NO: 125233 - DNA, 80 bp, synthetic construct
  source 1..80: mol_type = other DNA
acaccaccgggttctgtcaccgtcccccatcctaacataacagagactgccctcccaactacgggagagataccatttta

SEQ ID NO: 125234 - DNA, 80 bp, synthetic construct
  source 1..80: mol_type = other DNA
ggcggcgggcgggccccacgacgctctctcaactttcaccaccagtcccgtgcgtgggtccgagccgatacgcagcggtg

SEQ ID NO: 125235 - DNA, 80 bp, synthetic construct
  source 1..80: mol_type = other DNA
cacctactactcgccccatgacgagacgcaggagaattccgggtccgagtcctattgctggcacagccctccaccgccct

SEQ ID NO: 125236 - DNA, 80 bp, synthetic construct
  source 1..80: mol_type = other DNA
cactaccgatctgggcccggccggactacaatccacctcttaccgagacgtggaagcagcaggactaccaagctccgacc

SEQ ID NO: 125237 - DNA, 80 bp, synthetic construct
  source 1..80: mol_type = other DNA
tctaccgaccagctttggcaacacaatcacttgttacatcaaggccacagcggctgcaagggccgcgggtctccggaacc

SEQ ID NO: 125238 - DNA, 80 bp, synthetic construct
  source 1..80: mol_type = other DNA
ccacgcgacgctgaggccgaagtccaaatgactaactccggagcgcaattagcgggcggatccagacacgtcaggttcag

SEQ ID NO: 125239 - DNA, 80 bp, synthetic construct
  source 1..80: mol_type = other DNA
agacctcgtcctctgagccgcgctctggaggcattggaactctgcaatttattgaggagtttgtgccatcggtctacttt

SEQ ID NO: 125240 - DNA, 80 bp, synthetic construct
  source 1..80: mol_type = other DNA
cgtgttgacaaactaacaacaggagaaaatatacccggtcttgcaaatgtagagatttttttaaataggtgggaacgaat

SEQ ID NO: 125241 - DNA, 80 bp, synthetic construct
  source 1..80: mol_type = other DNA
gacctagagcccgagcaggtagagcaccaagcccccccccaagagggagggtctgctcccggctcggactccgggtcctg

SEQ ID NO: 125242 - DNA, 80 bp, synthetic construct
  source 1..80: mol_type = other DNA
ccttccagctattgttagagaggcaatcaagagacgtttgagaactctaattctggcaccaacaagggtggttgcagctg

SEQ ID NO: 125243 - DNA, 80 bp, synthetic construct
  source 1..80: mol_type = other DNA
ccagcgtacgcctcacgatgcacgcatttggaaaatagggactttgtgactggcacccagggaaccacacgcgtgacgct

SEQ ID NO: 125244 - DNA, 80 bp, synthetic construct
  source 1..80: mol_type = other DNA
ttcacgaacgccgcgcaccgcgtgttgttccagtagctggtgatgcactggacaacgagccgggccagggcgcagaagac

SEQ ID NO: 125245 - DNA, 80 bp, synthetic construct
  source 1..80: mol_type = other DNA
tgatggcgtttaaggacgctacaacaagcacagatggcaccagtggtgccggtcagctggttccagaggccagtacagct

SEQ ID NO: 125246 - DNA, 80 bp, synthetic construct
  source 1..80: mol_type = other DNA
ggcgtgaactatgcaacagggaaccttcctggttgctctttctctatctttcttctggccctgctatcgtgcctgactgt

SEQ ID NO: 125247 - DNA, 80 bp, synthetic construct
  source 1..80: mol_type = other DNA
atgatctgagcttgtggacaggagaccgcgatctcttgcccgattatgtagatgatgatggcgtctaagactggccgtac

SEQ ID NO: 125248 - DNA, 80 bp, synthetic construct
  source 1..80: mol_type = other DNA
cgacgacaagctgcccaaagcgcagttcgcggcggccggcggccgctacgagcacggggccctggccacccacgtcgtga

SEQ ID NO: 125249 - DNA, 80 bp, synthetic construct
  source 1..80: mol_type = other DNA
ctgttgctgtttgccggcgtcgacgcggaaacttacacctctgggggagccgttgctcaggccacgttacgactcaccag

SEQ ID NO: 125250 - DNA, 80 bp, synthetic construct
  source 1..80: mol_type = other DNA
gtttctcaaatgtacaccaatgttgaccaagacctggtggggtggccggccccccccggggtcaagtctttggcgccgtg

SEQ ID NO: 125251 - DNA, 80 bp, synthetic construct
  source 1..80: mol_type = other DNA
cctttttggcggtgggaggagttttgctcttcctttctgtcaatgttcatgctgacaccggatgcgccattgacatcacc

SEQ ID NO: 125252 - DNA, 80 bp, synthetic construct
  source 1..80: mol_type = other DNA
gctagacgctcggtcggggttctctctttcttctccttcctcctcttgggagggtgagacgatgctgctggtgatgaaat

SEQ ID NO: 125253 - DNA, 80 bp, synthetic construct
  source 1..80: mol_type = other DNA
catcggcgcgctggccggcagtaccctggcggtgctggtcatcggcggtattgcgttttgggtacgccgccgcgctcaga

SEQ ID NO: 125254 - DNA, 80 bp, synthetic construct
  source 1..80: mol_type = other DNA
aaggcgtagtgttcgagagcccattcgtgcaggtgaggattcgctttaaggaaggaggaccagaggtccactgccagtgc

SEQ ID NO: 125255 - DNA, 80 bp, synthetic construct
  source 1..80: mol_type = other DNA
ttaacttaaataaaaccttaccacccataaaaacgccttctgtttgtttaacacgacaccgcttaacaaaaaaaaaaaac

SEQ ID NO: 125256 - DNA, 80 bp, synthetic construct
  source 1..80: mol_type = other DNA
ccaagaccctggccggccccaaggggccagtctgccagatgtacaccaatgttgaccaagacttagtgggatggcctgcg

SEQ ID NO: 125257 - DNA, 80 bp, synthetic construct
  source 1..80: mol_type = other DNA
acagcaagacctggcgactgcacattatggactcatgctctttttgggcgtggcctcatgttgctcaatctggaaactga

SEQ ID NO: 125258 - DNA, 80 bp, synthetic construct
  source 1..80: mol_type = other DNA
ttccgggagcaggcgtggaaactgtttggctccgcggaggccccgcgggcgtttatcggggccgcgttaggcctgagccc

SEQ ID NO: 125259 - DNA, 80 bp, synthetic construct
  source 1..80: mol_type = other DNA
gttcgccgacccaaccgtagatgggacaccactggaaccagggccggtaagtctaagcagccgccgccgttagcccaaga

SEQ ID NO: 125260 - DNA, 80 bp, synthetic construct
  source 1..80: mol_type = other DNA
cggcctcgccgccgtcgtccgcgcggcccacgcagtagcgaaacagcaggcttcgggccgtcggctcgttcacccgcccg

SEQ ID NO: 125261 - DNA, 80 bp, synthetic construct
  source 1..80: mol_type = other DNA
tcccccccccctcccccgcttctggccaagcatcctcacctgcttaagcggaacccgcgggcgcgcggagactcatttgt

SEQ ID NO: 125262 - DNA, 80 bp, synthetic construct
  source 1..80: mol_type = other DNA
tgttagcagcagcaacagcggacgggtgttgcgtccccggcttccaggggagacggactacctaaacgatcccctgttgc

SEQ ID NO: 125263 - DNA, 80 bp, synthetic construct
  source 1..80: mol_type = other DNA
aggcgcctgaacccactgggacgcccgcagatcgcagcggtctcccggcagctcctaagcgccgttgactacattcaccg

SEQ ID NO: 125264 - DNA, 80 bp, synthetic construct
  source 1..80: mol_type = other DNA
cggcattgctttgggcagcagaagttcccggaacgcagatagctggagttttgttgatagtgtttctattgatgattgtg

SEQ ID NO: 125265 - DNA, 80 bp, synthetic construct
  source 1..80: mol_type = other DNA
tcttgtgtgatattggtgagtcctctccgaacccaactatagaagaaggaagaacgttacgtgttctaaagatggtggaa

SEQ ID NO: 125266 - DNA, 80 bp, synthetic construct
  source 1..80: mol_type = other DNA
ccgccagaggagctgctgagccgccgcgcgcccgctttccaagatggctaccccttcgatgatgccgcagtggtcttaca

SEQ ID NO: 125267 - DNA, 80 bp, synthetic construct
  source 1..80: mol_type = other DNA
gcagcgagaggctgggcggctcatagagcaagagcaaatgagagcgccaccatacttatgaccgccaccccaccaggcac

SEQ ID NO: 125268 - DNA, 80 bp, synthetic construct
  source 1..80: mol_type = other DNA
gttcgtggagagaaatctagtgaaaccagaaggcaaagtaattgacctgggctgtggtagaggaggctggtcttactatt

SEQ ID NO: 125269 - DNA, 80 bp, synthetic construct
  source 1..80: mol_type = other DNA
ctcttgaggaatggaaagaaactggttccgtcttgggcttctgtgaaggaggatctggtgggttatggtggttcctggaa

SEQ ID NO: 125270 - DNA, 80 bp, synthetic construct
  source 1..80: mol_type = other DNA
aggaatgccctgatgagcgcagagcctggaacagcatgcaaatcgaagacttcggcttcggcatcacatcaacccgggtg

SEQ ID NO: 125271 - DNA, 80 bp, synthetic construct
  source 1..80: mol_type = other DNA
tcctatattttgtcatctttgttgtagctgcttggtacgtcaagggtcgggctgtccccttggctgtctattccctcact

SEQ ID NO: 125272 - DNA, 80 bp, synthetic construct
  source 1..80: mol_type = other DNA
gctcttcgcgggcgttgatgcgggcacgcacaccactgggggctccgcagcctttaccacgcacaggctcgccagcttct

SEQ ID NO: 125273 - DNA, 80 bp, synthetic construct
  source 1..80: mol_type = other DNA
cctggggccggggtggcccccggtaacgtcccggggatccaggtggaggtcctcgtcgtcttcgtatccgcctgcgatct

SEQ ID NO: 125274 - DNA, 80 bp, synthetic construct
  source 1..80: mol_type = other DNA
gttgataaaggaattgatacccaccttattaagtttttcaccaaacgtccacttttggtggaaaaggaccaaggaaacac

SEQ ID NO: 125275 - DNA, 80 bp, synthetic construct
  source 1..80: mol_type = other DNA
cggcgctggacctccgtgtagtccagcaggccgctgtccttgatctcgtggcgggtgtacacctccaggaggacaaactc

SEQ ID NO: 125276 - DNA, 80 bp, synthetic construct
  source 1..80: mol_type = other DNA
gccagctgatagcccagcgcgtgtaatgccaagctctgttcgcgctccagaatctcggccaccaggtgctggagccgagc

SEQ ID NO: 125277 - DNA, 80 bp, synthetic construct
  source 1..80: mol_type = other DNA
gaagggagatacttctggagccggccgatagtcttgaagggggggggtggcgactccttgcgcctatcacagcatactcc

SEQ ID NO: 125278 - DNA, 80 bp, synthetic construct
  source 1..80: mol_type = other DNA
cagcacgatgaacggaactactcagaacaacgctgcgctttttgatggaggggtttttagcccttatttgacttccaggt

SEQ ID NO: 125279 - DNA, 80 bp, synthetic construct
  source 1..80: mol_type = other DNA
gccgtgaatgacagcggacgccggccctactgctggcactacagcccacctctctgtggtgttgtgccggcacggaatgt

SEQ ID NO: 125280 - DNA, 80 bp, synthetic construct
  source 1..80: mol_type = other DNA
aagtacggcgcgcacggacgcctcgagggcccggcgggcgtcctggatcgcgccgtgcgcggcgtccgcgtccccggtgt

SEQ ID NO: 125281 - DNA, 80 bp, synthetic construct
  source 1..80: mol_type = other DNA
ttgcgtcaggtgcgcaggccatgcgagatcttggggggggaactcctttctttggagtggctggacacgtcctgactctc

SEQ ID NO: 125282 - DNA, 80 bp, synthetic construct
  source 1..80: mol_type = other DNA
atcgcggggctcatgtttgctgctttcgtgatttctgggaaatcaacagatatgtggattgagagaacggcggacatttc

SEQ ID NO: 125283 - DNA, 80 bp, synthetic construct
  source 1..80: mol_type = other DNA
ggctaggacggtttgcgggccggtctactgttttactcccagccctgttgtcgtgggtaccactgacaaggagggcgtgc

SEQ ID NO: 125284 - DNA, 80 bp, synthetic construct
  source 1..80: mol_type = other DNA
ccagacctactactcctgatcagaatcacaaatttgaattgcaaattgaaaatggaaatgacgaatcaaaaataccctca

SEQ ID NO: 125285 - DNA, 80 bp, synthetic construct
  source 1..80: mol_type = other DNA
ttttgatcgccgttatactccggtatactggagtcttcaggagcaaaattcggaaacaaaagcaataccggcatcttatc

SEQ ID NO: 125286 - DNA, 80 bp, synthetic construct
  source 1..80: mol_type = other DNA
ctgtctttttattgccgtcatagcgcgggttccttccggtattgtctccttccgtgtttcagttagcctcccccatctcc

SEQ ID NO: 125287 - DNA, 80 bp, synthetic construct
  source 1..80: mol_type = other DNA
cctgccttaaaggctcatctggaggccctatcatgtgccctgcagggcacgtggtgggaatcttcagggcagctgtgtgc

SEQ ID NO: 125288 - DNA, 80 bp, synthetic construct
  source 1..80: mol_type = other DNA
cgtcgcagtcactcagatcgttgactttagcctagacccgacctttaccatcaccacccaaaccgtccctcaggacgctg

SEQ ID NO: 125289 - DNA, 80 bp, synthetic construct
  source 1..80: mol_type = other DNA
caccaaagagacattgaagtcaggccacttgtgccacggcttgagcaaaccgtgctgcctgtagctccgccaataatggg

SEQ ID NO: 125290 - DNA, 80 bp, synthetic construct
  source 1..80: mol_type = other DNA
accctgacctcggggtcagggtgtgcgaaaagatggccctttatgacattgcaaaaaagcttcccacggcagtgatggtg

SEQ ID NO: 125291 - DNA, 80 bp, synthetic construct
  source 1..80: mol_type = other DNA
actgtgcgaagacacaatcacttataactgtcctcttctcaggcagaatgaaccagaagacatagactgctggtgcaact

SEQ ID NO: 125292 - DNA, 80 bp, synthetic construct
  source 1..80: mol_type = other DNA
catccaaatcattgcatataagctctgtcagttcgctatcaggaagcagctcaggcgatgctacacaacaaatcatttct

SEQ ID NO: 125293 - DNA, 80 bp, synthetic construct
  source 1..80: mol_type = other DNA
tatccgtagaggaagcttgcagcctgacgcccccacattcagccagatccaaatttggctatggggcaaaggacgtccgt

SEQ ID NO: 125294 - DNA, 80 bp, synthetic construct
  source 1..80: mol_type = other DNA
aaaacgctacctcccagcaatagtacgtgaagctataaagagaggtctaagaactctgatcctagcccccacaagggtgg

SEQ ID NO: 125295 - DNA, 80 bp, synthetic construct
  source 1..80: mol_type = other DNA
ggcttgctgtactgcgaaaggtcaaaagagttgtagctagcttaatgagagggctggcttccaggaaacgtagatccaat

SEQ ID NO: 125296 - DNA, 80 bp, synthetic construct
  source 1..80: mol_type = other DNA
ttggaacgattggcacggaaaagcaaaccacgaatgtgcagcagagaggaattcatagcgaaagtgaaatccaatgcagc

SEQ ID NO: 125297 - DNA, 80 bp, synthetic construct
  source 1..80: mol_type = other DNA
ctaaccatcgattatatcacaaattgtgtgcaagtcttattagatggatggggtatgcatacgtcgaggcggttgacatt

SEQ ID NO: 125298 - DNA, 80 bp, synthetic construct
  source 1..80: mol_type = other DNA
ttactttgtgggacaatggagccagtgccgtttggaattccaccacagccacgggactctgccatgtcatgcgaggtagc

SEQ ID NO: 125299 - DNA, 80 bp, synthetic construct
  source 1..80: mol_type = other DNA
gcgacggaggtgcgcctggatgcggcagatcccagacccggaggatgtgaggcttctgatcatctacgatccgttgcccg

SEQ ID NO: 125300 - DNA, 80 bp, synthetic construct
  source 1..80: mol_type = other DNA
ttgggcgtaaccgagtaagatttggccattttcgcgggaaaactgaataagaggaagtgaaatctgaataattctgtgtt

SEQ ID NO: 125301 - DNA, 80 bp, synthetic construct
  source 1..80: mol_type = other DNA
cctaatgtgtcatgccacatttactatgaggctgctgtcaccagtcagagtgccaaattacaacctgatcatcatggacg

SEQ ID NO: 125302 - DNA, 80 bp, synthetic construct
  source 1..80: mol_type = other DNA
gcgaggatggtactgatgacacacttcttttccatcctcattgctcaggagcaactccacaaggccctagattgtgagat

SEQ ID NO: 125303 - DNA, 80 bp, synthetic construct
  source 1..80: mol_type = other DNA
ttaccttgaagttcaaggcgtggatgcctactgcctcatacacattaactgcagcaactctaaatatccagctagaattt

SEQ ID NO: 125304 - DNA, 80 bp, synthetic construct
  source 1..80: mol_type = other DNA
gaagaaggtcacatttgaccgcctccaggtggtcgacaaccactaccacgatgtcttaaaggagattaaggcacgagcgt

SEQ ID NO: 125305 - DNA, 80 bp, synthetic construct
  source 1..80: mol_type = other DNA
ttcgaacctgagatgctgaggaaaaaacagatcacagttctggaccttcatcccggtgctggtaaaacaaggaggatact

SEQ ID NO: 125306 - DNA, 80 bp, synthetic construct
  source 1..80: mol_type = other DNA
gggcgctcgtgctcgtggccatcactgtgttcaccctcactccgcactacaagaaaatgcttgtctgcttactgtggtgg

SEQ ID NO: 125307 - DNA, 80 bp, synthetic construct
  source 1..80: mol_type = other DNA
tgggccgtgaggacaaagctcaaactcactcctctgcgtgacgcgcaccgcttcgacttgtcggagtggttcgtggcagg

SEQ ID NO: 125308 - DNA, 80 bp, synthetic construct
  source 1..80: mol_type = other DNA
gtcctgctcaaggtgggagcctacacgggcacatacatctatgaccacctagcccctatgtcaacttgggcctccgacgg

SEQ ID NO: 125309 - DNA, 80 bp, synthetic construct
  source 1..80: mol_type = other DNA
tgaagaatgggtccatgagagtggtagggccgcgtctctgtgcaaacatgtggcacggcaccttccccatcaatgaatac

SEQ ID NO: 125310 - DNA, 80 bp, synthetic construct
  source 1..80: mol_type = other DNA
acggagacgaccttgtgtcttgtgagacccgggacaggagagtgcgccaccctcatccccgagcacaaaagagaagaaaa

SEQ ID NO: 125311 - DNA, 80 bp, synthetic construct
  source 1..80: mol_type = other DNA
gtaaccgggaaaccgggtcacgggtacgcccaggctcggggcgacgtacacgctaaccaccaactccagcagcgtctggc

SEQ ID NO: 125312 - DNA, 80 bp, synthetic construct
  source 1..80: mol_type = other DNA
ggcgtcagtttcagggacaccgcggtacccccgagccccgtcgtgcgagaacccacgaccacggccacgttggcctcaaa

SEQ ID NO: 125313 - DNA, 80 bp, synthetic construct
  source 1..80: mol_type = other DNA
gatggggaagagagaaaagaagctgtcagagtttggaaaggcgaagggaagccgtgccatctggtacatgtggctgggag

SEQ ID NO: 125314 - DNA, 80 bp, synthetic construct
  source 1..80: mol_type = other DNA
ctggtggcggcgtgtgccgcctcgtacgacgcgcgcgacgccgccgatgcggtacgggcccacgtcacggccaactaccg

SEQ ID NO: 125315 - DNA, 80 bp, synthetic construct
  source 1..80: mol_type = other DNA
gtggcttagtttgcggcaagtatgcccaggctatattgctgcggcttggggcgtggactggtacatacatctatgaccac

SEQ ID NO: 125316 - DNA, 80 bp, synthetic construct
  source 1..80: mol_type = other DNA
cctagctggggccccaccgacccccggcgtaggtcgcgcaatctgggtaaggtcatcgataccctcacgtgcggcttcgc

SEQ ID NO: 125317 - DNA, 80 bp, synthetic construct
  source 1..80: mol_type = other DNA
tccacggggtttctcaagacgtgcggagctcccccttgcaacatctacgggggtgatgtaggaagagagagaaaccgcag

SEQ ID NO: 125318 - DNA, 80 bp, synthetic construct
  source 1..80: mol_type = other DNA
gcatgtaaacccattcgcacttcctggtgtggaatgtggtgtggtggtggggtgaaaaaggggggggttaaattaggcgt

SEQ ID NO: 125319 - DNA, 80 bp, synthetic construct
  source 1..80: mol_type = other DNA
cagatagccgaacagttcagacaaaaggtgctgggcctgatgcagaccacggccaagcaggcggaagacttgaagccagc

SEQ ID NO: 125320 - DNA, 80 bp, synthetic construct
  source 1..80: mol_type = other DNA
cggggtatgatcctccccttctggagacttggaaacgaccggattatgatcccccccaggtgtccggatgcccgctacca

SEQ ID NO: 125321 - DNA, 80 bp, synthetic construct
  source 1..80: mol_type = other DNA
cagccaatgggctccagcgagcaggagttggtcgccatcgtgcgcgacctgggctgcggaccttactttctgggcacgtt

SEQ ID NO: 125322 - DNA, 80 bp, synthetic construct
  source 1..80: mol_type = other DNA
atgaatccgcgtgctggatgtctgcaacgcccacgcttgccatcccgaacgcatcggtgtccattagcgggttccgtgac

SEQ ID NO: 125323 - DNA, 80 bp, synthetic construct
  source 1..80: mol_type = other DNA
catgggttcaaatgcggcctaccaaggtgttaagccaaaaactggcaacggatgggatccaaatacagatgttgctgccc

SEQ ID NO: 125324 - DNA, 80 bp, synthetic construct
  source 1..80: mol_type = other DNA
catgacccccgtcgggcggctggtgacagtgaaccccttcgtcgcgacttccagcgccaactcaaaggtgctagtcgaga

SEQ ID NO: 125325 - DNA, 80 bp, synthetic construct
  source 1..80: mol_type = other DNA
acgcttcctcggccgtggcgcatcatggttgggggtggctcctggtcttcctgtgttgggcctggtatgtgcgtggtagg

SEQ ID NO: 125326 - DNA, 80 bp, synthetic construct
  source 1..80: mol_type = other DNA
gttcggatacacaggtatgcccccccggctaaacctctcttgagagacgaggtaacattcagcgtggggctctccacctt

SEQ ID NO: 125327 - DNA, 80 bp, synthetic construct
  source 1..80: mol_type = other DNA
cctgtgtgacatcggggagagcaatccggatccagagaaggaggaggcccggagccggagggtgatccttttgatggagc

SEQ ID NO: 125328 - DNA, 80 bp, synthetic construct
  source 1..80: mol_type = other DNA
aagttctcgacgtcgtgcaggaaacacagctccatatggacggtcccgccatacgtatccagcctgacccgttggtgata

SEQ ID NO: 125329 - DNA, 80 bp, synthetic construct
  source 1..80: mol_type = other DNA
tcactgacccctcacacatcaccgcagagacagcctctcggcgcttgaagaggggatctcccccctccctggcgagttca

SEQ ID NO: 125330 - DNA, 80 bp, synthetic construct
  source 1..80: mol_type = other DNA
tccacgtacgtgctaaagggggcgacttcaaatgcctccccgaagagctcttggaggattcggaatctcccgaggaaggc

SEQ ID NO: 125331 - DNA, 80 bp, synthetic construct
  source 1..80: mol_type = other DNA
ttctgctaaacaagaaaaacagtttgaattacaagttacaaaaactaataaaaaccaatcacaaattccctcagctactg

SEQ ID NO: 125332 - DNA, 80 bp, synthetic construct
  source 1..80: mol_type = other DNA
cgccacgagaggtctccccggttgaggtggtttctggtcttacaattggacctgtaattagttggatggctgtatctttc

SEQ ID NO: 125333 - DNA, 80 bp, synthetic construct
  source 1..80: mol_type = other DNA
ctgtacttttaccccgcgacgcccaggccgaagttcacatgactaacactggggcgcagctcgcgggcggcgcacgtcac

SEQ ID NO: 125334 - DNA, 80 bp, synthetic construct
  source 1..80: mol_type = other DNA
ttgcgagccacctgtaccacccacgccaaaggtcctgacatcgacatggtggacgccagcctctttatgggaggcagtgt

SEQ ID NO: 125335 - DNA, 80 bp, synthetic construct
  source 1..80: mol_type = other DNA
tttagaaaagatggtacagacaaaaaggagtatagagtcacaattgatgatttatatgcaaaacaactaaaacaggaaaa

SEQ ID NO: 125336 - DNA, 80 bp, synthetic construct
  source 1..80: mol_type = other DNA
cctggcgaacaccctaacatgctacttgaaagccacagctgcctgtagggcggcgaaactcaaagactatgacatgctcg

SEQ ID NO: 125337 - DNA, 80 bp, synthetic construct
  source 1..80: mol_type = other DNA
cccggcgtggcaacgctggcatttccaaacacattacgttctcgtacgtccatgaccgctattttcagtattaattggtt

SEQ ID NO: 125338 - DNA, 80 bp, synthetic construct
  source 1..80: mol_type = other DNA
agccgcgtgacccggctcgtcccgcagaaggtctccggtaatatcaccgcagtcgtgcggatgctccagagcctgtccac

SEQ ID NO: 125339 - DNA, 80 bp, synthetic construct
  source 1..80: mol_type = other DNA
aaagccacggtttgagcaaaccgtgctgcctgtggctccgtcgtggggacgtaaaaacctgggaggctgcaaactgtgga

SEQ ID NO: 125340 - DNA, 80 bp, synthetic construct
  source 1..80: mol_type = other DNA
cagacgcaccgagagcgaatccgtccacggagtcccggcctgggttttatggggcccggccctcggaatcgcggcttgtc

SEQ ID NO: 125341 - DNA, 80 bp, synthetic construct
  source 1..80: mol_type = other DNA
gtaagtctccttgttcgggggccaaaacagaatttgcagctggtcaacaccaatggaagctggcacataaacagaacatc

SEQ ID NO: 125342 - DNA, 80 bp, synthetic construct
  source 1..80: mol_type = other DNA
gtgtacgccacgacatctcgctctgcgaccgcccggcagaagaaggtcacttttgaccgtctccaggtggttgacgatca

SEQ ID NO: 125343 - DNA, 80 bp, synthetic construct
  source 1..80: mol_type = other DNA
attcattgttttttaccccggcgtacgactccacgtaggctctcaaaaaacgtcccatcatttccacaaatgtcttgtgg

SEQ ID NO: 125344 - DNA, 80 bp, synthetic construct
  source 1..80: mol_type = other DNA
gttgtcagtggcctagtggtggcagcagtcggaagtataggcctgggtaagatattggtggacgtcctagccgggtacgg

SEQ ID NO: 125345 - DNA, 80 bp, synthetic construct
  source 1..80: mol_type = other DNA
aatatgtggccggtggtgcttggcatggacggggtggttattatgaatgtgaggtttactggccccaattttagcggtac

SEQ ID NO: 125346 - DNA, 80 bp, synthetic construct
  source 1..80: mol_type = other DNA
gataccgtagtcctatgtgaggcatacgacacaggttgtgcgtggtatgagctgaccccagccgagaccaccgtcagact

SEQ ID NO: 125347 - DNA, 80 bp, synthetic construct
  source 1..80: mol_type = other DNA
gaagacccggcaagaaaaatggatgactggaagaatgggtgaaaggcaactccaaaagattgagagatggttcgtgagga

SEQ ID NO: 125348 - DNA, 80 bp, synthetic construct
  source 1..80: mol_type = other DNA
gggcgggaaattgtggatctaatgtgtcatgccacatttaccatgaggctgctatcaccagttagagtgccaaactataa

SEQ ID NO: 125349 - DNA, 80 bp, synthetic construct
  source 1..80: mol_type = other DNA
cgaggatcccgtgtcccctctggtatatttgtatggtgcgacaaaggcatttgtgtcccattttgtgattttagctctgt

SEQ ID NO: 125350 - DNA, 80 bp, synthetic construct
  source 1..80: mol_type = other DNA
cggggtaaattatgcaacagggaatttgcctggttgctctttctctatctttttgcttgccctcctgtcgtgcgttacag

SEQ ID NO: 125351 - DNA, 80 bp, synthetic construct
  source 1..80: mol_type = other DNA
gacagctcttcacatttagacctcgcgtgcatgcgactgtgcaggactgcaactgctccatctacactggccgcgtcacc

SEQ ID NO: 125352 - DNA, 80 bp, synthetic construct
  source 1..80: mol_type = other DNA
ataaaacaaaccgcatgactttccggaaaaagaattattcccgcagccaacatcattaaaacagcagcgggcgtcatcat

SEQ ID NO: 125353 - DNA, 80 bp, synthetic construct
  source 1..80: mol_type = other DNA
atgacacgcccctgcaagtgcgcagacccaccccggttagaccgagtggcgagaggcgagcggctgtttacaaaattgag

SEQ ID NO: 125354 - DNA, 80 bp, synthetic construct
  source 1..80: mol_type = other DNA
gagaccaccgtcaggcttagagcgtatttcaacacgcccggcctacccgtgtgtcaagaccatcttgaattttgggaggc

SEQ ID NO: 125355 - DNA, 80 bp, synthetic construct
  source 1..80: mol_type = other DNA
ggatgctcctcttgctggggcaagccgaggcggcactggagaagctagtcattttgcatgcggctagtgccgcaagctct

SEQ ID NO: 125356 - DNA, 80 bp, synthetic construct
  source 1..80: mol_type = other DNA
gacctcctacccataaactaattgattaaagtttagaaaccaatcacaccccattccccattttcccacataaacaatca

SEQ ID NO: 125357 - DNA, 80 bp, synthetic construct
  source 1..80: mol_type = other DNA
aaatcgagccacgtgggcggaaaacatccaggttgccatcaaccaggttcggtctatcataggagatgaaaaatattttg

SEQ ID NO: 125358 - DNA, 80 bp, synthetic construct
  source 1..80: mol_type = other DNA
ccgtccgggcccgcctcggggcgtggcccgcgggatgacgcgggccccgggcagggcgccagcgctcgcactttgcccta

SEQ ID NO: 125359 - DNA, 80 bp, synthetic construct
  source 1..80: mol_type = other DNA
tcactttgagtacgagggactgttgcgccgcagcgcactagcagccactaaggaccgttgcgttaccctacaaaaatcaa

SEQ ID NO: 125360 - DNA, 80 bp, synthetic construct
  source 1..80: mol_type = other DNA
gctcccacagacagtgggcacgacacagttgtcatggaagtcgccttttcgggaacaaagccttgcagaatacccgtcag

SEQ ID NO: 125361 - DNA, 80 bp, synthetic construct
  source 1..80: mol_type = other DNA
atgagtgggcagaatttgtgctgcccgagggtaactattcggaaaccatgactattgacttaatgaacaatgctattatc

SEQ ID NO: 125362 - DNA, 80 bp, synthetic construct
  source 1..80: mol_type = other DNA
gtccgggacggtggagggccagcttggaacagataacgagttaattatgtccagagatctgttagaaccatgcgtggcta

SEQ ID NO: 125363 - DNA, 80 bp, synthetic construct
  source 1..80: mol_type = other DNA
gtgcgctaccaccccagcatcctttaatccgtgtgctgtgatactgttgcagagagatggctctcacttgccgcctgcgc

SEQ ID NO: 125364 - DNA, 80 bp, synthetic construct
  source 1..80: mol_type = other DNA
ttgcaaagtcagcgaagcaaaggattctaaactaactctagttttaactaaatgtggaagtcagattttagctagtgttg

SEQ ID NO: 125365 - DNA, 80 bp, synthetic construct
  source 1..80: mol_type = other DNA
tccgttattccatctagcggggatgttgtcgttgtagcaactgacgcactgatgacgggtttaaccggcgattttgattc

SEQ ID NO: 125366 - DNA, 80 bp, synthetic construct
  source 1..80: mol_type = other DNA
gggggacgtatatcacagcgcgtcccgggctcgaccccgctttttactcctgtgcctactcctactgtccgtagtggtag

SEQ ID NO: 125367 - DNA, 80 bp, synthetic construct
  source 1..80: mol_type = other DNA
ctttgcgggctgcccgtctctgcgcgattgggccgtgaggtgttgttgggacctgctgatgactatcgggagatgggttg

SEQ ID NO: 125368 - DNA, 80 bp, synthetic construct
  source 1..80: mol_type = other DNA
cgtccggtccacccgtaatacatgcccgcggccaccagctccagcggcttgaggaccaggaacgaccaagcaaacatcac

SEQ ID NO: 125369 - DNA, 80 bp, synthetic construct
  source 1..80: mol_type = other DNA
acgtcaaatggggacaatattggacccgtttcatccataatcgatcttgatcgacagttaacttctggaggtattgatga

SEQ ID NO: 125370 - DNA, 80 bp, synthetic construct
  source 1..80: mol_type = other DNA
ggcctgttgaatccgcaggcggtctgccatgccccaagcttcgttctgacatcggcgcaggtccttgtaataatcttgca

SEQ ID NO: 125371 - DNA, 80 bp, synthetic construct
  source 1..80: mol_type = other DNA
tgctggcttgaggcctcaatgctcctagacaacatggaggtgagaggtgggatggttgctccactttatggcatagaagg

SEQ ID NO: 125372 - DNA, 80 bp, synthetic construct
  source 1..80: mol_type = other DNA
acaacatgatggggaaaagagagaaaaaaccaggagagttcggaaaagccaggggcagccgagctatttggtttatgtgg

SEQ ID NO: 125373 - DNA, 80 bp, synthetic construct
  source 1..80: mol_type = other DNA
ctattcggaaagggaagtctattgacgtgtgccaagttcaagtgtgtgacaaaactagagggaaagatagttcaatatga

SEQ ID NO: 125374 - DNA, 80 bp, synthetic construct
  source 1..80: mol_type = other DNA
ctccgccgagcgcgcctggtccagcgtcttggccacggtcgccgggacggcgaccaccttcaacagggtcttcagattgg

SEQ ID NO: 125375 - DNA, 80 bp, synthetic construct
  source 1..80: mol_type = other DNA
ccttgcagcggtgactggctgcgtaccatctacgactgggttgccacagtgttgtccgacttcaagacatggctttctgc

SEQ ID NO: 125376 - DNA, 80 bp, synthetic construct
  source 1..80: mol_type = other DNA
ggggttcgttggtccagcagaggcgcccgcccttgcgcgagcaaaaaggtggtaacacatcaagcaaatgctcgtcaggg

SEQ ID NO: 125377 - DNA, 80 bp, synthetic construct
  source 1..80: mol_type = other DNA
tgagggggagcgggaggttatcgactcagagtctggttcatggagtacgtgttccgacgagggttggtctgtcatctgct

SEQ ID NO: 125378 - DNA, 80 bp, synthetic construct
  source 1..80: mol_type = other DNA
tgcgcgcgcttggcgtcaacgccgtggccttctacaggggcattgacgtgtcggtaatccccacagctggggacgtggtc

SEQ ID NO: 125379 - DNA, 80 bp, synthetic construct
  source 1..80: mol_type = other DNA
cacacagcgctgacaggagctacagagattcaaaattcaggaggtacgagcatttttgcggggcatttgaaatgtagact

SEQ ID NO: 125380 - DNA, 80 bp, synthetic construct
  source 1..80: mol_type = other DNA
cagacatggcgcccggcccctcacctcgcgctgggtgcggccctcaggccggcgggtactcgctccggagcgtggctcca

SEQ ID NO: 125381 - DNA, 80 bp, synthetic construct
  source 1..80: mol_type = other DNA
acaattttaaccatcttcaccttcacaccggcttataagatcctcctctgccggagtctgtggtggttgtgctatatgct

SEQ ID NO: 125382 - DNA, 80 bp, synthetic construct
  source 1..80: mol_type = other DNA
cggcgcgcagcttggccgtggccagaaacgccgggtcgtccgccccgtttgccgtctcggccgtggaggttggcggttgg

SEQ ID NO: 125383 - DNA, 80 bp, synthetic construct
  source 1..80: mol_type = other DNA
cacgcctgacttaccagtggcacaaggaaggcagctcaatagggaagttgtttactcagaccatgaagggcgcagagcgt

SEQ ID NO: 125384 - DNA, 80 bp, synthetic construct
  source 1..80: mol_type = other DNA
cctagacccaataccctatgatccaaaattcgagaagcagctgggacaagtgatgctcctagtcctctgcgtgactcaag

SEQ ID NO: 125385 - DNA, 80 bp, synthetic construct
  source 1..80: mol_type = other DNA
gggtgatggaatatgccacactacctgcacctgtggagccatgatcgtaggccacgtgaagaacgggtctatgcgtatct

SEQ ID NO: 125386 - DNA, 80 bp, synthetic construct
  source 1..80: mol_type = other DNA
acagatcatgctgatcttggtgtcaatggccgcggttgtcgtcaatccatcagtgagaactgtcagagaggctggaattc

SEQ ID NO: 125387 - DNA, 80 bp, synthetic construct
  source 1..80: mol_type = other DNA
tgctccgcctggcgctcgttcactgactccctgctcatgtggttcctctgacctgtacctggtcactagacatgctgatg

SEQ ID NO: 125388 - DNA, 80 bp, synthetic construct
  source 1..80: mol_type = other DNA
tagccattgccttgtgcatggtttcagtggttctcaaccgaactgcggcctcaatgacagaggctggggctgttggtcta

SEQ ID NO: 125389 - DNA, 80 bp, synthetic construct
  source 1..80: mol_type = other DNA
gtgggttcccagctcccctgtgaacccgaaccagacgtagcagtgctaacatccatgctcacagatcccgcgcacattac

SEQ ID NO: 125390 - DNA, 80 bp, synthetic construct
  source 1..80: mol_type = other DNA
ggttcttggagtttgaagcccttgggttcctaaatgaagaccactggatgagccgcgagaactcctatggaggagttgag

SEQ ID NO: 125391 - DNA, 80 bp, synthetic construct
  source 1..80: mol_type = other DNA
tgccatactttgtcagagctcatgctctgttaagggtgtgctccgcggtgaggagccttgttggaggcagatacgtccag

SEQ ID NO: 125392 - DNA, 80 bp, synthetic construct
  source 1..80: mol_type = other DNA
ggtcagggagagggagcggtccagtggatgaacagactgatcgcctttgcctccagaggaaaccatgttgcccccaccca

SEQ ID NO: 125393 - DNA, 80 bp, synthetic construct
  source 1..80: mol_type = other DNA
gcgaatagagctggcccagcgtcgacataacctcgtccagaacgaggacgtcgtagttgttcagaaggttggggcccacg

SEQ ID NO: 125394 - DNA, 80 bp, synthetic construct
  source 1..80: mol_type = other DNA
tgtgtccctctgaccacgttgtcgggctcttccgtgccgctgtctgcactaggggtgtagccaaggcgctggacttcgtg

SEQ ID NO: 125395 - DNA, 80 bp, synthetic construct
  source 1..80: mol_type = other DNA
tccagcacacgtcaaccacaaagtgctctgccgctaccctccatgaacgctttggcattggatttgcgaccagcaacagc

SEQ ID NO: 125396 - DNA, 80 bp, synthetic construct
  source 1..80: mol_type = other DNA
aatcccacagggtggcatttgtaaataactttcacatgttaatgtacataactacatatctcggaaacggtgagcttccc

SEQ ID NO: 125397 - DNA, 80 bp, synthetic construct
  source 1..80: mol_type = other DNA
tatgcgcgcaccccctcccctcgcgcggcccaccgcgcggatatacgcctggctcaaactggcggccggtggagcggccc

SEQ ID NO: 125398 - DNA, 80 bp, synthetic construct
  source 1..80: mol_type = other DNA
agaagagaccaaaggggatcgggacaggttgtcacgtatgccctcaataccataacaaacatgaaagtccaactaatccg

SEQ ID NO: 125399 - DNA, 80 bp, synthetic construct
  source 1..80: mol_type = other DNA
cggggtggcagtacatccagatggccctcctcaaactcggggctctcactggcacctacctgtacgaccacctaactccc

SEQ ID NO: 125400 - DNA, 80 bp, synthetic construct
  source 1..80: mol_type = other DNA
ccctttatgacataacacaaaagcttcccgtcgcagtgatggggcgctcctatggattccaatactctccagcccaacgg

SEQ ID NO: 125401 - DNA, 80 bp, synthetic construct
  source 1..80: mol_type = other DNA
tttggatccagtgcaggaagaggaggaggaggaggagaacctgagggccggcctggacccttcaacggaattgtaactga

SEQ ID NO: 125402 - DNA, 80 bp, synthetic construct
  source 1..80: mol_type = other DNA
ttacagatgatgggcaggggctaaagggggtaaagagggagcgtgaggcttgtgaggctacagaggaggctaggaatcta

SEQ ID NO: 125403 - DNA, 80 bp, synthetic construct
  source 1..80: mol_type = other DNA
tgcgctcgtcgggcaggatgcgcacgcgccagccgcggttgtgcagggtgatgaggtccacgctggtggccacctccccg

SEQ ID NO: 125404 - DNA, 80 bp, synthetic construct
  source 1..80: mol_type = other DNA
cgagcagaacctgagagctttcacggaagctatgaccaggtactcagctcctcccggtgatccccccaaaccagaatatg

SEQ ID NO: 125405 - DNA, 80 bp, synthetic construct
  source 1..80: mol_type = other DNA
gaaccgaaacatggatgtcctctgaaggcgcctggaaacaaatacaaagagtggaaacttgggctttgagacacccagga

SEQ ID NO: 125406 - DNA, 80 bp, synthetic construct
  source 1..80: mol_type = other DNA
agaatgatactgatgacccacttcttcagtgtcctcatagccagggaccaacttgaacaggcccttgattgcgagatcta

SEQ ID NO: 125407 - DNA, 80 bp, synthetic construct
  source 1..80: mol_type = other DNA
tccatgcggatagttggcccgcgtatgtgtgccaacatgtggcatggtaccttccccatcaatgagtacaccacaggacc

SEQ ID NO: 125408 - DNA, 80 bp, synthetic construct
  source 1..80: mol_type = other DNA
ggcatagtttctcccacactgctcgtgtgcggcgacgaccttgtggtcatttcagagagtcaagggactgaggaggacga

SEQ ID NO: 125409 - DNA, 80 bp, synthetic construct
  source 1..80: mol_type = other DNA
gcctgcgggacttagcggtcgccgtagaacctatcatctttagtccgatggagaagaggatcattacttggggagcggag

SEQ ID NO: 125410 - DNA, 80 bp, synthetic construct
  source 1..80: mol_type = other DNA
acgccctgcacctgcggcgcctctgacctatatttggtcacgaggcacgctgatgtcatcccggtgcggaggcgtggaga

SEQ ID NO: 125411 - DNA, 80 bp, synthetic construct
  source 1..80: mol_type = other DNA
ttatcacctggcgctctggtcgtaggtgtagtgtgtgctgctgtgctgcgccgccacgtcggtccctccgaaggggcgac

SEQ ID NO: 125412 - DNA, 80 bp, synthetic construct
  source 1..80: mol_type = other DNA
tattaccggcgccgtcgttggtagcgttggccttggaaaaatcctggtagacatcctcgccggctacggcgctggtgtgg

SEQ ID NO: 125413 - DNA, 80 bp, synthetic construct
  source 1..80: mol_type = other DNA
ggcaagttcctcgcagacggaggtctctcaccgggggcctatgatgtcgtaatatgcgacgagtgccatgcagtggactc

SEQ ID NO: 125414 - DNA, 80 bp, synthetic construct
  source 1..80: mol_type = other DNA
cagcaccgccagcagtgccagagtcttatcaggtcgggtatctccatgcccctactggcagcggaaagagcaccaaagtt

SEQ ID NO: 125415 - DNA, 80 bp, synthetic construct
  source 1..80: mol_type = other DNA
tgagactccgcagggcctagcaaagatcatacaaaaggcccacaaagaaggtgtgtgcggaatacggtcggtatcgcgct

SEQ ID NO: 125416 - DNA, 80 bp, synthetic construct
  source 1..80: mol_type = other DNA
cgaagcccgtgtggctataaggtcccttactgagagactttatatcggaggcccccttaccaattccagaggggagaact

SEQ ID NO: 125417 - DNA, 80 bp, synthetic construct
  source 1..80: mol_type = other DNA
cacaaccgcccactcagcgaaaggcatcacttcgctcttcaacccgggcgcccagcagagacttcagctaataaacacca

SEQ ID NO: 125418 - DNA, 80 bp, synthetic construct
  source 1..80: mol_type = other DNA
aggtgaggatgtttgtgggcggatttgaacaccggtttaccgccgcttgtaactggaccagggtggagcgctgcaatatc

SEQ ID NO: 125419 - DNA, 80 bp, synthetic construct
  source 1..80: mol_type = other DNA
cccaccaagacagggagccagaacgcaggccgggccccggctctgttctatgataaagaccaacaggcctcgggtgtgtg

SEQ ID NO: 125420 - DNA, 80 bp, synthetic construct
  source 1..80: mol_type = other DNA
gggccctggcgcatggcgtcagggctgtggaggacgggattaactacgcaacagggaaccttcctggttgctccttttct

SEQ ID NO: 125421 - DNA, 80 bp, synthetic construct
  source 1..80: mol_type = other DNA
tcgtggtccacatgctccgaccagggcgactccgtaatatgctgttccatgtcgtactcctggacgggggctctaataac

SEQ ID NO: 125422 - DNA, 80 bp, synthetic construct
  source 1..80: mol_type = other DNA
cccgcccagagatatagacacggaacacaaacaagcacggatgtcgtagcaataatttattttacacacattccccgccc

SEQ ID NO: 125423 - DNA, 80 bp, synthetic construct
  source 1..80: mol_type = other DNA
atcatgaaacagactgtgatttttctgctaatactctgcaccatccctgcgcttttctcccaaacctccgcgcctcccaa

SEQ ID NO: 125424 - DNA, 80 bp, synthetic construct
  source 1..80: mol_type = other DNA
cagcattgtgggtctgggagtaaaaagcctgaaacgccgccggtgctattaaaatggaaccaagctaaatgccattattg

SEQ ID NO: 125425 - DNA, 80 bp, synthetic construct
  source 1..80: mol_type = other DNA
tgatggcgtcgagtgacgatactcccccttctgaaggggccaccaatctggttccagaggtcaatactcaggtggtcccg

SEQ ID NO: 125426 - DNA, 80 bp, synthetic construct
  source 1..80: mol_type = other DNA
tgctggtgctaaatccatctgtcgcggcgacgctcgggttcggggcatacatgtcaagagcttatggcgtggaccccaac

SEQ ID NO: 125427 - DNA, 80 bp, synthetic construct
  source 1..80: mol_type = other DNA
ctggccgtcatgggagatgctgcctgggactttggttctgctggaggattcttcacatcagtcggaaaaggcatacacac

SEQ ID NO: 125428 - DNA, 80 bp, synthetic construct
  source 1..80: mol_type = other DNA
aaaaacagttctcatccggatctgacctttaccaacttcatccgtttcacgtacaacattttttagaaccatgcttcccc

SEQ ID NO: 125429 - DNA, 80 bp, synthetic construct
  source 1..80: mol_type = other DNA
cctatttaacatccttttctgtctttttaacgtgtgcgctgcctttgcggccgtctcacacgcctggcccgactgtcttg

SEQ ID NO: 125430 - DNA, 80 bp, synthetic construct
  source 1..80: mol_type = other DNA
ggcctcggacgggagaccgcggtctgccatgacgcccggctcgcgtgggtgcgggacagcgtagaccaacgacgagaccg

SEQ ID NO: 125431 - DNA, 80 bp, synthetic construct
  source 1..80: mol_type = other DNA
ccagccttctttggaatggacccatggctgtctccatgacaggagtcatgagggggaatcactatgcttttgtgggagtc

SEQ ID NO: 125432 - DNA, 80 bp, synthetic construct
  source 1..80: mol_type = other DNA
tggttctgatgacccatttcttccaaatactccaagcccaggagcaactccataaagtgcttgacttcgacatatacgga

SEQ ID NO: 125433 - DNA, 80 bp, synthetic construct
  source 1..80: mol_type = other DNA
gcacgatatccgcgtggaggaatccatttaccaatgttgtgacatgaaccccgaggcccgacgagtcgtgtcgtctctca

SEQ ID NO: 125434 - DNA, 80 bp, synthetic construct
  source 1..80: mol_type = other DNA
cggcgcgcaaaaaagacgggcggcggtccgggcggcgtgcgcgcgcgcggcggtcgttgggggcgggaccgagagagcgg

SEQ ID NO: 125435 - DNA, 80 bp, synthetic construct
  source 1..80: mol_type = other DNA
tttggatacggggcgaaggatgtcagggcccacactagcaaggccgtagaccacatcagctccgtgtgggaggacttgct

SEQ ID NO: 125436 - DNA, 80 bp, synthetic construct
  source 1..80: mol_type = other DNA
ttttgtgggatgacgtgtccgaaagcattttcgaaccaatgcgttcccgtaaaaaggagggcggagacgagctgccgctg

SEQ ID NO: 125437 - DNA, 80 bp, synthetic construct
  source 1..80: mol_type = other DNA
gctctccatcctgcaccagggccggtgcttcggggtgaatgagttgggcggcctcccgcgtgacactctgcatctgcagg

SEQ ID NO: 125438 - DNA, 80 bp, synthetic construct
  source 1..80: mol_type = other DNA
ctaactcccttatctgactgggcgtgtgacggcttacgagacctagccgtcgccgttgagcccgttgtcttctcccctat

SEQ ID NO: 125439 - DNA, 80 bp, synthetic construct
  source 1..80: mol_type = other DNA
tcgatgccaacctgctcatggagggcggtgtggctcagacagagcctgagtccagggtgcccgttctggactttctcgag

SEQ ID NO: 125440 - DNA, 80 bp, synthetic construct
  source 1..80: mol_type = other DNA
atccagctcaataggaaatcatatgaaacggagtacccgaagtgcaagaatgatgattgggattttgtggtcacaacaga

SEQ ID NO: 125441 - DNA, 80 bp, synthetic construct
  source 1..80: mol_type = other DNA
aaatacgtcctcaatgagaccacgaactggctgtgggcttttctagcccgcgataagaaacccaggatgtgctcccggga

SEQ ID NO: 125442 - DNA, 80 bp, synthetic construct
  source 1..80: mol_type = other DNA
agaggtgtgtggccctgtttactgttttacaccaagccccgtcgttgtgggaacaacagaccgcaagggcctcgccacat

SEQ ID NO: 125443 - DNA, 80 bp, synthetic construct
  source 1..80: mol_type = other DNA
tggattaagcctggtggcatccgtggagctaccaaattctttggaggagctaggggatggacttgcaatgggtatcatga

SEQ ID NO: 125444 - DNA, 80 bp, synthetic construct
  source 1..80: mol_type = other DNA
ccaatccccccgccgccgcagccctatcagcagcagccgcgggcccttgcttcccaggatggcacccaaaaagaagctgc

SEQ ID NO: 125445 - DNA, 80 bp, synthetic construct
  source 1..80: mol_type = other DNA
agaataccccacaattaaacagaaaaaacctgatttcatcttggccactgacatagctgagatgggagccaatctctgtg

SEQ ID NO: 125446 - DNA, 80 bp, synthetic construct
  source 1..80: mol_type = other DNA
agatgcgacgcctgtgcctggaccttcccccggtcccccccaacgcatacacgccctatcatctgagggagtatgcgacg

SEQ ID NO: 125447 - DNA, 80 bp, synthetic construct
  source 1..80: mol_type = other DNA
acacatttctttgggatacttcagtcccaggaggcactccatagagcacttgacttcgacatgtacggagtcacctactc

SEQ ID NO: 125448 - DNA, 80 bp, synthetic construct
  source 1..80: mol_type = other DNA
gaccagacgggaaacatggcgacccggctgcgggccgcggtccccggctggagccgccgcaccctgctccccgagaccgc

SEQ ID NO: 125449 - DNA, 80 bp, synthetic construct
  source 1..80: mol_type = other DNA
aggcatgtttgacaccgtagtactctgtgaatgctacgacgctggagctgcgtggtatgaactcacgccagctgagacta

SEQ ID NO: 125450 - DNA, 80 bp, synthetic construct
  source 1..80: mol_type = other DNA
cgccctagtggcttttaaaatcatggggggggagctccctaccacggaggacatggttaatcttctgcctgctatcttat

SEQ ID NO: 125451 - DNA, 80 bp, synthetic construct
  source 1..80: mol_type = other DNA
aatacagaaattaaaatatactggggctcctatcgccatcctgtaaacgccaccgtcttcacccgcccaagcaaaccaag

SEQ ID NO: 125452 - DNA, 80 bp, synthetic construct
  source 1..80: mol_type = other DNA
ctccaggggctggatggaatgtgcgcgacaccgcctgcctggcgaagtcatacgcgcagatgtggctgttgctttatttt

SEQ ID NO: 125453 - DNA, 80 bp, synthetic construct
  source 1..80: mol_type = other DNA
tctgcagcttgttgcgtggggtagtttatggcaagtacttccaaatggtcgtgcttaaaagcaggggcctgactggtact

SEQ ID NO: 125454 - DNA, 80 bp, synthetic construct
  source 1..80: mol_type = other DNA
gcgctgtggcgagtggccgcggaggagtacgtggaggttaggcgagtggtggatttccactacgtgacgggcatgactgc

SEQ ID NO: 125455 - DNA, 80 bp, synthetic construct
  source 1..80: mol_type = other DNA
gttacgtcacttctgcccttacatgtggctccgccgtaggccgccatcttgccctcgtccaaaatggcttccatgtccgg

SEQ ID NO: 125456 - DNA, 80 bp, synthetic construct
  source 1..80: mol_type = other DNA
acgatgcaaatgcctgggcaaaggataacaacaaagcagataataataacttagcaacaggtaacatcttcgccatggaa

SEQ ID NO: 125457 - DNA, 80 bp, synthetic construct
  source 1..80: mol_type = other DNA
tagccggtgctgccattggcagtatcggcctgggcaggatcatcatcgacatcctcgctgggtatggtgccggtgtgtct

SEQ ID NO: 125458 - DNA, 80 bp, synthetic construct
  source 1..80: mol_type = other DNA
accgtcgtgctttgcgaggcgtatgatgttgggtgtgcatggtatgagttgacaccatcagaaacaaccgtcaggttacg

SEQ ID NO: 125459 - DNA, 80 bp, synthetic construct
  source 1..80: mol_type = other DNA
actgcagagtatcagaagataaagattcaaaactaactttaattcttacaaaatgtggaagtcagatcctagcaagtttt

SEQ ID NO: 125460 - DNA, 80 bp, synthetic construct
  source 1..80: mol_type = other DNA
ctctgaacaacattagttgaatttgactatagacacgcgcgtggacaacctcgatgcactcttgttcaatgtagtaatgg

SEQ ID NO: 125461 - DNA, 80 bp, synthetic construct
  source 1..80: mol_type = other DNA
gctcggttggcggtactgaagcgaaacgttgcagtgacccactttgcctatccggcgctaaatcttccaccaaaggttat

SEQ ID NO: 125462 - DNA, 80 bp, synthetic construct
  source 1..80: mol_type = other DNA
ggtggcgctcggggggcgaggatgcgcgcgcggacacggccctaaagaaacctaagacggagtcgcccaccgcacacccg

SEQ ID NO: 125463 - DNA, 80 bp, synthetic construct
  source 1..80: mol_type = other DNA
tgcaacaggaactggcgcacatgcgggctaggaccagcgccccctatgggatgtacacgccggtggcgcactatcgccct

SEQ ID NO: 125464 - DNA, 80 bp, synthetic construct
  source 1..80: mol_type = other DNA
gtcacagctcccttgtgagcctgagccggacacagaggtcttggcatctatgctaacggacccatcccacattacagccg

SEQ ID NO: 125465 - DNA, 80 bp, synthetic construct
  source 1..80: mol_type = other DNA
gcaccgtcacgaccggggagcccatcacgtactccacatatggtaaattcctcgcagatggaggctgctcagctggagcc

SEQ ID NO: 125466 - DNA, 80 bp, synthetic construct
  source 1..80: mol_type = other DNA
gtcatcattaaactgtgcaatggcgatagccttcgtcatttcatgaccagcgtttatgcactggttaagtgtttccatga

SEQ ID NO: 125467 - DNA, 80 bp, synthetic construct
  source 1..80: mol_type = other DNA
ggatgttggtacggaatggagatccggccagtgaaggaggaagaagcaaaacttgtgaaatctcgagtgacagctggagt

SEQ ID NO: 125468 - DNA, 80 bp, synthetic construct
  source 1..80: mol_type = other DNA
catgtgcagaacgcccttttcattggctgaaggcattgtcctagcatcagctgccttagggccgctcatagagggaaaca

SEQ ID NO: 125469 - DNA, 80 bp, synthetic construct
  source 1..80: mol_type = other DNA
ggctgagattgtggcccaggacgtgatagcaccgtctgaaatggatgtgggtgactatgtcataagagttaaagaaggac

SEQ ID NO: 125470 - DNA, 80 bp, synthetic construct
  source 1..80: mol_type = other DNA
tccagtctcccgaggcactgcaaaattgcgatggctggtcgaacggcagttcctcaacccggtagggcgcgttgtcgatc

SEQ ID NO: 125471 - DNA, 80 bp, synthetic construct
  source 1..80: mol_type = other DNA
cctacttcaggacgccctcctgcgtgtgccatactacgtgcgcgcgcatgccctgttgcgcgcgtgcatgttggtccgcc

SEQ ID NO: 125472 - DNA, 80 bp, synthetic construct
  source 1..80: mol_type = other DNA
taaaatcagagtcgtcgcaggcgccctgctcccataggcgatagtcggtgcgtttttttgagcttggattaggaagggca

SEQ ID NO: 125473 - DNA, 80 bp, synthetic construct
  source 1..80: mol_type = other DNA
gaactacatattgtgggaaaacaatatcaaactaacggtagttgtgggtgatataattggggtcttagagcaaggaaaaa

SEQ ID NO: 125474 - DNA, 80 bp, synthetic construct
  source 1..80: mol_type = other DNA
cctattgctggcactatgcacctaaaccgtgcactgtcatcccggcagccagcgtttgtggccctgtgtattgtttcaca

SEQ ID NO: 125475 - DNA, 80 bp, synthetic construct
  source 1..80: mol_type = other DNA
ccctccagggccgatatgtactgggtgcagtgcgcgggcgtgaaccccgcgtcggtaagcgtgttgatcaccacggagtg

SEQ ID NO: 125476 - DNA, 80 bp, synthetic construct
  source 1..80: mol_type = other DNA
tgtgtaaacactaccggccctgttgttttgaacctgaaagaaagttcaacagaatcaatctcagtgtcatttactgcagc

SEQ ID NO: 125477 - DNA, 80 bp, synthetic construct
  source 1..80: mol_type = other DNA
gatcgctcagcagcaaaacacgccaggaaagaaggcaatgtcactggagggcatccagtctctagaggcacagcaaagct

SEQ ID NO: 125478 - DNA, 80 bp, synthetic construct
  source 1..80: mol_type = other DNA
tggtgcttgctctatatatgttgtgcctggtacatcaaaggccgacttgttccagctaccacttactgcctattgcagat

SEQ ID NO: 125479 - DNA, 80 bp, synthetic construct
  source 1..80: mol_type = other DNA
ggtcccacgaccgcctcgaacaggaggcggtggagtgggcggttaaaaaacggaagcgggtaggtaaaattctccccgat

SEQ ID NO: 125480 - DNA, 80 bp, synthetic construct
  source 1..80: mol_type = other DNA
aaaaaactggtcaccgtgattaaaaagcaccaccgacagttcctcggtcatgtccggagtcataatgtaagactcggtaa

SEQ ID NO: 125481 - DNA, 80 bp, synthetic construct
  source 1..80: mol_type = other DNA
tttcacagaattggacggggtgcgcctacacagtgcgcccccttgcaagcccttgctgcgggaggtggtgcatcagagta

SEQ ID NO: 125482 - DNA, 80 bp, synthetic construct
  source 1..80: mol_type = other DNA
gtttctgcccgactccttcatgcaggagatcatcggggggcaggcccgcgagaccggcgacgaccggcccgtcctaacaa

SEQ ID NO: 125483 - DNA, 80 bp, synthetic construct
  source 1..80: mol_type = other DNA
ctcgccgcgacagctggccctgctggcctccatggtagaggaggccgtccggacgatcccgacgcccgaccccgcggcct

SEQ ID NO: 125484 - DNA, 80 bp, synthetic construct
  source 1..80: mol_type = other DNA
gtggcggacagatcgttggtggagtatacgtgttgccgcgcaggggcccacgattgggtgtgcgcgcgacgcgtaaaact

SEQ ID NO: 125485 - DNA, 80 bp, synthetic construct
  source 1..80: mol_type = other DNA
tttcaaaacttcccccctggggtcctgtcacttaaactggctgacccaatcaccattaacaatcaaaatgtatcactcaa

SEQ ID NO: 125486 - DNA, 80 bp, synthetic construct
  source 1..80: mol_type = other DNA
cgcgcagtcagggcgtccctcatcgctcagggaggtaaggccgccatctgcggcatctatctcttcaactgggcggtgaa

SEQ ID NO: 125487 - DNA, 80 bp, synthetic construct
  source 1..80: mol_type = other DNA
tggttggtgcacaaggagtggtttcatgacatcccattaccttggcatgctggtgcagacactggaactccacactggaa

SEQ ID NO: 125488 - DNA, 80 bp, synthetic construct
  source 1..80: mol_type = other DNA
acaaaaagaatacttccagccataatcagagaagctttaaagaggaggttgagaaccctcattttagcaccaaccagagt

SEQ ID NO: 125489 - DNA, 80 bp, synthetic construct
  source 1..80: mol_type = other DNA
gccatacagtcatcatggcccaagcttgaacaattttgggccaagcacatgtggaacttcatcagtggtatacagtacct

SEQ ID NO: 125490 - DNA, 80 bp, synthetic construct
  source 1..80: mol_type = other DNA
gctggaagacaatgtcacgcccatccccactacaatcatggcaaagaacgaagtgttctgcgtggacacttcgaaggtgg

SEQ ID NO: 125491 - DNA, 80 bp, synthetic construct
  source 1..80: mol_type = other DNA
ccatgaccattgtcatgctcttcctgcttgccggactcttgacctcaggagcggtgattttcttcatgtcgccaaaaggc

SEQ ID NO: 125492 - DNA, 80 bp, synthetic construct
  source 1..80: mol_type = other DNA
gcaggatggctcctgtcaccccgtggctcccggcctagttggggccccacggacccccggcgtaggtcgcgtaatttggg

SEQ ID NO: 125493 - DNA, 80 bp, synthetic construct
  source 1..80: mol_type = other DNA
gtggatgaacgcgactggtttcgtcaagacttgcggggcccccccgtgcaacatctacgacggcggtgatgccgggaacc

SEQ ID NO: 125494 - DNA, 80 bp, synthetic construct
  source 1..80: mol_type = other DNA
cagacagagaagtactgtaccaacaatatgatgagatggaagaatgttccctagtggctccttacatcgagcaagcccaa

SEQ ID NO: 125495 - DNA, 80 bp, synthetic construct
  source 1..80: mol_type = other DNA
gatatcaagcatgttaaaaaacgggaaaaaaaagaggaagaagtcgccgcggcgtcagcagacggcgtcgagtttgtgcg

SEQ ID NO: 125496 - DNA, 80 bp, synthetic construct
  source 1..80: mol_type = other DNA
tggcgctgctatcggcagcatagggctgggtagggtcattgtagacatcctcgccgggtacggcgccggcgtttcgggtg

SEQ ID NO: 125497 - DNA, 80 bp, synthetic construct
  source 1..80: mol_type = other DNA
cctcctcttctggagaagtggaaggatcccgactatgaaccaccacaggtgtctggctgtgcactaccaccagcgcggcc

SEQ ID NO: 125498 - DNA, 80 bp, synthetic construct
  source 1..80: mol_type = other DNA
cgccgagcttgtcggtcacggccgggaagcagagcgcgtactgcagtggcgttccatccgggaccaaaaagctggtggcg

SEQ ID NO: 125499 - DNA, 80 bp, synthetic construct
  source 1..80: mol_type = other DNA
tggcacaaagcaggaagttccattggaaaagcgttcatcaccactatcaaaggggcacagcgtctagctgccctaggcga

SEQ ID NO: 125500 - DNA, 80 bp, synthetic construct
  source 1..80: mol_type = other DNA
tgggtgtgtgtggatgaacaagactgggttcacgaaagcatgtggcggccctccgtgtggcgtgcgtgtcagcaacggca

SEQ ID NO: 125501 - DNA, 80 bp, synthetic construct
  source 1..80: mol_type = other DNA
ctcctctcgttggaggaggcatgtggcttgacgcccccccattccgctagatcgaaatttgggtatggcgctaaggatgt

SEQ ID NO: 125502 - DNA, 80 bp, synthetic construct
  source 1..80: mol_type = other DNA
cttcaaaatcagtcccctggctgagccagtaagtggtcagcagattaaggataattgcgctaatgagcttgatctgctgg

SEQ ID NO: 125503 - DNA, 80 bp, synthetic construct
  source 1..80: mol_type = other DNA
gatgccgcaatggtcttacatgcacatcgccgggcaggacgcctcggagtatctgagcccgggcctggtgcaatttgccc

SEQ ID NO: 125504 - DNA, 80 bp, synthetic construct
  source 1..80: mol_type = other DNA
cacagcgccacggcctgtacgtccctcggcccgacgacccagtcttggccgatgccatcaacgggctgtttcgcgacgcg

SEQ ID NO: 125505 - DNA, 80 bp, synthetic construct
  source 1..80: mol_type = other DNA
atgaccggctttaccggcgacttcgactcggtgatagactgcaacacgtgtgtcacccagacagtcgatttcagccttga

SEQ ID NO: 125506 - DNA, 80 bp, synthetic construct
  source 1..80: mol_type = other DNA
tgccattttgaacccccattggatgcccccctctggtttttatacgggagaatttgacatgcccgagggagatgacggct

SEQ ID NO: 125507 - DNA, 80 bp, synthetic construct
  source 1..80: mol_type = other DNA
caccgggcaccaagtcgctagacccctgcacctgtggggccagtgatctgtatttggtcaccaggaatgctgacgtcttg

SEQ ID NO: 125508 - DNA, 80 bp, synthetic construct
  source 1..80: mol_type = other DNA
gtcacggagagagacatcaggaccgaagagtccatttaccaagcgtgctccctgtctaaggagacacggactgtcataca

SEQ ID NO: 125509 - DNA, 80 bp, synthetic construct
  source 1..80: mol_type = other DNA
ccagtgtcaatcccaatcacagctgcggcttggtacctatgggagacaaaaaagcagagggccggagtgctgtgggatgt

SEQ ID NO: 125510 - DNA, 80 bp, synthetic construct
  source 1..80: mol_type = other DNA
gcgtactgcatgtcaactggttgcgtggtcatttgcggcaggattacaactactggaaggcccgctgttgtgccagaccg

SEQ ID NO: 125511 - DNA, 80 bp, synthetic construct
  source 1..80: mol_type = other DNA
gaaaccggcccgccaacagtgcctttccttacccctccctttgtctcccccaatgggttccaagaaagtccccctggggt

SEQ ID NO: 125512 - DNA, 80 bp, synthetic construct
  source 1..80: mol_type = other DNA
cttgttcgcgcgtgttcccgcgatgtcgcggttttatggggtgtgggcgggcttttcacagaatatatatattccaaatg

SEQ ID NO: 125513 - DNA, 80 bp, synthetic construct
  source 1..80: mol_type = other DNA
tatgctatggggtctcaactcccttgcgagcccgagcccgacgtaatggtactcacgtccatgctcaccgacccagacca

SEQ ID NO: 125514 - DNA, 80 bp, synthetic construct
  source 1..80: mol_type = other DNA
aacctcatgcgacaaagcaatctgtggtggcattgggatctcaggagggagcgttgcaccaagccttggctggggctatc

SEQ ID NO: 125515 - DNA, 80 bp, synthetic construct
  source 1..80: mol_type = other DNA
cctatctttggtcaaggggggcaggcatctcattttctgtcactcaaagaggaagtgtgatgagatggccaagcaactat

SEQ ID NO: 125516 - DNA, 80 bp, synthetic construct
  source 1..80: mol_type = other DNA
tggtatattccagcagggacccaaaaaaacttataaatcgatgtggaaatacatgacattgtaccatcgcacgtaaacac

SEQ ID NO: 125517 - DNA, 80 bp, synthetic construct
  source 1..80: mol_type = other DNA
acacgtatcaccggtggcagtgctgcctttacgaccagtgggttagctggctttttctccccgggcgcccgccagccctt

SEQ ID NO: 125518 - DNA, 80 bp, synthetic construct
  source 1..80: mol_type = other DNA
gggatacaggggtgtatgggccggcacgggagtaatgactactcggtgtccatgtggagcaaacatttcgggccatgtcc

SEQ ID NO: 125519 - DNA, 80 bp, synthetic construct
  source 1..80: mol_type = other DNA
tttccgcacccggcatcttgcacgcagcagcgcgcgtcatggctggtcagttgcaccacgcttctcccccagcggttctg

SEQ ID NO: 125520 - DNA, 80 bp, synthetic construct
  source 1..80: mol_type = other DNA
ctgctgaggagtacgtggaggtcacgcgggtgggggatttccactacgtgacgggcataaccaccgacaacgtaaagtgc

SEQ ID NO: 125521 - DNA, 80 bp, synthetic construct
  source 1..80: mol_type = other DNA
tatgcgggatgtggcccttcttcctcatgttgctgagcctccccccacgagcgtatgctctggacagggaagtgagcgca

SEQ ID NO: 125522 - DNA, 80 bp, synthetic construct
  source 1..80: mol_type = other DNA
tgtcctctgcgaggcgtacgacgtaggcgctgcgtggtacgagctaacaccagccgagaccacggtaaggctgcgcgcat

SEQ ID NO: 125523 - DNA, 80 bp, synthetic construct
  source 1..80: mol_type = other DNA
ggatggtggtccttaccgaatcaaccgtatctactgccttggccgagcttgccactaagagctttggcagctcttcaact

SEQ ID NO: 125524 - DNA, 80 bp, synthetic construct
  source 1..80: mol_type = other DNA
aagatataatgatgatactcgacatcgttgccgacagtgtgagtgtggtagcagtcatctagaacttcgtcccattgtgc

SEQ ID NO: 125525 - DNA, 80 bp, synthetic construct
  source 1..80: mol_type = other DNA
gagatgctgttggccttcatgacccttgtgaaacagtacggccccgagttcgtgaccgggtacaacatcatcaacttcga

SEQ ID NO: 125526 - DNA, 80 bp, synthetic construct
  source 1..80: mol_type = other DNA
taaacagaacagctctcaattgcaaggactcccttaacacggggttcatagcagccctcctttacagaaacaagttcaac

SEQ ID NO: 125527 - DNA, 80 bp, synthetic construct
  source 1..80: mol_type = other DNA
gccaacgctcccgccccccactagcgcccaggccgccgtggctctttccggagccggcggtggcgaccctgacgaggagg

SEQ ID NO: 125528 - DNA, 80 bp, synthetic construct
  source 1..80: mol_type = other DNA
ataaccaagttgcctacctcataattgggatcttgacattgttatcagttgtggcagctaatgaactagggatgctggag

SEQ ID NO: 125529 - DNA, 80 bp, synthetic construct
  source 1..80: mol_type = other DNA
cattgttgctcctaccatgttggtgtgcggcgacgacctagtcgtcatctcagagagtcaaggggctgaggaggatgagc

SEQ ID NO: 125530 - DNA, 80 bp, synthetic construct
  source 1..80: mol_type = other DNA
gacccattggtgtatgttcttttttttattgggaggggcgggtagctttacaatgcaaaagcctttgacgtggaggaagg

SEQ ID NO: 125531 - DNA, 80 bp, synthetic construct
  source 1..80: mol_type = other DNA
ggggagaaaggacaggcgcggagccgccagccccgcctcttcggtggcgtcgtcgtccgggagatcgagcaggccctcga

SEQ ID NO: 125532 - DNA, 80 bp, synthetic construct
  source 1..80: mol_type = other DNA
ttgttgttggccgcggccgtgtatgccgtggtcggcgccgtgacctcccgctacgaccgcgccctggacgcgggccgccg

SEQ ID NO: 125533 - DNA, 80 bp, synthetic construct
  source 1..80: mol_type = other DNA
tttgaccgcgtccaggttctggatgctcattacaatgctgtacttcaggagataaagctccgggcctccaaggtggacgc

SEQ ID NO: 125534 - DNA, 80 bp, synthetic construct
  source 1..80: mol_type = other DNA
cacttacacctgggaggagaacgaatctgacatctttttgttgaactcgacgaggccccccggcggaggatggttcgggt

SEQ ID NO: 125535 - DNA, 80 bp, synthetic construct
  source 1..80: mol_type = other DNA
gcaagaggagatagcagtgtcccaagagctgtagaaaaggctgctgagaaggagctagagattgttcccattgaaaagga

SEQ ID NO: 125536 - DNA, 80 bp, synthetic construct
  source 1..80: mol_type = other DNA
gaggatgcccccccggagaagcgcgccggggtgcacgacggtcacctcaagcgcacccccaaggtgtactgcggtgtgga

SEQ ID NO: 125537 - DNA, 80 bp, synthetic construct
  source 1..80: mol_type = other DNA
cagcggagttgaggtgtcccaccgactgcttcaggaaacatcccgaggcaacgtacgctcggtgtggctcagggccctgg

SEQ ID NO: 125538 - DNA, 80 bp, synthetic construct
  source 1..80: mol_type = other DNA
caagtcaaataggagatgagtaccactatggaggcggaaccagtgaggatgacaccatgctggcgcactggactgaagca

SEQ ID NO: 125539 - DNA, 80 bp, synthetic construct
  source 1..80: mol_type = other DNA
ggttgcgctggattacccagcaggaacttcaggatctccaatcctagacaagtgtgggagagtgataggactttatggca

SEQ ID NO: 125540 - DNA, 80 bp, synthetic construct
  source 1..80: mol_type = other DNA
cagtacttcatcgcaaggatggaagctgagctccaagtatgggtcccaaccctcgtggtccaagggggccgtgatgccat

SEQ ID NO: 125541 - DNA, 80 bp, synthetic construct
  source 1..80: mol_type = other DNA
tccacggggtgtccagcccgactgtccagctgcaagcccatcacagctttcgcgcaggggtgtggtccactgacagatgt

SEQ ID NO: 125542 - DNA, 80 bp, synthetic construct
  source 1..80: mol_type = other DNA
tgggagacggcacgtcacactccagtgaattcatggttggggaacatcataatgtacgcccccagcatatgggcgcgtat

SEQ ID NO: 125543 - DNA, 80 bp, synthetic construct
  source 1..80: mol_type = other DNA
cgctcaggtcgtcgtcgtatcgccacagcaccaccactttgtccaggaatgcaactgttccatatacccgggcaagatca

SEQ ID NO: 125544 - DNA, 80 bp, synthetic construct
  source 1..80: mol_type = other DNA
ggggtcgcccccctctctggccagctcctcagccagccagctgtctgctccatctctcagggcaacttgcaccactaacc

SEQ ID NO: 125545 - DNA, 80 bp, synthetic construct
  source 1..80: mol_type = other DNA
ataggaagttggcgctggctgtaatggaaatgacatacaaaaacaaagtggtgaaagtcctgaggccagctccaggtggg

SEQ ID NO: 125546 - DNA, 80 bp, synthetic construct
  source 1..80: mol_type = other DNA
tggcagcagctctcagaaaacttggagcgcctcccctcagagcgtggaagagccgggcacgtgcggtgagggcatcactc

SEQ ID NO: 125547 - DNA, 80 bp, synthetic construct
  source 1..80: mol_type = other DNA
cctcgaccaccaccaacagcggcctcatggcccccgatttgtacgtgtacgtggatcccgcgttcacggccaacacccga

SEQ ID NO: 125548 - DNA, 80 bp, synthetic construct
  source 1..80: mol_type = other DNA
cataatactgcttacctgcttattccatccttctcttggctttgatgtaaccaaggtgctcttggccgtgatcgggcccc

SEQ ID NO: 125549 - DNA, 80 bp, synthetic construct
  source 1..80: mol_type = other DNA
cttatcatcaacatgaagggcatgcgccacgtaggcgacattaacgacaccgtgcgtgcctacctcgacgaggccgggtg

SEQ ID NO: 125550 - DNA, 80 bp, synthetic construct
  source 1..80: mol_type = other DNA
ctagggagaatggaaaaaagaacctggaaaggacctcagtttgaggaagatgtgaacctcggtagtggcacaagagcagt

SEQ ID NO: 125551 - DNA, 80 bp, synthetic construct
  source 1..80: mol_type = other DNA
gtccacggttgcgctctgcctccggcaaagcagccccctgttccctctcccaggaggaaacggacggtacagctcactga

SEQ ID NO: 125552 - DNA, 80 bp, synthetic construct
  source 1..80: mol_type = other DNA
cttaagggctcctctggtggtccactgttatgcccctcggggcacgctgttggcatcttccgggcggcagtgtgtactcg

SEQ ID NO: 125553 - DNA, 80 bp, synthetic construct
  source 1..80: mol_type = other DNA
tgcaggacgctgaagctctgttcaataaatactgctccctctcgcttaaagagtaaaaaaagcccgcgcgcggacttctg

SEQ ID NO: 125554 - DNA, 80 bp, synthetic construct
  source 1..80: mol_type = other DNA
actcgtctcggtgctggataccggtcactcccaacgtggccgtgagggagcgcggtgccctcaccaagggtttgagaacg

SEQ ID NO: 125555 - DNA, 80 bp, synthetic construct
  source 1..80: mol_type = other DNA
ccaaacgctctcgcagccttcaaaggattgcgattgcggttggtgagggagttccaacagtacttaaaacgtgttgtgcc

SEQ ID NO: 125556 - DNA, 80 bp, synthetic construct
  source 1..80: mol_type = other DNA
tactcctactcagcgtaggggtaggcatctttttactccccgctcggtagagcggcacaccttagctacactccatagag

SEQ ID NO: 125557 - DNA, 80 bp, synthetic construct
  source 1..80: mol_type = other DNA
cctgttgaatctctcgctatcgccacacggacgcccagcttctctgacaacagcacgccaccagctgtgccccaaacttt

SEQ ID NO: 125558 - DNA, 80 bp, synthetic construct
  source 1..80: mol_type = other DNA
ccagtgagctggcatactacaaaaaatggcttaacagaactctgtaatggaaaccctattttaagacacacttgtgatgg

SEQ ID NO: 125559 - DNA, 80 bp, synthetic construct
  source 1..80: mol_type = other DNA
cctggtcctgactctgggagtagttggtgatgcgactggcgttggccgtgatccacttttccatggtcagcgtgggttgc

SEQ ID NO: 125560 - DNA, 80 bp, synthetic construct
  source 1..80: mol_type = other DNA
ggcctaagctcgagcagttttggcaaaagcacatgtggaacttcataagtggcatacagtatctggccggcctctctacg

SEQ ID NO: 125561 - DNA, 80 bp, synthetic construct
  source 1..80: mol_type = other DNA
cggtcaaagtacgggtatagtgcgaaagatgttcgttccttctccagcaaggccatgaaccagatccgctccgtctggga

SEQ ID NO: 125562 - DNA, 80 bp, synthetic construct
  source 1..80: mol_type = other DNA
gcatatgccaacatatccggcccctctgaggataggccgtactgctggcactacccacccagaccctgtggagttgtccc

SEQ ID NO: 125563 - DNA, 80 bp, synthetic construct
  source 1..80: mol_type = other DNA
gaagtgcgacgaactcgccgcaaaactggtcgcgttgggcatcaacgccgtggcctactaccgtggccttgacgtgtcca

SEQ ID NO: 125564 - DNA, 80 bp, synthetic construct
  source 1..80: mol_type = other DNA
acggcagcacgggcggaggcgttcaccggctccggcgtccttcgcgtttaagcttggtcaggagggcgctcaggtcggcg

SEQ ID NO: 125565 - DNA, 80 bp, synthetic construct
  source 1..80: mol_type = other DNA
taggatttatgagctcgctcatttctttatcctctggactaccgatagaattaattgttgtaccacatacagtaaaactg

SEQ ID NO: 125566 - DNA, 80 bp, synthetic construct
  source 1..80: mol_type = other DNA
caccccgacgagctcctcattccggctgccggggccgcccccccgctccgactgcgtggcctataaccccgccgggatca

SEQ ID NO: 125567 - DNA, 80 bp, synthetic construct
  source 1..80: mol_type = other DNA
gggccacgcggcggcgggcctgacggagctgtgtcagaccctcgcgccccgggacctcacggacccgctgctgtttgcgt

SEQ ID NO: 125568 - DNA, 80 bp, synthetic construct
  source 1..80: mol_type = other DNA
tggaactgaggatgagttgccaaattactgcttcccacttggcggtataggggtaactgacacctaccaaggtataaaat

SEQ ID NO: 125569 - DNA, 80 bp, synthetic construct
  source 1..80: mol_type = other DNA
aaaagtcactcaagtcctcggccactacagatgccaattcagagccagggctaagcgtgggactgccaagcgtgatggag

SEQ ID NO: 125570 - DNA, 80 bp, synthetic construct
  source 1..80: mol_type = other DNA
aggacaaccagctagcatatgtggtgataggtttgttattcatgatactgacagtggcagccaatgagatgggattattg

SEQ ID NO: 125571 - DNA, 80 bp, synthetic construct
  source 1..80: mol_type = other DNA
gcgctaagctactgtcccagggggggagggccgccacttgtggcaaatacctcttcaactgggcagtaaaaaccaagctc

SEQ ID NO: 125572 - DNA, 80 bp, synthetic construct
  source 1..80: mol_type = other DNA
gtagaccccagcaagggcgggaagaaagcagcccgcctcatcgtgtatcctgatctcagcgtcagggtatgcgagaagat

SEQ ID NO: 125573 - DNA, 80 bp, synthetic construct
  source 1..80: mol_type = other DNA
ctcttctatcatcagactgcctgactgaaccattcccaaataattttcattcttccactgttgtattatttgaacacact

SEQ ID NO: 125574 - DNA, 80 bp, synthetic construct
  source 1..80: mol_type = other DNA
ctcggagggttactccagctgggaagaggttcccttctgctctcaccatttccatgagctgacgatgaaggacggcaggg

SEQ ID NO: 125575 - DNA, 80 bp, synthetic construct
  source 1..80: mol_type = other DNA
ctggactttgttccagtggagagcatgcagactacccagaggtctccatccttttctgacaactcatcaccaccagccgt

SEQ ID NO: 125576 - DNA, 80 bp, synthetic construct
  source 1..80: mol_type = other DNA
ccgttactctgagttggcacccctattcgacaccacccgtgtgtacctggtggacaacaagtcaacggatgtggcatccc

SEQ ID NO: 125577 - DNA, 80 bp, synthetic construct
  source 1..80: mol_type = other DNA
caacaatcgctacaccagtaccagacgctcgtgtatttgaggtaaatgcagggtctacgtaaacgtacaacactgacgat

SEQ ID NO: 125578 - DNA, 80 bp, synthetic construct
  source 1..80: mol_type = other DNA
gggtcatccataccctaacgtgcggattcccccacctcatggggtacatcccgctcgtaggcggccccgttggtggcgtc

SEQ ID NO: 125579 - DNA, 80 bp, synthetic construct
  source 1..80: mol_type = other DNA
atcctcctcacgtgtgcggttcatccagagttaattcttgacatcaccaaactcctgctcgccatactcggcccgctcat

SEQ ID NO: 125580 - DNA, 80 bp, synthetic construct
  source 1..80: mol_type = other DNA
caaactcgaagtcggccatatccagagcgccgtagggagcggagtcgtgggaggtaaatcccggccccggggaatccccg

SEQ ID NO: 125581 - DNA, 80 bp, synthetic construct
  source 1..80: mol_type = other DNA
tgataggggagacgtcgagccgtaccgttagctccctcgcgagcattttcaacccgggatcggctcagagaatccagctt

SEQ ID NO: 125582 - DNA, 80 bp, synthetic construct
  source 1..80: mol_type = other DNA
ccactgtgtgcgctagagcccaagctccccccccatcgtgggaccagatgtggaagtgcttgatccgtctcaagcccacc

SEQ ID NO: 125583 - DNA, 80 bp, synthetic construct
  source 1..80: mol_type = other DNA
cttcatgggccaacacccttgctatacagactgggcgccgttcagaatgaagtcaccctgacacacccagtcaccaagta

SEQ ID NO: 125584 - DNA, 80 bp, synthetic construct
  source 1..80: mol_type = other DNA
ttccaggtgggattcaacccagcaaaggagcatcctctcggccgctatggaagtgatggtgcggttttctgccgaaccag

SEQ ID NO: 125585 - DNA, 80 bp, synthetic construct
  source 1..80: mol_type = other DNA
acagactttaagaactggctgtcctcaaaactgctccccaagctgcctggccttccctttatctcttgtcaaaaggggta

SEQ ID NO: 125586 - DNA, 80 bp, synthetic construct
  source 1..80: mol_type = other DNA
taactctgaagatgtctgaccaactagaaatcgacgggcagcgcactgagcagctgatccttgctcggcgaaaactcaaa

SEQ ID NO: 125587 - DNA, 80 bp, synthetic construct
  source 1..80: mol_type = other DNA
atcgtcctcgtcgtccgtgccgggccacgggggggtgggcgacagggcgcggaccgtgtgtcgccccagcgacaggtagc

SEQ ID NO: 125588 - DNA, 80 bp, synthetic construct
  source 1..80: mol_type = other DNA
tgtaattgacaacgtgcacacttggacagaacagtacaaatttcaaccagagtctccagcgcgattggcgtcggcaatac

SEQ ID NO: 125589 - DNA, 80 bp, synthetic construct
  source 1..80: mol_type = other DNA
gttatgctccacacaacagaaagaggagggagggcctatcaacatgccctgaacgaacttccagagtcactggaaacact

SEQ ID NO: 125590 - DNA, 80 bp, synthetic construct
  source 1..80: mol_type = other DNA
tgtcatcagacatgattgatggatgtttacaagagggtgcagcatggactacggatctgtctaatatggggaggggtgtc

SEQ ID NO: 125591 - DNA, 80 bp, synthetic construct
  source 1..80: mol_type = other DNA
aaacgtcaacactcggcgtcgccctcttagcagtgctgattattgtcactcttagcccaggttacaagaggttgcttatg

SEQ ID NO: 125592 - DNA, 80 bp, synthetic construct
  source 1..80: mol_type = other DNA
gcggtcacccaggtcgtagatttcagcttggaccccacatttgcaataaccacacaaaccgttccccaggacgccgtatc

SEQ ID NO: 125593 - DNA, 80 bp, synthetic construct
  source 1..80: mol_type = other DNA
gtgcgcctccaagaccgcagaagcggcccaggccagaactagaagaaactctggtgacggagagcaaggagcctccctcg

SEQ ID NO: 125594 - DNA, 80 bp, synthetic construct
  source 1..80: mol_type = other DNA
ccaacctacacattcgttctgcgagtcacacacgggaggagcgggaagagctggaagaaccatgttttttttttttattc

SEQ ID NO: 125595 - DNA, 80 bp, synthetic construct
  source 1..80: mol_type = other DNA
gtctccaaccattcagcttacagtccagtggacagtaacagcccgataacatggaattggatattaatcgaacattgttg

SEQ ID NO: 125596 - DNA, 80 bp, synthetic construct
  source 1..80: mol_type = other DNA
gctcccatccagggcatacgcgtttgatggcgagactgcggggtccctaggttgtggtgccctgctcttgatgaccatct

SEQ ID NO: 125597 - DNA, 80 bp, synthetic construct
  source 1..80: mol_type = other DNA
ttgcgggttcgccgacctcatggggtacattcccgttgtaggaggccctctaggtggcgtcgcggcagccctcgcgcacg

SEQ ID NO: 125598 - DNA, 80 bp, synthetic construct
  source 1..80: mol_type = other DNA
taactttagttgggcctaaaccagaaggaaaagttacttggttcgatggagatttaaaaagaccatgtgagcctaattat

SEQ ID NO: 125599 - DNA, 80 bp, synthetic construct
  source 1..80: mol_type = other DNA
gagtggtacccgcgtcaagcgtgtgcggccccgtctactgcttcacgcccagccctgtggtcgttggcacaaccaatcgg

SEQ ID NO: 125600 - DNA, 80 bp, synthetic construct
  source 1..80: mol_type = other DNA
gccgtggcgcgctttctgggagatgccgtgaaccgcgaacccgcgctcatgctggagtacttttgccggtgcgcccgcga

SEQ ID NO: 125601 - DNA, 80 bp, synthetic construct
  source 1..80: mol_type = other DNA
tggatgaatggcaccgggttcgtcaaaacatgtggggcacctccttgccgcatcacacctctggaagtgacacccaatga

SEQ ID NO: 125602 - DNA, 80 bp, synthetic construct
  source 1..80: mol_type = other DNA
ggtgatggccacgcgccgctcgacgaacggttcgtcctgcaggtaagtctcgctggccccgtagaggtgcagggccgcgg

SEQ ID NO: 125603 - DNA, 80 bp, synthetic construct
  source 1..80: mol_type = other DNA
gtctctggatgatgctgctggtggcgcaagttgaggcagctctggccaatctgattaccatcaatgctactgcggccgtt

SEQ ID NO: 125604 - DNA, 80 bp, synthetic construct
  source 1..80: mol_type = other DNA
gcagaaacggctggagcgcgacttgtcgtgctcgccactgccactccaccggggtcggtaacggtcccccacccaaacat

SEQ ID NO: 125605 - DNA, 80 bp, synthetic construct
  source 1..80: mol_type = other DNA
ccgctcctcctgctcgtgctcgcgctcccacatcgagcgtacgcttacgacagggagcaggctgcctctctcggggtgtc

SEQ ID NO: 125606 - DNA, 80 bp, synthetic construct
  source 1..80: mol_type = other DNA
cggttgggcagggtggctcctgtccccccggggctcacgcccgtcatggtgccccacagacccccggcataggtcgcgta

SEQ ID NO: 125607 - DNA, 80 bp, synthetic construct
  source 1..80: mol_type = other DNA
ctggctgacggcggctgctcggggggagcgtatgacgtcatcatctgtgatgagtgccactccgtggatccgacaacgat

SEQ ID NO: 125608 - DNA, 80 bp, synthetic construct
  source 1..80: mol_type = other DNA
atcgtcgttgccgtgcgagcggcgtgctgaccaccagcatgggcaacaccattacctgctatgtgaaagcgctggcggcg

SEQ ID NO: 125609 - DNA, 80 bp, synthetic construct
  source 1..80: mol_type = other DNA
tagggcctggtcaccttcttaggagtgtcctgacaagcgcgccatacttcgtcagggcgcaagccctgttgaggatgtgc

SEQ ID NO: 125610 - DNA, 80 bp, synthetic construct
  source 1..80: mol_type = other DNA
ctgtctaacgacaggcagcgctgtcatatgtggcaggattataacctcgggcaaacctgctgttatgcccgaccgcgagg

SEQ ID NO: 125611 - DNA, 80 bp, synthetic construct
  source 1..80: mol_type = other DNA
ccatagtcactgacaaagaaaaaccagtcaacattgaagcggagccaccttttggtgagagctacattgtggtaggagca

SEQ ID NO: 125612 - DNA, 80 bp, synthetic construct
  source 1..80: mol_type = other DNA
atcaccaacacgttcgcgcgcctatttacaacggggccagctcagaaaatccagcttgtaaacaccaatggcaggtggca

SEQ ID NO: 125613 - DNA, 80 bp, synthetic construct
  source 1..80: mol_type = other DNA
acaggtataaagtctgggggtggaggaaggaaaggaagttttaaaatgagcggctccatggaagggaacgctgtgagttt

SEQ ID NO: 125614 - DNA, 80 bp, synthetic construct
  source 1..80: mol_type = other DNA
cacagacataccaagtagggtacctccatgccccgacgggtagtgggaagagcaccaaagtgcccgcggcttacgccgcg

SEQ ID NO: 125615 - DNA, 80 bp, synthetic construct
  source 1..80: mol_type = other DNA
attcccctcccacaattactcataagaataaatcattggaattaatgtttcaataaagatcacttacttgaaatctgaaa

SEQ ID NO: 125616 - DNA, 80 bp, synthetic construct
  source 1..80: mol_type = other DNA
caatgtggctctgtatctcccagactcgtacaaatacaccccgtccaatgtcactcttccagaaaacaaaaacacctacg

SEQ ID NO: 125617 - DNA, 80 bp, synthetic construct
  source 1..80: mol_type = other DNA
gtctacgcaaaaggagatacaaccacaggagtgtacaggataatggcgcgagggatccttggcgtctaccaagcaggcgt

SEQ ID NO: 125618 - DNA, 80 bp, synthetic construct
  source 1..80: mol_type = other DNA
cctggagaatggtaggaaacttggagcagttcctattgacctgagcaaaggtacctcgggaagtccgataatcaatgctc

SEQ ID NO: 125619 - DNA, 80 bp, synthetic construct
  source 1..80: mol_type = other DNA
atgcgaaccgtggtgtcaagttttcgccgcgtacattcccgataacgccttaacaaatctcttaataccaaaaacggaac

SEQ ID NO: 125620 - DNA, 80 bp, synthetic construct
  source 1..80: mol_type = other DNA
gttcccgagtccgcgtccgacgacgacgatgacgacgactggccggacagccccccgcccgagccggcgccagaggcccg

SEQ ID NO: 125621 - DNA, 80 bp, synthetic construct
  source 1..80: mol_type = other DNA
gcagaggcgctcctgcaagtttgggtccccccgctcaacgcccgaggagggcgcgatggagtcgtactgctcatgtgtgt

SEQ ID NO: 125622 - DNA, 80 bp, synthetic construct
  source 1..80: mol_type = other DNA
gaccgcggtgaatggcgtcatgtggaccgtgtaccacggagcgggcagcaagactctcagcggccccaaaggaccagtca

SEQ ID NO: 125623 - DNA, 80 bp, synthetic construct
  source 1..80: mol_type = other DNA
tttgagtttgcgttcctaattcccccaacagtggaaacaaagacaaccctattttcagtgccaggcttctcagtgcagga

SEQ ID NO: 125624 - DNA, 80 bp, synthetic construct
  source 1..80: mol_type = other DNA
atttacacggtgacgacacggagaggaaatatgcggtcgaggggggggcacaacacgttttaagtactgttggaactccc

SEQ ID NO: 125625 - DNA, 80 bp, synthetic construct
  source 1..80: mol_type = other DNA
accccgccaaaaaaaacacacacgccctgggtgtttttcgcgaaaacacttccgcgttctcacttcctcgtatcgatttc

SEQ ID NO: 125626 - DNA, 80 bp, synthetic construct
  source 1..80: mol_type = other DNA
tgattgaattggaaccaccctttggagactcatacatagtggtgggcagaggagaacaacagatcaatcaccattggcac

SEQ ID NO: 125627 - DNA, 80 bp, synthetic construct
  source 1..80: mol_type = other DNA
aacgaggcgtttagggaggcgctgctaaacattgccgagcccgagggtcgctggctgctggagctaattaacattttgca

SEQ ID NO: 125628 - DNA, 80 bp, synthetic construct
  source 1..80: mol_type = other DNA
cacatcaacaggactgcactcaactgcgacgacagcctgaacaccggctttttggctagtctgttctacacccataagtt

SEQ ID NO: 125629 - DNA, 80 bp, synthetic construct
  source 1..80: mol_type = other DNA
tggcgataaatcttaccccgagccggattttttgggcgtattcgagaaacggcacacacagatccgccgcgcctaccacc

SEQ ID NO: 125630 - DNA, 80 bp, synthetic construct
  source 1..80: mol_type = other DNA
tgctataccgcctaggctcagtcaccaatgaggtcaccctcactcaccccgtaaccaaatacattgccacatgcatgcaa

SEQ ID NO: 125631 - DNA, 80 bp, synthetic construct
  source 1..80: mol_type = other DNA
gaaggagcgttcattgtaaatatgtgtatatatagggttgaagaagtcaggccagctttaagctgccaccggatgtcgag

SEQ ID NO: 125632 - DNA, 80 bp, synthetic construct
  source 1..80: mol_type = other DNA
ctccgttactatacaggctgggcgctgttcagaatgagataacaacaacacatccaatcaccaagtacatcatgacctgc

SEQ ID NO: 125633 - DNA, 80 bp, synthetic construct
  source 1..80: mol_type = other DNA
cggcttgcccgtctccgcccgtaggggccgggagatcctgctcggcccggccgatggaatggtctccaaggcgtggaggt

SEQ ID NO: 125634 - DNA, 80 bp, synthetic construct
  source 1..80: mol_type = other DNA
aatgctacctgggagtctctaccgagggcaatgctagagtgagacactgctcttccctggagacgggctgcttctgcctg

SEQ ID NO: 125635 - DNA, 80 bp, synthetic construct
  source 1..80: mol_type = other DNA
taccacaccctttggacagcagcgcgtgtttaaggagaaggttgacaccaaggctccagaaccacctgagggggtaaagt

SEQ ID NO: 125636 - DNA, 80 bp, synthetic construct
  source 1..80: mol_type = other DNA
atttcctctggggtcaggatcatatcccaggggactggaaactcttggagcagggtaaagccagcagcacatggtaatcc

SEQ ID NO: 125637 - DNA, 80 bp, synthetic construct
  source 1..80: mol_type = other DNA
gcagaccagaggcttgttcagcaccatcgtgacaagccttaccggcaaagacaccaatgagaattgtggcgaggtccaag

SEQ ID NO: 125638 - DNA, 80 bp, synthetic construct
  source 1..80: mol_type = other DNA
aatgaaggtggagaggtgagcctgcgggtccggcaggattcaatgggaaacttccacctgacagagcttgagaaagagga

SEQ ID NO: 125639 - DNA, 80 bp, synthetic construct
  source 1..80: mol_type = other DNA
agatcatgtgcggggagacccccagcacggaggacctagcgaacctactgccagctatactgtcccctggagcattggtt

SEQ ID NO: 125640 - DNA, 80 bp, synthetic construct
  source 1..80: mol_type = other DNA
ctgtgaagacagtgcgagaagctggaattttgatcacggcagcagcggtgacgctttgggagaatggagcaagctctgtt

SEQ ID NO: 125641 - DNA, 80 bp, synthetic construct
  source 1..80: mol_type = other DNA
acagatcccactacaattttggggatagggaccgtgctggatcaggccgagacggctggttgccgcctcacggttctggc

SEQ ID NO: 125642 - DNA, 80 bp, synthetic construct
  source 1..80: mol_type = other DNA
gaagcaggtggaagggcgtacaatcatgctctcagtgaactgccggagaccctagagacactgcttttactgacacttct

SEQ ID NO: 125643 - DNA, 80 bp, synthetic construct
  source 1..80: mol_type = other DNA
tggcttgggacatgatgatgaactggagccccaccacgacgctgctccttgcccaagtcatgaggatccctggcaccttg

SEQ ID NO: 125644 - DNA, 80 bp, synthetic construct
  source 1..80: mol_type = other DNA
ggcttatggaattgatccaagtgtgcgcaccggcgcgcgcacggtgaccacgggggctcccataacttactcaacctatg

SEQ ID NO: 125645 - DNA, 80 bp, synthetic construct
  source 1..80: mol_type = other DNA
atcggtggctggacccgtgggaggagcgggagccggcggcgttctggagagaggtgccgctggagcgcccggaggcccca

SEQ ID NO: 125646 - DNA, 80 bp, synthetic construct
  source 1..80: mol_type = other DNA
gcgcgactaggaaggcttccgagcggtcgcaacctcgtggaaggcgacaacctatcccaaaggctcgccgacccgagggc

SEQ ID NO: 125647 - DNA, 80 bp, synthetic construct
  source 1..80: mol_type = other DNA
aatcatgtttgcccccacactgtgggcgagaatgatactgatgacccacttcttcagtgttctcatggccagggatcagc

SEQ ID NO: 125648 - DNA, 80 bp, synthetic construct
  source 1..80: mol_type = other DNA
aacgtaaaaatatcactgttgaatggggaaaggatgtaatactagtcggaccacaagatctgccagttaattggcacggg

SEQ ID NO: 125649 - DNA, 80 bp, synthetic construct
  source 1..80: mol_type = other DNA
agcggggagaacctcgcgtatctggtggcataccaagccacggtgtgcgctcgggcgaaggctccccctccctcatggga

SEQ ID NO: 125650 - DNA, 80 bp, synthetic construct
  source 1..80: mol_type = other DNA
aactttctcctaaccaaccgtcgtcaacaagtgcctccgcagtatagtttaaatgcagaagaagagcgtatattacgcta

SEQ ID NO: 125651 - DNA, 80 bp, synthetic construct
  source 1..80: mol_type = other DNA
cgatgtgaccaaggtactgttggccctcattggccccttttacctgctccaagccagcttgctgcgcgtgccctactatg

SEQ ID NO: 125652 - DNA, 80 bp, synthetic construct
  source 1..80: mol_type = other DNA
acaaaagcgatgacaaacttaccctgtggacaactcctgacccatcacctaattgtcaaatatactcagaaaaagatgct

SEQ ID NO: 125653 - DNA, 80 bp, synthetic construct
  source 1..80: mol_type = other DNA
tgacggggggtgggcggtttttggggttggggtggtggtgggaaacggcccgagtccggaggccaacttagcccctcggt

SEQ ID NO: 125654 - DNA, 80 bp, synthetic construct
  source 1..80: mol_type = other DNA
cgtcgctgcctactgtttggcaactggctgtgtggtctgtatcggccgtgtgaacatcaatcagaagactgtagttgccc

SEQ ID NO: 125655 - DNA, 80 bp, synthetic construct
  source 1..80: mol_type = other DNA
ttttacagctgccgtcactagcccactaaccactagccaaactctcctcttcaacattttgggggggtgtgtggctgccc

SEQ ID NO: 125656 - DNA, 80 bp, synthetic construct
  source 1..80: mol_type = other DNA
tgactggaacactggctgttttcctccttcttataatgggacaactgacatggaatgatctgattaggttatgcatcatg

SEQ ID NO: 125657 - DNA, 80 bp, synthetic construct
  source 1..80: mol_type = other DNA
atgaggtttcataataaggtgtactccacaacctcgaagagcgccactctaagggcaaagaaggtgacctttgacagggt

SEQ ID NO: 125658 - DNA, 80 bp, synthetic construct
  source 1..80: mol_type = other DNA
ttaagaaagaacggaaaacgggtaatccaattgagcagaaaaacctttgacactgagtaccaaaaaacaaaaaacaatga

SEQ ID NO: 125659 - DNA, 80 bp, synthetic construct
  source 1..80: mol_type = other DNA
agttcaaacagtggacattcaaattcctgtgcaagctgcattgggtgaaactatggaaacccaaacttcgccaataaaaa

SEQ ID NO: 125660 - DNA, 80 bp, synthetic construct
  source 1..80: mol_type = other DNA
cctggcgccgcttaacacctgggcctcagatggtctcaaagagctggccatcgctgtcgagcccgtcatcttttctccaa

SEQ ID NO: 125661 - DNA, 80 bp, synthetic construct
  source 1..80: mol_type = other DNA
cgtccctcctcctaggaggaagcacacggtggtgcttactgagtccagcgtctccgacgctttggctgagctggcggtta

SEQ ID NO: 125662 - DNA, 80 bp, synthetic construct
  source 1..80: mol_type = other DNA
cctataactccctggctcctaaaacagcacccaatccatgcgaatggaaggacaacaacaaaataaaagttagagggcaa

SEQ ID NO: 125663 - DNA, 80 bp, synthetic construct
  source 1..80: mol_type = other DNA
ctggggcctacggaagggcgaaacagcattcgttactcagagttggcgccgctatatgacaccacccgggtttatctagt

SEQ ID NO: 125664 - DNA, 80 bp, synthetic construct
  source 1..80: mol_type = other DNA
tgatgacttagtcgtcatcgctgagagcgacggcgtagaggaggacaaccgagccctccgagccttcacggaggctatga

SEQ ID NO: 125665 - DNA, 80 bp, synthetic construct
  source 1..80: mol_type = other DNA
gtgggccaactgttcactttcacaccccggaggtaccaaacagagcaagactgcaactgttccatctatccggggcacat

SEQ ID NO: 125666 - DNA, 80 bp, synthetic construct
  source 1..80: mol_type = other DNA
cacctggatgaacgctacggggtttgtcaagacatgcggcgcgccaccgtgtaatatcgggcccacaggcaacaaatctc

SEQ ID NO: 125667 - DNA, 80 bp, synthetic construct
  source 1..80: mol_type = other DNA
gtttcacctgtcaacaagagatggcgaacccctcatgatagtggcaaaacacgaaagggggagacctctcttgttcaaga

SEQ ID NO: 125668 - DNA, 80 bp, synthetic construct
  source 1..80: mol_type = other DNA
ctacccttccccccgttactgatgtgttgtgacgtttcaataaataacacgtagtttattttgttggatgatggattgat

SEQ ID NO: 125669 - DNA, 80 bp, synthetic construct
  source 1..80: mol_type = other DNA
cctgtcagcaagccttttttgtttctccgattattaacagaaaacctgctacaacaacacctgtcactcggcaaaacatc

SEQ ID NO: 125670 - DNA, 80 bp, synthetic construct
  source 1..80: mol_type = other DNA
cccggacgcgtccgggttggtggggttcttgggctccttggtggttagcgggtacagggccttcatggtgttgctctgca

SEQ ID NO: 125671 - DNA, 80 bp, synthetic construct
  source 1..80: mol_type = other DNA
gcactaaggtgccagccgcctacgcagcccaggggtacaaagtacttgtactgaacccctctgttgctgcgaccctgggt

SEQ ID NO: 125672 - DNA, 80 bp, synthetic construct
  source 1..80: mol_type = other DNA
tgcatggtacgagcttacaccatcagagaccactgtcaggttgcgcgcgtaccttaacacccctggcctgcccgtctgtc

SEQ ID NO: 125673 - DNA, 80 bp, synthetic construct
  source 1..80: mol_type = other DNA
gtcatggatctcgcaaggaatgctgggtgcactcctgttgtggatgggaataaacgcgcgtgacaaatcaatagcactga

SEQ ID NO: 125674 - DNA, 80 bp, synthetic construct
  source 1..80: mol_type = other DNA
tctctcttccctttatgcctgtccacgacttctcaaaaaacaacatggcttccggtgttgctgggatctcttggatgcaa

SEQ ID NO: 125675 - DNA, 80 bp, synthetic construct
  source 1..80: mol_type = other DNA
aaacggattggtcgcgcagctttatcagccagagcgcgaaaaggtctacaccatggatggggagtacaaacttcggggtg

SEQ ID NO: 125676 - DNA, 80 bp, synthetic construct
  source 1..80: mol_type = other DNA
atctgcaggagatcctggcccagatgtacggaaaccaggactaccccatagaggacgaccccagcgcggatgccgcggac

SEQ ID NO: 125677 - DNA, 80 bp, synthetic construct
  source 1..80: mol_type = other DNA
cgggactcttgcgcttgcgcccctcccgcggcgcggcggaggcgacggcggccgccagcgcgtcggcggcgtccggtgcg

SEQ ID NO: 125678 - DNA, 80 bp, synthetic construct
  source 1..80: mol_type = other DNA
tactcctacttgccgtaggggtaggcatatttttactccccgctcgataaacgagcggccctaaacaacactccataaca

SEQ ID NO: 125679 - DNA, 80 bp, synthetic construct
  source 1..80: mol_type = other DNA
ggccacttaagggtcttgaaaggcttccaagaaaggagtatttccaacatgctggagcataatcaaacaaaacggggaaa

SEQ ID NO: 125680 - DNA, 80 bp, synthetic construct
  source 1..80: mol_type = other DNA
tgattaggttatgcatcatggttggagctaacgcttcagacaggatggggatgggaacaacgtacctagccctgatggct

SEQ ID NO: 125681 - DNA, 80 bp, synthetic construct
  source 1..80: mol_type = other DNA
caaagtgaggatgtttgttggcggcatcgaacaccggctagaggcagcatgcaattggaccaggggagaaccttgcggct

SEQ ID NO: 125682 - DNA, 80 bp, synthetic construct
  source 1..80: mol_type = other DNA
agtcaggtcaacttaagccatagcacggcaaaagctatgctacctgtgagccccgtctaaggacgttaaaggaagtcagg

SEQ ID NO: 125683 - DNA, 80 bp, synthetic construct
  source 1..80: mol_type = other DNA
cctggacctgcaccagattctgcggggctgacgcgcgcgctgttgggcgcgacggttcgcgaaccctttggtgggtttac

SEQ ID NO: 125684 - DNA, 80 bp, synthetic construct
  source 1..80: mol_type = other DNA
ttaaggggtgggggaagggggtgttggcgggaagcgtgggaacacggaggattctctcacgaccggcaccagtaccactc

SEQ ID NO: 125685 - DNA, 80 bp, synthetic construct
  source 1..80: mol_type = other DNA
acaaatgccatgtacagatcatggacctcgggcacatgtgtgacgccaccatgagttatgagtgccccatgctagacgag

SEQ ID NO: 125686 - DNA, 80 bp, synthetic construct
  source 1..80: mol_type = other DNA
tttggctatggggcgaaggatgttcgcagccatgccagcaaggccatacgccacatcaactccgtgtggcaagacctgct

SEQ ID NO: 125687 - DNA, 80 bp, synthetic construct
  source 1..80: mol_type = other DNA
aacgtatgtggcccagtgtactgcttcactcccagccccgtggtggtgggaacgaccgatagggcgtgcgtgcctaccta

SEQ ID NO: 125688 - DNA, 80 bp, synthetic construct
  source 1..80: mol_type = other DNA
tgagaggacttcccatccggtaccaaacctcagcagtgcacagggagcacagtggaaatgagatcgttgatgtcatgtgc

SEQ ID NO: 125689 - DNA, 80 bp, synthetic construct
  source 1..80: mol_type = other DNA
gctggggtttggggtggtggcgctgctgtgccctccggggtcaacgggcgagcggtcgtgcgattgatatatttttcaat

SEQ ID NO: 125690 - DNA, 80 bp, synthetic construct
  source 1..80: mol_type = other DNA
tcatgggcttgttggcctcctctcccctggtcccaagcagaacctcgctttaattaacaccaacggcagctggcatataa

SEQ ID NO: 125691 - DNA, 80 bp, synthetic construct
  source 1..80: mol_type = other DNA
gctgtcatcctacacccacgccttgtgttcgagctcacgaaatggttgttggcaatcttggggtctgcatacctcctcaa

SEQ ID NO: 125692 - DNA, 80 bp, synthetic construct
  source 1..80: mol_type = other DNA
gcgcggctgggaagggaggtgttgctgggacctgccgatgattataggaccatggcgtggcgtcttctcgcccccatcac

SEQ ID NO: 125693 - DNA, 80 bp, synthetic construct
  source 1..80: mol_type = other DNA
tggaggagtgggatttctcccacgtattctgttggaggtggccctggcttggctggggctcaactcacggaaccctaccc

SEQ ID NO: 125694 - DNA, 80 bp, synthetic construct
  source 1..80: mol_type = other DNA
cacggcttatgctcagcaaacacggggcctactgggcaccatcgtcacaagcctcactggcagggacaggaaccaagtgg

SEQ ID NO: 125695 - DNA, 80 bp, synthetic construct
  source 1..80: mol_type = other DNA
ctatctccaacatacattctcccggcggactgtagacatgttaccgttgtgttcataaacgtacgggaaatgcgcccgtc

SEQ ID NO: 125696 - DNA, 80 bp, synthetic construct
  source 1..80: mol_type = other DNA
ttcatggcatggccgccttttcattgcatggctactctccaactgagctcaatagggttgcagcatgcctcaggaaactt

SEQ ID NO: 125697 - DNA, 80 bp, synthetic construct
  source 1..80: mol_type = other DNA
ccaagtaccgattccggggtagaccaagggtcccccatggaagcttctgaacccgacccccccatcgcggatgaccagtc

SEQ ID NO: 125698 - DNA, 80 bp, synthetic construct
  source 1..80: mol_type = other DNA
gacttaatgtgccatgccaccttcacttcacgtctactacagccaatcagagtccccaactataatctgtatattatgga

SEQ ID NO: 125699 - DNA, 80 bp, synthetic construct
  source 1..80: mol_type = other DNA
tggattttgaccttgtgtgctctatcagaggtgactgggctctcccccgatgtgatacagtcacagtcctacttctcttt

SEQ ID NO: 125700 - DNA, 80 bp, synthetic construct
  source 1..80: mol_type = other DNA
agagacttcgttgagggggtttcgggtggaagctgggttgacattgtcttggaacatggaagctgtgtaacaacaatggc

SEQ ID NO: 125701 - DNA, 80 bp, synthetic construct
  source 1..80: mol_type = other DNA
tccccgctccaagactgggctcacagcggtctgcgcgacctggcggtagccactgaacccgtcatcttctcccggatgga

SEQ ID NO: 125702 - DNA, 80 bp, synthetic construct
  source 1..80: mol_type = other DNA
agagcgacgctgccgcccaagtgacgagtttgctcagctctatgaccgtcaccgcgctcttacgcaggctgcaccagtgg

SEQ ID NO: 125703 - DNA, 80 bp, synthetic construct
  source 1..80: mol_type = other DNA
ggcacttagcgcaaagagccgggggattagcgtaaggatgatggtggttccctccgtgatcgagtaaaccatgttaagga

SEQ ID NO: 125704 - DNA, 80 bp, synthetic construct
  source 1..80: mol_type = other DNA
ttcccgagagcgatgctgcggcaagggtcaccgcattgctgagttctctaactgtcacaagtctgctccggcggttacac

SEQ ID NO: 125705 - DNA, 80 bp, synthetic construct
  source 1..80: mol_type = other DNA
caagatcaggatgttcgtaggtgggatagaacataggttcgaagctgcctgcaactggacgcggggcgagccctgcgctc

SEQ ID NO: 125706 - DNA, 80 bp, synthetic construct
  source 1..80: mol_type = other DNA
gtaatactgctcaaagtgcaaaaagaaaatcaacaaataaccttcagccaacacaattgtatgttagaccttttactaat

SEQ ID NO: 125707 - DNA, 80 bp, synthetic construct
  source 1..80: mol_type = other DNA
tgacattgatatgctaattgacctcggcctggacctctccgacagcgatctggacgaggacccacccgagccggcggaga

SEQ ID NO: 125708 - DNA, 80 bp, synthetic construct
  source 1..80: mol_type = other DNA
gcgtcgcgattgtcgggagggtcgtcctatcaggccaacctgccgtcatcccagaccgagaggtgctctaccagcagttt

SEQ ID NO: 125709 - DNA, 80 bp, synthetic construct
  source 1..80: mol_type = other DNA
ggtctcgtagaccgtgcaccatgagcacaaatcctaaacctcaaagaaaaaccaaaagaaacaccaaccgtcgcccagaa

SEQ ID NO: 125710 - DNA, 80 bp, synthetic construct
  source 1..80: mol_type = other DNA
tcgaagcccatcaagtggcaccccgcgttttgaacttccaagcatcgtggggtgcccttgatggagggcaattttttaag

SEQ ID NO: 125711 - DNA, 80 bp, synthetic construct
  source 1..80: mol_type = other DNA
gggattgaaatgcctcaacctagatgtgtacagaatactcctgctcatgataggtgtggggagcctgctcagggaaagaa

SEQ ID NO: 125712 - DNA, 80 bp, synthetic construct
  source 1..80: mol_type = other DNA
tgtgatgctgccaccacgcttatagccaccgcggcttttaaggccgtggctaccaggctacaggtggtgacaccaatgac

SEQ ID NO: 125713 - DNA, 80 bp, synthetic construct
  source 1..80: mol_type = other DNA
tggcgcgagcgacctctacttggtcaccaggaatgcagatgttatacctgccaggcgcagaggggacacccgggcaggct

SEQ ID NO: 125714 - DNA, 80 bp, synthetic construct
  source 1..80: mol_type = other DNA
ggactacctggagatcgaggtgggggggcgacggctgttcttcgtcaaggctcacgtgcgagagagcctcctcagcatcc

SEQ ID NO: 125715 - DNA, 80 bp, synthetic construct
  source 1..80: mol_type = other DNA
tgctcggcaggcacaaccggttactcagggctgccaggaccacagacagtccccctcgggatggactccatgacggtccc

SEQ ID NO: 125716 - DNA, 80 bp, synthetic construct
  source 1..80: mol_type = other DNA
cctgccagggaatccagctgtggcctccctcatggcattcaccgcgtccgtcacgagcccattgcagacttccacgaccc

SEQ ID NO: 125717 - DNA, 80 bp, synthetic construct
  source 1..80: mol_type = other DNA
acgtggtggaaagcttggtggataaaatgaatcgttggaagacctacgcccaggagcagcgggagtgggaggacagtcag

SEQ ID NO: 125718 - DNA, 80 bp, synthetic construct
  source 1..80: mol_type = other DNA
gtgtacccggaccttggggtgcgggtgtgcgagaagatagcgctgtatgacatcacacgcaaactgcccacggcggttat

SEQ ID NO: 125719 - DNA, 80 bp, synthetic construct
  source 1..80: mol_type = other DNA
ggctgtagaggaccctcggttctgggaaatggtggacgaagaaagggagaaccatctgaaaggagagtgccacacatgca

SEQ ID NO: 125720 - DNA, 80 bp, synthetic construct
  source 1..80: mol_type = other DNA
aacaaagttcaatactaaggcagatggcctggaccaggggaccaaaccatgaggacccctttggaacaatgataccacac

SEQ ID NO: 125721 - DNA, 80 bp, synthetic construct
  source 1..80: mol_type = other DNA
catggtccagtcccggaaacacgaactggaggaacagggaagccctggttgagtttgaagaggcacatgccacgaagcaa

SEQ ID NO: 125722 - DNA, 80 bp, synthetic construct
  source 1..80: mol_type = other DNA
ctccacttatggcaagttcatcgcggatggaggctgttcagccggcgcctatgacgtcatcatatgcgatgaatgccatt

SEQ ID NO: 125723 - DNA, 80 bp, synthetic construct
  source 1..80: mol_type = other DNA
gagcgccctccaccttcagcctcaagcagcgaatcatgattgcaaaaattcaggttcctcacagacctgtataagattca

SEQ ID NO: 125724 - DNA, 80 bp, synthetic construct
  source 1..80: mol_type = other DNA
ttgtggagtgagttacaaagttatgaaaacctccgacgcttgctggagttggcttctgccagaacttccagctgttggag

SEQ ID NO: 125725 - DNA, 80 bp, synthetic construct
  source 1..80: mol_type = other DNA
tggagttcctggcccccgagctggtgcgggcggtggcgcgcctgcggtttcgggagtgcgcgccggaggacgccgtgccc

SEQ ID NO: 125726 - DNA, 80 bp, synthetic construct
  source 1..80: mol_type = other DNA
tcgggaaccattccctatttggacggtacattttatcttaatcatactttcaaaaaggtgtcaattatgtttgactcctc

SEQ ID NO: 125727 - DNA, 80 bp, synthetic construct
  source 1..80: mol_type = other DNA
agtgtcgcggcgcgcttctacccgtgtttgcccataataaacctctgaaccaaactttgggtctcattgtgattcttgtc

SEQ ID NO: 125728 - DNA, 80 bp, synthetic construct
  source 1..80: mol_type = other DNA
tccgggccgtgaccacccacgaccccagccccgcggccagcacggagcagccctcgcccctgggtcgggatgcggtggaa

SEQ ID NO: 125729 - DNA, 80 bp, synthetic construct
  source 1..80: mol_type = other DNA
cgatgttgcgagatcctgctcacatcaccgccgccacagcggcccggcgccttgcgcgcggttcacctccatcggaagct

SEQ ID NO: 125730 - DNA, 80 bp, synthetic construct
  source 1..80: mol_type = other DNA
cagtaagaccatctgcggcccgaagggacccgtcaaccagatgtacaccaatgttgaccaagacctagttggttggcccg

SEQ ID NO: 125731 - DNA, 80 bp, synthetic construct
  source 1..80: mol_type = other DNA
gactgggaggggtaggttgggcatctacaggttcgtctccgcgagtgagagaccatcgggcatgttcgattccgtagtgc

SEQ ID NO: 125732 - DNA, 80 bp, synthetic construct
  source 1..80: mol_type = other DNA
catcgggggcggggcgggaatggcggcgcgctgcgcgatgtcccgcgtgtgctggtcgaagacaggcatggactctagca

SEQ ID NO: 125733 - DNA, 80 bp, synthetic construct
  source 1..80: mol_type = other DNA
catgaaatcagttggaacaggaaggagaggaacggggtcacaaggcgaaaccttaggagaaaagtggaaaaagaaattaa

SEQ ID NO: 125734 - DNA, 80 bp, synthetic construct
  source 1..80: mol_type = other DNA
gacaacatcactggcccatctgaggacaggccttattgctggcactacgcacctaggccttgcgccgtcgttcctgcggg

SEQ ID NO: 125735 - DNA, 80 bp, synthetic construct
  source 1..80: mol_type = other DNA
cagaaagcgcacgagcgacagggtgttgcaatacgaccccagcagggcgtcgaactcgacgtcgtacaggctgtttgcat

SEQ ID NO: 125736 - DNA, 80 bp, synthetic construct
  source 1..80: mol_type = other DNA
aaatacttaagctttccaaggtccccgttcccgtagccttagaaaaggttggtattggtaattccacacaactgaggggt

SEQ ID NO: 125737 - DNA, 80 bp, synthetic construct
  source 1..80: mol_type = other DNA
atgagtccaacgtcgccggggctctggctaagctggcggagaagacattcggtaggcccgagccggaaaccgattccggg

SEQ ID NO: 125738 - DNA, 80 bp, synthetic construct
  source 1..80: mol_type = other DNA
aacgggcggcaaactttctccacgtcctaaagggtatatcggtgttcacctttttaccctgacccacaatcttcatcttg

SEQ ID NO: 125739 - DNA, 80 bp, synthetic construct
  source 1..80: mol_type = other DNA
cactcttccatggggccggttctaagacccttgctggccccaaaggcccggtagtgcagatgtacaccaatgtagacaaa

SEQ ID NO: 125740 - DNA, 80 bp, synthetic construct
  source 1..80: mol_type = other DNA
gttgctggagactgaatatgtgtttgattttcctgaaccttctgaggcttctgaagaaatatcgcttcatgatctttttg

SEQ ID NO: 125741 - DNA, 80 bp, synthetic construct
  source 1..80: mol_type = other DNA
accattgaaggtttagtaattggaactgatgaaaaagctgaggatggcaaaaaagatatttttgcaaataaactttatca

SEQ ID NO: 125742 - DNA, 80 bp, synthetic construct
  source 1..80: mol_type = other DNA
tagaaactctcctggtgagatatggtcaatttgccagttgggtcctgatcttgaacccttatcttggtcatttagctgag

SEQ ID NO: 125743 - DNA, 80 bp, synthetic construct
  source 1..80: mol_type = other DNA
cctggactttgactattgcccaggaacaacagttactgtcacagaacattgtggaaacaggggagcgtcactgcgcacaa

SEQ ID NO: 125744 - DNA, 80 bp, synthetic construct
  source 1..80: mol_type = other DNA
acggcctccgctgcccagcgacgcgggcgggtcggtaggcaaggcggtcgaacagatgaatacatatactctggacagtg

SEQ ID NO: 125745 - DNA, 80 bp, synthetic construct
  source 1..80: mol_type = other DNA
tacacaccatggacggggaataccgacttagaggagaggagaggaaaaacttcctggaattgttgagaactgcagacttg

SEQ ID NO: 125746 - DNA, 80 bp, synthetic construct
  source 1..80: mol_type = other DNA
acgccggggctcccagtatgtcaagaccaccttgagttttgggagggtgtgttcaccgggctcactcacattgatgctca

SEQ ID NO: 125747 - DNA, 80 bp, synthetic construct
  source 1..80: mol_type = other DNA
aggacaacgtggagggggtccttagggagatggcggacaaggtgctcagtccttcccaagaccacaatgactccggtcac

SEQ ID NO: 125748 - DNA, 80 bp, synthetic construct
  source 1..80: mol_type = other DNA
actgggttaacaaagcttaacagccccagcggcccaaaccatggagtgcgtgaccatggcgtaaggactagaggttagag

SEQ ID NO: 125749 - DNA, 80 bp, synthetic construct
  source 1..80: mol_type = other DNA
ccgcctcgggacgcatcagcagcgcgccgagtttgtcggtgacggccgggaagcatagcgcgtactgcagcggcgttccg

SEQ ID NO: 125750 - DNA, 80 bp, synthetic construct
  source 1..80: mol_type = other DNA
ccttttaatgagctgtgtgatgaccccgtgttccaacctcagaataatttaaaaaacacggtgattttcttagtaataat

SEQ ID NO: 125751 - DNA, 80 bp, synthetic construct
  source 1..80: mol_type = other DNA
ataaaggctaatctgctatggagacagtgcatgggaggcaatatcacgcgagtagaggctgagaacaaggtcgagatcct

SEQ ID NO: 125752 - DNA, 80 bp, synthetic construct
  source 1..80: mol_type = other DNA
ggcggcgtggcgcaggactcgcagccccccgggtggttggtgatcctggccaggagccatcccagatggcgggccctgct

SEQ ID NO: 125753 - DNA, 80 bp, synthetic construct
  source 1..80: mol_type = other DNA
cggtggtcctcaccgaatcaaacctacctactgccttggccgagcttgccaccaaaagttttggcagctcctcaacttcc

SEQ ID NO: 125754 - DNA, 80 bp, synthetic construct
  source 1..80: mol_type = other DNA
gggggcccatgtacaactctaagggccagctctgtggtcagcgcaggtgccgagctagcggagtgctcccgactagcttg

SEQ ID NO: 125755 - DNA, 80 bp, synthetic construct
  source 1..80: mol_type = other DNA
ctgtatacggccccccggtaaaagtactccttaaccgcgccctcgatcgcccgacgggcctgggtccgcacctcctccag

SEQ ID NO: 125756 - DNA, 80 bp, synthetic construct
  source 1..80: mol_type = other DNA
tatgacgcggggtgtgcatggtacgaactcacccccgccgagaccactgtgaggctacgagcttacctgaatacccccgg

SEQ ID NO: 125757 - DNA, 80 bp, synthetic construct
  source 1..80: mol_type = other DNA
cggaatcgctggggtgaccgggtcctttcttggaataacccgctcaatacccagaaatttgggcgtgcccccgcgagatc

SEQ ID NO: 125758 - DNA, 80 bp, synthetic construct
  source 1..80: mol_type = other DNA
gggtcttgatgtgtccgtcataccgaccagcggagacgtcgttgtcgtggcaacagacgctctaatgacgggctataccg

SEQ ID NO: 125759 - DNA, 80 bp, synthetic construct
  source 1..80: mol_type = other DNA
tctcttgcccgattatgtagatgatgatggcgtctaagactggccgtacagtatattacaatgtgggcaggagatcgcgg

SEQ ID NO: 125760 - DNA, 80 bp, synthetic construct
  source 1..80: mol_type = other DNA
gctgctttgcctactcctactgacggtaggggtaggcatctttctcctgccagcacggtgagctggtaggataacactcc

SEQ ID NO: 125761 - DNA, 80 bp, synthetic construct
  source 1..80: mol_type = other DNA
tgcaaaccacctgcccatgtggagcacaaatcgctggacatgtcaaaaacggttccatgaagatcgttgggcctaaaacc

SEQ ID NO: 125762 - DNA, 80 bp, synthetic construct
  source 1..80: mol_type = other DNA
atggcacaaatggtcattgtctcgccgcagaagcacaattttgttcaggactgcaattgttccatctatccaggccacgt

SEQ ID NO: 125763 - DNA, 80 bp, synthetic construct
  source 1..80: mol_type = other DNA
aacatcagtggtcccgctgtggaaaagccttactgctggcactacccgcctagaccatgtgaggttgtgtcagctcttaa

SEQ ID NO: 125764 - DNA, 80 bp, synthetic construct
  source 1..80: mol_type = other DNA
cgagccaaactaccatagggcactgtggagggtttctgcggaggattacgttgaggtcgttcgtgtgggagatcatcatt

SEQ ID NO: 125765 - DNA, 80 bp, synthetic construct
  source 1..80: mol_type = other DNA
ggatacaatatctggcgggactatcgacgttgcctggtaatcctgccattgcatcgctgatggctttcacagccgccgtc

SEQ ID NO: 125766 - DNA, 80 bp, synthetic construct
  source 1..80: mol_type = other DNA
ggcccgggcgctgcagaaagttgtaaaaggagataagcccgctaaatatgagccgcgacaggaacctgtaggcaaactcc

SEQ ID NO: 125767 - DNA, 80 bp, synthetic construct
  source 1..80: mol_type = other DNA
ttggcgttgtctgcgctgcgattctgcgtcggcatgtgggtcccggcgagggagcggtgcaatggatgaaccgcttaata

SEQ ID NO: 125768 - DNA, 80 bp, synthetic construct
  source 1..80: mol_type = other DNA
tgtagtagcgctgaaaagcgtcccctcccccggctcacagagctgctcttcggtgtagttgggtatactggtgcgcctca

SEQ ID NO: 125769 - DNA, 80 bp, synthetic construct
  source 1..80: mol_type = other DNA
gggttgtttccacccatccggcatctagttaatcaaatgcacgtcgacggtgtgtttgggtccctctccgtcgtcattac

SEQ ID NO: 125770 - DNA, 80 bp, synthetic construct
  source 1..80: mol_type = other DNA
tatcgtgtctcacagttcccgcctctgcttacaattatgccaatgtttctggcttgtaccaccttaccaatgactgccca

SEQ ID NO: 125771 - DNA, 80 bp, synthetic construct
  source 1..80: mol_type = other DNA
gactcctgccgtgcctgcacgttgccgcgacggtgacgaccatcggccgcgagatgctgctcgcgacccgcgagtacgtc

SEQ ID NO: 125772 - DNA, 80 bp, synthetic construct
  source 1..80: mol_type = other DNA
cccgttgtaatacagcacgttgaggtcggggagctccccgggcgtccggtggtcggggttgaggtcccggatgccccgtg

SEQ ID NO: 125773 - DNA, 80 bp, synthetic construct
  source 1..80: mol_type = other DNA
gcatagaaaaggctacgtcttttactaaaatgcaaatgaactgaaataaacatgttacacagtgtattaataaaaacatt

SEQ ID NO: 125774 - DNA, 80 bp, synthetic construct
  source 1..80: mol_type = other DNA
gacaggcccgcagacgcggctaacacacacgccggcaacccagaccccagtgggttggttgcgcggtcccgtctcctggc

SEQ ID NO: 125775 - DNA, 80 bp, synthetic construct
  source 1..80: mol_type = other DNA
tctcagcgacctcactgtgacccagctcctgaggcgattacaccagtggataagctcggagagcactaccccatgtgccg

SEQ ID NO: 125776 - DNA, 80 bp, synthetic construct
  source 1..80: mol_type = other DNA
attacacaaaagcttcctcaggcggtaatgggagcttcctatggcttccagtactcccctgcccaacgggtggagtatct

SEQ ID NO: 125777 - DNA, 80 bp, synthetic construct
  source 1..80: mol_type = other DNA
gctatgattaatgtctaatggaacagctgacacagctcggctgcgacatttagaacattgtcgccgacttcgctgctttg

SEQ ID NO: 125778 - DNA, 80 bp, synthetic construct
  source 1..80: mol_type = other DNA
ttttggagctgcaatacacaggaacagatggaccttgcaaggttcccatctccacagtagcatccttgaacgatctcacc

SEQ ID NO: 125779 - DNA, 80 bp, synthetic construct
  source 1..80: mol_type = other DNA
atggtgctgatgacacacttctttggaatactccaatcccaagaaacactccacagggtacttgacttcgacatgtacgg

SEQ ID NO: 125780 - DNA, 80 bp, synthetic construct
  source 1..80: mol_type = other DNA
atagggtggctgcatgcctcaggaaacttggggtcccgcccttgcgagcttggagacaccgggcccggaatgtccgcgct

SEQ ID NO: 125781 - DNA, 80 bp, synthetic construct
  source 1..80: mol_type = other DNA
tcaccaatgaagttcacacttggacagagcaatacaaatttcaagctgattccccaaggagactatcagcagccattggg

SEQ ID NO: 125782 - DNA, 80 bp, synthetic construct
  source 1..80: mol_type = other DNA
ccggtacccacacggtgggtgcggtagcaggctcgaacacccggggccttgcgggcctcttcgaccatgggccgtctcag

SEQ ID NO: 125783 - DNA, 80 bp, synthetic construct
  source 1..80: mol_type = other DNA
ccaaaagttttttgccattaaaaacctcctcctcctgccaggctcatacacatatgaatggaacttcaggaaggatgtta

SEQ ID NO: 125784 - DNA, 80 bp, synthetic construct
  source 1..80: mol_type = other DNA
gctcctcgaacgtctccgtggcccacgatgcaaccggacagagatattactacctcacacgtgacccaaccactcctctc

SEQ ID NO: 125785 - DNA, 80 bp, synthetic construct
  source 1..80: mol_type = other DNA
aggatgatcttcagaatgaggccaaaatcactgacatcatggaacctgaacatgccctattggccacgtcaatctttaag

SEQ ID NO: 125786 - DNA, 80 bp, synthetic construct
  source 1..80: mol_type = other DNA
catgatccagacatgattatgtatgctgaaaacgtgaatctggaaactccagatactcacatagtttacaagcctggcaa

SEQ ID NO: 125787 - DNA, 80 bp, synthetic construct
  source 1..80: mol_type = other DNA
gatccgctcgtggcggaggaggatgatcgggaggtctccgtgcccgcagaaatgctgcggaagtctcggagatttgctcc

SEQ ID NO: 125788 - DNA, 80 bp, synthetic construct
  source 1..80: mol_type = other DNA
accgctccgatccccgggtggaggggggaaggaaatgggagcggaggtgccgtggacgggtataaaggccagaggagcag

SEQ ID NO: 125789 - DNA, 80 bp, synthetic construct
  source 1..80: mol_type = other DNA
ccatattgacgcccactttctctcgcagacaaagcagtcgggagaaaactttgcgtatcttgtcgcctaccaagcgactg

SEQ ID NO: 125790 - DNA, 80 bp, synthetic construct
  source 1..80: mol_type = other DNA
ttgtaggcggtaacaggcgcggatcagcaccgccagggcgctacgaccggtgcgttgcacgtagcgtcgcgacagaactg

SEQ ID NO: 125791 - DNA, 80 bp, synthetic construct
  source 1..80: mol_type = other DNA
cctgctcacgtgcctccttcacccatccctggggtttgagatcaccaaagtcctgttggcaatcatggggccgctgtaca

SEQ ID NO: 125792 - DNA, 80 bp, synthetic construct
  source 1..80: mol_type = other DNA
ctccttgacaacatcaacacacccgaagggataataccagcaatgttcggtcctgagagggaaaaaactgatgccataga

SEQ ID NO: 125793 - DNA, 80 bp, synthetic construct
  source 1..80: mol_type = other DNA
gtccattggcacccattatcttcatgttgttgcagatgaaacgcgccagaccgtctgaagacaccttcaaccctgtgtac

SEQ ID NO: 125794 - DNA, 80 bp, synthetic construct
  source 1..80: mol_type = other DNA
cattttcatggagctggcctagcaatcaaacatacattggtcaaacatttgccactaattcctacaccttctcctacatt

SEQ ID NO: 125795 - DNA, 80 bp, synthetic construct
  source 1..80: mol_type = other DNA
gcgctgcatggtgacgcccgttcggtcgggacccgccggtcggagttatgccgcgtccagggccatcggggcgcttttta

SEQ ID NO: 125796 - DNA, 80 bp, synthetic construct
  source 1..80: mol_type = other DNA
ctgcggtgtgcgcggccgtttagcgtcgggacgattaaggacgtctctgggtccggcgcgtcctcggcgggagagtacac

SEQ ID NO: 125797 - DNA, 80 bp, synthetic construct
  source 1..80: mol_type = other DNA
cacccccctctggtttttgagatcaccaaacacttacttgccttactgggccctctatacatacttcaggcctctctctt

SEQ ID NO: 125798 - DNA, 80 bp, synthetic construct
  source 1..80: mol_type = other DNA
ggcacgggcgttatgacaacaagatgcccctgtggggcttacatatcaggccacgtccggcttggcactatgaggattac

SEQ ID NO: 125799 - DNA, 80 bp, synthetic construct
  source 1..80: mol_type = other DNA
tctggatgatgctactgatttctcaggcagaggcggcgatggagaacttggtaatgttgaatgccctcagcgctgcggga

SEQ ID NO: 125800 - DNA, 80 bp, synthetic construct
  source 1..80: mol_type = other DNA
cgataggctgcaagccttagatgcccactacaccactgtggtggctgagatgaaggagaaagcttcttcagtgaaggcag

SEQ ID NO: 125801 - DNA, 80 bp, synthetic construct
  source 1..80: mol_type = other DNA
ggtgtcccgcagtcaacgcaggggccgcacgggccgtggtaggcaaggtatataccgatttgtcaccccggtggagcgac

SEQ ID NO: 125802 - DNA, 80 bp, synthetic construct
  source 1..80: mol_type = other DNA
ctgttgctgtttgccggcgtcgatgcgtcaacctataccaccgggggaaccattgctcgggccacgtccacattcaccaa

SEQ ID NO: 125803 - DNA, 80 bp, synthetic construct
  source 1..80: mol_type = other DNA
tgtggaaaacactgatacaaacgatggcaaacttactttagtattagtaaaaaacggagggcttgttaatggctacgtat

SEQ ID NO: 125804 - DNA, 80 bp, synthetic construct
  source 1..80: mol_type = other DNA
tggtgcttcaccccagcgtaggtttccacgtaggcagccaggaatcgacccatgagctctgtaaaggttttctgggtggt

SEQ ID NO: 125805 - DNA, 80 bp, synthetic construct
  source 1..80: mol_type = other DNA
agtggcgtactgcctaccagcttcggcaatacagtaacttgctacatcaaggcaactgcggctgctaaagcggcaggcct

SEQ ID NO: 125806 - DNA, 80 bp, synthetic construct
  source 1..80: mol_type = other DNA
tggaggaagcttgtgatctcacgcccccccactctgcaaggtcaaagtttggctacggggcaaaagatgttcgcagccat

SEQ ID NO: 125807 - DNA, 80 bp, synthetic construct
  source 1..80: mol_type = other DNA
ggtggcgcggcgggccgggctccggccagccccggcacggccgccaggtcgccgtcgaagccctccgccagcgcctccag

SEQ ID NO: 125808 - DNA, 80 bp, synthetic construct
  source 1..80: mol_type = other DNA
gaagctcgatgccttcggacggacacgcgcgagcgtacacgtatcccaggggcccggtgtggaccttgatggtggttgcc

SEQ ID NO: 125809 - DNA, 80 bp, synthetic construct
  source 1..80: mol_type = other DNA
tatgacaccagttgctttgattcaactgtcactgaacaggacatcagggtggaagaggagatataccaatgctgtaacct

SEQ ID NO: 125810 - DNA, 80 bp, synthetic construct
  source 1..80: mol_type = other DNA
ggtcatcgactcggactctaagtcgtggtctacagtctccgatcaagaggattctgttatctgctgctccatgtcatact

SEQ ID NO: 125811 - DNA, 80 bp, synthetic construct
  source 1..80: mol_type = other DNA
tggtgagctccttaaccggtctccgacctgacggagttttccagcttggaggtgccggccgctcctccttcactcctcgc

SEQ ID NO: 125812 - DNA, 80 bp, synthetic construct
  source 1..80: mol_type = other DNA
gcgtccgggttttggaagacggcgtgaactatgcaacagggaaccttcctggttgctctttctctattttccttctggcc

SEQ ID NO: 125813 - DNA, 80 bp, synthetic construct
  source 1..80: mol_type = other DNA
ccctgacctatttcgatcagggctggggccccattagctacgctaatgtgagcgggagctcggaagataagccctactgc

SEQ ID NO: 125814 - DNA, 80 bp, synthetic construct
  source 1..80: mol_type = other DNA
gaaccgaggacaggccttgacttttcagatttgtattacttgactatgaataacaagcactggttggtccacaaggagtg

SEQ ID NO: 125815 - DNA, 80 bp, synthetic construct
  source 1..80: mol_type = other DNA
aggtgcaaactgcggtggactttggtaacagttacatcgctgagatggaaacagagagctggatagtggacagacagtgg

SEQ ID NO: 125816 - DNA, 80 bp, synthetic construct
  source 1..80: mol_type = other DNA
ggtgtgtgggctggtactggcatcatgaccacgcggtgcccgtgcggggctaacatctctggccatgtccgcctaggcac

SEQ ID NO: 125817 - DNA, 80 bp, synthetic construct
  source 1..80: mol_type = other DNA
gccgggccgccacgggtgccggccgttggcggtaaccccgattgtttatctcaggccccgggccgggaacccggaaaagc

SEQ ID NO: 125818 - DNA, 80 bp, synthetic construct
  source 1..80: mol_type = other DNA
aacggctcggactacggctcctgcgatccggcgcagcttcccttttcggccccgcgcctgggaccctcgagcgtatacac

SEQ ID NO: 125819 - DNA, 80 bp, synthetic construct
  source 1..80: mol_type = other DNA
acccagcaaaccctccttttcaacatattaggggggtgggtcgcctcgcagatcgcgactcccaccgcttccacggcttt

SEQ ID NO: 125820 - DNA, 80 bp, synthetic construct
  source 1..80: mol_type = other DNA
cacaaagaagtcgaacgcggggtgcagctcaagagccaggttggcgttgtcgggctgcataaactgctccggggtcatct

SEQ ID NO: 125821 - DNA, 80 bp, synthetic construct
  source 1..80: mol_type = other DNA
atcatcgggggagttgtgatcattgccgcgttggtcctcgtgccctcgcgggcctcgtgggcactttccccatgcgacag

SEQ ID NO: 125822 - DNA, 80 bp, synthetic construct
  source 1..80: mol_type = other DNA
cggatcaagtgcacatggaggaacaattgatgttagaattggagatggaggaggactatcttttgatgaaaagggagatt

SEQ ID NO: 125823 - DNA, 80 bp, synthetic construct
  source 1..80: mol_type = other DNA
gatgaccttgcccagctcctgcagggcgcgcccgctggtggaatggtccccggccgtcccttcggcgtgcagcaggcccc

SEQ ID NO: 125824 - DNA, 80 bp, synthetic construct
  source 1..80: mol_type = other DNA
ccgttggcgaccgcggcgaacgtcgcgggcagcacctcgccgtggacgctgacccgcagcatcttctcgagctccccgcg

SEQ ID NO: 125825 - DNA, 80 bp, synthetic construct
  source 1..80: mol_type = other DNA
taagactctcaagtttgatgccctgtcaggctcccaggaagtcgagttcactgggtatggaaaagctacactggaatgcc

SEQ ID NO: 125826 - DNA, 80 bp, synthetic construct
  source 1..80: mol_type = other DNA
tacttaccgtgggggtaggcatctttttgctccccgcccggtaaacgggcggcccaagcaacactccactttctcttttt

SEQ ID NO: 125827 - DNA, 80 bp, synthetic construct
  source 1..80: mol_type = other DNA
agtcagtacaactattgagaccactacccacactacacagttagacactacagtgcagaatagcactgtgttggttaggt

SEQ ID NO: 125828 - DNA, 80 bp, synthetic construct
  source 1..80: mol_type = other DNA
ataaaagctaaactcttgcaatactctggaccttgtcgtcatcaactcaacgagaccgtctacctcaccaaccagactga

SEQ ID NO: 125829 - DNA, 80 bp, synthetic construct
  source 1..80: mol_type = other DNA
tgggggagcagtggaaggaaaagttgaatgctatgagcagggatgaattcttcaaatacagaagagaggccataattgag

SEQ ID NO: 125830 - DNA, 80 bp, synthetic construct
  source 1..80: mol_type = other DNA
cccctccgggatgttcgactcttcggtcctgtgtgagtgctacgatgcgggatgcgcgtggtacgaactcactccttctg

SEQ ID NO: 125831 - DNA, 80 bp, synthetic construct
  source 1..80: mol_type = other DNA
tggtgttgccttgccttcttctgctgtgcgtggtacatcaaaggtagacttgtcccttctgtgacgtacggcttgctgca

SEQ ID NO: 125832 - DNA, 80 bp, synthetic construct
  source 1..80: mol_type = other DNA
tgggagtggtgtcactggtaggggctacacccacctctttggtagtgggtgtttggctggctgcatttcacttggccatc

SEQ ID NO: 125833 - DNA, 80 bp, synthetic construct
  source 1..80: mol_type = other DNA
acaataacgtagaacttcggttttttgacacagccaacaatgcagccactcctcaagttgtgttttacactgaagatgta

SEQ ID NO: 125834 - DNA, 80 bp, synthetic construct
  source 1..80: mol_type = other DNA
ggcaccaaagcaagtcagggtgaccttcagactgacaaccctactatatctggtaccatcaaatcatatgagtcctcttt

SEQ ID NO: 125835 - DNA, 80 bp, synthetic construct
  source 1..80: mol_type = other DNA
aaagctattggttttatgcctaatttggtagcctatccaaaacctaccactggctctaaaaaatatgcaagagatatagt

SEQ ID NO: 125836 - DNA, 80 bp, synthetic construct
  source 1..80: mol_type = other DNA
cgtcctgaacgctgtatccgccgccagcaatgagggagtgctttacggactggtcttcatctgcctcgcgtggcatgtcc

SEQ ID NO: 125837 - DNA, 80 bp, synthetic construct
  source 1..80: mol_type = other DNA
ggtactccgccaccgagggacctgagcgagtccgcatcgaccggatcggaaaacctctcgagaaaggcgtctaaccagtc

SEQ ID NO: 125838 - DNA, 80 bp, synthetic construct
  source 1..80: mol_type = other DNA
ctaggaagaatggaaaaaaggacctggaagggaccccaatacgaggaagatgtaaacttgggaagtggaaccagggcggt

SEQ ID NO: 125839 - DNA, 80 bp, synthetic construct
  source 1..80: mol_type = other DNA
ctcctcgggaggccccattatgtgcccttcggggcacgttgtgggactcttccgagctgccgtatgcacaaggtgtgtag

SEQ ID NO: 125840 - DNA, 80 bp, synthetic construct
  source 1..80: mol_type = other DNA
tgcaataatagcagccaatgaaatgggattgttggaaactacaaagagagatttaggaatgtctaaggagccaggtgttg

SEQ ID NO: 125841 - DNA, 80 bp, synthetic construct
  source 1..80: mol_type = other DNA
tggtttcatatgggctgctaccatatttctacccgggtgtggtgtttgatgtgaccaagtggctcctagcgttgcttggg

SEQ ID NO: 125842 - DNA, 80 bp, synthetic construct
  source 1..80: mol_type = other DNA
tagaggagaccccttgccgttaacgcaaacaacagcatattgacacctggaaagacaggagatcccctgctttttcaaca

SEQ ID NO: 125843 - DNA, 80 bp, synthetic construct
  source 1..80: mol_type = other DNA
cgaactacaacctgttcgtgatggatgaggcccattttacggatccggctagtatagctgctagggggtacatctcaaca

SEQ ID NO: 125844 - DNA, 80 bp, synthetic construct
  source 1..80: mol_type = other DNA
aaacctcccaagtatcctccagcccttcccatctgggctaggccagactacaatcctccactactggaccgctggaaagc

SEQ ID NO: 125845 - DNA, 80 bp, synthetic construct
  source 1..80: mol_type = other DNA
atcgcccggagcattggtagtggaggtggtatgcgcggcgattttgcgccgccacgtgggcccgggcgaaggtgctgtgc

SEQ ID NO: 125846 - DNA, 80 bp, synthetic construct
  source 1..80: mol_type = other DNA
tgcgtccaccatgggtgaagctcacaacgaaaagcgttccgatccagcatttgtctgcaagcaaggtgttgtggatagag

SEQ ID NO: 125847 - DNA, 80 bp, synthetic construct
  source 1..80: mol_type = other DNA
caaagtcaagctcactccattggcccgggctggccagctggacttgtccaattggttcgtgttcggtgccggcgaggcag

SEQ ID NO: 125848 - DNA, 80 bp, synthetic construct
  source 1..80: mol_type = other DNA
gagtaaaaagcctgaaacgccgccggtgctattaaaatggaaccaagctaaatgccattattgtgtacgcctcctgtgtt

SEQ ID NO: 125849 - DNA, 80 bp, synthetic construct
  source 1..80: mol_type = other DNA
gtgtgcgcgggctaaggcccctccaccctcctgggacactatgtggaagtgcctcacacggctaaagcctatgctcacag

SEQ ID NO: 125850 - DNA, 80 bp, synthetic construct
  source 1..80: mol_type = other DNA
gttgtcatgcctctccataacgtggactttggtcaaaaacatggaaaagcctggcttgaaaagagggggagcgaaaggac

SEQ ID NO: 125851 - DNA, 80 bp, synthetic construct
  source 1..80: mol_type = other DNA
gataactgaggactgccccatcccatgcgctacctcatggttgcgcgacgtgtgggactgggtgtgtacagtgttatctg

SEQ ID NO: 125852 - DNA, 80 bp, synthetic construct
  source 1..80: mol_type = other DNA
gttgtgcgttcggccatgttgtgggccagcacctgcagcgtgagcatggcgggcccgtccactaccacgcgcccgttgtg

SEQ ID NO: 125853 - DNA, 80 bp, synthetic construct
  source 1..80: mol_type = other DNA
gatcccaagtggcccttaatgcttttctgagcacattgccagctaatgtgccgcgcgggcaggaggactatgtcagcttt

SEQ ID NO: 125854 - DNA, 80 bp, synthetic construct
  source 1..80: mol_type = other DNA
ggagggagagtgcttaaaaaaacaactcccatgaaaccatgctatggatcttatgccaggcctacaaatccttttggtgg

SEQ ID NO: 125855 - DNA, 80 bp, synthetic construct
  source 1..80: mol_type = other DNA
gtgattggtttgtaggtgtaagtcacgtgttcacaattttctggtggtgggctataaaaaggggcgggtccttggtcttc

SEQ ID NO: 125856 - DNA, 80 bp, synthetic construct
  source 1..80: mol_type = other DNA
tagctctcatagccgccttcaaaattcaaccaggctttctcgcaatgacatttcttaggggaaagtggacgaaccaagag

SEQ ID NO: 125857 - DNA, 80 bp, synthetic construct
  source 1..80: mol_type = other DNA
ttcatttttccagccttggattatttctacaaattgttggtgtaagtccactccgcacatgtggaaaagctcccacagcg

SEQ ID NO: 125858 - DNA, 80 bp, synthetic construct
  source 1..80: mol_type = other DNA
cctccccttgagggagagccaggggaccctgacctggagtttgaaccagctgaatccgctcccccttccgaggtggagtg

SEQ ID NO: 125859 - DNA, 80 bp, synthetic construct
  source 1..80: mol_type = other DNA
cttacacctggggggagaatgagtctgatgtcttccttttgaactcgaccagaccgccgcatggtgcgtggtttggatgt

SEQ ID NO: 125860 - DNA, 80 bp, synthetic construct
  source 1..80: mol_type = other DNA
cactacatggtcccacgccccttctatatcggttggggcctgtccaaaatgaaatctgtttgacacaccccgtcacaaaa

SEQ ID NO: 125861 - DNA, 80 bp, synthetic construct
  source 1..80: mol_type = other DNA
agccggctgggacacccggatcacaaaagaagacttgaaaaatgaagcaaaaataacaaagagaatggaagaaaggcata

SEQ ID NO: 125862 - DNA, 80 bp, synthetic construct
  source 1..80: mol_type = other DNA
gcgcgacatccagacagagcgcgacatctaccagtgctgccagttggagcccgcagcacggaaagccattacatcgctca

SEQ ID NO: 125863 - DNA, 80 bp, synthetic construct
  source 1..80: mol_type = other DNA
gcccctcgtatgggttccagtactcaccatcccagcgggtcgatttcttactgagggcttggcgctccaaaagaacgccc

SEQ ID NO: 125864 - DNA, 80 bp, synthetic construct
  source 1..80: mol_type = other DNA
ataacggcggaggcggcacgtcggaggctgactcgagggtccccaccctcgttagccagttcttcggccagccagctgtc

SEQ ID NO: 125865 - DNA, 80 bp, synthetic construct
  source 1..80: mol_type = other DNA
tcgggggaaccacgtttcccccacgcactacgtgccggagagcgatgcggctgcccgcgtcactgctatactcagcagcc

SEQ ID NO: 125866 - DNA, 80 bp, synthetic construct
  source 1..80: mol_type = other DNA
aattgaagcactacacagattccaactgcagtggggtggaggcctagtgcgcactcctttctcaagaaactcaacccatg

SEQ ID NO: 125867 - DNA, 80 bp, synthetic construct
  source 1..80: mol_type = other DNA
gcaccaggccttggcaggagctgttccagtgtctttctcgggcagtgtcaagctcacatctggtcatctcaagtgtcgag

SEQ ID NO: 125868 - DNA, 80 bp, synthetic construct
  source 1..80: mol_type = other DNA
ggtgatggtgtcgcgctcgcttactaaggacaaacaggtggagctgaaatatgagtgggtggagttcacgctgcccgagg

SEQ ID NO: 125869 - DNA, 80 bp, synthetic construct
  source 1..80: mol_type = other DNA
cttgggccaaagtctttgccatcctcctccttgtcgcgggagtcgatgcagcgaccacctatagctcgggcgcgcaagtg

SEQ ID NO: 125870 - DNA, 80 bp, synthetic construct
  source 1..80: mol_type = other DNA
cgaggaggatgccggtttcgacattgtcgtccgtcgcccggtcaccgtcccggcaaacggcaccacggtcgtgcagccat

SEQ ID NO: 125871 - DNA, 80 bp, synthetic construct
  source 1..80: mol_type = other DNA
ggtctcatgaaggtgtgatctcaacccgttcaccaaaattcacacccaaacttggatcagtcatgattggaacttggaac

SEQ ID NO: 125872 - DNA, 80 bp, synthetic construct
  source 1..80: mol_type = other DNA
tgacatgtatggggtaacctactccgtcactccactcgatctccctgcaatcattcaacgactccatggtatggcagctt

SEQ ID NO: 125873 - DNA, 80 bp, synthetic construct
  source 1..80: mol_type = other DNA
agacttcgtgcccgtcgagaacatggagactaccatgcggtccccggtcttcactgacaattcctctccacccgcagtcc

SEQ ID NO: 125874 - DNA, 80 bp, synthetic construct
  source 1..80: mol_type = other DNA
ggaaggaggtgatgaaggtcccttgcttgactctcgggcgagttctccattccccagtttaactagtttacccgccagtg

SEQ ID NO: 125875 - DNA, 80 bp, synthetic construct
  source 1..80: mol_type = other DNA
atggggctgaggtggtaatagatactcaagacaaggcagttattagatgctgcatgatggatatgtggcctggggtagtc

SEQ ID NO: 125876 - DNA, 80 bp, synthetic construct
  source 1..80: mol_type = other DNA
cagggaattttacaaattgacgacaccgccgctgacgtaccagtaacatatggcgaaatggttctacaggggacaaactt

SEQ ID NO: 125877 - DNA, 80 bp, synthetic construct
  source 1..80: mol_type = other DNA
cgtcggccagcgtcagttgccggcggatggtcggcaggaataccacccgcccttcgcagcgctgcagcgccgccgcatcg

SEQ ID NO: 125878 - DNA, 80 bp, synthetic construct
  source 1..80: mol_type = other DNA
cgcctgcagaccgacccggtcgagtatctgtccgagcagctcaacaacctcatcgaaaccgtctctcccaacaccgacgt

SEQ ID NO: 125879 - DNA, 80 bp, synthetic construct
  source 1..80: mol_type = other DNA
ggatcctgcgggggtgggcccgtgggtgaggaagaagcggaagcggtaggggggggcgacgtgggtgccgtgtgcacaaa

SEQ ID NO: 125880 - DNA, 80 bp, synthetic construct
  source 1..80: mol_type = other DNA
cgcgcatacatgaacacccccgggctccctgtgtgccaagaccatctggaattctgggaggcagtcttcaccggactcac

SEQ ID NO: 125881 - DNA, 80 bp, synthetic construct
  source 1..80: mol_type = other DNA
cgttcgagccgcttaaggcgggaccaagcgacgttgagccctcgacagcggcggagtgcttcaaaaaaccacctaaatat

SEQ ID NO: 125882 - DNA, 80 bp, synthetic construct
  source 1..80: mol_type = other DNA
caggtcctggcagcagccagggtacccttggcccctctatggcaatgagggctgcgggtgcgcagggtggctcctgtctc

SEQ ID NO: 125883 - DNA, 80 bp, synthetic construct
  source 1..80: mol_type = other DNA
tcccagttgccctgcgagccagagcctgatgtgtccgtactaacatcaatgttgacagatccatcccacatcacggccga

SEQ ID NO: 125884 - DNA, 80 bp, synthetic construct
  source 1..80: mol_type = other DNA
gcctcaactctttcgtggtcgggtctcagcttccttgtgaacctgagccagacaccgaggtattggcgtccatgcttaca

SEQ ID NO: 125885 - DNA, 80 bp, synthetic construct
  source 1..80: mol_type = other DNA
gttcagatacatgggcataagcccgtctctggggtggaggtagcaccactgcagagcttcatgctgcggtgtggtgttgt

SEQ ID NO: 125886 - DNA, 80 bp, synthetic construct
  source 1..80: mol_type = other DNA
accaaaacatgtggggcccccgcctgcaacattggcgggagcggaaacaactctttgcggtgccccaccgactgctttcg

SEQ ID NO: 125887 - DNA, 80 bp, synthetic construct
  source 1..80: mol_type = other DNA
cagcgcgaaagctgctgttgaggatgaggatttttggaaacttgtggacagagaacgtgaactccacaaattgggcaagt

SEQ ID NO: 125888 - DNA, 80 bp, synthetic construct
  source 1..80: mol_type = other DNA
tatggttatctcctaccaggttggcaggcggaagccttgcgggcagcccagaagaggacagcagccgggataatgaaaaa

SEQ ID NO: 125889 - DNA, 80 bp, synthetic construct
  source 1..80: mol_type = other DNA
atgtcaggcgctgaggctgggcatacccgcgtagccggcaccatggcccacgcggcctctggcctcaccagcctgttcac

SEQ ID NO: 125890 - DNA, 80 bp, synthetic construct
  source 1..80: mol_type = other DNA
gaactcgtgctcgacgcaccgtttgttgttaataaaaatggcccagctatacgagaggcgggcgtactcgcgcagcgtgc

SEQ ID NO: 125891 - DNA, 80 bp, synthetic construct
  source 1..80: mol_type = other DNA
atacttggggggtaaatgaaactgacgtgtttctgctcaccagcgcgcgcccccccaacggccaatggttcggttgcacg

SEQ ID NO: 125892 - DNA, 80 bp, synthetic construct
  source 1..80: mol_type = other DNA
cggtgtcgatgcgaccacgcacaccaccggcggcgcggcgggccacaccatgagtaccctctccggcttgttcacctcgg

SEQ ID NO: 125893 - DNA, 80 bp, synthetic construct
  source 1..80: mol_type = other DNA
agtgcttctgcccctccccgatataaggaataggttcttccattacaaccaggaaaacacccctcggatgaaacttctgg

SEQ ID NO: 125894 - DNA, 80 bp, synthetic construct
  source 1..80: mol_type = other DNA
ctcctataccgtctcggtgcggtgagcaatgaggtcacattaacacatcctgtgaccaaatacattgctacatgcatgca

SEQ ID NO: 125895 - DNA, 80 bp, synthetic construct
  source 1..80: mol_type = other DNA
tgattatcatggatgaagcacattttaccgatccagccagcatagcagccagagggtatatctcaacccgagtgggtatg

SEQ ID NO: 125896 - DNA, 80 bp, synthetic construct
  source 1..80: mol_type = other DNA
ccggccgctgagttctttactgaagtggacggggtgagattacaccgttacgcccctccgtgtaggcccctgttgaggga

SEQ ID NO: 125897 - DNA, 80 bp, synthetic construct
  source 1..80: mol_type = other DNA
tgaacccaacgactctaacagcatccttagtcatgcttctggtccattatgcaataataggtccaggattgcaggccaaa

SEQ ID NO: 125898 - DNA, 80 bp, synthetic construct
  source 1..80: mol_type = other DNA
aggtacgggagctcaaggggaaacactgggagagaaatggaaaagacagttaaaccaactgagcaaatcagaattcaaca

SEQ ID NO: 125899 - DNA, 80 bp, synthetic construct
  source 1..80: mol_type = other DNA
gtgtgagaaaaatgagacacctgcgcctcctgcctgaaactgtgcctatggacatggctgtgcttctactggatgacttt

SEQ ID NO: 125900 - DNA, 80 bp, synthetic construct
  source 1..80: mol_type = other DNA
gtgtttatgctctggggcgcacatgcccagaatgccatcaggccggaccctcgggtccattgcgtcctcaagttttcgca

SEQ ID NO: 125901 - DNA, 80 bp, synthetic construct
  source 1..80: mol_type = other DNA
gagaactgaaataactcctttggtgttgtcctatgaagaagccgatgacatattggagcatttggtggagaactttttta

SEQ ID NO: 125902 - DNA, 80 bp, synthetic construct
  source 1..80: mol_type = other DNA
gggcggggatgttttatgaagccttaaaggccgagctggtatacacgagagcagtccatggttttagacctcgggcgaat

SEQ ID NO: 125903 - DNA, 80 bp, synthetic construct
  source 1..80: mol_type = other DNA
tcattgactcggtagtcgctgacgcgcgcaactacacccccgccccctccaccgtggacgcggtcattgacagcgtggtg

SEQ ID NO: 125904 - DNA, 80 bp, synthetic construct
  source 1..80: mol_type = other DNA
agttcaacagctctggctgccccgagcgcttgtctgcctgcccgaggctggacgattttcgcatcgggtggggaaccttg

SEQ ID NO: 125905 - DNA, 80 bp, synthetic construct
  source 1..80: mol_type = other DNA
gaaggcgtggggggggggggaatcggcactgaccaagagggtccgttttgtcacgcgaaaggaaagaggaaacagaccgc

SEQ ID NO: 125906 - DNA, 80 bp, synthetic construct
  source 1..80: mol_type = other DNA
acgaagcctgaccgggcaggtgttgttttagatgcagcggccggcggacggggccaccgcggatcccgcaattttggcat

SEQ ID NO: 125907 - DNA, 80 bp, synthetic construct
  source 1..80: mol_type = other DNA
catcactgctgaggcggcaggtcgacgcctcgcacgaggctcccccccgtccttggctagttcatcagccagccaactct

SEQ ID NO: 125908 - DNA, 80 bp, synthetic construct
  source 1..80: mol_type = other DNA
ggtgaggtgcaggtcctatccacggcaacacaaacattccttggtacttgcatcaatggggtgatgtggaccgtcttcca

SEQ ID NO: 125909 - DNA, 80 bp, synthetic construct
  source 1..80: mol_type = other DNA
cactggacgatcggccgacttggaactggagagagcaaccgatgtcaaatgggaagaccaggcagagatatcaggaagca

SEQ ID NO: 125910 - DNA, 80 bp, synthetic construct
  source 1..80: mol_type = other DNA
acgctggccgtcccgaatgggtcgactccgttccgggggttccgccggcatgtagatgttatggtaggagccgctgtcat

SEQ ID NO: 125911 - DNA, 80 bp, synthetic construct
  source 1..80: mol_type = other DNA
ggggcttcaacatcccaagagacttggaatagacaagacttgctggtcacatttaagacagctcatgcaaaaaagcagga

SEQ ID NO: 125912 - DNA, 80 bp, synthetic construct
  source 1..80: mol_type = other DNA
agggaggcccaaacctacctaattatttcaccactaattttaatgtatcaggtattactaaaagctttaaccacagttac

SEQ ID NO: 125913 - DNA, 80 bp, synthetic construct
  source 1..80: mol_type = other DNA
tggaggctggcaaggactacctggagatcgaggtgggggggcgacggctgttcttcgtcaaggctcacgtgcgagagagc

SEQ ID NO: 125914 - DNA, 80 bp, synthetic construct
  source 1..80: mol_type = other DNA
atcacaatcgggcaacaaagggtgttgttcagtcagagaggccctggtctcctcatcagatcgtggtaaacgggccctgc

SEQ ID NO: 125915 - DNA, 80 bp, synthetic construct
  source 1..80: mol_type = other DNA
ttttcaccctcggggcccgtcaaaagatccagctcattaatgacaacggcacttggcacatcaatcgtacggccctgaac

SEQ ID NO: 125916 - DNA, 80 bp, synthetic construct
  source 1..80: mol_type = other DNA
gtgggagatatgtgtgaagataccgtcacctacaagtgtccactcttggtcaatgctgagccagaggacatagattgttg

SEQ ID NO: 125917 - DNA, 80 bp, synthetic construct
  source 1..80: mol_type = other DNA
tgccatcaaggacagcaaggcagttcacgctgacatggggtactggatagaaagtgaaaagaacgagacctggaagctgg

SEQ ID NO: 125918 - DNA, 80 bp, synthetic construct
  source 1..80: mol_type = other DNA
agtgctacgactccggggccgcctggtacgagctaacaccggctgagactaccgtgaggcttagggcatactttaacacc

SEQ ID NO: 125919 - DNA, 80 bp, synthetic construct
  source 1..80: mol_type = other DNA
cgatgtcattctcccaattggaacacgcagtgtggaaacagataaaggaccacttgatagggcagccattgaagagaggg

SEQ ID NO: 125920 - DNA, 80 bp, synthetic construct
  source 1..80: mol_type = other DNA
gggagggcgattcccctatcctgcatcaagggagggagacacctgattttctgccactcaaagaaaaagtgtgacgagct

SEQ ID NO: 125921 - DNA, 80 bp, synthetic construct
  source 1..80: mol_type = other DNA
gcttcggcgcgctgctgtttggcgcgcaccacggcgtccttggtatcggccaggtcctgtcgggtcacgaatgcgacgta

SEQ ID NO: 125922 - DNA, 80 bp, synthetic construct
  source 1..80: mol_type = other DNA
acagctcccatgtgagcccgaaccggatgtaacggtggtcacttccatgctcaccgacccctcccatattacagcagaaa

SEQ ID NO: 125923 - DNA, 80 bp, synthetic construct
  source 1..80: mol_type = other DNA
tctaccacaaatacaccccaagtttctgcctttgtcaataactgggataacttgggcatgtggtggttctccatagcgct

SEQ ID NO: 125924 - DNA, 80 bp, synthetic construct
  source 1..80: mol_type = other DNA
gatgacccaaaaggacatggccataatccacacaggcttgaccatttttctatcagccgccacggcaatggcggtctgga

SEQ ID NO: 125925 - DNA, 80 bp, synthetic construct
  source 1..80: mol_type = other DNA
gcccactcccctgttgtacaggcttggagccgtccaaaatgagatcaccaccacacacccaatcacaaaatacatcatga

SEQ ID NO: 125926 - DNA, 80 bp, synthetic construct
  source 1..80: mol_type = other DNA
tcatgtgaccgccgaggccgcaagacggcgcctcgcgcgcgggtctcccccgtctctcgccagctcatcagcaagtcagc

SEQ ID NO: 125927 - DNA, 80 bp, synthetic construct
  source 1..80: mol_type = other DNA
cagtgcgattgaaggcttacttatccacacccggcttgcccgtttgtcaagatcatacggaattctgggaaagcgtcttt

SEQ ID NO: 125928 - DNA, 80 bp, synthetic construct
  source 1..80: mol_type = other DNA
tcccaccatgcgggaaggtcaagcttatccagctaactatccctatcccctaattggaaagaccgctgtggaaagcataa

SEQ ID NO: 125929 - DNA, 80 bp, synthetic construct
  source 1..80: mol_type = other DNA
gcgaggcgatggggtctgccacactacgtgtccctgcggagcggacatcattggccacgtcagaaatggcactatgaggg

SEQ ID NO: 125930 - DNA, 80 bp, synthetic construct
  source 1..80: mol_type = other DNA
cagaggtacgcgtagctctctcccggaaggtattgctcgcagaccctgtgcggggcagtggaggtgctgccctccatgaa

SEQ ID NO: 125931 - DNA, 80 bp, synthetic construct
  source 1..80: mol_type = other DNA
tcactgcttgtagtcaaagggacgtatgcaactgttgataaaaatacaactaataaacaatttagcattaaactactgtt

SEQ ID NO: 125932 - DNA, 80 bp, synthetic construct
  source 1..80: mol_type = other DNA
cactttcgaccgtctccaggtggtcgacagccactaccatgcagtcctgaaggagatcaagcaacgggcatccggagtga

SEQ ID NO: 125933 - DNA, 80 bp, synthetic construct
  source 1..80: mol_type = other DNA
ggtgtatgccaccacctctcgttccgccgccactcggcagaagaaggtgaccttcgatcgcatgcaggtggtagatagtc

SEQ ID NO: 125934 - DNA, 80 bp, synthetic construct
  source 1..80: mol_type = other DNA
actgtgccagcgcctggatccgatggagaagcggctccgggtgcgtcggtgtggcgtgggcgaacagggtgttcgtgtgg

SEQ ID NO: 125935 - DNA, 80 bp, synthetic construct
  source 1..80: mol_type = other DNA
cggcgcaactcgagctccccgcaccggtagaccgaggcaaagagtgtggtggcgataatcagctcgcgaatatatcgcca

SEQ ID NO: 125936 - DNA, 80 bp, synthetic construct
  source 1..80: mol_type = other DNA
gggcgagctctgccgtcagcttggcggcatccatggcccgcgcctgccgcagcgcttcctcggccatgcgcgtggcctct

SEQ ID NO: 125937 - DNA, 80 bp, synthetic construct
  source 1..80: mol_type = other DNA
ggcttcagcgattgcaagaagagcacaaagaaacatggcattatgatcaggaaaacccatacagaacctgggcgtatcac

SEQ ID NO: 125938 - DNA, 80 bp, synthetic construct
  source 1..80: mol_type = other DNA
ggcagacaccgccgcgtgcggcgacatcatcaacggcttgcccgtctccgcccgtaggggccaggagatactcctcggac

SEQ ID NO: 125939 - DNA, 80 bp, synthetic construct
  source 1..80: mol_type = other DNA
tacgaaacgtttggagaaaacacctcgagtgcgtaagacctcatccgccattgccacccgccaggattcgcccgccacgc

SEQ ID NO: 125940 - DNA, 80 bp, synthetic construct
  source 1..80: mol_type = other DNA
cggcccgcacggtgtgcggccccgtttactgcttcacgcccagccctgtcgtagtaggaaccactgacaagctgggcatt

SEQ ID NO: 125941 - DNA, 80 bp, synthetic construct
  source 1..80: mol_type = other DNA
taaaggctgagatgacgcagcaaaaacaggccacagcaccacgtgggtaggtgatgtaattttattttcctcgtctgcgg

SEQ ID NO: 125942 - DNA, 80 bp, synthetic construct
  source 1..80: mol_type = other DNA
ggcagaggaggatgagcgggaggtctccgtacccgcagaaattctgcggaagtctcggagattcgcccgggccctgcccg

SEQ ID NO: 125943 - DNA, 80 bp, synthetic construct
  source 1..80: mol_type = other DNA
gttcccccagcagtcccggaggcgtatcaagtaggctacttgcacgcgcctaccggtagtggtaagagcaccaaggtccc

SEQ ID NO: 125944 - DNA, 80 bp, synthetic construct
  source 1..80: mol_type = other DNA
caagaagagaccaaagaggttcaggacaggttgtgacctatgccctcaacacccttaccaacataaaggttcagctaatc

SEQ ID NO: 125945 - DNA, 80 bp, synthetic construct
  source 1..80: mol_type = other DNA
ctcatggaccctcctttgcactcctgacgtaacctgcggctcggagcaggtctactggtcgttgccagacatgatgcaag

SEQ ID NO: 125946 - DNA, 80 bp, synthetic construct
  source 1..80: mol_type = other DNA
cagacgaacacaatatttatacactccctttgccgtcaaaagtccacaaaaactccaaaggtcagaaaaaccgccacatg

SEQ ID NO: 125947 - DNA, 80 bp, synthetic construct
  source 1..80: mol_type = other DNA
gggggcgagggcggttaaatcacaaaacatgcacggcctctgcccccggagacgggtgggaggaaggaggagggagaaga

SEQ ID NO: 125948 - DNA, 80 bp, synthetic construct
  source 1..80: mol_type = other DNA
aggctgacctcgagatcatgacaagcacatgggtcctggcaggaggggtgctagccgccgtggcagcttactgcctggcg

SEQ ID NO: 125949 - DNA, 80 bp, synthetic construct
  source 1..80: mol_type = other DNA
ctggcttaatgttggtgacatacgtcatatctgggaagtcagtggatatgtggttggaacgcgccgcagacataacctgg

SEQ ID NO: 125950 - DNA, 80 bp, synthetic construct
  source 1..80: mol_type = other DNA
ggggactaccattacatcacgggggtgacacaggacaatctgaagtgtccctgtcaggtaccatctccagagttcttcac

SEQ ID NO: 125951 - DNA, 80 bp, synthetic construct
  source 1..80: mol_type = other DNA
aacacgaccatggggcgcgccgccatgacgggccgcagcaggttgcagctggcgaacatggacgtccacgcgcccggatg

SEQ ID NO: 125952 - DNA, 80 bp, synthetic construct
  source 1..80: mol_type = other DNA
ctggatgaactctacaggcttcgtcaaaacgtgcggagcccccccctgcaacattggaccaagtggtaacgactccctga

SEQ ID NO: 125953 - DNA, 80 bp, synthetic construct
  source 1..80: mol_type = other DNA
ggctcacggcagtctgcgcgacttagctgtagccaccgagcccgtcatcttctcccggatggagattaagactatcacct

SEQ ID NO: 125954 - DNA, 80 bp, synthetic construct
  source 1..80: mol_type = other DNA
caacaccatgcagcgagttgtgttcgttgtgctactgctcttggtggctccagcctacagctttaactgccttggaatga

SEQ ID NO: 125955 - DNA, 80 bp, synthetic construct
  source 1..80: mol_type = other DNA
aataaatagtgggaccatattgacgccagggaaagaccggagtggttctctgcttttcctccagaggtctgtgagcacag

SEQ ID NO: 125956 - DNA, 80 bp, synthetic construct
  source 1..80: mol_type = other DNA
tcacgcctgatgatgcgaagaatgaggcggcccacaggcaaagttaccttggaagctgatgtcattcttccgataggcac

SEQ ID NO: 125957 - DNA, 80 bp, synthetic construct
  source 1..80: mol_type = other DNA
accagcataaatggtacaagttgctttccaaacgagcccatccaggtgtaggtttctatgtcataggtaataaaaagacg

SEQ ID NO: 125958 - DNA, 80 bp, synthetic construct
  source 1..80: mol_type = other DNA
aaagattcaaggcctattacaacaggcctcgaagcaagcacaggacatacagcctgccatccagtcatcgtggcctaagc

SEQ ID NO: 125959 - DNA, 80 bp, synthetic construct
  source 1..80: mol_type = other DNA
cgcataaccctggaatttttgcttctttgaatttggggcatcactcattttttcaagaaattgtaatcagaaatttagat

SEQ ID NO: 125960 - DNA, 80 bp, synthetic construct
  source 1..80: mol_type = other DNA
tgttctgccacgaagaagtacataacccagcgtcgcaacgtggattcgttgatatcccccaaggcctcaaggcgctccat

SEQ ID NO: 125961 - DNA, 80 bp, synthetic construct
  source 1..80: mol_type = other DNA
gccatggcgcagaaagcgtctagccatggcgcagaaagcgtctagccatggcgcagaaagcgtctagccatggcgcagaa

SEQ ID NO: 125962 - DNA, 80 bp, synthetic construct
  source 1..80: mol_type = other DNA
ggccacagaatggcctgggacatgatgatgaattggtcacccacggttaccctgatcgtgtccagtgcacttagggtccc

SEQ ID NO: 125963 - DNA, 80 bp, synthetic construct
  source 1..80: mol_type = other DNA
cccctctccgtgcaaaacaattctctctccttaggggttaacccgccttttctcatcactgactctggattagctatgga

SEQ ID NO: 125964 - DNA, 80 bp, synthetic construct
  source 1..80: mol_type = other DNA
cggcgcgtcaggcgccataggtgccggccgagtccgcggtccaccatacccgcctcctcgaggaccacggccagggaaca

SEQ ID NO: 125965 - DNA, 80 bp, synthetic construct
  source 1..80: mol_type = other DNA
ccgacattaaccacctgcgctccctcagcatccttaaccgctggctggaaaccgagcttgttttcgtgggggacgaggag

SEQ ID NO: 125966 - DNA, 80 bp, synthetic construct
  source 1..80: mol_type = other DNA
caggcgtacctgacactccagagctcttcttcccagcctcgctccggcggcattggaaccctccagtttgtggaggagtt

SEQ ID NO: 125967 - DNA, 80 bp, synthetic construct
  source 1..80: mol_type = other DNA
cattgtgacctgtgctatgttcacatgcaaaaagaacatggaaggaaaagtcgtgctgccagaaaatctggaatacacca

SEQ ID NO: 125968 - DNA, 80 bp, synthetic construct
  source 1..80: mol_type = other DNA
aggtcccgtgccgactcggccgtggccggcacggtgaacgtgggccaacccggaaaccccaggacggcaaagtacgggac

SEQ ID NO: 125969 - DNA, 80 bp, synthetic construct
  source 1..80: mol_type = other DNA
taatgatggcgcaggtggaggctgcactcgagaacttgttcgttttgaacaccgccagcttggcgggttctcacggacat

SEQ ID NO: 125970 - DNA, 80 bp, synthetic construct
  source 1..80: mol_type = other DNA
ggcagacaaagtgctcagccctcttcaagactacaatgactccggtcactccactggagtggacaccggaggaggcagcg

SEQ ID NO: 125971 - DNA, 80 bp, synthetic construct
  source 1..80: mol_type = other DNA
tccggaagggcccccaacacgatgtttgtgccgggcaaggtcggcgggatgagggccacgaacgccagcacggcctggtg

SEQ ID NO: 125972 - DNA, 80 bp, synthetic construct
  source 1..80: mol_type = other DNA
gggctgctcatcggctttggattgaggacgctgtggagcccccgagaacgcctcgtgctgaccctgggtgccgccatggt

SEQ ID NO: 125973 - DNA, 80 bp, synthetic construct
  source 1..80: mol_type = other DNA
cgtacaggaggagcgcccgtgccagccacgtgacatagtaggcgaggacggcggctataatacatgccggcgccaccgcc

SEQ ID NO: 125974 - DNA, 80 bp, synthetic construct
  source 1..80: mol_type = other DNA
gatacgacaccaacctccccgtggatctgctacacatggtgtacgcgggccgcggggcgaccggctcgtcgggtgtggtg

SEQ ID NO: 125975 - DNA, 80 bp, synthetic construct
  source 1..80: mol_type = other DNA
gtttgacataatagccggagcccattggggcatcttggcgggcctagcctactattccatgcaaggcaactgggctaaag

SEQ ID NO: 125976 - DNA, 80 bp, synthetic construct
  source 1..80: mol_type = other DNA
attgcagaccaaaccctaaaactcctgtttaccaaccctttgtacttgcagaataactttctcacgttagccattgaacg

SEQ ID NO: 125977 - DNA, 80 bp, synthetic construct
  source 1..80: mol_type = other DNA
ccgcgttggatggggagccctagtgcacgaggacaacgttatcaacagtgatgacgcgaggccctactgctggcattacc

SEQ ID NO: 125978 - DNA, 80 bp, synthetic construct
  source 1..80: mol_type = other DNA
acgctgtctcccgtagtcaacgtagagggagaactgggagggggcgactgggcatttataggtatgtctcgtcgtgcgag

SEQ ID NO: 125979 - DNA, 80 bp, synthetic construct
  source 1..80: mol_type = other DNA
ggctcactcactcggctccctcgcggaccaccaggctccccgcgcccgccccccccccgaagactcccgccgtcacggcg

SEQ ID NO: 125980 - DNA, 80 bp, synthetic construct
  source 1..80: mol_type = other DNA
cttccaaatggaaggggtcctctaagaccaatcagttcacaactacagtaaaataaaaaacaaaacatctaaaaaccact

SEQ ID NO: 125981 - DNA, 80 bp, synthetic construct
  source 1..80: mol_type = other DNA
agcaatactgcgtcggcatgtgggcccgggagagggggccgtgcagtggatgaaccggctgatagcgttcgcttcgcgtg

SEQ ID NO: 125982 - DNA, 80 bp, synthetic construct
  source 1..80: mol_type = other DNA
cggtctcgaaggacgataaagtgcaagtcacgcaggtgacagcgttccccgccgctgtgctggtggaaacagacagccag

SEQ ID NO: 125983 - DNA, 80 bp, synthetic construct
  source 1..80: mol_type = other DNA
taaatgggatgtcaaattttagctcctctcctgtacccacaatcttcatgtctttcttcccagatgaccaagagagtccg

SEQ ID NO: 125984 - DNA, 80 bp, synthetic construct
  source 1..80: mol_type = other DNA
tgggaagcataggcctcggcaagatactggtggatgtgttggcggggtacggcgctggtatctcggtggctctcgtcgcc

SEQ ID NO: 125985 - DNA, 80 bp, synthetic construct
  source 1..80: mol_type = other DNA
agggacgagccccttttttgcttttcccagatgcatccggtgctgcggcagatgcgcccccctcctcagcagcggcaaga

SEQ ID NO: 125986 - DNA, 80 bp, synthetic construct
  source 1..80: mol_type = other DNA
gggtatctgccgaggactacgttgaggtacggaggttgggcgactgccattacgtggtaggggtcactgctgaagggctg

SEQ ID NO: 125987 - DNA, 80 bp, synthetic construct
  source 1..80: mol_type = other DNA
aacgctatgcagacacgcccctcgaactcgttcccgcaggccagcttggccttgtggagcagcagctcgtcgggatgggt

SEQ ID NO: 125988 - DNA, 80 bp, synthetic construct
  source 1..80: mol_type = other DNA
cccacacgcccagaatagatcaggtggacccaaaagttttaccaaggcaaagtcgaatgggttgggtgttcctccggcgt

SEQ ID NO: 125989 - DNA, 80 bp, synthetic construct
  source 1..80: mol_type = other DNA
tgcccgaaatagtgctcgaggtgttcgccggcggtcactggggtgtcctgatcgccatcgcctacttcggcatgtcaggc

SEQ ID NO: 125990 - DNA, 80 bp, synthetic construct
  source 1..80: mol_type = other DNA
tagaggagacccccccaacacaaaaacagcatattgacgctgggaaagaccagagatcctgctgtctctgcaacatcaat

SEQ ID NO: 125991 - DNA, 80 bp, synthetic construct
  source 1..80: mol_type = other DNA
tccaagcttggatgggaccgctttgtgggcgtggtggtccgacggctggccgcgcgccgcccgggcctggtctttatgct

SEQ ID NO: 125992 - DNA, 80 bp, synthetic construct
  source 1..80: mol_type = other DNA
ccccttctgcgggaggaggtgacattcagcgtcgggctctctacctatgtcataggatcgcagctcccctgcgagccaga

SEQ ID NO: 125993 - DNA, 80 bp, synthetic construct
  source 1..80: mol_type = other DNA
gcctgaagccgactctgcaaggccctactcctctcctgtataggttaggagcaattcaaaatgacatctgcatgacacac

SEQ ID NO: 125994 - DNA, 80 bp, synthetic construct
  source 1..80: mol_type = other DNA
ggacaccaggttggctcgtttcgcccccaaacttggctttgtcgtggccaccgtggagaatacagacttccacgccaacc

SEQ ID NO: 125995 - DNA, 80 bp, synthetic construct
  source 1..80: mol_type = other DNA
acgcgatatctggtgaaaactgaatcatggatccttagaaatcccggatacgctctggtggctgcaatcctggggtggat

SEQ ID NO: 125996 - DNA, 80 bp, synthetic construct
  source 1..80: mol_type = other DNA
ggacgacggtgtcatctgttgctccatgtcctactcttggaccggggccctcgttactccgtgtgcggctgaagaggaga

SEQ ID NO: 125997 - DNA, 80 bp, synthetic construct
  source 1..80: mol_type = other DNA
catggccacgggagaggccctctgggctctcccccacgcggccgcggccgtggctatgagccgtcggtacgaccgggccc

SEQ ID NO: 125998 - DNA, 80 bp, synthetic construct
  source 1..80: mol_type = other DNA
ctgatgacatcaagagacacgcagacattgtcgtggcagctgctacggtgtgttctgcgttgtacgttggggacttctgt

SEQ ID NO: 125999 - DNA, 80 bp, synthetic construct
  source 1..80: mol_type = other DNA
attgctccactccatgtgccgaatcttggctatgggaggtgtgggattgggtctgcactgtgctgagtgacttcaagacg

SEQ ID NO: 126000 - DNA, 80 bp, synthetic construct
  source 1..80: mol_type = other DNA
ggtgcgaggatgcgcgcgcagacacggccctaaagaaacctaagacggggtcgcccaccgcacccccgcccgcagatcca

SEQ ID NO: 126001 - DNA, 80 bp, synthetic construct
  source 1..80: mol_type = other DNA
tagctgacaaggtgtttgctggcgatggtagcggccaatcaccaagctccggctttgagggttcggtagctagtccaccg

SEQ ID NO: 126002 - DNA, 80 bp, synthetic construct
  source 1..80: mol_type = other DNA
tcgcaagccgccccatatatcgaacaagctcaggtgatagcccaccagttcaaggagaaagtccttggactgctgcagcg

SEQ ID NO: 126003 - DNA, 80 bp, synthetic construct
  source 1..80: mol_type = other DNA
tgagttcggcgatggtggcgcgcacctcgcgctcgaaatccccgggggcctcctcttcttccatgacgacctcttcttct

SEQ ID NO: 126004 - DNA, 80 bp, synthetic construct
  source 1..80: mol_type = other DNA
gccatactttgtcagggcacgagccctgcttaggatatgcgccgtcgtgaaacacgtggctgggggtaagtacatccaga

SEQ ID NO: 126005 - DNA, 80 bp, synthetic construct
  source 1..80: mol_type = other DNA
ctattctgctcacgtgcatgttccatccggcattggggtttgaggtcaccaaaatcttgctggcgctgatagggcccgtg

SEQ ID NO: 126006 - DNA, 80 bp, synthetic construct
  source 1..80: mol_type = other DNA
ttaattatttacccctaatcaactgtaattgtccattcaccaaaccctggtcattctacacctgttatgataaaatcccc

SEQ ID NO: 126007 - DNA, 80 bp, synthetic construct
  source 1..80: mol_type = other DNA
gttggagctaacgcttcagacaggatggggatgggaacaacgtacctagccttgatggctacttttaaaatgagaccaat

SEQ ID NO: 126008 - DNA, 80 bp, synthetic construct
  source 1..80: mol_type = other DNA
agccaggcgcagaggggataccagggcaggcttgcttagccctagacccctgagcactttaaagggctcgtcgggagagc

SEQ ID NO: 126009 - DNA, 80 bp, synthetic construct
  source 1..80: mol_type = other DNA
tatatctggaccatctgatgacagaccatactgttggcattacgcgcccagaccctgtgatatcatctcagcacaaaccg

SEQ ID NO: 126010 - DNA, 80 bp, synthetic construct
  source 1..80: mol_type = other DNA
cactgttgtgatgcaggtgaaagtgtcaaaaggagccccctgcaggattccagtgatagtagctgatgatcttacagcgg

SEQ ID NO: 126011 - DNA, 80 bp, synthetic construct
  source 1..80: mol_type = other DNA
ctggcacctgggcaagctggagctggacttcaactactgcgagggcaccaccgtggtgatcaccgagaactgcggcacca

SEQ ID NO: 126012 - DNA, 80 bp, synthetic construct
  source 1..80: mol_type = other DNA
attgggcctccgatggcttgaaagacctggcagtggctcttgagccagtcgtgttcacgccaatggagaagaaggtaata

SEQ ID NO: 126013 - DNA, 80 bp, synthetic construct
  source 1..80: mol_type = other DNA
accccttaaccgcccacctcctggccgaatataatcgtcggtgccagaccgaagaggtgctgccgccgcgggaggatgtg

SEQ ID NO: 126014 - DNA, 80 bp, synthetic construct
  source 1..80: mol_type = other DNA
cgccgacctcttggggtacatccccgtcctgggcgctcctctcgggggcgtcgcggctgctctcgctcacggtgtgagag

SEQ ID NO: 126015 - DNA, 80 bp, synthetic construct
  source 1..80: mol_type = other DNA
cggcgaggcgcggcgcggaggggagcagctcgacgtctccggtggcccgcggccacgaggcacgcgccaggccccccctc

SEQ ID NO: 126016 - DNA, 80 bp, synthetic construct
  source 1..80: mol_type = other DNA
acaggttgttgatttcagcctagaccctactttctccatagagaccaccactgtaccccaggatgctgtctctcgtagcc

SEQ ID NO: 126017 - DNA, 80 bp, synthetic construct
  source 1..80: mol_type = other DNA
caacaacgctcttaccctacctactgcagatccgttaatggtgagctccgatgggttaggaataagtgtcactagtccca

SEQ ID NO: 126018 - DNA, 80 bp, synthetic construct
  source 1..80: mol_type = other DNA
agttgccaatcaatcctttaagcaactcccttataagacaccataacatggtgtactcaacatcatcacgcagcgctggt

SEQ ID NO: 126019 - DNA, 80 bp, synthetic construct
  source 1..80: mol_type = other DNA
cgcgatcggtaacgaagatggggaaaagggacttttgggtaaacacctttaataagcgacagaggcagtgtagcgtaatg

SEQ ID NO: 126020 - DNA, 80 bp, synthetic construct
  source 1..80: mol_type = other DNA
tggagatgaagcccgtgtcagatcgcgaaagcgccacttcgccgaggagtgcaatctgtgaggccccaggaggactgggt

SEQ ID NO: 126021 - DNA, 80 bp, synthetic construct
  source 1..80: mol_type = other DNA
ggaactaggactagtcctattagcagtcatatccatcttcactcttaccccagcatacaagactctcctgagccgctcag

SEQ ID NO: 126022 - DNA, 80 bp, synthetic construct
  source 1..80: mol_type = other DNA
cctaccgtcataattgaccttatcaccggcggtcattggggtatccttgtgggtgtcgcgtacttcagcatgcaaacgaa

SEQ ID NO: 126023 - DNA, 80 bp, synthetic construct
  source 1..80: mol_type = other DNA
cggaggccccccagattgtccgcggggcctccgaagacgtccggaaacaaccctacaacctgaccatcgcttggtttcgg

SEQ ID NO: 126024 - DNA, 80 bp, synthetic construct
  source 1..80: mol_type = other DNA
aggcggcgctggagaagctagtcattttgcatgcggctagcgccgcaagctctaatggcataatttgtttcatcatcttc

SEQ ID NO: 126025 - DNA, 80 bp, synthetic construct
  source 1..80: mol_type = other DNA
agacccgctacctccgccgggtctaccgttgatgcagtcattgacgaggtggttgccaacgctcgagattatgctagacg

SEQ ID NO: 126026 - DNA, 80 bp, synthetic construct
  source 1..80: mol_type = other DNA
accagcttgggcaacactctcacctgctacctcaaagctcaagcagcctgcagggctgctggcctcaaggacgtcgatat

SEQ ID NO: 126027 - DNA, 80 bp, synthetic construct
  source 1..80: mol_type = other DNA
gtctgtacttgatgcgggagggcgccaccgcttccacggctttagacatgacggctcggaacatggaaccgtccttttac

SEQ ID NO: 126028 - DNA, 80 bp, synthetic construct
  source 1..80: mol_type = other DNA
agcctatggccttgcgtccatcttttcgcctggagcatcccagaaaatccagcttataaacaccagcggcagctggcaca

SEQ ID NO: 126029 - DNA, 80 bp, synthetic construct
  source 1..80: mol_type = other DNA
tccccgtgcggcgcaggtgggacactcgggccggccttctcagccctaggccgttgagtacactcaagggctcttcggtg

SEQ ID NO: 126030 - DNA, 80 bp, synthetic construct
  source 1..80: mol_type = other DNA
ccgggcttatggcatcgaccccaatataagaaccggggtcaggacaatcacgacaggcgcccccattacttactcaacct

SEQ ID NO: 126031 - DNA, 80 bp, synthetic construct
  source 1..80: mol_type = other DNA
agagaagcttgcccagggactagcgtgatcattgatggcaactgtgatggacggggaaaatcaaccagatccaccacgga

SEQ ID NO: 126032 - DNA, 80 bp, synthetic construct
  source 1..80: mol_type = other DNA
ggtctcgtacgagcagaccgagtacatctgccggctggcgggatacccggacggaattccggtcctagagcaccacggca

SEQ ID NO: 126033 - DNA, 80 bp, synthetic construct
  source 1..80: mol_type = other DNA
ggaacccatcatcttcagtccgatggagaagaaggtcatcgtctggggagcggagacggctgcatgtggggacattctac

SEQ ID NO: 126034 - DNA, 80 bp, synthetic construct
  source 1..80: mol_type = other DNA
caacaacgtgtgtttaaggagaaggtagacacgaaagccccagagcctccggagggagtgaaatatgtgatgaatgaggt

SEQ ID NO: 126035 - DNA, 80 bp, synthetic construct
  source 1..80: mol_type = other DNA
gttctctagtcaatggagtagttcgaatgttgagcaagccctgggacgccatcacaagcgtgaccacgatggccatgacg

SEQ ID NO: 126036 - DNA, 80 bp, synthetic construct
  source 1..80: mol_type = other DNA
ctgtgtgggcgaggcctgattacaatccgccgttgctggagacgtggaaggctcctgactataagcctcccatagtttcc

SEQ ID NO: 126037 - DNA, 80 bp, synthetic construct
  source 1..80: mol_type = other DNA
tgcccgctaccacctccacggtcccctcctgtgcctccgcctcggaaaaagcgtacggtggtcctcaccgaatcaaccct

SEQ ID NO: 126038 - DNA, 80 bp, synthetic construct
  source 1..80: mol_type = other DNA
aattctgaccactctgacacaaaagccctagtccaagcgagtacaaaggaagcaacatgggaaggataccggtcgttact

SEQ ID NO: 126039 - DNA, 80 bp, synthetic construct
  source 1..80: mol_type = other DNA
ggacccttgtacttgttacaggctagcctcctgcgagtgccctactatgtacgcgcgcacgcgctccttcgtgcgtgcat

SEQ ID NO: 126040 - DNA, 80 bp, synthetic construct
  source 1..80: mol_type = other DNA
ttggaaaccgtgacgcggtttatgacagatactataggaagcggtctaataccacccgtggagttgtttgatccggcgca

SEQ ID NO: 126041 - DNA, 80 bp, synthetic construct
  source 1..80: mol_type = other DNA
cccttgaatacccccggttttgtgctttttgatttgggtgagtttactcatttaaacccttttctctctcatctctcttt

SEQ ID NO: 126042 - DNA, 80 bp, synthetic construct
  source 1..80: mol_type = other DNA
tgagggggaacccggcgatccagacctgacatcagactcttggtccaccgtcagcggttcggaggatgtcgtgtgctgct

SEQ ID NO: 126043 - DNA, 80 bp, synthetic construct
  source 1..80: mol_type = other DNA
ccctggacaagatcctgcggggcaccatgcgcgggggtgcggccctgatctgctccccgcgccatcatctaacccgccaa

SEQ ID NO: 126044 - DNA, 80 bp, synthetic construct
  source 1..80: mol_type = other DNA
gcggccccgaacatcggccctattgctggcactaccccccaaagccttgcggcatcgtgccagcacgaagcgtatgtggc

SEQ ID NO: 126045 - DNA, 80 bp, synthetic construct
  source 1..80: mol_type = other DNA
gcccggcattctctcccctggcgctttagtggttggcgtcatctgcgcggccatcttgcgtcgccacgtggggcaaggtg

SEQ ID NO: 126046 - DNA, 80 bp, synthetic construct
  source 1..80: mol_type = other DNA
taccgtgaaggcgcggacgctctccgtagaggaggcctgcgacctgacgcccccgcattcagccaaatcaaaattcggct

SEQ ID NO: 126047 - DNA, 80 bp, synthetic construct
  source 1..80: mol_type = other DNA
acgcatctaggggtgtgtggaggagccgcccgccatatttgggagacgccgtgggacccccgactccggtgcgtctggag

SEQ ID NO: 126048 - DNA, 80 bp, synthetic construct
  source 1..80: mol_type = other DNA
tcatgtcgctgactgcgcgcaaccctgacgcgttccgacagcagccgcaggccaaccggctctccgcaattctggaagcg

SEQ ID NO: 126049 - DNA, 80 bp, synthetic construct
  source 1..80: mol_type = other DNA
ccttttgggacacaagccagaaactagagagacgaccctgggagttgagaacttcttgcttgatctgcggccggctacag

SEQ ID NO: 126050 - DNA, 80 bp, synthetic construct
  source 1..80: mol_type = other DNA
ccaggtgggctatttgcacgcaccaacaggcagcgggaagagcaccaaggtccctgccgcgtatgccagccaggggtata

SEQ ID NO: 126051 - DNA, 80 bp, synthetic construct
  source 1..80: mol_type = other DNA
gtgccctggtgaaacacctcgcaggagctaggtacatccagatgctgttgatcactataggcaggtggaccggcacttac

SEQ ID NO: 126052 - DNA, 80 bp, synthetic construct
  source 1..80: mol_type = other DNA
cgttcgagcccctgagggctgaagaagacgatactgagctctcagtaccggcggaatgtttcaagaaaccacccaagtat

SEQ ID NO: 126053 - DNA, 80 bp, synthetic construct
  source 1..80: mol_type = other DNA
acgccccacaaccagcatatgacctagagctaataacatcttgctcatccaatgtttccgttgcacacgacgggaccggc

SEQ ID NO: 126054 - DNA, 80 bp, synthetic construct
  source 1..80: mol_type = other DNA
gggtgccgctgtggcctcacctgaccaacctttacacggaggcccggaacgggaggccacagcgccgtctttctccccaa

SEQ ID NO: 126055 - DNA, 80 bp, synthetic construct
  source 1..80: mol_type = other DNA
aaggaagcagcattggtaaggctttggcgaccacatggaaaggagcccaacggctagccgtcttaggggacacagcgtgg

SEQ ID NO: 126056 - DNA, 80 bp, synthetic construct
  source 1..80: mol_type = other DNA
atacttcccgctgctggataccggtcacctctaacatcgctgtgagccaacccggcgcgctcaccaagggcttgcggacg

SEQ ID NO: 126057 - DNA, 80 bp, synthetic construct
  source 1..80: mol_type = other DNA
tggcaggggacctttcctatcaattgctacacggagggccagtgcgcgccgaaaccccccacgaactacaagaccgccat

SEQ ID NO: 126058 - DNA, 80 bp, synthetic construct
  source 1..80: mol_type = other DNA
ttaacagttctggctgccccgagcgtttgtcttcctgccgtgcgctggacgatttccgcatcgggtggggaaccttggag

SEQ ID NO: 126059 - DNA, 80 bp, synthetic construct
  source 1..80: mol_type = other DNA
cccctcgagtgggagccgggagaccctgacctagagtctgggtcggtggagtaccatccctcctcccaggaggtgaaggc

SEQ ID NO: 126060 - DNA, 80 bp, synthetic construct
  source 1..80: mol_type = other DNA
ctatgcagcctctcgaccggctgtcatgagtgtcaaagcctacacaattggtggaaagggacatgagactccaaagatgg

SEQ ID NO: 126061 - DNA, 80 bp, synthetic construct
  source 1..80: mol_type = other DNA
gatggcgttcgagacggcgtgggctatgatcggggcgtgatcggcgaagaactgcaagagaaacggagtctctggtgcgt

SEQ ID NO: 126062 - DNA, 80 bp, synthetic construct
  source 1..80: mol_type = other DNA
gctcggaccagccgatgcggaaacggcaaggggttggaggcttctcgcccccatcaccgcgtacgcgcagcagacccgag

SEQ ID NO: 126063 - DNA, 80 bp, synthetic construct
  source 1..80: mol_type = other DNA
ccaaaccaaataagctgccccgtcttaccgcgacaaagcacacagaacaaaacacactccgcagacgaacacaatattta

SEQ ID NO: 126064 - DNA, 80 bp, synthetic construct
  source 1..80: mol_type = other DNA
tccagaagtagtgaggaggcttttttggaggcctaggcttttgcaaaaagctccggggatcgaaagagcctgctaaagca

SEQ ID NO: 126065 - DNA, 80 bp, synthetic construct
  source 1..80: mol_type = other DNA
ggttgcgcgattgacatcaccaggagggagctcaagtgtggcagcggaatattcatacacaatgatgttgaagcctggat

SEQ ID NO: 126066 - DNA, 80 bp, synthetic construct
  source 1..80: mol_type = other DNA
gaacatcccctgcaagctccgatatgacaccttctactgaggaggtcgacggggcctcagatgatggttcctacagttcc

SEQ ID NO: 126067 - DNA, 80 bp, synthetic construct
  source 1..80: mol_type = other DNA
tcaagtcgtgtccacggccacacaatccttccttgccaccactctcaatggcgtcctctggacagtctaccacggggccg

SEQ ID NO: 126068 - DNA, 80 bp, synthetic construct
  source 1..80: mol_type = other DNA
gagttgaactatgttctctgggaaggaggacatgatctcactgtagtggccggggatgtgaaaggggtgttgtcaaaagg

SEQ ID NO: 126069 - DNA, 80 bp, synthetic construct
  source 1..80: mol_type = other DNA
tactacctgaccagagacccaaccactccactcgcccgggctgcctgggaaacagttagacactcccctatcaattcatg

SEQ ID NO: 126070 - DNA, 80 bp, synthetic construct
  source 1..80: mol_type = other DNA
tggtccttgggactacagacgtgcgtggagcccctacttacacctggggggggaatgactctgacgtcctcgtcatgagc

SEQ ID NO: 126071 - DNA, 80 bp, synthetic construct
  source 1..80: mol_type = other DNA
acatgtttcgagacaacagcggggaggaagctgaggaaatgagagactgcaggtttagggccggtcgcgagctgcgccgc

SEQ ID NO: 126072 - DNA, 80 bp, synthetic construct
  source 1..80: mol_type = other DNA
cgcctttgacggcaccgaagcaacatcgatcggcttttcggtcgtcgtagctttgaccgtcttcacgctcaccccaacgt

SEQ ID NO: 126073 - DNA, 80 bp, synthetic construct
  source 1..80: mol_type = other DNA
ggatcagcttatcacgccccacattgaggcccttgatgaaagccaaaagcagcgccctgaggacgcccggcccgtggtca

SEQ ID NO: 126074 - DNA, 80 bp, synthetic construct
  source 1..80: mol_type = other DNA
gagcagcctcacctcctttttcagtcctgggccagcccagagattgcagctcataaataccaacgggagctggcacatta

SEQ ID NO: 126075 - DNA, 80 bp, synthetic construct
  source 1..80: mol_type = other DNA
cggctcccgccctcattggggccccaatgaccctcggcggagatcccgcaatttgggtaaggtcatcgatacccttactt

SEQ ID NO: 126076 - DNA, 80 bp, synthetic construct
  source 1..80: mol_type = other DNA
cctggtggaggttaatttggacttgaaatgctatgaagagggtttgcctcctagcggctcggagactgatgaagctgaag

SEQ ID NO: 126077 - DNA, 80 bp, synthetic construct
  source 1..80: mol_type = other DNA
gtggctagacttcatggcttgtggccccctaccaagaaaaacatggttgggttttctttggcttttgtaatcatggcctg

SEQ ID NO: 126078 - DNA, 80 bp, synthetic construct
  source 1..80: mol_type = other DNA
gcccgaggatctggaggggcctgaccggcgcgacgctagtgagcggcaggaaaatgagaaagagaaggcacagggctgct

SEQ ID NO: 126079 - DNA, 80 bp, synthetic construct
  source 1..80: mol_type = other DNA
ctcgagagccttctctagcaccgctaatctcacttcgctttcctctaccccagcttcttttcccactcccctaaagcaaa

SEQ ID NO: 126080 - DNA, 80 bp, synthetic construct
  source 1..80: mol_type = other DNA
gctggtgccgccgtgggcggcataggtcttggcagggtgttgcttgatgtgcttgctgggtacggagctggagtctccgg

SEQ ID NO: 126081 - DNA, 80 bp, synthetic construct
  source 1..80: mol_type = other DNA
gccgtggaggatccaatcttctggaatatggtagatgaagagcgtgagtgccacctacgaggagaatgccggacctgcat

SEQ ID NO: 126082 - DNA, 80 bp, synthetic construct
  source 1..80: mol_type = other DNA
aagtacatcatgacatgcatggcagccgatcttgaggtaatcaccagcacctgggtgattgctggtggtgtgcttgccgc

SEQ ID NO: 126083 - DNA, 80 bp, synthetic construct
  source 1..80: mol_type = other DNA
tgggctaaagtccttggcatcttgttcctatttgctggcgtagatgctagcacgaccgtgagacatgctgccggccaaac

SEQ ID NO: 126084 - DNA, 80 bp, synthetic construct
  source 1..80: mol_type = other DNA
aatgctgtcagatcccgcccacatcacggcggaaacggccaagcgcaggctaaatcgagggtctccaccctctctggcaa

SEQ ID NO: 126085 - DNA, 80 bp, synthetic construct
  source 1..80: mol_type = other DNA
tgtggcgagcggcctagcaggcgcggccataggcggcgtaggcctgggcaaggtcatcgtagacatcttagccggctatg

SEQ ID NO: 126086 - DNA, 80 bp, synthetic construct
  source 1..80: mol_type = other DNA
ggaaatagcagtactatttcaaatcttacagttgtagctcacaaaaatttaactgacagaactattaaggcatatagcta

SEQ ID NO: 126087 - DNA, 80 bp, synthetic construct
  source 1..80: mol_type = other DNA
gaagaggcgcgggtcgggccaggaaaacccctccccccagtccacgcgtccccccctcgcgccggcagaggccaagagtg

SEQ ID NO: 126088 - DNA, 80 bp, synthetic construct
  source 1..80: mol_type = other DNA
gcacgggacttttccaatcaatgccaccactaccggccccagcacaccacgaccagcccccaactatcagcgcgcgcttt

SEQ ID NO: 126089 - DNA, 80 bp, synthetic construct
  source 1..80: mol_type = other DNA
caaaaacgtaatggccgtcggagtcggcaaagcgggccgggaggtcgtcgccgagcgggacgacccgccgcccccgaccg

SEQ ID NO: 126090 - DNA, 80 bp, synthetic construct
  source 1..80: mol_type = other DNA
ggccccgttcaggaccatctcgccgtacgtcaccggcacgtcggcttcggtgtcctccactttcaggaaggactgcagga

SEQ ID NO: 126091 - DNA, 80 bp, synthetic construct
  source 1..80: mol_type = other DNA
agtgctctaagcacatcccactggtcgaacatggcctgcagctggcagaacaattcaaacaaaaagccttgggtgtcttg

SEQ ID NO: 126092 - DNA, 80 bp, synthetic construct
  source 1..80: mol_type = other DNA
ctgcctatgcgtaggtagcgccgttgtttgtggaaggatcgtaacctctggtaggcccgccgtagtgcccgatcgggagg

SEQ ID NO: 126093 - DNA, 80 bp, synthetic construct
  source 1..80: mol_type = other DNA
ccgcaaccggattgagcgattgaaaaaagaatacagctccacttggcatcaggatgacaaccacccgtacagaacctgga

SEQ ID NO: 126094 - DNA, 80 bp, synthetic construct
  source 1..80: mol_type = other DNA
gatggccatctcccccgggagcaaggtcgctcaccccatgtacatgtggctctagtgacctttatctggtcacgagggag

SEQ ID NO: 126095 - DNA, 80 bp, synthetic construct
  source 1..80: mol_type = other DNA
catccccgcgaggcgcaggggtgacacccgtgcggccctcctcagtccacggcccatttgcaccctaaaagggtcatcag

SEQ ID NO: 126096 - DNA, 80 bp, synthetic construct
  source 1..80: mol_type = other DNA
gggcgaaggtctttatggtcctactcctctttgcaggagttgaagccacgcctaaggtgggcggtgctgcgtcttataac

SEQ ID NO: 126097 - DNA, 80 bp, synthetic construct
  source 1..80: mol_type = other DNA
gcgtacgtggtcctggtggaccagacgggaaacatggcgacccggctgcgggccgcggtccccggctggagccgccgcac

SEQ ID NO: 126098 - DNA, 80 bp, synthetic construct
  source 1..80: mol_type = other DNA
ggtcttccacgagctcgcggcaccccggcgggcgcttaaactgcacgtcgctggcagcggtggccgtggataccgccgat

SEQ ID NO: 126099 - DNA, 80 bp, synthetic construct
  source 1..80: mol_type = other DNA
cagtcgagcaatatgttgacttcagcctagatccaactttcacaatcgagacgcgcacagccccccaagatgcggtctca

SEQ ID NO: 126100 - DNA, 80 bp, synthetic construct
  source 1..80: mol_type = other DNA
agaaaaaccagtcaacattgaggcagaaccgccttttggtgagagttacatcgtgataggagcaggtgaaaaagctttga

SEQ ID NO: 126101 - DNA, 80 bp, synthetic construct
  source 1..80: mol_type = other DNA
aacccccatctaatgccacgcgagcgacccgcgactcgcgatacgcgctaacggtgacccagataatccagatagccatc

SEQ ID NO: 126102 - DNA, 80 bp, synthetic construct
  source 1..80: mol_type = other DNA
gcaaacatcttcaggggaagttatttagcaggagcaggtctggctttctcattaatgaaatctttaggaggaggtaggag

SEQ ID NO: 126103 - DNA, 80 bp, synthetic construct
  source 1..80: mol_type = other DNA
cgcggcccgcttgggtggctcgccgtcgccacgttgtctccccgcgggaacgtcagggcctcggcgtcagggacggccga

SEQ ID NO: 126104 - DNA, 80 bp, synthetic construct
  source 1..80: mol_type = other DNA
agtgtacccaatgtcaataccagcaactctttttgtgtggtacttttggcagaaaaagaaacagagatcaggagtgttat

SEQ ID NO: 126105 - DNA, 80 bp, synthetic construct
  source 1..80: mol_type = other DNA
ggcgtcctagcggggctcgcgttctttgggatgcaggccaactgggccaaggtggtcttgatcctgtttctcttcgcgtg

SEQ ID NO: 126106 - DNA, 80 bp, synthetic construct
  source 1..80: mol_type = other DNA
ttgaggggactaccctcattggccatgcaatcaccggccctacgcgctcccttgtaagcctcttcagctctgggcccaag

SEQ ID NO: 126107 - DNA, 80 bp, synthetic construct
  source 1..80: mol_type = other DNA
ccgaggggcgtcggcgacatcctcccctaagcgccggcggccgctggtctgtttttgtttccccgtttcggtgtggtgtg

SEQ ID NO: 126108 - DNA, 80 bp, synthetic construct
  source 1..80: mol_type = other DNA
cctcccgcccacccgtacccgggtatgctgttcgcgggccccagtcccctggaggcccagatcgccgcgctggtggaggc

SEQ ID NO: 126109 - DNA, 80 bp, synthetic construct
  source 1..80: mol_type = other DNA
gtctcccagtctgccaagaccacctagagttttgggagggtgttttcacaggacttacccacattgatgcgcacttccta

SEQ ID NO: 126110 - DNA, 80 bp, synthetic construct
  source 1..80: mol_type = other DNA
ccagccgcatcctctcccgtcgaagcgcgggccccggttggtggacaggaggccggcggccccagcgcagccacccaggg

SEQ ID NO: 126111 - DNA, 80 bp, synthetic construct
  source 1..80: mol_type = other DNA
tcctcacgagggttgaggcggcgctgcaggtgtgggtcccccccctcgcggtgcgggagggccgtgatgctatcattctc

SEQ ID NO: 126112 - DNA, 80 bp, synthetic construct
  source 1..80: mol_type = other DNA
ttcggttcggtaggcggcatgctatcatcagtggggaaggctctacacacggcttttggcgcagcatttaataccatttt

SEQ ID NO: 126113 - DNA, 80 bp, synthetic construct
  source 1..80: mol_type = other DNA
tctaccacggggcgggtgccaagaccatcagcggcccgaagggacctgtcaatcaaatgtacactaatgttgaccaagac

SEQ ID NO: 126114 - DNA, 80 bp, synthetic construct
  source 1..80: mol_type = other DNA
ggacttgctagcagacacaacaacaccaattccaacaacgatcatggcgaagaatgaggtattctcggtcaacccacaaa

SEQ ID NO: 126115 - DNA, 80 bp, synthetic construct
  source 1..80: mol_type = other DNA
agtttttcacacaatgtggcacgcaactgaaggagcagtcctgcgaaacggagaagggagactagatccgtatgcaggag

SEQ ID NO: 126116 - DNA, 80 bp, synthetic construct
  source 1..80: mol_type = other DNA
gccgcggaaggcagtggggggcaaggggtcgctggcctcaaaggaggacacccgaacgctccagtactccgcgtccaacc

SEQ ID NO: 126117 - DNA, 80 bp, synthetic construct
  source 1..80: mol_type = other DNA
agctacactggaatgccaggtgcaaactgcggtggactttggtaacagttacatcgctgagatggaaacagagagctgga

SEQ ID NO: 126118 - DNA, 80 bp, synthetic construct
  source 1..80: mol_type = other DNA
gactgtcccgacctctgccgttccctaccgaaatgcctctggggtttatcatgtcaccaatgattgcccaaactcttcca

SEQ ID NO: 126119 - DNA, 80 bp, synthetic construct
  source 1..80: mol_type = other DNA
gtggcctttcccaagccccggcgccccggcgactcccccggaaaccccggcctgggcgccggcaccgggccgggctccgc

SEQ ID NO: 126120 - DNA, 80 bp, synthetic construct
  source 1..80: mol_type = other DNA
gacagggaggtgttgtaccaacaatttgatgagatggaggagtgtgcctctagggcggctctcatcgaagagtggcagcg

SEQ ID NO: 126121 - DNA, 80 bp, synthetic construct
  source 1..80: mol_type = other DNA
gcgttacgtgtgcctgccgtccgaacgcgggtagggtatggggcgggggatgtggagagcccacacgcggaaagcaagaa

SEQ ID NO: 126122 - DNA, 80 bp, synthetic construct
  source 1..80: mol_type = other DNA
tgcccgcttgatcgtattcccggacctaggggtacgggtctgcgagaagcgcgcactttacgacatttcacgcaaattac

SEQ ID NO: 126123 - DNA, 80 bp, synthetic construct
  source 1..80: mol_type = other DNA
ataaaaactgaattaagactctcctacggactgccgctttttcaacccggattttacaaccagaagaacgaaacttttcc

SEQ ID NO: 126124 - DNA, 80 bp, synthetic construct
  source 1..80: mol_type = other DNA
acgccgtgcacatgtggtgcttcggacctatatttggttacgaggcacgccgatgtcattccagtgcgtaggcgaggaga

SEQ ID NO: 126125 - DNA, 80 bp, synthetic construct
  source 1..80: mol_type = other DNA
ccagtttggctggcttacaaggttgcagcggctggagtgtcataccacgaccggaggtggtgctttgatggtcctaggac

SEQ ID NO: 126126 - DNA, 80 bp, synthetic construct
  source 1..80: mol_type = other DNA
cggcactatctactggcctgttgcaccttcaccaaaacatcgtggacgtgcagtacctctatggactttctccagctgtt

SEQ ID NO: 126127 - DNA, 80 bp, synthetic construct
  source 1..80: mol_type = other DNA
ggtggacccagtacttcatagcacacattgaagccaagctacatgtttgggtccccttcctccgggtgcgcggtggccgt

SEQ ID NO: 126128 - DNA, 80 bp, synthetic construct
  source 1..80: mol_type = other DNA
gctgccacgcgccagaagaaagtgacatttgacagacttcaggtgcttgatcaacattaccaagatgtccttaaggagat

SEQ ID NO: 126129 - DNA, 80 bp, synthetic construct
  source 1..80: mol_type = other DNA
ctgcttgacggtgggctcggtggccatagtcggtagaatcatcctatctgggagacctgccatcattcccgacagggagg

SEQ ID NO: 126130 - DNA, 80 bp, synthetic construct
  source 1..80: mol_type = other DNA
cgctccacagttactctccggtagagctcaatagggttgcggggacactcaggaagcttgggtgcccccccctacgggct

SEQ ID NO: 126131 - DNA, 80 bp, synthetic construct
  source 1..80: mol_type = other DNA
gccgtcgcctctatgatggccttcagtgctgccctcactagccctttatccaccagtaccaccatcctcctcaacatcat

SEQ ID NO: 126132 - DNA, 80 bp, synthetic construct
  source 1..80: mol_type = other DNA
cagacgcccaccaccaccgccgcggcggcagtaaacctgagcggaggcggtgacagggaggaggaggagctggctttaga

SEQ ID NO: 126133 - DNA, 80 bp, synthetic construct
  source 1..80: mol_type = other DNA
acagatgattattgagatagtcacagaaggacattggggcgtcttaggtgccatcttatacttcagcatggtggccaact

SEQ ID NO: 126134 - DNA, 80 bp, synthetic construct
  source 1..80: mol_type = other DNA
tgggtatggaacaggtgtggctggggcgctcgtcgccttcaagatcatgtgtggggaaaggccgacagccgaagaactgg

SEQ ID NO: 126135 - DNA, 80 bp, synthetic construct
  source 1..80: mol_type = other DNA
gttgcgtgacgatctgcggcaggatagtgttatctggaaagcctgcagtagtgccggaccgggaagtcctgtaccaacaa

SEQ ID NO: 126136 - DNA, 80 bp, synthetic construct
  source 1..80: mol_type = other DNA
gtgcagatggcgctcattaagatcggagcgtgggcagggacatacctatacgaccacctgtcgccattgcacacctgggc

SEQ ID NO: 126137 - DNA, 80 bp, synthetic construct
  source 1..80: mol_type = other DNA
gttgcgaaaggccttgtggtactgcctgatagggtgcttgcgagtgccccgggaggtctcgtagaccgtgcatcatgagc

SEQ ID NO: 126138 - DNA, 80 bp, synthetic construct
  source 1..80: mol_type = other DNA
ggtgaaaacaggtcaggatggagctgaggagaccgagtgggataaagatgaaactgttgcaagacaaaatcaaatcgcca

SEQ ID NO: 126139 - DNA, 80 bp, synthetic construct
  source 1..80: mol_type = other DNA
ctacctaaaggcccaggccgcttgtagggctgccaagctcaaggactttgacatgctggtttgcggagacgatttggtca

SEQ ID NO: 126140 - DNA, 80 bp, synthetic construct
  source 1..80: mol_type = other DNA
caggtaactacaacagctctgctaacgagcttttgtgccccaccgactgcttccgtaaacatccggaagctacataccag

SEQ ID NO: 126141 - DNA, 80 bp, synthetic construct
  source 1..80: mol_type = other DNA
acagcgggcatacgcctttgacggtgagcaggcggcatccatcggcgctgtggtgattattggcctcacagtattcaccc

SEQ ID NO: 126142 - DNA, 80 bp, synthetic construct
  source 1..80: mol_type = other DNA
ttacgtgcgggactgtgtttatctttttttgctacatacttggcaaaccggaatgggggtgtggcaacaatgcttggaag

SEQ ID NO: 126143 - DNA, 80 bp, synthetic construct
  source 1..80: mol_type = other DNA
ggcatgccgatgtcatccccgtgcgccggcggggcgacagcaggggcagcctgctttcgccccggcctatctcttacctg

SEQ ID NO: 126144 - DNA, 80 bp, synthetic construct
  source 1..80: mol_type = other DNA
cagagccacctgggctgagaacatctacgctccaatcatgcagatccgcaacctcatcggggaggaagagtatagagact

SEQ ID NO: 126145 - DNA, 80 bp, synthetic construct
  source 1..80: mol_type = other DNA
caagaggacgctcaagccctccgagccttcacggaggccatgacgaggtattctgctcctcccggggatgctccacaacc

SEQ ID NO: 126146 - DNA, 80 bp, synthetic construct
  source 1..80: mol_type = other DNA
gttggagaacctggtcgtcctgaacgccgtatcgctggccgggacgcacggcattgtgtccctccttgtggtcttctgct

SEQ ID NO: 126147 - DNA, 80 bp, synthetic construct
  source 1..80: mol_type = other DNA
gacaaagacccgataccgggggccgcccggtggcccgggaagagcccccggagggttttcgtccgcgtggtcctcgaccc

SEQ ID NO: 126148 - DNA, 80 bp, synthetic construct
  source 1..80: mol_type = other DNA
cctgggtggcaaatgagtctgatgtgttcctgctgcggagcaccaggccccctcgtgggtcctggtttgggtgtacctgg

SEQ ID NO: 126149 - DNA, 80 bp, synthetic construct
  source 1..80: mol_type = other DNA
ggttcgggggcgggtgcgggagaccgagtaggccccgcccatccgcggcccctcccggcagccacgccgccccagcgtcg

SEQ ID NO: 126150 - DNA, 80 bp, synthetic construct
  source 1..80: mol_type = other DNA
aggcaggagatgggtggcaacataacccgcgtggaatccgagaacaaggtcatcattcttgattcctttgagcccctcac

SEQ ID NO: 126151 - DNA, 80 bp, synthetic construct
  source 1..80: mol_type = other DNA
tctgggatgttcgacagcgtagtgctccgcgagtgctatgatgccggggcatcctggtatgaacttacgcctgctgagac

SEQ ID NO: 126152 - DNA, 80 bp, synthetic construct
  source 1..80: mol_type = other DNA
aaacccatgaaagaacatacatgggttacagacatgacagtaagggaaaagtagactataaggttacagtcattccacct

SEQ ID NO: 126153 - DNA, 80 bp, synthetic construct
  source 1..80: mol_type = other DNA
gaaccgcttaaggcggaatatgatgacagggagatgtcagtggcagcggagtgccacagacctccaagaccccggtaccc

SEQ ID NO: 126154 - DNA, 80 bp, synthetic construct
  source 1..80: mol_type = other DNA
gtggggcacggcccgcgccacgctgccggagatgaaggagctgctgttgcgcgccgcgcccgagatccggaagcaggcct

SEQ ID NO: 126155 - DNA, 80 bp, synthetic construct
  source 1..80: mol_type = other DNA
caatatttatacactccctttgccgtcaaaagtccacaaaaactccaaaggtcagaaaaaccgccacatgaacacttccg

SEQ ID NO: 126156 - DNA, 80 bp, synthetic construct
  source 1..80: mol_type = other DNA
gctgctttgactctactgtcactgaacaagatatcagggtagaagagagcatataccaatcatgtcaactccatcctgat

SEQ ID NO: 126157 - DNA, 80 bp, synthetic construct
  source 1..80: mol_type = other DNA
gtcctaaccaccagcctaggcaatactctgacttgctacttgaaagctcaagcggcatgcagggctgctgggctgagaga

SEQ ID NO: 126158 - DNA, 80 bp, synthetic construct
  source 1..80: mol_type = other DNA
aagtcgcagtgttgggtgccagtagcacccacccttgctgtcgcgaacgcctctgttcctataagagggttccgcagtca

SEQ ID NO: 126159 - DNA, 80 bp, synthetic construct
  source 1..80: mol_type = other DNA
agcttgaaggacgcacccaaaaggaggagctggccactgaatgagggagtgatggctgtcgggcttgtgagcattctggc

SEQ ID NO: 126160 - DNA, 80 bp, synthetic construct
  source 1..80: mol_type = other DNA
cacagactatgctcgatctggtcattggggcgcattggggcgtgatggccggcgtggcttactattccatgcaagggaat

SEQ ID NO: 126161 - DNA, 80 bp, synthetic construct
  source 1..80: mol_type = other DNA
ggagaagaaagtcatcacctggggtgccgacacggtcgcgtgcggcgatattatatctgggctcccagtatcagccagga

SEQ ID NO: 126162 - DNA, 80 bp, synthetic construct
  source 1..80: mol_type = other DNA
tgatggaagaaccgtcatggatgttatctccagagaagatcagagggggagtggacaagttgtcacctacgccctaaaca

SEQ ID NO: 126163 - DNA, 80 bp, synthetic construct
  source 1..80: mol_type = other DNA
ggcagctgtttactttcaggcctaagcaccatcaggtcacccaggattgtaactgctctatatatgctggccacatcacg

SEQ ID NO: 126164 - DNA, 80 bp, synthetic construct
  source 1..80: mol_type = other DNA
aatcatgagcggcgaggtgcccaccaccgaagacttggtcaacctgctaccctccatcttgtcaccaggagcgctggtcg

SEQ ID NO: 126165 - DNA, 80 bp, synthetic construct
  source 1..80: mol_type = other DNA
cggcatcgtgctgatcatgttctcgggagtggacgcgaacacgtacaccaccggcggctccgcggctagcatgacttccg

SEQ ID NO: 126166 - DNA, 80 bp, synthetic construct
  source 1..80: mol_type = other DNA
tgctatcacctggagccctcgtagtgggcgtggtgtgcgcggcaatattacgacgccacaccgggccctctgaaggggca

SEQ ID NO: 126167 - DNA, 80 bp, synthetic construct
  source 1..80: mol_type = other DNA
gggactggagactcacgactgacctatcagtggcacaaagaagggagttcaataggaaaattgttcacacagacaatgaa

SEQ ID NO: 126168 - DNA, 80 bp, synthetic construct
  source 1..80: mol_type = other DNA
tcccaagggcgcccccaactcatgcgagtgggatgaagatgatactcaggtacaggtagcggctgaagacgatcaagacg

SEQ ID NO: 126169 - DNA, 80 bp, synthetic construct
  source 1..80: mol_type = other DNA
gctttgttgtcataggcagactacacatcaatgaacggacggtcatagccccaaataaggaggtcttgtatgaggctttt

SEQ ID NO: 126170 - DNA, 80 bp, synthetic construct
  source 1..80: mol_type = other DNA
gtctgtgaccaccccccacccaaacattgaggaagttgccctgccgacgacgggtgaaatacccttctacggcagggcga

SEQ ID NO: 126171 - DNA, 80 bp, synthetic construct
  source 1..80: mol_type = other DNA
acaattcttctgtgacaaaattaacacaggttctttgctggcaaagcgctgatccgtaatggaaatgaaaccttcggaaa

SEQ ID NO: 126172 - DNA, 80 bp, synthetic construct
  source 1..80: mol_type = other DNA
catggaagccgagcaggctgcgtctgtcgggatagctgtcatcggggtgcttaccatcttcaccctcaccccggcgtaca

SEQ ID NO: 126173 - DNA, 80 bp, synthetic construct
  source 1..80: mol_type = other DNA
ctcctaggcgccattggacggtgcaagattgcaactgttccatctatcctggccatataacgggtcaccgcatggcatgg

SEQ ID NO: 126174 - DNA, 80 bp, synthetic construct
  source 1..80: mol_type = other DNA
cggatttggggccaaggaggtccgcagcttgtccgggagggccgttaaccacatcaagtccgtgtggaaggacctcctgg

SEQ ID NO: 126175 - DNA, 80 bp, synthetic construct
  source 1..80: mol_type = other DNA
gggcgggtctttcgcccttactcttcagcacgacgcagtgggccacgctcccttgttccttcgtgccaatgccggccata

SEQ ID NO: 126176 - DNA, 80 bp, synthetic construct
  source 1..80: mol_type = other DNA
ggccgccaaccgacagtgggcatgacactgtggtcatggaagtgacttacactgggagcaagccatgcagaataccagtg

SEQ ID NO: 126177 - DNA, 80 bp, synthetic construct
  source 1..80: mol_type = other DNA
gtggttttgcaatggcagtagagttaagaatcctcaaatcagacatacatgtaatgatcaaaaccttactttgatccatg

SEQ ID NO: 126178 - DNA, 80 bp, synthetic construct
  source 1..80: mol_type = other DNA
tgaataccacctgctcgtgtggtgcacaaatcaccggacatgtcaagaatggttccatgaggatcgtggggcctaggacc

SEQ ID NO: 126179 - DNA, 80 bp, synthetic construct
  source 1..80: mol_type = other DNA
aagtggtaagggtacagagaccagcaaaaaatggaaccgtgatggatgtcatatccagacgtgaccagagaggaagtggc

SEQ ID NO: 126180 - DNA, 80 bp, synthetic construct
  source 1..80: mol_type = other DNA
cactttctacggggttgatacacttacaccagaacatagtggatgttcagtacctctatggtatatctccatcaattaca

SEQ ID NO: 126181 - DNA, 80 bp, synthetic construct
  source 1..80: mol_type = other DNA
accagccgcgatggcgaaccgcgcatggaaaccattgtgggcaaaaacgaacgcggcaaaagcctgctgtttaaaaccgc

SEQ ID NO: 126182 - DNA, 80 bp, synthetic construct
  source 1..80: mol_type = other DNA
atttggctgatgctgatgataccacaagcagaagcggccttggagaaccttgtcacgctgaacgccgtcgccgctgccgg

SEQ ID NO: 126183 - DNA, 80 bp, synthetic construct
  source 1..80: mol_type = other DNA
tctctgtgagcggcggcgggggcgacatttatcacagcatgtcaattgcccgaccccgctatttactcctgtgcctactc

SEQ ID NO: 126184 - DNA, 80 bp, synthetic construct
  source 1..80: mol_type = other DNA
gagttttggaggcttgttgatgaggaaagagagagacatcttagaggacggtgtgcccagtgcgtgtacaacatgatggg

SEQ ID NO: 126185 - DNA, 80 bp, synthetic construct
  source 1..80: mol_type = other DNA
tctcttgagcaccatagtggtgagcatgacaggccgcgacaagacagagcaggccggagagatccaagtcctatccacag

SEQ ID NO: 126186 - DNA, 80 bp, synthetic construct
  source 1..80: mol_type = other DNA
ttcggccatggccactgaaatatccagcagtgctgcttgccccactatgggtgaggcacataacgagaagagaactgact

SEQ ID NO: 126187 - DNA, 80 bp, synthetic construct
  source 1..80: mol_type = other DNA
cccgtactaccccggagaggctcgaggcgggccgcgcggggtcgactcccggcgcgcggcccgccattctccctggacca

SEQ ID NO: 126188 - DNA, 80 bp, synthetic construct
  source 1..80: mol_type = other DNA
cagtggcttgcaaaagataccaatgctgctggtcaaccagataaaactcacacctatggcgttgcagccatgggtggaga

SEQ ID NO: 126189 - DNA, 80 bp, synthetic construct
  source 1..80: mol_type = other DNA
cgcctccgaatgagagtgtttcgttccttccccctccccccgcgtcagacaaaccctaaccaccgcttaagcggcctccg

SEQ ID NO: 126190 - DNA, 80 bp, synthetic construct
  source 1..80: mol_type = other DNA
ctcggtatcggcacggtcttagaccaggcagagactgctggagctcgccttgtcgtgctcgcaaccgccacgccaccagg

SEQ ID NO: 126191 - DNA, 80 bp, synthetic construct
  source 1..80: mol_type = other DNA
tcccttagttgcagagccggatgatagggagatatcagtgtctgcggagtgtcataatcctcccaggcaaaagtttccac

SEQ ID NO: 126192 - DNA, 80 bp, synthetic construct
  source 1..80: mol_type = other DNA
cccaaagcccccctcacagcctgtgtcatcacccagagccaaattttggcccaattgcaagccatccagcaggcgcgaca

SEQ ID NO: 126193 - DNA, 80 bp, synthetic construct
  source 1..80: mol_type = other DNA
aggcgtaaaattcccagggaggccatgcgccacggaagctgtacgcgtggcatattggactagcggttagaggagacccc

SEQ ID NO: 126194 - DNA, 80 bp, synthetic construct
  source 1..80: mol_type = other DNA
ggcatcatgatgagaaccacccatatagaacctggaactaccacggtagctacgaagtgaagccaacaggctctgcaagc

SEQ ID NO: 126195 - DNA, 80 bp, synthetic construct
  source 1..80: mol_type = other DNA
acctgacccgcgatcccgagacccccctggcacgagctgcctgggaaacagtccgacacactccggtcaattcctggttg

SEQ ID NO: 126196 - DNA, 80 bp, synthetic construct
  source 1..80: mol_type = other DNA
ctcgaatggcagtatcgtctggcagctcgagggagctgttcttcacgtccctgggtgcattccctgtgagcggaagggca

SEQ ID NO: 126197 - DNA, 80 bp, synthetic construct
  source 1..80: mol_type = other DNA
atctggaggccgccggttcggaccacacgctcgcgtcccagtccgacacggaggatgccccctcccccgttacgctggaa

SEQ ID NO: 126198 - DNA, 80 bp, synthetic construct
  source 1..80: mol_type = other DNA
ggtgcgaagccgtccccctcggagttagaagacgcgttcacaaaatggacgaagactgagtttccctgtcgttgccagcc

SEQ ID NO: 126199 - DNA, 80 bp, synthetic construct
  source 1..80: mol_type = other DNA
catgggtttcacgtaggcgaacatgccatcaaagtgcaggggatcgaagctgaggcccacggttacgaccgtcgtgtata

SEQ ID NO: 126200 - DNA, 80 bp, synthetic construct
  source 1..80: mol_type = other DNA
gagaaaaagactcctatgggcttctcatatgacaccaggtgctttgactctacagttacagagcgagacataaagactga

SEQ ID NO: 126201 - DNA, 80 bp, synthetic construct
  source 1..80: mol_type = other DNA
cgcgcacgtaatcgtatagttcgtgcgagggagcgaggaggtcgggaccgaggttgctacgggcgtgctgctctgctcgg

SEQ ID NO: 126202 - DNA, 80 bp, synthetic construct
  source 1..80: mol_type = other DNA
gttcgtaggtgggatagagcacaggttccaagctgcctgcaactggacccggggtgatccctgtactctggaaatgcgtg

SEQ ID NO: 126203 - DNA, 80 bp, synthetic construct
  source 1..80: mol_type = other DNA
agctctctttgtgtctccggtgatgccttccaataggtgagtgataaagcgaggtagctcttttctaatcattgcagtaa

SEQ ID NO: 126204 - DNA, 80 bp, synthetic construct
  source 1..80: mol_type = other DNA
agaaacggctgtgcttatacctaagcaattaaccacctccattaaaacaaccgtttgtaaaagtattaccccaccaaata

SEQ ID NO: 126205 - DNA, 80 bp, synthetic construct
  source 1..80: mol_type = other DNA
cagaaggcccttggcctcctgcagaccgcgtcccgccaagctgaggtcattgcccctgccgtccagaccaactggcaaaa

SEQ ID NO: 126206 - DNA, 80 bp, synthetic construct
  source 1..80: mol_type = other DNA
gtgcagatggaaggggtctttcacacaatgtggcatgtcacgagaggatcagtcatcacttgcaacaacggacgtttaga

SEQ ID NO: 126207 - DNA, 80 bp, synthetic construct
  source 1..80: mol_type = other DNA
ctccaacaccccaacatcttcgacgcaggtgtcgcaggtcttcccgacgatgacgccggtgaacttcccgccgccgttgt

SEQ ID NO: 126208 - DNA, 80 bp, synthetic construct
  source 1..80: mol_type = other DNA
ggacaagaacagtgtggagggcgaggttcaaatcgtctccactggaacgcagaccttcctcgcaacctgtgtcaacggtg

SEQ ID NO: 126209 - DNA, 80 bp, synthetic construct
  source 1..80: mol_type = other DNA
ctcgatgtcctactcgtggacgggcgccctaattacgccctgtgccgcagaggaaaccaaactccccatcaacgcactga

SEQ ID NO: 126210 - DNA, 80 bp, synthetic construct
  source 1..80: mol_type = other DNA
cacagccagtacatacactacacagctaaacacaacagtgcagaatagtactgtgttggttaggtacttgctgagggagg

SEQ ID NO: 126211 - DNA, 80 bp, synthetic construct
  source 1..80: mol_type = other DNA
tggaggcaggagatgggtaacaacatcacccgagtggagtctgagaacaaagttgtcattctagattccttcgatcccat

SEQ ID NO: 126212 - DNA, 80 bp, synthetic construct
  source 1..80: mol_type = other DNA
ggaccggctggtgacggacgtgcgcgaggccgtggcgcagcgcgagcggttcaagaacgagggcctgggctcgctggtgg

SEQ ID NO: 126213 - DNA, 80 bp, synthetic construct
  source 1..80: mol_type = other DNA
ggtgaccaggcggcgccaggggccgccggggtcccagctgcgccatgccgggagcggtgagagggcaaaccccagaggcg

SEQ ID NO: 126214 - DNA, 80 bp, synthetic construct
  source 1..80: mol_type = other DNA
tcgaagccgcgtgcaattggactcggggagagcgctgtgacgtggaggacagggataggtcagagctcagcccactgcta

SEQ ID NO: 126215 - DNA, 80 bp, synthetic construct
  source 1..80: mol_type = other DNA
catcatcaataatataccccacaaagtaaacaaaagttaatatgcaaatgagcttttaaattttaacggttttagggcag

SEQ ID NO: 126216 - DNA, 80 bp, synthetic construct
  source 1..80: mol_type = other DNA
gtccatgatgtatccagtgaaatcccagacagagcatggagcagtggatttgagtggataaccgactatgctggaaagac

SEQ ID NO: 126217 - DNA, 80 bp, synthetic construct
  source 1..80: mol_type = other DNA
tcaggttcacagcaattgctccgacccgagcagtactggatcgatggagaggtgtgaataaacaaacagcgatgaaacac

SEQ ID NO: 126218 - DNA, 80 bp, synthetic construct
  source 1..80: mol_type = other DNA
tacagtgagactccgggcttatctcaacacgcccggtttgcccgtatgtcaggaccatctggagttctgggaggcggtgt

SEQ ID NO: 126219 - DNA, 80 bp, synthetic construct
  source 1..80: mol_type = other DNA
ggcattcctggttgcgaacatgctcagcacgagatggacgaatcaggaaaatgtagttctggttctcggagcagccttct

SEQ ID NO: 126220 - DNA, 80 bp, synthetic construct
  source 1..80: mol_type = other DNA
gcgtcgggaccaacaaccgcctatgcgcgtccctgtgtcagcagtgctttgccactaaatgcgataacaaccgcctgcac

SEQ ID NO: 126221 - DNA, 80 bp, synthetic construct
  source 1..80: mol_type = other DNA
ctacatggagtccgtcttccagatgtacacccgcatcgccggctttttggcctgccgggccacgcgcggcatgcgccaca

SEQ ID NO: 126222 - DNA, 80 bp, synthetic construct
  source 1..80: mol_type = other DNA
ggccgccggcggtccataagcccggccggccgggccgacgcgaataaaccgggccgccggccggagcgccgcgcagcagc

SEQ ID NO: 126223 - DNA, 80 bp, synthetic construct
  source 1..80: mol_type = other DNA
ggcaagttcttggcggatggaggttgctcaggtggcgcttacgacattatcatttgtgatgagtgccattccactgaccc

SEQ ID NO: 126224 - DNA, 80 bp, synthetic construct
  source 1..80: mol_type = other DNA
atagactgtaacacgtgtgtcacccagacagtcgacttcagccttgaccccaccttcaccatcgagacaaccacgcttcc

SEQ ID NO: 126225 - DNA, 80 bp, synthetic construct
  source 1..80: mol_type = other DNA
cggtcaactgttcaccttccgacctcgccgtcactggaccacccaagactgtaattgttccatctacacaggacatatca

SEQ ID NO: 126226 - DNA, 80 bp, synthetic construct
  source 1..80: mol_type = other DNA
ccccaaggcgcgtcggagcgaaggccggtcctgggctcagcctgggtacccttggcccctctatggtaacgagggctgcg

SEQ ID NO: 126227 - DNA, 80 bp, synthetic construct
  source 1..80: mol_type = other DNA
actggtccacaccgtgttccagctcgtggctgcgcgatatctgggattgggtgtgcgaggtactttctgatttcaagacc

SEQ ID NO: 126228 - DNA, 80 bp, synthetic construct
  source 1..80: mol_type = other DNA
gtttgacctttacaagaagtctggaatcactgaagtggatagaacagaagccaaagaagggttgaaaagaggagaaacaa

SEQ ID NO: 126229 - DNA, 80 bp, synthetic construct
  source 1..80: mol_type = other DNA
ttcaatattacatcgcacgtgcagaggccatgttatatgtttgggtgccttcgctgcaggttcgcggtggacgcgatgct

SEQ ID NO: 126230 - DNA, 80 bp, synthetic construct
  source 1..80: mol_type = other DNA
gaagttggcacccgacctgggggcaagatctatgctgacgacacagctggctgggacacccgcatcacgagagctgactt

SEQ ID NO: 126231 - DNA, 80 bp, synthetic construct
  source 1..80: mol_type = other DNA
cgaccccaccacccccattcctaccactatcatggcgaagaatgaggtgttctgcgtggacgtgtctaagggcggtcgca

SEQ ID NO: 126232 - DNA, 80 bp, synthetic construct
  source 1..80: mol_type = other DNA
ggagtcacatactctatcactccacttgatctacctctgatcatccagcgccttcatggaatggctgctttttcactcca

SEQ ID NO: 126233 - DNA, 80 bp, synthetic construct
  source 1..80: mol_type = other DNA
agggcccccggggcagacatttggccagcgttttgggtctcgcaccgcgcgcccccgatcccatcgcgcccgccctcctc

SEQ ID NO: 126234 - DNA, 80 bp, synthetic construct
  source 1..80: mol_type = other DNA
gaagagacagctaaactcattagacagaaaagagtttgaagagtataaaagaagtggaatactagaagtggacaggactg

SEQ ID NO: 126235 - DNA, 80 bp, synthetic construct
  source 1..80: mol_type = other DNA
cggccgccgggctgacggccgtgggcgacaagatggcgagccacatctcgcgcgcgctgtttctgccccccatcaaactc

SEQ ID NO: 126236 - DNA, 80 bp, synthetic construct
  source 1..80: mol_type = other DNA
tgcattggtgctctggtcgttaccgccctgacaattgtcacgctcacccctacctacaagaccttattggcgcagctctt

SEQ ID NO: 126237 - DNA, 80 bp, synthetic construct
  source 1..80: mol_type = other DNA
gagtgagctgatcgtgcgccgtgcgcagcccctggagagggatgcaaatttgcaagaacaaacagaggagggcctacccg

SEQ ID NO: 126238 - DNA, 80 bp, synthetic construct
  source 1..80: mol_type = other DNA
aattggaccattaagtgggagtacgttgtccttctatttctggtgttggcagatgctcgcgtttgtttagccctttggct

SEQ ID NO: 126239 - DNA, 80 bp, synthetic construct
  source 1..80: mol_type = other DNA
gcatgcatgacgggcgggatctttctgttcttcatgcaggtgagagggatagggaagttatccctaggactggtcgcaat

SEQ ID NO: 126240 - DNA, 80 bp, synthetic construct
  source 1..80: mol_type = other DNA
acctggccatgaagaaccccaattggtgcagagctacggatggaacatcgtcacgatgaagagcggagtggatgtcttct

SEQ ID NO: 126241 - DNA, 80 bp, synthetic construct
  source 1..80: mol_type = other DNA
cggcctcacacacatagatgcccacttcctttcccaaacaaagcaatcgggggaaaatttcgcatacttaacagcctacc

SEQ ID NO: 126242 - DNA, 80 bp, synthetic construct
  source 1..80: mol_type = other DNA
gatttgggttgcgtttcccagagacccttgccgcgtggaacacggggtaggggactccaacgtcccaaagcgttcatccc

SEQ ID NO: 126243 - DNA, 80 bp, synthetic construct
  source 1..80: mol_type = other DNA
agttcggatacggggcaaaggaggtccgggcccacgccagcaaagccattaaccacatcaactccgtgtgggaggacttg

SEQ ID NO: 126244 - DNA, 80 bp, synthetic construct
  source 1..80: mol_type = other DNA
acatcttgggttccacagggacgcaccacgtggtctgttcatgggaagggagagtggatgaccacagaagacatgcttga

SEQ ID NO: 126245 - DNA, 80 bp, synthetic construct
  source 1..80: mol_type = other DNA
cccggccacgtctgggaacgggcacggcctaccccgtccccctggaactcacgcccgagaacgcggaggccgtggcgcgc

SEQ ID NO: 126246 - DNA, 80 bp, synthetic construct
  source 1..80: mol_type = other DNA
caggtagacgaacaaaccttccaggaaatcaccagtgtgagccgtgcgttaggacagcaagacaccgggagtctggaagc

SEQ ID NO: 126247 - DNA, 80 bp, synthetic construct
  source 1..80: mol_type = other DNA
ccagacctccggaaagttggggaaaggatacggagattgagagaagaataccaacaaacatggacgtatgaccacaacaa

SEQ ID NO: 126248 - DNA, 80 bp, synthetic construct
  source 1..80: mol_type = other DNA
tcacctgtggggcagagcaggtctactggtcgctccctgacatgatgcaagacccagtcaccttccgctccacaagacaa

SEQ ID NO: 126249 - DNA, 80 bp, synthetic construct
  source 1..80: mol_type = other DNA
aaccaccaaccaaaccatgttctttaacatactggggggctgggttgccactcacttggcaggacctacagcatcctccg

SEQ ID NO: 126250 - DNA, 80 bp, synthetic construct
  source 1..80: mol_type = other DNA
aacaaaaacagactggtcaaaaacaaagtgaccataagcagggtgggcaaaaagaaacaagtcaaaagaaaactaatgac

SEQ ID NO: 126251 - DNA, 80 bp, synthetic construct
  source 1..80: mol_type = other DNA
ggtcgagatgagtccacttctgttttctaccactcagatggcaattctcccctgtacattcactaccatgcctgcgctgt

SEQ ID NO: 126252 - DNA, 80 bp, synthetic construct
  source 1..80: mol_type = other DNA
ctggcccccgagttggtacgggcggtggcgcgactgcggtttaaggagtgcgcgccggcggacgtggtgcctcagcgtaa

SEQ ID NO: 126253 - DNA, 80 bp, synthetic construct
  source 1..80: mol_type = other DNA
ggaggatggagcctacagaatcaagcaaagagggattcttggatattctcagattggagccggagtttacaaagaaggaa

SEQ ID NO: 126254 - DNA, 80 bp, synthetic construct
  source 1..80: mol_type = other DNA
gccaactgcaagattatcttcgtgtcgtccaccaacaccgggaaggccagtacgagctttttgtacaacctccgcggggc

SEQ ID NO: 126255 - DNA, 80 bp, synthetic construct
  source 1..80: mol_type = other DNA
gagtgggataacgggtgaggaagagagggaggagtgtactgggggtgaagaagtggggggggagaagggagaacaggaaa

SEQ ID NO: 126256 - DNA, 80 bp, synthetic construct
  source 1..80: mol_type = other DNA
ctcatcgtgctggacaccagtgtcaccaacagtagccgtcaggcaccccggtgcgaccaccgcatcgatccgcaaccatg

SEQ ID NO: 126257 - DNA, 80 bp, synthetic construct
  source 1..80: mol_type = other DNA
agggcgtatgctgataacggagaggcggcagcttcgctgggactgctgacgatcgccattattaccatattcactcttac

SEQ ID NO: 126258 - DNA, 80 bp, synthetic construct
  source 1..80: mol_type = other DNA
tttaacgggatttgtggtggaaaatggaacacgtacacatcatggtgctacaagcgttgtatcagactttataggtcccc

SEQ ID NO: 126259 - DNA, 80 bp, synthetic construct
  source 1..80: mol_type = other DNA
gaactccacggagtttctcaagacgtgcggagctcccccttgtgacatctatgggtgcgggggcgaccacaaaaatgcgt

SEQ ID NO: 126260 - DNA, 80 bp, synthetic construct
  source 1..80: mol_type = other DNA
tttcagtgacggcgcgaccctgttcgcgaggacgcagcgtgaagacgccgccggtcatctcccggtaatagggcgggtcc

SEQ ID NO: 126261 - DNA, 80 bp, synthetic construct
  source 1..80: mol_type = other DNA
atggagggtcagcgtcaatggtgaagatgccaggaagtaggacgtggttgaaatagtcaatgggagtgtcaacttgcaac

SEQ ID NO: 126262 - DNA, 80 bp, synthetic construct
  source 1..80: mol_type = other DNA
ccaagtgatcatcgacatttttgtcggtggtcattgggggatacttgccggcgtgctgtactacagcatggttgccaact

SEQ ID NO: 126263 - DNA, 80 bp, synthetic construct
  source 1..80: mol_type = other DNA
ctatgaccaggtattcagctccccccggcgacgagccgcatccagaatacgatcttgagcttattacatcatgctcatca

SEQ ID NO: 126264 - DNA, 80 bp, synthetic construct
  source 1..80: mol_type = other DNA
aaagggtggccgcaaaccggcccgccttatcgtgtaccccgatctaggggtgcgcgtggccgagaagatggccttgtacg

SEQ ID NO: 126265 - DNA, 80 bp, synthetic construct
  source 1..80: mol_type = other DNA
gcagcaatgcttggaagagcgaaacttgcaagaactacataaactccttgacaagtcgctgagatgcctttggacaggct

SEQ ID NO: 126266 - DNA, 80 bp, synthetic construct
  source 1..80: mol_type = other DNA
gacacacaccctttggggagatgatgttgaggaaagtgaactcatcattccgcacaccatagccggaccaaaaagcaagc

SEQ ID NO: 126267 - DNA, 80 bp, synthetic construct
  source 1..80: mol_type = other DNA
tgctggaaagattattatctgttgtatctctcctggattcacatcacaaagtatttctatagcacaggctactatgttcc

SEQ ID NO: 126268 - DNA, 80 bp, synthetic construct
  source 1..80: mol_type = other DNA
gaaccatgaatacagtgttccgtatcgtgctgctctctcttcttgtagctttcggtcaggcaggaattcatattattaat

SEQ ID NO: 126269 - DNA, 80 bp, synthetic construct
  source 1..80: mol_type = other DNA
cgggttcgggaccgagtggctctggtcgtcggtggcgcgctggtacaccggatgccccgggaatagctcccccgacagga

SEQ ID NO: 126270 - DNA, 80 bp, synthetic construct
  source 1..80: mol_type = other DNA
cccttttgttccgcatatgagctgaaataacacccagtcccttttgatggcgatacactttgatgatgttaaggtatatt

SEQ ID NO: 126271 - DNA, 80 bp, synthetic construct
  source 1..80: mol_type = other DNA
ggctgtgggtagcattggcctgggcaaggttattgttgacattctggccgggtacggtgcaggcgtggctggggctctcg

SEQ ID NO: 126272 - DNA, 80 bp, synthetic construct
  source 1..80: mol_type = other DNA
ttctcttcttttacagtatgattaaatgagactagttattaatagtaatcaattacggggtcattagttcatagcccata

SEQ ID NO: 126273 - DNA, 80 bp, synthetic construct
  source 1..80: mol_type = other DNA
tatggtggttgtcctatttgttggtccgagcggaagctttgatccaagattgggtgccaccttggcaggcccgaggcggc

SEQ ID NO: 126274 - DNA, 80 bp, synthetic construct
  source 1..80: mol_type = other DNA
ccatcaccaagtacatcatggcttgcatgtccgcagacttggaggtcattaccagcacttgggtcttggtagggggtgtt

SEQ ID NO: 126275 - DNA, 80 bp, synthetic construct
  source 1..80: mol_type = other DNA
ccactccggtctctgctgtccaagtgaagaacaccagtaagagctacatggtgactaatgactgttccaacgacagcatc

SEQ ID NO: 126276 - DNA, 80 bp, synthetic construct
  source 1..80: mol_type = other DNA
gtgccttctgaggttgggcgcttggactggtacctatgtctatgaccatctcgcccccctttctggctgggctagcgacg

SEQ ID NO: 126277 - DNA, 80 bp, synthetic construct
  source 1..80: mol_type = other DNA
caccgttacgctcccccttgcaaacctctcattagggaggaaacttgcttctccgtgggcttacattcctatgttgtagg

SEQ ID NO: 126278 - DNA, 80 bp, synthetic construct
  source 1..80: mol_type = other DNA
ccccagccgattacgacgaggatgacaatgacgagggcgaggacgaaagtctcgccggcactcccgccagcgggaccccc

SEQ ID NO: 126279 - DNA, 80 bp, synthetic construct
  source 1..80: mol_type = other DNA
cgtaggggtggtggatcacaggttccaggctgcgtgcaactggacgcgaggagagcgatgtgagctcgaagaccgggaca

SEQ ID NO: 126280 - DNA, 80 bp, synthetic construct
  source 1..80: mol_type = other DNA
aaacttcttggttgcggggattgggccggctttggctgtacggtaccagccggtgggcgtccagaggtgcgagggtgatg

SEQ ID NO: 126281 - DNA, 80 bp, synthetic construct
  source 1..80: mol_type = other DNA
aatggatgacaactgaagacatgttgagtgtctggaaccgtgtgtggattgaagagaatgaatacatgaaagataaaaca

SEQ ID NO: 126282 - DNA, 80 bp, synthetic construct
  source 1..80: mol_type = other DNA
ggggagacagaattgggaagttgccataatggatgaagcccattggaccgatccacatagcatcgcggcgagagggcatc

SEQ ID NO: 126283 - DNA, 80 bp, synthetic construct
  source 1..80: mol_type = other DNA
acctcatgggttccacaaggacgcacaacatggtcgattcatgggaaaggggagtggatgaccacggaagacatgcttga

SEQ ID NO: 126284 - DNA, 80 bp, synthetic construct
  source 1..80: mol_type = other DNA
acgtccgagagcatgcccgcaaggccataaaccacatcaactccgtgtgggaggacttgctggaagaccctcaaacacca

SEQ ID NO: 126285 - DNA, 80 bp, synthetic construct
  source 1..80: mol_type = other DNA
agtacatgctgaccagagcggaggcgctcctgcacgtctgggtcccctcgctcaacgcccggtgagggcgtgatggtgcc

SEQ ID NO: 126286 - DNA, 80 bp, synthetic construct
  source 1..80: mol_type = other DNA
tcagaacgtgctggtggagctggagggggacaacgcgcgtctggccgtcctcaaacgctgcatagaagtctcccacttcg

SEQ ID NO: 126287 - DNA, 80 bp, synthetic construct
  source 1..80: mol_type = other DNA
tgccaacctatccggcccatctgatgacaagccttactgctggcactaccccccccgcccgtgtgaagtggtaccggctg

SEQ ID NO: 126288 - DNA, 80 bp, synthetic construct
  source 1..80: mol_type = other DNA
gagcatctcctgaagatgtggacctcaaagaagactcccttggggttctcgtatgatacccgctgctttgactctactgt

SEQ ID NO: 126289 - DNA, 80 bp, synthetic construct
  source 1..80: mol_type = other DNA
acgtggacggtcgtcctgtcgcccccgccaattcagcaacccttacctatgccactgttggatcgtcggtggacaccgct

SEQ ID NO: 126290 - DNA, 80 bp, synthetic construct
  source 1..80: mol_type = other DNA
atgtaaataaacttggtattgcccaacactttcccgcgtgtcgcgtgtggttcatgtgtgtgcctggcgtcccccaccct

SEQ ID NO: 126291 - DNA, 80 bp, synthetic construct
  source 1..80: mol_type = other DNA
catgtaattaatacagaagcaccgttaaacagtatagcacccgatacaaatagacagcggacttctcgcgttttagttcg

SEQ ID NO: 126292 - DNA, 80 bp, synthetic construct
  source 1..80: mol_type = other DNA
gggcataggcaccgtcctggatcaagcggagaccgtaggggtcaggttggttgttctagcgactgccacaccccccggct

SEQ ID NO: 126293 - DNA, 80 bp, synthetic construct
  source 1..80: mol_type = other DNA
aggccaacttttctccttccggccacgcttgcattggactacccaagactgtaactgttccatctactctggccacatca

SEQ ID NO: 126294 - DNA, 80 bp, synthetic construct
  source 1..80: mol_type = other DNA
ccaagcatcgaccacgcccttccccacgggagatccaaaaccacaacctcccggggtcaaccacgaacccccatctaatg

SEQ ID NO: 126295 - DNA, 80 bp, synthetic construct
  source 1..80: mol_type = other DNA
attaaagctcaaaaaggcactttacttagacccacagctagttttatttcctttgtcatgtatttttacagcgacggaac

SEQ ID NO: 126296 - DNA, 80 bp, synthetic construct
  source 1..80: mol_type = other DNA
gtggccccctaccaaggataacatggttgggttttctttggcttttgtgatcatggcctgtgcaatgtcaggtctgctgg

SEQ ID NO: 126297 - DNA, 80 bp, synthetic construct
  source 1..80: mol_type = other DNA
gggttttaactcatcttcagacctggatgtggatagccttaacgggtacacctccggagacatgcatacagacgatgact

SEQ ID NO: 126298 - DNA, 80 bp, synthetic construct
  source 1..80: mol_type = other DNA
ggtttttggtgcccctcatcgcgctgtcgctcgcgtccttccgggggatcaagataggctacacggcccacatccgcaag

SEQ ID NO: 126299 - DNA, 80 bp, synthetic construct
  source 1..80: mol_type = other DNA
gaatggatggaggacaagaccacggtttccgactggacggaagtcccatatgtagggaagagagaagacatctggtgcgg

SEQ ID NO: 126300 - DNA, 80 bp, synthetic construct
  source 1..80: mol_type = other DNA
ctaatgacgcacttcttcagcgtactccagagccaggagcaactggaaaaagcccttgcatttgaaatgtatgggtcagt

SEQ ID NO: 126301 - DNA, 80 bp, synthetic construct
  source 1..80: mol_type = other DNA
ctcccgggagtataaagagggtgatcattcgaggccaaggtatccagctcaacgacgaggcggtgagctcctcaaccggt

SEQ ID NO: 126302 - DNA, 80 bp, synthetic construct
  source 1..80: mol_type = other DNA
ggcgtggtgacggcaggggcagcctgctttcgccccgacccatctcttacctgaaaggctcctcgggtggtccactgctg

SEQ ID NO: 126303 - DNA, 80 bp, synthetic construct
  source 1..80: mol_type = other DNA
gtacatcacgggcagggcggtcctgctggccgcccactttcctctccacctatggcctttcgtcctgctgctcctaacgc

SEQ ID NO: 126304 - DNA, 80 bp, synthetic construct
  source 1..80: mol_type = other DNA
cggagatgatttggtggtcgtagcagagagtgctggagtcaacgaggatatcgccaacctgcgagccttcacggaggcta

SEQ ID NO: 126305 - DNA, 80 bp, synthetic construct
  source 1..80: mol_type = other DNA
tgcgctagggctaaggcaccccctccgtcctgggacaacacgtggaaatgcctgatacgactgaaacccatgctcacagg

SEQ ID NO: 126306 - DNA, 80 bp, synthetic construct
  source 1..80: mol_type = other DNA
atgcccctggccacgagccgcgccacgatttcgcgcgccaggggcgatggaagcggaacgggaaaccgcaacgtgaggtc

SEQ ID NO: 126307 - DNA, 80 bp, synthetic construct
  source 1..80: mol_type = other DNA
ccggcctccggtaccgccccctcggaggaagaagacaatcacacttactgaatctaatgtctctagtgccctggcagagc

SEQ ID NO: 126308 - DNA, 80 bp, synthetic construct
  source 1..80: mol_type = other DNA
tggggcgggtagcaggccagaatgccaggaccctcacgggtcttttaagccccgggccggctcagaaagtccagctaata

SEQ ID NO: 126309 - DNA, 80 bp, synthetic construct
  source 1..80: mol_type = other DNA
aacagagcacagaaggagcactgtggtgagcgtaggaaataaaaggaaatgaactagcaaattcagaacaagaggccaga

SEQ ID NO: 126310 - DNA, 80 bp, synthetic construct
  source 1..80: mol_type = other DNA
ggtcgggtgcgtctggtatgcggttggtatatgtacactttacctgggggcgtgccggtccgccccagcccctcccacgc

SEQ ID NO: 126311 - DNA, 80 bp, synthetic construct
  source 1..80: mol_type = other DNA
ttacacctttacatgattttttacatggaaagttcccagccgccaggaccccgtttaaaaaaataacagtcgttcttgct

SEQ ID NO: 126312 - DNA, 80 bp, synthetic construct
  source 1..80: mol_type = other DNA
cagtgctaaaaagcgaccgaaatagcccgggggaatacatacccgcaggcgtagagacaacattacagcccccataggag

SEQ ID NO: 126313 - DNA, 80 bp, synthetic construct
  source 1..80: mol_type = other DNA
ctccggcggttgcaccagtggatcaatgaagactacccaagcccttgcagcggtgattggctgcgtaccatctgggactg

SEQ ID NO: 126314 - DNA, 80 bp, synthetic construct
  source 1..80: mol_type = other DNA
cgtcacgggcatgcctacctacacctcaggggctaacgagacggacttcctactgcttaacaacacaaggccaccactgg

SEQ ID NO: 126315 - DNA, 80 bp, synthetic construct
  source 1..80: mol_type = other DNA
tttttgctcccgaactagcgaaccacacgttcgtcatagacggtccagagacaaaggaatgtccgtccgccgatagagcg

SEQ ID NO: 126316 - DNA, 80 bp, synthetic construct
  source 1..80: mol_type = other DNA
gccaagagctacctgggcagaaaacatccacgccgccataaatcaagtaagagccataattggtgatgaaaaatacatag

SEQ ID NO: 126317 - DNA, 80 bp, synthetic construct
  source 1..80: mol_type = other DNA
catggccaaaaatgaggtgttctgtattgatcccgccaagggcggaaaaaagccagctcgcctcatcgtataccctgacc

SEQ ID NO: 126318 - DNA, 80 bp, synthetic construct
  source 1..80: mol_type = other DNA
tgagcttaaccccctggaagcgcatttttactgtttttaggcaaggtgtatgaactctactaactctacgggcttctctg

SEQ ID NO: 126319 - DNA, 80 bp, synthetic construct
  source 1..80: mol_type = other DNA
cgggtgtgctctcccccccaaaggactgccacccgtgccgccccctaggaggaagaaggtcgtgcagctggatgagtcgt

SEQ ID NO: 126320 - DNA, 80 bp, synthetic construct
  source 1..80: mol_type = other DNA
gtatagaccccaatatccgcactggggtaagaactatcactacgggcggggcaatcacatactctacttatggcaaattc

SEQ ID NO: 126321 - DNA, 80 bp, synthetic construct
  source 1..80: mol_type = other DNA
gaattacataccctgaatttttggttgcctttgttcgctgtcagaccgatttgcatacaagtgacaacctaaaatctgtt

SEQ ID NO: 126322 - DNA, 80 bp, synthetic construct
  source 1..80: mol_type = other DNA
gacgtagtagtgttaggctcacaagaaggagcgatgcattcagctttaacaggagctacagaaatccaaatgacttctgg

SEQ ID NO: 126323 - DNA, 80 bp, synthetic construct
  source 1..80: mol_type = other DNA
catgggtgcgccttgcccccccccgggccggttccaataccgccgcctaggcggaagaaggtcgtacacctggatgactc

SEQ ID NO: 126324 - DNA, 80 bp, synthetic construct
  source 1..80: mol_type = other DNA
gaatccaatgtgtcttctgccttggcggagctcgccactaagaccttcggtagctccggatcgtcggccgttgatagcgg

SEQ ID NO: 126325 - DNA, 80 bp, synthetic construct
  source 1..80: mol_type = other DNA
gatctgggcccggccggattacaatccacctcttaccgagacgtggaagcagcaggactacaagcctccgaccgtccacg

SEQ ID NO: 126326 - DNA, 80 bp, synthetic construct
  source 1..80: mol_type = other DNA
cggattacggggactgtcggtcccggtcccgccggttcttcgatgtgccacacccaaggatgcgttggtggcgatttcgg

SEQ ID NO: 126327 - DNA, 80 bp, synthetic construct
  source 1..80: mol_type = other DNA
gttatctgattttagagtatggctgaaagccaaactcctcccacgcctgccggggatccccttcctctcgtgccaaacgg

SEQ ID NO: 126328 - DNA, 80 bp, synthetic construct
  source 1..80: mol_type = other DNA
gcaagtcggcacctatggcctcaatactttcaccaatatggaagcccaattgattagacagatggagggagaaggaatct

SEQ ID NO: 126329 - DNA, 80 bp, synthetic construct
  source 1..80: mol_type = other DNA
ccagcgattttgtatacagtaagtaggagctttttcgatttgcgcatggtggtgggattgttaaagtgtgttgggcttat

SEQ ID NO: 126330 - DNA, 80 bp, synthetic construct
  source 1..80: mol_type = other DNA
gcgatcctgaaactgatgaagctacagaggcggaagaagaggcggctatgccgacttatgtgaatgaaaatgaaaatgag

SEQ ID NO: 126331 - DNA, 80 bp, synthetic construct
  source 1..80: mol_type = other DNA
cctgtccgaccctggctcccgccagcgggtgcggtgggtcgtgggtgttgagagcacacaggcgggacacctcgatcacc

SEQ ID NO: 126332 - DNA, 80 bp, synthetic construct
  source 1..80: mol_type = other DNA
gagagctgaaccaactattttggatgttgatctcagaccagcctcggcttggactctctatgctgtggctaccaccataa

SEQ ID NO: 126333 - DNA, 80 bp, synthetic construct
  source 1..80: mol_type = other DNA
gagatttcctccccctacaactaaatttccccctgctatgcaggggaggcggttcttgttctccccgaaccatcatcacc

SEQ ID NO: 126334 - DNA, 80 bp, synthetic construct
  source 1..80: mol_type = other DNA
aaggtataggcagttcccacggacccttagacggcatttatttaacgtacgaagaaacatgtccccttgtggctattatt

SEQ ID NO: 126335 - DNA, 80 bp, synthetic construct
  source 1..80: mol_type = other DNA
agtctggacgtgttttctcaggggtggggtaggctgagtgcgtataacacctcaggaccatctgatgacaaaccctattg

SEQ ID NO: 126336 - DNA, 80 bp, synthetic construct
  source 1..80: mol_type = other DNA
atgtccggaatgatctgatctcttatggaggtccctggaagctgagtgccacctgggatgggattgaggaggtccaaatg

SEQ ID NO: 126337 - DNA, 80 bp, synthetic construct
  source 1..80: mol_type = other DNA
gggccaaggttatcgccatcttgttgctgttcactggcgtggacgcagagacccgcaccgtcggggcgtctgcgggccgt

SEQ ID NO: 126338 - DNA, 80 bp, synthetic construct
  source 1..80: mol_type = other DNA
ggatggaaatccgttgtggagaagggctcgtcgtgtggaaagaggtgtcggaatggtatgacggttacgcttatcatcca

SEQ ID NO: 126339 - DNA, 80 bp, synthetic construct
  source 1..80: mol_type = other DNA
gcttggaagagccggctcgtctagaacccccacacgatgaacaggagaagaccaacgctgggctggagcatggctaccta

SEQ ID NO: 126340 - DNA, 80 bp, synthetic construct
  source 1..80: mol_type = other DNA
taataatacccctggagatattctgtttgatttgcatctaggaccacaccttaatccctttctacagcatttgtcccaaa

SEQ ID NO: 126341 - DNA, 80 bp, synthetic construct
  source 1..80: mol_type = other DNA
cgttctaggggtggccactcttggcatactgtggtgctttgtggcaagaacttcggttagccgaatgtttttgggcacgg

SEQ ID NO: 126342 - DNA, 80 bp, synthetic construct
  source 1..80: mol_type = other DNA
tcactgtccttgatctgcaccccggagcaggaaagacgcgcaagatactaccccaaatcatcaaggaggccatcaacaaa

SEQ ID NO: 126343 - DNA, 80 bp, synthetic construct
  source 1..80: mol_type = other DNA
ggcaatgcccgggccttttttaatgccgccccatccaaacataaactcccgttagctcttggatcaaaccaggatcctac

SEQ ID NO: 126344 - DNA, 80 bp, synthetic construct
  source 1..80: mol_type = other DNA
aaaagggtctactacctgacccgcgaccctgagactcccctggcacgggctgcctgggagacagctcgacacactccagt

SEQ ID NO: 126345 - DNA, 80 bp, synthetic construct
  source 1..80: mol_type = other DNA
ggatataatcgccgggaggcactgggggattcttttcggcattgcatatttctccatggctgccaactgggccaaggtta

SEQ ID NO: 126346 - DNA, 80 bp, synthetic construct
  source 1..80: mol_type = other DNA
gggcttaatacacctccaccaaaacattgtggacgtgcagtacctctatggcttgaccccggctataaccaggtacatgg

SEQ ID NO: 126347 - DNA, 80 bp, synthetic construct
  source 1..80: mol_type = other DNA
agtcatgtaccaacaatatgatgagatggaagaatgctctaagcatatcccctaccttgttgagggccgggctattgcag

SEQ ID NO: 126348 - DNA, 80 bp, synthetic construct
  source 1..80: mol_type = other DNA
ctatgaagacggtttgcctcctagcgatcctgaaactgatgaggctacagaagcggaagaagaggcggctatgccgactt

SEQ ID NO: 126349 - DNA, 80 bp, synthetic construct
  source 1..80: mol_type = other DNA
ggccagctgccctgatatatcaggaaaatccccctcctaccactgtacttttgcctcgcgacgcccaggccgaagtccat

SEQ ID NO: 126350 - DNA, 80 bp, synthetic construct
  source 1..80: mol_type = other DNA
tctgtcccaccgactgcttcaggaaacatcctgatgccacatacagccggtgtggcgcggggccctggttgacacctcga

SEQ ID NO: 126351 - DNA, 80 bp, synthetic construct
  source 1..80: mol_type = other DNA
tggtggcatagagcacaggcttgacgcggcatgcaactggacccgcggtgagcgatgtgatctcgaggacagagataggg

SEQ ID NO: 126352 - DNA, 80 bp, synthetic construct
  source 1..80: mol_type = other DNA
aaaattcttttggacaacatccacctcccaaatggcctagtagctcagctgtacggtcccgaaagagataaaacttacac

SEQ ID NO: 126353 - DNA, 80 bp, synthetic construct
  source 1..80: mol_type = other DNA
atgggcatgaaattagcaatggatacgtacaaaatgcggtgggtacgttggatactgttattaccggtcatacaaatgtt

SEQ ID NO: 126354 - DNA, 80 bp, synthetic construct
  source 1..80: mol_type = other DNA
ctagtcagttgtctgcaccttctttgaaggcgacatgtactacccatcacgactccccagacgctgacctcattgaggcc

SEQ ID NO: 126355 - DNA, 80 bp, synthetic construct
  source 1..80: mol_type = other DNA
gggcaaccacgtgtcgcccacgcactatgtgcctgagactgatgcttctgtggccgtaacaaagatacttagttctctca

SEQ ID NO: 126356 - DNA, 80 bp, synthetic construct
  source 1..80: mol_type = other DNA
agggccaaggacttgcctcaatacctggcaaggcagctttcccatcaacagttacactgaagggccttgcgtccccaggc

SEQ ID NO: 126357 - DNA, 80 bp, synthetic construct
  source 1..80: mol_type = other DNA
gccatagcagagcagttcaagcacaaagcactcggcctgctccaaaccacggcaaggcgggcagaggaaatcaaaccggc

SEQ ID NO: 126358 - DNA, 80 bp, synthetic construct
  source 1..80: mol_type = other DNA
cgaggagcccgcccttcgcatatgctactatccccgcagtcccgggggctttgttcagtttgtaacttcgacccgcaacg

SEQ ID NO: 126359 - DNA, 80 bp, synthetic construct
  source 1..80: mol_type = other DNA
ggccatataacgggtcaccgtatggcatgggatatgatgatgaactggtcccctacgacagcgctggtagtagcccagct

SEQ ID NO: 126360 - DNA, 80 bp, synthetic construct
  source 1..80: mol_type = other DNA
tctccttttaagtcgtggatcatggttgtcaattccatcgccccactggcttctcactctctgtgcgctctctgaagtta

SEQ ID NO: 126361 - DNA, 80 bp, synthetic construct
  source 1..80: mol_type = other DNA
ggcagtaaaacacgtcgagctgttgttcgtccagccccgcgaaaataacgtcgaggtcgtcgtcgggaaaatcgtccggg

SEQ ID NO: 126362 - DNA, 80 bp, synthetic construct
  source 1..80: mol_type = other DNA
agaatccgatacagccttggagtctgaggtcgaatccgagacagcatcggattcgaccgagtctggggaccaggatgaag

SEQ ID NO: 126363 - DNA, 80 bp, synthetic construct
  source 1..80: mol_type = other DNA
ctcatattgaacagcactagaccaccccggggagcttggttcgggtgctcctggatgaactcaaccgggttcacgaagac

SEQ ID NO: 126364 - DNA, 80 bp, synthetic construct
  source 1..80: mol_type = other DNA
cggcacgcctaatcgtataccctgatcttggtgtaagggtgtgcgaaaagagggctttgtacgatcttgcacagaaacta

SEQ ID NO: 126365 - DNA, 80 bp, synthetic construct
  source 1..80: mol_type = other DNA
aatcaagtgggagtacgtagtcctcgcatttctggtgctagcagatgctcgtgtctgcgcatgtctctggctcatgttgc

SEQ ID NO: 126366 - DNA, 80 bp, synthetic construct
  source 1..80: mol_type = other DNA
tctggagaataagcatctgcgccacaataactacaaacagtttcacattcaactgaccaggtcagcttaggacatgatgg

SEQ ID NO: 126367 - DNA, 80 bp, synthetic construct
  source 1..80: mol_type = other DNA
aaccacatcaactccgtgtgggaggacttgctggaagactctgtcacccctataccaactaccatcatggccaagaatga

SEQ ID NO: 126368 - DNA, 80 bp, synthetic construct
  source 1..80: mol_type = other DNA
cagaacctgacactgctctttgttaacttaacgcataatggagcatacattggttataacaaagacggttctaatagaga

SEQ ID NO: 126369 - DNA, 80 bp, synthetic construct
  source 1..80: mol_type = other DNA
tgagaggagaagcaaggaaaacctttgtggacctaatgagaagaggggacttaccagtctggttggcttataaagtggca

SEQ ID NO: 126370 - DNA, 80 bp, synthetic construct
  source 1..80: mol_type = other DNA
cgcactgctcggggctgacgagccgccgcagcagcggcgtcgtcaggtggtggtcgtagcacgcgcgtatcagcgcctcg

SEQ ID NO: 126371 - DNA, 80 bp, synthetic construct
  source 1..80: mol_type = other DNA
gacaccgttgttctgtgcgaggcgtacgacacaggttgcgcatggtatgaactgactccatctgagacgactgtgagact

SEQ ID NO: 126372 - DNA, 80 bp, synthetic construct
  source 1..80: mol_type = other DNA
cctggtggctttccttcgtttcctaacaatcccaccaacagcagggatattgaagagatggggaacaattaaaaaatcaa

SEQ ID NO: 126373 - DNA, 80 bp, synthetic construct
  source 1..80: mol_type = other DNA
tgcttcagtccgtccgcggaaagatgtaaatctttgtcaacgtcccaaaatacgcaggccgggatgttggctgtgaccct

SEQ ID NO: 126374 - DNA, 80 bp, synthetic construct
  source 1..80: mol_type = other DNA
ccaaacatgcagtgtcgagaggaacagccaaactgaggtggtttgtggagaggaatctcgtgaaaccggaaggaaaagtc

SEQ ID NO: 126375 - DNA, 80 bp, synthetic construct
  source 1..80: mol_type = other DNA
ataaccgtgtttaccatcactccagcctacaaggttctcctacaacgcagtacatggtggttgtgctacatgctgatctt

SEQ ID NO: 126376 - DNA, 80 bp, synthetic construct
  source 1..80: mol_type = other DNA
cgccggcgaagaggcccagcgctgcgacaatatcttcagcgccctctggatgccagacctgtttttcaagcgcctgattc

SEQ ID NO: 126377 - DNA, 80 bp, synthetic construct
  source 1..80: mol_type = other DNA
cctagttattgtggctatcactgtgtttaccttgaccccacattacaaatggctgctcgtgaggctgatttggtggaacc

SEQ ID NO: 126378 - DNA, 80 bp, synthetic construct
  source 1..80: mol_type = other DNA
tgggaaagagagaagaccaatggtgtggatctctgatagggcttaactccagagcaacctgggcaaagaacatacaagtg

SEQ ID NO: 126379 - DNA, 80 bp, synthetic construct
  source 1..80: mol_type = other DNA
aacgctgcgggaggaatgagaatcgacggcgccaacttaattcttgatgtagattacccctttgaagcaatccgccaact

SEQ ID NO: 126380 - DNA, 80 bp, synthetic construct
  source 1..80: mol_type = other DNA
ctccctttgtatcccccaatgggtttcaagagagtccccctggggtactctctttgcgcctatccgaacctctagttacc

SEQ ID NO: 126381 - DNA, 80 bp, synthetic construct
  source 1..80: mol_type = other DNA
aaaaacgaggttttctgtgttgcaccagaaaaggggggccgcaagccagctcgcctcatcgtgtttccggatttgtcggt

SEQ ID NO: 126382 - DNA, 80 bp, synthetic construct
  source 1..80: mol_type = other DNA
tacagacaacgccgggtaccttcaagactcctgaaggcgaagttggagctatagctctagatttcaaacccggcacatct

SEQ ID NO: 126383 - DNA, 80 bp, synthetic construct
  source 1..80: mol_type = other DNA
ttgcactgatcatgaactcctctggatctactggtctgcctaaaggtgtcgctctgcctcatagaactgcctgcgtgaga

SEQ ID NO: 126384 - DNA, 80 bp, synthetic construct
  source 1..80: mol_type = other DNA
tcgtggtagggtcccagctcccttgcgagcctgaacctgatgtagcagttctaacatcaatgcttactgatccatcttat

SEQ ID NO: 126385 - DNA, 80 bp, synthetic construct
  source 1..80: mol_type = other DNA
gatgaggactctttcccctcgtgtcccgatgatccattttactcgcaaattattgccggttatgcgccccaaggcccccc

SEQ ID NO: 126386 - DNA, 80 bp, synthetic construct
  source 1..80: mol_type = other DNA
tttagtctcagcagggagtggaaaggtggacaacttcacaatgggagtactgtgtttggcaatcctcttcgaagaggtga

SEQ ID NO: 126387 - DNA, 80 bp, synthetic construct
  source 1..80: mol_type = other DNA
gagttcaagaagtcagagggtacacaaagggcggtcccggacatgaagagccccaactggtgcaaagttatggatggaac

SEQ ID NO: 126388 - DNA, 80 bp, synthetic construct
  source 1..80: mol_type = other DNA
gagcaagccccggaaactaccgaagtcactctcattacctcccccttctttttttcttatatcagagaagatgactgaca

SEQ ID NO: 126389 - DNA, 80 bp, synthetic construct
  source 1..80: mol_type = other DNA
gtactgcctatccgtaggcagtgttgtggtggtggggcgtgtggtcctcggatcccataaagtcaccgctccagaccggg

SEQ ID NO: 126390 - DNA, 80 bp, synthetic construct
  source 1..80: mol_type = other DNA
taaagccaaccactgcaatgcaaccgtgctatggctcctacgctcgtccaaccaacgaacacggaggacaatccaaggat

SEQ ID NO: 126391 - DNA, 80 bp, synthetic construct
  source 1..80: mol_type = other DNA
gagatgagtaccattatgggggtgcaaccaatgaggacgaccatgatctggccaactggactgaagcaaagattctcctt

SEQ ID NO: 126392 - DNA, 80 bp, synthetic construct
  source 1..80: mol_type = other DNA
ctggcgctcaccacgtggttgagcagcatgggcgtaaagacgggctccgagcgcgccccggacccgtccatgtagatcag

SEQ ID NO: 126393 - DNA, 80 bp, synthetic construct
  source 1..80: mol_type = other DNA
tacgccgccgggcccgcgcaacgcggggtgatcggcgagtactgcatacaggattccctgctggtgggccagctgttttt

SEQ ID NO: 126394 - DNA, 80 bp, synthetic construct
  source 1..80: mol_type = other DNA
gcgagtgcctggtgctgtgcccccccctgtggaccggcgaccgcctggtcttcgattcgcccgttcagcggctgtgcccc

SEQ ID NO: 126395 - DNA, 80 bp, synthetic construct
  source 1..80: mol_type = other DNA
aagcgcctcgacgagatggagcagggatggggacagctcggcgtcgacgacaactcgtcttccgagtcaaggccttactg

SEQ ID NO: 126396 - DNA, 80 bp, synthetic construct
  source 1..80: mol_type = other DNA
agcaattcaagcagaaggttctcggcctcatccagacctcagccaaacaagcagaagagctgaagccggttgtcacctcg

SEQ ID NO: 126397 - DNA, 80 bp, synthetic construct
  source 1..80: mol_type = other DNA
aagttgtcaattgcgacgatgggttccgcttatggattccaatactcgccgcagcagcgggtcgaacgtctgctagagat

SEQ ID NO: 126398 - DNA, 80 bp, synthetic construct
  source 1..80: mol_type = other DNA
cccctccgtgcaagcccctgctgcgtgaagaagtcacattccaagttggactccatcagtacgtagtagggtcgcaattg

SEQ ID NO: 126399 - DNA, 80 bp, synthetic construct
  source 1..80: mol_type = other DNA
gatgttgaagtccaagatccaaggcttgctgcagcaggcctctaagcaggcccaggacatacaacccgctatgcaggctt

SEQ ID NO: 126400 - DNA, 80 bp, synthetic construct
  source 1..80: mol_type = other DNA
gtggctcaaaggcaagctgacgcctgccctcccgggcattcctttcctttcatgccaacgagggtaccaggaggtttggc

SEQ ID NO: 126401 - DNA, 80 bp, synthetic construct
  source 1..80: mol_type = other DNA
ccgtgtttgacatagtggctggggcccattggggcattttggcaggcttggcctactattctatgcagggtaactgggcc

SEQ ID NO: 126402 - DNA, 80 bp, synthetic construct
  source 1..80: mol_type = other DNA
ctggcggcactctggcccactctgccttcaagtttacgagcctgttttccgcgggcccgaaacagaacctgcatttggtg

SEQ ID NO: 126403 - DNA, 80 bp, synthetic construct
  source 1..80: mol_type = other DNA
ttctttgaccgcggccctcaacagacaatcagtttgatccacaccaatggtagttggcacataaaccggaccgccctcaa

SEQ ID NO: 126404 - DNA, 80 bp, synthetic construct
  source 1..80: mol_type = other DNA
gacttggaagagggcgaagggctggcgagactggaggcgccgtccccggagcgacatccccgcgtgcagctgcagaagga

SEQ ID NO: 126405 - DNA, 80 bp, synthetic construct
  source 1..80: mol_type = other DNA
gccagtcccactatgttactggccagacagctgacaatctgaagtgcccctgccaggtaccatctcctgaattcttctca

SEQ ID NO: 126406 - DNA, 80 bp, synthetic construct
  source 1..80: mol_type = other DNA
cgtcagcttcagcagccattataaacaccccacggaccggatagtgaatactcacggtgtggaggcaaactgaggaatga

SEQ ID NO: 126407 - DNA, 80 bp, synthetic construct
  source 1..80: mol_type = other DNA
ccgggacggggccattttgctaatgagtctcctttatccatccttggtctttgacatctccaagatcttgatagctgtac

SEQ ID NO: 126408 - DNA, 80 bp, synthetic construct
  source 1..80: mol_type = other DNA
atgaaaacgatcagtacatatacatgggagaaccactagaaaatgatgaagactgcgcccattggaaagaagcaaagatg

SEQ ID NO: 126409 - DNA, 80 bp, synthetic construct
  source 1..80: mol_type = other DNA
ttgttgggggccaggttaataaagttgatcgcgccgtagtccagggaaaactttttaatgaacgcgatggtctcgatgtc

SEQ ID NO: 126410 - DNA, 80 bp, synthetic construct
  source 1..80: mol_type = other DNA
aagtccaggaaagaatgcccgttttcaaaccgggtctggaattctttccagatagaggagtttgggacgggagtgttcac

SEQ ID NO: 126411 - DNA, 80 bp, synthetic construct
  source 1..80: mol_type = other DNA
acttgctccagacctcgctcttgcgcgtcccttactttgtgagggcccatgcattgattaaaatctgcagtctagtgcga

SEQ ID NO: 126412 - DNA, 80 bp, synthetic construct
  source 1..80: mol_type = other DNA
gcccaaactctttcgaagctgtagaaggagtggaaggactagaggttagaggagaccccgcatttgcatcaaaacagcat

SEQ ID NO: 126413 - DNA, 80 bp, synthetic construct
  source 1..80: mol_type = other DNA
atggtggctacaataccatctgaccagggcagaggctcttctgtatgtctacatcccgcccctagaagttaggggcggcc

SEQ ID NO: 126414 - DNA, 80 bp, synthetic construct
  source 1..80: mol_type = other DNA
acgagcgaaacctgagagtcttcacggaggctatgaccaggtactccgcccctcccggtgaccttcccagaccggaatat

SEQ ID NO: 126415 - DNA, 80 bp, synthetic construct
  source 1..80: mol_type = other DNA
attctcctgcttgaccgtcccgacatcggccctgacatatggtaactcctctggcctctactatctcaccaatgactgcc

SEQ ID NO: 126416 - DNA, 80 bp, synthetic construct
  source 1..80: mol_type = other DNA
ccgggtgcgggttgcgtggtcctccgcgcccgcccgaaccccctccgtcgcccgcccccccgcgggcccttgaggtggcg

SEQ ID NO: 126417 - DNA, 80 bp, synthetic construct
  source 1..80: mol_type = other DNA
acctccacagcccctactatagccagcaaatcccggcagtctcgacagataaagacagcggcggcgacctccaacagaaa

SEQ ID NO: 126418 - DNA, 80 bp, synthetic construct
  source 1..80: mol_type = other DNA
cccttctggggtggcccatcgtccctaacaggaagatgagtcagtggggatccgtggcgatccttgtccagccggacagc

SEQ ID NO: 126419 - DNA, 80 bp, synthetic construct
  source 1..80: mol_type = other DNA
cccccccatgcaagcccttgctgcgggatgaggtcacattcagcgtcggcctccacgagtttccggtcggctctcagtta

SEQ ID NO: 126420 - DNA, 80 bp, synthetic construct
  source 1..80: mol_type = other DNA
agtagatttattaccggaacttgcttctgagttagatgtccaaggagccctggtaaatctcaggaccaaagtcttagagg

SEQ ID NO: 126421 - DNA, 80 bp, synthetic construct
  source 1..80: mol_type = other DNA
aatgacggctcagaaaaaccatcgtcgtcggatgggtgcacttcatattccttgtaacttgtatcacttacgatcttatg

SEQ ID NO: 126422 - DNA, 80 bp, synthetic construct
  source 1..80: mol_type = other DNA
aaggagcgtgggcaaaggtcgtcgtcatcctcctgctgtgcgctggggtggacgcgaacacgcgcactgttggtggcaac

SEQ ID NO: 126423 - DNA, 80 bp, synthetic construct
  source 1..80: mol_type = other DNA
tggggaccaggaggaagccccccgcatcggtggccgtagggccccccggaggcttggggtgcggttttttctggacatgt

SEQ ID NO: 126424 - DNA, 80 bp, synthetic construct
  source 1..80: mol_type = other DNA
ggaccagttactcattaagcgcgcaagtcccctttcagaagacatgcatgacccagatgcctgtgacgagggtaaaccag

SEQ ID NO: 126425 - DNA, 80 bp, synthetic construct
  source 1..80: mol_type = other DNA
tttccattatgaaaaacacaacaaacacaagaagaggaactggcaacataggagagacacttggagaaaaatggaaaagt

SEQ ID NO: 126426 - DNA, 80 bp, synthetic construct
  source 1..80: mol_type = other DNA
gccggactaatggtatgcaacccaaacaagaagagagggtggccagctaccgagttcctttcagcggttgggttgatgtt

SEQ ID NO: 126427 - DNA, 80 bp, synthetic construct
  source 1..80: mol_type = other DNA
cacccagagttttcccgggctcttcagccttgccccgtctcagaaaatccaccttataaacaccaacggcagctggcaca

SEQ ID NO: 126428 - DNA, 80 bp, synthetic construct
  source 1..80: mol_type = other DNA
ggctaccgcaggtgccgagctagcggtgttctcaccactagtcttggaaacaccttaacctgctatctaaaggcgcaagc

SEQ ID NO: 126429 - DNA, 80 bp, synthetic construct
  source 1..80: mol_type = other DNA
gcacaaccacagcgagtggcaagctggtcactgattggtgttgcaggagctgttccttgccaccactgcgatacaccaca

SEQ ID NO: 126430 - DNA, 80 bp, synthetic construct
  source 1..80: mol_type = other DNA
cgttatgggggctttgctgtactacagcatggctactaattgggctaaggtcatcatagtcctactcatgttcgcaggag

SEQ ID NO: 126431 - DNA, 80 bp, synthetic construct
  source 1..80: mol_type = other DNA
ctggaccgagcagtacaagttccaggccgacagccccaagagactggccaccgccatcgccggcgcctgggagaacggcg

SEQ ID NO: 126432 - DNA, 80 bp, synthetic construct
  source 1..80: mol_type = other DNA
gagacgtggtggttgtcgccaccgatgccctcatgacaggatatactggggacttcgactctgtgatcgactgcaacgtg

SEQ ID NO: 126433 - DNA, 80 bp, synthetic construct
  source 1..80: mol_type = other DNA
acaacgagcttgttacgtgcaacggagaaaccgttgctttgaactcagagttctttgaagactttgactttgatgagaat

SEQ ID NO: 126434 - DNA, 80 bp, synthetic construct
  source 1..80: mol_type = other DNA
acattgatgcccacttcctctcacaaacaaaacaggggggagagaatttcgcgtacttggttgcttatcaggcgaccgtg

SEQ ID NO: 126435 - DNA, 80 bp, synthetic construct
  source 1..80: mol_type = other DNA
agaacctgagggccggcctggacccttcaacggaattgtaactgagcctgatcccgaagagggtactagcagtgggcaaa

SEQ ID NO: 126436 - DNA, 80 bp, synthetic construct
  source 1..80: mol_type = other DNA
actacatgaacgggcgggtggtgccgccatctctagtagacacctatgtgaacattggtgccaggtggtctctggatgcc

SEQ ID NO: 126437 - DNA, 80 bp, synthetic construct
  source 1..80: mol_type = other DNA
cgacatccagacagagagttccatctaccagtgctgcaacctagagcctgcggcacgtaaggctattactgccctcactg

SEQ ID NO: 126438 - DNA, 80 bp, synthetic construct
  source 1..80: mol_type = other DNA
aataacacccccggcgatgctctgcccgatccgagtttgggtccccatcttaatcctttcttgctccatctatcacaaat

SEQ ID NO: 126439 - DNA, 80 bp, synthetic construct
  source 1..80: mol_type = other DNA
tctggcaggggaagatgttgagcacgaagttgactggcccgggcaactacccggcgattgatgtcttgaatttggcggcg

SEQ ID NO: 126440 - DNA, 80 bp, synthetic construct
  source 1..80: mol_type = other DNA
aaaacattccagccagaacctcaaataggtgaagaaaactggcaagatggagatgttttctatggaggcaggactattaa

SEQ ID NO: 126441 - DNA, 80 bp, synthetic construct
  source 1..80: mol_type = other DNA
ccttagggttgacgggggctcactaggtacaaacctaagtcctgacttaaggtttaacagcagtggagccatagcttttg

SEQ ID NO: 126442 - DNA, 80 bp, synthetic construct
  source 1..80: mol_type = other DNA
tgtgctgtaacacgagcccacccgcgagtggcgtggccgaccttagcctctggggcgccccctgtcgtttgggtcccccc

SEQ ID NO: 126443 - DNA, 80 bp, synthetic construct
  source 1..80: mol_type = other DNA
agcggaagtggatgacagggagatctccacggcggccgagtgccacagaccacctagacccaaatacccaccggcgttgc

SEQ ID NO: 126444 - DNA, 80 bp, synthetic construct
  source 1..80: mol_type = other DNA
tggttcacggtaggcgccggcgggggagacatttatcacagcatgtctcatgcccgaccccgctatttactcctgtgcct

SEQ ID NO: 126445 - DNA, 80 bp, synthetic construct
  source 1..80: mol_type = other DNA
gggcaccccgccgtcggtccggaagcagcagtggagaaagaaatgccggtggatgtcgttgatggtcagggcgaagcgcg

SEQ ID NO: 126446 - DNA, 80 bp, synthetic construct
  source 1..80: mol_type = other DNA
ctaagtccatagatttcatccccatcgaatcactggacattgcatctaggtctcctagctttactgataatggcaccccc

SEQ ID NO: 126447 - DNA, 80 bp, synthetic construct
  source 1..80: mol_type = other DNA
gggaaatcccacacccagtttaaaggctgtcactttacagcaagtattacctgtgctcgcgacctcagaagaaaagcgag

SEQ ID NO: 126448 - DNA, 80 bp, synthetic construct
  source 1..80: mol_type = other DNA
tagtgttgtgcctcatgtcggtggtcatgaaccgaacagtggcctccataacagaggcttcagctgtgggactggcagca

SEQ ID NO: 126449 - DNA, 80 bp, synthetic construct
  source 1..80: mol_type = other DNA
gaggagcagagcgtggtctgctgctccatgtcatactcctggaccggggctctaataactccctgtagccccgaagagga

SEQ ID NO: 126450 - DNA, 80 bp, synthetic construct
  source 1..80: mol_type = other DNA
gcactatggtcatcttgctggccgtcctaaccctgtcaccgtattacaagcggtggttggctcgggtggtttggtggtta

SEQ ID NO: 126451 - DNA, 80 bp, synthetic construct
  source 1..80: mol_type = other DNA
gaacatggcgaggagacggcgtcatgacaacacgctgtccatgtggggctactatctcaggccacgtgaagaacgggtca

SEQ ID NO: 126452 - DNA, 80 bp, synthetic construct
  source 1..80: mol_type = other DNA
tatgttcgactcctctgtgagctggcctggtaacgaccgactacttactcccaacgagtttgaaatcaaacgaaccgtgg

SEQ ID NO: 126453 - DNA, 80 bp, synthetic construct
  source 1..80: mol_type = other DNA
accctcttactgaacattctcggagggtggttcgcgtctcagctggcaccgcctacagcggccacggcgttcgtcgcgag

SEQ ID NO: 126454 - DNA, 80 bp, synthetic construct
  source 1..80: mol_type = other DNA
aaacagaccccgattcccacaaccatcatggcaaagaacgaggtgttttgcgttgatacgtcgaaggggtggcgcaagcc

SEQ ID NO: 126455 - DNA, 80 bp, synthetic construct
  source 1..80: mol_type = other DNA
aagaaggtcactttcgaccgattacagattctggaccaacactacaacaatgtagtgaaggaggtgaaactccgggcctc

SEQ ID NO: 126456 - DNA, 80 bp, synthetic construct
  source 1..80: mol_type = other DNA
tccccgggattctatcaccgggtgcgttagtagtcggcgtcatctgcgcggccatcttacgccgccacgtgggacaaggg

SEQ ID NO: 126457 - DNA, 80 bp, synthetic construct
  source 1..80: mol_type = other DNA
gatgataatggaaaacttctagaaggatctagtttagataaagattattggaacttcagaaatgatgattctattatgcc

SEQ ID NO: 126458 - DNA, 80 bp, synthetic construct
  source 1..80: mol_type = other DNA
tcccgaaggtggtcatcttgcaggtctgccggcccatggtgggcacgcagccgggcttgtggttgcaatcgcagtgcagg

SEQ ID NO: 126459 - DNA, 80 bp, synthetic construct
  source 1..80: mol_type = other DNA
atgctgaacctggggacccgcaactactacacctccagctgctacctggtaaacccccaggccaccacaaacaaggcgac

SEQ ID NO: 126460 - DNA, 80 bp, synthetic construct
  source 1..80: mol_type = other DNA
agtggtggttattctcctcatgatagcaggggttgagagcaacaccatcatcggttctaacgcgggcagtaacacgcgga

SEQ ID NO: 126461 - DNA, 80 bp, synthetic construct
  source 1..80: mol_type = other DNA
tcaatgctacttctgctgccagcagccagggatggatttgtggaatagttttcatctgtgctgcctggtatgttcgcggc

SEQ ID NO: 126462 - DNA, 80 bp, synthetic construct
  source 1..80: mol_type = other DNA
ggccataggatggcgtgggatatgatgatgaactggtctcccacggtggcctacgcagtttccagcgttttgaggatacc

SEQ ID NO: 126463 - DNA, 80 bp, synthetic construct
  source 1..80: mol_type = other DNA
gaaccgtctcggaaggaggaccccacgtgctttagcctcaaagcccagtgtcagaccacactctagtgtgccactctgcg

SEQ ID NO: 126464 - DNA, 80 bp, synthetic construct
  source 1..80: mol_type = other DNA
aggggcaggttggaatgttcgcgatacagcttgtcttgcaaaatcatacgctcaaatgtggctgctgctatatttccatc

SEQ ID NO: 126465 - DNA, 80 bp, synthetic construct
  source 1..80: mol_type = other DNA
tgttgctgtttgccggcgtcgacgcggaaacctacgtcaccgggggaagtgttggccgggccactgccggattcaccgac

SEQ ID NO: 126466 - DNA, 80 bp, synthetic construct
  source 1..80: mol_type = other DNA
tcataggccaggcggaggctgcgctagagaacctaatcgtcctcaacgcggcttccgccgccagtatccaggggtgtgga

SEQ ID NO: 126467 - DNA, 80 bp, synthetic construct
  source 1..80: mol_type = other DNA
ctgacgtcttcctccttgagagtgcgcgacctccgctaggagcctggtttgggtgtacctggatgaactccaccggctac

SEQ ID NO: 126468 - DNA, 80 bp, synthetic construct
  source 1..80: mol_type = other DNA
ccgcactactggtggcttagccagtctcttctccatcggtcccaggcaaaatctacaactcatcaacaccactggcagct

SEQ ID NO: 126469 - DNA, 80 bp, synthetic construct
  source 1..80: mol_type = other DNA
ccggttgctccttttctatcttcttgctggccctgctgtcctgcatcaccaccccggtctccgctgccgaagtgaagaac

SEQ ID NO: 126470 - DNA, 80 bp, synthetic construct
  source 1..80: mol_type = other DNA
gcgtcgacgaggcgtcggcgggcctgacgctcggcggcgatgcgctgcgcgtcccttttttggattttgccaccgcgacg

SEQ ID NO: 126471 - DNA, 80 bp, synthetic construct
  source 1..80: mol_type = other DNA
tcgacgagcactgagaccgcaaccaacagaattaaaatattcatggaaaagttggggaaaatcaaaaatagttagctcag

SEQ ID NO: 126472 - DNA, 80 bp, synthetic construct
  source 1..80: mol_type = other DNA
aagtccggcgagagctggttgttaaagtactggtagcccgggacgcgggtcacggggacgcccaggctcggagccacgta

SEQ ID NO: 126473 - DNA, 80 bp, synthetic construct
  source 1..80: mol_type = other DNA
accacacgatgcccgtgcggtgctaacgtctctggcaatgtccgcttgggttcgatgaggataacagggccaaaaacttg

SEQ ID NO: 126474 - DNA, 80 bp, synthetic construct
  source 1..80: mol_type = other DNA
ccctcgtagctttcaagatcatgagcggcgaggccccaacagcggaggatatggtcaacttgctgcctgctcttctatca

SEQ ID NO: 126475 - DNA, 80 bp, synthetic construct
  source 1..80: mol_type = other DNA
cacggagatggagcgacggctccacagccagtcgggccggtcgccgccggccagagcttcccacccgcggtccagccact

SEQ ID NO: 126476 - DNA, 80 bp, synthetic construct
  source 1..80: mol_type = other DNA
aattatactcccccacaatgagacgtctttccgcggttgatagcctattatatcgtcttttaaatcgctgttctcaaatt

SEQ ID NO: 126477 - DNA, 80 bp, synthetic construct
  source 1..80: mol_type = other DNA
cggccgccgcgttagccaagcgccccgcggaggagtggctggcgcgacccctgcccgagggactgcaggcgttcgtggcc

SEQ ID NO: 126478 - DNA, 80 bp, synthetic construct
  source 1..80: mol_type = other DNA
acaagccagatgtagctcagggaaccgtaagttcggcagatcttttaacgcaacaggcagcgcccaacagaccaaactac

SEQ ID NO: 126479 - DNA, 80 bp, synthetic construct
  source 1..80: mol_type = other DNA
agagcttccaaacgttccatggcttcgtagaagtcaactgcaaaagtaaaaaactgggagtttcgagctgcaacagttaa

SEQ ID NO: 126480 - DNA, 80 bp, synthetic construct
  source 1..80: mol_type = other DNA
ttctggggctggggtaattagttgggatgatagcaagtttctgagcaattgagatttgccacatccggtggtgccataaa

SEQ ID NO: 126481 - DNA, 80 bp, synthetic construct
  source 1..80: mol_type = other DNA
catcaatgtcatccagacaaatggcagctggcatgtgaataggacggcgctcaactgctttgagtccattgagactgggt

SEQ ID NO: 126482 - DNA, 80 bp, synthetic construct
  source 1..80: mol_type = other DNA
tcacatgctatgtgaaagccctagcggcctgcaaggctgcggggatagttgcgcccacaatgctggtatgcggcgatgac

SEQ ID NO: 126483 - DNA, 80 bp, synthetic construct
  source 1..80: mol_type = other DNA
tgcgcaagcgctgaaacaggtagtttaaggtggtggcaacgtgttctgagacgaagaaatacagaatccaccgacgaagc

SEQ ID NO: 126484 - DNA, 80 bp, synthetic construct
  source 1..80: mol_type = other DNA
ctgcgggtttgccgacctcatggggtacatccctgtcctaggcgcccccctaggtggcgttgccagggctctggcacatg

SEQ ID NO: 126485 - DNA, 80 bp, synthetic construct
  source 1..80: mol_type = other DNA
ttactgtcctgcatcaccgttccggtttcagccgtccaagtgaagaacatcagcgacagctatatggtgactaatgactg

SEQ ID NO: 126486 - DNA, 80 bp, synthetic construct
  source 1..80: mol_type = other DNA
gtgaccattactgctgaaggcaagccatctattgatgtatggctggaggacatttttcaagaaagtcctgctgaaaccag

SEQ ID NO: 126487 - DNA, 80 bp, synthetic construct
  source 1..80: mol_type = other DNA
aaggcgcggtccaatggatgaacaggcttatcgcctttgcgtccagaggtaaccatgtcgccccgacacactacgtggcg

SEQ ID NO: 126488 - DNA, 80 bp, synthetic construct
  source 1..80: mol_type = other DNA
acctccctgtttcaacatatgcttgatcttcgtgccggtaaatcgttagaggataacccttggttacatgaggacgttgt

SEQ ID NO: 126489 - DNA, 80 bp, synthetic construct
  source 1..80: mol_type = other DNA
cacttctctcgtgcctcactgtcccagcgtcggctgagcactaccggaatgcttcgggcatctaccacatcaccaatgat

SEQ ID NO: 126490 - DNA, 80 bp, synthetic construct
  source 1..80: mol_type = other DNA
ttgacggggtgcgaatacaccggtacgcgccagagcccaaaccgcttctgagggatgagatctccttcaccgtgtggcta

SEQ ID NO: 126491 - DNA, 80 bp, synthetic construct
  source 1..80: mol_type = other DNA
gtgggacatgatgatgaactggtcgccgactacaacgttaattgtgtcctatgcaatgcgagtgccccagcttctgatcg

SEQ ID NO: 126492 - DNA, 80 bp, synthetic construct
  source 1..80: mol_type = other DNA
tgagaaagtgtccaaccgtaccttctgttggataccagtcacgtctaacatcgctgtaagagaaagcggagcgtttacca

SEQ ID NO: 126493 - DNA, 80 bp, synthetic construct
  source 1..80: mol_type = other DNA
tccagattgtaaggccagcaggctagtttaaaagtgtttaataccacaccttttgatatttatatacatgcaagattcta

SEQ ID NO: 126494 - DNA, 80 bp, synthetic construct
  source 1..80: mol_type = other DNA
gaggccgtgatgggagccgcttatggcttccaatactccccagcgcagcgagtcgactattttttgaaagcgtgggcatc

SEQ ID NO: 126495 - DNA, 80 bp, synthetic construct
  source 1..80: mol_type = other DNA
cagccaagctgttctctggaagcccggggggggtcggatagtgcaagattgcaattgttcgatctacccgtgccacgtca

SEQ ID NO: 126496 - DNA, 80 bp, synthetic construct
  source 1..80: mol_type = other DNA
ctgggccgttaaaaccaagctcaaactcactccattggccggcgcggctactctcgacttgtcggggtggtttacgtcag

SEQ ID NO: 126497 - DNA, 80 bp, synthetic construct
  source 1..80: mol_type = other DNA
gcggggactaggtccccggcgtgcgcggcaaaccgttccatgaccggattgaacaggcccaggggcaggacgaacgtcag

SEQ ID NO: 126498 - DNA, 80 bp, synthetic construct
  source 1..80: mol_type = other DNA
ttccaaaatgtgagtaataaagcgaggtagtttttctttaatcatgttagtaatagaaaaatcctctaaatacgtcacta

SEQ ID NO: 126499 - DNA, 80 bp, synthetic construct
  source 1..80: mol_type = other DNA
ggatcatgactctatgtgcactatctgaggtcactggcttatccccagatgtgatacaatcgcaatcctacttttccttt

SEQ ID NO: 126500 - DNA, 80 bp, synthetic construct
  source 1..80: mol_type = other DNA
tggccgaagcttgaacagttctggaaaaaacacctgtggaacttcgtcagcggggtacagtacctggccggcttatcgac

SEQ ID NO: 126501 - DNA, 80 bp, synthetic construct
  source 1..80: mol_type = other DNA
taaaagcgaccgcagtgttcgcatcgttgcacgggttgtatctgctgaatgaggtgtactcggcgacctcgcgccaaaaa

SEQ ID NO: 126502 - DNA, 80 bp, synthetic construct
  source 1..80: mol_type = other DNA
tgggtttggatggaattacatttataaatgttaggtttgctggagataagtttaaaggcattatgttcgaagctaatacc

SEQ ID NO: 126503 - DNA, 80 bp, synthetic construct
  source 1..80: mol_type = other DNA
aatgcaactcccattccaacaactattatggcaaagaatgaagtgttctgtgtggatgctaaaaagggaggtcggaagcc

SEQ ID NO: 126504 - DNA, 80 bp, synthetic construct
  source 1..80: mol_type = other DNA
gttcggtcgaacgaacggccacgacagtggcataggttgggaggtggtccgacatagcctcggcgtacgtcgggaggccc

SEQ ID NO: 126505 - DNA, 80 bp, synthetic construct
  source 1..80: mol_type = other DNA
tttgatgaatcgttgtttggtgatgtagcatcggatattggatccgaaacgtcgttatattcacatgcagttaaaactgc

SEQ ID NO: 126506 - DNA, 80 bp, synthetic construct
  source 1..80: mol_type = other DNA
tggatgctgataagggctatgaaagaaggtaaagtggcgatgtacgctcttcccgtcttgagtgctctgactccaggaat

SEQ ID NO: 126507 - DNA, 80 bp, synthetic construct
  source 1..80: mol_type = other DNA
gatgatgatgacgaagaccagtacgaggactgaccgggccgtaccttttgttagatgcagcgaccggctatcatcacgga

SEQ ID NO: 126508 - DNA, 80 bp, synthetic construct
  source 1..80: mol_type = other DNA
atcttggagatgtgcgcagttactgttacctagcttcagtcaatgacttgtcaccaagagccgcgtgtccaaccatgggt

SEQ ID NO: 126509 - DNA, 80 bp, synthetic construct
  source 1..80: mol_type = other DNA
ttgtcatgaactatatccgtaacctggatagtgaaacaggggcaatggtgcgcctgctggaagatggcgattagccatta

SEQ ID NO: 126510 - DNA, 80 bp, synthetic construct
  source 1..80: mol_type = other DNA
cttttccgtcgggctgcattcctatgcaataggatcccaactgccatgcgagcccgagccggacgtctcggtgctgacat

SEQ ID NO: 126511 - DNA, 80 bp, synthetic construct
  source 1..80: mol_type = other DNA
ggcggcgagacgcctggcccggggttcacccccctctgaggctagctcctcagctagccagctgtcagcaccgtcgttgc

SEQ ID NO: 126512 - DNA, 80 bp, synthetic construct
  source 1..80: mol_type = other DNA
gtggagggtcctatgttcaattcacggggccaatcctgcggctaccgccgctgccgggctagcggtgttctccccaccag

SEQ ID NO: 126513 - DNA, 80 bp, synthetic construct
  source 1..80: mol_type = other DNA
cactgctcaacatcactgaacccgaggggagatggttgtatgatcttatcaacattctacagagtatcatagtgcaggag

SEQ ID NO: 126514 - DNA, 80 bp, synthetic construct
  source 1..80: mol_type = other DNA
gtggttacactcgcagtgcacgggcattagcatcattcccgcaccgcgctgcatattcgggtatagggccttaacaaagg

SEQ ID NO: 126515 - DNA, 80 bp, synthetic construct
  source 1..80: mol_type = other DNA
tttgtggcgagcgtaaaaatggggaatgagattgcaatgtgcctccaaagagcggggaaaaaggtcatccaactcaaccg

SEQ ID NO: 126516 - DNA, 80 bp, synthetic construct
  source 1..80: mol_type = other DNA
gtgctggaactgggtggatgtgttaccataacagctgaggggaagccttcaatggatgtatggcttgacgccatttacca

SEQ ID NO: 126517 - DNA, 80 bp, synthetic construct
  source 1..80: mol_type = other DNA
aagccaaaaaacccacaacttcctcaaatcgtcacttccgttttcccacgttacgtcacttcccattttaaaaaactaca

SEQ ID NO: 126518 - DNA, 80 bp, synthetic construct
  source 1..80: mol_type = other DNA
ccgccgccgcacatcgcccccccggggcctcctctatccgtggcggtccccccaccctcgtatcccccagttgcggttac

SEQ ID NO: 126519 - DNA, 80 bp, synthetic construct
  source 1..80: mol_type = other DNA
gggattgaagacacgttattcgccgtgcttaaacttccggagctttgcggagagtttggaaatattctgccgttatgggc

SEQ ID NO: 126520 - DNA, 80 bp, synthetic construct
  source 1..80: mol_type = other DNA
cggccggctctgacgatgtaactaccaactcaggctcaggttgtggtaccaatggtccagcgtcgtgtcccgccaccgac

SEQ ID NO: 126521 - DNA, 80 bp, synthetic construct
  source 1..80: mol_type = other DNA
accgcaaccagcatatgacctagagcacatcacatcatgctcttccaatgtctcagttgcacatgatgcgacgggcaaaa

SEQ ID NO: 126522 - DNA, 80 bp, synthetic construct
  source 1..80: mol_type = other DNA
taatcaattacggggtcattagttcatagcccatatatggagttccgcgttacataacttacggtaaatggcccgcctgg

SEQ ID NO: 126523 - DNA, 80 bp, synthetic construct
  source 1..80: mol_type = other DNA
ccagagagagaaaagagtgcagcaatagacggggagtacagactgcggggagaagcaaggaaaacgtttgtggagctcat

SEQ ID NO: 126524 - DNA, 80 bp, synthetic construct
  source 1..80: mol_type = other DNA
atgaaagcgttcagcgactcgactccgtagcctggaggaacgtgaacgggttgggtcgcggtgtaccccggttcgagact

SEQ ID NO: 126525 - DNA, 80 bp, synthetic construct
  source 1..80: mol_type = other DNA
tctcgggtggggatctgaatgaaggccgccagcgtatatattcatccaaattattgccagtttccttatacatgtatgca

SEQ ID NO: 126526 - DNA, 80 bp, synthetic construct
  source 1..80: mol_type = other DNA
tggaaggggaaggctaggcacataccggttcgtcactccgggggaaaggccgtccggcatcttcgacacctcggtgctct

SEQ ID NO: 126527 - DNA, 80 bp, synthetic construct
  source 1..80: mol_type = other DNA
cagcccaatcatcaacgcacaaggggttgtgttgggtctctacggtaacggtctgaaatccaatgatgtttacatcagca

SEQ ID NO: 126528 - DNA, 80 bp, synthetic construct
  source 1..80: mol_type = other DNA
cgccaagagcagaccccggaccaaaaccgagtgaggttctgtgtgttgttttttttttcctcgttttgttttctcttctt

SEQ ID NO: 126529 - DNA, 80 bp, synthetic construct
  source 1..80: mol_type = other DNA
tgcagggcctggtgctcgtgggcctctgggtctgtgccaccagcctggttgtccgtggccccacggtcagtctggtatca

SEQ ID NO: 126530 - DNA, 80 bp, synthetic construct
  source 1..80: mol_type = other DNA
agagttgatgaagacttcaacccagtgtacccttatgaccccccacatgctcccgttatgcccttcattactccaccttt

SEQ ID NO: 126531 - DNA, 80 bp, synthetic construct
  source 1..80: mol_type = other DNA
attgcggcggagatcctgcggaagtccaagaagttccccgcggcgatacccatatgggcacggccggattacaatcctcc

SEQ ID NO: 126532 - DNA, 80 bp, synthetic construct
  source 1..80: mol_type = other DNA
tctgccattttggaagcagtagtgccgtctcgaactaatcccacccatgagaaagtgctaaccatagtgaacgctctgtt

SEQ ID NO: 126533 - DNA, 80 bp, synthetic construct
  source 1..80: mol_type = other DNA
cgcgactcggaagacttcggagcggtcacaacctcgcggacggcgccaacctatccccaaggcgcgccgacccgagggca

SEQ ID NO: 126534 - DNA, 80 bp, synthetic construct
  source 1..80: mol_type = other DNA
gttaagaccaagctcaaactcactccattgcgtgccgctgccttccttgatttatcaggttggtttgtggcaggctatag

SEQ ID NO: 126535 - DNA, 80 bp, synthetic construct
  source 1..80: mol_type = other DNA
aaggggctgtacgttttatggttgtaggaggggtttagtaggcagaccaaaaagtaaaatgtctgtaaaaaaatgcttgt

SEQ ID NO: 126536 - DNA, 80 bp, synthetic construct
  source 1..80: mol_type = other DNA
gcccttctcgtcgtatcgctgttgttggtggtcgagggggtgttgtgtcactacgtgcgcgtgttggtgggcccccacct

SEQ ID NO: 126537 - DNA, 80 bp, synthetic construct
  source 1..80: mol_type = other DNA
gtagtggattctcttgcgtaccttgtcgtacttctgccagcagaaatgggcccttgaacagcagatacccctcctgcggc

SEQ ID NO: 126538 - DNA, 80 bp, synthetic construct
  source 1..80: mol_type = other DNA
tgtaattccaatggtgactcagttagccatgacagatacaaccccttttgggcaacaaagagtgttcaaagagaaggtgg

SEQ ID NO: 126539 - DNA, 80 bp, synthetic construct
  source 1..80: mol_type = other DNA
gagaagatggctctctacgatgtggtctccacccttcctcaagccgtgatgggctcctcatacggattccagtactctcc

SEQ ID NO: 126540 - DNA, 80 bp, synthetic construct
  source 1..80: mol_type = other DNA
caagggtataaagtgctggtccttaacccgtcggtggcagcgacactcgggtttggcgcttacatgtccaaggcccatgg

SEQ ID NO: 126541 - DNA, 80 bp, synthetic construct
  source 1..80: mol_type = other DNA
gctgaggggttaaattcacacaatgcaatcgtgacgtggtactatctgaaatgttgcctggggtatgtgtacacattata

SEQ ID NO: 126542 - DNA, 80 bp, synthetic construct
  source 1..80: mol_type = other DNA
aagcgcaactgcacgtgtgggttccccccctcgacgtccggggggggcgcgacgccgtcatcttactcatgtgtgtagtg

SEQ ID NO: 126543 - DNA, 80 bp, synthetic construct
  source 1..80: mol_type = other DNA
gggttgccgaggatgcgagtgcactgcgagccttcacggaggctatgaccagatactcagctcctccaggcgacgatccg

SEQ ID NO: 126544 - DNA, 80 bp, synthetic construct
  source 1..80: mol_type = other DNA
acctgatccagctgctggtgatcaagacaaatgggttaaggatgaaaacagcgatgaacataacagaataggcaagggaa

SEQ ID NO: 126545 - DNA, 80 bp, synthetic construct
  source 1..80: mol_type = other DNA
acagatgtgttcttactgaacagcacgcggcctccgcggggagcttggtttggatgcacatggatgaatggcaccgggtt

SEQ ID NO: 126546 - DNA, 80 bp, synthetic construct
  source 1..80: mol_type = other DNA
gaagtgtggaagcggaatttttgtggttgacaacgtgcacacttggacagaacagtacaaattccaaccagagtccccag

SEQ ID NO: 126547 - DNA, 80 bp, synthetic construct
  source 1..80: mol_type = other DNA
cagcctccggtaccaccgccccggaggaagaggacggtggtccttactgagtcaactgtatccactgccttggccgagct

SEQ ID NO: 126548 - DNA, 80 bp, synthetic construct
  source 1..80: mol_type = other DNA
tgtgggaggacttgctggaagacaacaataccccaataccaacaacaatcatggccaaaaaggttttcgccccagcgaag

SEQ ID NO: 126549 - DNA, 80 bp, synthetic construct
  source 1..80: mol_type = other DNA
cagtccacaatggagacacccatgctgtgggaaatgacacatccaaccacggagtgacagccacgataacccccaggtca

SEQ ID NO: 126550 - DNA, 80 bp, synthetic construct
  source 1..80: mol_type = other DNA
ttcgtgtcctgtcaacgcggatacaggggggtctggcgaggagatggcgttatgcacactcgctgccactgtggtgctga

SEQ ID NO: 126551 - DNA, 80 bp, synthetic construct
  source 1..80: mol_type = other DNA
tggcaataaaagggccacttcgtatctccgcatcctctgctgctcaaaggagggggcgcattgggagaaatcccaacaga

SEQ ID NO: 126552 - DNA, 80 bp, synthetic construct
  source 1..80: mol_type = other DNA
atgcagacaagacttttcaaccagaacctcaagttggagaggaaaactggcaggaaaatgaagcattctacggaggcaga

SEQ ID NO: 126553 - DNA, 80 bp, synthetic construct
  source 1..80: mol_type = other DNA
gggacgccgaccgactccccgcctccgggacagacacgcacgacgcgccgccagtagtgctctgcgtccagcaaggcgcc

SEQ ID NO: 126554 - DNA, 80 bp, synthetic construct
  source 1..80: mol_type = other DNA
ccgccgtgtaccttccagacatccaatgaaacctggaactgccctactgactgtttccggaagcatccgggcacaacgtt

SEQ ID NO: 126555 - DNA, 80 bp, synthetic construct
  source 1..80: mol_type = other DNA
ggggtcgcctgaggacactgattttccccaccctttaaccgccacgccgccacatggaattgtgagaaccatcccgtgca

SEQ ID NO: 126556 - DNA, 80 bp, synthetic construct
  source 1..80: mol_type = other DNA
aatgctatcaccatagaaaacaacaccttgtggacaggcgcaaaaccaagcgccaactgtgtaattaaagagggagaaga

SEQ ID NO: 126557 - DNA, 80 bp, synthetic construct
  source 1..80: mol_type = other DNA
aagtggccataaaccaagtgagaaggctcattgggaatgagaattatctagacttcatgacatcaatgaagagattcaaa

SEQ ID NO: 126558 - DNA, 80 bp, synthetic construct
  source 1..80: mol_type = other DNA
acttgatgctggtaatgacccagaggacattgactgttggtgcgacaaacaagccgtgtatgtccagtatgggcgttgca

SEQ ID NO: 126559 - DNA, 80 bp, synthetic construct
  source 1..80: mol_type = other DNA
tctagtcctgaagtggaagaagcacggacgctcagagtcctctccatggtgtgggattggcttgaaaaaagaccaggagc

SEQ ID NO: 126560 - DNA, 80 bp, synthetic construct
  source 1..80: mol_type = other DNA
cgtcctctgcgaggcatatgataccggagccgcgtggtacgagctaacacccgctgagaccacaatcaggctgcgtgcat

SEQ ID NO: 126561 - DNA, 80 bp, synthetic construct
  source 1..80: mol_type = other DNA
tctgttgtggaggcaggaaatgggaggaaacatcacacgggtagagtctgagaacaaggtggtcgtactcgacagctttg

SEQ ID NO: 126562 - DNA, 80 bp, synthetic construct
  source 1..80: mol_type = other DNA
atcaggcctccaatttgacaataacggacgcattaccattagtaatcgcatccagactcgaagtgtaacatccctcacta

SEQ ID NO: 126563 - DNA, 80 bp, synthetic construct
  source 1..80: mol_type = other DNA
ggtagacccacacgcgccgacgccagaggccggcgctggtcttgcggccgatcccgccgtggcccgggacgacgcggagg

SEQ ID NO: 126564 - DNA, 80 bp, synthetic construct
  source 1..80: mol_type = other DNA
gcagatcatgcaccctgcccccattacggtttatgggagaggatggatgttggtatggcatggaaataaggccttccact

SEQ ID NO: 126565 - DNA, 80 bp, synthetic construct
  source 1..80: mol_type = other DNA
ctttgtggtggggtcccaactaccctgtgagccagaacctgatgtgaccgtcctaacgtcaatgctgtcagaccctgctc

SEQ ID NO: 126566 - DNA, 80 bp, synthetic construct
  source 1..80: mol_type = other DNA
ttctacttgacaacatcactacagtgagaggaccagttgccactttttatggtccagagcaagggaaaatgctcgaggtg

SEQ ID NO: 126567 - DNA, 80 bp, synthetic construct
  source 1..80: mol_type = other DNA
tcaccccattatctgactgggccgccgacggcctcaaagatctggctgtggccttagagccagtcatctttacacccatg

SEQ ID NO: 126568 - DNA, 80 bp, synthetic construct
  source 1..80: mol_type = other DNA
gctcttgtcgctgatctgatccttgtccagatcctcggcgttgctcaggccgaacggggtcatcttgcacagctggcggc

SEQ ID NO: 126569 - DNA, 80 bp, synthetic construct
  source 1..80: mol_type = other DNA
gatgctgtcatcttgctcacgtgcttattatacccctccctcggattcgacataaccaaggtgcttctggcaatcattgg

SEQ ID NO: 126570 - DNA, 80 bp, synthetic construct
  source 1..80: mol_type = other DNA
ctacgtccaggagcgcaccatcttcttcaaggacgacggcaactacaagacccgcgccgaggtgaagttcgagggcgaca

SEQ ID NO: 126571 - DNA, 80 bp, synthetic construct
  source 1..80: mol_type = other DNA
agacgtcattcctgttcgcaggagaggtgacaatcgaggtgccctcctcagccctagaccaatatccactcttaagggct

SEQ ID NO: 126572 - DNA, 80 bp, synthetic construct
  source 1..80: mol_type = other DNA
acctgctctcctgtcccccggggcattagtagtggaggtggtttgcgccgccgtcctacgacgccacgtgggccctagcg

SEQ ID NO: 126573 - DNA, 80 bp, synthetic construct
  source 1..80: mol_type = other DNA
gttgggccacctacagataaccgcggtctcccggcagctcttgagcgccatcgactacgtccactgcgaaggcatcatcc

SEQ ID NO: 126574 - DNA, 80 bp, synthetic construct
  source 1..80: mol_type = other DNA
ctggggacaacctgggtacccttggcccctgtatgggaatgagggttgtggctgggcaggatggctcctgtccccccgcg

SEQ ID NO: 126575 - DNA, 80 bp, synthetic construct
  source 1..80: mol_type = other DNA
tgtgtggcttgctttttgtttgcttcgcatggtacgtccggggcagggctatccccgggcttacatatgctttgcttcaa

SEQ ID NO: 126576 - DNA, 80 bp, synthetic construct
  source 1..80: mol_type = other DNA
aatactcaccaaagcagcgggtcgaattcctggttaacgcctggaaagcaaaaaagaacccgatggggttttcttatgac

SEQ ID NO: 126577 - DNA, 80 bp, synthetic construct
  source 1..80: mol_type = other DNA
aaagaagaattcattgccaaagtacggagccatgcagcagtgggggcttttctagaggaacaagagcagtggaaaacggc

SEQ ID NO: 126578 - DNA, 80 bp, synthetic construct
  source 1..80: mol_type = other DNA
atatgcagctcaggggtttaaggtgttagtgctcaacccctctgtagcagccacccttggatttggggcgtacatgtcca

SEQ ID NO: 126579 - DNA, 80 bp, synthetic construct
  source 1..80: mol_type = other DNA
cggagtctgacgcatcgcagcgcgttacgctgatgctcagctccctcaccattaccagcctactcaggaggcttcacaac

SEQ ID NO: 126580 - DNA, 80 bp, synthetic construct
  source 1..80: mol_type = other DNA
gaaaaaaccttaccccgtctttcctccccttatcctctaaatattcgtctccccgttcggcaacaagtggagggtgttga

SEQ ID NO: 126581 - DNA, 80 bp, synthetic construct
  source 1..80: mol_type = other DNA
ccatctgcatcagcgcggtaagaaccaagcatgtaaaattgatttatggccttgtagggacaacaacctttttctacagg

SEQ ID NO: 126582 - DNA, 80 bp, synthetic construct
  source 1..80: mol_type = other DNA
ccaaaagagctttaacaatcacgtgaggaccctgatcgcgagggaggaggtgaccatcgggctgatgcatctgtgggact

SEQ ID NO: 126583 - DNA, 80 bp, synthetic construct
  source 1..80: mol_type = other DNA
atgtatggtccactatccttatcggctgtggcactacccgtgcaccgtcaacttcacagtctttaaggtcaggacgtacg

SEQ ID NO: 126584 - DNA, 80 bp, synthetic construct
  source 1..80: mol_type = other DNA
cgggttttttgagctggcgctggccttcgactccacgcgcgtggcggactacgaccgcgtgtatatctactacaaccacc

SEQ ID NO: 126585 - DNA, 80 bp, synthetic construct
  source 1..80: mol_type = other DNA
ctacgggatgcccggaacgaatgagcagatgtagaccattgcactcgttcaaccagggctggggtcctatttcgtatgcc

SEQ ID NO: 126586 - DNA, 80 bp, synthetic construct
  source 1..80: mol_type = other DNA
aatttgctaccggcaattctgtcacctggcgcgttggtggtcggcgtagtatgcgccgcgatccttcgacgccacgtagg

SEQ ID NO: 126587 - DNA, 80 bp, synthetic construct
  source 1..80: mol_type = other DNA
tttttgggaaaggcagcatagtggcctgtgcaaagttcgaatgtgaggaagcaaaaaaggctgtaggtcatgtttatgac

SEQ ID NO: 126588 - DNA, 80 bp, synthetic construct
  source 1..80: mol_type = other DNA
gctggacgattgggaggtgtggtgtgaagacgcgtgggacagcgagaaggggtgcgcggacgacggggacgcaccggagt

SEQ ID NO: 126589 - DNA, 80 bp, synthetic construct
  source 1..80: mol_type = other DNA
accgacccccggcgtaggtcacgcaatttgggtaaggtcatcgataccctcacgtgtggcttcgccgacctcatggggta

SEQ ID NO: 126590 - DNA, 80 bp, synthetic construct
  source 1..80: mol_type = other DNA
gcagcagacgcgaggggtgctgggcgctataattgtcagcctaaccggccgggacaaaaatgaagccgagggtgaggtgc

SEQ ID NO: 126591 - DNA, 80 bp, synthetic construct
  source 1..80: mol_type = other DNA
gcccagcagactcgaggcttgatgggcaccattgtcaccagccttacagggcgcgacaaaaatgtagtggagggcgaggt

SEQ ID NO: 126592 - DNA, 80 bp, synthetic construct
  source 1..80: mol_type = other DNA
cttcaccacaccaactgagacttctgattccagccccatcatcgcggacgacaagtctgacgacgggtcttactcgtcta

SEQ ID NO: 126593 - DNA, 80 bp, synthetic construct
  source 1..80: mol_type = other DNA
tgcccggggtgtacaccaacgaggccttccaccccgacatcgtgctgttgcccggctgcggtgtggactttaccgagagc

SEQ ID NO: 126594 - DNA, 80 bp, synthetic construct
  source 1..80: mol_type = other DNA
ttgtgatcattgccgcgttggtcctcgtgccctcgcgggcctcgtgggcactttccccatgcgacagcggatggcacgag

SEQ ID NO: 126595 - DNA, 80 bp, synthetic construct
  source 1..80: mol_type = other DNA
ccactagtgggagtgaagagggtagtaatgagcttgttggacggcagagggccagtacgtttcgtgctggctcttatcac

SEQ ID NO: 126596 - DNA, 80 bp, synthetic construct
  source 1..80: mol_type = other DNA
gcggtcacccaagctgtcgacttcagcctggaccccaccttcactataaccacacagactgtcccacaagacgctgtctc

SEQ ID NO: 126597 - DNA, 80 bp, synthetic construct
  source 1..80: mol_type = other DNA
gacagcttcttgcctttcgacctaggacgcaccacaccactcaagaatgcaactgttccatctatactggtcatgttacg

SEQ ID NO: 126598 - DNA, 80 bp, synthetic construct
  source 1..80: mol_type = other DNA
cagagtagacaaacagaacaaaaacaaactgggcaaaaacaaaatgagcataaacagggtgggcagaaacaggagtggca

SEQ ID NO: 126599 - DNA, 80 bp, synthetic construct
  source 1..80: mol_type = other DNA
agatccaggtagtctccaccgctacccagacttttctcgccaccggtgtaaacgggacattgtggacagtctatcacggt

SEQ ID NO: 126600 - DNA, 80 bp, synthetic construct
  source 1..80: mol_type = other DNA
agttcaagcagaaggccctcggcctcctgcagaccgcgtcccgccaagcagaggttatcacccctgctgtccagaccaac

SEQ ID NO: 126601 - DNA, 80 bp, synthetic construct
  source 1..80: mol_type = other DNA
ccaaaaggggcccgtgcgacagtcagatcacccgcatcatccgacaggcccaggtccacgctgacgagttttccccgcat

SEQ ID NO: 126602 - DNA, 80 bp, synthetic construct
  source 1..80: mol_type = other DNA
atcccgatcgtgaacgacccccagacccgcatggaggccgaggaggccgtcagggcgggcacggccgtggactttatctg

SEQ ID NO: 126603 - DNA, 80 bp, synthetic construct
  source 1..80: mol_type = other DNA
gtcgtgctcgtccatgcctcctctcgagggagagccgggcgatccggatttgagctgcgactcttggtccactgtgagtg

SEQ ID NO: 126604 - DNA, 80 bp, synthetic construct
  source 1..80: mol_type = other DNA
ccatatttcacctactctggctccgtcccatacttggatggcaccttttacctgaaccacacttttaaaaaggtgtccgt

SEQ ID NO: 126605 - DNA, 80 bp, synthetic construct
  source 1..80: mol_type = other DNA
tcctaccttaccaatgcaatttgagtcacactaagatattgcttgagcccgagagcatgtccaaggtgaacctgaacggg

SEQ ID NO: 126606 - DNA, 80 bp, synthetic construct
  source 1..80: mol_type = other DNA
atccctgagcccaattacaccagggccctctggagggtgtccgctgaggaatacgtcgaagtcaaaagggtggtggatag

SEQ ID NO: 126607 - DNA, 80 bp, synthetic construct
  source 1..80: mol_type = other DNA
tgaggaagcctgcagcctgacgcccccccactcggccagatcaaaatttggttacggggcgaaggaggttcggagccatg

SEQ ID NO: 126608 - DNA, 80 bp, synthetic construct
  source 1..80: mol_type = other DNA
tttcgcctacgatggctccgaggccgcatccattggcctaatggtcattgctggtctgactgtcttcaccctcaccccac

SEQ ID NO: 126609 - DNA, 80 bp, synthetic construct
  source 1..80: mol_type = other DNA
gtattggctgggcaggcttcacagctaaatgctgtagtggacttgcaagacaggaacactgagttatcgtaccaacttat

SEQ ID NO: 126610 - DNA, 80 bp, synthetic construct
  source 1..80: mol_type = other DNA
atgtggagaatgagcagtcaattcagaccgcagcgggtgaggtagtgaaagcagccagtgatggttttaagttggactgc

SEQ ID NO: 126611 - DNA, 80 bp, synthetic construct
  source 1..80: mol_type = other DNA
acactcccctgtcaattcatggctgggaaacatcatccagtacgccccgacagtttgggtgcgcatggtcctaatgacac

SEQ ID NO: 126612 - DNA, 80 bp, synthetic construct
  source 1..80: mol_type = other DNA
tgagttattttcaccggcgtgacctgaggacacttgggttcgccatcagctcagcagtgcctgtcgactgggtgcccacc

SEQ ID NO: 126613 - DNA, 80 bp, synthetic construct
  source 1..80: mol_type = other DNA
ctcacaccaccggccaattcgccaacctgttctcactcggaccccggcaaaacctccaacttataaataccaatgggagt

SEQ ID NO: 126614 - DNA, 80 bp, synthetic construct
  source 1..80: mol_type = other DNA
gtagcgcctaaaaggacgcgggaatttgcccccgggaccctgcgggtcgacgtgacgttcctggacatcctggcgacccc

SEQ ID NO: 126615 - DNA, 80 bp, synthetic construct
  source 1..80: mol_type = other DNA
tctgtggggtctttatcctcgctgtccttctctactttgtctgctgcaaggccagagaaaaatctaggcggtccatctac

SEQ ID NO: 126616 - DNA, 80 bp, synthetic construct
  source 1..80: mol_type = other DNA
tctcccagattttcaccttctcgcctcgccgacatgagacgatgcaggattgcaattgctcaatctatcccggccacata

SEQ ID NO: 126617 - DNA, 80 bp, synthetic construct
  source 1..80: mol_type = other DNA
tacgtacgaagcgagctccgccagcgcggcctgcgggacgtgcggcccgtggtggaggacgaggtgttcctggacagcgt

SEQ ID NO: 126618 - DNA, 80 bp, synthetic construct
  source 1..80: mol_type = other DNA
ggtcgagcacaggttcaccgctgcttgcaactggactcggggggaccgttgcgagctggacgaccgcgataggatagaga

SEQ ID NO: 126619 - DNA, 80 bp, synthetic construct
  source 1..80: mol_type = other DNA
ggtggcgggggcccactggggtgtcctagcgggcctagcctattactctatggcgtggaactgggcgaaggttttggttg

SEQ ID NO: 126620 - DNA, 80 bp, synthetic construct
  source 1..80: mol_type = other DNA
tccaaggactgcctgtctccgctcggagggtgagggagatactgctcggcccggctgatagcatgaccagcaaggagtgg

SEQ ID NO: 126621 - DNA, 80 bp, synthetic construct
  source 1..80: mol_type = other DNA
tgacacccgctgttttgactcaacggtcactgagaatgacatccgtgttgaggagtcgatttaccaatgttgtgacttag

SEQ ID NO: 126622 - DNA, 80 bp, synthetic construct
  source 1..80: mol_type = other DNA
atcgcgctgggccctgagggcgtcgaaatgtacgccccgcaaaaacagacagaagtcctttggggtcagggtatcgtcgt

SEQ ID NO: 126623 - DNA, 80 bp, synthetic construct
  source 1..80: mol_type = other DNA
gagacatggcgaggttttcaaaagtcttaccgtagccacgtcgggtaaaacagaaaacggagtgaccgtttccaaatatg

SEQ ID NO: 126624 - DNA, 80 bp, synthetic construct
  source 1..80: mol_type = other DNA
tggggccctttgagacatgcatccaggatcaattcgactaggggcaagccctattgttggcactatgtgcccaagccttg

SEQ ID NO: 126625 - DNA, 80 bp, synthetic construct
  source 1..80: mol_type = other DNA
agcttgaggaagctacccagaatgcaaccagggccgctggagatatcagaggagacacctatgttccaagagctgtggaa

SEQ ID NO: 126626 - DNA, 80 bp, synthetic construct
  source 1..80: mol_type = other DNA
tatgttcgacaccagcgtgctctgtgagtgctatgacctggggtgctcgtggtatgaactaacgcccagtgaaaccacca

SEQ ID NO: 126627 - DNA, 80 bp, synthetic construct
  source 1..80: mol_type = other DNA
gctcctcgtttacgtactggtgacagatgcgcttgtattgttcgtgttgctcaggcattagtttaaaagaggttctaagt

SEQ ID NO: 126628 - DNA, 80 bp, synthetic construct
  source 1..80: mol_type = other DNA
gcccttccgggcacgtggtgggtgttttcagggctgccgtgtgcacgcggggtgtcgcgaaggcgctcgatttcattccg

SEQ ID NO: 126629 - DNA, 80 bp, synthetic construct
  source 1..80: mol_type = other DNA
cgttgcgcgggccgacccccctcctctataggatggggtccgtgcagaacgaggtaacactcacacatcccataaccaaa

SEQ ID NO: 126630 - DNA, 80 bp, synthetic construct
  source 1..80: mol_type = other DNA
cagcttacgcgcagcaaacgcgtgggctgctgggcacaatagtgactagcctcactggtcgtgataggaatgaggtggcg

SEQ ID NO: 126631 - DNA, 80 bp, synthetic construct
  source 1..80: mol_type = other DNA
acctcagtgctctgcgagtgctacgacgccggatgcgcctggtacgagctgacaccggctgagaccacaacaaggctgag

SEQ ID NO: 126632 - DNA, 80 bp, synthetic construct
  source 1..80: mol_type = other DNA
aaatggatttataacgttaaatgtaacaattgaaaatacaacatggacgcgttatcatcaagatggatggaaacaaattt

SEQ ID NO: 126633 - DNA, 80 bp, synthetic construct
  source 1..80: mol_type = other DNA
gacggacgtgttgctcctcaacaacacgcggccaccctccggcaactggtttggctgtacatggatgaatggcaccgggt

SEQ ID NO: 126634 - DNA, 80 bp, synthetic construct
  source 1..80: mol_type = other DNA
ctgtattattatgagctgtaccctacaatgactgtagtagttgtgtcagtagccacgttcatactcctgtcgatggtggg

SEQ ID NO: 126635 - DNA, 80 bp, synthetic construct
  source 1..80: mol_type = other DNA
gaagacggtctttcagtgagccactgaccgtggtaggggtcatgctgacactggctagcggcatgatgcgccacacctcc

SEQ ID NO: 126636 - DNA, 80 bp, synthetic construct
  source 1..80: mol_type = other DNA
cccagcccgacgcaggggagataaccgcgctgctcttctcagcccacgacccataagcaccttaaaggggtcgtctggcg

SEQ ID NO: 126637 - DNA, 80 bp, synthetic construct
  source 1..80: mol_type = other DNA
gcggggtgctcaccactagcatgggaaacactctcacatgctacgtgaaagcccaagcggcctgtaaggccgcgggcatt

SEQ ID NO: 126638 - DNA, 80 bp, synthetic construct
  source 1..80: mol_type = other DNA
tggaggacgccgaggcactgttcaataaatattgctcggtgtctcttaaggactaaacacccgcgctttttttaggcgcc

SEQ ID NO: 126639 - DNA, 80 bp, synthetic construct
  source 1..80: mol_type = other DNA
gtcactaacgcagacctagaggatgaagagcaactcctacgctacatggagggtgaacacaagcaactggcggccacaat

SEQ ID NO: 126640 - DNA, 80 bp, synthetic construct
  source 1..80: mol_type = other DNA
gctgatagcgttcgcttcgcggggtaaccacgtctcccccacgcattatgtgcctgagagcgacgctgcagcgcgtgtca

SEQ ID NO: 126641 - DNA, 80 bp, synthetic construct
  source 1..80: mol_type = other DNA
gcctgggcaagatactagtggacatcttggccgggtacggggcaggcatttcaggggcccttgtcgcctttaaaatcatg

SEQ ID NO: 126642 - DNA, 80 bp, synthetic construct
  source 1..80: mol_type = other DNA
tgccgtatgcacaaggggtgtagcaaaatccttagactttatcccagtggaaaacatggagacaactatgcgctctccct

SEQ ID NO: 126643 - DNA, 80 bp, synthetic construct
  source 1..80: mol_type = other DNA
ctccaaggaaatggggtgcccgcgcaccgtgtaaagtatgtttttaattctaattctcgaaaaaaccttaccccgtcttt

SEQ ID NO: 126644 - DNA, 80 bp, synthetic construct
  source 1..80: mol_type = other DNA
tggatcaccgaggactgtccagtcccatgtgcaggctcttggcttcgcgatatgtgggattggatttgcaccatcttatc

SEQ ID NO: 126645 - DNA, 80 bp, synthetic construct
  source 1..80: mol_type = other DNA
gccaaaatgaccctgcttaaccctcccgctaatacttcttaaataaaataaagacacaattggttggaaaagtcaaaagt

SEQ ID NO: 126646 - DNA, 80 bp, synthetic construct
  source 1..80: mol_type = other DNA
tgatccccccagaccggaatatgacctggagctaataacatcctgttcctcaaatgtgtctgtggcgttgggcccgcggg

SEQ ID NO: 126647 - DNA, 80 bp, synthetic construct
  source 1..80: mol_type = other DNA
gttgcggcggagattttgcgcacttccaagaagtttcctgcggccatcccggtttgggctcggccggagtacaatcctcc

SEQ ID NO: 126648 - DNA, 80 bp, synthetic construct
  source 1..80: mol_type = other DNA
tcacccacgggcccacccccgcaggatccctgcgcgtcggcgggcgtgtggctgccctggcgctcggccggtggccgggc

SEQ ID NO: 126649 - DNA, 80 bp, synthetic construct
  source 1..80: mol_type = other DNA
agccggagtttacaaagaaggaacattccatacaatgtggcacgtcacacgtggtgctgttctgatgcatagagggaaga

SEQ ID NO: 126650 - DNA, 80 bp, synthetic construct
  source 1..80: mol_type = other DNA
caggacgattgggtcggaggtaggcagcgccacccaccggttcacaagcgtcttttcacctgggtcgcgacagaaagtcc

SEQ ID NO: 126651 - DNA, 80 bp, synthetic construct
  source 1..80: mol_type = other DNA
ggtcgccttttgctgctcggcccagccgacgacatgaaaggcatgggatggagactcttggctcccataaccgcgtatgc

SEQ ID NO: 126652 - DNA, 80 bp, synthetic construct
  source 1..80: mol_type = other DNA
cagtgggacgctaaagaaaataatggtcagggagaagctaagactcatacatatggtgtggctgccatgggcggttataa

SEQ ID NO: 126653 - DNA, 80 bp, synthetic construct
  source 1..80: mol_type = other DNA
gtcagtccgtgtcacacatatcctcaccagcctcactgtcactcagctcctgaaaaggctccacgtgtggataagctcag

SEQ ID NO: 126654 - DNA, 80 bp, synthetic construct
  source 1..80: mol_type = other DNA
ggtgacaccacttcaggagtgtacagaattatgacaagagggctgctgggtaattaccaagcaggagccggtgtcatggt

SEQ ID NO: 126655 - DNA, 80 bp, synthetic construct
  source 1..80: mol_type = other DNA
tcgcccgtcgggttcccaagacctatcccgtttgcgcgggggagggaaggacgcgggggaggggaggacgcgggcgagag

SEQ ID NO: 126656 - DNA, 80 bp, synthetic construct
  source 1..80: mol_type = other DNA
ttattctttgatgcatttaacgttgtagcgatacgaataaatactggaaaccgcaagcaccgtgatatttgtattatgta

SEQ ID NO: 126657 - DNA, 80 bp, synthetic construct
  source 1..80: mol_type = other DNA
gagggggccgggacgccgtcatcctccttatgtgtgtggctcacccgcgtctaatgtttgacatcaccaagcttttgtta

SEQ ID NO: 126658 - DNA, 80 bp, synthetic construct
  source 1..80: mol_type = other DNA
acactaccaggtaaccctgctgtggcgtccctcatggctttttctgctgctgtcactagtcctctctccacgaccaccac

SEQ ID NO: 126659 - DNA, 80 bp, synthetic construct
  source 1..80: mol_type = other DNA
aacttggtgtattcgaccacatcacgcagcgcgtccctccgccagaagaaggtgaccttcgaccgtgtccaggtggtaga

SEQ ID NO: 126660 - DNA, 80 bp, synthetic construct
  source 1..80: mol_type = other DNA
gtgattagtaagttgtcaacagccatcatgggcgatgcttacggattccagtattcgcccaagcagcgggtcgaacgtct

SEQ ID NO: 126661 - DNA, 80 bp, synthetic construct
  source 1..80: mol_type = other DNA
tcaagaatgttgattaacagattcacaatgagacacaagaaggccacatacgagccggatgttgatctcggaagtggaac

SEQ ID NO: 126662 - DNA, 80 bp, synthetic construct
  source 1..80: mol_type = other DNA
ctgcctccctcaccccgccccattctgcaagatcgaagtttgggtacggggcaaaagaggtgagagctctagcgcccaag

SEQ ID NO: 126663 - DNA, 80 bp, synthetic construct
  source 1..80: mol_type = other DNA
tggggcccggctacctcctgagggccgccttgacgcgggtgccatacttcgtcagagcgcaagctctgctgaggatatgt

SEQ ID NO: 126664 - DNA, 80 bp, synthetic construct
  source 1..80: mol_type = other DNA
ggatgtcgtggtgtgtgccactgacgccctgatgacggggttcactggagactttgattctgtcatcgattgcaacgtcg

SEQ ID NO: 126665 - DNA, 80 bp, synthetic construct
  source 1..80: mol_type = other DNA
tcaagatggaaaagttgacactaaaaggcaccacctacggcatgtgcacggaaaagttttcttttgcaaaaaatccggct

SEQ ID NO: 126666 - DNA, 80 bp, synthetic construct
  source 1..80: mol_type = other DNA
atgtagggcaggggggactcctccaagaactcggccacgccggccgtcgcgtgccgccgccgcagctcctccgcgaacgc

SEQ ID NO: 126667 - DNA, 80 bp, synthetic construct
  source 1..80: mol_type = other DNA
gtggaaaagctcccacagcgccccctccactttcataatcaggcagaccttcataatagcaacagatctggctgctccac

SEQ ID NO: 126668 - DNA, 80 bp, synthetic construct
  source 1..80: mol_type = other DNA
acactagcacacaggggtggagtatgctggcaagagccgacttgtcggtaacttcgttggtcttcagatcttccgcgccg

SEQ ID NO: 126669 - DNA, 80 bp, synthetic construct
  source 1..80: mol_type = other DNA
cttgctcaggggtggtgttgtaaataatccaatcgtagcaacagcgctgggcatggtggtgaaatatatctttaagcaac

SEQ ID NO: 126670 - DNA, 80 bp, synthetic construct
  source 1..80: mol_type = other DNA
taccagacacgcagatgtggtgcctgtgcgcaggagaggcgactctcggggtgccctgttgagtcctaggccgatatcca

SEQ ID NO: 126671 - DNA, 80 bp, synthetic construct
  source 1..80: mol_type = other DNA
atacccacacgggcggggggggggtgtcgcgggccgtctgctggcccgcggccacataaacaatgactcggtgcctttct

SEQ ID NO: 126672 - DNA, 80 bp, synthetic construct
  source 1..80: mol_type = other DNA
gctggtgctactatatggcaacccaaaaaagagttcaagaagtcagagggtacacaaagggcggtcccggacatgaagag

SEQ ID NO: 126673 - DNA, 80 bp, synthetic construct
  source 1..80: mol_type = other DNA
ataaaaatggagatctttcttcagatgctagcgtggaagttagcgcccctatcactaaaaccaacaaaatcgtaggttta

SEQ ID NO: 126674 - DNA, 80 bp, synthetic construct
  source 1..80: mol_type = other DNA
ccccttgggtccgccggggccccgggccgggccgccacgggtgccggccgttggcggtaaccccgagtgttcatctcagg

SEQ ID NO: 126675 - DNA, 80 bp, synthetic construct
  source 1..80: mol_type = other DNA
cgtagggcactctgaaaaactttgtgagaccccctgcatcatgataaggccgaacatggtgcatgaaaggggaggccccc

SEQ ID NO: 126676 - DNA, 80 bp, synthetic construct
  source 1..80: mol_type = other DNA
ctgaactcaatcacacctgtgatgagcagaaccttacactcatatttgtcaatgccacttttaagggaacctattatgga

SEQ ID NO: 126677 - DNA, 80 bp, synthetic construct
  source 1..80: mol_type = other DNA
gtaacgggccatcgtatggcttgggatatgatgatgaactggtctccatcagtgactttcgtcatttccagcatcctgag

SEQ ID NO: 126678 - DNA, 80 bp, synthetic construct
  source 1..80: mol_type = other DNA
ggaagcgaccaacgccttgattgacaaggatggatggctacattctggagacatagcttactgggacgaagacgaacact

SEQ ID NO: 126679 - DNA, 80 bp, synthetic construct
  source 1..80: mol_type = other DNA
actcaaacatagagcatggaacagctttcttgtggaggatcatgggttcggggtatttcacactagtgtctggctcaagg

SEQ ID NO: 126680 - DNA, 80 bp, synthetic construct
  source 1..80: mol_type = other DNA
actcctctagctcgcctggtgtacacagttaagaaggattatcaggaggaatttgaaaatctttttgccgactgttctgg

SEQ ID NO: 126681 - DNA, 80 bp, synthetic construct
  source 1..80: mol_type = other DNA
cttcgggcggtcctctgctgtgccccctgggccacgctgtcgggatattccgtgcagcagtgtgtacccggggcgtggct

SEQ ID NO: 126682 - DNA, 80 bp, synthetic construct
  source 1..80: mol_type = other DNA
ttgtgtggtgggctgagacagtggcatgtggagacatcctacacggcctcccggtttccgcaaggctaggtagggaggtc

SEQ ID NO: 126683 - DNA, 80 bp, synthetic construct
  source 1..80: mol_type = other DNA
cgcccctggcctgtttttgagcacaacatgcttatgcgctgtactgtgcatttgggagctcgtcgtggcatgttttctcc

SEQ ID NO: 126684 - DNA, 80 bp, synthetic construct
  source 1..80: mol_type = other DNA
ccgttggcgacgagcagctagcgcgctggcttcaaacgcgcgagcctgccgacttggaggagcgacgcaagctaatgatg

SEQ ID NO: 126685 - DNA, 80 bp, synthetic construct
  source 1..80: mol_type = other DNA
aaaccgcaatgggtgtctggcaacaatgtctagaggagcgtaacctccgcgagcttgaaaaactgctggttcgaaatcgc

SEQ ID NO: 126686 - DNA, 80 bp, synthetic construct
  source 1..80: mol_type = other DNA
gggtggttggagcataggattgatgcggcctgtaactggacccgcggggatcgatgtgagctcgatgacagagatagagt

SEQ ID NO: 126687 - DNA, 80 bp, synthetic construct
  source 1..80: mol_type = other DNA
taatggatccgaacaaaatacatcaacttccagacatgaaaatcgcatatttaaattaacggagagggaagctaatgagg

SEQ ID NO: 126688 - DNA, 80 bp, synthetic construct
  source 1..80: mol_type = other DNA
caagaggtgggtgggaacatcactcgggtcgagtctgagaacaaagtaatagtgcttgactcattcgatcctctggtcgc

SEQ ID NO: 126689 - DNA, 80 bp, synthetic construct
  source 1..80: mol_type = other DNA
ctaccacctatcccatgaccaagcctattttacccatggctactagagtgtatggaaaaaatgaaaatgtgcctatgacc

SEQ ID NO: 126690 - DNA, 80 bp, synthetic construct
  source 1..80: mol_type = other DNA
gatcggtgggatttgcaacaagaacaacaccttgggatatcagccttgacatcaaaccagccaccgcatgggcactgtat

SEQ ID NO: 126691 - DNA, 80 bp, synthetic construct
  source 1..80: mol_type = other DNA
gctagcaagtgctggcatccagtgtcacctaccctcgcggtgccgaacaccagtgtgcccataacgggtttccggcgtca

SEQ ID NO: 126692 - DNA, 80 bp, synthetic construct
  source 1..80: mol_type = other DNA
gcctgttcgtgggcggccatgagcacaggctcacggctgcttgcaactggactaggggagagaggtgcaacctggacgac

SEQ ID NO: 126693 - DNA, 80 bp, synthetic construct
  source 1..80: mol_type = other DNA
gaagttcacttgctccaacaaagctactggattaaccatacagcgggagaacgtgaagtatgaagtggcagcttttgtcc

SEQ ID NO: 126694 - DNA, 80 bp, synthetic construct
  source 1..80: mol_type = other DNA
aaggtgctggtgctcaacccctccgttgctgcaacactgggctttggtgcctacatgtccaaggcccatgggattgaccc

SEQ ID NO: 126695 - DNA, 80 bp, synthetic construct
  source 1..80: mol_type = other DNA
tggggacgagctcgtcgctcgatagcaccgccgcagccgcggcagcagcagccgccatgacagcgacgagactggcctcg

SEQ ID NO: 126696 - DNA, 80 bp, synthetic construct
  source 1..80: mol_type = other DNA
ttttcacctttacaccggcctacaagatcctcctatgtcgcagtctgtggtggctgtgttatatgctggtgttggcggag

SEQ ID NO: 126697 - DNA, 80 bp, synthetic construct
  source 1..80: mol_type = other DNA
gggccgacacctcatcttctgccactccaagaagaagtgtgacgagcttgccgggaagctagtcgcccttgggatcaacg

SEQ ID NO: 126698 - DNA, 80 bp, synthetic construct
  source 1..80: mol_type = other DNA
aacaggagacgtcgtagtttgcgctactgacgcacttatgacgggattcaccggagacttcgactctgtcatagattgca

SEQ ID NO: 126699 - DNA, 80 bp, synthetic construct
  source 1..80: mol_type = other DNA
cttggtacgagctcacccccgctgagacctcggttaggttgcgggcttacctaaatacaccaggattgcccgtttgccag

SEQ ID NO: 126700 - DNA, 80 bp, synthetic construct
  source 1..80: mol_type = other DNA
aagggtacaaggtgctcgtcctgaacccgtccgttgccgccaccttagggtttggagcgtacatgtccaaggcacatggt

SEQ ID NO: 126701 - DNA, 80 bp, synthetic construct
  source 1..80: mol_type = other DNA
agcggatcttgaagtggtcactagcacatgggttttggtgggaggcattgtggcggccttggccgcctactgcctgtcgg

SEQ ID NO: 126702 - DNA, 80 bp, synthetic construct
  source 1..80: mol_type = other DNA
atgccaacggaagcggccccgaacaccgcccttactgttggcactaccccccaaaaccttgtggcatcgtgccggcacga

SEQ ID NO: 126703 - DNA, 80 bp, synthetic construct
  source 1..80: mol_type = other DNA
ccagagcgcgacggcggacctggcgatccagattccaaagtgccccgaccccgagaggtacttctacacctcccagtgtc

SEQ ID NO: 126704 - DNA, 80 bp, synthetic construct
  source 1..80: mol_type = other DNA
aaaccaggagggcccggcaagagccgggctgtcaatatgctaaaacgcggaatgccccgcgtgttgtccttgattggact

SEQ ID NO: 126705 - DNA, 80 bp, synthetic construct
  source 1..80: mol_type = other DNA
tgctcaccctggccaccttcttcttgtggatggcagaggtatcagggacgaaaatagccggaaccctactcatagcactg

SEQ ID NO: 126706 - DNA, 80 bp, synthetic construct
  source 1..80: mol_type = other DNA
acaaagcaagcgggggagaacttcgcgtacctagtagcctaccaagctacggtgtgcgccagagccaaggcccctccccc

SEQ ID NO: 126707 - DNA, 80 bp, synthetic construct
  source 1..80: mol_type = other DNA
actcgcgcagcgtgcggttgcagatgaggtacgtgagcacgttctcgctctggcggacggaacaccgcagtttctggtgc

SEQ ID NO: 126708 - DNA, 80 bp, synthetic construct
  source 1..80: mol_type = other DNA
ggtgactcggctgagcttgctcggttaaggcatctggaccactgccgccgcctgcactgctttgcccgggagagctgcgg

SEQ ID NO: 126709 - DNA, 80 bp, synthetic construct
  source 1..80: mol_type = other DNA
gccctacccatctgggcacggcctgactacaaccctcccctcttggagacctggaaggcccctgactacgaacctccaat

SEQ ID NO: 126710 - DNA, 80 bp, synthetic construct
  source 1..80: mol_type = other DNA
ctacggcttccaatactcaccagcgcagcgggtcgatttcctcttgaagtcttggaactcgaagagggtccccatggggt

SEQ ID NO: 126711 - DNA, 80 bp, synthetic construct
  source 1..80: mol_type = other DNA
tggcattgaaattacagctaagggtcttcaaattggcattgatgcaaccaaagaggaagataatggaaaggaaatatatg

SEQ ID NO: 126712 - DNA, 80 bp, synthetic construct
  source 1..80: mol_type = other DNA
tgcctcgggcatctaccatgtcaccaacgactgcccgaattccagtatagtgtatgagtctgaccaccatatcctgcacc

SEQ ID NO: 126713 - DNA, 80 bp, synthetic construct
  source 1..80: mol_type = other DNA
agtcacactggcgggaccacgaagcaatcacaatcggagacctgggtacaagacacaaaaccagggcccatgggacgaag

SEQ ID NO: 126714 - DNA, 80 bp, synthetic construct
  source 1..80: mol_type = other DNA
aggagaatttcagtatgggagagtttctcctggacttgagaccggcaacagcctggtcactgtatgctgtgaccacagcg

SEQ ID NO: 126715 - DNA, 80 bp, synthetic construct
  source 1..80: mol_type = other DNA
ttggtcatccatcgtatccgaacgctgattggacaggagaaatacactgactacctaacagtcatggacaggtattctgt

SEQ ID NO: 126716 - DNA, 80 bp, synthetic construct
  source 1..80: mol_type = other DNA
aggaacccggcggcgtcccagcagtagatgggacgagaccggacgcttcccgaacccaaccagcgcttccaagaccggta

SEQ ID NO: 126717 - DNA, 80 bp, synthetic construct
  source 1..80: mol_type = other DNA
gccccgggtcgggtggcctccgtccaaaaacgtcggcaacacgcggatgcgggcgtcgggatgcgtggtcaggcgctgga

SEQ ID NO: 126718 - DNA, 80 bp, synthetic construct
  source 1..80: mol_type = other DNA
ggtcactcaaatgtactctagtgccgagggagatctcgttgggtggcccagccctcctgggaccaaatccctagagccat

SEQ ID NO: 126719 - DNA, 80 bp, synthetic construct
  source 1..80: mol_type = other DNA
ccaacgcagaggccgaatcgggagaaatccctctcaggtcggagacgagtatcactatggaggcacaacaaatgatgatg

SEQ ID NO: 126720 - DNA, 80 bp, synthetic construct
  source 1..80: mol_type = other DNA
tgttgcgtccgggtgtcacctttgagatcactaagtggctcctagcgacgcttggaccagcctacctcctcaagtatacc

SEQ ID NO: 126721 - DNA, 80 bp, synthetic construct
  source 1..80: mol_type = other DNA
ctggcttggtaacatcataatgtttgcgcccacattgtgggttcggatggtactgatgactcatttcttttccatcctcc

SEQ ID NO: 126722 - DNA, 80 bp, synthetic construct
  source 1..80: mol_type = other DNA
ggatccccttggagtacatcaagggaggcaggcatctaatcttttgtcattcaaggaagaagtgcgacgaactggctaag

SEQ ID NO: 126723 - DNA, 80 bp, synthetic construct
  source 1..80: mol_type = other DNA
gaagcagccttccaaacatgggtcccccctctcaaccctcgggggggcagggatgtggtcattctgtgtatcatgctcta

SEQ ID NO: 126724 - DNA, 80 bp, synthetic construct
  source 1..80: mol_type = other DNA
gaacgagtagttggagtactgcaccttggcggctcccggtgagggcgagggcttgggttgcttctgggcatgccgcccgg

SEQ ID NO: 126725 - DNA, 80 bp, synthetic construct
  source 1..80: mol_type = other DNA
gacgttaagttcccgggcggcggccagatcgttggcggagtatacttgttgccgcgcaggtgccccaggttgggtgtgcg

SEQ ID NO: 126726 - DNA, 80 bp, synthetic construct
  source 1..80: mol_type = other DNA
actgaggactgcggaaatagaggaccctctttgagaacaactactgcctctggaaaactcataacagaatggtgctgccg

SEQ ID NO: 126727 - DNA, 80 bp, synthetic construct
  source 1..80: mol_type = other DNA
aattgtaagatagatatagaaaaagactcaaaactaactttggtactgacaaagtgcggaagtcagattttggcaaatgt

SEQ ID NO: 126728 - DNA, 80 bp, synthetic construct
  source 1..80: mol_type = other DNA
ggtgcatgccggcggacggcatgccttttaagtaaacatctgggtcgcccggcccaacgggagccggcggttgggtctgg

SEQ ID NO: 126729 - DNA, 80 bp, synthetic construct
  source 1..80: mol_type = other DNA
aaaacagctgcgcttgaatgtttctactttggttttttggtgttaacgtccacacggtttccttctgggcaaaacgacag

SEQ ID NO: 126730 - DNA, 80 bp, synthetic construct
  source 1..80: mol_type = other DNA
cctgcccggcaacccggctattgcctctctcatgtctttctctgcctctctcactagcccgctgtcgacgcatcaaaccc

SEQ ID NO: 126731 - DNA, 80 bp, synthetic construct
  source 1..80: mol_type = other DNA
ccacagggtttactaaaacctgcggtgcgccgccgtgccaaattacacctggcacatacaaccgctctgccggccacttg

SEQ ID NO: 126732 - DNA, 80 bp, synthetic construct
  source 1..80: mol_type = other DNA
ataaattagaattagcacttgatgctccatttcaagaaaaaaatggaaaactggtattgaaaacaggacatggtttagct

SEQ ID NO: 126733 - DNA, 80 bp, synthetic construct
  source 1..80: mol_type = other DNA
aggagaatgccgctaaggctaatggtcctgcaagaggagacagtagtgtctcaagagaggtggaaaaggcagctgaaaaa

SEQ ID NO: 126734 - DNA, 80 bp, synthetic construct
  source 1..80: mol_type = other DNA
acttggtgcaggcgagcttgctgtgcgtgccctactttgtgcgtgcccacgttctgttgcgggcatgcttgctcgcccgc

SEQ ID NO: 126735 - DNA, 80 bp, synthetic construct
  source 1..80: mol_type = other DNA
gtatgaggcagcggacgtgattatgcacacccccgggtgcgtgccctgcgttcgggaaggcaatttctcccgttgctggg

SEQ ID NO: 126736 - DNA, 80 bp, synthetic construct
  source 1..80: mol_type = other DNA
cgggccccaaaggcccagtggtgcaaatgtacactaatgtagacaaagatctggtgggatggcctaccccccccggaacg

SEQ ID NO: 126737 - DNA, 80 bp, synthetic construct
  source 1..80: mol_type = other DNA
ggagatgaacctttggacttgtgtacccggaaacgccccaggcattaagtgccacacatgtgtgtttacttgaggtgatg

SEQ ID NO: 126738 - DNA, 80 bp, synthetic construct
  source 1..80: mol_type = other DNA
cggcgctgaagggtgcatcgcatagggtgttataattagccatttccggtaacagtcgttgggaatttaggaggctgcaa

SEQ ID NO: 126739 - DNA, 80 bp, synthetic construct
  source 1..80: mol_type = other DNA
gcatcgcggccttcctctgcatactgacattgtccccacattacaagcagtggctagccaggattatctggtggttgcag

SEQ ID NO: 126740 - DNA, 80 bp, synthetic construct
  source 1..80: mol_type = other DNA
gaagatcaatggtgtggatccctgataggcttaacagcaagggccacctgggccaccaacatacaagtggccataaacca

SEQ ID NO: 126741 - DNA, 80 bp, synthetic construct
  source 1..80: mol_type = other DNA
aagtcgctgggggtcattatgtccaaatggcccttatgaggctggccgcattgacgggcacgtacgtttatgatcatctc

SEQ ID NO: 126742 - DNA, 80 bp, synthetic construct
  source 1..80: mol_type = other DNA
gacatcatggagcctgaacatgctctattggctacgtcaattttcaagctgacttatcaaaacaaggtggtgagggtgca

SEQ ID NO: 126743 - DNA, 80 bp, synthetic construct
  source 1..80: mol_type = other DNA
ggtttgcaaacggtcgcggtagtttcgaaacttttttcctaccgccattttttcgggggtgaccacgtaaaaggtatggc

SEQ ID NO: 126744 - DNA, 80 bp, synthetic construct
  source 1..80: mol_type = other DNA
gtcgttctcgggcgccgggtgtggctgtccgtcgccccccgcggtcctggccagcgcatggtccaacacggagagcgccc

SEQ ID NO: 126745 - DNA, 80 bp, synthetic construct
  source 1..80: mol_type = other DNA
cgggtgtgcatgcccgtccccgccccgtacgtcgtccacggttctctaacgatgcgggaggtggcacgggtcatccagca

SEQ ID NO: 126746 - DNA, 80 bp, synthetic construct
  source 1..80: mol_type = other DNA
tgtcccccccaggacatttggcagcccccctcgcctcacggaggacgactttgggcttctcaactacgcgctcgtggaga

SEQ ID NO: 126747 - DNA, 80 bp, synthetic construct
  source 1..80: mol_type = other DNA
ggtctgcggggatgacctggtcgtgatttcggagagtgcgggagtcaccgaggatgccagtgcactgcgagctttcacgg

SEQ ID NO: 126748 - DNA, 80 bp, synthetic construct
  source 1..80: mol_type = other DNA
actgactcgaccacaatattgggtattggcactgtgttagaccaagcggaaacgagcggggctcgacttgtcgtgctcgc

SEQ ID NO: 126749 - DNA, 80 bp, synthetic construct
  source 1..80: mol_type = other DNA
gagtgacacgctgttgtgtgacataggtgaatcagcttcaagcccggaggtggaagaacaccgcacattgcgagttttgg

SEQ ID NO: 126750 - DNA, 80 bp, synthetic construct
  source 1..80: mol_type = other DNA
aaccccagaggagtggttacgcgcggcgcgggaggcgcggaataccggagttgcccattaagggccgcgggaattgccgg

SEQ ID NO: 126751 - DNA, 80 bp, synthetic construct
  source 1..80: mol_type = other DNA
aggagataacttcccctacctggtggcataccaagccacagtgtgcgccagggctcaggccccacctccatcgtgggatc

SEQ ID NO: 126752 - DNA, 80 bp, synthetic construct
  source 1..80: mol_type = other DNA
actccctgaagctgctgcagtcgctcgcgcctccgggggacaaggtcgtctacctgtgtcctattttggtgtttgtcgcg

SEQ ID NO: 126753 - DNA, 80 bp, synthetic construct
  source 1..80: mol_type = other DNA
acacattatgctattctgcaggcaaaagccactcgtgaagctcaaaaaaggacagctgctggaataatgaagaatccaac

SEQ ID NO: 126754 - DNA, 80 bp, synthetic construct
  source 1..80: mol_type = other DNA
aggagggaccggatctttgcttggattggctgcgttaattggactggcgagttcactgcaattgtcaacctaccagggga

SEQ ID NO: 126755 - DNA, 80 bp, synthetic construct
  source 1..80: mol_type = other DNA
tatttgataagaacggagtgcttttagacaactcaaatcttggaaaaacttattggaactttagaagtggagattccaat

SEQ ID NO: 126756 - DNA, 80 bp, synthetic construct
  source 1..80: mol_type = other DNA
atgggagactcctacggattccagtactcaccgtcgcagcgggtcgacttcctagtaaaagcatggaaggccaagaagac

SEQ ID NO: 126757 - DNA, 80 bp, synthetic construct
  source 1..80: mol_type = other DNA
gtatgttaattgcaataaagtggttgattgtcattacggtctactaggttgtctttttttgggggggggggaaggaaaat

SEQ ID NO: 126758 - DNA, 80 bp, synthetic construct
  source 1..80: mol_type = other DNA
aaggcgacatgcactacccatcatgactccccagatgctgacctcattgaggccaacctcctgtggcggcaggagatggg

SEQ ID NO: 126759 - DNA, 80 bp, synthetic construct
  source 1..80: mol_type = other DNA
cattataccagcaatttgatgagatggaggagtgctcggcctcgctaccctatatggacgaggcacgtgccattgccggg

SEQ ID NO: 126760 - DNA, 80 bp, synthetic construct
  source 1..80: mol_type = other DNA
aggccagcctgatcgaggtgaagacctgcacctggcccaagagccacaccctgtggagcaacggcgtgctggagagcgac

SEQ ID NO: 126761 - DNA, 80 bp, synthetic construct
  source 1..80: mol_type = other DNA
gcatcatggttggagctaatgcttcagacaggatggggatgggaacaacgtacctagccttgatggctactttcaaaatg

SEQ ID NO: 126762 - DNA, 80 bp, synthetic construct
  source 1..80: mol_type = other DNA
gcggataatcccggccgcgcgtcgggctcaaactcaccggcaaagcgtccaccatggtcagcacgttttggccgaacagg

SEQ ID NO: 126763 - DNA, 80 bp, synthetic construct
  source 1..80: mol_type = other DNA
tgggagaggcggtatctcacagcacatacgggctggcgagcttccttttcgcccggtgggcgtcgcagaaaatccagctt

SEQ ID NO: 126764 - DNA, 80 bp, synthetic construct
  source 1..80: mol_type = other DNA
acgtcggccaggctcaggcgcgtggaggccagaaagtcccccacggccgttttccagggcagcatgttcagggtaaactc

SEQ ID NO: 126765 - DNA, 80 bp, synthetic construct
  source 1..80: mol_type = other DNA
ggagctaagtatatccaggtactgttgatcaccataggtaggtggaccggcacttacatctatgaccacctctccccttt

SEQ ID NO: 126766 - DNA, 80 bp, synthetic construct
  source 1..80: mol_type = other DNA
ggacaccgaatggcatgggatatgatgatgaattggtcaccaactgttaccctggtcctgtcgtacctggcacgtatacc

SEQ ID NO: 126767 - DNA, 80 bp, synthetic construct
  source 1..80: mol_type = other DNA
ctccaacggtccaaggagccgtgcaggcattgaataggtttcgtaaaccctctagtagtacatcggggtcacgtccagcc

SEQ ID NO: 126768 - DNA, 80 bp, synthetic construct
  source 1..80: mol_type = other DNA
gcctcgatggaggtccgcgggctcatggccaagcagctcttggtgacggtttgccagcggtctatccactccacggcgca

SEQ ID NO: 126769 - DNA, 80 bp, synthetic construct
  source 1..80: mol_type = other DNA
catgctgaatgtaactgaggagctaagaagtgaccatcttaccctgtcttgtctgcgaaccgactatgagtctagcgatg

SEQ ID NO: 126770 - DNA, 80 bp, synthetic construct
  source 1..80: mol_type = other DNA
ggcatctggtgcacaggccatgagagaccttggaggaggtgcccccttctttggtgtggcgggacatgtcgtgaccctcg

SEQ ID NO: 126771 - DNA, 80 bp, synthetic construct
  source 1..80: mol_type = other DNA
cctacttacagttgggtggtgaatgagacagacgttttcctcttgaacagcacgcgaccaccgcgaggggcgtggtttgg

SEQ ID NO: 126772 - DNA, 80 bp, synthetic construct
  source 1..80: mol_type = other DNA
gacgcccaacaactggcacctcagtggtgtggtgtggagtggtcgttcttggcctagtcgtaactgggctagtcaccatt

SEQ ID NO: 126773 - DNA, 80 bp, synthetic construct
  source 1..80: mol_type = other DNA
cagtacttcatagcccgattggaggccgccatccacgtgtgggtgcccccattggaggttaggggtggtcgtgatgctat

SEQ ID NO: 126774 - DNA, 80 bp, synthetic construct
  source 1..80: mol_type = other DNA
agctcccaacgcctctgtgcccgtgagggggttccgtaagcacgtggacctcctcgtgggcgccgcggcgctgtgttctg

SEQ ID NO: 126775 - DNA, 80 bp, synthetic construct
  source 1..80: mol_type = other DNA
tgaggctccaccgctacgcccccccctgcaaacccctgctgagggacgagatcaccttcagtgtaggactgcattcatat

SEQ ID NO: 126776 - DNA, 80 bp, synthetic construct
  source 1..80: mol_type = other DNA
cttctctcacccggggctctggttgtgggcgtcgtctgtgctgcggtactgcgccgacacatcggcccgtctgaggtggc

SEQ ID NO: 126777 - DNA, 80 bp, synthetic construct
  source 1..80: mol_type = other DNA
gtgtctgctaaacccgaacgtgagctccgagcgagacgtgattaataccaacgacgttgaagtgctggacgaatgcctgg

SEQ ID NO: 126778 - DNA, 80 bp, synthetic construct
  source 1..80: mol_type = other DNA
agtttcaagcgcacttgcggagcttgctcgcaagtcgtttccaccgccctcaacacaatcgctggagagctcagggttgg

SEQ ID NO: 126779 - DNA, 80 bp, synthetic construct
  source 1..80: mol_type = other DNA
ggcaaacacgttttacccagctctgcggccccaaatctcacacgcgcgtgtaacgcggctcgagaacggtttgggttttc

SEQ ID NO: 126780 - DNA, 80 bp, synthetic construct
  source 1..80: mol_type = other DNA
atcgtcgttgccgtgcgagcggcgtgctgccgaccagctttggcaacaccattacctgctatattaaagcgaccgcggcg

SEQ ID NO: 126781 - DNA, 80 bp, synthetic construct
  source 1..80: mol_type = other DNA
gcagccaacgagctaggcatgctggagaaaaccaaagaggacctctttgggaagaagaacttaattccatctagtgcttc

SEQ ID NO: 126782 - DNA, 80 bp, synthetic construct
  source 1..80: mol_type = other DNA
atgactgttccaactcgagtatcatctatgagatggacaatatgatcatgcataccccaggttgcgttccctgcgttcgg

SEQ ID NO: 126783 - DNA, 80 bp, synthetic construct
  source 1..80: mol_type = other DNA
atttcattgcagacaggttcccaaatagaaagagcatttctccaggcaccagttgaagagcgttgatcaatggcctgttc

SEQ ID NO: 126784 - DNA, 80 bp, synthetic construct
  source 1..80: mol_type = other DNA
ccgccagcgcctgcaggcgacggagctcgaccacgtcaaactcggcaccgctttccacgcggtccagcacggcctccacg

SEQ ID NO: 126785 - DNA, 80 bp, synthetic construct
  source 1..80: mol_type = other DNA
aatgtaactttgattaatgtcacaaaaccatacgaaggaagctattatggctccagcgatgatggttcaagtcattacaa

SEQ ID NO: 126786 - DNA, 80 bp, synthetic construct
  source 1..80: mol_type = other DNA
agagaaaccgcgtgtcaactgtgcaacagctgacaaagagattctcacttggaatgctgcaaggacgaggaccattaaaa

SEQ ID NO: 126787 - DNA, 80 bp, synthetic construct
  source 1..80: mol_type = other DNA
aaatgtcttttgtcaagaacccaactgacactggacatggcactgcagtgatgcaagtgaaggtgccaaaaggagcaccc

SEQ ID NO: 126788 - DNA, 80 bp, synthetic construct
  source 1..80: mol_type = other DNA
gtacgccccgccatgcaagcctctgctacgggaggaggtctccttcagcgtcggcctcaactcctatgtggtggggtccc

SEQ ID NO: 126789 - DNA, 80 bp, synthetic construct
  source 1..80: mol_type = other DNA
aattgggccatcaagtgggagtatgttgtcctcctattcctggtgctggcagattctcgcatttgtctggctctttggct

SEQ ID NO: 126790 - DNA, 80 bp, synthetic construct
  source 1..80: mol_type = other DNA
ggccgaggcgcagatccaacaatgggttccgcctctggaagcaagaggtggaagagatggcgtcgtttgggctgcggtgc

SEQ ID NO: 126791 - DNA, 80 bp, synthetic construct
  source 1..80: mol_type = other DNA
tatgggcacggccagattataatcctccccttgtggaaccatggaagcgcccggactacgaaccacccttagttcacggg

SEQ ID NO: 126792 - DNA, 80 bp, synthetic construct
  source 1..80: mol_type = other DNA
cgttcagctggtgaggatgatggaaggggaaggggtgattggcccagacgatgtggagaaactcacaaaagggaaaggac

SEQ ID NO: 126793 - DNA, 80 bp, synthetic construct
  source 1..80: mol_type = other DNA
aggggcaccgagagcgagcgcacgatggcgatctcatcggagggcgtctgggcgagagcggcgaaaaggccccgatagcg

SEQ ID NO: 126794 - DNA, 80 bp, synthetic construct
  source 1..80: mol_type = other DNA
caactactgacaccacaattcacactacacatctagacactacagtgcagaatactactttattgattgggtttttacta

SEQ ID NO: 126795 - DNA, 80 bp, synthetic construct
  source 1..80: mol_type = other DNA
tatacggagtcacgtacaatatcactccacttgatttacctcagatcattcaacgcctccatggcatggctgccttttca

SEQ ID NO: 126796 - DNA, 80 bp, synthetic construct
  source 1..80: mol_type = other DNA
gccaatatcagcggcccttcaaatgataggccgtattgttggcactatgcacccaggccctgcgtgggcctgcctgctaa

SEQ ID NO: 126797 - DNA, 80 bp, synthetic construct
  source 1..80: mol_type = other DNA
attccacacatgagatgtactgggttagccaggcctctggtaacattgtgcatgcagtaaacatgaccagtcaagtgcta

SEQ ID NO: 126798 - DNA, 80 bp, synthetic construct
  source 1..80: mol_type = other DNA
actgggctcacccacattgatgcccattttctctctcagacaaagcaggcgggggaaaactttgcgtatctggtggctta

SEQ ID NO: 126799 - DNA, 80 bp, synthetic construct
  source 1..80: mol_type = other DNA
ataaatgattcaataaacacagattctgattcaaacagcaaagcatctttattatttattttttcgcgcgcggtaggccc

SEQ ID NO: 126800 - DNA, 80 bp, synthetic construct
  source 1..80: mol_type = other DNA
cgcaaacgcgcgcgaccacgcatctatagacccattattgtgcttaacccagacgataatggcattcatagattggatgg

SEQ ID NO: 126801 - DNA, 80 bp, synthetic construct
  source 1..80: mol_type = other DNA
gctggatcgaaatcaaaatctttatctgctgggtcagacattgttgggaggaaccatgaaggggctcttgctaattatcc

SEQ ID NO: 126802 - DNA, 80 bp, synthetic construct
  source 1..80: mol_type = other DNA
cctcagtacgcaccacaactgacagcgggaaactcgtcacggactggtgttgtaggagctgcacgcttcctcctttaaga

SEQ ID NO: 126803 - DNA, 80 bp, synthetic construct
  source 1..80: mol_type = other DNA
gcataaagttgcgtgtgatgcggaagggtcccggcacctcggaacggttgttaattacctgggcggcgagcacgatctcg

SEQ ID NO: 126804 - DNA, 80 bp, synthetic construct
  source 1..80: mol_type = other DNA
atggttcgacgaggagtccgctccttgtcaagcaaaataaaacaaaaaacaaaacaagttggaagtagacctggaccttc

SEQ ID NO: 126805 - DNA, 80 bp, synthetic construct
  source 1..80: mol_type = other DNA
ggcagagtctgacgcctcgcagcgtgtgatgcaagtgttgggctcactcacaattaccagcttactcaggagactacatg

SEQ ID NO: 126806 - DNA, 80 bp, synthetic construct
  source 1..80: mol_type = other DNA
cgttaggctgcgagcctaccttaacacccctggccttcctgtctgtcaagatcaccttgagttttgggaggtggtattca

SEQ ID NO: 126807 - DNA, 80 bp, synthetic construct
  source 1..80: mol_type = other DNA
gcggctgctgccgcttctgccgctgcctctactgctcgtggtatggcagctgattttggactttacaatcaactggctgc

SEQ ID NO: 126808 - DNA, 80 bp, synthetic construct
  source 1..80: mol_type = other DNA
ggtggcgtaacctgatcgcgccccccgttgtctcttgcagcagactacgtaccgcccgccccccgccggacgccccgcgc

SEQ ID NO: 126809 - DNA, 80 bp, synthetic construct
  source 1..80: mol_type = other DNA
ctgcctgaccgtgctgttcgccattctcgtcgtatcgctgttgttggtggtcgagggggtgttgtgtcactacgtgcgcg

SEQ ID NO: 126810 - DNA, 80 bp, synthetic construct
  source 1..80: mol_type = other DNA
ccagcactaccatgatgtccttaaggagataaaagctcgagcctccaaagtgagcgccaggctcctctccacggaggaag

SEQ ID NO: 126811 - DNA, 80 bp, synthetic construct
  source 1..80: mol_type = other DNA
cccaagctctgccagtgtacctaatgactcttatgaaaggagcttcaagaagatcttggcctcttaacgaaggcataatg

SEQ ID NO: 126812 - DNA, 80 bp, synthetic construct
  source 1..80: mol_type = other DNA
ttggaagatgagtttaaaaacggtgaaatgaatttgttatacaagtatacatttgaacagctgaagacacattggctgga

SEQ ID NO: 126813 - DNA, 80 bp, synthetic construct
  source 1..80: mol_type = other DNA
tgaacatctggcaggggacctttcccattaattgttacacggagggccagtgcatgccaaagcctgcgccaaacttcaag

SEQ ID NO: 126814 - DNA, 80 bp, synthetic construct
  source 1..80: mol_type = other DNA
tgattaccactatgtggtaggggcaacagctgacaatctcaagtgcccatgccaagttccatcaccagagttcttcacgg

SEQ ID NO: 126815 - DNA, 80 bp, synthetic construct
  source 1..80: mol_type = other DNA
atccgagcaccccccccaaatcccggcgccggtcgtcacgcacgccaatgccctccctgacggccatcgccgaagagtcg

SEQ ID NO: 126816 - DNA, 80 bp, synthetic construct
  source 1..80: mol_type = other DNA
gacacatggtattggttggtacctggtagccttttgcgcggcgtggtacgtgcggggtaaacttgtcccgctgacgatct

SEQ ID NO: 126817 - DNA, 80 bp, synthetic construct
  source 1..80: mol_type = other DNA
tatggaacagagtgtggatactggaaaacccttggatggatgacaaaacttgcgtgaagtcatgggaggaagttccgtac

SEQ ID NO: 126818 - DNA, 80 bp, synthetic construct
  source 1..80: mol_type = other DNA
tttccccactgctcttaacatcctcacagcagaaagcggactggataccattggcattgacgatcaaaggtctcaatcca

SEQ ID NO: 126819 - DNA, 80 bp, synthetic construct
  source 1..80: mol_type = other DNA
tgcagtgcgcgatgaggcgctcactgttaacacaggccgcggcctcacagtgagttacgatggtttaattttaaatcttg

SEQ ID NO: 126820 - DNA, 80 bp, synthetic construct
  source 1..80: mol_type = other DNA
cccgcgtgatgtccttgataggactaaagagggctatgttgagcttgatagacggcaagggaccgatacgtttcgtgttg

SEQ ID NO: 126821 - DNA, 80 bp, synthetic construct
  source 1..80: mol_type = other DNA
aacggagctcacgtgttaggtactataacaattaaaggtcttaaaggagcactgcgggaaatgaacgataacgctttatc

SEQ ID NO: 126822 - DNA, 80 bp, synthetic construct
  source 1..80: mol_type = other DNA
gtttacttaaacggagacaaaactaaacctgtaacactaaccattacactaaacggtacacaggaaacaggagacacaac

SEQ ID NO: 126823 - DNA, 80 bp, synthetic construct
  source 1..80: mol_type = other DNA
cgttctcgcttcacagttactctccaactgagctcaacagagtggcgggggttctcaggaagcttgggatccccccccta

SEQ ID NO: 126824 - DNA, 80 bp, synthetic construct
  source 1..80: mol_type = other DNA
attcgacccgctggtggctgagacggacgatagggaaatctccgtgccggctgagtgccacaggccccccagaccaaaat

SEQ ID NO: 126825 - DNA, 80 bp, synthetic construct
  source 1..80: mol_type = other DNA
catgatatgctgttcgtattcttacagctggacaggggcacttattacaccttgtgccgccgaagaagagaagttaccta

SEQ ID NO: 126826 - DNA, 80 bp, synthetic construct
  source 1..80: mol_type = other DNA
tggcatgtttgatactgtcgttctctgcgaggcgtatgacacaggagctgcgtggtacgagctaacacctgctgagacca

SEQ ID NO: 126827 - DNA, 80 bp, synthetic construct
  source 1..80: mol_type = other DNA
aggagacacagcttgggactttggatcagttggaggggtgttcacctcagtagggaaggctgtccatcaagtgtttggtg

SEQ ID NO: 126828 - DNA, 80 bp, synthetic construct
  source 1..80: mol_type = other DNA
ggagacacaaccaccggagtctacagaatcatggcgcgaggattgcttggtagctaccaggctggatctggagtgatggt

SEQ ID NO: 126829 - DNA, 80 bp, synthetic construct
  source 1..80: mol_type = other DNA
tgtgggttgggcttccggtgggcgggacgcgaaccgcggtgtggatcccgacgcgggcccgagcgtatgctccatgttgt

SEQ ID NO: 126830 - DNA, 80 bp, synthetic construct
  source 1..80: mol_type = other DNA
gtcctgatgggccgccacggccccgtcgatcgtggtggcctcgagcccggggtggtggcgcgccagtcgttctaggttca

SEQ ID NO: 126831 - DNA, 80 bp, synthetic construct
  source 1..80: mol_type = other DNA
cgtcggcgcccccgaagatttggggcgcagagacagaatctccgccgttagttctcccatgcgggcgtaggcaagggtcc

SEQ ID NO: 126832 - DNA, 80 bp, synthetic construct
  source 1..80: mol_type = other DNA
gctttctccgctcacggtagcggaaaagaggtcattgacgctatgtgtcatgccaccctgacatatagaatgttggaacc

SEQ ID NO: 126833 - DNA, 80 bp, synthetic construct
  source 1..80: mol_type = other DNA
tcagtgactccgaagagcagagcgtggtttgctgttctatgtcatactcctggactggcgccataataacaccatgcagc

SEQ ID NO: 126834 - DNA, 80 bp, synthetic construct
  source 1..80: mol_type = other DNA
agttgttagtctacgtggaccgacaaagacagttttctttgtggaagcttggcttaacgtagttctaacagtttttgatt

SEQ ID NO: 126835 - DNA, 80 bp, synthetic construct
  source 1..80: mol_type = other DNA
aaagctttgacacagaataccctaagacaaagaacaacgaatgggattttgttgtgactactgatatatcagagatgggg

SEQ ID NO: 126836 - DNA, 80 bp, synthetic construct
  source 1..80: mol_type = other DNA
aataaagatggaaaagctcaccctgaagggaaccacttacgcagtttgcgctgaagggttcacttttaccaagaccccag

SEQ ID NO: 126837 - DNA, 80 bp, synthetic construct
  source 1..80: mol_type = other DNA
cacaaatggccatcatcaagttaggggcgcttactggcacctatgtctacaaccatctcacccctcttcgtgactgggcg

SEQ ID NO: 126838 - DNA, 80 bp, synthetic construct
  source 1..80: mol_type = other DNA
ttactctcacccccgggtataagacccttctcagccggtttttgtggtggttgtgctatcttctgaccctgggggaagct

SEQ ID NO: 126839 - DNA, 80 bp, synthetic construct
  source 1..80: mol_type = other DNA
tgtcgctacagtcaacatggtatctagactgctactgaacaggttcacgatgacacacagaagacccaccattgagaaag

SEQ ID NO: 126840 - DNA, 80 bp, synthetic construct
  source 1..80: mol_type = other DNA
acacagacattcctgggtacatcgatcagcggcaccctatggacagtctaccacagcgctggaaacaagaccctggctgg

SEQ ID NO: 126841 - DNA, 80 bp, synthetic construct
  source 1..80: mol_type = other DNA
tggggctggcaacaagaccttagctggctcacggggtccagtcacgcagatgtactccagtgccgaggtggacttggtgg

SEQ ID NO: 126842 - DNA, 80 bp, synthetic construct
  source 1..80: mol_type = other DNA
tgatgatgtaattgaagtaggcgtttttaaggcggcggatggtggcgaggaggaccaggtccttgggtcccgcttgctgg

SEQ ID NO: 126843 - DNA, 80 bp, synthetic construct
  source 1..80: mol_type = other DNA
cccgcgtggccatcaagtccctcactgagaggctttatgttgggggccctcttaccaattcaaaggtggagaactgcggc

SEQ ID NO: 126844 - DNA, 80 bp, synthetic construct
  source 1..80: mol_type = other DNA
gaagtggaagtcattacgaagcttggtgaaagaaagattctgaggccgcgctggattgacgccagggtgtactcggatca

SEQ ID NO: 126845 - DNA, 80 bp, synthetic construct
  source 1..80: mol_type = other DNA
ttgtcccccggaggccgtgtatcgccccccaccacacagcgccccctacggtcctccccagggtccggcgtcccatgccc

SEQ ID NO: 126846 - DNA, 80 bp, synthetic construct
  source 1..80: mol_type = other DNA
gtgtggttaaagagcagcacagagagatcatgtcttctcccggcaaatatcacatcggactgggttagtatgcccctggc

SEQ ID NO: 126847 - DNA, 80 bp, synthetic construct
  source 1..80: mol_type = other DNA
agctccatcgtggggatgtagctccatcgtggggatgtagctccatcgtggggatgtagctccatcgtgtggatgtagct

SEQ ID NO: 126848 - DNA, 80 bp, synthetic construct
  source 1..80: mol_type = other DNA
ccataacatggtgtacgccacaacctccaagtcagccaccacccggcaaaagaaggttaccttcgaccgcatgcaggtgc

SEQ ID NO: 126849 - DNA, 80 bp, synthetic construct
  source 1..80: mol_type = other DNA
cacgtggggcgagaatgagaccgatgtgtttctgctgaacacaaccaggcccccccggggtgcttggttcggctgcacgt

SEQ ID NO: 126850 - DNA, 80 bp, synthetic construct
  source 1..80: mol_type = other DNA
atggggtgtgtcataaactggaaaggaaaagaactcaaatgtggaagtggaattttcgtcactaatgaggtccacacctg

SEQ ID NO: 126851 - DNA, 80 bp, synthetic construct
  source 1..80: mol_type = other DNA
ccaataacacacctggtgatattttgtttgatttacaattaggacctcaattaaacccctttttgtctcatttagcacaa

SEQ ID NO: 126852 - DNA, 80 bp, synthetic construct
  source 1..80: mol_type = other DNA
tagctgagcaattcaagcaaaaggtgctcggcttgatccaggttacgacgaagcaggcagaagaactcaaaccagccgtc

SEQ ID NO: 126853 - DNA, 80 bp, synthetic construct
  source 1..80: mol_type = other DNA
ggaacgcgcacccttgcccggtcgcgatggcgtggatggggaagccctacggcggccgcccggtggacgcgttcgagggt

SEQ ID NO: 126854 - DNA, 80 bp, synthetic construct
  source 1..80: mol_type = other DNA
tgggctgccggtggtctgcgtgacctagcggtggccgttgagcctattatcttcagcccaatggagaggaaggttatcgt

SEQ ID NO: 126855 - DNA, 80 bp, synthetic construct
  source 1..80: mol_type = other DNA
ggagttggggcggaccaaggatgtgcaataaactttggcaagagagaactcaagtgtggggatggcatcttcgtctttag

SEQ ID NO: 126856 - DNA, 80 bp, synthetic construct
  source 1..80: mol_type = other DNA
ttcttaacattttggggggctggatcgcctctcagctggccccgcctacggcatcgacggcctttgtcgttagcggcatg

SEQ ID NO: 126857 - DNA, 80 bp, synthetic construct
  source 1..80: mol_type = other DNA
ttaaggctcagaatgatgccgtcccaagaggagataactatgcatcagcggcagaagccaaagcagcaggaaaagaaatt

SEQ ID NO: 126858 - DNA, 80 bp, synthetic construct
  source 1..80: mol_type = other DNA
tagtttttcattaggaatactatgcgtgtcaataatgattgaagaagtgatgagatccagatggagtagaaagatgctga

SEQ ID NO: 126859 - DNA, 80 bp, synthetic construct
  source 1..80: mol_type = other DNA
gggcagcggcgcggctgctcgaactgcaccaccgtggcgcccgtgggtggtgggcacacgtaaaagtttgcatcggtgtt

SEQ ID NO: 126860 - DNA, 80 bp, synthetic construct
  source 1..80: mol_type = other DNA
accttggaaaatctggatacttagaatggtctgtttggctgtcagtgcttacacaccttgggccattctcccctcagtaa

SEQ ID NO: 126861 - DNA, 80 bp, synthetic construct
  source 1..80: mol_type = other DNA
tgcacagtagtcatcaaatgcgagcatacatgtcctctcaacatcacattcaagaataagaccatgggaaatgcatgggt

SEQ ID NO: 126862 - DNA, 80 bp, synthetic construct
  source 1..80: mol_type = other DNA
aatacagaaattagaatctactggggctcctgtcgctcctgtaaacgccaccgtcttcacccacccaaacctgcaatttg

SEQ ID NO: 126863 - DNA, 80 bp, synthetic construct
  source 1..80: mol_type = other DNA
ggcgaccaggctcacggcgcgcacggcggccacggcggcctcgctgccgccggccacgcgcaggtccccgcgcaggcgca

SEQ ID NO: 126864 - DNA, 80 bp, synthetic construct
  source 1..80: mol_type = other DNA
aagaaatgtcctatgggcttttcatatgacacccgctgctttgactcaacggtcactgagagtgacatccgtactgagga

SEQ ID NO: 126865 - DNA, 80 bp, synthetic construct
  source 1..80: mol_type = other DNA
acagtgtgtgcaagggcgaaagctccccctcccagctgggacgtgatgtggaagtgtctcatccggcttaagcctaccct

SEQ ID NO: 126866 - DNA, 80 bp, synthetic construct
  source 1..80: mol_type = other DNA
gacccccctaaaccagaatatgacttggagctgataacatcatgctcttcaaatgtatctgtggctttagaccagcatgg

SEQ ID NO: 126867 - DNA, 80 bp, synthetic construct
  source 1..80: mol_type = other DNA
gtgcccgcccccgacgggcgccacggtggtgcagtttgagcagccgcgccgctgcccgacgcgcccggaggtgcagaact

SEQ ID NO: 126868 - DNA, 80 bp, synthetic construct
  source 1..80: mol_type = other DNA
tcctgctcctccaacgtttccgtggcacgagacaacaaggggaaaaggtactactaccttacccgtgatgccactactcc

SEQ ID NO: 126869 - DNA, 80 bp, synthetic construct
  source 1..80: mol_type = other DNA
acttgcgagcgtcttcgtacttcgaataacaaaaccacgtacgcccactggttacagcgccgcgtcccttttgctttcga

SEQ ID NO: 126870 - DNA, 80 bp, synthetic construct
  source 1..80: mol_type = other DNA
cgcttatatggtgcctggatggcaagctgaagctatgcgctcagctcaacggcggacggctgctggcatcatgaagaatg

SEQ ID NO: 126871 - DNA, 80 bp, synthetic construct
  source 1..80: mol_type = other DNA
ggctcctgtcacgtgaaggcgaaccgagggcggctgtccaacccaccccccgccacccagtcccggtccccgtcggattg

SEQ ID NO: 126872 - DNA, 80 bp, synthetic construct
  source 1..80: mol_type = other DNA
acagcgggggggacatatttcacagcgtgtcccatgcccgaccccgcactctactcctgtgcctactcctacttacggta

SEQ ID NO: 126873 - DNA, 80 bp, synthetic construct
  source 1..80: mol_type = other DNA
ccaccagcagttgcgtggtggtggttttccccatcccgtggggaccgtctatataaacccgcagtagcgtgggcattttc

SEQ ID NO: 126874 - DNA, 80 bp, synthetic construct
  source 1..80: mol_type = other DNA
tactccaggcatggggggagtgtttctgcggcaacgtttgcgtctatctgcagggcggcgtcctcggctgcgttagacgc

SEQ ID NO: 126875 - DNA, 80 bp, synthetic construct
  source 1..80: mol_type = other DNA
aggagagggccataacggcgagacctcggaagcgctaaataacatccttacggatgacacgtttattgcacctattctat

SEQ ID NO: 126876 - DNA, 80 bp, synthetic construct
  source 1..80: mol_type = other DNA
atcacagcgtgtcccaggttcgaccccaccctttactccctggggcccaaaccccaaactcccggaaggaggtaggcatc

SEQ ID NO: 126877 - DNA, 80 bp, synthetic construct
  source 1..80: mol_type = other DNA
ccccgaggttatcatggacatagtggtgggcggccactggggcatattgatggccgttgcttactatggtatggcaggca

SEQ ID NO: 126878 - DNA, 80 bp, synthetic construct
  source 1..80: mol_type = other DNA
catcatgggccttgtgtgaagctctaaccctagccacaggaccaataacaacactctgggaaggatcacctggaaagttt

SEQ ID NO: 126879 - DNA, 80 bp, synthetic construct
  source 1..80: mol_type = other DNA
atccaaatcaggttggggatgagtaccattatggaggtaccacgagtgaggatgacaccaacctagcccactggacagaa

SEQ ID NO: 126880 - DNA, 80 bp, synthetic construct
  source 1..80: mol_type = other DNA
tagcaagatttaatgaggatctgccctctcccctcagctcgcgtctcagcgtcagctgtaaaaagtcactcaagtcctca

SEQ ID NO: 126881 - DNA, 80 bp, synthetic construct
  source 1..80: mol_type = other DNA
tcggagtcctactgcgaccaggacgaaccggacgcggactacccgtactaccccgtggaggctcgaggcgggccgcgcgg

SEQ ID NO: 126882 - DNA, 80 bp, synthetic construct
  source 1..80: mol_type = other DNA
gtggcccctgttcctcctcctccttgcgatgcccgagagagcgtacgcttttgatggagaggtagcggggtctctggtgg

SEQ ID NO: 126883 - DNA, 80 bp, synthetic construct
  source 1..80: mol_type = other DNA
ctccgcgtctggcccccaggtccgcaccgcgtcgtaaaccccggcggcctcgcgctgagccgcgagcgggcgcgccgcgg

SEQ ID NO: 126884 - DNA, 80 bp, synthetic construct
  source 1..80: mol_type = other DNA
cagctgacctggaggtgatcaccagcacgtgggtgcttgccggggggattgtcgcggcattggcagcctattgtctgaca

SEQ ID NO: 126885 - DNA, 80 bp, synthetic construct
  source 1..80: mol_type = other DNA
atcaacttgggcagcccagggtttgcgcgacttggcagttgctgtggagcctgtggtgtttagtccaatggagaggaagg

SEQ ID NO: 126886 - DNA, 80 bp, synthetic construct
  source 1..80: mol_type = other DNA
cctcttgtatagacttggtgccgttcaaaatgagattatcaccactcatccaatcaccaaatacatcatgacctgcatgg

SEQ ID NO: 126887 - DNA, 80 bp, synthetic construct
  source 1..80: mol_type = other DNA
cctcaactcgttcgcggttgggtcccagctcccttgtgagccagagcctgacgtagcagtactaacatccatgctaacag

SEQ ID NO: 126888 - DNA, 80 bp, synthetic construct
  source 1..80: mol_type = other DNA
tccgattggtctactccgtgttctggttcttggttacgagacatctgggactgggtttgcactgtgttgtctgattttaa

SEQ ID NO: 126889 - DNA, 80 bp, synthetic construct
  source 1..80: mol_type = other DNA
tgtcgtccaggactctgttaacttcacctttcctactcacaaactagaagctcaacgactacaccgcttttccagaagca

SEQ ID NO: 126890 - DNA, 80 bp, synthetic construct
  source 1..80: mol_type = other DNA
acacattcgttctgcgagtcacacacgggaggagcgggaagagctggaagaaccatgtttttttttattccaaaagatta

SEQ ID NO: 126891 - DNA, 80 bp, synthetic construct
  source 1..80: mol_type = other DNA
aaatgtggaagtgtctcatacggctaaaacccacgctgcacgggccaacgcccctgctgtataggctaggggccgtccaa

SEQ ID NO: 126892 - DNA, 80 bp, synthetic construct
  source 1..80: mol_type = other DNA
aaatacctctttaactgggcagtaaggaccaagcttaaactcactccaattccaggtgcgtcccggttggacttgtccgg

SEQ ID NO: 126893 - DNA, 80 bp, synthetic construct
  source 1..80: mol_type = other DNA
ggggcgcctccccttagggcgtagaagagtcgagctcgtgcagtgagggcttccctcatcagacggggggggaggacggc

SEQ ID NO: 126894 - DNA, 80 bp, synthetic construct
  source 1..80: mol_type = other DNA
accccattactaccaatgctaagcatgagcttagtttaaaacttggcagcaacataactttagaaaatgggttactttcg

SEQ ID NO: 126895 - DNA, 80 bp, synthetic construct
  source 1..80: mol_type = other DNA
gtgggggtggtggtggtgtggtgtttttctgttgttgttgtttctggtccgcctggtcacaaaaggcacggcgccccgaa

SEQ ID NO: 126896 - DNA, 80 bp, synthetic construct
  source 1..80: mol_type = other DNA
cggaagctgcctactgcggttatggggcccgcttacgggttccaatactcgccggcacagcgggtcgaaagactcctagg

SEQ ID NO: 126897 - DNA, 80 bp, synthetic construct
  source 1..80: mol_type = other DNA
aagtctggaagtagcattggcaaagcctttacaaccaccctcaaaggagcgcagagactagccgctctaggagacacagc

SEQ ID NO: 126898 - DNA, 80 bp, synthetic construct
  source 1..80: mol_type = other DNA
tccgtgttctggatcatggcttcgagacatctgggactggatttgttccattcttgcagactttaagaactggttatctg

SEQ ID NO: 126899 - DNA, 80 bp, synthetic construct
  source 1..80: mol_type = other DNA
ccgtgatggcatcattctgcttgctggcttgttttatcccgctctagtctttgacatcactaaactcttgttagcaatac

SEQ ID NO: 126900 - DNA, 80 bp, synthetic construct
  source 1..80: mol_type = other DNA
aaagtgtccaaccgattgctttcgtaagcatccgggcgctacctatgcaaagtgtgggtctgggccttggctcactcccc

SEQ ID NO: 126901 - DNA, 80 bp, synthetic construct
  source 1..80: mol_type = other DNA
gtctggcgtgggctgctgttggcagcatcggcttgggaagggtgctggtggacgttatcgctggctacggtgcgggcgtg

SEQ ID NO: 126902 - DNA, 80 bp, synthetic construct
  source 1..80: mol_type = other DNA
tcctcggtcctgtgcgagtgctatgacgctggctgtgcttggtacgagctcacgcccgccgagacctcggttagattgcg

SEQ ID NO: 126903 - DNA, 80 bp, synthetic construct
  source 1..80: mol_type = other DNA
tttgacatgaccatgaagatctggaaggtgctgaggtacgatgagacccgcaccaggtgcagaccctgcgagtgtggcgg

SEQ ID NO: 126904 - DNA, 80 bp, synthetic construct
  source 1..80: mol_type = other DNA
gatgtaattaatggactttgagcacctgggcaataaaataggggtaatgtggtttttgtgagtcatgtataataaaactg

SEQ ID NO: 126905 - DNA, 80 bp, synthetic construct
  source 1..80: mol_type = other DNA
ccccaagaccgggcccccgaagacatcctcggagcccgtgcgatgcaaccgccacgacccgctggcccggtacggctcgc

SEQ ID NO: 126906 - DNA, 80 bp, synthetic construct
  source 1..80: mol_type = other DNA
acttacgaatggggcgagggtgcgtcagacgtcatcatcctcaataacaccaggccgccgtcgggtaactggttcggctg

SEQ ID NO: 126907 - DNA, 80 bp, synthetic construct
  source 1..80: mol_type = other DNA
gtcttttgcaaggccagatcaaagtctcatagaacaatctacaggccagtaatcggggatcctcagccactccaagtgga

SEQ ID NO: 126908 - DNA, 80 bp, synthetic construct
  source 1..80: mol_type = other DNA
acgaacgagtttgacgcggaggcccccccgagcgagcgcgggaccgggggttttggctctaccggtatttagcccacagc

SEQ ID NO: 126909 - DNA, 80 bp, synthetic construct
  source 1..80: mol_type = other DNA
ctactttcagtaggggtaggcatctacctgctccccaaccgatgaacggttgggcaaccactccgggcccttaggccata

SEQ ID NO: 126910 - DNA, 80 bp, synthetic construct
  source 1..80: mol_type = other DNA
cccagcctattcggctcactgtataggaataaccgacagggatttcattgagggggtgcatggaggaacctgggtttcag

SEQ ID NO: 126911 - DNA, 80 bp, synthetic construct
  source 1..80: mol_type = other DNA
gacatcaccaaattcttgcttgccatactcggtcccttgatggtcctccaagccagtctgatcagagtgccgtactttgt

SEQ ID NO: 126912 - DNA, 80 bp, synthetic construct
  source 1..80: mol_type = other DNA
tctgtgtatcgtaagcgcgagtaagctcgagagtcaaaaacataatcgttgcaagcgcgcaccaaatactgatagcccac

SEQ ID NO: 126913 - DNA, 80 bp, synthetic construct
  source 1..80: mol_type = other DNA
aagggtacaaggtcctggtgctcaatccatcggtcgctgccaccctaggcttcggtagttacatgtctacatcacatggc

SEQ ID NO: 126914 - DNA, 80 bp, synthetic construct
  source 1..80: mol_type = other DNA
gggcagcttttcaccttccgacctaggacgcactacatcacccaagactgcaactgttccatctacactggtcatgttac

SEQ ID NO: 126915 - DNA, 80 bp, synthetic construct
  source 1..80: mol_type = other DNA
agactaaagtcatcgtctggtgtgcggataccgctgcatgtggggacatcatccaagggctgccggtctccgcgaggcgg

SEQ ID NO: 126916 - DNA, 80 bp, synthetic construct
  source 1..80: mol_type = other DNA
tccagcggcatgttgtggatggccgaagttccactccaatggatcgcgtcggctatagtcctggagttttttatgatggt

SEQ ID NO: 126917 - DNA, 80 bp, synthetic construct
  source 1..80: mol_type = other DNA
aggcatcccgaatttgctcctccatccacggggactgagagccattactattgctgtatttggtaagcaaaatacgtaca

SEQ ID NO: 126918 - DNA, 80 bp, synthetic construct
  source 1..80: mol_type = other DNA
aaagttaggggagtttggcagagccaaggggagccgagcaatctggtatatgtggctaggagcgcggtttctggaatttg

SEQ ID NO: 126919 - DNA, 80 bp, synthetic construct
  source 1..80: mol_type = other DNA
ccggtgtggtcaggttggcgccgggttgccccaggggaaccggggacatcttcagcgacatctccccgagggcctccagg

SEQ ID NO: 126920 - DNA, 80 bp, synthetic construct
  source 1..80: mol_type = other DNA
tcatacttttaatatcacttctggattatacaagggagatagctataaaagagaagtgataacatcaatgtctaaatttg

SEQ ID NO: 126921 - DNA, 80 bp, synthetic construct
  source 1..80: mol_type = other DNA
catctccaccagaacattgtggatgtccaatacttgtatggcctttccctggccatcacgaagtatatggtcaagtggga

SEQ ID NO: 126922 - DNA, 80 bp, synthetic construct
  source 1..80: mol_type = other DNA
agcgccgggtggcagaggcggctctgcgccgggtggcgatggaggcagaggcacgttttcgtgaggattcggcagcggtt

SEQ ID NO: 126923 - DNA, 80 bp, synthetic construct
  source 1..80: mol_type = other DNA
ccgacctgggtgtgcgcgtatgcgagaagatggctctgtatgaagtggtcagcaagctccctctggccgtgatgggaaaa

SEQ ID NO: 126924 - DNA, 80 bp, synthetic construct
  source 1..80: mol_type = other DNA
cccctccggcgattcaagaccgcgtttgactacgaccagaagttgctgatcgacctgtgtgcggaccgcgccccctacgt

SEQ ID NO: 126925 - DNA, 80 bp, synthetic construct
  source 1..80: mol_type = other DNA
ttaattatgagcggagtaacacaaacattaaacgtcaatgccagtaccagcaaaggtcttgctattgaaaataactcact

SEQ ID NO: 126926 - DNA, 80 bp, synthetic construct
  source 1..80: mol_type = other DNA
gcctgcctcttacgaggcgacactccaccatggatcactcccctgtgaggaacttctgtcttcacgcggaaagcgcctag

SEQ ID NO: 126927 - DNA, 80 bp, synthetic construct
  source 1..80: mol_type = other DNA
cgatgatatccgtagatgtacctggacatccaggtgatgccggcggcggtggtggaggcacgcggaaagtcgcggacgcg

SEQ ID NO: 126928 - DNA, 80 bp, synthetic construct
  source 1..80: mol_type = other DNA
gccgctcgttcgatctagcacacccacgggtctgctgtgtgggatttcgactcgcgggatccgatcgcacgtccggagga

SEQ ID NO: 126929 - DNA, 80 bp, synthetic construct
  source 1..80: mol_type = other DNA
ataccgactagcggagacgtcgttgtcgtggcaacagacgctctaatgactggctttaccggcgactttgactcagtgat

SEQ ID NO: 126930 - DNA, 80 bp, synthetic construct
  source 1..80: mol_type = other DNA
gaccctgctcacatcacggcagagacggccaagcgcaggctagatcgagggtctccgccctctctagctagctcctcggc

SEQ ID NO: 126931 - DNA, 80 bp, synthetic construct
  source 1..80: mol_type = other DNA
caaggagccactcaagcaggtcggttcagcataactccagccgcgccatcatacactcttaagcttggggaatatggaga

SEQ ID NO: 126932 - DNA, 80 bp, synthetic construct
  source 1..80: mol_type = other DNA
tggatgatcgttcgagcgattacatttcccacaacttctaccgttgtcatgccagtcttagcgctcctaactccgggaat

SEQ ID NO: 126933 - DNA, 80 bp, synthetic construct
  source 1..80: mol_type = other DNA
cacgggtgcgctttgccctctccagtgcaacctccagttccaccgccaaggaggaaaagcgtggtgcacctggatgattc

SEQ ID NO: 126934 - DNA, 80 bp, synthetic construct
  source 1..80: mol_type = other DNA
caattgggcagtgcgcacaaaggcaaaactcactccattgcctcaagcgggcctcttggatttatccaactggttcactg

SEQ ID NO: 126935 - DNA, 80 bp, synthetic construct
  source 1..80: mol_type = other DNA
ggctaccatagcccctcttagtttagatggaggtggaaatttaggtttggatttatctgctcccctggacgttagtaaca

SEQ ID NO: 126936 - DNA, 80 bp, synthetic construct
  source 1..80: mol_type = other DNA
tcggtgagcgacggtccggttgcttgggtcccctggctgccatcaaaaccccaccctcgcagcggcatacgccccctccg

SEQ ID NO: 126937 - DNA, 80 bp, synthetic construct
  source 1..80: mol_type = other DNA
cacataaacaggactgccctcaactgcaatgaaagcttgaacactgggttcttggctggcttgttctacgcccacagttt

SEQ ID NO: 126938 - DNA, 80 bp, synthetic construct
  source 1..80: mol_type = other DNA
cgccgccccggacccccgcctttcgagccgacgacgatgacggggacgagtacgacgacgcagccgacgccggcggcgac

SEQ ID NO: 126939 - DNA, 80 bp, synthetic construct
  source 1..80: mol_type = other DNA
aagttgtacaataaaagtatatgtgacgcatgcaaggtgtggtttatgactcatgggcggggcttagtcctatataagtg

SEQ ID NO: 126940 - DNA, 80 bp, synthetic construct
  source 1..80: mol_type = other DNA
ttgtgggtgatgggtaccaggatccgtggctcgacgttggcagactgccccccgcaccgatgtgaggcctcagggacgaa

SEQ ID NO: 126941 - DNA, 80 bp, synthetic construct
  source 1..80: mol_type = other DNA
tcaatgacatgacccccgttgggcggctggtgacagtgaaccccttcgtcgcgacttccagtgccaactcaaaggtgctg

SEQ ID NO: 126942 - DNA, 80 bp, synthetic construct
  source 1..80: mol_type = other DNA
tccggatcgctgtccaggaacgtcagctgttggggtaggtattccctctcgaaggcgggcatgacctctgcactcaggtt

SEQ ID NO: 126943 - DNA, 80 bp, synthetic construct
  source 1..80: mol_type = other DNA
tcctcgacaagattagggagacacccgtcgcggacgcccgggttgcagacgatcatgtggtttccaaggccaagaggcgg

SEQ ID NO: 126944 - DNA, 80 bp, synthetic construct
  source 1..80: mol_type = other DNA
gccctggtggttggggtgatctgcgcggccatcttgcgcagacatgtagggccgggagaggtggccgtgcagtggatgaa

SEQ ID NO: 126945 - DNA, 80 bp, synthetic construct
  source 1..80: mol_type = other DNA
gccggtgatgagatacgccgcgaacggaaactcccggagcggcaggccggtcgggacctccaaggccgccacgtcccgga

SEQ ID NO: 126946 - DNA, 80 bp, synthetic construct
  source 1..80: mol_type = other DNA
cattgttcgggggaatgtcttggatcacccaaggactcttggtggcactactcttgtggatgggcatcagtgcgcgagac

SEQ ID NO: 126947 - DNA, 80 bp, synthetic construct
  source 1..80: mol_type = other DNA
cattcactgccgccctgaccagtcctctgtctacatccacgaccctcctccttaacatcctagggagttgggttgcctcc

SEQ ID NO: 126948 - DNA, 80 bp, synthetic construct
  source 1..80: mol_type = other DNA
aggagaactgtgtgaggaaacagttacatacaaatgcccatacttgaagcaaagtgaaccagaagacatagactgctggt

SEQ ID NO: 126949 - DNA, 80 bp, synthetic construct
  source 1..80: mol_type = other DNA
ggaatcgtggaagtagacagagcccccgccaggaaagccaggagagaagggcgtctcacaggtggccacccagtgtccag

SEQ ID NO: 126950 - DNA, 80 bp, synthetic construct
  source 1..80: mol_type = other DNA
tgctggccgggtgttaacctgtcccactcaagattttaattttcttttcctagtccccccagacgtggagcagaaaacca

SEQ ID NO: 126951 - DNA, 80 bp, synthetic construct
  source 1..80: mol_type = other DNA
agctgttcgggtgagtaggccctctcaaaagccggcatgatctcggcgctcaagttgtcagtttctacgaaagaggagga

SEQ ID NO: 126952 - DNA, 80 bp, synthetic construct
  source 1..80: mol_type = other DNA
tcttcccgaataccctaatcctcaagttaatctaccacaaaatattgtgtttccagaacccccacgtcctccttctgttg

SEQ ID NO: 126953 - DNA, 80 bp, synthetic construct
  source 1..80: mol_type = other DNA
gctgttggttttatgccaagcacaacagcttatccaaagtatgattctagcgctccaactaatccagaagataaaaaaag

SEQ ID NO: 126954 - DNA, 80 bp, synthetic construct
  source 1..80: mol_type = other DNA
acttcagccttgaccctaccttcaccattgagacaaccacacttccccaggacgccgtctcccgcactcaacgtcggggc

SEQ ID NO: 126955 - DNA, 80 bp, synthetic construct
  source 1..80: mol_type = other DNA
cagcctggccgtgccccccctcgttctgctgcaccggttctccctgttcaaccccagggacctcctggactttgagcttg

SEQ ID NO: 126956 - DNA, 80 bp, synthetic construct
  source 1..80: mol_type = other DNA
gcggccgccgcgcccgcgcccgtctggcctgtggccttggcgtacgcgctatataagcccatgcggcgttggatgagctc

SEQ ID NO: 126957 - DNA, 80 bp, synthetic construct
  source 1..80: mol_type = other DNA
attcgcgtggcgcccgtgaccacgcagtccagtacctcgttgagggtctgcacgcacgtactctttccggatccggcgtt

SEQ ID NO: 126958 - DNA, 80 bp, synthetic construct
  source 1..80: mol_type = other DNA
gcctcacctggcccaccagcgcgccccgccaggccggcagaccgagcggctgggcgaggcctggagccagctgatggagg

SEQ ID NO: 126959 - DNA, 80 bp, synthetic construct
  source 1..80: mol_type = other DNA
ccttagacccatgtccctgcggagcatctgacctttaccttgtcacccggaatgctgacgtcattcctgttcggaggcgg

SEQ ID NO: 126960 - DNA, 80 bp, synthetic construct
  source 1..80: mol_type = other DNA
agcacgtcgacttgttggttggggctgccacgctctgttcggccatgtacgtgggcgatctctgcgggtccgtgttcctg

SEQ ID NO: 126961 - DNA, 80 bp, synthetic construct
  source 1..80: mol_type = other DNA
aatcaagactatcacctggggggcggatactgcggcttgtggagacatcatcaacgggctgcctgtttccgcccggagag

SEQ ID NO: 126962 - DNA, 80 bp, synthetic construct
  source 1..80: mol_type = other DNA
cccaatgggcttctcttatgacacccgttgctttgactcgacggttactgaggcggacatccgtacggaggaggcactct

SEQ ID NO: 126963 - DNA, 80 bp, synthetic construct
  source 1..80: mol_type = other DNA
tgctatggatggccagtgtggagccccattggatagcggcctccatcatactggagttcttcctgatggtgctgcttatt

SEQ ID NO: 126964 - DNA, 80 bp, synthetic construct
  source 1..80: mol_type = other DNA
ggcaactggttcggctgcacctggatgaactccacggggtttgtgaagaattgcggagctccgccctgcaacttagggcc

SEQ ID NO: 126965 - DNA, 80 bp, synthetic construct
  source 1..80: mol_type = other DNA
gctccttccgcttctcctccgacgccatctcgaccaccttcaccaccaacctgacccagtactcgctctcgcgcgtcgac

SEQ ID NO: 126966 - DNA, 80 bp, synthetic construct
  source 1..80: mol_type = other DNA
gaggagtcggagggagccatttggtaaacgtaggaagtggaaaagaggctaactgtcaggccaccttaagccacagtacg

SEQ ID NO: 126967 - DNA, 80 bp, synthetic construct
  source 1..80: mol_type = other DNA
tacggctcttcaaattcctgtatttgccaatccgcggcacgctaactttaaacaaattgccgtacaaacctatgtattat

SEQ ID NO: 126968 - DNA, 80 bp, synthetic construct
  source 1..80: mol_type = other DNA
aaggtacaaaattatcaataacaatactaatccagctcttaaaggatttaccattaaattgttgtttgataaaaatggag

SEQ ID NO: 126969 - DNA, 80 bp, synthetic construct
  source 1..80: mol_type = other DNA
catctgactggttacatcgaggacctagagagttctgcataaaagtactctgcccttacatgcctaaagttatagaaaag

SEQ ID NO: 126970 - DNA, 80 bp, synthetic construct
  source 1..80: mol_type = other DNA
ctagtcacggctagctgtgaaaggtccgtgagccgcatgactgcagagagtgccgtaactggtctctctgcagatcatgt

SEQ ID NO: 126971 - DNA, 80 bp, synthetic construct
  source 1..80: mol_type = other DNA
caaattgtgccccaaactacctggcctcccctttatctcctgtcaaaagggctacagggggacatgggccggcactggca

SEQ ID NO: 126972 - DNA, 80 bp, synthetic construct
  source 1..80: mol_type = other DNA
ctagacagaacctccagcttatcaacagcaatgggagctggcatatcaacaggaccgcattgaattgcaatgatagcctc

SEQ ID NO: 126973 - DNA, 80 bp, synthetic construct
  source 1..80: mol_type = other DNA
aagctaggatgggactaagcaaaggggaaaaaacatcccacgcagtatcgaggggaacaagcaaaatcagatggatcacg

SEQ ID NO: 126974 - DNA, 80 bp, synthetic construct
  source 1..80: mol_type = other DNA
gaggcggcggcccgcgacccccgaagacgaagaagagcggcgcggacgcccccggctcggacgcccgcgcccccctcgcc

SEQ ID NO: 126975 - DNA, 80 bp, synthetic construct
  source 1..80: mol_type = other DNA
gatagtcgatttcagcctggaccccactttctcaattgagacaaccactgtcccacaagacgcagtcgctaggagtcaac

SEQ ID NO: 126976 - DNA, 80 bp, synthetic construct
  source 1..80: mol_type = other DNA
gagggatcctcatcgccaactgaggaggacgacgcctcagatgctggctcatatagttccatgccgcccctcgagggcga

SEQ ID NO: 126977 - DNA, 80 bp, synthetic construct
  source 1..80: mol_type = other DNA
gttatttcggccattgaaaaccacgatgaaaagatcaatttctgtagacagttcttcacccaaaaacgtttttaatccag

SEQ ID NO: 126978 - DNA, 80 bp, synthetic construct
  source 1..80: mol_type = other DNA
cagaatttttcaccgaattggacggagtgaggctccatcgctatgcccctccttgcaaacccctactgagagacgagatc

SEQ ID NO: 126979 - DNA, 80 bp, synthetic construct
  source 1..80: mol_type = other DNA
tgatgacagggaggtctcggttgccgcagaaatcctgcgtccgaccaagaagttccctccagctctaccaatctgggctc

SEQ ID NO: 126980 - DNA, 80 bp, synthetic construct
  source 1..80: mol_type = other DNA
gccgccgcccatcatcgccacgtcggaccccaccccgcgacgggacgccgccacaaaaagcagacgccgacgaccccact

SEQ ID NO: 126981 - DNA, 80 bp, synthetic construct
  source 1..80: mol_type = other DNA
aaaagaaaagaggaggctcgataggagttgccatccttattggtttgatgactggtgccggagccgtcgtcttgtcgaac

SEQ ID NO: 126982 - DNA, 80 bp, synthetic construct
  source 1..80: mol_type = other DNA
aggcgatttcgactccgtcatagactgcaatgtgtcggtgacgcaggtagtcgacttcagcctagaccccactttcacca

SEQ ID NO: 126983 - DNA, 80 bp, synthetic construct
  source 1..80: mol_type = other DNA
gcgggcatttcgggggccctcgtcgcattcaagatcatgtctggcgagaagccctctatggaagatgtcatcaatctact

SEQ ID NO: 126984 - DNA, 80 bp, synthetic construct
  source 1..80: mol_type = other DNA
tgccggcgttgatggcgttcgagacggcgtgggctatgatcggggcgtgatcggcgaagaactgcaagagaaacggagtc

SEQ ID NO: 126985 - DNA, 80 bp, synthetic construct
  source 1..80: mol_type = other DNA
attatcaccgagcagcgtctgctacagaggcgcaaagcagcggcagagcaggaacgcttaaatcaggagctccaagacat

SEQ ID NO: 126986 - DNA, 80 bp, synthetic construct
  source 1..80: mol_type = other DNA
ggacaatgaaggctacgtgcgcacttgcggggctccaccatgtgaaatcagaccagctccaaatgccactgaccctgcta

SEQ ID NO: 126987 - DNA, 80 bp, synthetic construct
  source 1..80: mol_type = other DNA
gccgctatttggtgggtggttggtgctggcgcgcgcctataaaaaaggacgcaccgccgccctaatcgccagtgcgttcc

SEQ ID NO: 126988 - DNA, 80 bp, synthetic construct
  source 1..80: mol_type = other DNA
ccaagttgggtacctgcatgctccgactggcagtgggaaaagcacaaaggtgccggccgcatatgcaagtcaaggctaca

SEQ ID NO: 126989 - DNA, 80 bp, synthetic construct
  source 1..80: mol_type = other DNA
tccgtaacattgccggcggcaagtacgtacaggctgtgttattaaaagttggcgcttggacaggcacttacctgtacaat

SEQ ID NO: 126990 - DNA, 80 bp, synthetic construct
  source 1..80: mol_type = other DNA
cgcaagctttcattggtccaggctaaacgaccgccttttctagaacaaaaaggaggaagaacatccaactgattttcatc

SEQ ID NO: 126991 - DNA, 80 bp, synthetic construct
  source 1..80: mol_type = other DNA
ggagtggtatccctagtgggagcgacaccaacctccttggtggtgggcgtaggactagcagcttttcacctggccatcgt

SEQ ID NO: 126992 - DNA, 80 bp, synthetic construct
  source 1..80: mol_type = other DNA
actgggctaaggttctgattgtggcgctactctttgccggcgttgacggtgagacccacacgacggcgagggtggccggc

SEQ ID NO: 126993 - DNA, 80 bp, synthetic construct
  source 1..80: mol_type = other DNA
gtcctgggcccaacccgcatggtgtccaggaaggtgtccgccatttccagggcccacgacatgctcccccccgacgagca

SEQ ID NO: 126994 - DNA, 80 bp, synthetic construct
  source 1..80: mol_type = other DNA
ccgcgccaagctgattgcccagggggggagagccaggatatgtggcatatatctcttcaactggtcggtcaaaaccaagc

SEQ ID NO: 126995 - DNA, 80 bp, synthetic construct
  source 1..80: mol_type = other DNA
gcagcattggaagggtcttccaaaaaaccagaaaaggcatagaaaggctgacagtgatcggagaacacgcctgggatttt

SEQ ID NO: 126996 - DNA, 80 bp, synthetic construct
  source 1..80: mol_type = other DNA
ggggagatgggggggtcggacgccacgacgatggacgggtcggcgggcgccaccgcgtgggggcgggccaagggctgcgg

SEQ ID NO: 126997 - DNA, 80 bp, synthetic construct
  source 1..80: mol_type = other DNA
ctcctcatgctggcggctgtgtttttccagatggcttaccacgatgcccgccacattctgcaatggggaatcccggatgt

SEQ ID NO: 126998 - DNA, 80 bp, synthetic construct
  source 1..80: mol_type = other DNA
tggcattacccctgcacagttaactataccatcttcaaaataaggatgtatgtgggaggggttgagcacaggctcacggc

SEQ ID NO: 126999 - DNA, 80 bp, synthetic construct
  source 1..80: mol_type = other DNA
atcagcccgctgagcaattctctaattcgccatcataacttggtgtattcgaccacatcacgcagcgcgtccctccgcca

SEQ ID NO: 127000 - DNA, 80 bp, synthetic construct
  source 1..80: mol_type = other DNA
atatgtgtatgatgtcaataagatcacatatgtggtgaaagtggaaccccacacgggtgactatttggcagctaatgagt

SEQ ID NO: 127001 - DNA, 80 bp, synthetic construct
  source 1..80: mol_type = other DNA
atcaacttcttggtgttctattggagaaagccccaccgctatcgctgctttcaccaattaataaattccaacccgaggga

SEQ ID NO: 127002 - DNA, 80 bp, synthetic construct
  source 1..80: mol_type = other DNA
tcaagaatggcaatcagtggagatgattgtgttgtaaaacctatagatgacagatttgcaagtgctttaacagctctaaa

SEQ ID NO: 127003 - DNA, 80 bp, synthetic construct
  source 1..80: mol_type = other DNA
gagccttcacggacgccatgaccaggtactcggcgcctcctggagatgaaccgcacccggagtatgacttggagcacatt

SEQ ID NO: 127004 - DNA, 80 bp, synthetic construct
  source 1..80: mol_type = other DNA
ccgagaggctatacatcgggggccccttgacaaactccaaagggcaaaactgcggctatcggaggtgccgtgcaagcggc

SEQ ID NO: 127005 - DNA, 80 bp, synthetic construct
  source 1..80: mol_type = other DNA
ctcggcgtccgggtctgcgagaaaatggccctctatgacattacacaaaagcttcctcaggcggtaatgggagcttccta

SEQ ID NO: 127006 - DNA, 80 bp, synthetic construct
  source 1..80: mol_type = other DNA
ggcgccgcctatgcggcgctcctggtgctcgccgatgacgtctatccgctctttctcctcgccccggggcccctgttcgt

SEQ ID NO: 127007 - DNA, 80 bp, synthetic construct
  source 1..80: mol_type = other DNA
cgacaattctgggaataggtaccgttttggaccaagctgagacggctggcgtacgcctcactgtcttagccacggccacg

SEQ ID NO: 127008 - DNA, 80 bp, synthetic construct
  source 1..80: mol_type = other DNA
gccatccgcaaggatgaggcgggactgatatataatgccttactggagcgggtagcgcgctataatagcaccaacgtaca

SEQ ID NO: 127009 - DNA, 80 bp, synthetic construct
  source 1..80: mol_type = other DNA
tgtgggcagtgatgtcagcaggagcactttcggtctgaccgcgttgttcagtccgggcgctcaacaacagctccagctgg

SEQ ID NO: 127010 - DNA, 80 bp, synthetic construct
  source 1..80: mol_type = other DNA
ctgcttcactcccagcccggtcgtggtgggcaccaccgataaatccggggcgcctacctacacctgggaggagaatgaga

SEQ ID NO: 127011 - DNA, 80 bp, synthetic construct
  source 1..80: mol_type = other DNA
ctgacacaggccacggaacggtagtgttagaactcaagtatttgggagctgacggaccatgcaagattcccatctcttct

SEQ ID NO: 127012 - DNA, 80 bp, synthetic construct
  source 1..80: mol_type = other DNA
acgtgactgttgaacagtacgttgacttcagcttggaccccaccttttccattgagactcacactgctccccaagacgcg

SEQ ID NO: 127013 - DNA, 80 bp, synthetic construct
  source 1..80: mol_type = other DNA
ccgctgccataaacaacattattaaggatcctttttgaatttgtgattgagcgtattaaattatatggtgtaggcttgct

SEQ ID NO: 127014 - DNA, 80 bp, synthetic construct
  source 1..80: mol_type = other DNA
cctgccccacggactgtttccggaaacatccggaggctacgtacaataaatgtggttccggtccttggcttacacccagg

SEQ ID NO: 127015 - DNA, 80 bp, synthetic construct
  source 1..80: mol_type = other DNA
ttccagaggagccagcggagtccagcagttcgggagtcggcactggggggcccaagactcggtcgaaacacgtagatagt

SEQ ID NO: 127016 - DNA, 80 bp, synthetic construct
  source 1..80: mol_type = other DNA
gtgggcgccgtccatgcaggcgcgcggtggccgcgatggcatcatatgggccgccaccatattctgcccgggcgtggtgt

SEQ ID NO: 127017 - DNA, 80 bp, synthetic construct
  source 1..80: mol_type = other DNA
aagtccgcctgctgggtacctgtgtctcccacgttggctgcccccaacgcctctgtaccgcttcagggcttccgtggcca

SEQ ID NO: 127018 - DNA, 80 bp, synthetic construct
  source 1..80: mol_type = other DNA
ataattgtcagtggcggggccatggttcaattagccatatacgccacggttgtgcgtgcagtgggcgctcgagcacaaca

SEQ ID NO: 127019 - DNA, 80 bp, synthetic construct
  source 1..80: mol_type = other DNA
gagggaaggggcgcggcgggacggaggaagacgagaagaagagaagaggcgaaggtcgggcccgggagcggggcggccgg

SEQ ID NO: 127020 - DNA, 80 bp, synthetic construct
  source 1..80: mol_type = other DNA
tggcgtcttgtacttcatcttgttcttcgtggctgcctggtacatcaagggcagggcggtcccgttggtcacctattcct

SEQ ID NO: 127021 - DNA, 80 bp, synthetic construct
  source 1..80: mol_type = other DNA
ccccaccagggtctgtgacaactccacatcccaacatagaggaggtggccctcggacatgagggcgaaatccccttctat

SEQ ID NO: 127022 - DNA, 80 bp, synthetic construct
  source 1..80: mol_type = other DNA
tcttacaggctagcctgttgtccgtgccgtactacgtgcgcgcgcatgcattgctgcggttatgcatactcgtacgccgt

SEQ ID NO: 127023 - DNA, 80 bp, synthetic construct
  source 1..80: mol_type = other DNA
agctcgggcaggctcgcgttccgaggccggccgagcagataggtctttgggatgtaaagcagctgcccggggtcccgagg

SEQ ID NO: 127024 - DNA, 80 bp, synthetic construct
  source 1..80: mol_type = other DNA
cgaaaacgctggcagcacgcggatgcgggcgtctggatgcggggtcaggcgctgcacgaatagcatggaatctgctgcgt

SEQ ID NO: 127025 - DNA, 80 bp, synthetic construct
  source 1..80: mol_type = other DNA
tcccccctcatgggatgtacagtggaagtgcctcaccagaatgaaacccctgctgacaggacctacgccattgttataca

SEQ ID NO: 127026 - DNA, 80 bp, synthetic construct
  source 1..80: mol_type = other DNA
ccgagccgcggggttaagcgcgagggcgagaacatgtacccgaccatgcagatcatggtgcccaagcgtcggcgcgtgga

SEQ ID NO: 127027 - DNA, 80 bp, synthetic construct
  source 1..80: mol_type = other DNA
tgaacagctgcaacgggtacacgggtatgcggtgcacctccgccccgcctatggttaccttgtctgagcctcccaggtgc

SEQ ID NO: 127028 - DNA, 80 bp, synthetic construct
  source 1..80: mol_type = other DNA
gcactgacagacttcaaagcctggctgcaggcaaaactcctcccgcaactccccggagtgcccttcttctcatgccagaa

SEQ ID NO: 127029 - DNA, 80 bp, synthetic construct
  source 1..80: mol_type = other DNA
gtgtgacaatcaaaacctaacactaatcaatgtaactaaactttatgagggagtttactatggtactaatgacagaggca

SEQ ID NO: 127030 - DNA, 80 bp, synthetic construct
  source 1..80: mol_type = other DNA
gactcgttgatcattctcgcaaccatagcccatccttctctggtctttgaagtcactaagcacttgctcgccgtgctagg

SEQ ID NO: 127031 - DNA, 80 bp, synthetic construct
  source 1..80: mol_type = other DNA
tttataaggaaggtcaatagtaatgcagctctgggcgccatgtttgaggagcagaatcaatggaggagtgctagagaagc

SEQ ID NO: 127032 - DNA, 80 bp, synthetic construct
  source 1..80: mol_type = other DNA
cccactgagctaaagtattcatggaaaacatggggtaaagcaaaaatgctctccacagagtcttataaccaaacctttct

SEQ ID NO: 127033 - DNA, 80 bp, synthetic construct
  source 1..80: mol_type = other DNA
gcccgagcagggccaacagtttctgtcgggccgcagtgggctcggaaaccgcggccggggacgcggccgccatggcgagt

SEQ ID NO: 127034 - DNA, 80 bp, synthetic construct
  source 1..80: mol_type = other DNA
agcgcgttcacgctccatagttattctccagtagagctcaatagggttgcggggacactcaggaagcttgggtgcccccc

SEQ ID NO: 127035 - DNA, 80 bp, synthetic construct
  source 1..80: mol_type = other DNA
ctggcgtctcctctgggggcgacccgtaaatggttgcagtgatgtaaatggtgtccgcggtccagaccacggtcaaaatg

SEQ ID NO: 127036 - DNA, 80 bp, synthetic construct
  source 1..80: mol_type = other DNA
cacaacacttgacgcaaagggcccagaatgccttggacaatctggttatgttgcacaactccgaacaaggaggaagagcc

SEQ ID NO: 127037 - DNA, 80 bp, synthetic construct
  source 1..80: mol_type = other DNA
taaggcccgggcttctggggtgaccgctaggctcctctcaaccgaggaggcgtgcgacctcacacccccgcactcagctc

SEQ ID NO: 127038 - DNA, 80 bp, synthetic construct
  source 1..80: mol_type = other DNA
ggggggtgtaggatgggtatcaggacttccacttcccgtccttccatcccccgttcccctcggttgttcctcgcctcgcc

SEQ ID NO: 127039 - DNA, 80 bp, synthetic construct
  source 1..80: mol_type = other DNA
actggtcgcccacagttgggtatgtggtctctagcctgctaagagtaccgcaaatcctcatggacatcgttcttgaaggc

SEQ ID NO: 127040 - DNA, 80 bp, synthetic construct
  source 1..80: mol_type = other DNA
agcctcccaggtgagcgctaggctcctctccacggaggaggcctgcgacctcacacctgcgcactctgcccgatcaaaat

SEQ ID NO: 127041 - DNA, 80 bp, synthetic construct
  source 1..80: mol_type = other DNA
aggaaaaagtcttttgttcaaaacagaggatggtgttaacatgtgtaccctcatggccatagaccttggtgaattgtgtg

SEQ ID NO: 127042 - DNA, 80 bp, synthetic construct
  source 1..80: mol_type = other DNA
ttgcgagacccctctcacatcacggccgagacagcggctcggcgtctcgcgcgaggttctcctccatcggaagctagctc

SEQ ID NO: 127043 - DNA, 80 bp, synthetic construct
  source 1..80: mol_type = other DNA
tgaacgcaaagccgccgggaaagacaactatgccacagaggcggcgattaaaccccaggcagaggtaggcgtagctttcc

SEQ ID NO: 127044 - DNA, 80 bp, synthetic construct
  source 1..80: mol_type = other DNA
tacggaaaacctgggcggcctctccggcctgtttgagcagaaggacattctccactactacgtggagcaggaatgcatcg

SEQ ID NO: 127045 - DNA, 80 bp, synthetic construct
  source 1..80: mol_type = other DNA
gtggtggtgaacaagcccgtggggagatatcgctcagcccccaaacgcctatccatgactcaagaaaagtttgagatggg

SEQ ID NO: 127046 - DNA, 80 bp, synthetic construct
  source 1..80: mol_type = other DNA
caaggccgttgaccacatccgctccgtgtgggaggacttgctagaagactctgacaccccaatccccacgaccatcatgg

SEQ ID NO: 127047 - DNA, 80 bp, synthetic construct
  source 1..80: mol_type = other DNA
ctttcagttttcagagcaacgttcagccactcctgcagtccacttaacagctcctcagcccgtggagatatgctgacatt

SEQ ID NO: 127048 - DNA, 80 bp, synthetic construct
  source 1..80: mol_type = other DNA
tgtcgtttagagtgggactacacgattacccggtggggtcgcagttaccctgcgagcctgaaccggacgtggccgtgttg

SEQ ID NO: 127049 - DNA, 80 bp, synthetic construct
  source 1..80: mol_type = other DNA
acagggaatggtttcatgatctcgctctcccttggacgcccccttcgagcacagcgtggagaaacagagaactcctcatg

SEQ ID NO: 127050 - DNA, 80 bp, synthetic construct
  source 1..80: mol_type = other DNA
tctgttgcagtacagcttgcttaagactccatatttcgtccgcgcgcatatcttattgcgcgtgtgcatgttctttcgcg

SEQ ID NO: 127051 - DNA, 80 bp, synthetic construct
  source 1..80: mol_type = other DNA
ttgggttgattttcatctgcttcgcatggcacatacggggcagggctgtccctctatttgcctatgcttgtcttcagtta

SEQ ID NO: 127052 - DNA, 80 bp, synthetic construct
  source 1..80: mol_type = other DNA
tagctataaatgcaggaaagggtctggagtttgatacaaacacatctgagtctccagatatcaacccaataaaaactaaa

SEQ ID NO: 127053 - DNA, 80 bp, synthetic construct
  source 1..80: mol_type = other DNA
ggtaacaacacgacacaacgagtggtcatagcactactggttctagcggttggtccagcgtactctgcccattgcatagg

SEQ ID NO: 127054 - DNA, 80 bp, synthetic construct
  source 1..80: mol_type = other DNA
ttggccactgacatagctgagatgggagccaatctctgcgtggagagagtgttggattgtaggacggctttcaaacctgt

SEQ ID NO: 127055 - DNA, 80 bp, synthetic construct
  source 1..80: mol_type = other DNA
aaaaaagatattgttgaagaggtccaaatcaaaacaggagaaaatcgaacccttgttggtccacctggaaaagttgattg

SEQ ID NO: 127056 - DNA, 80 bp, synthetic construct
  source 1..80: mol_type = other DNA
tctgaatgaagagttgatcacggaacagatggcccctcatcataaaatcctagctaaagccattttcaaactaacttacc

SEQ ID NO: 127057 - DNA, 80 bp, synthetic construct
  source 1..80: mol_type = other DNA
tggctgaaagccaagctcatgccacaactgcctgggattccctttgtgtcctgccagcgcgggtatagggtggtctggcg

SEQ ID NO: 127058 - DNA, 80 bp, synthetic construct
  source 1..80: mol_type = other DNA
tgataacatcaagtgtccgtgccaggtcccatcacctgaattcttcacagagcttgacggggtgaggctgcacaggtatg

SEQ ID NO: 127059 - DNA, 80 bp, synthetic construct
  source 1..80: mol_type = other DNA
attcagataatgactgcaaatttactttggttcttacaaaatgtgggagtcaagtactagctactgtagctgctttggct

SEQ ID NO: 127060 - DNA, 80 bp, synthetic construct
  source 1..80: mol_type = other DNA
cttcagttttagaccaagacatcaccgcgtggtccaggagtgcaattgtagcatctacccagggcatgtcacaggccatc

SEQ ID NO: 127061 - DNA, 80 bp, synthetic construct
  source 1..80: mol_type = other DNA
aaggagccatagtgagtgaggaaaaacccattcccgaaggagagtggagagatggcttcgactggataacggaatttgag

SEQ ID NO: 127062 - DNA, 80 bp, synthetic construct
  source 1..80: mol_type = other DNA
gggcaaaagtcgctgcggtcttgattttgttcgctggcgttgacgcaacaacacatctggttgccagtctgccggcccaa

SEQ ID NO: 127063 - DNA, 80 bp, synthetic construct
  source 1..80: mol_type = other DNA
actaagtcattagacccctgttcctgcggggctgtggatctctacctggtcacccgaaatgctgacgtcattccggtccg

SEQ ID NO: 127064 - DNA, 80 bp, synthetic construct
  source 1..80: mol_type = other DNA
ccccccggtgtggcaaagcgccccccgccgggcggctccaggcccgccagcaccgcctccgcgtccgacgcgcccagggc

SEQ ID NO: 127065 - DNA, 80 bp, synthetic construct
  source 1..80: mol_type = other DNA
ccacagaccggggcccatggtcgtccgtcccggctgccagtccgcagatggggtggtgtccgtacccacggcccaaagag

SEQ ID NO: 127066 - DNA, 80 bp, synthetic construct
  source 1..80: mol_type = other DNA
catcatgatctacccctgttttgatctcggctggaattctgttgaggcattcacatacacactagaaagcagttcactag

SEQ ID NO: 127067 - DNA, 80 bp, synthetic construct
  source 1..80: mol_type = other DNA
aaagactcaaaactcactttaattctcacaaagtgtggaagtcagattctaggaagcgtgtctttgttggtagtcaaggg

SEQ ID NO: 127068 - DNA, 80 bp, synthetic construct
  source 1..80: mol_type = other DNA
cgcggagccacgtcgcgcgtgcgtgccccgcgatgcgcttcccaggactggcggaccgtggcgcgacgggcctccgcggc

SEQ ID NO: 127069 - DNA, 80 bp, synthetic construct
  source 1..80: mol_type = other DNA
acgtggtgactggtgaggtgcaggtgctgtccacggccacccagaccttcttgggtacgacagtaggggtggtcatgtgg

SEQ ID NO: 127070 - DNA, 80 bp, synthetic construct
  source 1..80: mol_type = other DNA
cccttggtggaagcggcttccaggggccagagccctttcccaagcctcccatcgcttgttagcagcagcaacagcggacg

SEQ ID NO: 127071 - DNA, 80 bp, synthetic construct
  source 1..80: mol_type = other DNA
ttttgagccaaacgagcagacggggatcagccccgcgcgcgcgcacgtggcggcggccaacctggtgacggcctacgagc

SEQ ID NO: 127072 - DNA, 80 bp, synthetic construct
  source 1..80: mol_type = other DNA
gtggtgttatgtgagtgctatgacgcaggctgttcctggtacgatctacagcccgctgagaccacggtacgactgagagc

SEQ ID NO: 127073 - DNA, 80 bp, synthetic construct
  source 1..80: mol_type = other DNA
attgggcgcccattctcctgagcgacacccacgggtgcagctaactcgagacagccgcgcggcgtttgtgcctcgtcaaa

SEQ ID NO: 127074 - DNA, 80 bp, synthetic construct
  source 1..80: mol_type = other DNA
taaaaaatctaccacagaaatgtccatattatttaaataaaacatcaggggctcaggaaccaccaccgaaataaaaaccg

SEQ ID NO: 127075 - DNA, 80 bp, synthetic construct
  source 1..80: mol_type = other DNA
gctgtggccgctgctgcttttagtactatgcctacctagtagggctttcgctcacactagtgaggaagcagcttctgttg

SEQ ID NO: 127076 - DNA, 80 bp, synthetic construct
  source 1..80: mol_type = other DNA
atcatggggccggttctaagactcttgctggcccgaaaggtcctgtttgtcaaatgtacaccaatgttgaccaggacatg

SEQ ID NO: 127077 - DNA, 80 bp, synthetic construct
  source 1..80: mol_type = other DNA
gttcccagatttgggagttcgtgtgtgcgagaagatggccctttacgacgtggtctccacccttcctcaggccgtgatgg

SEQ ID NO: 127078 - DNA, 80 bp, synthetic construct
  source 1..80: mol_type = other DNA
tccagaccatataaccgcagaagcagcaggtcgacgccttgcaagaggcagccctccatcactggcaagttcatcggcca

SEQ ID NO: 127079 - DNA, 80 bp, synthetic construct
  source 1..80: mol_type = other DNA
cgcgtccgagcaggggcagatcgggctagttctgctagtggttatatctgtcatcaccctcaccccagcatacaagacca

SEQ ID NO: 127080 - DNA, 80 bp, synthetic construct
  source 1..80: mol_type = other DNA
ttgattgaactcgaacccccgtttggtgactcttatatcgtggtgggaagaggagaacagcagataaaccaccactggca

SEQ ID NO: 127081 - DNA, 80 bp, synthetic construct
  source 1..80: mol_type = other DNA
ggatgaagcccactttattgatccagcaagcattgctgcacgtgggtacatctcaacaagagtggaattgggggaagcag

SEQ ID NO: 127082 - DNA, 80 bp, synthetic construct
  source 1..80: mol_type = other DNA
cactatgtgcccaggccttgtcatctcgtcgaggcacggactgtctgcggcccggtatattgtttcacccccagccctgt

SEQ ID NO: 127083 - DNA, 80 bp, synthetic construct
  source 1..80: mol_type = other DNA
gctggaactaatgcagtttaccaaggtgtaaaaattacagatggaaatgatggtgatgtcaatgatgactgggaaaaaga

SEQ ID NO: 127084 - DNA, 80 bp, synthetic construct
  source 1..80: mol_type = other DNA
atggggaatggagaccctttcaaactgcttacgaagcatgtctccgttcgtattatcgttagaacagacaccccagcatg

SEQ ID NO: 127085 - DNA, 80 bp, synthetic construct
  source 1..80: mol_type = other DNA
tcgctttcaagatcatgtctggcgagaaacccaccgtggaggatgtcgtcaacctattgccagccatcctctctcccggc

SEQ ID NO: 127086 - DNA, 80 bp, synthetic construct
  source 1..80: mol_type = other DNA
ctccgggctccgtcaccgtgccccatcctaacatccaggaggttgctctgtccaccaccggagagatccccttctacggc

SEQ ID NO: 127087 - DNA, 80 bp, synthetic construct
  source 1..80: mol_type = other DNA
tggcaacaccctaacctgctacatcaaggcgcacgcagcatgcaaagcagctaagctcaaagattttgacatgttggttt

SEQ ID NO: 127088 - DNA, 80 bp, synthetic construct
  source 1..80: mol_type = other DNA
gggcctggccgccaatccccaaaccccgcgttgctcggctggccaggtcacgaacccccagttcgccgacaggctgtacc

SEQ ID NO: 127089 - DNA, 80 bp, synthetic construct
  source 1..80: mol_type = other DNA
tgaacaatttgagataggatggaaggcgtggggaaagagtaagatattcgctccggaattggcaaattccactttcgtga

SEQ ID NO: 127090 - DNA, 80 bp, synthetic construct
  source 1..80: mol_type = other DNA
gctgacttatctcatcttcacctctgtttgctgcactgccatctgcagcattgccactttttttgtggccattttccaaa

SEQ ID NO: 127091 - DNA, 80 bp, synthetic construct
  source 1..80: mol_type = other DNA
ctagaggccatgccgtcgggatcttccgggcggctgtgtgctccaggggagtcgccaagtccatcgatttcatccccgtt

SEQ ID NO: 127092 - DNA, 80 bp, synthetic construct
  source 1..80: mol_type = other DNA
acgtgatcccaacgtacacgttgtgtattaaagcattgtataaaaacacgcatgcgggcttgctgttctcatttctaggt

SEQ ID NO: 127093 - DNA, 80 bp, synthetic construct
  source 1..80: mol_type = other DNA
cccattggtgtatgttctttttttattgggaggcgcgggtaggcgggtagctttacaatgcaaaagccttcgacgtggag

SEQ ID NO: 127094 - DNA, 80 bp, synthetic construct
  source 1..80: mol_type = other DNA
atgtagacctgatggttggtgctgcaacagtatgttctgccttgtatgttggagacctctgcggcgggttgttcttggta

SEQ ID NO: 127095 - DNA, 80 bp, synthetic construct
  source 1..80: mol_type = other DNA
cggggaaaggggccggaaaccgagacggtgtggccggcggtcgcatttttttaatggctctggtgtcggccgcgtttgag

SEQ ID NO: 127096 - DNA, 80 bp, synthetic construct
  source 1..80: mol_type = other DNA
acttacggtaggggtaggcatctttttactccccgctcgataaatgagcggctttaagcaacactccattacagtgtccc

SEQ ID NO: 127097 - DNA, 80 bp, synthetic construct
  source 1..80: mol_type = other DNA
tctgccagccataattcaaagactccacggcttaagcgcatttacgctgcacggatactctccgcacgaactcaatcggg

SEQ ID NO: 127098 - DNA, 80 bp, synthetic construct
  source 1..80: mol_type = other DNA
acagcaagggccagcagtgcggctaccgtaggtgccgcgcaagcggtgtcttccccaccagcatgggtaacaccataacg

SEQ ID NO: 127099 - DNA, 80 bp, synthetic construct
  source 1..80: mol_type = other DNA
tttcccgaacgagcccatccatgtgtaggtttctacgtcgtaggtgacaaagagccgctgggtgcgcgcgtgggagccga

SEQ ID NO: 127100 - DNA, 80 bp, synthetic construct
  source 1..80: mol_type = other DNA
caccgggaggcggtcgacaaagcgctcgatcatctccccgcggcgacggcgcatggtctcggtgacggcgcggccgttct

SEQ ID NO: 127101 - DNA, 80 bp, synthetic construct
  source 1..80: mol_type = other DNA
ctcgaccaccgaaagcccccctcacggcctgcgtcatcacccagagcaagatcctggcccaattgcaatccatcaaccaa

SEQ ID NO: 127102 - DNA, 80 bp, synthetic construct
  source 1..80: mol_type = other DNA
ctgtgccgcgtggtacatcaagggcaggttggttcccggggttgcgtacgctctctatgggatgtggccgctcctcctcg

SEQ ID NO: 127103 - DNA, 80 bp, synthetic construct
  source 1..80: mol_type = other DNA
acatcatggcctgtatgtcagcagacctagaagtggtgaccagcacgtgggtcctggtaggtggcatcctggcagcccta

SEQ ID NO: 127104 - DNA, 80 bp, synthetic construct
  source 1..80: mol_type = other DNA
gggcgcatatgacatcataatttgtgatgagtgccactcaacagattctaccaccatcttgggtatcggcaccgtccttg

SEQ ID NO: 127105 - DNA, 80 bp, synthetic construct
  source 1..80: mol_type = other DNA
cgctggcgagctcttctgcaagccagctgtccgctccgtctctcaaggcaacatgcaccattcatcatgactccccggac

SEQ ID NO: 127106 - DNA, 80 bp, synthetic construct
  source 1..80: mol_type = other DNA
aggtcgtcaccagcacctgggtgttggttggcggggtcctggccgcgctggccgcttactgcttatcaacaggctgtgtg

SEQ ID NO: 127107 - DNA, 80 bp, synthetic construct
  source 1..80: mol_type = other DNA
caagcacatccagggcacagtaatcaagggtttcacgcaccagatcgtaatgaggacattgctttttttcccagagttcg

SEQ ID NO: 127108 - DNA, 80 bp, synthetic construct
  source 1..80: mol_type = other DNA
cattcctgcaccatccccaggtaattctcatttttccagccttggattatttctacaaattgttggtgtaagtccactcc

SEQ ID NO: 127109 - DNA, 80 bp, synthetic construct
  source 1..80: mol_type = other DNA
ggtaggagccgtggcagccaatgaaatggggtggctggaaaaaactaaaggtgacatcagcagtctactggggacgagaa

SEQ ID NO: 127110 - DNA, 80 bp, synthetic construct
  source 1..80: mol_type = other DNA
aaacatagtagatgtccagtacctctacggcatcgggtctgcggtggtgtcctgggccctcaagtgggagtatgtcgtgc

SEQ ID NO: 127111 - DNA, 80 bp, synthetic construct
  source 1..80: mol_type = other DNA
cgctatatcatggttatgttttcaggggtcgatgccagcacatataccatcggtggccatgcagctcgttctgccagcag

SEQ ID NO: 127112 - DNA, 80 bp, synthetic construct
  source 1..80: mol_type = other DNA
cgcctggctccaggtcttacacaccttgcacatgtggcgccagtgatctctacctcatcacacgagatgccgacgtcata

SEQ ID NO: 127113 - DNA, 80 bp, synthetic construct
  source 1..80: mol_type = other DNA
agtgcatgctccccaggagcgggtttccacgggccttaccggcttgggcacggcctgactacaacccgccgctcgtggaa

SEQ ID NO: 127114 - DNA, 80 bp, synthetic construct
  source 1..80: mol_type = other DNA
acgtatgtgttgatcgtctctctgttcaccccctacatgttgcaccagcttcagacaaaaatacaacaactggtgaatag

SEQ ID NO: 127115 - DNA, 80 bp, synthetic construct
  source 1..80: mol_type = other DNA
tacaccttcctgggtgtgttccatgcgtcaccactggaaacacatcgcagtgttgggtcccggtttcccccaccttggct

SEQ ID NO: 127116 - DNA, 80 bp, synthetic construct
  source 1..80: mol_type = other DNA
acccgagcaggcacgactcgcaatacactcattaactgagagactctacgtgggagggcccatgatgaacagcaaagggc

SEQ ID NO: 127117 - DNA, 80 bp, synthetic construct
  source 1..80: mol_type = other DNA
tgtgggacgacgaggactcggccgacgatagcagcgtgttggacttgggcgtgagcggtagggttaacccgttcgcgcat

SEQ ID NO: 127118 - DNA, 80 bp, synthetic construct
  source 1..80: mol_type = other DNA
gctttcgcctcgcggggtaaccatgtttcccccacgcactacgtgcccgagagcgatgctgcagcgcgcgtcaccgccat

SEQ ID NO: 127119 - DNA, 80 bp, synthetic construct
  source 1..80: mol_type = other DNA
gactgggtgaacaaaggcgaatcaacgtcccacgcggccctagctctggcaatggtgttaaccagagtgaaaggactaga

SEQ ID NO: 127120 - DNA, 80 bp, synthetic construct
  source 1..80: mol_type = other DNA
aaacgttacccaggcccgggaacgcagcaacacggaggcgactggattgtacaagagacccttaagggtggcgaccgagg

SEQ ID NO: 127121 - DNA, 80 bp, synthetic construct
  source 1..80: mol_type = other DNA
gcacataaaccggaccgccctcaattgcaacgacagcctgcagacggggttcatcacttcccttttttatgccagaagtg

SEQ ID NO: 127122 - DNA, 80 bp, synthetic construct
  source 1..80: mol_type = other DNA
ttcggttttccgaggttgtcgtgtatgcggcgctaggtggtgccgtgtggatttcgttggcgcaggtgctggggctccgg

SEQ ID NO: 127123 - DNA, 80 bp, synthetic construct
  source 1..80: mol_type = other DNA
catggcgcacacactaataatgattgggtccaacgcctctgacaggatgggaatgggcgtcacctacctagctttaattg

SEQ ID NO: 127124 - DNA, 80 bp, synthetic construct
  source 1..80: mol_type = other DNA
cccagtgataccctgttctgtgacataggggaatcctccccaagtccagaagtagaagaacaacgcacactacgcgtcct

SEQ ID NO: 127125 - DNA, 80 bp, synthetic construct
  source 1..80: mol_type = other DNA
caactggggtgacaatgaatcggacgtcttcgtccttaataacaccaggccaccgctgggcaattggttcggctgcacct

SEQ ID NO: 127126 - DNA, 80 bp, synthetic construct
  source 1..80: mol_type = other DNA
ttaccaacagtacgacgagatggaggagtgctcacggcacatcccctacctagtcgaaggtcaacaaatagctgaacagt

SEQ ID NO: 127127 - DNA, 80 bp, synthetic construct
  source 1..80: mol_type = other DNA
tactccttctaacaattggattgagtctagtggcatctgtggagttaccaaattccttggaggagctgggggatggactt

SEQ ID NO: 127128 - DNA, 80 bp, synthetic construct
  source 1..80: mol_type = other DNA
ccgcaaatgcccggcatccccttcctatcctgccaacgcgggtatcggggggtttggcgaggcgacggcatcatgaacac

SEQ ID NO: 127129 - DNA, 80 bp, synthetic construct
  source 1..80: mol_type = other DNA
tatcatactccttgcttgcctgttgcacccccagctaggctttgaggttacaaagattctcctagctttgcttggtcctc

SEQ ID NO: 127130 - DNA, 80 bp, synthetic construct
  source 1..80: mol_type = other DNA
tctcagctccgtcgttgaaggcgacgtgtactacgcacggcgctcaccctgacgctgagctgatagaggcaaacttgctg

SEQ ID NO: 127131 - DNA, 80 bp, synthetic construct
  source 1..80: mol_type = other DNA
agctggttctccgtcagtgcaggcgggggcgacatatatcacagcgtgtcgcgagcccaccccgcatcttactcttggct

SEQ ID NO: 127132 - DNA, 80 bp, synthetic construct
  source 1..80: mol_type = other DNA
ttaagaaggaaactaaaatgaaaccatgctatggatcttatgctagaccaacaaacacaagtggcggacaggctaagctt

SEQ ID NO: 127133 - DNA, 80 bp, synthetic construct
  source 1..80: mol_type = other DNA
cgtggcgaaggccgcgtacggcccgggatgaggggcccccgaccgcggcggtccgggccccgtccgggcccgctcgccgg

SEQ ID NO: 127134 - DNA, 80 bp, synthetic construct
  source 1..80: mol_type = other DNA
ccgcaggggccgagaggtactgctcggaccggccgatggagtggtctccaaggcgtggaggttgctgcaacattgggctt

SEQ ID NO: 127135 - DNA, 80 bp, synthetic construct
  source 1..80: mol_type = other DNA
acactaacatgttatttaaaattccataattaaaggtactccatccaaaactaatcttttctagcgctaaccaagcatgg

SEQ ID NO: 127136 - DNA, 80 bp, synthetic construct
  source 1..80: mol_type = other DNA
ccattggcggcttggaacgacattccatacctaggaaagagagaggacatctggtgtggaagcctaattggaacaaggac

SEQ ID NO: 127137 - DNA, 80 bp, synthetic construct
  source 1..80: mol_type = other DNA
cagttattggtgcccttaaacgcctggttgctacgcctgaataagtgataataagcggatgaatggcagaaattcgatga

SEQ ID NO: 127138 - DNA, 80 bp, synthetic construct
  source 1..80: mol_type = other DNA
aggaggtgttgaaggacttggtgtccaaaaacttggttacattctgcgtgagatgagccaccattcaggtggaaaaatgt

SEQ ID NO: 127139 - DNA, 80 bp, synthetic construct
  source 1..80: mol_type = other DNA
cgtcccacactcttttgcttaacatcatgggaggatgggtagcttcccaggtagcgcctcctacggcctctaccgcattc

SEQ ID NO: 127140 - DNA, 80 bp, synthetic construct
  source 1..80: mol_type = other DNA
tgcagggatcgtggaccccagcatgctggtatgtggtgacgacctggtcgtcatctcagagagccaaggtaacgaggagg

SEQ ID NO: 127141 - DNA, 80 bp, synthetic construct
  source 1..80: mol_type = other DNA
gttgggcactattgtcaccagcatgaccggccgagacaaaaacgaggttgagggtgaaatacaggtggtctctacagcta

SEQ ID NO: 127142 - DNA, 80 bp, synthetic construct
  source 1..80: mol_type = other DNA
agagtgggcaaaactttacactccatggaccagaatacacccctgttcaatggtttggtggtaaaaaaatagtaatgcta

SEQ ID NO: 127143 - DNA, 80 bp, synthetic construct
  source 1..80: mol_type = other DNA
tgggaatgcctgggtggtcgtggcagacgaagtctgagtgagcccctaactgtggtggtggtcatgttagcaatggccag

SEQ ID NO: 127144 - DNA, 80 bp, synthetic construct
  source 1..80: mol_type = other DNA
atgtatttttagataggcgggcttccagtaaaacacataaatacggcccgcgttggaattccgtctacgcacttccatat

SEQ ID NO: 127145 - DNA, 80 bp, synthetic construct
  source 1..80: mol_type = other DNA
agcgattgatctacccacacatgagaaccatggactaaagactcggcaggagaagtggatgacaggcagaatgggtgaga

SEQ ID NO: 127146 - DNA, 80 bp, synthetic construct
  source 1..80: mol_type = other DNA
gggtgtggcggacgcggtgcggtcattgaacggggtgcagttaaatacatgcccgggacccatgaagcatgcgcgacttc

SEQ ID NO: 127147 - DNA, 80 bp, synthetic construct
  source 1..80: mol_type = other DNA
atctcttctacttcctcctcaggcggtggtggcgtgggagcgggcctgcgtcgccggcggcgcacgggcagacggtcgat

SEQ ID NO: 127148 - DNA, 80 bp, synthetic construct
  source 1..80: mol_type = other DNA
tttaagatcatgagtggcgagatgccgtcgacagaggacctggtaaacctgcttccggccatactatcgccgggtgccct

SEQ ID NO: 127149 - DNA, 80 bp, synthetic construct
  source 1..80: mol_type = other DNA
gaccgtgctcgtggctctcaccatcttcacactgaccccgcactacaagaggatgctcgtcagtttcctttggtggaatc

SEQ ID NO: 127150 - DNA, 80 bp, synthetic construct
  source 1..80: mol_type = other DNA
gctccccccggagacgtccccaaggccgcatatgacctggagcttgttacatcctgttcctccaacgtcaccgtggcgag

SEQ ID NO: 127151 - DNA, 80 bp, synthetic construct
  source 1..80: mol_type = other DNA
gaaaagaggaataccgtgattacatgcaatcattgaggaggtatgaagaggcaacaatatgtgaagacagagtgctgtaa

SEQ ID NO: 127152 - DNA, 80 bp, synthetic construct
  source 1..80: mol_type = other DNA
acctcagcgcctcccaaaagacatatttcctgcagattcactcaaatatggaacattcccagctgctacaacaaacagag

SEQ ID NO: 127153 - DNA, 80 bp, synthetic construct
  source 1..80: mol_type = other DNA
atgtggcgctcaaagaagacccccatggggttttcttacgacaccaaatgctttgactcaacagtcacggagcgcgacat

SEQ ID NO: 127154 - DNA, 80 bp, synthetic construct
  source 1..80: mol_type = other DNA
cagttcttccggcacgtgcgcgcccagctgaacatccgcgagtacgtaaagcaaaacgtcacccccagggaaaccgccct

SEQ ID NO: 127155 - DNA, 80 bp, synthetic construct
  source 1..80: mol_type = other DNA
cgccccctcccgcccctcgccccctcccgcccctcgccccctcccgcccctcgccacctcgcgcccctcgccacctgccg

SEQ ID NO: 127156 - DNA, 80 bp, synthetic construct
  source 1..80: mol_type = other DNA
caacgtttcagtggcccatgacgcaaccggaaagagatactactacctcacgcgtgacccaaccatcccgctgtcacgag

SEQ ID NO: 127157 - DNA, 80 bp, synthetic construct
  source 1..80: mol_type = other DNA
atgctcctagataacattaacacaccagaaggaattattcctagtatgtttgaaccagagcgtgaaaaagtggatgccat

SEQ ID NO: 127158 - DNA, 80 bp, synthetic construct
  source 1..80: mol_type = other DNA
taagttctgtttcatgtaaaatgggaaatgaggcgttgcgaggggcgttaggtagggatacagcgctgattatgcatttt

SEQ ID NO: 127159 - DNA, 80 bp, synthetic construct
  source 1..80: mol_type = other DNA
ccagaagaaggtgacatttgaccgtctgcaagtcgtggaccagcattaccacgatgtcctcaaggagattaaagcccggg

SEQ ID NO: 127160 - DNA, 80 bp, synthetic construct
  source 1..80: mol_type = other DNA
ctcaccactagccttggtaatactctgacttgcttcctgaaagcgagtgcagcatgcagggcagcaaacctaaagaatcc

SEQ ID NO: 127161 - DNA, 80 bp, synthetic construct
  source 1..80: mol_type = other DNA
gctcatagcttagggcttcggctgcgtgtcctttggctcgaagcttgcctttggaaatgtgctgacagctgggacagtag

SEQ ID NO: 127162 - DNA, 80 bp, synthetic construct
  source 1..80: mol_type = other DNA
ggacgtgtccgctttgaacgcccggggcgttttattactgtcgacccgagacctggcctttgccggggccgtcgagtatc

SEQ ID NO: 127163 - DNA, 80 bp, synthetic construct
  source 1..80: mol_type = other DNA
tttccagctttaaggtatattattgatgatgcattatcatattggctcgtttccagctttaaggtatattattgatgatg

SEQ ID NO: 127164 - DNA, 80 bp, synthetic construct
  source 1..80: mol_type = other DNA
ccccacattaccgaagtggaacctgaagacattgactgctggtgcaaccttacatcaacatgggtgacttatggaacgtg

SEQ ID NO: 127165 - DNA, 80 bp, synthetic construct
  source 1..80: mol_type = other DNA
gcaaaaccattagcggcccaaagggacctgtcaaccaaatgtacaccaatgttgaccaagacttggtggggtggccagcg

SEQ ID NO: 127166 - DNA, 80 bp, synthetic construct
  source 1..80: mol_type = other DNA
actcccctgtgaggaactactgtcttcacgcagaaagcgtctagccatggcgttagtatgagtgtcgtacagcctccagg

SEQ ID NO: 127167 - DNA, 80 bp, synthetic construct
  source 1..80: mol_type = other DNA
gggacacacccagccctccggaagtggaaagagcagttctcgatgatggcatctatagaatcttgcaaagaggactgttg

SEQ ID NO: 127168 - DNA, 80 bp, synthetic construct
  source 1..80: mol_type = other DNA
aatgctggtatcctgcagcgcccacattggccgtgcccaacgcctcggtccccgtgactgggttccgcaagcatgtggat

SEQ ID NO: 127169 - DNA, 80 bp, synthetic construct
  source 1..80: mol_type = other DNA
cttcctcttggcacttctctcgtgcctgacggtccccgcttcagccgtgcattatcgcaatgtttctggcgtctatcaca

SEQ ID NO: 127170 - DNA, 80 bp, synthetic construct
  source 1..80: mol_type = other DNA
gagggagcaatgcacacagcgctgacaggagctacggagattcaaaactcaggaggtacaagcattttcgcggggcactt

SEQ ID NO: 127171 - DNA, 80 bp, synthetic construct
  source 1..80: mol_type = other DNA
cggcgctcgcgcctgtggtgcggcgtggaccacgccccggcggggttcaaccccaccgtcaccgtctttcacgtgtacga

SEQ ID NO: 127172 - DNA, 80 bp, synthetic construct
  source 1..80: mol_type = other DNA
ggatacggagctggagtctcaggcgccttggtggcttttaagatcatgggagtggagtgccccactgctgaggacatggt

SEQ ID NO: 127173 - DNA, 80 bp, synthetic construct
  source 1..80: mol_type = other DNA
ggttggggtggccgtgctcatagccctcaccatcttcacactgactccccattacaagtggatgcttgttaggttcttat

SEQ ID NO: 127174 - DNA, 80 bp, synthetic construct
  source 1..80: mol_type = other DNA
gctaaggttttgattgtgatgctactttttgctggcgttgacgggagcacctccgtggtaggggggcggcaagcctccgc

SEQ ID NO: 127175 - DNA, 80 bp, synthetic construct
  source 1..80: mol_type = other DNA
caggattatgtatgaggatctagaagggggcaacatccccgccctgctggatgtggaagcatacctcaaaagcaagaatg

SEQ ID NO: 127176 - DNA, 80 bp, synthetic construct
  source 1..80: mol_type = other DNA
cagcttcaggtgttatcttcaaatcatgatgtttaataaagcgcagagtatccacacaggatgcatgggctaaaccaagc

SEQ ID NO: 127177 - DNA, 80 bp, synthetic construct
  source 1..80: mol_type = other DNA
tgaccacgtgattaaggagcatgggcgtaaagacgggctccgagcgcgccccggagccgtccatgtaaatcagtagctcc

SEQ ID NO: 127178 - DNA, 80 bp, synthetic construct
  source 1..80: mol_type = other DNA
ccgtgatgctgtcatcctgctcacgtgcttgctccacccgtccttagggtttgagatcaccaagaccctgttggcaatca

SEQ ID NO: 127179 - DNA, 80 bp, synthetic construct
  source 1..80: mol_type = other DNA
aggtgcggacagcatggttcgtcccttcaatagcaaaaggtggggtcattgcccgtgcgctgagacaaaaagggaagagt

SEQ ID NO: 127180 - DNA, 80 bp, synthetic construct
  source 1..80: mol_type = other DNA
tggggtacatccctgtcattggcgccccggtcggaggcgtcgccagagccctggcacacggtgttaggatcctggaagac

SEQ ID NO: 127181 - DNA, 80 bp, synthetic construct
  source 1..80: mol_type = other DNA
tacgccatgttgatgagcgtctgccttttgaacaatttccgtacacaaatttgaccccgtgatagcatttccttgggtat

SEQ ID NO: 127182 - DNA, 80 bp, synthetic construct
  source 1..80: mol_type = other DNA
ggcacatcaaccgcactgccctgaactgcaatgacagtcttaacactggcttcctagcggccttgttttacgtcaacagg

SEQ ID NO: 127183 - DNA, 80 bp, synthetic construct
  source 1..80: mol_type = other DNA
cactcccggcggagtcgccgctctcttactgtgcaagcacatggggagagcactctggcaaacaagaagggagcttggct

SEQ ID NO: 127184 - DNA, 80 bp, synthetic construct
  source 1..80: mol_type = other DNA
ttcaaacaaaaagccctcggcgtgctaggcgtcgccagtaaacaagtccaggaagcagcgccagtggtcaagaccaactt

SEQ ID NO: 127185 - DNA, 80 bp, synthetic construct
  source 1..80: mol_type = other DNA
accatgttgaggacgagcgaccgcagctcggtgtttacggaggcgagttgctggacgtcggccacgagcgagagacgggc

SEQ ID NO: 127186 - DNA, 80 bp, synthetic construct
  source 1..80: mol_type = other DNA
gtgcgggagggtaactcctctcgttgctgggtagcgcttacccccacgctcgcagccagggatgttggtgtccccactca

SEQ ID NO: 127187 - DNA, 80 bp, synthetic construct
  source 1..80: mol_type = other DNA
acggcgctgggaacaaaacgctagctggctcacgagggcctgttacgcagatgtattccagcgccgaggaggaccttgtg

SEQ ID NO: 127188 - DNA, 80 bp, synthetic construct
  source 1..80: mol_type = other DNA
cacatcaagggggggagacacctaatcttctgccattccaggaaaaagtgcgatgagctggcccccgcccttcgtggcat

SEQ ID NO: 127189 - DNA, 80 bp, synthetic construct
  source 1..80: mol_type = other DNA
aaagaaaagaggtggcagtgaaacatccgtgcttatggtcattttcatgctgattggatttgccgctgccttaaagcttt

SEQ ID NO: 127190 - DNA, 80 bp, synthetic construct
  source 1..80: mol_type = other DNA
tggctagggttgacgatgtggtggttacagtacttcatagccaggtctgaggccttggtgcatgtttacatcccgtctct

SEQ ID NO: 127191 - DNA, 80 bp, synthetic construct
  source 1..80: mol_type = other DNA
tcagtatttcatagcccgggtagaggcctttatccatgtgtgggtgcccccgttgcaggttaggggtggtcgtgatgcta

SEQ ID NO: 127192 - DNA, 80 bp, synthetic construct
  source 1..80: mol_type = other DNA
caacaccataaagtacccagaggcgcgggcctggttgccatgcagggtgggaggggtcgtcaacggcgcccctggctcct

SEQ ID NO: 127193 - DNA, 80 bp, synthetic construct
  source 1..80: mol_type = other DNA
aaaattgtgaaagaaatagcagagacacaacatggaacaatagttatcagagtacaatatgaaggggacggttctccatg

SEQ ID NO: 127194 - DNA, 80 bp, synthetic construct
  source 1..80: mol_type = other DNA
agctaattgcgtacgacaaaccatgcggaactcgctgtttttttttctctgtttgttactttttattgaaaacagacatg

SEQ ID NO: 127195 - DNA, 80 bp, synthetic construct
  source 1..80: mol_type = other DNA
agttgcctatcagccctcttagtaactctatgataaggcatcataacatggtatactctaccacctcacggagcgccagc

SEQ ID NO: 127196 - DNA, 80 bp, synthetic construct
  source 1..80: mol_type = other DNA
gttagcgacccggccttctgggacatggttgacgttgaaagagagaaccacctacgaggggagtgccatacttgcatcta

SEQ ID NO: 127197 - DNA, 80 bp, synthetic construct
  source 1..80: mol_type = other DNA
tggaaaaactgcagttgaaaggaacgacctatggtgtctgctcgaaggcttttaagtttgtcggaacgccagccgacaca

SEQ ID NO: 127198 - DNA, 80 bp, synthetic construct
  source 1..80: mol_type = other DNA
cagggttgcagcactggaacaccatcagactggggtactttacgctggccagcacgctcttatcgctaatttgatccttg

SEQ ID NO: 127199 - DNA, 80 bp, synthetic construct
  source 1..80: mol_type = other DNA
tcagtgtggaatagggtttggatagaggaaaacccatggatggaggacaagactcatgtgtccagttgggaagacgttcc

SEQ ID NO: 127200 - DNA, 80 bp, synthetic construct
  source 1..80: mol_type = other DNA
ggtggttgatttcagcttggatcccaccttttcaattgagactaccaccgtcccacaggacgctgtaaccaggagccaga

SEQ ID NO: 127201 - DNA, 80 bp, synthetic construct
  source 1..80: mol_type = other DNA
ggccggtggttcgaccaacgggccgcggccacgggcccccggcgtgccggcgtcggggcgtggtcgtgcataatggaatt

SEQ ID NO: 127202 - DNA, 80 bp, synthetic construct
  source 1..80: mol_type = other DNA
gctgacacccaagtggatatgcagttttttgccaccactgcagccaatacaacaccaaaagctgttctttatgctgaaga

SEQ ID NO: 127203 - DNA, 80 bp, synthetic construct
  source 1..80: mol_type = other DNA
acaaggtagcgggtagggtattgaaagataccacgccaatgttaccatgctacgggtcttacgccaaaccaacaaatgaa

SEQ ID NO: 127204 - DNA, 80 bp, synthetic construct
  source 1..80: mol_type = other DNA
atgtgacttgcagcccgaggcacgcgcggcaatacggtcactcacccagcgcctatactgtggaggccctatgtataaca

SEQ ID NO: 127205 - DNA, 80 bp, synthetic construct
  source 1..80: mol_type = other DNA
cggctccatcactgaaggccacatgtactacgcatggtcaacatcctgatgcggagctgattgaagcaaatctgctgtgg

SEQ ID NO: 127206 - DNA, 80 bp, synthetic construct
  source 1..80: mol_type = other DNA
tcgctggtgtcggcggccctggttgccgatgcgccggcggcgtcccggcgtagcgacaggagttctgccgtcagctcccc

SEQ ID NO: 127207 - DNA, 80 bp, synthetic construct
  source 1..80: mol_type = other DNA
cattttaactgttatgcttgcaaagcttgagaccttaactgctcagctagaggagctgtcgcataaggttgaagaattag

SEQ ID NO: 127208 - DNA, 80 bp, synthetic construct
  source 1..80: mol_type = other DNA
agtgtttgtgaggatttacgaggattaatacagtacgagctgttttttagcaagaagatttcaatgtctaagaaaccagg

SEQ ID NO: 127209 - DNA, 80 bp, synthetic construct
  source 1..80: mol_type = other DNA
tcgacttccatcttgggcatcggtacagttttggaccaggcggagacggctggagcgcggcttgtcgtgcagcctccagg

SEQ ID NO: 127210 - DNA, 80 bp, synthetic construct
  source 1..80: mol_type = other DNA
taaaatactcatggaaaacgtggggaaaggcaaaaatagtgacagctgagacacaaaattcctctttcataatagacggg

SEQ ID NO: 127211 - DNA, 80 bp, synthetic construct
  source 1..80: mol_type = other DNA
ccccggttcgaaaccggccggatccgccgctcccgatgcgcctggccccgcatccacgacgtccgcgccgagacccagcc

SEQ ID NO: 127212 - DNA, 80 bp, synthetic construct
  source 1..80: mol_type = other DNA
tctacggtaaggctataccgatagcccagctcaagggggggaggcaccttatcttttgccattccaagaaaaagtgtgat

SEQ ID NO: 127213 - DNA, 80 bp, synthetic construct
  source 1..80: mol_type = other DNA
agcaaaacgcctccccctgagccgctttcctaccaacacaacggcatgcctctgcgggcatcggaacacgcctaccggcc

SEQ ID NO: 127214 - DNA, 80 bp, synthetic construct
  source 1..80: mol_type = other DNA
caccgaacaagacatcagggtggaagaggaaatataccaatgttgtgaccttgagccagaagctaggaaggcaatcagct

SEQ ID NO: 127215 - DNA, 80 bp, synthetic construct
  source 1..80: mol_type = other DNA
gtgtcgtcgatcgacgaattagggcgtcgccagctcacggacaccatccgcaaggacctgcggttgtcgctggccaagtt

SEQ ID NO: 127216 - DNA, 80 bp, synthetic construct
  source 1..80: mol_type = other DNA
cagaatgccctaacagcaacagggcctggaattcactggaagttgaagattatggtttcgggatcttcaccaccaacata

SEQ ID NO: 127217 - DNA, 80 bp, synthetic construct
  source 1..80: mol_type = other DNA
ttctctcgtgtcttactgtgcctgcctcggcactgaattatgctaacaagtctggtatttaccatcttaccaatgactgc

SEQ ID NO: 127218 - DNA, 80 bp, synthetic construct
  source 1..80: mol_type = other DNA
tctagtgtgtgtggccccgtatactgttttactcctagccctgtcgtggtcggaaccactgatcgcttcggggtccctac

SEQ ID NO: 127219 - DNA, 80 bp, synthetic construct
  source 1..80: mol_type = other DNA
acgcgcttacctcaacaccccaggacttcccgtgtgccaggatcacctcgagttttgggagggagtgttcaccgggctca

SEQ ID NO: 127220 - DNA, 80 bp, synthetic construct
  source 1..80: mol_type = other DNA
atcagcaagtgttggacaccggcctcgcccacgttggcggtcccgaacgcgtcaacgcctgtgcgggggtttcgcgatca

SEQ ID NO: 127221 - DNA, 80 bp, synthetic construct
  source 1..80: mol_type = other DNA
acatcaacagaactgcccttaattgtaatgacagcctccaaactgggttcatagccggcctaatataccatcatagattc

SEQ ID NO: 127222 - DNA, 80 bp, synthetic construct
  source 1..80: mol_type = other DNA
tcgcggacgggggttgctccgggggagcgtatgatgtgatcatctgtgatgaatgtcatgcccaagacgctactagcata

SEQ ID NO: 127223 - DNA, 80 bp, synthetic construct
  source 1..80: mol_type = other DNA
gggcctcaactccttcgtggtcgggtctcagctaccctgcgagcccgaaccagacacggaggtgttggcgtcaatgctga

SEQ ID NO: 127224 - DNA, 80 bp, synthetic construct
  source 1..80: mol_type = other DNA
gcggtagcgttccatgagcacgtttatggtatccatgcccttctcccaggacgaaaccaaaggcagactcagggggttgc

SEQ ID NO: 127225 - DNA, 80 bp, synthetic construct
  source 1..80: mol_type = other DNA
ctgttgaggacgtaagtgacgtcgttgcgggccacgaccagctgctgtttgctgtgcacctcgcagcgcatgtgccccgc

SEQ ID NO: 127226 - DNA, 80 bp, synthetic construct
  source 1..80: mol_type = other DNA
tattgacgcacactttttatcccaggcgaagcaggcaggagagaatttcgcctacctagttgcttaccaggctacggtct

SEQ ID NO: 127227 - DNA, 80 bp, synthetic construct
  source 1..80: mol_type = other DNA
tttggccaaccccaggctgagagtgactccggggcgtgtcttacaacatcaaccagcacttctgacccagctcccatcgt

SEQ ID NO: 127228 - DNA, 80 bp, synthetic construct
  source 1..80: mol_type = other DNA
gtaaagccacaataagcagcttgaagaactggagtaacacaatgcaaaatgtgcagcaaaaactccgacatgtttgtctt

SEQ ID NO: 127229 - DNA, 80 bp, synthetic construct
  source 1..80: mol_type = other DNA
aacgagcgctccgtggccgcgcacctggcggacatcattttccccgaacgcctgcttaaaaccctgcaacagggtctgcc

SEQ ID NO: 127230 - DNA, 80 bp, synthetic construct
  source 1..80: mol_type = other DNA
ggatgattctcttgctggggcaggccgaggcggcgttggagaagctagtcattctacatgcggccagcgccgcgagtctt

SEQ ID NO: 127231 - DNA, 80 bp, synthetic construct
  source 1..80: mol_type = other DNA
agaattgcttttggaatacaaaagactctacgcattatttgatgactttgttcctcctcggtgatttcagcttcagtgtt

SEQ ID NO: 127232 - DNA, 80 bp, synthetic construct
  source 1..80: mol_type = other DNA
ctagataacatcaacatgcctaatggattggttgctcagctttatgagcctgaaagacaaaaggtgttctcgatggacgg

SEQ ID NO: 127233 - DNA, 80 bp, synthetic construct
  source 1..80: mol_type = other DNA
caatccggaggaagaaaagttgccagttaaccccctcagcaactcactgatgcgctaccacaacaaggtttattccacca

SEQ ID NO: 127234 - DNA, 80 bp, synthetic construct
  source 1..80: mol_type = other DNA
atgaggtgtacctgtcgcccacgtacgagaaatcggagagggaagttgaaaaaatcctcagtgtcttgcctttcaccctc

SEQ ID NO: 127235 - DNA, 80 bp, synthetic construct
  source 1..80: mol_type = other DNA
ctgcgacttggaggacagggacaggagtcagctgtctcctctgttgcactctaccacggaatgggccatcctgccctgca

SEQ ID NO: 127236 - DNA, 80 bp, synthetic construct
  source 1..80: mol_type = other DNA
tcaccgtcggcgccggcgggggcgacatttttcacagcgtgtcgcgcgcccgaccccgctcattactcttcggcctactc

SEQ ID NO: 127237 - DNA, 80 bp, synthetic construct
  source 1..80: mol_type = other DNA
gcgcagccaacggcgtggacgcacgggcaggggaaagccggtggtgtatagatacgtctcacaagaggaacgaccatcgg

SEQ ID NO: 127238 - DNA, 80 bp, synthetic construct
  source 1..80: mol_type = other DNA
ggccgggccactaatagctggaggcatgctaatagcgtgttatgtcatatccggaagctcagccgatctatcattggaga

SEQ ID NO: 127239 - DNA, 80 bp, synthetic construct
  source 1..80: mol_type = other DNA
tcggcgccattatgaggacagaaattactcctttggttctgtcgtgtgaagaggctgatgacatattggaggacttggtg

SEQ ID NO: 127240 - DNA, 80 bp, synthetic construct
  source 1..80: mol_type = other DNA
cgagacagaattgaaatgagccccttgttgttctcaaccactgagctcgccatcttaccgtgctcatttaccaccatgcc

SEQ ID NO: 127241 - DNA, 80 bp, synthetic construct
  source 1..80: mol_type = other DNA
ataattttgtacaagcccctggtggagagttcacggtatccccttgaaacgctccaggcgaaatactatggagggcgccc

SEQ ID NO: 127242 - DNA, 80 bp, synthetic construct
  source 1..80: mol_type = other DNA
gagaaagtgtggccaagaaaaaaggcggctacttgctcgcagcggccctctgccaagctggagtgtgcagtcccttgatt

SEQ ID NO: 127243 - DNA, 80 bp, synthetic construct
  source 1..80: mol_type = other DNA
caaaagaaaacggagaattgactgaagatcaggacatagatctaaacttctttgatattaataacccagatacaggaggt

SEQ ID NO: 127244 - DNA, 80 bp, synthetic construct
  source 1..80: mol_type = other DNA
tctggtgggttggcccgctcctcccggtgctaagtccttggacccgtgttcatgtggttcatcagacctatatttggtga

SEQ ID NO: 127245 - DNA, 80 bp, synthetic construct
  source 1..80: mol_type = other DNA
ccttagctacaagttgccaaccaagcgtcagaaattggtggtcatggtgggagaaaagcccattactataactcagcact

SEQ ID NO: 127246 - DNA, 80 bp, synthetic construct
  source 1..80: mol_type = other DNA
acgtgcttccgctgtaccgggccgacccggcggtcgagctgacccagctgtttcccggcctggccgccctgtgtcttgac

SEQ ID NO: 127247 - DNA, 80 bp, synthetic construct
  source 1..80: mol_type = other DNA
cactccctcgatgatgccgcagtggtcttacatgcacatcgccggtcaggatgcctcggagtacctgagtcccggtctgg

SEQ ID NO: 127248 - DNA, 80 bp, synthetic construct
  source 1..80: mol_type = other DNA
gtgctcgactcctactacgactcagtcttaaaggacattaagctagcggcctccaaggtcaccgcaaggctcctcaccat

SEQ ID NO: 127249 - DNA, 80 bp, synthetic construct
  source 1..80: mol_type = other DNA
agtgggactgatgttcgccattgttggaggactcgctgagctagacattgattctatgtcagtcccttttaccatagctg

SEQ ID NO: 127250 - DNA, 80 bp, synthetic construct
  source 1..80: mol_type = other DNA
ttgtgcggggccgtgtttttggcgggtcagctgttcacctggcagccgcgccggcactggaccgtccaaacctgtaactg

SEQ ID NO: 127251 - DNA, 80 bp, synthetic construct
  source 1..80: mol_type = other DNA
tagccaacgaatctatacctactccacttcatacaccgactctgtcacccatacctgaattggaagaggaggacgaacta

SEQ ID NO: 127252 - DNA, 80 bp, synthetic construct
  source 1..80: mol_type = other DNA
tgaacctgagcccgacgcagacgtattgaggtccatgctaacagatccgccccacatcacggcggagactgcggcgcggc

SEQ ID NO: 127253 - DNA, 80 bp, synthetic construct
  source 1..80: mol_type = other DNA
tggtaatgatgacccatttcttctcaatactccaatcccaagaactactccatagggcccttgactttgatatgtacggg

SEQ ID NO: 127254 - DNA, 80 bp, synthetic construct
  source 1..80: mol_type = other DNA
gctggaccacgggcacgacggcggccgaagccacgtgaaaccggcggtcgttgttgtcgctggcctgcagagccttggcg

SEQ ID NO: 127255 - DNA, 80 bp, synthetic construct
  source 1..80: mol_type = other DNA
ttcttggattttagacaggaaccaacacatgagtgtgacacaggagtgatgggggctgccgtcaagaacggcatggcaat

SEQ ID NO: 127256 - DNA, 80 bp, synthetic construct
  source 1..80: mol_type = other DNA
ccaacaacccgccccccgttctctcggccctgttctgtgccaccccgacaagctcctcattccggctgccggggccgccc

SEQ ID NO: 127257 - DNA, 80 bp, synthetic construct
  source 1..80: mol_type = other DNA
ggcggagttcgatcagctgctggccgactttccggaggcggccggcatgcgcgcccccggtccgtactccatgcgcatca

SEQ ID NO: 127258 - DNA, 80 bp, synthetic construct
  source 1..80: mol_type = other DNA
cttctgcctacgaagtacgcaattcttcgggcatttaccatgtcaccaatgactgcccaaactccagcatcgtgtacgag

SEQ ID NO: 127259 - DNA, 80 bp, synthetic construct
  source 1..80: mol_type = other DNA
cactgcgccaggcggaggccgctttgaagaagatcaagagagtcatcgggaacttgatgcagagtcttcacatgagaggg

SEQ ID NO: 127260 - DNA, 80 bp, synthetic construct
  source 1..80: mol_type = other DNA
tgtggcacacgacgaaaggagccgccttgatgagcggaacgggacgcctggacccttactggggtagcgtccgggaggac

SEQ ID NO: 127261 - DNA, 80 bp, synthetic construct
  source 1..80: mol_type = other DNA
acctatgtggggagtgccgtgtcctccagcacccgcggtctggtgtcattcttcgcccccgggccctcccagaacttgat

SEQ ID NO: 127262 - DNA, 80 bp, synthetic construct
  source 1..80: mol_type = other DNA
gcaaactctctcactgaacccgtcatgtaccactgctcagagagaatgactctctcacaacccatataaagcacactcac

SEQ ID NO: 127263 - DNA, 80 bp, synthetic construct
  source 1..80: mol_type = other DNA
agcgtggtcctccagacccaagacgctatcctgcacacgccgggctgcgttccttgtgtcagggagggaaacacctcgcg

SEQ ID NO: 127264 - DNA, 80 bp, synthetic construct
  source 1..80: mol_type = other DNA
taagcttgttgcatgggcggcgatataaaatgcaaggtgctgctcaaaaaatcaggcaaagcctcgcgcaaaaaagcaag

SEQ ID NO: 127265 - DNA, 80 bp, synthetic construct
  source 1..80: mol_type = other DNA
ggggctgcccagtggatgaacaggctgatagcttttgcttcacgaggcaatcacgtgtcaccaactcactacgtgcctga

SEQ ID NO: 127266 - DNA, 80 bp, synthetic construct
  source 1..80: mol_type = other DNA
ggtctggcacataaaggggcgggccccggccgcagccgtgtacgcggcttgcggaatgtggcctctactcctactgctcc

SEQ ID NO: 127267 - DNA, 80 bp, synthetic construct
  source 1..80: mol_type = other DNA
cggggcccacacccctactgtacaggctgggggcagtgcaaaacgagatcactaccactcaccccatcaccaaatacatc

SEQ ID NO: 127268 - DNA, 80 bp, synthetic construct
  source 1..80: mol_type = other DNA
ctccactttctcaacgccatgtcaaaggtccgcaaagacattcaagagtggaaaccatcaactggatggtatgattggca

SEQ ID NO: 127269 - DNA, 80 bp, synthetic construct
  source 1..80: mol_type = other DNA
aaagcttacatggatgtcataagccggcgggaccagagaggatctgggcaggtggtgacttacgccttgaacaccatcac

SEQ ID NO: 127270 - DNA, 80 bp, synthetic construct
  source 1..80: mol_type = other DNA
cacttgatatccaggtggctgatcccgcaggtggtgtttaaaaacacaacggcacgggccagctccgtgaagcactggtg

SEQ ID NO: 127271 - DNA, 80 bp, synthetic construct
  source 1..80: mol_type = other DNA
ttctggggtgagcccggcccgcgctcacgtctcggcggccaacctggtgagcgcgtacgagcagacggtgaacgaggagc

SEQ ID NO: 127272 - DNA, 80 bp, synthetic construct
  source 1..80: mol_type = other DNA
ctaacagcagcattgtctaccaggcccaagacgtgattttacacctccccggttgtgtcccatgtgttaaaaccgggaac

SEQ ID NO: 127273 - DNA, 80 bp, synthetic construct
  source 1..80: mol_type = other DNA
ttcgtgccggttgaatctcttgagaccaccatgaggtctccagtattctctgacaattccactcctcctgccgtgcccca

SEQ ID NO: 127274 - DNA, 80 bp, synthetic construct
  source 1..80: mol_type = other DNA
caacgcatcgcggtgttgggtagctttaacccccactgtggcggctccctactttaatgctccaacagaagcgctcaggc

SEQ ID NO: 127275 - DNA, 80 bp, synthetic construct
  source 1..80: mol_type = other DNA
cgctgcccggtaacccggctgtggcctccctaatgtccttctctgcggctctgacaagtcctttagccacatctacaacc

SEQ ID NO: 127276 - DNA, 80 bp, synthetic construct
  source 1..80: mol_type = other DNA
tctgcgcatggtatgtgaagggccgagcgctgccagcattcacatatgccatcctacaactatggcctctcctcttgctg

SEQ ID NO: 127277 - DNA, 80 bp, synthetic construct
  source 1..80: mol_type = other DNA
cccgccttgtcgactggtcttctccacctccaccaaaacatcgtggacgtacaattcatgtatggcctatcacctgccct

SEQ ID NO: 127278 - DNA, 80 bp, synthetic construct
  source 1..80: mol_type = other DNA
caaagctttcccaccgagtccagtaccttcacaagaagactctggagtggtttccactaccgcaggttccggagctgcgt

SEQ ID NO: 127279 - DNA, 80 bp, synthetic construct
  source 1..80: mol_type = other DNA
aagagaggaaaaattttctggaactgctcagaaccgctgacttaccagtatggctagcttaccaggtcgcagcagcagga

SEQ ID NO: 127280 - DNA, 80 bp, synthetic construct
  source 1..80: mol_type = other DNA
cagcgacgcgacagcggggcgcgtaaggcgccgctgcggcccgcctacgggaaccctggcgtgggttggcgcgggacccg

SEQ ID NO: 127281 - DNA, 80 bp, synthetic construct
  source 1..80: mol_type = other DNA
gatcgcaaacaccagtgatgatagcgaccagaggccttattgctggaactactcgccgcttccatgcggagtggtaccgg

SEQ ID NO: 127282 - DNA, 80 bp, synthetic construct
  source 1..80: mol_type = other DNA
ctgaggagagcaagctgcctatcaacccattgagcaactccttactgcgtcaccacaacatggtctacgccacaacatcc

SEQ ID NO: 127283 - DNA, 80 bp, synthetic construct
  source 1..80: mol_type = other DNA
ggtgcgccccatcaagcaggtggtgccgggcctgggcgtgcagaccgtggacattcagatccccaccgacatggatgtcg

SEQ ID NO: 127284 - DNA, 80 bp, synthetic construct
  source 1..80: mol_type = other DNA
gcgatatccgtacggaggaggcaatctaccagtgttgtgacctggacccccaagcccgcgtggccatcaagtccctcacc

SEQ ID NO: 127285 - DNA, 80 bp, synthetic construct
  source 1..80: mol_type = other DNA
tgagtctatggaaactactatgcggtctccggtctttacagataattcatctcccccggccgtaccgcagacattccagg

SEQ ID NO: 127286 - DNA, 80 bp, synthetic construct
  source 1..80: mol_type = other DNA
tattgctttaccccgagcccggtggtggtgggcaccaccgatgcggaaggcaaacgtacctatggctggtgcggcagcgc

SEQ ID NO: 127287 - DNA, 80 bp, synthetic construct
  source 1..80: mol_type = other DNA
cccctcacaaccaaccagactatgttctttaacatccttggaggttgggtagccacacacctagcgggacctgcagcatc

SEQ ID NO: 127288 - DNA, 80 bp, synthetic construct
  source 1..80: mol_type = other DNA
ttctagggatagggaccgttctcgaccaggcggagactagcggtgcaagacttacagttcttgcaaccgccaccccccct

SEQ ID NO: 127289 - DNA, 80 bp, synthetic construct
  source 1..80: mol_type = other DNA
cctcagcagcctcactgtcacccaactcctgagaaggctccaccagtggataagcactgattgcaccaccccgtgtgccg

SEQ ID NO: 127290 - DNA, 80 bp, synthetic construct
  source 1..80: mol_type = other DNA
ggtggggaactgggcgaaggtcctgctagtgctgttgctgtttgccggcgtcgatgcaggaacccacgtcaccggaggaa

SEQ ID NO: 127291 - DNA, 80 bp, synthetic construct
  source 1..80: mol_type = other DNA
ggagaggtggcagtccagtggatgaacaggctgatcgccttcgcctccaggggaaaccatgttgcccctacccactacgt

SEQ ID NO: 127292 - DNA, 80 bp, synthetic construct
  source 1..80: mol_type = other DNA
gggcttattttaacaccccaggtctccctgtgtgccaagatcatcttgagttctgggaaggcgtctttactggtttaacc

SEQ ID NO: 127293 - DNA, 80 bp, synthetic construct
  source 1..80: mol_type = other DNA
tcatcttcttcggccgcctctgcggcggtggtcttgggtgcggagggaggcggtggtgggatcgcggaggatgtgtcgtc

SEQ ID NO: 127294 - DNA, 80 bp, synthetic construct
  source 1..80: mol_type = other DNA
ggctccaccagtggatcaatgaggactgctccacgccatgctccggctcgtggctaagagatatctgggactggatatgc

SEQ ID NO: 127295 - DNA, 80 bp, synthetic construct
  source 1..80: mol_type = other DNA
atggaagaactggcaagaggttcctttttgctcccaccactttcacaagatctttatgaaggatggccgctcactagttg

SEQ ID NO: 127296 - DNA, 80 bp, synthetic construct
  source 1..80: mol_type = other DNA
gggaaaacaaagacgaattgcagcctacaatgcaactcatggtgcccaagcggcagaagctggaggaagtgctggaaaat

SEQ ID NO: 127297 - DNA, 80 bp, synthetic construct
  source 1..80: mol_type = other DNA
gcgagctttggacagcttttagcgaacgcacggccgcttgccagctggccgatctgatttttcccgaacgactcatgcaa

SEQ ID NO: 127298 - DNA, 80 bp, synthetic construct
  source 1..80: mol_type = other DNA
tccgcggccttgctggcggtaaatatgttcaagcagcgctgctgcgcgttggggcgtgcacaggaacatacatttatgac

SEQ ID NO: 127299 - DNA, 80 bp, synthetic construct
  source 1..80: mol_type = other DNA
aaagcggaacattaacaaaaataccgcgatcccgtaggtcccttcgcagggccagctgaacataatcgtgcaggtctgca

SEQ ID NO: 127300 - DNA, 80 bp, synthetic construct
  source 1..80: mol_type = other DNA
gaagcacataatgaaaagcgagcagatccagcgtacttctgcaagcaaggtgttgtggacagaggatggggaaacggttg

SEQ ID NO: 127301 - DNA, 80 bp, synthetic construct
  source 1..80: mol_type = other DNA
caaaccgatggtgcctgggtgccgcgcttcgacccgtcttccttcccgagggacggagaccggtggccgccgggccggag

SEQ ID NO: 127302 - DNA, 80 bp, synthetic construct
  source 1..80: mol_type = other DNA
cttggttgcatctccaagtatacctttagtttgctcccgtagaggtgtataaatacaaacggtgacaagtattgagcgta

SEQ ID NO: 127303 - DNA, 80 bp, synthetic construct
  source 1..80: mol_type = other DNA
tcttggaaatgtggacagccaagaagaccccgctggggttctcatatgacactcggtgcttcgactccactgtcactgaa

SEQ ID NO: 127304 - DNA, 80 bp, synthetic construct
  source 1..80: mol_type = other DNA
gagcaattccctcgcccgtctctatctccaagaattggtccgtgaaaacactaatcattcaccacaaaaacacccgactc

SEQ ID NO: 127305 - DNA, 80 bp, synthetic construct
  source 1..80: mol_type = other DNA
tccaagaagactccaatggggttctcctacgacaccaggtgctttgactcaacagttactgagcacgacatcaagactga

SEQ ID NO: 127306 - DNA, 80 bp, synthetic construct
  source 1..80: mol_type = other DNA
tggataaagcgtttcagcgccaacaaaaacccctctggcgttcatgccgctcaaggaaaacaaagttcccacatatccag

SEQ ID NO: 127307 - DNA, 80 bp, synthetic construct
  source 1..80: mol_type = other DNA
gtgatggcgtcatctgggccatgaccatgttttacccgggtgtggtgtttgacataaccaagtggttgttggcgatcctc

SEQ ID NO: 127308 - DNA, 80 bp, synthetic construct
  source 1..80: mol_type = other DNA
cctctggagctgattaaggggggcagacatctcatcttctgccactcaaagaaaaagtgtgatgaactggccagacaact

SEQ ID NO: 127309 - DNA, 80 bp, synthetic construct
  source 1..80: mol_type = other DNA
cccttttgggacccctctacatactccaggcttcattgctgcgtgtgccttactttgtgagggctcaagcgctacttaag

SEQ ID NO: 127310 - DNA, 80 bp, synthetic construct
  source 1..80: mol_type = other DNA
cagcacgctcttgtcggagatcagatccgcgtccaggtcctccgcgttgctcagggcgaacggagtcaactttggtagct

SEQ ID NO: 127311 - DNA, 80 bp, synthetic construct
  source 1..80: mol_type = other DNA
gtcgacaccccctccctgtttgtcgcctggctggccgctcggtggctccgggtggcttccggcctgggtgccgtcctgtg

SEQ ID NO: 127312 - DNA, 80 bp, synthetic construct
  source 1..80: mol_type = other DNA
accgcaagatcccaacgaggacgcggtaaacagtatgttccctgaatgtctgtttgaggcggctgaggagggttctcaca

SEQ ID NO: 127313 - DNA, 80 bp, synthetic construct
  source 1..80: mol_type = other DNA
tttaatgaacgcgatggtctcgatgtcctcgcgcgacaggagccgggcgggaagctggttgcgttggagggccgtccaga

SEQ ID NO: 127314 - DNA, 80 bp, synthetic construct
  source 1..80: mol_type = other DNA
cgccgattccgggacggggcttacctccccgaccgagacctctgactcggccccccttatcgcggacgacaaatccgacg

SEQ ID NO: 127315 - DNA, 80 bp, synthetic construct
  source 1..80: mol_type = other DNA
ggtggtgagacacaagaatcgtctgctactgttgtctgccgtccaccttgcaataataccgacgttatggcctcctcaaa

SEQ ID NO: 127316 - DNA, 80 bp, synthetic construct
  source 1..80: mol_type = other DNA
tcaatgcagtggcatattacagagggctcgacgtctccgtgataccagcacaaggagacgtggtggtcgtcgccactgac

SEQ ID NO: 127317 - DNA, 80 bp, synthetic construct
  source 1..80: mol_type = other DNA
ccgaccacaccgacgaatcccccaagggggaggggccattttacgaggaggagtggtataacaaagtctgtctttaaaaa

SEQ ID NO: 127318 - DNA, 80 bp, synthetic construct
  source 1..80: mol_type = other DNA
aacgcgatggtctctatgtcctcgcgcgacaagagccgggcggggagctggttgcgctggagtgcggtccagaaccactg

SEQ ID NO: 127319 - DNA, 80 bp, synthetic construct
  source 1..80: mol_type = other DNA
tggccttcaagatcatgtgcggcgaaactccatctgcagaggacatggtcaatctgctaccggccctcttgtcacccggt

SEQ ID NO: 127320 - DNA, 80 bp, synthetic construct
  source 1..80: mol_type = other DNA
tacaatttttaattctgggaatgctgctgatggttggtggagtgaccctggtacgcagaaacagatggttacttctgaat

SEQ ID NO: 127321 - DNA, 80 bp, synthetic construct
  source 1..80: mol_type = other DNA
acacggacgctgctgcaaaagtcaatgctatactcagctccctaactataacatctttgctccgcaagttacaccaatgg

SEQ ID NO: 127322 - DNA, 80 bp, synthetic construct
  source 1..80: mol_type = other DNA
ggccaaatgttcaccttccggccccgtgtgcacgaaaccgtccaggagtgcaattgttccatctactctggtcacgtcac

SEQ ID NO: 127323 - DNA, 80 bp, synthetic construct
  source 1..80: mol_type = other DNA
gcaggcgccctggaggcgctggagacggcggcggccgccgccgaagaggcggatgccgcgcgcggtgatgagccggcgcg

SEQ ID NO: 127324 - DNA, 80 bp, synthetic construct
  source 1..80: mol_type = other DNA
gaaggacgcagtcttgcatctgccgggttgtgtcccgtgtgagaaagtgaggctgaagcccgatggcaatgataccttta

SEQ ID NO: 127325 - DNA, 80 bp, synthetic construct
  source 1..80: mol_type = other DNA
gggggagcctggggatcctgacttgagtgacgggtcgtggtccacaatgagtgacgagccagacagtgtcgtgtgttgct

SEQ ID NO: 127326 - DNA, 80 bp, synthetic construct
  source 1..80: mol_type = other DNA
tgtatgtgccacagcagccctgcgatgccctctcacggatatgggcaatactgcccaaaatctttttttttcacgaggag

SEQ ID NO: 127327 - DNA, 80 bp, synthetic construct
  source 1..80: mol_type = other DNA
agaattgtcaccgttatacgataccactcgagtgtacttagtggacaacaagtcttctgatatcgcttctttaaactacc

SEQ ID NO: 127328 - DNA, 80 bp, synthetic construct
  source 1..80: mol_type = other DNA
ccggcggcttacgctagccagggctacaaggtgttggtcttgaacccatctgtggcggcaacgcttagctttggctctta

SEQ ID NO: 127329 - DNA, 80 bp, synthetic construct
  source 1..80: mol_type = other DNA
catggccaaaaatgaggtgttctgcatcgacccgacgaaaggcgggaagaaggctgctcgcctcatcgtattccctgatc

SEQ ID NO: 127330 - DNA, 80 bp, synthetic construct
  source 1..80: mol_type = other DNA
ttcagtgccgccctcaccagtccgttgtcgaccagtaccaccatccttctcaacatcatgggaggctggttagcgtccca

SEQ ID NO: 127331 - DNA, 80 bp, synthetic construct
  source 1..80: mol_type = other DNA
atgaactctacaggatttgtcaaaacttgcggtgcaccgccatgcaacaccaggccggtaggcagtggtaatgacacctt

SEQ ID NO: 127332 - DNA, 80 bp, synthetic construct
  source 1..80: mol_type = other DNA
attacaatgaagtactgaaggagatcaaggcgaaggcgtccactgtgaaggcgcggctactcactactgaggaagcctgc

SEQ ID NO: 127333 - DNA, 80 bp, synthetic construct
  source 1..80: mol_type = other DNA
caactccgtgtgggaggatttgctggaagacaatgtcacaccgcttgctactaccatcatggccaaaaacgaggtgttct

SEQ ID NO: 127334 - DNA, 80 bp, synthetic construct
  source 1..80: mol_type = other DNA
aacatgacatttaccagtgctgccaactagatccggtagcacggaaagccatcacatctcttactgagcggctgtactgc

SEQ ID NO: 127335 - DNA, 80 bp, synthetic construct
  source 1..80: mol_type = other DNA
gtgtgatggtgtccagaaaagctcctgaaggtgttacagtagacaataattatgatcataagcaagatattctaaaatac

SEQ ID NO: 127336 - DNA, 80 bp, synthetic construct
  source 1..80: mol_type = other DNA
tcttccagccagaacctcaagtaggagaggataactggagtgaaaattacccagtttatggcggaagagcgcttaagaaa

SEQ ID NO: 127337 - DNA, 80 bp, synthetic construct
  source 1..80: mol_type = other DNA
gctcgaagaccctcgctggcccaaaaggtcccgtttgccagatgtacactaatgtcgaccaggacctcgtaggctggccc

SEQ ID NO: 127338 - DNA, 80 bp, synthetic construct
  source 1..80: mol_type = other DNA
agtacgccccgacaatttgggcgcgcatggtcctaatgacacactttttctccgtcttaatggcccaggacatcttggac

SEQ ID NO: 127339 - DNA, 80 bp, synthetic construct
  source 1..80: mol_type = other DNA
gacagctctaaatgacatgggaaagattagaaaagatatacaacaatgggaaccttcaaaaggatggaacgattggacac

SEQ ID NO: 127340 - DNA, 80 bp, synthetic construct
  source 1..80: mol_type = other DNA
gcggtcacccaagtcgtggacttcagtttagaccctacttttaccataaccacacaaactgtcccccaggactccgtgtc

SEQ ID NO: 127341 - DNA, 80 bp, synthetic construct
  source 1..80: mol_type = other DNA
gacaaaaatggttacaccccacatgaccaaggatcgatgaacactctcactgccagttcactggctgcgcgtgcctctgg

SEQ ID NO: 127342 - DNA, 80 bp, synthetic construct
  source 1..80: mol_type = other DNA
gccggggataaaagccaacgcgggcggtctgggttaccacaacaggtgggtgcttcggtgacttgacggtcgccactctc

SEQ ID NO: 127343 - DNA, 80 bp, synthetic construct
  source 1..80: mol_type = other DNA
gggccatcgaatggcttgggacatgatgcagaactggtctcccgctgcagctttggttgtggctcagcttctccggctcc

SEQ ID NO: 127344 - DNA, 80 bp, synthetic construct
  source 1..80: mol_type = other DNA
agatggggtcattttggcaacagcgttcctttaccccactttgatgtttgacatcacgaagctcctgctcggcccacttg

SEQ ID NO: 127345 - DNA, 80 bp, synthetic construct
  source 1..80: mol_type = other DNA
gaggcgagggcatcagccatacctcatgcccctgcggggccatgattacaggtcatgtaaagaatgggtccatgaagatc

SEQ ID NO: 127346 - DNA, 80 bp, synthetic construct
  source 1..80: mol_type = other DNA
ggcgagtgggggacttccactacgtgacgggtatgactgctgacaatctcaaatgcccgtgccaggtcccatcacctgaa

SEQ ID NO: 127347 - DNA, 80 bp, synthetic construct
  source 1..80: mol_type = other DNA
cataggctggcccgctcctcagggttcccgctcattgtcaccctgcacttgcggctcctcggacctttatctggtcacga

SEQ ID NO: 127348 - DNA, 80 bp, synthetic construct
  source 1..80: mol_type = other DNA
gggtgacgaggctaaagtcggcgaggacggcccgccagagcgagacggcgtccgaccgcagcatgacgaggatgttggcg

SEQ ID NO: 127349 - DNA, 80 bp, synthetic construct
  source 1..80: mol_type = other DNA
tgggggtgcaatccctgaagcgccgacgatgcttctgatagctaacgtgtcgtatgtgtgtcatgtatgcgtccatgtcg

SEQ ID NO: 127350 - DNA, 80 bp, synthetic construct
  source 1..80: mol_type = other DNA
agaggtctatcagtgttgtgacctggagcccgaagcccgcaaagtcatcaccgccctcacagatagactctatgtgggcg

SEQ ID NO: 127351 - DNA, 80 bp, synthetic construct
  source 1..80: mol_type = other DNA
tcgacaccctaacctgcggcttcgccgatctcatgggatacatcccgctcgtgggcgcccccgtgggtggcgtcgctaga

SEQ ID NO: 127352 - DNA, 80 bp, synthetic construct
  source 1..80: mol_type = other DNA
gccaacatttctggcaatgttcgcctgggctctatgagaatcacagggcccaagacctgcatgaatacctggcaggggac

SEQ ID NO: 127353 - DNA, 80 bp, synthetic construct
  source 1..80: mol_type = other DNA
tggtggatccagtacttcatagcccatactgaagctcgcctgtaccagtgggtaccgtcccttcgtgtgcgagggtggag

SEQ ID NO: 127354 - DNA, 80 bp, synthetic construct
  source 1..80: mol_type = other DNA
ccgtgctagtggagttctgcctaccagcttcggcaacacaatcacttgttacatcaaggccacagcggccgcaagggccg

SEQ ID NO: 127355 - DNA, 80 bp, synthetic construct
  source 1..80: mol_type = other DNA
tcaactgtcacagagagagacatacggacagaagaatccatctatctggcttgtcaactgcccgaagaggcccggaaagt

SEQ ID NO: 127356 - DNA, 80 bp, synthetic construct
  source 1..80: mol_type = other DNA
gggatgccaccgcgccaccgcctcccgcactgcgggcaggaggcatccggctgccgccgaggccacgccgggccaggctc

SEQ ID NO: 127357 - DNA, 80 bp, synthetic construct
  source 1..80: mol_type = other DNA
cagcaaagccgtacgccacatcaactccgtgtggcaagacttgctggaggacaaccaaacacctattgacactaccatca

SEQ ID NO: 127358 - DNA, 80 bp, synthetic construct
  source 1..80: mol_type = other DNA
aaggtcgagctaggggaggcggcggcaatattcatgacagccaccccaccaggcacttcagatccattcccagagtccaa

SEQ ID NO: 127359 - DNA, 80 bp, synthetic construct
  source 1..80: mol_type = other DNA
ggtgcgccctacctccacggaccgctccaccggtgcctccccctcggaggaaaaggacaatccagctggatggctccaat

SEQ ID NO: 127360 - DNA, 80 bp, synthetic construct
  source 1..80: mol_type = other DNA
accacaaatttaactcttcaggctgccctgaaaggatggccagctgtagaccccttgccgatttcgaccagggctggggc

SEQ ID NO: 127361 - DNA, 80 bp, synthetic construct
  source 1..80: mol_type = other DNA
ggtggccgcaaccatggcaaacgagatggggttcctggaaaaaacgaagaaagatttcgggttgggaagcattgcaaccc

SEQ ID NO: 127362 - DNA, 80 bp, synthetic construct
  source 1..80: mol_type = other DNA
aaatccacatgttggctgccagttacacccaccctggcggtgccgaatgcatccgtgccgatcagaggattccgcaagca

SEQ ID NO: 127363 - DNA, 80 bp, synthetic construct
  source 1..80: mol_type = other DNA
gatataagttccatccagaaaccccccaggggctggccagagtgattcaaaaggctcacgaaagtggaacttgtggtatc

SEQ ID NO: 127364 - DNA, 80 bp, synthetic construct
  source 1..80: mol_type = other DNA
tatacggacgcgccgggccagtcggccaacacaacccaccggaggcggtagccgcgtttggctgtggagtgggtggttcc

SEQ ID NO: 127365 - DNA, 80 bp, synthetic construct
  source 1..80: mol_type = other DNA
cagttagctcccacaaccacattccgggatataaggtccagacaaacggaccctggatgcaggtgccactagaggtgaaa

SEQ ID NO: 127366 - DNA, 80 bp, synthetic construct
  source 1..80: mol_type = other DNA
atttgtctgacgcatgtgttttgcttagctagttcccccaaaagacgctctccgcccagcgatagcaactcctgtaaaga

SEQ ID NO: 127367 - DNA, 80 bp, synthetic construct
  source 1..80: mol_type = other DNA
actccacaaattgggcaaatgtggaagctgcgtttataacatgatgggcaagagagagaaaaaacttggagagtttggca

SEQ ID NO: 127368 - DNA, 80 bp, synthetic construct
  source 1..80: mol_type = other DNA
tgacatgttggtctgcggagacgacctcgtcattatctcggagagtctgggggtctcggaggacgctagtgcgctgagag

SEQ ID NO: 127369 - DNA, 80 bp, synthetic construct
  source 1..80: mol_type = other DNA
cgaaacacaggggacgcaccccgggggcctccgacgacagaaacccaccggtccgccttttttgcacgggtaagcacctt

SEQ ID NO: 127370 - DNA, 80 bp, synthetic construct
  source 1..80: mol_type = other DNA
atgcccattgttatctgggcgcttgtcattaccaccgccgcgtccccggccgatatctcaccctggtcgaggcggtgttg

SEQ ID NO: 127371 - DNA, 80 bp, synthetic construct
  source 1..80: mol_type = other DNA
cgtcggggttgcctgtgtccggttcggcccccaccgcgtgcggcacgcacgaggacgagtccgcgtgctttattggcgtt

SEQ ID NO: 127372 - DNA, 80 bp, synthetic construct
  source 1..80: mol_type = other DNA
ccagctcctaaggcggctgcaccagtggataagctcggattgcaccactccgtgctctggttcctggctaagggacatct

SEQ ID NO: 127373 - DNA, 80 bp, synthetic construct
  source 1..80: mol_type = other DNA
aagtcagaggagacaactatacagcttcatctgttgcaactgaagaatcgctattggctgctgtggccgaaaccgaaact

SEQ ID NO: 127374 - DNA, 80 bp, synthetic construct
  source 1..80: mol_type = other DNA
gcctgctaggctaatagtctacccagacttgagtgtgcgggtttgtgagaagagagccctctatgacatcacgcgcaagc

SEQ ID NO: 127375 - DNA, 80 bp, synthetic construct
  source 1..80: mol_type = other DNA
gcgggcacgtaggcggcaaacgccgtgcaccacggggtacagtcgccggtggcatgagcccgagtctggatttcgacctg

SEQ ID NO: 127376 - DNA, 80 bp, synthetic construct
  source 1..80: mol_type = other DNA
ggcaccacgatgagaaccacccatatagaacctggaactatcacggcagttatgatgtgaagcccacaggctccgccagt

SEQ ID NO: 127377 - DNA, 80 bp, synthetic construct
  source 1..80: mol_type = other DNA
gatccacggctgctagttcccagggcccggagtcccccaatgaggcggatacggcatcggatgctgaatcttacagctcc

SEQ ID NO: 127378 - DNA, 80 bp, synthetic construct
  source 1..80: mol_type = other DNA
aacaggagcattgtgtatgaggctgacgatgtaatcttgcacttacccgggtgtgtgccttgcgtcgcaaccggcggcaa

SEQ ID NO: 127379 - DNA, 80 bp, synthetic construct
  source 1..80: mol_type = other DNA
atgtggcgctcaaagaagacaccaatgggtttttcctatgacacaaggtgttttgattcaactgtcactgagcgtgacat

SEQ ID NO: 127380 - DNA, 80 bp, synthetic construct
  source 1..80: mol_type = other DNA
accttgaggtcatgacaagcacgtgggtccttgcggggggggttttggccgctctagctgcctattgcctagccactggt

SEQ ID NO: 127381 - DNA, 80 bp, synthetic construct
  source 1..80: mol_type = other DNA
actcggcatacagggcgtcgatgagatgggctgcgctgggcgccactgcgtcgtacgccgaggggctatccagcacgaag

SEQ ID NO: 127382 - DNA, 80 bp, synthetic construct
  source 1..80: mol_type = other DNA
gcacaaatgtggagccttatgtacttccaccgaagagatctaagactagcagcaaatgccatttgctcagctgtcccatc

SEQ ID NO: 127383 - DNA, 80 bp, synthetic construct
  source 1..80: mol_type = other DNA
taatgcggaaccagaaacacccaacatggatgtcattggggaaagaataaaaaggatcaaggaggagcataattcaacat

SEQ ID NO: 127384 - DNA, 80 bp, synthetic construct
  source 1..80: mol_type = other DNA
gatcgtgacatcagggaagcctgttccactaccagaccgagaggttctttaccaacaatacgacgagatggaggagtgct

SEQ ID NO: 127385 - DNA, 80 bp, synthetic construct
  source 1..80: mol_type = other DNA
tacggagagttgggactcttgctggaccaaagcaaccccacgccaagcctgaagcccgcaacggcgcagcagatccttcc

SEQ ID NO: 127386 - DNA, 80 bp, synthetic construct
  source 1..80: mol_type = other DNA
cattgtttggaggaatgtcctggttctcacaaatcctcattggaacgttgctgatgtggttgggtctgaacacaaagaat

SEQ ID NO: 127387 - DNA, 80 bp, synthetic construct
  source 1..80: mol_type = other DNA
cagctgtggcatctcggtctctggttcaagaagatgccctgaatgtggtgctgcttcggctggaggatctgtctcggcgc

SEQ ID NO: 127388 - DNA, 80 bp, synthetic construct
  source 1..80: mol_type = other DNA
tttcaagacgtggtggtggatgtggattgcgcggaaaatactaaagaggatcagttggccgaaatcagttaccgttttca

SEQ ID NO: 127389 - DNA, 80 bp, synthetic construct
  source 1..80: mol_type = other DNA
ttttgacagactgcaagtcctagatagtcattatcaggacgtgctcaaggaggctaaggctaaggcatccacagtgaagg

SEQ ID NO: 127390 - DNA, 80 bp, synthetic construct
  source 1..80: mol_type = other DNA
gaaaatggataaacttagattgaagggcgtgtcatactccttgtgtaccgcagcgttcacattcactaagatcccggctg

SEQ ID NO: 127391 - DNA, 80 bp, synthetic construct
  source 1..80: mol_type = other DNA
tttggtcaacaaagggtgttcaaagaaaaggttgacacaaaggctcccgaaccaccactaggagtcgcccaaatcatgga

SEQ ID NO: 127392 - DNA, 80 bp, synthetic construct
  source 1..80: mol_type = other DNA
gcgcaacggtgagaaacgctccatggtgggcacgctttggccggtaagacgggcgcaatcttgtacgctctagatggaaa

SEQ ID NO: 127393 - DNA, 80 bp, synthetic construct
  source 1..80: mol_type = other DNA
gacccggactacgtccctccggtggtacacgggtgccccctgccgcctaccaaggtccctccaataccacctccacggag

SEQ ID NO: 127394 - DNA, 80 bp, synthetic construct
  source 1..80: mol_type = other DNA
gcggccctacaaaagcaatatcgtcgcctgcctccagcactgccggggcaacatctcctttgcgcgacgatacttgctat

SEQ ID NO: 127395 - DNA, 80 bp, synthetic construct
  source 1..80: mol_type = other DNA
aacccgtggctaccactgttagtttcaacaaagaaactgaatctaattgtgtttattctataacctttgactttgcttgg

SEQ ID NO: 127396 - DNA, 80 bp, synthetic construct
  source 1..80: mol_type = other DNA
gtacgtgaaaggtcgccttgtacccgcgtgtacctacatggcactggggatgtggccgttgctcctgacaatcttggccc

SEQ ID NO: 127397 - DNA, 80 bp, synthetic construct
  source 1..80: mol_type = other DNA
cattgacaactctcatcaccccagccgtccaacatgcggtaaccacctcatacaacaactactccctgatggcgatggcc

SEQ ID NO: 127398 - DNA, 80 bp, synthetic construct
  source 1..80: mol_type = other DNA
gtacccccttccaacatctattccggatcctcgagcagatcccacccccgcagatcttacaccaacgccaaacttaagcg

SEQ ID NO: 127399 - DNA, 80 bp, synthetic construct
  source 1..80: mol_type = other DNA
acaagagccgatgttgggtgccagtcactcccaatatagctataaatcaacccggcgctctcactaaggggttgcgagcg

SEQ ID NO: 127400 - DNA, 80 bp, synthetic construct
  source 1..80: mol_type = other DNA
aggcagctatattgatgggacttgacaagggatggccaatatcaaagatggacataggagttccacttctcgccttggtg

SEQ ID NO: 127401 - DNA, 80 bp, synthetic construct
  source 1..80: mol_type = other DNA
ccggctgcggcggtggccgtggcctatgggcctcacggcgcgggtctttcccagcattaccctccccacgtcgcccatca

SEQ ID NO: 127402 - DNA, 80 bp, synthetic construct
  source 1..80: mol_type = other DNA
tacacctgcaccagaacatagtggacatccagtacttgtacgggttggcccctgccctggtctcctgggccgtcaggtgg

SEQ ID NO: 127403 - DNA, 80 bp, synthetic construct
  source 1..80: mol_type = other DNA
ctgccaggcaaccctgccattgcttcactcatgtccttcactgccgccgtcacaagccctctgaccacccaacagaccct

SEQ ID NO: 127404 - DNA, 80 bp, synthetic construct
  source 1..80: mol_type = other DNA
ccgagaccgacgccgcggctcgagtgactgccatactgtcatctctgactgtgacttccctgctccggaggctccacaag

SEQ ID NO: 127405 - DNA, 80 bp, synthetic construct
  source 1..80: mol_type = other DNA
caaaggcggggtcgcacgggcagagggaagccggaggtgtatcgatacgtctcaccaggtgagcggccgtcgggaatgtt

SEQ ID NO: 127406 - DNA, 80 bp, synthetic construct
  source 1..80: mol_type = other DNA
atcacgccatgcgccgcggaagaaagcaagctgcccatcaacgcgttgagcaactctttgctgcgccatcacaacatggt

SEQ ID NO: 127407 - DNA, 80 bp, synthetic construct
  source 1..80: mol_type = other DNA
cagctttcttccaaatggcctatcaggactgtcaccacctgatcacctgggagattcctgacgtccttaactcgttggcc

SEQ ID NO: 127408 - DNA, 80 bp, synthetic construct
  source 1..80: mol_type = other DNA
aggcttaagctcgggaggcagcgccaccgacgacagtatcgccttgtgtgtgtgctggtaatttatacaccgatccgtaa

SEQ ID NO: 127409 - DNA, 80 bp, synthetic construct
  source 1..80: mol_type = other DNA
tggcccaggagcaacttgaaaaggccctagattgccaaatctatggtgcctgttactccattgaaccattggatctacct

SEQ ID NO: 127410 - DNA, 80 bp, synthetic construct
  source 1..80: mol_type = other DNA
cccttcgacagcggagatacaggatccgacgctgggtcgtactcctccatgcctccccttgagggagagccggaggatcc

SEQ ID NO: 127411 - DNA, 80 bp, synthetic construct
  source 1..80: mol_type = other DNA
caccgggcccggagcgtccgcgctaggcttctgtccagaggaggcagggctgccatatgcggcaagtacctcttcaattg

SEQ ID NO: 127412 - DNA, 80 bp, synthetic construct
  source 1..80: mol_type = other DNA
gggggagaattttgcatacttaacagcctatcaggctacagtgtgcgccagatccaaagcacctcccccgtcctgggacg

SEQ ID NO: 127413 - DNA, 80 bp, synthetic construct
  source 1..80: mol_type = other DNA
ttcaagaaggcgtgttccacacaatgtggcacgtcaccaggggagctgtcctcatgtaccaagggaagagactggaacca

SEQ ID NO: 127414 - DNA, 80 bp, synthetic construct
  source 1..80: mol_type = other DNA
cggtcgccgggacgaaggccgcgtcgctgtccagctgctgcgcgagcgccgcgtcgagggcgtcgaagcgctgcagttcg

SEQ ID NO: 127415 - DNA, 80 bp, synthetic construct
  source 1..80: mol_type = other DNA
cacagatatgcacccgcgtgtcgtccgctgctcagggatgagataacattcagtgtggggctctccagctacgttgttgg

SEQ ID NO: 127416 - DNA, 80 bp, synthetic construct
  source 1..80: mol_type = other DNA
caacggccggcccccgtggcggcccggcccgaggccccggcggacccaaggggccccggcccggtgccccacaacggccc

SEQ ID NO: 127417 - DNA, 80 bp, synthetic construct
  source 1..80: mol_type = other DNA
cctagaaatgaactttgtaagggaactgaaactcttcataggcagcttagtcataagtgtgatgggcagaatttaacact

SEQ ID NO: 127418 - DNA, 80 bp, synthetic construct
  source 1..80: mol_type = other DNA
gcaggcagacggcggcaattaccccacccaggagctgccgcagcgcagggcaggcgtcgcacgtgtccgggaccaggcgc

SEQ ID NO: 127419 - DNA, 80 bp, synthetic construct
  source 1..80: mol_type = other DNA
cccgcggcgtcaggtcaggcgggagctcctgcaggtttacctcgcatagacgggtcagggcgcgggctagatccaggtga

SEQ ID NO: 127420 - DNA, 80 bp, synthetic construct
  source 1..80: mol_type = other DNA
gacgtgggatccccggccttatataccccccccgccccacccccgttagaacgcgacgggtgcattcaagatggccctgg

SEQ ID NO: 127421 - DNA, 80 bp, synthetic construct
  source 1..80: mol_type = other DNA
gctaaggttttgattgtgatgctacttttcgccggcgttgacggggaaacccgcaggataggggagcaggcaggccaaac

SEQ ID NO: 127422 - DNA, 80 bp, synthetic construct
  source 1..80: mol_type = other DNA
caccttcgcccgctcccgcgctccctcgagcattgcctccagggagcgcgcgcgctcccgcaaacggacacgcgcatcgg

SEQ ID NO: 127423 - DNA, 80 bp, synthetic construct
  source 1..80: mol_type = other DNA
cagcatcggcctaggcaaggtgctggttgacatcctagcaggctacggagccggcatagccggtgctttggtagccttca

SEQ ID NO: 127424 - DNA, 80 bp, synthetic construct
  source 1..80: mol_type = other DNA
tagatgggcaagtgcgagagaggctgtggaagaccctgtattctgggccctcgtggatgaggagagagagaggcatctcg

SEQ ID NO: 127425 - DNA, 80 bp, synthetic construct
  source 1..80: mol_type = other DNA
gcccgctccgtttttcggtggggtgctgatacggtgccagccctggccccgaacccccgcgcttatggacacaccacacg

SEQ ID NO: 127426 - DNA, 80 bp, synthetic construct
  source 1..80: mol_type = other DNA
ctggaccggggcgttgataacgccttgtagtccagaggaggaaaagttacccatcaaccctctgagcaactccctgttgc

SEQ ID NO: 127427 - DNA, 80 bp, synthetic construct
  source 1..80: mol_type = other DNA
taatgtgtcgactgtgcttgcgcagatggccgagaaaaacttcccgcctcccgcgtcttcgacaacgggatacgggtccg

SEQ ID NO: 127428 - DNA, 80 bp, synthetic construct
  source 1..80: mol_type = other DNA
gcagacgcccctgctgtataggctaggagccgttcaaaatgaggtcaccctcacacaccctataaccaaatacatcatgg

SEQ ID NO: 127429 - DNA, 80 bp, synthetic construct
  source 1..80: mol_type = other DNA
cctcggtggcgtccagcgtctggccccgctggatcagatcccgcaacaggatggccgtggggctggtcgcgatcggtggc

SEQ ID NO: 127430 - DNA, 80 bp, synthetic construct
  source 1..80: mol_type = other DNA
cagaatgtacgtggctggggcagaacaccgcttcaacgctgcttgcaactggaccagaggggagcgctgtgacatcgagg

SEQ ID NO: 127431 - DNA, 80 bp, synthetic construct
  source 1..80: mol_type = other DNA
ctcttcggagagcggcctcgcgcagaccttcggagctccggggctccgccggccgaggccgccctcgccggttcaaccct

SEQ ID NO: 127432 - DNA, 80 bp, synthetic construct
  source 1..80: mol_type = other DNA
gtgggcgtcggacgtcgacgccggtgagcttgtagccgatcccccggggcagaggagagtgggtgacgacgtagctggcg

SEQ ID NO: 127433 - DNA, 80 bp, synthetic construct
  source 1..80: mol_type = other DNA
ttataccagatacaaatggcggccaagacaaatggaaaaaggatgaaaacagtgatgagcataacagaataggcaaaggc

SEQ ID NO: 127434 - DNA, 80 bp, synthetic construct
  source 1..80: mol_type = other DNA
gccgagctccccgtcgatatcgagcgccggttacgcccgatcgaacggaacgtgcacgagatcgcaggcgccctggaggc

SEQ ID NO: 127435 - DNA, 80 bp, synthetic construct
  source 1..80: mol_type = other DNA
gaggaaatctcttgttcctaggccccgccgatgacgtgaaaggcaaagggtgggccctactcgccccgatcacggcatac

SEQ ID NO: 127436 - DNA, 80 bp, synthetic construct
  source 1..80: mol_type = other DNA
gtccatggcgatgatccgaggacaggtgcgcagcaggcgtagcattaacgcatccacgcggcccagttgctgcatcgttg

SEQ ID NO: 127437 - DNA, 80 bp, synthetic construct
  source 1..80: mol_type = other DNA
agacagaggctacctcaagtgccttcagcagcactgcaaatttaacttcgcttgcttcggttaatgaaaccgtcatcgca

SEQ ID NO: 127438 - DNA, 80 bp, synthetic construct
  source 1..80: mol_type = other DNA
tgatccacctgcaccaaaatattgtggacgtacaatacctgtacggcgtagggtctgtggttgcctcctgggccatcaag

SEQ ID NO: 127439 - DNA, 80 bp, synthetic construct
  source 1..80: mol_type = other DNA
tccctgagcccaactataagagggccctgtggagggtgtccgcagaggagtacgtcgaggtagtgaggatgggtgatagc

SEQ ID NO: 127440 - DNA, 80 bp, synthetic construct
  source 1..80: mol_type = other DNA
atgttcgttagcgggatcgaacaccggttcgacgccgcttgcaactggacacgaggggagcgttgcgacctcgacgaccg

SEQ ID NO: 127441 - DNA, 80 bp, synthetic construct
  source 1..80: mol_type = other DNA
ccgcgacaattcgcagagagagaacaggggacatggtgatcagggcagaaggaaaggacgctgccacgcaagtggaagtc

SEQ ID NO: 127442 - DNA, 80 bp, synthetic construct
  source 1..80: mol_type = other DNA
gggcttcgggatcgaccggataaatgcccggaacgcctccggggaccggtgtgccatcaagtcctcgtacgcggaggccg

SEQ ID NO: 127443 - DNA, 80 bp, synthetic construct
  source 1..80: mol_type = other DNA
cttggccttagggggagtgttgatcttcttatccacagccgtctctgctgatgtggggtgctcggtggacttctcaaaga

SEQ ID NO: 127444 - DNA, 80 bp, synthetic construct
  source 1..80: mol_type = other DNA
tgacacacctggtcctgtatatttttagaatggaagacatcaattttgcgtccctggctccgcggcacggcacgcggccg

SEQ ID NO: 127445 - DNA, 80 bp, synthetic construct
  source 1..80: mol_type = other DNA
ctcccacatatgccactcggtgcacacacctgcagaaccgggactttgtttcagggatccaagggacgactagagtctca

SEQ ID NO: 127446 - DNA, 80 bp, synthetic construct
  source 1..80: mol_type = other DNA
agaacatccaggtggccatcaaccaggtccgcgcagtgataggcgaggagaaatatgtcgattacatgggctcactcaag

SEQ ID NO: 127447 - DNA, 80 bp, synthetic construct
  source 1..80: mol_type = other DNA
atgattcgcaccgcccgcagcataaggcgccttgtcctccgggcgcagcagcgcaccctgatctcacttaaatcagcaca

SEQ ID NO: 127448 - DNA, 80 bp, synthetic construct
  source 1..80: mol_type = other DNA
gcgctcccggcggcagcggcacgttggcgtggcgctcgggcaggtcccggtgctgcgccctgagagcgctggcgtgcgcg

SEQ ID NO: 127449 - DNA, 80 bp, synthetic construct
  source 1..80: mol_type = other DNA
atcaaagcgtttgtcccagcgtcttaatggcgggaagggcggagagaaacagaccacgcggacatgggtggtgtttggtg

SEQ ID NO: 127450 - DNA, 80 bp, synthetic construct
  source 1..80: mol_type = other DNA
gtttttacattccagagagctacaaggatcgcatgtattctttcttcagaaacttccagcccatgagtaggcaagttgtt

SEQ ID NO: 127451 - DNA, 80 bp, synthetic construct
  source 1..80: mol_type = other DNA
cccatacaaccggtccaccattaatcaccgtggttgcatacacacactcatgttcaaactttacacgagcggtataccat

SEQ ID NO: 127452 - DNA, 80 bp, synthetic construct
  source 1..80: mol_type = other DNA
ctggcactatggcccgcggccgtgtaccaccgtctcagcttccagtgtatgcggcccggtgtactgctttaccccaagcc

SEQ ID NO: 127453 - DNA, 80 bp, synthetic construct
  source 1..80: mol_type = other DNA
agaccaggctggggaagtccaggttttgtccactgtcacacaatcttttcttggaacatcaatctcaggggttctgtgga

SEQ ID NO: 127454 - DNA, 80 bp, synthetic construct
  source 1..80: mol_type = other DNA
atcaaccccctcagtaacagcctcattagacaccacaatctagtgtactccacttcatccaagagtgcaggtttgaggca

SEQ ID NO: 127455 - DNA, 80 bp, synthetic construct
  source 1..80: mol_type = other DNA
ttaatggagtttgaggaaccacacgccacgaagcagtctgtgatagcattgggctcacaagagggagctctgcatcaagc

SEQ ID NO: 127456 - DNA, 80 bp, synthetic construct
  source 1..80: mol_type = other DNA
cgcagcctggtcgaacgcagacgcgtgttgatggcaggggtacgaagccatacgcgcttctacaaggcgctggccgaaga

SEQ ID NO: 127457 - DNA, 80 bp, synthetic construct
  source 1..80: mol_type = other DNA
tggctaaaggcaaagctcgtgcctgctctgcctggcatcccctttctctcgtgtcaacgggggtttcggggtacttggcg

SEQ ID NO: 127458 - DNA, 80 bp, synthetic construct
  source 1..80: mol_type = other DNA
tgtccccgacgcactacgtgcctgagactgacgcgtcaaaaaatgtgactcagatactcacttctcttaccatcaccagc

SEQ ID NO: 127459 - DNA, 80 bp, synthetic construct
  source 1..80: mol_type = other DNA
cgacagcagcacagccgctccagaaacatctaaccttctttctgatactaacactcctaaaaccggaggtgagctctggg

SEQ ID NO: 127460 - DNA, 80 bp, synthetic construct
  source 1..80: mol_type = other DNA
agatgattgtgttgtgaaacccttagatgacaggtttgcaaacgctctaacagctttaaatgacatgggaaaggtcagga

SEQ ID NO: 127461 - DNA, 80 bp, synthetic construct
  source 1..80: mol_type = other DNA
aactccacgggttgctcagaacggcttggcgcatgcaagcccttggaacacttccagcagggatggggccctataaccca

SEQ ID NO: 127462 - DNA, 80 bp, synthetic construct
  source 1..80: mol_type = other DNA
cacatactcgaggacgcacagggcgcactactgtagacgatgttatcgattccgtagtggcagacgcgcgcaaataccgc

SEQ ID NO: 127463 - DNA, 80 bp, synthetic construct
  source 1..80: mol_type = other DNA
tggcaaattcctcgccgacggaggctgctcaggcggagcctatgacgtcataatatgcgatgaatgccattcagttgatg

SEQ ID NO: 127464 - DNA, 80 bp, synthetic construct
  source 1..80: mol_type = other DNA
ttgctatctcaaggcttctgccgcctgtcaagccgctggcctcaaagactatgacatgttggtgtgcggagacgatttgg

SEQ ID NO: 127465 - DNA, 80 bp, synthetic construct
  source 1..80: mol_type = other DNA
actgagatggttcgtcgagagaaacatggtcacaccagaagggaaggtggtggacctcggttgcggcagagggggctggt

SEQ ID NO: 127466 - DNA, 80 bp, synthetic construct
  source 1..80: mol_type = other DNA
tcggtcacggtcccacatccaaacattacagagacagcgcttcccacgacgggagaaatccccttctatgggaagtgcat

SEQ ID NO: 127467 - DNA, 80 bp, synthetic construct
  source 1..80: mol_type = other DNA
cacgccgaacgtggccgtagtccaacgtggagctctcaccagggaattgcggactcatattgacatcattgtgatgtccg

SEQ ID NO: 127468 - DNA, 80 bp, synthetic construct
  source 1..80: mol_type = other DNA
acagctcaggatgccccgagcgcatgagcgcttgtaaacccatcacccacttcgaccaagggtggggccctatcacttat

SEQ ID NO: 127469 - DNA, 80 bp, synthetic construct
  source 1..80: mol_type = other DNA
gtcggctaggcttatcgtctatcctgatctgggggtgagggtctgcgagaagagggctctctatgacgtagcgcagaaac

SEQ ID NO: 127470 - DNA, 80 bp, synthetic construct
  source 1..80: mol_type = other DNA
ttcctttctgctcccaccactttcatgaattgatcatgaaagatggaagaaagttggtggttccctgcagaccccaggac

SEQ ID NO: 127471 - DNA, 80 bp, synthetic construct
  source 1..80: mol_type = other DNA
cctccacgccgtggacgccccctcccaattcgtcacctggctcgccgtgcgctggctgcggtgtgcggtgggtctcggtg

SEQ ID NO: 127472 - DNA, 80 bp, synthetic construct
  source 1..80: mol_type = other DNA
gcccctcccggggatgctccgcagccggcgtacgacctcgagcacataacatcttgctcatccaatgtctcggtcgcgca

SEQ ID NO: 127473 - DNA, 80 bp, synthetic construct
  source 1..80: mol_type = other DNA
tctccggttctgcgcgctggcgcgcaaggtagccggaggccattacgtgcagatggccatcctcaaggtggtggcgctta

SEQ ID NO: 127474 - DNA, 80 bp, synthetic construct
  source 1..80: mol_type = other DNA
gccattttgccctgcactttctctgacctgcccgctctgtcgactggccttctccacctccaccaaaacatcgtggacgt

SEQ ID NO: 127475 - DNA, 80 bp, synthetic construct
  source 1..80: mol_type = other DNA
cattggggcattctggcgggcctggcgtattatagcatgcagggcaactgggcgaaagtggtgattattatggtgatgtt

SEQ ID NO: 127476 - DNA, 80 bp, synthetic construct
  source 1..80: mol_type = other DNA
gcccccacgtacaactggggggagaatgagactgacgtgatcatcctgaactcgaccaagccgccaggcggcgcttggtt

SEQ ID NO: 127477 - DNA, 80 bp, synthetic construct
  source 1..80: mol_type = other DNA
atgccgatgtcatcccggcccggaggcggggcgaccgacggggagccctgctctctccaaggcccctatcatctctgaag

SEQ ID NO: 127478 - DNA, 80 bp, synthetic construct
  source 1..80: mol_type = other DNA
ttactcacgtgcctcttccaccctgcacttggatttgacattaccaagatactccttgccatcctgggccccctgtacat

SEQ ID NO: 127479 - DNA, 80 bp, synthetic construct
  source 1..80: mol_type = other DNA
aataagtgtttagggttttgcaatttaattaaatatgcaatgtaatttagttgtaaatatttgattgtgtagctttattt

SEQ ID NO: 127480 - DNA, 80 bp, synthetic construct
  source 1..80: mol_type = other DNA
taaaggctaaacccttcagggtgaatctcctctataaacattccagcaccttcaaccatgcccaaataattttcatctcg

SEQ ID NO: 127481 - DNA, 80 bp, synthetic construct
  source 1..80: mol_type = other DNA
cgccctgccagtatgggcaaggccggggtatgacccacccctcctggagacttggaagcagcctgattatgacccccccc

SEQ ID NO: 127482 - DNA, 80 bp, synthetic construct
  source 1..80: mol_type = other DNA
gcattcacggatgctatgaccaggtactcagctccccctggagacgccccgcaacctacttacgaccttgagctcataac

SEQ ID NO: 127483 - DNA, 80 bp, synthetic construct
  source 1..80: mol_type = other DNA
ctggcccgaatggaccaatcatccaaatgtacaccaatgtagacaaagatgtggtggggtggccctcccctccaggcaca

SEQ ID NO: 127484 - DNA, 80 bp, synthetic construct
  source 1..80: mol_type = other DNA
catggcgtgagggccctcgaggacggaataaactttgcaacagggaatttgcccggttgctctttctctatcttccttct

SEQ ID NO: 127485 - DNA, 80 bp, synthetic construct
  source 1..80: mol_type = other DNA
ccaggtgggctacttgcacgcaccaacaggtagcgggaagagcaccaaggtccccgccgcatatgccagtagcaccaagg

SEQ ID NO: 127486 - DNA, 80 bp, synthetic construct
  source 1..80: mol_type = other DNA
agctcacatctcttggccttaatgctgtcgcattctacaggggcgttgacgtgtctgtgattccaacttcaggcgatgtc

SEQ ID NO: 127487 - DNA, 80 bp, synthetic construct
  source 1..80: mol_type = other DNA
cggggtccccaaagacccccatacggctttgggttgccctgacggcgacgggtggtggccgaacgcctcaccgcgcccgg

SEQ ID NO: 127488 - DNA, 80 bp, synthetic construct
  source 1..80: mol_type = other DNA
tcggtcactggttccatgcacgtgcggatcatctgatctgtacctggtcacccggcatgcggacgtcatccccgctcgca

SEQ ID NO: 127489 - DNA, 80 bp, synthetic construct
  source 1..80: mol_type = other DNA
ctatggaccataacataactttagtgggtcccttaaacctgccagttacatggtatgatggagaaggaaataaattctgt

SEQ ID NO: 127490 - DNA, 80 bp, synthetic construct
  source 1..80: mol_type = other DNA
gatcaatcgggtggccagttgcctcaggaaacttggggttccaccgttgagagcctggagacatcgggcccgcgctgttc

SEQ ID NO: 127491 - DNA, 80 bp, synthetic construct
  source 1..80: mol_type = other DNA
cggtcacgccaaacctggccgtgaaacacaccggagctcttacccgcaacataagaactcacattgacgtgatcgtagcg

SEQ ID NO: 127492 - DNA, 80 bp, synthetic construct
  source 1..80: mol_type = other DNA
gctgatacccgtcccgtccagggcctcccccgtgagcagggcgatggcctcggtggccaggctgaaggcggcgttcaggg

SEQ ID NO: 127493 - DNA, 80 bp, synthetic construct
  source 1..80: mol_type = other DNA
cgcgcgcagtcgttgacgctctagaccgtgcaaaaggagagcctgtaagcgggcactcttccgtggtctggtggataaat

SEQ ID NO: 127494 - DNA, 80 bp, synthetic construct
  source 1..80: mol_type = other DNA
tggttgaaggttaaactcctacccgccctaccaggcatccctttcctctcgtgtcaacgagggttcaagggagtctggcg

SEQ ID NO: 127495 - DNA, 80 bp, synthetic construct
  source 1..80: mol_type = other DNA
taccccggagtatgacgatagggagccctccgtaccggcggagtgtcacaggccttcagggcctaagtacccaccggcac

SEQ ID NO: 127496 - DNA, 80 bp, synthetic construct
  source 1..80: mol_type = other DNA
tcaaggacacttgcgggcgctaaacatcctgcgctccaaatgtatacaaatgtggatcaagacctcgttggatggccagc

SEQ ID NO: 127497 - DNA, 80 bp, synthetic construct
  source 1..80: mol_type = other DNA
acatgtgcgaagttctcatgttcggggaagataacaggtaatctggtccaaattgagaaccttgaatacacagtggttgt

SEQ ID NO: 127498 - DNA, 80 bp, synthetic construct
  source 1..80: mol_type = other DNA
cttcaggtaatttttctggaatcgggctcggggtcattctcactcttgtaattctctttatttttatactagcgcttctg

SEQ ID NO: 127499 - DNA, 80 bp, synthetic construct
  source 1..80: mol_type = other DNA
cttcttaacatcctaggagggtgggtggcatcacaactagctccaccctcagcgtccacggcgttcgttgtgagcggatt

SEQ ID NO: 127500 - DNA, 80 bp, synthetic construct
  source 1..80: mol_type = other DNA
ccggagagacccgccccccgccgcccgggcccgcccccggggccggcgcggagtcgggcacggcgccagtgctcgcactt

SEQ ID NO: 127501 - DNA, 80 bp, synthetic construct
  source 1..80: mol_type = other DNA
agcgcgggtataagggggtctggcgggtggacggcatcatgcacactcgctgccactgtggagctgaaatcactggacac

SEQ ID NO: 127502 - DNA, 80 bp, synthetic construct
  source 1..80: mol_type = other DNA
ttctctccacagctggcgcgcaagttgcaaggcgcccataacatcaggagcagatatcttgaagtcgcaattgggcccgg

SEQ ID NO: 127503 - DNA, 80 bp, synthetic construct
  source 1..80: mol_type = other DNA
tgttgaatcatgcaaaagacaacgcagggatgtttttaatcccgcctcatcacgcccgtaaatacctatatagtttaata

SEQ ID NO: 127504 - DNA, 80 bp, synthetic construct
  source 1..80: mol_type = other DNA
tctgctgccgcaagcgtcccaggtcatacaatcatatggtagacccactactcagcttctcttattgaaactcagtcact

SEQ ID NO: 127505 - DNA, 80 bp, synthetic construct
  source 1..80: mol_type = other DNA
aagacggaggccagggccccgggtgcggcgtggaccgtggtatgccactgccggaaaagggcgacgagcgccggctcgga

SEQ ID NO: 127506 - DNA, 80 bp, synthetic construct
  source 1..80: mol_type = other DNA
accgtgattaaaaagcaccaccgacagttcctcggtcatgtccggagtcataatgtaagactcggtaaacacatcaggtt

SEQ ID NO: 127507 - DNA, 80 bp, synthetic construct
  source 1..80: mol_type = other DNA
cttcatcttgtttggaatacctttacccgctttaccggcagagctttttttggtaaggtgtttcagtgaacctgatgttg

SEQ ID NO: 127508 - DNA, 80 bp, synthetic construct
  source 1..80: mol_type = other DNA
tggaatcatgtatgaaggtgttttccacactctctggcacacaactagaggagcagccataatgagtggggagggtcgac

SEQ ID NO: 127509 - DNA, 80 bp, synthetic construct
  source 1..80: mol_type = other DNA
gggggttagaggttggtgattggatagcaaacgtgggatgacggaggccactcgtcgccaacggccagcggtggcccgtg

SEQ ID NO: 127510 - DNA, 80 bp, synthetic construct
  source 1..80: mol_type = other DNA
tgctcaccggaagttggaagaccaacgtcaggccacaattctgtgccactccgctggggagtgcggcctgcgcagcccca

SEQ ID NO: 127511 - DNA, 80 bp, synthetic construct
  source 1..80: mol_type = other DNA
aagaaggtgattgtctggggagcagataccgctgcgtgtggtgacatcataaggtggctgccagtttcggctaggctagg

SEQ ID NO: 127512 - DNA, 80 bp, synthetic construct
  source 1..80: mol_type = other DNA
acagtcacggagagggacatcaagaccgaggaatcaatataccttagctgctcccttcctgagcaggcccgtaccgccat

SEQ ID NO: 127513 - DNA, 80 bp, synthetic construct
  source 1..80: mol_type = other DNA
gataccggtctcgccaaacgtggccgtacagcggcccggcgccctcacgcagggcttgcgggcccacatcgacgtcgtcg

SEQ ID NO: 127514 - DNA, 80 bp, synthetic construct
  source 1..80: mol_type = other DNA
aaacacctgaaggagaaatcggggccgtgactttggacttccccactggaacatcaggctcaccaatagtggacaaaaac

SEQ ID NO: 127515 - DNA, 80 bp, synthetic construct
  source 1..80: mol_type = other DNA
gatgaccagaggagagtcttccgagagctggtgaggaactgtgacctgcctgtttggctctcatggcaagtggctaaggc

SEQ ID NO: 127516 - DNA, 80 bp, synthetic construct
  source 1..80: mol_type = other DNA
tgcgtatggtgttgatgacgcacttctttgggatcttacagtctcaagaaacactccacaaagcgctcgacttcgacatg

SEQ ID NO: 127517 - DNA, 80 bp, synthetic construct
  source 1..80: mol_type = other DNA
tccacatatggcaaatttctcgccgatgggggctgcgctagcggcgcctatgacatcatcatatgcgatgaatgccacgc

SEQ ID NO: 127518 - DNA, 80 bp, synthetic construct
  source 1..80: mol_type = other DNA
actccttacaaacggggtttatcgccgcgttgctgtataagaacaaattcaactctagcggctgcgcggaaaggatggcc

SEQ ID NO: 127519 - DNA, 80 bp, synthetic construct
  source 1..80: mol_type = other DNA
tgggcgcaaattttagagccagtagggtgattgaccctaggagatgtttaaagccagtcattctgacggatggtccagaa

SEQ ID NO: 127520 - DNA, 80 bp, synthetic construct
  source 1..80: mol_type = other DNA
attatgaaataaacgatgcgatattatcaatacaaacaaatgtgcacgccctgatggatacggttaaacttgttgaagtt

SEQ ID NO: 127521 - DNA, 80 bp, synthetic construct
  source 1..80: mol_type = other DNA
gagggctcatgtgttaattaagatctgcagcctagtgcgcggggtgctgcttggtaagtattaccagatggctctgctca

SEQ ID NO: 127522 - DNA, 80 bp, synthetic construct
  source 1..80: mol_type = other DNA
cggggggggccgaggcgaggacaggctccgaaacagaagcggggaccgcggcctcgacgggggttttgcctttgggggtg

SEQ ID NO: 127523 - DNA, 80 bp, synthetic construct
  source 1..80: mol_type = other DNA
tccccctccttgtcccccgcgtaaacgcccccggcggcgcgtccccggtggttgcagggccggcggaagtagttgacgtc

SEQ ID NO: 127524 - DNA, 80 bp, synthetic construct
  source 1..80: mol_type = other DNA
aaccagagtggtcaattgggaagtgatcatcatggacgaagcacattttttagatccggctagcatagcagccagaggct

SEQ ID NO: 127525 - DNA, 80 bp, synthetic construct
  source 1..80: mol_type = other DNA
gcatatcgatttgatcgtggtgtccgccacgttctgctccgctctttacataggggatgtttgtggtgcgattatgatag

SEQ ID NO: 127526 - DNA, 80 bp, synthetic construct
  source 1..80: mol_type = other DNA
cggctgaactctctagggtggcagcaactctcagaaagcttgggatgcctcccttgagagcctggagacagagggctcgc

SEQ ID NO: 127527 - DNA, 80 bp, synthetic construct
  source 1..80: mol_type = other DNA
ctgctctaactccttaatctcatggtttgctaataacactttgtgtaaagctttttaccaacaaaaacttttgtattctg

SEQ ID NO: 127528 - DNA, 80 bp, synthetic construct
  source 1..80: mol_type = other DNA
caagaggctacaccagtgggttaccgaggattgccccatcccatgcagtgactcctggcttcgggacatatgggagtgtg

SEQ ID NO: 127529 - DNA, 80 bp, synthetic construct
  source 1..80: mol_type = other DNA
taatatcttacaaactcttttggcctctaaccaaattttggttgtattggatggcatgggtccaataacggacgtttccc

SEQ ID NO: 127530 - DNA, 80 bp, synthetic construct
  source 1..80: mol_type = other DNA
agtgggacttcgtcgtgacaactgacatttcagagatgggcgccaactttaaagctgaccgtgtcatagattccaggaga

SEQ ID NO: 127531 - DNA, 80 bp, synthetic construct
  source 1..80: mol_type = other DNA
gtgctaagtttaagtgtgtgacaaaactggaaggaaagatagtccaatatgaaaacttaaaatattcagtgatagtcacc

SEQ ID NO: 127532 - DNA, 80 bp, synthetic construct
  source 1..80: mol_type = other DNA
aaatgacggggcggattttttaaaggagttaaccttgagtttaatgtctcgttgttatcctgagtctgtctggtgggctg

SEQ ID NO: 127533 - DNA, 80 bp, synthetic construct
  source 1..80: mol_type = other DNA
gcacaggttcgacgctgcctgcaactggacccgcggggaacgttgtgagcttgatgatcgagacagggtcgagatgagcc

SEQ ID NO: 127534 - DNA, 80 bp, synthetic construct
  source 1..80: mol_type = other DNA
tctcggcgtgctgagtgtcgccggcaagcaggccaaggaggcaacaccaatagtccagtcaaatctacaaaagcttgagc

SEQ ID NO: 127535 - DNA, 80 bp, synthetic construct
  source 1..80: mol_type = other DNA
attgaattcattggcagtggcttggatgatattgagagcgataacgttcaccacaacatctaatgtggtcgtcccgctgc

SEQ ID NO: 127536 - DNA, 80 bp, synthetic construct
  source 1..80: mol_type = other DNA
ccttgactttgactattgtccaggaacaaaagttaccatcacagaggactgtggcaagaggggtccctcaatcagaacta

SEQ ID NO: 127537 - DNA, 80 bp, synthetic construct
  source 1..80: mol_type = other DNA
gaacttctcgccggcgcttacaaagtagtcgtaatcgcggggcagcagcacccgtgccgtgactcgttgcgggtgcccgc

SEQ ID NO: 127538 - DNA, 80 bp, synthetic construct
  source 1..80: mol_type = other DNA
agcggggtcaggtggtgcgtcacgctccggaggtggacgatcgcgcagtagcggcgctcgcggttaaagaaaaagagggc

SEQ ID NO: 127539 - DNA, 80 bp, synthetic construct
  source 1..80: mol_type = other DNA
ggcgcttggtgggcagaggaggtgacggcgaggggctcatctcctgctccggcggatagcgcgctgaaccgtggccccgg

SEQ ID NO: 127540 - DNA, 80 bp, synthetic construct
  source 1..80: mol_type = other DNA
gaatgacccaggataacctgaaatgcccatgtcaagttccatcaccggagtttttcacggagctagacggtgtgagatta

SEQ ID NO: 127541 - DNA, 80 bp, synthetic construct
  source 1..80: mol_type = other DNA
ggttccgtcacggttccacacccgaatattactgagtcagctttgcccactaccggcgagatacccttctatgggaaggc

SEQ ID NO: 127542 - DNA, 80 bp, synthetic construct
  source 1..80: mol_type = other DNA
aatcccccttgaagtcatcaaagggggaagacaccttatcttttgccattctaaaaagaaatgcgacgagcttgccaagc

SEQ ID NO: 127543 - DNA, 80 bp, synthetic construct
  source 1..80: mol_type = other DNA
caccggggcccgtcgctcggggtgctcgttggttggcacgcgcgacgcggcgaatggcctgtcgtaagttctgtgtggtc

SEQ ID NO: 127544 - DNA, 80 bp, synthetic construct
  source 1..80: mol_type = other DNA
gtcagtaccgaggagaccagtgtcgtctgctgttctatgtcgtacacatggacgggagctcttgttaccccatgcgctgc

SEQ ID NO: 127545 - DNA, 80 bp, synthetic construct
  source 1..80: mol_type = other DNA
caattcaaacagaaagccctgggcgtcttgcagacggccggcaggcaggcacaggaagcagctcccgtagtccagtccaa

SEQ ID NO: 127546 - DNA, 80 bp, synthetic construct
  source 1..80: mol_type = other DNA
tccacggtgactgaaagggacatcagggtcgaggaagagatctatcagtgctgtgacctggagcccgaggcccgcagagc

SEQ ID NO: 127547 - DNA, 80 bp, synthetic construct
  source 1..80: mol_type = other DNA
acccctcccacatcaccgccgagacggcagcgcgccgcctggcgcgcggatctcctccatcagaggcaagctcgtctgcc

SEQ ID NO: 127548 - DNA, 80 bp, synthetic construct
  source 1..80: mol_type = other DNA
ggtaagtacctctttaattgggcagtgaagactaagctcaaactcactccattgcgcagcgcagccagcctggatctatc

SEQ ID NO: 127549 - DNA, 80 bp, synthetic construct
  source 1..80: mol_type = other DNA
ccttcgtttcctgacaatcccaccaacagcagggatactaaaaagatggggaacgatcaaaaaatcaaaagctatcaatg

SEQ ID NO: 127550 - DNA, 80 bp, synthetic construct
  source 1..80: mol_type = other DNA
ccgtgtctctggacttttcccctggaacgtcaggatctccaattgtcgacagaaaaggaaaagttgtgggtctttacggt

SEQ ID NO: 127551 - DNA, 80 bp, synthetic construct
  source 1..80: mol_type = other DNA
tccctgtgattcatcatggttgagggagatctgggattgggtttgcaccgtactgactgacttcaaaacatggctcaagg

SEQ ID NO: 127552 - DNA, 80 bp, synthetic construct
  source 1..80: mol_type = other DNA
cgctgcgtccacacacccgtttattcgcgtctccacaaaaatgggacgcacgttcggaccaccctgaggatgcccgccag

SEQ ID NO: 127553 - DNA, 80 bp, synthetic construct
  source 1..80: mol_type = other DNA
catcgtgagttctgtgaacacaacatcaaagatgttgctgaacagatttaccacaaggcacaggaaacccacttatgaga

SEQ ID NO: 127554 - DNA, 80 bp, synthetic construct
  source 1..80: mol_type = other DNA
ggatgtggtaaaagtgacgtttttggtgtgcgccggtgtacacgggaagtgacaattttcgcgcggttttaggcggatgt

SEQ ID NO: 127555 - DNA, 80 bp, synthetic construct
  source 1..80: mol_type = other DNA
gcaattcaaacagaaagtgctcgggttaatacaggctacaaccaaacaagcagaggagcttaagccagccgttcattccg

SEQ ID NO: 127556 - DNA, 80 bp, synthetic construct
  source 1..80: mol_type = other DNA
gtttattaaacgcgtccaagataaggcggtcgcaggcgtcctccataaggccccgggccgtgagtgcgtcctcctccggc

SEQ ID NO: 127557 - DNA, 80 bp, synthetic construct
  source 1..80: mol_type = other DNA
gttgggcggctttgactcccacagtggcggccccgtacgtcggtgctccagttgagtccctacgacaacatgtggacctg

SEQ ID NO: 127558 - DNA, 80 bp, synthetic construct
  source 1..80: mol_type = other DNA
gtggatagtccagcgttcaaaacctcttacaatttgattaaaatcaacattaatagtggcacagcaaacacaaacacgca

SEQ ID NO: 127559 - DNA, 80 bp, synthetic construct
  source 1..80: mol_type = other DNA
tgccacgcaacattcacaatgcgcttgctatcaccagtcagggttccaaattacaatttgataataatggatgaggccca

SEQ ID NO: 127560 - DNA, 80 bp, synthetic construct
  source 1..80: mol_type = other DNA
agtcgctatcatgggagacgcttatggcttccaatactcacccaaacagcgggtggaccgtctgctcaaggtgtggcgct

SEQ ID NO: 127561 - DNA, 80 bp, synthetic construct
  source 1..80: mol_type = other DNA
ttctcgtcaaatcatggccatactctcttccttgaccgtaaccagccttctgcgcaaattacacgagtggatcaacacag

SEQ ID NO: 127562 - DNA, 80 bp, synthetic construct
  source 1..80: mol_type = other DNA
aaagcgttcgatgatttctccgcggcgacgacgcatggtttcagtgacggcgtgaccgttctctcggggtcgcagctcga

SEQ ID NO: 127563 - DNA, 80 bp, synthetic construct
  source 1..80: mol_type = other DNA
gatccctcccacattacagcagagacggctaagcgtaggctggctagagggtctcccccctctttagccagctcatcagc

SEQ ID NO: 127564 - DNA, 80 bp, synthetic construct
  source 1..80: mol_type = other DNA
cgagctgttgttcgtccagccccgcgaaaataacgtcgaggtcgtcgtcgggaaaatcgtccgggcccccgtcccgcggc

SEQ ID NO: 127565 - DNA, 80 bp, synthetic construct
  source 1..80: mol_type = other DNA
atgccacctcttgaaggtgagcctggagaccccgatttcgattcggggtcatgggccacggtcagcgaagaagagggtga

SEQ ID NO: 127566 - DNA, 80 bp, synthetic construct
  source 1..80: mol_type = other DNA
cggatctcggcctaattggggcccaaatgacccccggcgaaggtctcgcaacttgggtaaggtcatcgataccctcacgt

SEQ ID NO: 127567 - DNA, 80 bp, synthetic construct
  source 1..80: mol_type = other DNA
gctcgtgggcccgcgagcgggccgaccgggctcggttccggcgccgggtgacggaggccgaggcggtcatcgggccgtgc

SEQ ID NO: 127568 - DNA, 80 bp, synthetic construct
  source 1..80: mol_type = other DNA
agatgttcgcgtcggtgagcggagaggaaacagatttcctttttggaggataataacttaacttgactgcgaacagtttt

SEQ ID NO: 127569 - DNA, 80 bp, synthetic construct
  source 1..80: mol_type = other DNA
agaaatccgtcgcaagttggtgatgagtactgttatggggggcacacgaatgaagacgactcgaacttcgcccattggac

SEQ ID NO: 127570 - DNA, 80 bp, synthetic construct
  source 1..80: mol_type = other DNA
ctcactggaagacgtgccagttaaagctctaagaaaaaagtgctccaatccaaatataatccaatccgacttataacgac

SEQ ID NO: 127571 - DNA, 80 bp, synthetic construct
  source 1..80: mol_type = other DNA
ctttcaaacctctaattggtattttagctttgatactgataatctttattaactttataataattaacaccttacagtaa

SEQ ID NO: 127572 - DNA, 80 bp, synthetic construct
  source 1..80: mol_type = other DNA
gagtcgtgagtttgtttcgtcttcatcctcttcctcgtcgtggggatcgtcatcggaggatgaagacgatgaaccccggc

SEQ ID NO: 127573 - DNA, 80 bp, synthetic construct
  source 1..80: mol_type = other DNA
agcgcggtgtggccggcgccgcgcgggtcgttaacaaggtgttgggtgaggacgacgagaccaaggccgggtcggccgcc

SEQ ID NO: 127574 - DNA, 80 bp, synthetic construct
  source 1..80: mol_type = other DNA
taccacattccttatgcttactagtctcgcaactctgacttctgctcgctcacacctcactgtaactataggttcaaact

SEQ ID NO: 127575 - DNA, 80 bp, synthetic construct
  source 1..80: mol_type = other DNA
ttgccaataagtcccctgagcaacggcctattacggcaccacaacctggtgtactccaccacctcccgcagcgccccttt

SEQ ID NO: 127576 - DNA, 80 bp, synthetic construct
  source 1..80: mol_type = other DNA
ctggactgtctatcacggggccggaacaaggaccatcgcgtcacccaagggtcccgtcatccagatgtacactaacgtgg

SEQ ID NO: 127577 - DNA, 80 bp, synthetic construct
  source 1..80: mol_type = other DNA
cggtaggcccgggaccagcggtctcggtcgttgagggtcctgtgtattttttccaggacgtggtaaaggtgactctggat

SEQ ID NO: 127578 - DNA, 80 bp, synthetic construct
  source 1..80: mol_type = other DNA
agaacggcattgaaacacctgaacggatttaaacgtgacctcggatccatgctagacaccatcaaccggcggccaagcaa

SEQ ID NO: 127579 - DNA, 80 bp, synthetic construct
  source 1..80: mol_type = other DNA
cgcgcgttcattaacaccctgcacctgtggctcctcggacctctatttggtcacgaggcatgccgatgtcattcccgtgc

SEQ ID NO: 127580 - DNA, 80 bp, synthetic construct
  source 1..80: mol_type = other DNA
cggacgtgttcttgctggcctctttgaggccccccaaaggccagtggtttggatgtgtgtggatgaatagtacagggttt

SEQ ID NO: 127581 - DNA, 80 bp, synthetic construct
  source 1..80: mol_type = other DNA
ggtggcaatatcacaagggtggaggctgagaacaaggtcgtgatacttgactcctttgagcctctcagggctgaggagga

SEQ ID NO: 127582 - DNA, 80 bp, synthetic construct
  source 1..80: mol_type = other DNA
caaggtgtggtaaatatttaaaaaacagtttccccacaagagccgagtcttgtatacaatattcaccaataattcctcgt

SEQ ID NO: 127583 - DNA, 80 bp, synthetic construct
  source 1..80: mol_type = other DNA
aggcgcacgtccgtcgcctggccctcgaagacgggcgggacgaggctgacgggatccccgttgcagaggtcgacggtgga

SEQ ID NO: 127584 - DNA, 80 bp, synthetic construct
  source 1..80: mol_type = other DNA
ctatctggccaccgtcagcgatctctccaccaaagctgcgtgcccgactatgggagaagctcacaatgacaaacgtgctg

SEQ ID NO: 127585 - DNA, 80 bp, synthetic construct
  source 1..80: mol_type = other DNA
ctgtgaatgaagccttggcagcggctggcttggtgggagtgctagcagggctagccttccaagacatggaaaactttttg

SEQ ID NO: 127586 - DNA, 80 bp, synthetic construct
  source 1..80: mol_type = other DNA
ccgaccgagagatcatgtaccagcagtatgatgagatggaagagtgcactagtcgcattccatatctcgtcgaggggcag

SEQ ID NO: 127587 - DNA, 80 bp, synthetic construct
  source 1..80: mol_type = other DNA
atactctccacacgaactcaatcgggtgacgggaaccctcaggaaacttggggtgcccccgttgagggcgtggagacatc

SEQ ID NO: 127588 - DNA, 80 bp, synthetic construct
  source 1..80: mol_type = other DNA
ctcatttcagaaccatgaaggctttcacagcttgcgttctgattagcctagtcacacttagtttagctgcttacactcaa

SEQ ID NO: 127589 - DNA, 80 bp, synthetic construct
  source 1..80: mol_type = other DNA
ccaggtactctggtagacttgctcgccgggggtcattggggtgtcctcgtaggagtggcctattacagcatgcaggctaa

SEQ ID NO: 127590 - DNA, 80 bp, synthetic construct
  source 1..80: mol_type = other DNA
cgtgtggcggtcagatcgtgggtggagtatacttgttgccgcgcaggggcccacgcttgggtgtgcgcgcgacaaggaag

SEQ ID NO: 127591 - DNA, 80 bp, synthetic construct
  source 1..80: mol_type = other DNA
cgcggcccggggcttttcgtctgcggtgtcggtggcgtgctgatcacgtggagggttaacaggcgaatgggagctcgtgt

SEQ ID NO: 127592 - DNA, 80 bp, synthetic construct
  source 1..80: mol_type = other DNA
aacggccgcgcggatcatctcatattgttcctcggggcgcgctccccagccacatatagccccgagaagagaagccatcg

SEQ ID NO: 127593 - DNA, 80 bp, synthetic construct
  source 1..80: mol_type = other DNA
gatagacgctaaccttctatggaggcaagagatgggtagcaatatcactcgggtagagtccgagacgaaggtggtgatcc

SEQ ID NO: 127594 - DNA, 80 bp, synthetic construct
  source 1..80: mol_type = other DNA
tgtggatgctacctccattctcggcatcggaacggtccttgatcaagcagagacagccggggtcagactaactgtgctgg

SEQ ID NO: 127595 - DNA, 80 bp, synthetic construct
  source 1..80: mol_type = other DNA
gtaccgttcaacattgctggatatgcacttcttacctacatagtagcgcatgttacaggacttaaaaccggagatttaat

SEQ ID NO: 127596 - DNA, 80 bp, synthetic construct
  source 1..80: mol_type = other DNA
ccgtcgccatcgccacgcacgtgcacacagagatgcaccgcctactggcctcggagtgggccgacgcgggctcgggcccc

SEQ ID NO: 127597 - DNA, 80 bp, synthetic construct
  source 1..80: mol_type = other DNA
catgatactccagcatgcatggagagtgggctgcaccatattggcagcagtttctgtatcaccactcctcttgacttcct

SEQ ID NO: 127598 - DNA, 80 bp, synthetic construct
  source 1..80: mol_type = other DNA
atcaagggaaggagacacttgatcttctgccattcaaagaaaaagtgtgacgagctcgcggcggcccttcggtgcatggg

SEQ ID NO: 127599 - DNA, 80 bp, synthetic construct
  source 1..80: mol_type = other DNA
gccaagcagcttgtccgatctaggcgctgcggccccgcggtcagatgctagtagcccatttccaagcttgatagggtctc

SEQ ID NO: 127600 - DNA, 80 bp, synthetic construct
  source 1..80: mol_type = other DNA
gctgcgttgggccagttggtccatcccgagactgagacactctggacaatgccaatggcgtgtggtatggcgggactcgt

SEQ ID NO: 127601 - DNA, 80 bp, synthetic construct
  source 1..80: mol_type = other DNA
ctctgctatacagactgggcgccgttcagaatgaagtcaccctgacgcacccagtcaccaagtacatcatgacatgcatg

SEQ ID NO: 127602 - DNA, 80 bp, synthetic construct
  source 1..80: mol_type = other DNA
ggaaatggaactcctccaagccaacctcctctggaagcacgaaatgggaagccacatccctcgagtccaatcagaaaaca

SEQ ID NO: 127603 - DNA, 80 bp, synthetic construct
  source 1..80: mol_type = other DNA
atctcttctgctggtgtactatgggaggcaatatgactcgcatagagtctgagtctaaggtgctcatggtcgactccttc

SEQ ID NO: 127604 - DNA, 80 bp, synthetic construct
  source 1..80: mol_type = other DNA
cctgtttcgcgaccgcgagggagaggagcccgaggagatgcgggatcgaaagttccacgcagggcgcgagttgcggcatg

SEQ ID NO: 127605 - DNA, 80 bp, synthetic construct
  source 1..80: mol_type = other DNA
ggtggaggtgggtccgtgggggtgtccagatcaataacgacaaacggcccctcgttcctaccagacaagctatcgtagtg

SEQ ID NO: 127606 - DNA, 80 bp, synthetic construct
  source 1..80: mol_type = other DNA
tatcttcgtgtcgtccaccaacaccgggaaggccagtacgagctttttgtacaacctccgcggggccgccgacgagcttc

SEQ ID NO: 127607 - DNA, 80 bp, synthetic construct
  source 1..80: mol_type = other DNA
tcggcattacgcgtggccaatgaggtcaatgagctacgcattgaatacgaatccgctataaaatccgggttttctgcctt

SEQ ID NO: 127608 - DNA, 80 bp, synthetic construct
  source 1..80: mol_type = other DNA
gccgctgacgtaaaggccaaggtctaaaaatacccgccaacacgcccagaaaccggtgacacactaaaaaaatacgtaca

SEQ ID NO: 127609 - DNA, 80 bp, synthetic construct
  source 1..80: mol_type = other DNA
tgcttatggtgggagaaaaacctatcaccgtcacccagcactcggcagaaacagagggctgcctgcacttcccctatcag

SEQ ID NO: 127610 - DNA, 80 bp, synthetic construct
  source 1..80: mol_type = other DNA
tttaggaagcatcctgaggccacctatattaaatgtggagctgggccctggctaactcccaattgcatggtccattaccc

SEQ ID NO: 127611 - DNA, 80 bp, synthetic construct
  source 1..80: mol_type = other DNA
cggggcatcggatggcgtgggacatgatgatgaattggtcgccgaccgcaaccatggtcttggcctacttgatgcgtgtc

SEQ ID NO: 127612 - DNA, 80 bp, synthetic construct
  source 1..80: mol_type = other DNA
cccgtcgtaggcgctcccctagggggcgtcgccagggccctggcgcacggcgtcagggtcctggaggacggtgtgaacta

SEQ ID NO: 127613 - DNA, 80 bp, synthetic construct
  source 1..80: mol_type = other DNA
tgaagaattaaaaaatgacgatggtagcaataaaggagtcggtttatgtgtgagaattggagaaggaggtggtttaactt

SEQ ID NO: 127614 - DNA, 80 bp, synthetic construct
  source 1..80: mol_type = other DNA
tgatgatggtctccagccgccccatggccgtggggaccgcctggtccacgtactgcagggtctcgagttcggccatgacg

SEQ ID NO: 127615 - DNA, 80 bp, synthetic construct
  source 1..80: mol_type = other DNA
gaccaccgtgtcggccaggcccagcagccgctgcaggatgagccccgtcgccagcacggcgcgcgcggccgccgcgtcgt

SEQ ID NO: 127616 - DNA, 80 bp, synthetic construct
  source 1..80: mol_type = other DNA
gtgggtcctagctggaggagtcctggcagccgtcgccgcatattgcctggcgactggatgcgtttccatcatcggccgct

SEQ ID NO: 127617 - DNA, 80 bp, synthetic construct
  source 1..80: mol_type = other DNA
ggcgcaagtgttgccttgcgagccttcttcttgggagggagcggaggcacctcctgctcgcgctcggggctcatctcccg

SEQ ID NO: 127618 - DNA, 80 bp, synthetic construct
  source 1..80: mol_type = other DNA
tgccatgacaggtctcacgacccttttcactcaaggggccaagcagaacctccagctgatcaacaccaatggcagctggc

SEQ ID NO: 127619 - DNA, 80 bp, synthetic construct
  source 1..80: mol_type = other DNA
ccctggccatcccgaacgtatcggttcccgtccggtggttccgccgccacgtggacctcctggtgggagccgcggcgttc

SEQ ID NO: 127620 - DNA, 80 bp, synthetic construct
  source 1..80: mol_type = other DNA
tacaggcagcactacctgcatcgttaatcggacctattctagacagattctgcttctctattcccaacccccataaataa

SEQ ID NO: 127621 - DNA, 80 bp, synthetic construct
  source 1..80: mol_type = other DNA
aagcacaggaccagcttgaaaaagcccttgactgtgagatctacggggctcaacactccattgaaccgcttgacctacct

SEQ ID NO: 127622 - DNA, 80 bp, synthetic construct
  source 1..80: mol_type = other DNA
aaaacgcaatgttgaagtaactcacttcgcatacccggcagtgaatcttccgccaaaggttatgagcgcagtaatgaatc

SEQ ID NO: 127623 - DNA, 80 bp, synthetic construct
  source 1..80: mol_type = other DNA
tacttggtggggtcccagttgccctgcgagcccgagccagacgtagctgtactgacatcaatgcttacagacccctccca

SEQ ID NO: 127624 - DNA, 80 bp, synthetic construct
  source 1..80: mol_type = other DNA
cgcatcgcgtacagtcaccaacattctaagctcgcttaccatcaccagtctcctccgtaagctccatgagtggatcaaca

SEQ ID NO: 127625 - DNA, 80 bp, synthetic construct
  source 1..80: mol_type = other DNA
tggtgaccaatgactgctccaatgacagcatcacttggcagctcgaggctgcggttctccacgtccccgggtgcgtcccg

SEQ ID NO: 127626 - DNA, 80 bp, synthetic construct
  source 1..80: mol_type = other DNA
atgacatgcatgtccgctgatttagaagtcatcaccagcgcgtgggtactcgcggggggaatccttgctgctctggctgc

SEQ ID NO: 127627 - DNA, 80 bp, synthetic construct
  source 1..80: mol_type = other DNA
cggtcacccaggtggttgactttagtcttgaccctaccttttcaatcgagaccacaacggtgcctcaggacgcagtgtcc

SEQ ID NO: 127628 - DNA, 80 bp, synthetic construct
  source 1..80: mol_type = other DNA
tgcgttcgcttcccgagggaaccacgtgtcgcctacccactacatacaggaagatgacgcgtccaagcgtgtcatgagtg

SEQ ID NO: 127629 - DNA, 80 bp, synthetic construct
  source 1..80: mol_type = other DNA
accatggtagctacgaaacaaaacaaactggatcagcatcatccatggtcaacggagtggtcaggctgctgacaaaacct

SEQ ID NO: 127630 - DNA, 80 bp, synthetic construct
  source 1..80: mol_type = other DNA
gcaaggatgatgcaagttctgccgctaacctcacacaacagtccatgccaaacagacccaactacatcggtttcagggac

SEQ ID NO: 127631 - DNA, 80 bp, synthetic construct
  source 1..80: mol_type = other DNA
gatcaccggtggaaatacgtcttcagcacgtcgcaatcgcgtaccaaacacatcacgcatatgattaatttgttcaattg

SEQ ID NO: 127632 - DNA, 80 bp, synthetic construct
  source 1..80: mol_type = other DNA
tagacgctgagaccaggatcggcacggttgcgggccagagcactcgtagtttcgtttcgctctttagcccggggccgagc

SEQ ID NO: 127633 - DNA, 80 bp, synthetic construct
  source 1..80: mol_type = other DNA
tgggtgcgccctacctcccggcaagccgccccccgttcccccgcctaggaggaaacgcatggtcgtgcttaccgagtcta

SEQ ID NO: 127634 - DNA, 80 bp, synthetic construct
  source 1..80: mol_type = other DNA
tgatgaataaccaacggaaaaaggcgagaagtacgcctttcaatatgctgaaacgcgagagaaaccgcgtgtcaactgtg

SEQ ID NO: 127635 - DNA, 80 bp, synthetic construct
  source 1..80: mol_type = other DNA
tgtcagcgcaggggcgcccggttctttttgtcaagaccgacctgtccggtgccctgaatgaactgcaggacgaggcagcg

SEQ ID NO: 127636 - DNA, 80 bp, synthetic construct
  source 1..80: mol_type = other DNA
cccgtacctccccctgggagatgggcccaccgtcccacccaagggtgcgggtggctcatcggcatctgttcggtattggt

SEQ ID NO: 127637 - DNA, 80 bp, synthetic construct
  source 1..80: mol_type = other DNA
tcgcggagccagcgacgaggacggactggtagaggtaggttgggcatatataggtatgtttctagcggcgagagagcttc

SEQ ID NO: 127638 - DNA, 80 bp, synthetic construct
  source 1..80: mol_type = other DNA
agtcgccccatcctacggaatgcgatgcgtaggagtagggaacagagactttgtggaaggagtctcgggtggagcatggg

SEQ ID NO: 127639 - DNA, 80 bp, synthetic construct
  source 1..80: mol_type = other DNA
cactgattggttgtgggaatttctgaaaagagaaaagaaacccaggatgtgcaccagagaagagttcatcagcaaagtca

SEQ ID NO: 127640 - DNA, 80 bp, synthetic construct
  source 1..80: mol_type = other DNA
gagggacaggcccagacgaccgcgtggtcgccaactatgtacgaagcgagctccgacaacgcggcctgcaggacgtgcgt

SEQ ID NO: 127641 - DNA, 80 bp, synthetic construct
  source 1..80: mol_type = other DNA
caccgttggggggtacgaccccgagcccgccgaggaccccgtgtacagcaccgtccgccgttggtagctgtttggttccg

SEQ ID NO: 127642 - DNA, 80 bp, synthetic construct
  source 1..80: mol_type = other DNA
cgaccatctagcgccgatgcaacactgggccgcagctggtcttaaggacttagcagtggccactgagcctgtaatattta

SEQ ID NO: 127643 - DNA, 80 bp, synthetic construct
  source 1..80: mol_type = other DNA
cctgtgcgggactcagctttcccagcgcggcgccgcgctcggttcccagctcggggaccgagcgccagggcgccaggcgt

SEQ ID NO: 127644 - DNA, 80 bp, synthetic construct
  source 1..80: mol_type = other DNA
tctgctcatctgtgcctgtcgattgggtcccaacagggaaaacaacctgctcgattcacgggaaaggagagtggatgacc

SEQ ID NO: 127645 - DNA, 80 bp, synthetic construct
  source 1..80: mol_type = other DNA
ggaagaaccatattgaaggagaatatcaaatatgaggttgccatttttgtgcacggaccaacgactgtggagtcacatgg

SEQ ID NO: 127646 - DNA, 80 bp, synthetic construct
  source 1..80: mol_type = other DNA
agttaaaactactaacaatacagaatgggaaaaagacactgcagtatctgaacacaatcagatatgcaaaggcaacgtgt

SEQ ID NO: 127647 - DNA, 80 bp, synthetic construct
  source 1..80: mol_type = other DNA
tgttcacgcccggcgagcggtcctcggtcaggatgaaacgtagctatgacgaggtgtacggcgacgacgacatcctggac

SEQ ID NO: 127648 - DNA, 80 bp, synthetic construct
  source 1..80: mol_type = other DNA
acagcactgctctgaactgcaatgacagttccaaaactggcttccttaaggccttgttctataccagggagttcaactca

SEQ ID NO: 127649 - DNA, 80 bp, synthetic construct
  source 1..80: mol_type = other DNA
ggtatatggccgctcttattactccttttgtgcctgccgcatcgagcatttgccatggacaatgagcaggctgcctctgt

SEQ ID NO: 127650 - DNA, 80 bp, synthetic construct
  source 1..80: mol_type = other DNA
tagtacaccagccccctcttatgcttactcgcgcgccttgtggcgggtagcttccgatagctacgtcgaggtacgcaaag

SEQ ID NO: 127651 - DNA, 80 bp, synthetic construct
  source 1..80: mol_type = other DNA
ggactttgtcactggcacccaggggactacaagagttaccttggtgctggagctgggtggatgcgtaaccataaccgctg

SEQ ID NO: 127652 - DNA, 80 bp, synthetic construct
  source 1..80: mol_type = other DNA
cacatcaaccgcacagccttaaactgcaatgacagcttgaataccggcttcatcgcatccttgttccactacgggaaatt

SEQ ID NO: 127653 - DNA, 80 bp, synthetic construct
  source 1..80: mol_type = other DNA
cagggtgaattcacaatatccccaaataataccccgcagttaggacctcatttaaaccctttcctctcccatctttctca

SEQ ID NO: 127654 - DNA, 80 bp, synthetic construct
  source 1..80: mol_type = other DNA
ctgtggttgcttcatgctagtgaaaagcgtggctgtgattaagcataacatggtgtgtggcaactgcgaggacagggcct

SEQ ID NO: 127655 - DNA, 80 bp, synthetic construct
  source 1..80: mol_type = other DNA
tctcctgagccctaggccaatatccaccctcaagggctcctctggcggtccactgttatgcccctcgggacacgctgtcg

SEQ ID NO: 127656 - DNA, 80 bp, synthetic construct
  source 1..80: mol_type = other DNA
ctcgggttgctccagacggcatccaagcaagcagagacgatcactcccgccgtccactccaattggcaaaaactcgagtc

SEQ ID NO: 127657 - DNA, 80 bp, synthetic construct
  source 1..80: mol_type = other DNA
gcactcctctcgtgcctaactgtcccggcttcggcacagcactaccggaacatctcgggcatctatcacgtcaccaatga

SEQ ID NO: 127658 - DNA, 80 bp, synthetic construct
  source 1..80: mol_type = other DNA
gacggcacgctgattgaagcagaagcctgcgatgtcggtttccgcgaggtgcggattgaaaatggtctgctgctgctgaa

SEQ ID NO: 127659 - DNA, 80 bp, synthetic construct
  source 1..80: mol_type = other DNA
ggcccggccctgcccatttgggcacggccggactacaaccccccgttgctggagacgtggaaaaagccggactacaaacc

SEQ ID NO: 127660 - DNA, 80 bp, synthetic construct
  source 1..80: mol_type = other DNA
aggaagttcagaagcgtgtgaccacaggctgatgtcagctgcaattaaagaccagaaagctgtgcatgctgacatgggtt

SEQ ID NO: 127661 - DNA, 80 bp, synthetic construct
  source 1..80: mol_type = other DNA
cagctttattgatgaaaagaaaatgccttaattaaatttctttatacaaatcagcatggtgccaaaaattgcttcacttg

SEQ ID NO: 127662 - DNA, 80 bp, synthetic construct
  source 1..80: mol_type = other DNA
tctgagggtgccaaccagtggatgaacaggcttatagcgtttgcctcacggggcaatcacgtgtcccccacgcactatgt

SEQ ID NO: 127663 - DNA, 80 bp, synthetic construct
  source 1..80: mol_type = other DNA
tcgaacacccatctcttctcaagatttaaatacaaacaccttttcgagagatgctctctttggagtttagccgatagcat

SEQ ID NO: 127664 - DNA, 80 bp, synthetic construct
  source 1..80: mol_type = other DNA
atcgtctatgaggctgacatgatcatcttgcacctgcccgggtgtgtcccatgcatcaagacagggaacgaatctaggtg

SEQ ID NO: 127665 - DNA, 80 bp, synthetic construct
  source 1..80: mol_type = other DNA
tccatgtcctactcttggacgggggccttggttacgccatgcgcagccgaggagaacaagctaccaatcaaccccctgag

SEQ ID NO: 127666 - DNA, 80 bp, synthetic construct
  source 1..80: mol_type = other DNA
ccttttcatctggtggctccagtacttcctgaccagggcggaagccatgatacgcgtgtgggtcccctccctccaagtca

SEQ ID NO: 127667 - DNA, 80 bp, synthetic construct
  source 1..80: mol_type = other DNA
gctggtgctgctcattggccaagccgaagccgccctggaaaacctgatcgtgcttaacgcagtgtctgctgctagcacct

SEQ ID NO: 127668 - DNA, 80 bp, synthetic construct
  source 1..80: mol_type = other DNA
tgcctggttgactacccctacaggctatggcactacccgtgcacacagaacttcaccctccataaagtgcgcaccttcgt

SEQ ID NO: 127669 - DNA, 80 bp, synthetic construct
  source 1..80: mol_type = other DNA
cgtccgcggccgcttgcgtggcgatgtccccccacgtctcgggcccctgccccccgggcccgcggcgacggtcttcgtcc

SEQ ID NO: 127670 - DNA, 80 bp, synthetic construct
  source 1..80: mol_type = other DNA
tgtcttgcatggacaggcatgagcttcactgggacctgaagctggaaagcaacatcatctagatgcactaaccacctgga

SEQ ID NO: 127671 - DNA, 80 bp, synthetic construct
  source 1..80: mol_type = other DNA
cgctctatgttagcgcagagaccacgatggccactccctcgatgatgccgcagtggtcttacatgcacatcgccggtcag

SEQ ID NO: 127672 - DNA, 80 bp, synthetic construct
  source 1..80: mol_type = other DNA
tgcacacagcgttgactggggcgacagaaatccagacgtcaggaacgacaacaatcttcgcaggacacctgaaatgcaga

SEQ ID NO: 127673 - DNA, 80 bp, synthetic construct
  source 1..80: mol_type = other DNA
gacactcctgttgcttggctttacgcagccaccgccgctttggtatttgtatctacttgccttggagtaaaattgtattt

SEQ ID NO: 127674 - DNA, 80 bp, synthetic construct
  source 1..80: mol_type = other DNA
ggccgtcttatctggtggaaccagtatgccatatgcaggggtgaggccgccttgcaagtatgggtcccccccctgcttgt

SEQ ID NO: 127675 - DNA, 80 bp, synthetic construct
  source 1..80: mol_type = other DNA
gttggtgctaaataccatggcccccacgagtcccgcggcgcgcgccaggtacgccccgacggcgttggcgcgggccgcgg

SEQ ID NO: 127676 - DNA, 80 bp, synthetic construct
  source 1..80: mol_type = other DNA
gtggagatctggacaaaagaaggagaaagaaagaaactaagaccccgctggctggatgctagaacatactcagacccact

SEQ ID NO: 127677 - DNA, 80 bp, synthetic construct
  source 1..80: mol_type = other DNA
ccaccctgagcccaccacggacgaggatgacgacgacctggacgacggtgaggcgtgtggcggcgaggaccctggtggag

SEQ ID NO: 127678 - DNA, 80 bp, synthetic construct
  source 1..80: mol_type = other DNA
accgctacgcgccaccctgcaaccccctcctaagggaggaggtctgcttctccgtggggctgcactcctttgtggtggtg

SEQ ID NO: 127679 - DNA, 80 bp, synthetic construct
  source 1..80: mol_type = other DNA
gagatgcagttgccaccaggggacaacatcatctatgtgggagaccttagccagcagtggtttcagaaaggtagcactat

SEQ ID NO: 127680 - DNA, 80 bp, synthetic construct
  source 1..80: mol_type = other DNA
tattgggaaaactttggggtgggattttcagatggacagattgagtaaaaatttgttttttctgtcttgcagctgtcatg

SEQ ID NO: 127681 - DNA, 80 bp, synthetic construct
  source 1..80: mol_type = other DNA
cgtcctcgctctgctcgtcactggaatggtcaggattgagagcctcgtgcgctatgtggtagcggtggggattgcgttcc

SEQ ID NO: 127682 - DNA, 80 bp, synthetic construct
  source 1..80: mol_type = other DNA
atcatccagggagtgagggcggccacttgtggacgctacctcttcaactgggcggtgaagacaaagctcaaactcactcc

SEQ ID NO: 127683 - DNA, 80 bp, synthetic construct
  source 1..80: mol_type = other DNA
tcggaggcgacacaattatctgaaattaaacccccacttatagaagtatcggataataacacatctaacctaacaaaaaa

SEQ ID NO: 127684 - DNA, 80 bp, synthetic construct
  source 1..80: mol_type = other DNA
aacaccaggtgggaaatgacacacagggagtcacggttgagataacaccccaggcatcaaccgttgaagctgtcttgcct

SEQ ID NO: 127685 - DNA, 80 bp, synthetic construct
  source 1..80: mol_type = other DNA
ccctgcgtgagagaggggaatcagtcacgctgctgggtggcccttactcctaccgtcgcagcgccatacatcggcgcacc

SEQ ID NO: 127686 - DNA, 80 bp, synthetic construct
  source 1..80: mol_type = other DNA
agtagttattaaatgcgagcatcaatgccctctcaacattacatttaaaaaccgtaccatggggaatgcatgggtaggct

SEQ ID NO: 127687 - DNA, 80 bp, synthetic construct
  source 1..80: mol_type = other DNA
tcttcggccagccagctgtctgcaccgtccctcaaggctacttgcacaacatccaaagaccacccggacatggaactcat

SEQ ID NO: 127688 - DNA, 80 bp, synthetic construct
  source 1..80: mol_type = other DNA
accgcgatcccgtaggtcccttcgcagggccagctgaacataatcgtgcaggtctgcacggaccagcgcggccacttccc

SEQ ID NO: 127689 - DNA, 80 bp, synthetic construct
  source 1..80: mol_type = other DNA
gggattgtgatgcgttaatataccgtgatgaagccgcccgagaccgactccccgcaattcgtgtaagcgggcgaaacgga

SEQ ID NO: 127690 - DNA, 80 bp, synthetic construct
  source 1..80: mol_type = other DNA
cttgatgggtcgaacgtatctgcagcgctccgagcgcttgcagagaagtctttcccgtcatctggactgcaggaggcagg

SEQ ID NO: 127691 - DNA, 80 bp, synthetic construct
  source 1..80: mol_type = other DNA
tcacccacgacacagtcttttcgatgatcgatgtttattggtattttactagtaggcggcaaagcggaccgcacaatctc

SEQ ID NO: 127692 - DNA, 80 bp, synthetic construct
  source 1..80: mol_type = other DNA
ataggggagtttgggctggtgacggggtgtgtcacaccacttgctcatgcggtgctcaaattgctggacacgtgaagaac

SEQ ID NO: 127693 - DNA, 80 bp, synthetic construct
  source 1..80: mol_type = other DNA
aaagtgagaacgcgaagcgttcgcactttgtcctaatagtatatatattattaggacaaagtgcgaacgcttcgcgttct

SEQ ID NO: 127694 - DNA, 80 bp, synthetic construct
  source 1..80: mol_type = other DNA
gggcggctggggcaccgagcgcgcgcggatgcgcgtccgcgcgtcgggtttggtcgcgggtgactggtgtgtgaggcagc

SEQ ID NO: 127695 - DNA, 80 bp, synthetic construct
  source 1..80: mol_type = other DNA
gctgtcttgggagtcgcgacctttttctgttggatggctgaagttccaggaacgaagatcgccggaatgttgctgctctc

SEQ ID NO: 127696 - DNA, 80 bp, synthetic construct
  source 1..80: mol_type = other DNA
gcacacggtgagggccctgtcgcccacccacccggagcccaccacggacgaggatgacgacgacctggacgacggtgagg

SEQ ID NO: 127697 - DNA, 80 bp, synthetic construct
  source 1..80: mol_type = other DNA
ttacgcatcatgagaagtttgagttagataatccagaactgcctgggcatgattgtaagtcctgtgaatatcatcggaat

SEQ ID NO: 127698 - DNA, 80 bp, synthetic construct
  source 1..80: mol_type = other DNA
cccgtggcatatgcctcccaaggctataaggtcctcgtgctcaacccgtcagtggccgcaactctatcattcggagccta

SEQ ID NO: 127699 - DNA, 80 bp, synthetic construct
  source 1..80: mol_type = other DNA
ttgaagacgccgaggctttgtttcacaagtactgcgcgctcactcttaaagactaaggcgcgcccacccgaaaaaaaggc

SEQ ID NO: 127700 - DNA, 80 bp, synthetic construct
  source 1..80: mol_type = other DNA
accagcgtacaagtccctccttgtcagcactctctggtggctccaatatttcattgcacgtgcagaggccatcatgcaaa

SEQ ID NO: 127701 - DNA, 80 bp, synthetic construct
  source 1..80: mol_type = other DNA
gaactacaattggcagatgacgaatcaaaagatgatcaaaaacaaattccatctactactgtggcaatcgtggtgggtgt

SEQ ID NO: 127702 - DNA, 80 bp, synthetic construct
  source 1..80: mol_type = other DNA
ccctaactgtggctgccgccgcacctctaatggtcgcgggcaacacactcaccatgcaatcacaggccccgctaaccgtg

SEQ ID NO: 127703 - DNA, 80 bp, synthetic construct
  source 1..80: mol_type = other DNA
ccgcggctcacagcgtcagcggcttcacaagcctgttcacccggggcccgagccagaagctgcaattggtgaattccaat

SEQ ID NO: 127704 - DNA, 80 bp, synthetic construct
  source 1..80: mol_type = other DNA
acaggtcatcgaatggcttgggacatgatgatgaattggtcacccactggcgccttagtggtggcacagctactccggat

SEQ ID NO: 127705 - DNA, 80 bp, synthetic construct
  source 1..80: mol_type = other DNA
ctgatattcaccgactggagccactcaagtgtgaaactctcctctgtgacatcggagaatcgtccccatcctccgcaact

SEQ ID NO: 127706 - DNA, 80 bp, synthetic construct
  source 1..80: mol_type = other DNA
ttttaatttgaactacattacgcccccagcggttttgcactaccttggctttagatggattttctttcagagctcgctgc

SEQ ID NO: 127707 - DNA, 80 bp, synthetic construct
  source 1..80: mol_type = other DNA
tgcttacagacccctcccacatcacggctgatgctgcccggcgccggctagctagagggtctcccccctccctggccagt

SEQ ID NO: 127708 - DNA, 80 bp, synthetic construct
  source 1..80: mol_type = other DNA
agccacatgaccctgcatggttgcagcttcttcggtttcaacaacatgtgcgccgaggtctggggagctgctaagatcag

SEQ ID NO: 127709 - DNA, 80 bp, synthetic construct
  source 1..80: mol_type = other DNA
tggccttgttaacacctggattgagatgcctaaacctggatgtgtacaagatcctgctactgatggttggaataggcagt

SEQ ID NO: 127710 - DNA, 80 bp, synthetic construct
  source 1..80: mol_type = other DNA
aaaggtgtacttctcccaagttcaaaccttgattccacatattggaactttagaagtgacaatttaactgtatctgaggc

SEQ ID NO: 127711 - DNA, 80 bp, synthetic construct
  source 1..80: mol_type = other DNA
tgggcccggcctgattacaaccccccgctgcttgagacctggaaagcaccagattacgacccgccggtggtatctggctg

SEQ ID NO: 127712 - DNA, 80 bp, synthetic construct
  source 1..80: mol_type = other DNA
ctcccaaggggagaggccttcgggtatgttcgacaccgtcgtcctgtgtgaggcttatgacacgggatgcgcatggtacg

SEQ ID NO: 127713 - DNA, 80 bp, synthetic construct
  source 1..80: mol_type = other DNA
caaaggtggcacttaggccagattgcaagtacaagattagcaaacttgtaaatatcaggaattgttgctacatttctggg

SEQ ID NO: 127714 - DNA, 80 bp, synthetic construct
  source 1..80: mol_type = other DNA
ggtacatttgactccgttgtcctgtgcgaggcatatgacattggatgcgcctggtacgaactcactcctcctgaaaccac

SEQ ID NO: 127715 - DNA, 80 bp, synthetic construct
  source 1..80: mol_type = other DNA
atcagaacctccgacgcttgctggagttggcttctgccagaacttccagctgttggagaatcctttttggctcaacttta

SEQ ID NO: 127716 - DNA, 80 bp, synthetic construct
  source 1..80: mol_type = other DNA
ttccattcaagccctggtcaatagaaacagaacttgctatccttttttcttcactaccggaactgttattaaaaagagac

SEQ ID NO: 127717 - DNA, 80 bp, synthetic construct
  source 1..80: mol_type = other DNA
gccagaacctcaaaaaggtgaagaaaactggcaagatggagatgttttctatggaggcaggactattaaaaaggaaacca

SEQ ID NO: 127718 - DNA, 80 bp, synthetic construct
  source 1..80: mol_type = other DNA
gcgcataccttaacacccctggactgccagtgtgtcaggatcatcttgacttctgggagggcgtcttcacaggcctcact

SEQ ID NO: 127719 - DNA, 80 bp, synthetic construct
  source 1..80: mol_type = other DNA
gcgatgaggacctgggttcggagcctgagtcgttctcctccatgcccccccttgaggaggagccggaggaccccgacctc

SEQ ID NO: 127720 - DNA, 80 bp, synthetic construct
  source 1..80: mol_type = other DNA
accccccaaaaaagaaaaagaccccacagcgcggatggaggccggggtaggtgccgccggaccccctcgcgatgggaatg

SEQ ID NO: 127721 - DNA, 80 bp, synthetic construct
  source 1..80: mol_type = other DNA
gggccgcccggtggcccgggaagagcccccggagggttttcgtccgcggggtccccgacccgatctagcgtctgtcccgc

SEQ ID NO: 127722 - DNA, 80 bp, synthetic construct
  source 1..80: mol_type = other DNA
aattacgcggggagcgaggggccgtccgaacgtttttaattaccataagcgggaatggcggcccgttaaaagctgctaat

SEQ ID NO: 127723 - DNA, 80 bp, synthetic construct
  source 1..80: mol_type = other DNA
agccagagcatgttgcaaaactaccgcactttcattctcgagcgatctgggatgctgcccgccacctgcaacgctttccc

SEQ ID NO: 127724 - DNA, 80 bp, synthetic construct
  source 1..80: mol_type = other DNA
cccaacagcagcattgtgtatgaggcggatggcatgatcctgcacctcccgggttgtgtcccctgtgtgaagaccggcga

SEQ ID NO: 127725 - DNA, 80 bp, synthetic construct
  source 1..80: mol_type = other DNA
gacgggttggaccgcgggaggcgtgggagagcgacctgcgggagaggatgaggtcggctcggccgggttgcggcctaaaa

SEQ ID NO: 127726 - DNA, 80 bp, synthetic construct
  source 1..80: mol_type = other DNA
gctgcacccgtggtggagtccaagtggcgagcccttgagaccttctgggcgaagcacatgtggaatttcatcagcgggat

SEQ ID NO: 127727 - DNA, 80 bp, synthetic construct
  source 1..80: mol_type = other DNA
ccggagagcggccagcacgctgtggttgcttggcctggacggcacagacgcgccccctggggcgctgacccccaacgacg

SEQ ID NO: 127728 - DNA, 80 bp, synthetic construct
  source 1..80: mol_type = other DNA
gggaatgtcttggatcacacaaggactaatgggggccttacttctttggatgggtgtcaacgcacgagaccggtcaatcg

SEQ ID NO: 127729 - DNA, 80 bp, synthetic construct
  source 1..80: mol_type = other DNA
tcgcggtcacacaggtcgtagacttcagtttagaccccactttcaccataaccacacaaactgttccacaagacgctgtc

SEQ ID NO: 127730 - DNA, 80 bp, synthetic construct
  source 1..80: mol_type = other DNA
tatagctcgatgcctcccctcgagtgggagccgggagacccagatctcagttcggggtcttggtccacagtgagcgagga

SEQ ID NO: 127731 - DNA, 80 bp, synthetic construct
  source 1..80: mol_type = other DNA
ttatggcaaatttctggctgacgggtggtgctctgggggggcgtatgatatcatcatatgcgacgagtgccattcgacag

SEQ ID NO: 127732 - DNA, 80 bp, synthetic construct
  source 1..80: mol_type = other DNA
atcttactcatgtgtgtagtacacccgaccctggtatttgacatcaccaaactactcctggccatcttcggacccctttg

SEQ ID NO: 127733 - DNA, 80 bp, synthetic construct
  source 1..80: mol_type = other DNA
gcaggttccattctgctcaaaccatttcactgaattgatcatgaaagatggaagaacattggtggttccatgccgaggac

SEQ ID NO: 127734 - DNA, 80 bp, synthetic construct
  source 1..80: mol_type = other DNA
ccccgatgcaacgccacaggccgcacgcccggtccgagcgcggaccgggtggcggcgggtgacgtcctgcactgcccgct

SEQ ID NO: 127735 - DNA, 80 bp, synthetic construct
  source 1..80: mol_type = other DNA
gaaagtcactctggagtgttggtggaactcgagggtgacaacgcgcgcctagccgtactaaaacgcagcatcgaggtcac

SEQ ID NO: 127736 - DNA, 80 bp, synthetic construct
  source 1..80: mol_type = other DNA
aatatgtgctcattcttccagctgtccagggacacagttatgtgattacacgaaacaaacctcaaaggggtttggtatat

SEQ ID NO: 127737 - DNA, 80 bp, synthetic construct
  source 1..80: mol_type = other DNA
attcgtggaatattgaaaggatccccccgtcaacagccggtctgtcaccgggttagatttgccgaacctacggagggcgt

SEQ ID NO: 127738 - DNA, 80 bp, synthetic construct
  source 1..80: mol_type = other DNA
ttatcatgctcacatgccttttccatcctgccctggggtttgaggtcacgaaaatcctcctcgggatactaggtcctttg

SEQ ID NO: 127739 - DNA, 80 bp, synthetic construct
  source 1..80: mol_type = other DNA
actcggtggtcgccgacgcgcgcaactacacccccgccccctcgaccgtggacgcggtcatcgacagcgtggtggccgac

SEQ ID NO: 127740 - DNA, 80 bp, synthetic construct
  source 1..80: mol_type = other DNA
ctatgaccatctatcgcctctcgccgactgggctagcgacggtttgcgcgacctcgctgtcgcggttgaaccggtcgttt

SEQ ID NO: 127741 - DNA, 80 bp, synthetic construct
  source 1..80: mol_type = other DNA
attttcgcccatggaaaaaaaggtcatcacttggggagccgacaccgttgcctgcggtgacattctggccggcctaccgg

SEQ ID NO: 127742 - DNA, 80 bp, synthetic construct
  source 1..80: mol_type = other DNA
attttcaaggtcaggatgtttgtaggcggcctcgaacacaggttcccggccgcttgcaattggaccagaggggagcgttg

SEQ ID NO: 127743 - DNA, 80 bp, synthetic construct
  source 1..80: mol_type = other DNA
tggtatctggtggctccttttagtcttttgtgcctcttggcatctacgaggcagggttgtccctctggtgacgtatggga

SEQ ID NO: 127744 - DNA, 80 bp, synthetic construct
  source 1..80: mol_type = other DNA
gcctcggaaaaagagaacggtggtgctggatgagtccaatgtatctactgctctggcagagcttgccgagaagacctttg

SEQ ID NO: 127745 - DNA, 80 bp, synthetic construct
  source 1..80: mol_type = other DNA
gacgacgtggcccaccgcgacgacgtcaaccgcgccgccgccgcgtttttggcacgcggccacaacctcttcctgtggga

SEQ ID NO: 127746 - DNA, 80 bp, synthetic construct
  source 1..80: mol_type = other DNA
ggtcgaagacactggctgggccgaaaggccccatttgccagatgtataccaacgtggaccaggacttggtggggtggcct

SEQ ID NO: 127747 - DNA, 80 bp, synthetic construct
  source 1..80: mol_type = other DNA
tgcggacttcaggcagggatgggggcaagtaacctacaaagtcaacatctcaggcccttctgacgaccgtccctactgtt

SEQ ID NO: 127748 - DNA, 80 bp, synthetic construct
  source 1..80: mol_type = other DNA
agcagcgcccgcctcccaaagtcgaggaggtagaagtggaggaaaaactaccgcctttggaggtggcaccccccctgcct

SEQ ID NO: 127749 - DNA, 80 bp, synthetic construct
  source 1..80: mol_type = other DNA
ttaaatgagacatgattcctcgagtttttatattactgacccttgttgcgcttttttgtgcgtgctccacattggctgcg

SEQ ID NO: 127750 - DNA, 80 bp, synthetic construct
  source 1..80: mol_type = other DNA
gcttgtatttaatgcgcgaaggcgcaacgcccagtgccgctttagatatgactgcgcgcaacatggagccgtcattctac

SEQ ID NO: 127751 - DNA, 80 bp, synthetic construct
  source 1..80: mol_type = other DNA
atgaagatatgagaccttactgttggcactatccaccaaagccatgcggcatggtcggcgccaggactgtatgtggccca

SEQ ID NO: 127752 - DNA, 80 bp, synthetic construct
  source 1..80: mol_type = other DNA
ttgggactttggatcggttggaggagtgtttacctccgtgggaaaggctgtccatcaagtatttggtggagcattccgct

SEQ ID NO: 127753 - DNA, 80 bp, synthetic construct
  source 1..80: mol_type = other DNA
tgtgtacgacgccaacaaaatagtgtacacggtcaaagtcgaaccacacacgggagactatgttgccgcaaacgagacac

SEQ ID NO: 127754 - DNA, 80 bp, synthetic construct
  source 1..80: mol_type = other DNA
ccgcgaaccgcccacccgccccaaaacgtcgcgtgggtccatcgggcccaggtagcctccccgcggggcccgcgtgatgg

SEQ ID NO: 127755 - DNA, 80 bp, synthetic construct
  source 1..80: mol_type = other DNA
gaaatgttcaaaaagcgaaatctaaccataatggatcttcatcctgggtcaggaaagacgcggaaatatcttccagccat

SEQ ID NO: 127756 - DNA, 80 bp, synthetic construct
  source 1..80: mol_type = other DNA
gtggtgcatgggtgcccattgccacctaccaaggcccccccaataccaccaccacggaaaaagaggacggttgtcctgac

SEQ ID NO: 127757 - DNA, 80 bp, synthetic construct
  source 1..80: mol_type = other DNA
cctactgcagtacagcctgcttaagactccatatttcgtccgcgcgcatatcctcttgcgtgcatgcatgttcttccgtg

SEQ ID NO: 127758 - DNA, 80 bp, synthetic construct
  source 1..80: mol_type = other DNA
tgaccaggtattctgcaacccccggggatctacccagcccgtcgtatgacctagagctgataacatcatgctcttcaaac

SEQ ID NO: 127759 - DNA, 80 bp, synthetic construct
  source 1..80: mol_type = other DNA
aaactcccgcttatgggccatcagcagcgcgtacagctgtctgtgcgtccggcaggcgctgtggtcgatgcggtgggcgt

SEQ ID NO: 127760 - DNA, 80 bp, synthetic construct
  source 1..80: mol_type = other DNA
ggtatcctatggagattagaccaaagaagacacatgacagccacctggtccgctcatgggtgacggctggagagatccat

SEQ ID NO: 127761 - DNA, 80 bp, synthetic construct
  source 1..80: mol_type = other DNA
ccgggcctgccagtctgccaggaccatcttgagttctgggaggcagttttcaccggcctcacacacatagatgctcactt

SEQ ID NO: 127762 - DNA, 80 bp, synthetic construct
  source 1..80: mol_type = other DNA
caccgcttacgctcagcagacacggggtctgttaggcaccattgtgaccagcctcaccggcagggacactaatgagaact

SEQ ID NO: 127763 - DNA, 80 bp, synthetic construct
  source 1..80: mol_type = other DNA
tcccggggctggcgtggcaggcggcctccgtcaatctggagttccgggacgcgtccccacaacactccggcctgtatctg

SEQ ID NO: 127764 - DNA, 80 bp, synthetic construct
  source 1..80: mol_type = other DNA
ggctggggtcttactaggcccagcaccatgtacggaggagccaagaagcgctccgatcagcaccccgttcgcgtccgcgg

SEQ ID NO: 127765 - DNA, 80 bp, synthetic construct
  source 1..80: mol_type = other DNA
caacattgaatatgacattgacatgaacttttttgacttaagatcacaaaaacaaggtcttaaacctaagattgtaatgt

SEQ ID NO: 127766 - DNA, 80 bp, synthetic construct
  source 1..80: mol_type = other DNA
ataacaatctttacactaactcctgcttacaagaccctccttagcaaattcttgtggtggttgtgttacatgctggctct

SEQ ID NO: 127767 - DNA, 80 bp, synthetic construct
  source 1..80: mol_type = other DNA
tggtgtgacaaccaagaagtctacgtccaatatggacggtgcacgcggaccaggcattccaagcgaagcaggagatccgt

SEQ ID NO: 127768 - DNA, 80 bp, synthetic construct
  source 1..80: mol_type = other DNA
ccgcgccgcccagactgcatctgcgtgtttgaattcgccaatgacaaaacgttgggaggggtgtgcgtcatcctggagct

SEQ ID NO: 127769 - DNA, 80 bp, synthetic construct
  source 1..80: mol_type = other DNA
cgctcgtaggcgcccccgtgggtggcgtcgccagggccctggcgcatggcgtcagggctgtggaggacgggattaattat

SEQ ID NO: 127770 - DNA, 80 bp, synthetic construct
  source 1..80: mol_type = other DNA
ctacaacccacccctggtcgagaagtggaagcagcctgagtacgaaccaccggtcgttcacggttgcgccttacctccca

SEQ ID NO: 127771 - DNA, 80 bp, synthetic construct
  source 1..80: mol_type = other DNA
tgggcttgaagccttttcgctgcacacatactctccccacgaactcacaagggtagctgccgctctcaggaaacttgggg

SEQ ID NO: 127772 - DNA, 80 bp, synthetic construct
  source 1..80: mol_type = other DNA
acgggacagtgattgtggaactgcagtatactggaagcaacggaccctgccgagttcccatctccgtgactgcaaacctc

SEQ ID NO: 127773 - DNA, 80 bp, synthetic construct
  source 1..80: mol_type = other DNA
gtaaaaaccaagctcaaactcactccattgcgtggcgcgtccgacctggatttgtcaggctggttcgcggcaggcttcag

SEQ ID NO: 127774 - DNA, 80 bp, synthetic construct
  source 1..80: mol_type = other DNA
gagccgggacaactgaagctcaactggttcaagaaaggaagttctatcggccaaatgtttgagacaacgatgagaggggc

SEQ ID NO: 127775 - DNA, 80 bp, synthetic construct
  source 1..80: mol_type = other DNA
cctgcatgtcagctgacctcgaggtgatcactagcgcgtgggtcatcacgggagtggttcttgctgcattggcagcatac

SEQ ID NO: 127776 - DNA, 80 bp, synthetic construct
  source 1..80: mol_type = other DNA
tctggtagcagttcaacatatcaaggtgttaaatatgaaaacggagctggtggaaatggaacttggaaagtagatgacac

SEQ ID NO: 127777 - DNA, 80 bp, synthetic construct
  source 1..80: mol_type = other DNA
gactggacgacaccatgttccacgagctggttaagagacatctgggactgggtctgtaccgtgctgtcagacttcaaaac

SEQ ID NO: 127778 - DNA, 80 bp, synthetic construct
  source 1..80: mol_type = other DNA
acaattggggggagaacgagtcagatgtcttcctgctggcgtccccacgaccgccagcgggcgtgtggttcggctgtact

SEQ ID NO: 127779 - DNA, 80 bp, synthetic construct
  source 1..80: mol_type = other DNA
cgggatactgggccccttgtacctgctgcaacattcactcaccaaggtcccctacttcctcagggcgcgcgccctgctga

SEQ ID NO: 127780 - DNA, 80 bp, synthetic construct
  source 1..80: mol_type = other DNA
tcacgcctcgtgcggcttatcatcaacatgaagggcatgcgccacgtaggcgacattaacgacaccgtgcgtgcctacct

SEQ ID NO: 127781 - DNA, 80 bp, synthetic construct
  source 1..80: mol_type = other DNA
gcacatcaacagaactgccttgaactgtaatgaaagcttggatactggctggctagcagggctgctctactaccacaagt

SEQ ID NO: 127782 - DNA, 80 bp, synthetic construct
  source 1..80: mol_type = other DNA
cttgtccggagaacctttaggatgccagccagggcggcggtaatcataaccacgcccagcgcagaggcggccagaaaccc

SEQ ID NO: 127783 - DNA, 80 bp, synthetic construct
  source 1..80: mol_type = other DNA
gtgtctcgatgctggtactcagtttcgccgaccctggctgttttcgacgcctccacgccggtccatgggttccgcagaca

SEQ ID NO: 127784 - DNA, 80 bp, synthetic construct
  source 1..80: mol_type = other DNA
ccgcgcgtgggcttccccgttgcgggcgctgcggaggagagcggggtcgctggcgcaggtgagcgggtaggcctcctgaa

SEQ ID NO: 127785 - DNA, 80 bp, synthetic construct
  source 1..80: mol_type = other DNA
atctggggcacttgtcgggtttaagatcatgtgcggcgagaccccttctgccgaggacatggttaacctgctccctgctc

SEQ ID NO: 127786 - DNA, 80 bp, synthetic construct
  source 1..80: mol_type = other DNA
ccggtcgtccgattccgactcggatgactcggaggacacggactcggagacgctgtcacacgcctcctcggacgtgtccg

SEQ ID NO: 127787 - DNA, 80 bp, synthetic construct
  source 1..80: mol_type = other DNA
gtgaagaggacgatgtcgtctgttgctctatgtcatacacttggacgggggccttgatcacaccatgcgctgctgaggag

SEQ ID NO: 127788 - DNA, 80 bp, synthetic construct
  source 1..80: mol_type = other DNA
atttgctctcgcaaaccaaacagagtggggaaaactttccctaccttgtagcctaccaagctacggtttgcttgagagcc

SEQ ID NO: 127789 - DNA, 80 bp, synthetic construct
  source 1..80: mol_type = other DNA
cagcacgtcgcagtcgctgtacatgctgttcatggtcccgaagacgccgatggctccgcgggcggcgctggcgaacttgg

SEQ ID NO: 127790 - DNA, 80 bp, synthetic construct
  source 1..80: mol_type = other DNA
gcagcgcagctctccgccaaaagaaagtcacctttgacagacagcaggtgctcgaccagcattaccatgatgttctgaag

SEQ ID NO: 127791 - DNA, 80 bp, synthetic construct
  source 1..80: mol_type = other DNA
gtcatcgtgggtaggattgtgttatccggcaagccggcaatcatacctgacaggcaagtcctataccgagagtttgatga

SEQ ID NO: 127792 - DNA, 80 bp, synthetic construct
  source 1..80: mol_type = other DNA
cccttccggcatgttcgactcgtccgtcctctgtgagtgctatgacgcgggttgtgcttggtatgagcttacacccgctg

SEQ ID NO: 127793 - DNA, 80 bp, synthetic construct
  source 1..80: mol_type = other DNA
acaaacctatcaggtggggtatctgcatgctccaactggcagcggaaagagcacgaaggtaccggcagcgtatgccagcc

SEQ ID NO: 127794 - DNA, 80 bp, synthetic construct
  source 1..80: mol_type = other DNA
ccgtcgtcggtgatgaggacgttgtttcggcagcagcagggccgggccccggagaacgagaggcccatagctcggcgagc

SEQ ID NO: 127795 - DNA, 80 bp, synthetic construct
  source 1..80: mol_type = other DNA
tgccctctctacctcctccagttgtgtttggtgaggactccatactttgtgagggcccaggccctcatcagagtgtgttc

SEQ ID NO: 127796 - DNA, 80 bp, synthetic construct
  source 1..80: mol_type = other DNA
ggttcaccaagacatgtggaggccctccatgtaacatcggaggttcgggcaacaacaccctcttgtgtcccaccgactgc

SEQ ID NO: 127797 - DNA, 80 bp, synthetic construct
  source 1..80: mol_type = other DNA
gggaacacactgacgtgctacctcaaggccacagccgctaccagggcggcgggtctgcgggattgcacgatgctggtttg

SEQ ID NO: 127798 - DNA, 80 bp, synthetic construct
  source 1..80: mol_type = other DNA
atgcaccgctacaggagaacacagaagggaaaaaagatcagtggcactcgttccacatgtgggaatgggactggagacac

SEQ ID NO: 127799 - DNA, 80 bp, synthetic construct
  source 1..80: mol_type = other DNA
gtgggcccgggagaggtggccgtgcagtggatgaaccggctgatagcgttcgcttcgcggggtaaccacgtttcccccac

SEQ ID NO: 127800 - DNA, 80 bp, synthetic construct
  source 1..80: mol_type = other DNA
cgatttgtcttactggatagaaagtggattgaatggaacctggaaactggaacgtgctgtgctaggagaagtcaagtcat

SEQ ID NO: 127801 - DNA, 80 bp, synthetic construct
  source 1..80: mol_type = other DNA
ctcaagcctacgcttgcgggccccacacctctcctgtaccgtttgggccctattaccaatgaggtcaccctcacacaccc

SEQ ID NO: 127802 - DNA, 80 bp, synthetic construct
  source 1..80: mol_type = other DNA
gcaaccgtgaggaaagagggagacggctccacagtcatcagagccgaaggaaaggacgcagccacccaggtacgcgtgga

SEQ ID NO: 127803 - DNA, 80 bp, synthetic construct
  source 1..80: mol_type = other DNA
tccaggaaagaccagagaggtagtggacaagttggaacatatggtttgaacacattcaccaacatggaagttcaactcat

SEQ ID NO: 127804 - DNA, 80 bp, synthetic construct
  source 1..80: mol_type = other DNA
aagaaggtatatctattgctagccccttcctggacgggagcgatccctccagggctatctatgaaagcatacagagattc

SEQ ID NO: 127805 - DNA, 80 bp, synthetic construct
  source 1..80: mol_type = other DNA
tggccactcttgcttctggtcctggcactgcctgagcgggcttatgcctttgaccgggagcaggcagcgtccattggggt

SEQ ID NO: 127806 - DNA, 80 bp, synthetic construct
  source 1..80: mol_type = other DNA
aatcttggacagcagtctatgcccaacagacccaactacattggcttcagagataattttattggtcttatgtactataa

SEQ ID NO: 127807 - DNA, 80 bp, synthetic construct
  source 1..80: mol_type = other DNA
ccacgtaaggcaggggggcctcttccagtaactcggccacgttggccgtcgcgtgccgcctccgcagctcgtccgcaaag

SEQ ID NO: 127808 - DNA, 80 bp, synthetic construct
  source 1..80: mol_type = other DNA
gaccccccgaccagtggaggggaaagctggccggggtagaaaacacccccggagtgccccacggcaacacgtcagtgaga

SEQ ID NO: 127809 - DNA, 80 bp, synthetic construct
  source 1..80: mol_type = other DNA
gttggcgcttttgacatagccgtcaagatgagaatgctgccggatttttttaccgggaactgggatgacatgttccaggg

SEQ ID NO: 127810 - DNA, 80 bp, synthetic construct
  source 1..80: mol_type = other DNA
gattagtcgtccccatatggctttgaatgaaatctaagatcttttttttttttctcttacagtatggtgaacaccaatca

SEQ ID NO: 127811 - DNA, 80 bp, synthetic construct
  source 1..80: mol_type = other DNA
atctctaattatagtcaacggaaagttcaagatccttaataacaaaacagacccatccctacctaaatcatttaacatca

SEQ ID NO: 127812 - DNA, 80 bp, synthetic construct
  source 1..80: mol_type = other DNA
taaacctcctgccttcaatactctgccctggagccctagtggttggtgtcatatgcgccgccgttctgcggcgccacatt

SEQ ID NO: 127813 - DNA, 80 bp, synthetic construct
  source 1..80: mol_type = other DNA
ccgcagagctgctttgtttgccgctgtttcaacagaaatgaccgcccccagggggcggtgctgtttgcgggttggcacaa

SEQ ID NO: 127814 - DNA, 80 bp, synthetic construct
  source 1..80: mol_type = other DNA
aagtacatcatggcatgcatgtcagccgaccttgaggtggtgaccagcgcatgggtcctggtgggcggtcttgtggcagc

SEQ ID NO: 127815 - DNA, 80 bp, synthetic construct
  source 1..80: mol_type = other DNA
ccactttgtggttggtgctactgcggacaacctaaaatgcccatgtcaggtcccagcccctgagttcttcaccgaggttg

SEQ ID NO: 127816 - DNA, 80 bp, synthetic construct
  source 1..80: mol_type = other DNA
ggctcctcgggaggtcccctactatgcccagccggacatgtagccgggatcttccgtgccgccgtagtcaccagggaggt

SEQ ID NO: 127817 - DNA, 80 bp, synthetic construct
  source 1..80: mol_type = other DNA
tacggcgtccagctttgtcggcctcttcaccccgggagcttctcagcacctccagcttatcaacaccaacggcagctggc

SEQ ID NO: 127818 - DNA, 80 bp, synthetic construct
  source 1..80: mol_type = other DNA
cgtggtcagtggcttggccggagctgccgtgggtagcatcggcctaggcagggtgttggtggatatactagcaggttacg

SEQ ID NO: 127819 - DNA, 80 bp, synthetic construct
  source 1..80: mol_type = other DNA
tttggcttggcctacttctccatgcagggggcgtgggcgaaggtcgttgtcatccttctgctggctgctggtgtggacgc

SEQ ID NO: 127820 - DNA, 80 bp, synthetic construct
  source 1..80: mol_type = other DNA
cgcgcccgcccgaaccccctccgtcgcccgcccccccgcgggcccttgagggtgcggtgaccacgtcggcggcgacgtcc

SEQ ID NO: 127821 - DNA, 80 bp, synthetic construct
  source 1..80: mol_type = other DNA
cctggttcggtcacggtcccccatcccaatatcacagagtcagcgctacccaccactggtgagatccctttctacggcaa

SEQ ID NO: 127822 - DNA, 80 bp, synthetic construct
  source 1..80: mol_type = other DNA
ggcagaagcccagatccagcagtgggtgccacctttggaggcccgtggcggtcgtgatggcatcatatgggccgcaacca

SEQ ID NO: 127823 - DNA, 80 bp, synthetic construct
  source 1..80: mol_type = other DNA
tttatttcttgggtgtgtccgcgggtatataagcaggtggagtggtttcagtgttagtttattctgatggagttttggag

SEQ ID NO: 127824 - DNA, 80 bp, synthetic construct
  source 1..80: mol_type = other DNA
acgatcccagcccagaggcaggcggcagcctatccctaaggcgcgcccgcggacgggccggaactgggctcagcccggtt

SEQ ID NO: 127825 - DNA, 80 bp, synthetic construct
  source 1..80: mol_type = other DNA
cagcccttcttcagttgcaaccatgaagttaccgttagccttcctttttttctttgtgccaattagggcaacaccttgtg

SEQ ID NO: 127826 - DNA, 80 bp, synthetic construct
  source 1..80: mol_type = other DNA
cgggacgcgggtggtggcgcgcctggatcgtttttccgagtgtctgcgcgccatggttcacacgcacgtcttcccccacg

SEQ ID NO: 127827 - DNA, 80 bp, synthetic construct
  source 1..80: mol_type = other DNA
tggtgactggaggtggtcggcggccaatgggccgggtggttcgtcggcgtgaggcaagtgcggttccggtgggagcgagt

SEQ ID NO: 127828 - DNA, 80 bp, synthetic construct
  source 1..80: mol_type = other DNA
gccctatgtacaactcaaagggccagctctgtggtcaacgccgatgccgggcaagcggggtactccccacaagcatgggt

SEQ ID NO: 127829 - DNA, 80 bp, synthetic construct
  source 1..80: mol_type = other DNA
ccaggtattctgcccctccgggggatgaaccacagcccacctatgacttggagctgataacatcgtgctcctcgaacgtc

SEQ ID NO: 127830 - DNA, 80 bp, synthetic construct
  source 1..80: mol_type = other DNA
atgggcggccacgtcggccaggctcaggcgcgtggaggccagaaagtcccccacggccgttttccggggcagcatgctca

SEQ ID NO: 127831 - DNA, 80 bp, synthetic construct
  source 1..80: mol_type = other DNA
gtacacttatgctcccacacgcagcaaccggtgggttcccaggaattctgttggacaccggcataagcttgcatatatcc

SEQ ID NO: 127832 - DNA, 80 bp, synthetic construct
  source 1..80: mol_type = other DNA
ggcagtgactatcatggctatctcgtgtgtcccaaatgcagtgatattgcaaaacgcatggaaggtgagttgcacaatat

SEQ ID NO: 127833 - DNA, 80 bp, synthetic construct
  source 1..80: mol_type = other DNA
ttccccgagacacaaagattatcgggtgaaccggaacctacaaccacctagtataccttaactcaaccgccgttgtggaa

SEQ ID NO: 127834 - DNA, 80 bp, synthetic construct
  source 1..80: mol_type = other DNA
aaaatgagactgacatctttctcttgaacaacacgaggccccctactggcaactggtttggctgcacctggatgaattcc

SEQ ID NO: 127835 - DNA, 80 bp, synthetic construct
  source 1..80: mol_type = other DNA
ccgaccagtgtatgggagaggaggaaggagaaaaatagacccctggattgcccctttttgcttcgtctatgagattgtcc

SEQ ID NO: 127836 - DNA, 80 bp, synthetic construct
  source 1..80: mol_type = other DNA
tggaaacatagtatcttctgtcaatatgatctccagaatgctcatcaacaggttcaccatgaaacataaaaaaccgacat

SEQ ID NO: 127837 - DNA, 80 bp, synthetic construct
  source 1..80: mol_type = other DNA
aggactggcagggggaagccaggcatctacagatttgtggcgccgggagagcgcccttccggcatgtttgactcgtccgt

SEQ ID NO: 127838 - DNA, 80 bp, synthetic construct
  source 1..80: mol_type = other DNA
tagcattgcgtgcaccaagacctcctcgttttcgggaaacgccccgcgccaccacagacgcggggcgttccagcgcggca

SEQ ID NO: 127839 - DNA, 80 bp, synthetic construct
  source 1..80: mol_type = other DNA
tggtgttcgcaccagaactggccaaccacacttttgtggttgacgggcccgagaccaaagaatgtcccgatgtaaaaaga

SEQ ID NO: 127840 - DNA, 80 bp, synthetic construct
  source 1..80: mol_type = other DNA
ggtcagtgcatgccaagggagaatggatgacaacggctgatatgttggaagtttggaacagagtatggatacaggacaat

SEQ ID NO: 127841 - DNA, 80 bp, synthetic construct
  source 1..80: mol_type = other DNA
ccgagaatggtgcttcacaggagaaaggaataaccaaattttagaagaaaatatggaggttgaaatctggactagagagg

SEQ ID NO: 127842 - DNA, 80 bp, synthetic construct
  source 1..80: mol_type = other DNA
gtggttgagcatagactcactgctgcttgcaattggactcgcggagacccctgctcgcttggggatcgggacagggctga

SEQ ID NO: 127843 - DNA, 80 bp, synthetic construct
  source 1..80: mol_type = other DNA
aataacaccaatgttaagacataccatagagaattctacagcaaatgtgtccctggcagctatagccaaccaggcagtgg

SEQ ID NO: 127844 - DNA, 80 bp, synthetic construct
  source 1..80: mol_type = other DNA
ccttcgcgagagctgcgtgggagacagcaagacacactccaatcaattcctggctaggcaacataattatgtttgccccc

SEQ ID NO: 127845 - DNA, 80 bp, synthetic construct
  source 1..80: mol_type = other DNA
ccagggtctacgctgaccatcagtcgctcaagtggttcaaggactttgcggctggtaagcgatcagcagtgggattcctt

SEQ ID NO: 127846 - DNA, 80 bp, synthetic construct
  source 1..80: mol_type = other DNA
gagattcacggcaatcaagccatcactgggtctcatcaatagatggggttcagtggggaaaaaagaggctatggaaataa

SEQ ID NO: 127847 - DNA, 80 bp, synthetic construct
  source 1..80: mol_type = other DNA
ttctgtactcgaacgtggccttgtacctgcccgactccttcaagtacacgccggccaacgtcacgctgcccactaacacc

SEQ ID NO: 127848 - DNA, 80 bp, synthetic construct
  source 1..80: mol_type = other DNA
agctttaactttagctacaggaccaataacaacactctgggaaggatcacctgggaagttttggaataccacgatagctg

SEQ ID NO: 127849 - DNA, 80 bp, synthetic construct
  source 1..80: mol_type = other DNA
agccgcagggctccgggactgcaccatgctcgtgtgtggcgacgacttagtcgttatctgtgaaagtcagggagtccagg

SEQ ID NO: 127850 - DNA, 80 bp, synthetic construct
  source 1..80: mol_type = other DNA
agaaaacccccaaacgcgttagaggaccggacggaccttatgggaggaagtgggcagcgggaaccccgtccgttcccgag

SEQ ID NO: 127851 - DNA, 80 bp, synthetic construct
  source 1..80: mol_type = other DNA
gggccgccgggccatgatgcgagccgcgcgccgcgctgccactgcaccccccgcaggcaggactcgcagacgagcggccg

SEQ ID NO: 127852 - DNA, 80 bp, synthetic construct
  source 1..80: mol_type = other DNA
ggggccaaatcaccctcaccacgttcctaacagctatggtgctagtgacactccactatggatacatgctccctgggtgg

SEQ ID NO: 127853 - DNA, 80 bp, synthetic construct
  source 1..80: mol_type = other DNA
attggaacaggcggctcaacagattggagaattcgcctatggaaagcgctcgcgtcgcggagacttggccatcgctttag

SEQ ID NO: 127854 - DNA, 80 bp, synthetic construct
  source 1..80: mol_type = other DNA
cgcgaacaacacgcggctcttgacgcgcagctccttgggaaaccccagggtcacgcgggcaacgtcgccctcgaagctgc

SEQ ID NO: 127855 - DNA, 80 bp, synthetic construct
  source 1..80: mol_type = other DNA
tgaaggagccgcccaatggatgaaccggttgatagccttcgcatctcggggtaaccatgtctctcccacgcattatgttc

SEQ ID NO: 127856 - DNA, 80 bp, synthetic construct
  source 1..80: mol_type = other DNA
cattggccctctctaccttatgcaggccagcctcttgcgcgtgccgtattacgtacgggctcacgctatactgcgggcat

SEQ ID NO: 127857 - DNA, 80 bp, synthetic construct
  source 1..80: mol_type = other DNA
gagcaaaccgtgctgcctgtagctccgccaataacgggaggcgtaataatcccggggaggccatgcgccacggaagctgt

SEQ ID NO: 127858 - DNA, 80 bp, synthetic construct
  source 1..80: mol_type = other DNA
ccctggagttccatggaaaatctgggttttaagaatgacatgcttaagcgtagctgccatcactccatgggccattttgc

SEQ ID NO: 127859 - DNA, 80 bp, synthetic construct
  source 1..80: mol_type = other DNA
ccagagaatcacaggagacgaggggatgggcgtgttggttaccaacccacacccaggcatgctcggtggtatgaaggagg

SEQ ID NO: 127860 - DNA, 80 bp, synthetic construct
  source 1..80: mol_type = other DNA
gaaattcctggctgacggagggtgtggaggaggcgcgtatgacataatcatctgtgatgagtgccattccaccgattcta

SEQ ID NO: 127861 - DNA, 80 bp, synthetic construct
  source 1..80: mol_type = other DNA
gacccccctcctgtataggctggggcccgtactaaatgaggtggtactcacacacccggtcaccaagtacatcatggcct

SEQ ID NO: 127862 - DNA, 80 bp, synthetic construct
  source 1..80: mol_type = other DNA
cacaacatcacgcagcgcggctacccgccagaagaaagtaacctttgacagggtgcaagtgcttgaccaacactaccagg

SEQ ID NO: 127863 - DNA, 80 bp, synthetic construct
  source 1..80: mol_type = other DNA
ggtggttatcgtcgtcgtcgccgccgccgcacgcggcctgggcggcgagggcaggcccggcgcaccgcgcggcgatcgag

SEQ ID NO: 127864 - DNA, 80 bp, synthetic construct
  source 1..80: mol_type = other DNA
ggtcctgggctcagcccgggtacccctggcccctctatggtaacgagggctgcgggtgtgcagggtggctcctgtcccca

SEQ ID NO: 127865 - DNA, 80 bp, synthetic construct
  source 1..80: mol_type = other DNA
gtcccactgattgcttccggaaacatccggaggccacctatgggaagtgcggctctggcccctggatcacgcctagatgc

SEQ ID NO: 127866 - DNA, 80 bp, synthetic construct
  source 1..80: mol_type = other DNA
attgcttgttgttaaagggaagtttgccaatattaacaatgaaacaaacccaggcgaggactataaaaaattttcagtta

SEQ ID NO: 127867 - DNA, 80 bp, synthetic construct
  source 1..80: mol_type = other DNA
agtattcttcctcctcatgcagcggaagggcattggaaagataggtttgggaggcgttgtcctgggagtcgcaaccttct

SEQ ID NO: 127868 - DNA, 80 bp, synthetic construct
  source 1..80: mol_type = other DNA
ggagatccgtggagccgacttcaagcccaatcctcaagacttggaaatcgtgcccgtggaaaaagacagcaaggaaagaa

SEQ ID NO: 127869 - DNA, 80 bp, synthetic construct
  source 1..80: mol_type = other DNA
atccaagagccgtccaaacaaaacccggtctttttaaaaccaacactgggaccataggcgccgtatctctggacttttct

SEQ ID NO: 127870 - DNA, 80 bp, synthetic construct
  source 1..80: mol_type = other DNA
ggtattgacccaaacatccgcaccggggtgaggactattaccactggtggagctagcacctattctacctatggcaaatt

SEQ ID NO: 127871 - DNA, 80 bp, synthetic construct
  source 1..80: mol_type = other DNA
caggatagagatgagtcctctcctgttctctacgacccagcttgccattctgccttgctcattcaccactatgccagctc

SEQ ID NO: 127872 - DNA, 80 bp, synthetic construct
  source 1..80: mol_type = other DNA
gtgggagaacgatgcagagatcacaggctccagtgagagagtggacgtgcgcttggatgatgatgggaacttccagctca

SEQ ID NO: 127873 - DNA, 80 bp, synthetic construct
  source 1..80: mol_type = other DNA
gcccttgtagtcggtgtggtctgcgcagcaatactacgccggcacgttggcccgggcgagggagcagtgcagtggatgaa

SEQ ID NO: 127874 - DNA, 80 bp, synthetic construct
  source 1..80: mol_type = other DNA
agcccattgagcaactccctcattcggcaccacaacatggtgtatagcactacatcacgtagtgcctcccttcgccagaa

SEQ ID NO: 127875 - DNA, 80 bp, synthetic construct
  source 1..80: mol_type = other DNA
ccggacccgggaggcctcctttgaggagtggctgcgatccaaggaagtggccctggattttggcctgacggaaaggcttc

SEQ ID NO: 127876 - DNA, 80 bp, synthetic construct
  source 1..80: mol_type = other DNA
cagtggataagctcggagagtaccactccatgctccggttcctggctgagggacatttgggactggatatgcgaggtgct

SEQ ID NO: 127877 - DNA, 80 bp, synthetic construct
  source 1..80: mol_type = other DNA
atgacagggaggtttccaccgctgcggagatcttgcgaccttccaggaaattccctccagccctaccaatttgggctagg

SEQ ID NO: 127878 - DNA, 80 bp, synthetic construct
  source 1..80: mol_type = other DNA
ctgctgctgatcgccaagaaaaagtacatcggcgtcatctacgggggtaagatgctcatcaagggcgtggatctggtgcg

SEQ ID NO: 127879 - DNA, 80 bp, synthetic construct
  source 1..80: mol_type = other DNA
tggccactcttgctgctcgttctggctctaccacaacgcgccttcgcctacaatcaagaagtagcgggctctatgggggt

SEQ ID NO: 127880 - DNA, 80 bp, synthetic construct
  source 1..80: mol_type = other DNA
gcggctctcgccctaactggggccctaatgacccccggcgaagatcccgcaacctgggtaaggtcatcgatacccttact

SEQ ID NO: 127881 - DNA, 80 bp, synthetic construct
  source 1..80: mol_type = other DNA
tttggcgatactagccttcttgagattcacagcaatcaaaccatcactgggcctcatcaatagatggggttccgtgggga

SEQ ID NO: 127882 - DNA, 80 bp, synthetic construct
  source 1..80: mol_type = other DNA
gaaggtcattgacagtgcagacacacggagaaagcactctagcgaacaagaagggggcttggatggacagcaccaaggcc

SEQ ID NO: 127883 - DNA, 80 bp, synthetic construct
  source 1..80: mol_type = other DNA
acaaagtagccgccgcagggatatcttaccatgataggaaatggtgttttgacggacccagaaccaacaccatattggaa

SEQ ID NO: 127884 - DNA, 80 bp, synthetic construct
  source 1..80: mol_type = other DNA
tccacttgctcagaagaagacgattccatcatctgttgctccatgtcatactcttggactggtgccctcgtgaccccctg

SEQ ID NO: 127885 - DNA, 80 bp, synthetic construct
  source 1..80: mol_type = other DNA
ggggcgagtggcggagggacggcgtgatgcataccacgtgcccctgcggtgctgagttagccggccacatcaagaatggc

SEQ ID NO: 127886 - DNA, 80 bp, synthetic construct
  source 1..80: mol_type = other DNA
gcggtgggtctagttagtctcttgggaagcacaattttaaagaatgacgtcccaatggcgggaccaatggtagctgggtg

SEQ ID NO: 127887 - DNA, 80 bp, synthetic construct
  source 1..80: mol_type = other DNA
gacttcgacatgtacggagtcacgtattctatcactccgttggacttacctcagatcatccagcggttacatggtatggc

SEQ ID NO: 127888 - DNA, 80 bp, synthetic construct
  source 1..80: mol_type = other DNA
cgctgccgccggccacgcgcaggtccccgcgcaggcgcatgagcaccagcgcgtcgcgcacgaaccgcagctcgcgcagc

SEQ ID NO: 127889 - DNA, 80 bp, synthetic construct
  source 1..80: mol_type = other DNA
gccaagctgctcatagcacggggtcgggggagcaatccgaggaggatggcgcggcctctgaggctgattcttacagttcc

SEQ ID NO: 127890 - DNA, 80 bp, synthetic construct
  source 1..80: mol_type = other DNA
gttgcgctatcacaacaaagtgtactgcacaacatcaaggagcgcttcgctgagggccaagaaggtgaccttcgacaggg

SEQ ID NO: 127891 - DNA, 80 bp, synthetic construct
  source 1..80: mol_type = other DNA
ttgattgctaccgagaaaaatctgatttccctacatactggattatgatcattggaattgtcaatctagtttcttgcaca

SEQ ID NO: 127892 - DNA, 80 bp, synthetic construct
  source 1..80: mol_type = other DNA
catgctacttgaaggcacaagccgcttgcaaggcagcagggctcagagactttgacatgttggtatgcggagacgacctt

SEQ ID NO: 127893 - DNA, 80 bp, synthetic construct
  source 1..80: mol_type = other DNA
aaggctcccccgccttcgtgggacgtgatgtggaaatgcttgctccgcctcaaaccgaccctacagggacccacacctat

SEQ ID NO: 127894 - DNA, 80 bp, synthetic construct
  source 1..80: mol_type = other DNA
ccaacatcaaggactgtgacatgttggtgtgcggagatgacttggtggtcatttgtgagagtgctggcgtccaggaagac

SEQ ID NO: 127895 - DNA, 80 bp, synthetic construct
  source 1..80: mol_type = other DNA
gacgggagcgacggggccggcgcaaaaaaacgcagtatctcccgcgaaggctacccgccgccccagcccccggccaaatg

SEQ ID NO: 127896 - DNA, 80 bp, synthetic construct
  source 1..80: mol_type = other DNA
caaacttccgcactggaagctccctacgtgcctccccgctatttggctcctacggagggaagaaatagcattcgttattc

SEQ ID NO: 127897 - DNA, 80 bp, synthetic construct
  source 1..80: mol_type = other DNA
ccgggaggctccagacccgccagcaccgcatctgcgtcagccgcccccatggcgcccccgctgacggcctggtgaaccag

SEQ ID NO: 127898 - DNA, 80 bp, synthetic construct
  source 1..80: mol_type = other DNA
ccgtagtcacatcaatgctcacagaccccacgcacatcaccgcagaaacggcagcacggcggttaaagaaggggtccccc

SEQ ID NO: 127899 - DNA, 80 bp, synthetic construct
  source 1..80: mol_type = other DNA
ctcaaactcactccaataccagctgcatccatgctcgacctgtcgggctggtttagggctggttacagcggggtggacat

SEQ ID NO: 127900 - DNA, 80 bp, synthetic construct
  source 1..80: mol_type = other DNA
taaattgttattagatggaacatatatataaagtagcgcctattaaaggaaaaaaaaaacaacgattattttctgtgtat

SEQ ID NO: 127901 - DNA, 80 bp, synthetic construct
  source 1..80: mol_type = other DNA
gccaagtcggcaactacgcgttcggcgagcacagcctgctgtatctgagttaaagtgttttggaaatcatccaagtccac

SEQ ID NO: 127902 - DNA, 80 bp, synthetic construct
  source 1..80: mol_type = other DNA
tgttccactccatgtgatcgatcttggctgtgggaggtctgggattgggtctgcaccgtcttaagtgacttcaagacgtg

SEQ ID NO: 127903 - DNA, 80 bp, synthetic construct
  source 1..80: mol_type = other DNA
gcgctcgaagaggactccaatggggttctcctacgacactaggtgtttcgactcaacagtcacagagcgcgacatacgca

SEQ ID NO: 127904 - DNA, 80 bp, synthetic construct
  source 1..80: mol_type = other DNA
ttcatagcccgccttgaggccattctacacgtgtacgcccccccccttcgggttcgcggggggcgtgacgcagtcatctt

SEQ ID NO: 127905 - DNA, 80 bp, synthetic construct
  source 1..80: mol_type = other DNA
tccaaagcccacgggatcaaccccaacatcaggaccggagtacggactgtgaccaccggagactcaatcacttactccac

SEQ ID NO: 127906 - DNA, 80 bp, synthetic construct
  source 1..80: mol_type = other DNA
tattactgctgaaacggcgggtcgacgcctcgctcgaggatccccaccgtcacttgctagttcatcagcaagtcagctct

SEQ ID NO: 127907 - DNA, 80 bp, synthetic construct
  source 1..80: mol_type = other DNA
aaccatggaaacaaccacgcagcctaccactactcatactacacagatagacacaacactacagaatactactttattaa

SEQ ID NO: 127908 - DNA, 80 bp, synthetic construct
  source 1..80: mol_type = other DNA
taacaatgacgaccatagacagtatagagtcactgtctatacaataccgcgtaataaaactgttaaaattcaacctcata

SEQ ID NO: 127909 - DNA, 80 bp, synthetic construct
  source 1..80: mol_type = other DNA
tggtggctcaggcggaggcggcgcttgagaacttagtcgtcctcaatgccgcgtctgccgctagcaaccaaggttggctc

SEQ ID NO: 127910 - DNA, 80 bp, synthetic construct
  source 1..80: mol_type = other DNA
gttgaattcctacgtgatagggtctcaactcccctgtgagccagaaccggatgtttctgtgctgacctcgatgttgagag

SEQ ID NO: 127911 - DNA, 80 bp, synthetic construct
  source 1..80: mol_type = other DNA
tatcgtggttatgttttcaggggtcgatgccagcacatataccaccggaggcgcccaagctcgtcacacccaagcattta

SEQ ID NO: 127912 - DNA, 80 bp, synthetic construct
  source 1..80: mol_type = other DNA
caggactgagcatgacatttaccaatgctgccaactggaccccacaacaaagaaagccattacttcgctcaccgagcggt

SEQ ID NO: 127913 - DNA, 80 bp, synthetic construct
  source 1..80: mol_type = other DNA
tccggctcgtggttgagggatgtttgggactggatatgcacggtgttgtctgacttcaagacctggctccagtctaagct

SEQ ID NO: 127914 - DNA, 80 bp, synthetic construct
  source 1..80: mol_type = other DNA
ggagggtttgcatttactcgctggcgcggcctttgaccatgccgccgctgccgacgttgcaagaggagaaggaggaggag

SEQ ID NO: 127915 - DNA, 80 bp, synthetic construct
  source 1..80: mol_type = other DNA
ccgcagttgctcctcgagatattccttgaggggcactggggtgtcatcggtgccatattgtattacagtatggttgcgaa

SEQ ID NO: 127916 - DNA, 80 bp, synthetic construct
  source 1..80: mol_type = other DNA
gaagagatgagtcgcataccaggaggaaggatgtatgcagatgacactgctggctgggacacccgcatcagcaggtttga

SEQ ID NO: 127917 - DNA, 80 bp, synthetic construct
  source 1..80: mol_type = other DNA
ggctgagagagtgtggtgtcgacaggttaaagaggatggcaattagtggagacgattgcgtggtgaaacccctagatgag

SEQ ID NO: 127918 - DNA, 80 bp, synthetic construct
  source 1..80: mol_type = other DNA
aaatgcaatctgctcagcagttccagtggactgggtgcccacaggcagaacatcctggtcaatacactcaaaaggagagt

SEQ ID NO: 127919 - DNA, 80 bp, synthetic construct
  source 1..80: mol_type = other DNA
aggagaatggagttcaactgacagttgtagtggggtctgtaaaaaaccctatgtggagaggtccacagagattgccagtg

SEQ ID NO: 127920 - DNA, 80 bp, synthetic construct
  source 1..80: mol_type = other DNA
tcccgcagtcagcgccgagggcgaactggcagaggcaagttgggcatatacagatatgtttcctctggtgagcgaccttc

SEQ ID NO: 127921 - DNA, 80 bp, synthetic construct
  source 1..80: mol_type = other DNA
cccaaaccattgacttttcacttgaccctacctttagtgtggagaccactaccgtgccccaggacgccgtgtcgcgaagt

SEQ ID NO: 127922 - DNA, 80 bp, synthetic construct
  source 1..80: mol_type = other DNA
gtcataataggagtggctacattcttctgttggatggctgaagtgcctggaacaaagatcgctggaatgttgctgctttc

SEQ ID NO: 127923 - DNA, 80 bp, synthetic construct
  source 1..80: mol_type = other DNA
tagtggacagacagtgggcccaggacttgaccctgccatggcagagtggaagtggcgtggtgtggagagagatgcatcat

SEQ ID NO: 127924 - DNA, 80 bp, synthetic construct
  source 1..80: mol_type = other DNA
cggtcttcaatatttcatcttattcttcatggcagcctggtatatcagggggagagcggtcccgttggccacctactcgc

SEQ ID NO: 127925 - DNA, 80 bp, synthetic construct
  source 1..80: mol_type = other DNA
gacaccaccatcatggcaaaaaatgaggttttctgcgtccaaccagagaaaggaggccgcaagccagctcgccttatcgt

SEQ ID NO: 127926 - DNA, 80 bp, synthetic construct
  source 1..80: mol_type = other DNA
cacactaccccaaggaagggcgtggcggtttattacagagccagtcccttgagcggggatgcgtcatagacgagatactg

SEQ ID NO: 127927 - DNA, 80 bp, synthetic construct
  source 1..80: mol_type = other DNA
accacagtcacgcacctggccgtcggggcgctcgcgttggggaaggtgacgggtccgtgctgctgccgctcgatcgttgt

SEQ ID NO: 127928 - DNA, 80 bp, synthetic construct
  source 1..80: mol_type = other DNA
ctgctttgactcaactgtcacagagagagacatcaaaactgaggagtccatataccaggcctgctccttacccgaggagg

SEQ ID NO: 127929 - DNA, 80 bp, synthetic construct
  source 1..80: mol_type = other DNA
gtatgggcctatcacctatgcctcccattccagcagggttgcaaatgacagcgagcgccggccttactgctggcactaca

SEQ ID NO: 127930 - DNA, 80 bp, synthetic construct
  source 1..80: mol_type = other DNA
gcctggcagagctggacatagattcaatggcgatccccatgaccatagccggcttgatgttcgcagcgtacgtgataaca

SEQ ID NO: 127931 - DNA, 80 bp, synthetic construct
  source 1..80: mol_type = other DNA
atgaaaagaaaatgccttgattttccgcttgcttgtattcccctggacaatttactctatgtgggatatgctccaggcga

SEQ ID NO: 127932 - DNA, 80 bp, synthetic construct
  source 1..80: mol_type = other DNA
agtcctcatgactaactctggggtacaattagcgggcgggtccaggtacgccaggtacagaggtcgggccgctccttact

SEQ ID NO: 127933 - DNA, 80 bp, synthetic construct
  source 1..80: mol_type = other DNA
cggcgtctccaacaggagacgcgggggatacaggggagaaggcctgcgggaacggaggtgtcgtacctctgcccgtttcc

SEQ ID NO: 127934 - DNA, 80 bp, synthetic construct
  source 1..80: mol_type = other DNA
atccttcgttgtctctggcatcgcgggagccgctgtcggtggtgtggggttgggcaaggtcctcgtcgacgtcctagccg

SEQ ID NO: 127935 - DNA, 80 bp, synthetic construct
  source 1..80: mol_type = other DNA
gtcatgttacagcgcaggcagctgccaggaggctcgctaggggcacctccccatctgatgcaagctcctcagcaagccag

SEQ ID NO: 127936 - DNA, 80 bp, synthetic construct
  source 1..80: mol_type = other DNA
cacaagccatcatgggagaagcctatggctttcagtattcgccacgggatagggttgagtacttactccgcttatggcgg

SEQ ID NO: 127937 - DNA, 80 bp, synthetic construct
  source 1..80: mol_type = other DNA
acctgcatgcccccactggcagtgggaaaagcactaaagtgccggctgcttacgcgagccaaggctacaaagtgcttgtg

SEQ ID NO: 127938 - DNA, 80 bp, synthetic construct
  source 1..80: mol_type = other DNA
aagaaatttcgcttcacaatctttttgatgtggagctggatcagtctgaaggggatccgaatgaggaagcggtagatggt

SEQ ID NO: 127939 - DNA, 80 bp, synthetic construct
  source 1..80: mol_type = other DNA
tggcactcaacgccttcctgagcacgcagccggccaacgtgccccgcgggcaggaggactacgtgagcttcatcagcgct

SEQ ID NO: 127940 - DNA, 80 bp, synthetic construct
  source 1..80: mol_type = other DNA
ttttaaagaaaacgaccccaatgtatccttgttatggttcttacgcacgacccacgaacgaaaaaggagggcaggcgaag

SEQ ID NO: 127941 - DNA, 80 bp, synthetic construct
  source 1..80: mol_type = other DNA
gaggaaggttaagagggtggtggcgagtctgatgagaggtttgtcctcgaggaaacgccgatcccaagatgttttggcta

SEQ ID NO: 127942 - DNA, 80 bp, synthetic construct
  source 1..80: mol_type = other DNA
aagcgccggaagtcgtcgcggaggcccacgggcgccggccgcgtgctttcggccgggacgcccggtcgtgcttcgcgagc

SEQ ID NO: 127943 - DNA, 80 bp, synthetic construct
  source 1..80: mol_type = other DNA
agcagggccatctggtacatgtggctggggagccgcttcctggagtttgaggccctcgggttcctaaacgaggatcactg

SEQ ID NO: 127944 - DNA, 80 bp, synthetic construct
  source 1..80: mol_type = other DNA
gtctttgatggtcactggggtgtgatctttggcctggcctacttctccatgcaaggggcgtgggccaaggtcgccgtcat

SEQ ID NO: 127945 - DNA, 80 bp, synthetic construct
  source 1..80: mol_type = other DNA
gccccatcactgaaggccacctgccctgctggtcacgactcccccggcgccgacctcattgaggcaaacctcttatggtg

SEQ ID NO: 127946 - DNA, 80 bp, synthetic construct
  source 1..80: mol_type = other DNA
cgccaacagcagcatcgtgtatgaggccgatgatgttatccttcatttacccggttgtgtaccctgcactatcgagaccg

SEQ ID NO: 127947 - DNA, 80 bp, synthetic construct
  source 1..80: mol_type = other DNA
atggcgttaaaggtactaacattgagcgacgatttgggagtataccgcaatgatcgaatccacaaagcggtgagcgcaag

SEQ ID NO: 127948 - DNA, 80 bp, synthetic construct
  source 1..80: mol_type = other DNA
tgcttcaggcctcgctactacgggttccctacttcgtgagagcacacgcgcttatcaaaatctgcagcatggtgcgcggg

SEQ ID NO: 127949 - DNA, 80 bp, synthetic construct
  source 1..80: mol_type = other DNA
ggcctcctatcagtagaggaggcatgcgaccttactccacctcactcggcccggtctaagtttggatacggtgccaaaga

SEQ ID NO: 127950 - DNA, 80 bp, synthetic construct
  source 1..80: mol_type = other DNA
cgaggaccatcgcttcggcgtcgggccctgtgatccagatgtacactaatgtggaccaggatttggtgggctggccagcg

SEQ ID NO: 127951 - DNA, 80 bp, synthetic construct
  source 1..80: mol_type = other DNA
ggagaagtcactgtggagtgtgaaccgaggagtggactgaatacagaggcctactacgtcatgaccattggaacgaaaca

SEQ ID NO: 127952 - DNA, 80 bp, synthetic construct
  source 1..80: mol_type = other DNA
gtatcctgcccctccttattccactgatcgccgcggcgattggcgccgtgcccggaattgcatccgtggccttgcaggcg

SEQ ID NO: 127953 - DNA, 80 bp, synthetic construct
  source 1..80: mol_type = other DNA
tctagacgcggccgatccagcccgtgttgtatcgttctcgcccattatacgatcaaccgcacgtgtgctgtgagatctat

SEQ ID NO: 127954 - DNA, 80 bp, synthetic construct
  source 1..80: mol_type = other DNA
ccgggaaggttttggaacacgaccatagccgtgtccactgccaacattttcaggggaagctacttggcaggagctggatt

SEQ ID NO: 127955 - DNA, 80 bp, synthetic construct
  source 1..80: mol_type = other DNA
gggcgaaggtcctagcagtccttttcctgtttgcagtggtggacgctaccacccgtaccgtcggggcagcgacgggccaa

SEQ ID NO: 127956 - DNA, 80 bp, synthetic construct
  source 1..80: mol_type = other DNA
cctcagctcgtccagagttatggatggaacatcgtgaccatgaagagcaaagtggatgtcttttacaaaccttcagaaag

SEQ ID NO: 127957 - DNA, 80 bp, synthetic construct
  source 1..80: mol_type = other DNA
gtggatgaaccgactcatcgcgttcgcgtcacgaggcaatcatgtctcacccacgcactacgtccccgaaaccgatgcgg

SEQ ID NO: 127958 - DNA, 80 bp, synthetic construct
  source 1..80: mol_type = other DNA
atcacatcgaagaattactgaagccgctgtgaaacctttcacaagacgatataaacttggttaagtgtattgatggggct

SEQ ID NO: 127959 - DNA, 80 bp, synthetic construct
  source 1..80: mol_type = other DNA
gccaacataaccggtccttcgcaagaccgaccctattgctggcattatgcacctaggccttgcaccaccatcccagccag

SEQ ID NO: 127960 - DNA, 80 bp, synthetic construct
  source 1..80: mol_type = other DNA
tctcggcgccgtcgctaagggctacgtgtacaacgcatggccctcacgtcgacgctgagctgatcgaggcgaatttgctg

SEQ ID NO: 127961 - DNA, 80 bp, synthetic construct
  source 1..80: mol_type = other DNA
catctccagcttgttgacgccgaacacccggttgttgctgttgttgatagcgccatttaccaatagcagcaccattagcc

SEQ ID NO: 127962 - DNA, 80 bp, synthetic construct
  source 1..80: mol_type = other DNA
acctatggcatcctccagctgtggcctctactcctactactgctcgttctcccgcctcgagctctcgctcatgactacga

SEQ ID NO: 127963 - DNA, 80 bp, synthetic construct
  source 1..80: mol_type = other DNA
cgccccgagccgcgcccggtcgactcccggcgcgccgcgcgccaggcttccgggccccacgaaaccatcacggcgctggt

SEQ ID NO: 127964 - DNA, 80 bp, synthetic construct
  source 1..80: mol_type = other DNA
ttctcactaaaccatgggatgtggtgcccatggtgacacaaatggcaatgacagacacaactccatttggccagcagaga

SEQ ID NO: 127965 - DNA, 80 bp, synthetic construct
  source 1..80: mol_type = other DNA
catggataggaatgaattcacgtagcacctcactgtctgtgtcattagtattagtgggagtcgtgacattgtatttggga

SEQ ID NO: 127966 - DNA, 80 bp, synthetic construct
  source 1..80: mol_type = other DNA
tggtagaatgtttgaaaaaacccgcaggggattggaaaggctctctgtggttggggaacatgcatgggactttggctcag

SEQ ID NO: 127967 - DNA, 80 bp, synthetic construct
  source 1..80: mol_type = other DNA
ttttgagagggttcaggaaagagattggaaggatgctgaacatcttgaacaggagacgcaggacagcaggcgtgatcgtt

SEQ ID NO: 127968 - DNA, 80 bp, synthetic construct
  source 1..80: mol_type = other DNA
gattttgacttgtgtgaaggcaccacagttgttgtggatgaacattgtggaaatcgaggtccatctctcagaactacaac

SEQ ID NO: 127969 - DNA, 80 bp, synthetic construct
  source 1..80: mol_type = other DNA
tccacatgggcgagcgacggtctccgcgatctcgcggtcgccgtggagccagtcaccttctcgcctatggagaagaaaat

SEQ ID NO: 127970 - DNA, 80 bp, synthetic construct
  source 1..80: mol_type = other DNA
ctcctatggtatgcacagatacaaccacactggatagcagcttcaataatactggagttttttctcatagtcttgctcat

SEQ ID NO: 127971 - DNA, 80 bp, synthetic construct
  source 1..80: mol_type = other DNA
acgaagcgctgcttggttccgtagtggtggcgcaggaccacggagatagaacgacggctccacagccagtccggccggtc

SEQ ID NO: 127972 - DNA, 80 bp, synthetic construct
  source 1..80: mol_type = other DNA
gaagcaatcaaccaactaacactgcgattagaaaacgggttagaagtaaccaacgaaggaaagcttaacgttaagttggg

SEQ ID NO: 127973 - DNA, 80 bp, synthetic construct
  source 1..80: mol_type = other DNA
tgggcgttaggatacaacgcctgcataaaagccttgatctgcttaaaagccacctgagcctttgcgccttcagagaagaa

SEQ ID NO: 127974 - DNA, 80 bp, synthetic construct
  source 1..80: mol_type = other DNA
tggaagtggaactgaagaatataaggcagacattgtgatgtacactgaaaatgtaaatctggaaactccagatacccatg

SEQ ID NO: 127975 - DNA, 80 bp, synthetic construct
  source 1..80: mol_type = other DNA
actgccgcctcagctcggccgccctgtcgtccaggtcagacccgcgcgcctccgcgtgaaggcgcgtcccgcacacccac

SEQ ID NO: 127976 - DNA, 80 bp, synthetic construct
  source 1..80: mol_type = other DNA
taactcccaggtgcctggtagactacccttatagactgtggcattatccgtgcactgtaaacttcaccatctttaaggcg

SEQ ID NO: 127977 - DNA, 80 bp, synthetic construct
  source 1..80: mol_type = other DNA
gccgtgtatgccgtggtcggcgccgtgacctcccgctacgaccgcgccctggacgcgggccgccgtctggctgcggcccg

SEQ ID NO: 127978 - DNA, 80 bp, synthetic construct
  source 1..80: mol_type = other DNA
cccaggtggtcattgacattgttgccgggggccactgggaggtcttgtttgctgccgcttacttcgcatcagcggctaac

SEQ ID NO: 127979 - DNA, 80 bp, synthetic construct
  source 1..80: mol_type = other DNA
agacattacagaaaagggtcttcaaattggcattgatgaaactaaagaagaaaataacaagatatttgccaatgaaatat

SEQ ID NO: 127980 - DNA, 80 bp, synthetic construct
  source 1..80: mol_type = other DNA
cacagcagcggctgtgactctttgggagaacggagccagttccgtgtggaacgcaacaacggcaatcggactctgccaca

SEQ ID NO: 127981 - DNA, 80 bp, synthetic construct
  source 1..80: mol_type = other DNA
gcctgcggtatcaaaggaacttaatgtatcaaaacgttgcgttgaacctgttaccctaacaggctctatgttagcgcata

SEQ ID NO: 127982 - DNA, 80 bp, synthetic construct
  source 1..80: mol_type = other DNA
gtacaatcatgctctcagtgaactgccggagaccctggagacactgcttctattgacactcctggcaacagtcacaggag

SEQ ID NO: 127983 - DNA, 80 bp, synthetic construct
  source 1..80: mol_type = other DNA
acggtggttgtggacaaaagagatcccagtgactacaggggaggcaaagtgggaaccctaaggcgttcaggcaaggaaat

SEQ ID NO: 127984 - DNA, 80 bp, synthetic construct
  source 1..80: mol_type = other DNA
tccattcttttctaaccttaaattttcctttctttaggtggctccatcttagccctagtcacggctagctgtgaaaggtc

SEQ ID NO: 127985 - DNA, 80 bp, synthetic construct
  source 1..80: mol_type = other DNA
aatattgaagaggttgccttgtccaacaccggagagatccccttctacggtaaggccattcccctcgcaaccatcaaggg

SEQ ID NO: 127986 - DNA, 80 bp, synthetic construct
  source 1..80: mol_type = other DNA
caatgtgtcaactgtgcttgctcagctggctgaaaagactttcccgcagcccgtgtcttcgacaacgggatacgggtcag

SEQ ID NO: 127987 - DNA, 80 bp, synthetic construct
  source 1..80: mol_type = other DNA
cttcctcttagctttgctgtcttgcctgacggtgcccgcctcagctcaccaagtgcgcaactcctcggggatctaccatg

SEQ ID NO: 127988 - DNA, 80 bp, synthetic construct
  source 1..80: mol_type = other DNA
atcctaacctggcaaaccgcaatgggtgtctggcaacaatgtctagaggagcgtaacctccgcgagcttgaaaaactgct

SEQ ID NO: 127989 - DNA, 80 bp, synthetic construct
  source 1..80: mol_type = other DNA
cccgttttcatcacgatggacggggcggttcgccggaccgccgatttgtttctggccgattccttcatgcaggagatcat

SEQ ID NO: 127990 - DNA, 80 bp, synthetic construct
  source 1..80: mol_type = other DNA
gtggacgcagaaacccatattacgggtggcaatgtgggtcataccacccgaggtctcgctaatctgtttacacctggtgc

SEQ ID NO: 127991 - DNA, 80 bp, synthetic construct
  source 1..80: mol_type = other DNA
gggacgggctcgccggaggtggcgtcggtgaatagcgtggtggccaggcttccgggccccaacgagccctccgccccaac

SEQ ID NO: 127992 - DNA, 80 bp, synthetic construct
  source 1..80: mol_type = other DNA
cttaccatggaagctatgaggcccccacacaagggtcagcgtcctctctaataaacggggttgtcaggctcctgtcaaaa

SEQ ID NO: 127993 - DNA, 80 bp, synthetic construct
  source 1..80: mol_type = other DNA
tatctatgaaagcatacagagattcagccatagctcagcccgcttaccagtagacagagagcacagcagtacaagcgcca

SEQ ID NO: 127994 - DNA, 80 bp, synthetic construct
  source 1..80: mol_type = other DNA
caacccgcccctaacccggcctccaccccctcgaccaccacctccaccccctcgaccaccacctccacgccctcgaccac

SEQ ID NO: 127995 - DNA, 80 bp, synthetic construct
  source 1..80: mol_type = other DNA
cgatgaagttgcaacacataaccaaattgccagaggcaacctgtacgccatggagatcaacctccaggccaacctgtgga

SEQ ID NO: 127996 - DNA, 80 bp, synthetic construct
  source 1..80: mol_type = other DNA
tgcgcgagtgtattcagaccatcagtccttgaaatggtttaaagatttcgctgcaggaaagcggtcagccatggggtttg

SEQ ID NO: 127997 - DNA, 80 bp, synthetic construct
  source 1..80: mol_type = other DNA
gaaggaaatgatggctttttgtgggacgacgttacagacagtctgtttagtcctgcagttattggacaccatggtaaaaa

SEQ ID NO: 127998 - DNA, 80 bp, synthetic construct
  source 1..80: mol_type = other DNA
agatgcaccatgcaagatccccttctcgtcccaagatgagaagggagtaacccagaatgggagattgataacagccaacc

SEQ ID NO: 127999 - DNA, 80 bp, synthetic construct
  source 1..80: mol_type = other DNA
tactttcagtaggggtaggcatctttttgctccctgctcggtaggcagggagcctaaagcaacactccatcttctttagt

SEQ ID NO: 128000 - DNA, 80 bp, synthetic construct
  source 1..80: mol_type = other DNA
ctttttgtttaacattctgactgggaaaaagttgactgctcatctaaaaaaactctggaggatgcttgatccaaggcagg

SEQ ID NO: 128001 - DNA, 80 bp, synthetic construct
  source 1..80: mol_type = other DNA
cagcaaaacttgcctggcttgaggagcgcggttacgtgaacctcaaaggcgaagtggtggacctcggctgtggaagagga

SEQ ID NO: 128002 - DNA, 80 bp, synthetic construct
  source 1..80: mol_type = other DNA
gtaaagccagcagcacatggtaatccacggacagaacttacattatgataatctgcatgatcacaatcgggcaacagggg

SEQ ID NO: 128003 - DNA, 80 bp, synthetic construct
  source 1..80: mol_type = other DNA
cttgtagcacaagtcgaggcggcgctggctaatctaatcaccatcaatgccatgtctgcagctggcgcgcagggagttcc

SEQ ID NO: 128004 - DNA, 80 bp, synthetic construct
  source 1..80: mol_type = other DNA
acaaagttactgtctatgatttatataaagcaagtaaaaccaagtctaatgtcagaccttacaccacaaagggcactaca

SEQ ID NO: 128005 - DNA, 80 bp, synthetic construct
  source 1..80: mol_type = other DNA
tgatgaggagtgggcggaggacccgggcgccatggacacatcccacgatcccccggacgacgaggttgcctactttgacc

SEQ ID NO: 128006 - DNA, 80 bp, synthetic construct
  source 1..80: mol_type = other DNA
ggtgatgtgattgggctttatggcaatggagtcataatgcccaacggctcatacataagcgcgatagtgcagggtgagag

SEQ ID NO: 128007 - DNA, 80 bp, synthetic construct
  source 1..80: mol_type = other DNA
acgcgttgagcaactctttgctgcgtcaccacaacatggtttacgccacaacatcccgcagcgcaagccagcggcagaag

SEQ ID NO: 128008 - DNA, 80 bp, synthetic construct
  source 1..80: mol_type = other DNA
gtgcaaaggatgttcgttccttctccagcaaggccatgaaccagatccgctccgtctggaaggacttgttggaagacaat

SEQ ID NO: 128009 - DNA, 80 bp, synthetic construct
  source 1..80: mol_type = other DNA
ggttggtggcatggtgcttctaggagccatgctagttggacaggtgactatcttggacttgctgaagctcacagtggcgg

SEQ ID NO: 128010 - DNA, 80 bp, synthetic construct
  source 1..80: mol_type = other DNA
tggttctcggcctaattggggccccaatgacccccggcgcaggtcccgcaatctgggtaaggtcatcgataccctgactt

SEQ ID NO: 128011 - DNA, 80 bp, synthetic construct
  source 1..80: mol_type = other DNA
tgcggtccattgaatgtcgtaacaaagttgtagtaatggatatgcacagcagccactgttccggtaatcgcggatatgga

SEQ ID NO: 128012 - DNA, 80 bp, synthetic construct
  source 1..80: mol_type = other DNA
ctccccgggtccactggacgacgcaagactgcaattgttccatctatcccggcgacataacaggacatcgtatggcttgg

SEQ ID NO: 128013 - DNA, 80 bp, synthetic construct
  source 1..80: mol_type = other DNA
ctcttccaaaagggtgtggcctaacgagctggtggcgtatttaatcaggctagcgcggcgggcctgccgtagtttctggc

SEQ ID NO: 128014 - DNA, 80 bp, synthetic construct
  source 1..80: mol_type = other DNA
ctaatgacacacttcttctccattctcatggtccaagacaccctggaccagaacctcaactttgagatgtatggatcagt

SEQ ID NO: 128015 - DNA, 80 bp, synthetic construct
  source 1..80: mol_type = other DNA
gtgtggattcgccgacctcatggggtacatcccgctcgtcggcgctcccgtaggtggcgtcgcaagggcccttgcgcatg

SEQ ID NO: 128016 - DNA, 80 bp, synthetic construct
  source 1..80: mol_type = other DNA
aatggcatagtttgtttcatcatcttcttcatagccgcctggcatatcaagggccgattggtccccctggctgcttactc

SEQ ID NO: 128017 - DNA, 80 bp, synthetic construct
  source 1..80: mol_type = other DNA
tggtccacctctcccgatcattgagagtgcggtggattttttccaggacccggtagaggtgggattggatgttgaggtac

SEQ ID NO: 128018 - DNA, 80 bp, synthetic construct
  source 1..80: mol_type = other DNA
ttggagtgttatataacactccaatcgatctcgggttcgcctttacgcgtaaaatactcattggcttgaacgaaatgtcg

SEQ ID NO: 128019 - DNA, 80 bp, synthetic construct
  source 1..80: mol_type = other DNA
acatcacgcgcccacgtcagatgaacttacctccgaagacttttcatgtaattgtaaattttaattacgaggtctcgtac

SEQ ID NO: 128020 - DNA, 80 bp, synthetic construct
  source 1..80: mol_type = other DNA
tatgactctcgagattcctcccttgccagaacctactgttgcggaacctgtggttactgctccgattgtttcaactgtat

SEQ ID NO: 128021 - DNA, 80 bp, synthetic construct
  source 1..80: mol_type = other DNA
cggcgaggtcgtacgggcaggggaaaactggggatatataggtacgtctcgcaaggagagcggccgtcaggcatgttcaa

SEQ ID NO: 128022 - DNA, 80 bp, synthetic construct
  source 1..80: mol_type = other DNA
acggcccttgctggagctctggaggctgagatggatggtgcaaagggaaggctgtcctctggccacttgaaatgtcgcct

SEQ ID NO: 128023 - DNA, 80 bp, synthetic construct
  source 1..80: mol_type = other DNA
accactgcgggttcggctggttggaccccgggggcttgccgttggggaagatggccgcgtggaactgcttcagcagaaag

SEQ ID NO: 128024 - DNA, 80 bp, synthetic construct
  source 1..80: mol_type = other DNA
aaacccattgagcaattccctcattcgacaccacaatctggtgtactccacaacatcccggagtgctgcacagcggcaga

SEQ ID NO: 128025 - DNA, 80 bp, synthetic construct
  source 1..80: mol_type = other DNA
gctcgcctcatgcaagaggttgagcgactttaatcaaggctgggggggtcttggcagctccaacatctctggtccgtctg

SEQ ID NO: 128026 - DNA, 80 bp, synthetic construct
  source 1..80: mol_type = other DNA
tcgtccgtcctctgtgagtgctatgacgcgggctgtgcttggtatgagctcacgcccgccgagactacagttaggctacg

SEQ ID NO: 128027 - DNA, 80 bp, synthetic construct
  source 1..80: mol_type = other DNA
ttcggtgtcccccctggaccttcctgaaatcattcaacgactccatggtcccagcgcgttcacactccatacttactctc

SEQ ID NO: 128028 - DNA, 80 bp, synthetic construct
  source 1..80: mol_type = other DNA
gtggggcgaggacctaggtcccaccgtcagactggaatctgataacaaggtggtggtctttgattccttcaccccccttg

SEQ ID NO: 128029 - DNA, 80 bp, synthetic construct
  source 1..80: mol_type = other DNA
ccgaggtggatggtgtgcggatacaccggtatgcacccccgtgcaaacctctcctcagggatgaggtcaccttcagggtg

SEQ ID NO: 128030 - DNA, 80 bp, synthetic construct
  source 1..80: mol_type = other DNA
tccccggagctccaggacacgggggagatggtgtggcgtccgaggtcggaggcgccaaacagaagcacctccgagacaac

SEQ ID NO: 128031 - DNA, 80 bp, synthetic construct
  source 1..80: mol_type = other DNA
cttcccatatcaccgccgagacggcagcgcgccgccttgcgcgtgggtcccctccatcagaggcaagctcatccgccagc

SEQ ID NO: 128032 - DNA, 80 bp, synthetic construct
  source 1..80: mol_type = other DNA
ccgcacggtggggagagagagaccgccaacccccccccccactgccgcccctgaagaagaagaagacccaccgcacaccc

SEQ ID NO: 128033 - DNA, 80 bp, synthetic construct
  source 1..80: mol_type = other DNA
taatcacaacacagcactaacatgttatttaaaattccataattaaaggcgctccatccaaaactaactttttctaacgc

SEQ ID NO: 128034 - DNA, 80 bp, synthetic construct
  source 1..80: mol_type = other DNA
tggcactaaaagaattcaaggaatttgcagctgggagaaaatctttgaccctgaacctaatcacagaaatgggcaggctt

SEQ ID NO: 128035 - DNA, 80 bp, synthetic construct
  source 1..80: mol_type = other DNA
agattgaggacggctgtactggcacccaccagggtcgttgctgctgagatgtctgaggccctgagaggacttcccatccg

SEQ ID NO: 128036 - DNA, 80 bp, synthetic construct
  source 1..80: mol_type = other DNA
gaggtgtggcctgggcgtgtttgtaagtttgtgcggatgaggaagttgggcgcggcgtgggagccgggcgcgccggatgt

SEQ ID NO: 128037 - DNA, 80 bp, synthetic construct
  source 1..80: mol_type = other DNA
acttcaaagcctggctgcaggcaaaactcctcccacaactccccggagtgcccttcctctcgtgtcagagagggtacaag

SEQ ID NO: 128038 - DNA, 80 bp, synthetic construct
  source 1..80: mol_type = other DNA
ggacgcttgctggcaacaaacagcccgcgctccaaatgtacaccaatgtggaccaggatctggtgggttggccggctcct

SEQ ID NO: 128039 - DNA, 80 bp, synthetic construct
  source 1..80: mol_type = other DNA
agtgctggacgagacgaccaattggctgtgggcctacctatcaagagagaaaaaacctcgtttgtgcacgagagaggaat

SEQ ID NO: 128040 - DNA, 80 bp, synthetic construct
  source 1..80: mol_type = other DNA
ctgcatgtgcatgtttctacttaggttcttaggtgtcacagtccaaatagtttccttccgagcaaagcgatgatcaatga

SEQ ID NO: 128041 - DNA, 80 bp, synthetic construct
  source 1..80: mol_type = other DNA
ctccttaaacgcatactatggtccatgaacttcccgcctcgagtctcgtccaatcactacatcgtcttatcattaagaat

SEQ ID NO: 128042 - DNA, 80 bp, synthetic construct
  source 1..80: mol_type = other DNA
tgctgctgctatttgccggcgtcgacgcggaaacccacgtcaccgggggagccgctgcccatggcacgtctgtattcact

SEQ ID NO: 128043 - DNA, 80 bp, synthetic construct
  source 1..80: mol_type = other DNA
gggatgtgattcccatggtgacccagatggcaatgacagacacaacaccatttggacagcaaagagtcttcaaggaaaaa

SEQ ID NO: 128044 - DNA, 80 bp, synthetic construct
  source 1..80: mol_type = other DNA
tgtgttgacccccttaagggtgggaagaagccagctcgtctcatagtgtaccctgacctggtggtcagggtgtgcgaaaa

SEQ ID NO: 128045 - DNA, 80 bp, synthetic construct
  source 1..80: mol_type = other DNA
tacctgttacagtacagcctcctgcaagtgccgtattacgtgcgtgctcatgcgctcctccgtgtgtgcatgctcgtgcg

SEQ ID NO: 128046 - DNA, 80 bp, synthetic construct
  source 1..80: mol_type = other DNA
cttattcttaaatactgcgatcattcacagtaccttataaataccttaacttctataattacgggtgccaggcgcccgcg

SEQ ID NO: 128047 - DNA, 80 bp, synthetic construct
  source 1..80: mol_type = other DNA
ggctacagtcacaggagggatctttttattcttgatgagcgggagtggcatagggaagatgaccctgggaatgtgctgca

SEQ ID NO: 128048 - DNA, 80 bp, synthetic construct
  source 1..80: mol_type = other DNA
tttggatagaggaaaacccatggatggaggacaaaacccacatatccagttggggagatgttccatatttaggaaaaagg

SEQ ID NO: 128049 - DNA, 80 bp, synthetic construct
  source 1..80: mol_type = other DNA
agaaaactttccagcctgaacctcaagttggtgaagaaaactggcaggaaagtgaagccttttatggaggaagggctatt

SEQ ID NO: 128050 - DNA, 80 bp, synthetic construct
  source 1..80: mol_type = other DNA
ctgcgccatcacaacatggtgtacgccacgacctccaggtctgccactatgcggcagaagaaggttaccttcgaccgact

SEQ ID NO: 128051 - DNA, 80 bp, synthetic construct
  source 1..80: mol_type = other DNA
ggggcgcggtaccccgccgatggggagtgggcgcggtaccccgccgatggtgaggtggcgcggtaccccgccgatggtga

SEQ ID NO: 128052 - DNA, 80 bp, synthetic construct
  source 1..80: mol_type = other DNA
ctggccttgcggcagggcgctgtcatacctgatatcgcctcgctcgacgaagtgccaaaaatctttgagggtcttggacg

SEQ ID NO: 128053 - DNA, 80 bp, synthetic construct
  source 1..80: mol_type = other DNA
ctaagctacactgctgcagctgcttgctattataatcttaatgtaaccagaggagaaaatattacactctcaggagcagg

SEQ ID NO: 128054 - DNA, 80 bp, synthetic construct
  source 1..80: mol_type = other DNA
gtttttcagggtaatgattctaaagtttttttgtatgaatttccattttatgaaatgtgtgacattaccatgtacatgag

SEQ ID NO: 128055 - DNA, 80 bp, synthetic construct
  source 1..80: mol_type = other DNA
gccaatgacaagacgctgggcgtggtttgtgtcatcatagaactaaagacatgcaaatatatttcttccggggacaccgc

SEQ ID NO: 128056 - DNA, 80 bp, synthetic construct
  source 1..80: mol_type = other DNA
ccattgtacgagaagccctcaaggaatgcacacagactccgctgacggtggaggaattaagccgcgcgtatgaagctaac

SEQ ID NO: 128057 - DNA, 80 bp, synthetic construct
  source 1..80: mol_type = other DNA
ggctcaaggccaagctgctgccccgcatgcccggcatccccttcctctcctgtcagagaggttacaagggggaatggcga

SEQ ID NO: 128058 - DNA, 80 bp, synthetic construct
  source 1..80: mol_type = other DNA
gccgcaaacctatcaggtagggtacctccacgctcccacggggagtgggaagagtacgaaagttccagcggcttatgcgg

SEQ ID NO: 128059 - DNA, 80 bp, synthetic construct
  source 1..80: mol_type = other DNA
cgtcgcgacagaactgcgtttgccgatacgggcgttgggccgaattgtaagcgcgtcacctcttgggagtcatcggcgga

SEQ ID NO: 128060 - DNA, 80 bp, synthetic construct
  source 1..80: mol_type = other DNA
ctgcccatcaatgcgctcagcaactcgctgctgcgccatcgcaacctggtatactctacaacttcccgcagtgcagggca

SEQ ID NO: 128061 - DNA, 80 bp, synthetic construct
  source 1..80: mol_type = other DNA
aaagaaataaaaaaggaataacttccaacttattactggtactgtgactgttttatgcagactaaatggaagacatcaat

SEQ ID NO: 128062 - DNA, 80 bp, synthetic construct
  source 1..80: mol_type = other DNA
ctcctcttttccaccacccagctgtctatcttgccctgctcctttaccactatgcccgcgctatccacagggttaataca

SEQ ID NO: 128063 - DNA, 80 bp, synthetic construct
  source 1..80: mol_type = other DNA
aaggccacatacgcgcgctcgaacgcccccgccttccagctgctgccgggggactcttcgcacaccgcgacgctcgccag

SEQ ID NO: 128064 - DNA, 80 bp, synthetic construct
  source 1..80: mol_type = other DNA
tcgccaacatcagcggcccatccgaggacaagccttattgctggcactatccaccccgaccatgcggggtagtgcctgcg

SEQ ID NO: 128065 - DNA, 80 bp, synthetic construct
  source 1..80: mol_type = other DNA
ccgaatgtcataggccacccaggcctaagtacccgcctgccctacccatctgggcgaggccggactacaatccccctcta

SEQ ID NO: 128066 - DNA, 80 bp, synthetic construct
  source 1..80: mol_type = other DNA
ggcagagattttgcgccccactaaaaggttcccgccggccataccaatctgggcccggccagactacaacccgcctctgg

SEQ ID NO: 128067 - DNA, 80 bp, synthetic construct
  source 1..80: mol_type = other DNA
actgcctatcgatgggtagtgtggtggtgaccgggagggtcatactatcaggccagcctgccatcataccagaccgtgag

SEQ ID NO: 128068 - DNA, 80 bp, synthetic construct
  source 1..80: mol_type = other DNA
aactcctggcttggcaacatcataatgtttgcccccacactgtgggtgaggatggtcttgatgacccacttcttttctat

SEQ ID NO: 128069 - DNA, 80 bp, synthetic construct
  source 1..80: mol_type = other DNA
acctgttatctcaaggccagtgcagcctgtcgagctgcaaagctccgggactgcactatgctcgtgtgcggcgacgacct

SEQ ID NO: 128070 - DNA, 80 bp, synthetic construct
  source 1..80: mol_type = other DNA
agacaaacaacgtctgtagcgaccctttgcaggcagcggaaccccccacctggcgacaggtgcctctgcggccaaaagcc

SEQ ID NO: 128071 - DNA, 80 bp, synthetic construct
  source 1..80: mol_type = other DNA
tacggcctttaatacccacaccttctttaaggtttttgctctaggccccaagcagaacttgcagctgattaacaccaacg

SEQ ID NO: 128072 - DNA, 80 bp, synthetic construct
  source 1..80: mol_type = other DNA
gaaactggtacgttggacattcaggcggttgactggatgtaccaagctcgcaatattattgactcccatccactaagtgt

SEQ ID NO: 128073 - DNA, 80 bp, synthetic construct
  source 1..80: mol_type = other DNA
ttcagaaagcaccctgaggcaacgtatagtaaatgcggggccgggccctggctgacacccaggtgcctgatcgactaccc

SEQ ID NO: 128074 - DNA, 80 bp, synthetic construct
  source 1..80: mol_type = other DNA
tactggtcctattcctgtttgctggagtggacgccaatacccacatctctggtggcacagcggcgcgtagcgtcggcagc

SEQ ID NO: 128075 - DNA, 80 bp, synthetic construct
  source 1..80: mol_type = other DNA
cagcctcagtcctttctttcatggacaaggggataccattcatgaagatgaatatctcggtcataatgctgctggtcagt

SEQ ID NO: 128076 - DNA, 80 bp, synthetic construct
  source 1..80: mol_type = other DNA
cgcatacctgaatactcctggcttacctgtgtgccaagatcaccttgaattttgggagggagtattcacggggcttacac

SEQ ID NO: 128077 - DNA, 80 bp, synthetic construct
  source 1..80: mol_type = other DNA
ttttcaaccagaacctcaagttggttcctatgccagacctactaatgaaaagggcggacaggctaaatttttaaatggag

SEQ ID NO: 128078 - DNA, 80 bp, synthetic construct
  source 1..80: mol_type = other DNA
cagacggtaaatctgagccaagcttttaaaaaccttaaaggtttgtggggagtgcatgccccggtaggagaaagagcaac

SEQ ID NO: 128079 - DNA, 80 bp, synthetic construct
  source 1..80: mol_type = other DNA
ataaattatgcaacagggaatttgcccggttgctctttctctatcttcctcttagccctcttgtcctgcatctctgtgcc

SEQ ID NO: 128080 - DNA, 80 bp, synthetic construct
  source 1..80: mol_type = other DNA
cttggtggcgaggaagacggactcgggggcgtaggcgtccgcgccgcagtgggcgcagacggtctcgcactccacgagcc

SEQ ID NO: 128081 - DNA, 80 bp, synthetic construct
  source 1..80: mol_type = other DNA
caatattacaaacatgaaattactatgtttaatcttactgtaattgaacatccaacaacaaaagcacccaccactgctaa

SEQ ID NO: 128082 - DNA, 80 bp, synthetic construct
  source 1..80: mol_type = other DNA
tttccccgccccctcacactgatttttatcatatttaacaaactgctctatacaagttaagtatgaatggcatcacccct

SEQ ID NO: 128083 - DNA, 80 bp, synthetic construct
  source 1..80: mol_type = other DNA
cacaacaagaagcgagctgatagtagctatgtgtgcaaacaaggcttcaccgatcgtgggtggggcaacggatgtggact

SEQ ID NO: 128084 - DNA, 80 bp, synthetic construct
  source 1..80: mol_type = other DNA
ggatgtggaagaggcggctggtgttactatatggcaacccaaaaaagagtccaagaggtcagagggtacacaaagggcgg

SEQ ID NO: 128085 - DNA, 80 bp, synthetic construct
  source 1..80: mol_type = other DNA
gggtggaaatcaatctttatctgctgggttagatattgcgtggaggaaccatgaaggggcttttgctaattatcctttcc

SEQ ID NO: 128086 - DNA, 80 bp, synthetic construct
  source 1..80: mol_type = other DNA
ccaggtgctggagccgagcctctagctgcaggcgggccgtgggatccaagactgacacattaaaaaacacagaatccgcg

SEQ ID NO: 128087 - DNA, 80 bp, synthetic construct
  source 1..80: mol_type = other DNA
ctcaagttacatcgcctgacaccttatggaccactgccgatccatcccccaattgttccatctacactgatttagatgcc

SEQ ID NO: 128088 - DNA, 80 bp, synthetic construct
  source 1..80: mol_type = other DNA
gcctgactccggaaggccaccgggtggccgttcacgtttacggcacgcggcagtacttttacatgaacaaggaggaggtc

SEQ ID NO: 128089 - DNA, 80 bp, synthetic construct
  source 1..80: mol_type = other DNA
gggtttggattagggtcatctggaagaagaacgatgggagtcataatccgagaacgggatcgggcggttgtgtcttaaac

SEQ ID NO: 128090 - DNA, 80 bp, synthetic construct
  source 1..80: mol_type = other DNA
cagcaataaatcaggttagatctcttataggcaatgaggaatacacagattacatgccatccatgaaaagatttagaaga

SEQ ID NO: 128091 - DNA, 80 bp, synthetic construct
  source 1..80: mol_type = other DNA
tgggcgccgccgcgttgtgctcggccatgtacgtgggagacctctgtggtggggttttcctagttgggcaacttttcacc

SEQ ID NO: 128092 - DNA, 80 bp, synthetic construct
  source 1..80: mol_type = other DNA
ttggccatgactcccgcaaagcgttcacggcgacgggtcacgctggcactatgttcacatggaacaacataagcagattt

SEQ ID NO: 128093 - DNA, 80 bp, synthetic construct
  source 1..80: mol_type = other DNA
ttgactaccagcatgggcaacaccttgacatgctacctgaaagcacaggcggcgtgcagggctgctaagctgaaggactt

SEQ ID NO: 128094 - DNA, 80 bp, synthetic construct
  source 1..80: mol_type = other DNA
agtcattcttgcaggaccgatgccagtgacaccatcgagtgcggcacagagaaggggcagaatagggagaaatccgaaga

SEQ ID NO: 128095 - DNA, 80 bp, synthetic construct
  source 1..80: mol_type = other DNA
tgttcccgcacgtacagctccgcgagcgtgttgctgagaaggggctggtacgcgatcagaaagcccccattggccaggta

SEQ ID NO: 128096 - DNA, 80 bp, synthetic construct
  source 1..80: mol_type = other DNA
agacgcccgggtccgcgtcctaccgcatcagcgatagcaactttgtccaatgtggttccaactgcaccatgatcatcgac

SEQ ID NO: 128097 - DNA, 80 bp, synthetic construct
  source 1..80: mol_type = other DNA
ttcaaactaattcagcctaccaaggtgttaaactaaaggctaatcaagcaggaggtggagctaatggagactgggaaaag

SEQ ID NO: 128098 - DNA, 80 bp, synthetic construct
  source 1..80: mol_type = other DNA
gatcgtctgctgaagatgtggcgttcaaagaagtcgcccatgggcttctcctatgacaccagatgtttcgactccacagt

SEQ ID NO: 128099 - DNA, 80 bp, synthetic construct
  source 1..80: mol_type = other DNA
acgcagctctcggagcagtgttcgctgaacagaatcaatggagcacggcgcgggaggccgtgggtgaccctctgttctgg

SEQ ID NO: 128100 - DNA, 80 bp, synthetic construct
  source 1..80: mol_type = other DNA
ttcaaaaacttcccacctggggtcctgtcactcaaactggctgacccaatcgccatcactaatggggatgtctcactcaa

SEQ ID NO: 128101 - DNA, 80 bp, synthetic construct
  source 1..80: mol_type = other DNA
gcgtcgcggccgtaccggcaggaggaagcccgggatatacaggtacgtctcgcaaggggagcgaccgtcaggaatgtttg

SEQ ID NO: 128102 - DNA, 80 bp, synthetic construct
  source 1..80: mol_type = other DNA
ggctatataaataacctgtttggaaccatcgagcgcctgcgcgagaccaacgcgggcctggcgacccaattgcaggagcg

SEQ ID NO: 128103 - DNA, 80 bp, synthetic construct
  source 1..80: mol_type = other DNA
gtgcggatgtacgtggtagggttggagcatcggctggaagcggcgtgcaacttcacgcgcggggatccctgcgggctgga

SEQ ID NO: 128104 - DNA, 80 bp, synthetic construct
  source 1..80: mol_type = other DNA
gccattagtgctatgactcagggtcgcaggggcaacgtgtactgggtgcgcgactcggttagcggcctgcgcgtgcccgt

SEQ ID NO: 128105 - DNA, 80 bp, synthetic construct
  source 1..80: mol_type = other DNA
catagaccttggtgaattgtgtgaagatacaatcacgtacaagtgtcccctcctcaggcaaaatgaaccagaagacatag

SEQ ID NO: 128106 - DNA, 80 bp, synthetic construct
  source 1..80: mol_type = other DNA
ccaacagcagtatcgtatatgaggcgccagctgtcattatgcatcttcctggatgcaccccttgtgtcaaggtcggtaat

SEQ ID NO: 128107 - DNA, 80 bp, synthetic construct
  source 1..80: mol_type = other DNA
agtatggggaacaaatttagaaaccccacagtggcgcccacccacgatgtgaccaccgaccgtagccagcgcctgatgct

SEQ ID NO: 128108 - DNA, 80 bp, synthetic construct
  source 1..80: mol_type = other DNA
acaagtgtgcggtcctgtctactgttttacaccgagtcctgtggttgtggggaccacggacaagaagggactaccaactt

SEQ ID NO: 128109 - DNA, 80 bp, synthetic construct
  source 1..80: mol_type = other DNA
cgggccgccgggtccaacacggacacgttcaggaacaccgagtcggccgcgcagcccgctgctccccgggcggccaggcc

SEQ ID NO: 128110 - DNA, 80 bp, synthetic construct
  source 1..80: mol_type = other DNA
tgcaccttcctgggtgcgtcccgtgtgttggcgcaggaaatgcatcgcggtgttggtatccagtcacccccaccattgct

SEQ ID NO: 128111 - DNA, 80 bp, synthetic construct
  source 1..80: mol_type = other DNA
aagtgctagtggacatcttggcagggtatggtgcgggcatttcgggggctctcgtcgcatttaagatcatgtctggcgag

SEQ ID NO: 128112 - DNA, 80 bp, synthetic construct
  source 1..80: mol_type = other DNA
tcatggccaaaaatgaggtgttctgcgtggaccccgccaaggggggtaagaaaccagctcgcctcatcgtttaccctgac

SEQ ID NO: 128113 - DNA, 80 bp, synthetic construct
  source 1..80: mol_type = other DNA
gccaggcgtgcggtcagccggccgcgggagaccctggggtccggaggtcgggaaagcgtcgccggtacgaggcgtggccg

SEQ ID NO: 128114 - DNA, 80 bp, synthetic construct
  source 1..80: mol_type = other DNA
taccatggtgcaggttcgaaaacgctcgcgggcgccaaacatcccgcgctccaaatgtacacaaatgtggatcaggacct

SEQ ID NO: 128115 - DNA, 80 bp, synthetic construct
  source 1..80: mol_type = other DNA
ctgagaatggacaaactacagctcaaaggaatgtcatattccatgtgtacaggaaagttcaaagttgtgaaggaaatagc

SEQ ID NO: 128116 - DNA, 80 bp, synthetic construct
  source 1..80: mol_type = other DNA
ctgccccactgactgtttcaggaagcatcctgagactacctatgccaagtgcgggtcaggtccttggatcacgccacgat

SEQ ID NO: 128117 - DNA, 80 bp, synthetic construct
  source 1..80: mol_type = other DNA
ctgcccccgaagccacgccaccccgtcgacctttgccaaggttctggcgtggctcggggtcgcgggtcgccgcacgtccc

SEQ ID NO: 128118 - DNA, 80 bp, synthetic construct
  source 1..80: mol_type = other DNA
attggaggaactgccagatgccctacagaccattgccctaataacactgttgagcgttatgactctcggggtgttctgcc

SEQ ID NO: 128119 - DNA, 80 bp, synthetic construct
  source 1..80: mol_type = other DNA
ggcgggagaagagggaagaagaggcgtcgggatccaaaggacggacccagaccacctttggttgcagacccctttctccc

SEQ ID NO: 128120 - DNA, 80 bp, synthetic construct
  source 1..80: mol_type = other DNA
ccgtgcgctgcggaggaggaaaagttgccaataagccccatgagcaattcgctcatccgacatcacaatttggtatactc

SEQ ID NO: 128121 - DNA, 80 bp, synthetic construct
  source 1..80: mol_type = other DNA
caagttcttggctgatgggggctgctcgggaggagcctacgacatcataatctgtgatgaatgtcacgccaccgacccca

SEQ ID NO: 128122 - DNA, 80 bp, synthetic construct
  source 1..80: mol_type = other DNA
atccttctcatgtgtgcggtccacccagagctaatcttttccatcaccaagatcttgctcgccatactcggtccgctcat

SEQ ID NO: 128123 - DNA, 80 bp, synthetic construct
  source 1..80: mol_type = other DNA
tgggcctatcacctacaactctagcagtggtatgagtggcgaggagcgccggccatattgctggcactacagcccgcccc

SEQ ID NO: 128124 - DNA, 80 bp, synthetic construct
  source 1..80: mol_type = other DNA
cggagacgccccgcaaccagcgtatgatctcgagctgataacatcttgctcatccaatgtctcggtggcgcacgacgcta

SEQ ID NO: 128125 - DNA, 80 bp, synthetic construct
  source 1..80: mol_type = other DNA
cccagccacgtgggaggcgccagcccatccctaaagatcggcgcaccactggcaagtcctggggaaaaccaggatacccc

SEQ ID NO: 128126 - DNA, 80 bp, synthetic construct
  source 1..80: mol_type = other DNA
ccttccagttcggtatatgacgccagccataaatgtggcccactctgggaccgagattgttgacctgatgtgtcatgcca

SEQ ID NO: 128127 - DNA, 80 bp, synthetic construct
  source 1..80: mol_type = other DNA
tggtgctctcgtagcctttaaaatcatgagcggcgagatgccatccatggaagacatggtcaatttgctgccggccattc

SEQ ID NO: 128128 - DNA, 80 bp, synthetic construct
  source 1..80: mol_type = other DNA
gacattaccaaactgttactagcaataattggtcctttgatggtgctccaagcatgcctggttagggtgccatacttcgt

SEQ ID NO: 128129 - DNA, 80 bp, synthetic construct
  source 1..80: mol_type = other DNA
gctatgaccaggtactctgctccccccggggatcccccccaaccagaatacgacttggagcttataacatcgtgctcctc

SEQ ID NO: 128130 - DNA, 80 bp, synthetic construct
  source 1..80: mol_type = other DNA
agtacagagttactgtttatacaagaccacgtaatgaaactgtgagaattcaaccatacaccactaagggaactacaaaa

SEQ ID NO: 128131 - DNA, 80 bp, synthetic construct
  source 1..80: mol_type = other DNA
tgcagcttcccgttcatccgcccgcgatgacaagttgacggctcttttggcacaattggattctttgacccgggaactta

SEQ ID NO: 128132 - DNA, 80 bp, synthetic construct
  source 1..80: mol_type = other DNA
taaaacatcaggggctcaggaaccaccaccgaaataaaaaccggtcgtaacaaatacattgtgtcctgcaacaaaaaaaa

SEQ ID NO: 128133 - DNA, 80 bp, synthetic construct
  source 1..80: mol_type = other DNA
gccggaaaacctaccggattgatggtagtggtcaaatggcgattaccgttgatgttgaagtggcgagcgatacaccgcat

SEQ ID NO: 128134 - DNA, 80 bp, synthetic construct
  source 1..80: mol_type = other DNA
gccccggccgggtacttcacccccatcgccgtggacctgtggaacgtcatgtacacgttggtggtcaaatatcagcgccg

SEQ ID NO: 128135 - DNA, 80 bp, synthetic construct
  source 1..80: mol_type = other DNA
tttagctctaaatatgtcacagcctgttactattaatgcaaacaacgaactttctctcttaatagacgccccacttaatg

SEQ ID NO: 128136 - DNA, 80 bp, synthetic construct
  source 1..80: mol_type = other DNA
caagccgtaaaggactatgaaacatataacaatggtgaggtcaagtatcctgaaataacacgggatgatttattagcaac

SEQ ID NO: 128137 - DNA, 80 bp, synthetic construct
  source 1..80: mol_type = other DNA
gctaaattggccttacgtcctgattgtagctacagaattactaaaacagtaaccattacttcatgcgcctatattatagg

SEQ ID NO: 128138 - DNA, 80 bp, synthetic construct
  source 1..80: mol_type = other DNA
acgccaggtaggcgtgctgccgcgacaccgcgggcccgtcggcgggccagtcgcaggcgcgcacggtgttgaccacgatg

SEQ ID NO: 128139 - DNA, 80 bp, synthetic construct
  source 1..80: mol_type = other DNA
tctacttcataccaccacccagtgggccatactcccatgttctttcaccaccttgccagctctcagcaccggcctcatac

SEQ ID NO: 128140 - DNA, 80 bp, synthetic construct
  source 1..80: mol_type = other DNA
agacggttgacttcagccttgaccctaccttcactattgagacaaccacgctcccacaagatgccgtttcccgctcccag

SEQ ID NO: 128141 - DNA, 80 bp, synthetic construct
  source 1..80: mol_type = other DNA
ccttatcacctttttcacactcaccccctgttacaaaagcctgttggttctgtccgtctggtggctccagtatttcatag

SEQ ID NO: 128142 - DNA, 80 bp, synthetic construct
  source 1..80: mol_type = other DNA
gggcttgaggccttttctctgcactcatactctcccaccgaactcacacgggtagcagccgctctcagaaaacttggagc

SEQ ID NO: 128143 - DNA, 80 bp, synthetic construct
  source 1..80: mol_type = other DNA
ccgcgtgcgaggacgttccggcgttcgtcgccgcgcacgccgacccgcggcgcttccactttcacgccccgcccatgttt

SEQ ID NO: 128144 - DNA, 80 bp, synthetic construct
  source 1..80: mol_type = other DNA
tccttatgcaaaggaaaggtgtgagcaaaatcggactggcaggagtcacactcggcctagccacattcttttgttggatg

SEQ ID NO: 128145 - DNA, 80 bp, synthetic construct
  source 1..80: mol_type = other DNA
ttccgcatcgctgtctgcgagggccagctgttggggtgagtactccctctggaaagcgggcatgacttctgcgctaaggt

SEQ ID NO: 128146 - DNA, 80 bp, synthetic construct
  source 1..80: mol_type = other DNA
gtggtgtcggtgggtggttgttttttgtggttgtttttgtgtctgttcccgtcccccgtcaccccctccctccgtcccct

SEQ ID NO: 128147 - DNA, 80 bp, synthetic construct
  source 1..80: mol_type = other DNA
atttaccaggctaatgattccgacacaaggccctactgctggaactacacgcctcggccctgctggacggtgcctgcatc

SEQ ID NO: 128148 - DNA, 80 bp, synthetic construct
  source 1..80: mol_type = other DNA
gtgccgagcttttactgggacagcaggccgctcccaatcgacctaattacattggttttagggacaacttcattggtttg

SEQ ID NO: 128149 - DNA, 80 bp, synthetic construct
  source 1..80: mol_type = other DNA
tttatgcagacaagactttccagccagaacctcaagttggagaagaaaactggcaggaaaatgaagccttctatggagga

SEQ ID NO: 128150 - DNA, 80 bp, synthetic construct
  source 1..80: mol_type = other DNA
tgccccactgactgtttccgcaagcatccggaggccacgtactctcggtgtggctccggtccctggatcacgcctaggtg

SEQ ID NO: 128151 - DNA, 80 bp, synthetic construct
  source 1..80: mol_type = other DNA
aacagagagcggtcacggactttcctccgtagcctgggggacagaccgccagggtgcagtggcaaacaacccccggttcg

SEQ ID NO: 128152 - DNA, 80 bp, synthetic construct
  source 1..80: mol_type = other DNA
accggagctgctcaggctgggagatttagtatcacccccgcggcaccctcttacactctgaagctcggagagtatggaga

SEQ ID NO: 128153 - DNA, 80 bp, synthetic construct
  source 1..80: mol_type = other DNA
ccttgcgagtctggagacatcgggccagaagtgtccgcgctaagctactgtcccaggggtggaaggctgccatctgcggc

SEQ ID NO: 128154 - DNA, 80 bp, synthetic construct
  source 1..80: mol_type = other DNA
gaggggagacggcatatgccgcactacatgcccctgtgtggctgatattgtgggccacgtgaagaacgggtccatgagga

SEQ ID NO: 128155 - DNA, 80 bp, synthetic construct
  source 1..80: mol_type = other DNA
ggctcgcgcgttcgcaacaccacaccacaccacacggcccaccacaacacggcccaccacgacacaacacgacacgacgc

SEQ ID NO: 128156 - DNA, 80 bp, synthetic construct
  source 1..80: mol_type = other DNA
acatcccttcgtacgcccaggacctggagcgcctgtcgcgcctctgggagcacgagctggtgcgctgtttcaaaattctg

SEQ ID NO: 128157 - DNA, 80 bp, synthetic construct
  source 1..80: mol_type = other DNA
atttaattaattgtaaatagacaatataagtatgcataaaagtgtagttttatagtagtatttagtggtgttagtgtaaa

SEQ ID NO: 128158 - DNA, 80 bp, synthetic construct
  source 1..80: mol_type = other DNA
ctgtgggcgaggatgatactgatgacccatttctttagcgtcctcatagccagggatcagcttgaacaggcccttgattg

SEQ ID NO: 128159 - DNA, 80 bp, synthetic construct
  source 1..80: mol_type = other DNA
ctgcggaaagcgggaaaaaatgtggtggtactgaataggaaaacctttgaaaaggagtaccccaccattaagcagaagaa

SEQ ID NO: 128160 - DNA, 80 bp, synthetic construct
  source 1..80: mol_type = other DNA
gcgtcgtggccccagaaccgcacgtgcatgcagttgagggtcagaagcatgtggaggatgttaagactgtccgcgaggca

SEQ ID NO: 128161 - DNA, 80 bp, synthetic construct
  source 1..80: mol_type = other DNA
gtatgctggggtttctccctggatgcccacccccacccccccgtgggtctagccgggccttagggatagcgtataacgtg

SEQ ID NO: 128162 - DNA, 80 bp, synthetic construct
  source 1..80: mol_type = other DNA
atagcaacagatctggctgctccacaacctgcagcgtgttcaaaacaacaagattcaatgagtttctgccctctgccctg

SEQ ID NO: 128163 - DNA, 80 bp, synthetic construct
  source 1..80: mol_type = other DNA
ccaaaatgaaaccatgctatggctcttttgctagaccgactaatgaaaaaggaggtcaggctaagtttttaaatgatgat

SEQ ID NO: 128164 - DNA, 80 bp, synthetic construct
  source 1..80: mol_type = other DNA
acgttaagttcccggctggcgggcagatcgttggtgaagtatatgtcctgccgcgtaggggcccacaattgggtgtgcgc

SEQ ID NO: 128165 - DNA, 80 bp, synthetic construct
  source 1..80: mol_type = other DNA
cccgtgttaacttaagattttgtacggcagaacggaatccactgtgtgtttccaataatactccaaattcacgcatactc

SEQ ID NO: 128166 - DNA, 80 bp, synthetic construct
  source 1..80: mol_type = other DNA
acgacacaagggttcgcatctctctttaccatagggccaaagcagaacatccagctagtcaattctaacgggagctggca

SEQ ID NO: 128167 - DNA, 80 bp, synthetic construct
  source 1..80: mol_type = other DNA
ttttacagccgccatattaatgataccggctgccccgagcggatgtcacattgcaaaaccatcagggattttgcccaggg

SEQ ID NO: 128168 - DNA, 80 bp, synthetic construct
  source 1..80: mol_type = other DNA
catcaagggtggtagacacctcatcttctgccattcaaagaaaaaatgtgatgagttggccaaacagctgaccagcttgg

SEQ ID NO: 128169 - DNA, 80 bp, synthetic construct
  source 1..80: mol_type = other DNA
tgtgtcaggcggacgcgggggggacatatttcacagcgtgtcccgggcccgaccccgctcattactcctgttcctactcc

SEQ ID NO: 128170 - DNA, 80 bp, synthetic construct
  source 1..80: mol_type = other DNA
tgcggacgggaatgcagtcccattgaaatacaccacaataacaaaatttggaacaataccttattcaccacatggcagcc

SEQ ID NO: 128171 - DNA, 80 bp, synthetic construct
  source 1..80: mol_type = other DNA
agcgacgccctgtggtgatgtaggctgtacgcgatggtcgtctggaggttccccatgtctcgggggggtggtggtgaatg

SEQ ID NO: 128172 - DNA, 80 bp, synthetic construct
  source 1..80: mol_type = other DNA
ggcgcggcgcagtggatgaataggttgatagcatttgcctcgaggggcaatcatgtgtcacctacccactacgtgcccga

SEQ ID NO: 128173 - DNA, 80 bp, synthetic construct
  source 1..80: mol_type = other DNA
caccgcgtcgaccaggacgcggtgcgcccgcacggccgcatccaccgtcgacgcggggtctgccgtcgcgacggcggcgc

SEQ ID NO: 128174 - DNA, 80 bp, synthetic construct
  source 1..80: mol_type = other DNA
gcaggccgggcatttacaggttcgtggcaccgggagagcgcccttcggggatgttcgattcatcagtcctttgtgagtgc

SEQ ID NO: 128175 - DNA, 80 bp, synthetic construct
  source 1..80: mol_type = other DNA
tggagaaattggagcagtaacattggacttcaaacccggaacatcaggttctcccatcattaacaggaaaggaaaagtca

SEQ ID NO: 128176 - DNA, 80 bp, synthetic construct
  source 1..80: mol_type = other DNA
ttgagtcgtggaaacaaccggactacgaacctccggttgtacatgggtgtgcattacctcctagtaaccagcccccaatt

SEQ ID NO: 128177 - DNA, 80 bp, synthetic construct
  source 1..80: mol_type = other DNA
tacccagcaggaacttcaggatctccaatcctagacaagtgtgggagagtgataggactttatggcaatggggtcgtgat

SEQ ID NO: 128178 - DNA, 80 bp, synthetic construct
  source 1..80: mol_type = other DNA
gcctgcgacctcacaccatcgcactcagcccggtccaaatatgggtatggtgcacaggacgttagaagccatgctagcaa

SEQ ID NO: 128179 - DNA, 80 bp, synthetic construct
  source 1..80: mol_type = other DNA
tccaggtggcccacctgcatgctcccaccggcagcggtaagagcaccaaggtcccggccgcatacgcggcccagggctat

SEQ ID NO: 128180 - DNA, 80 bp, synthetic construct
  source 1..80: mol_type = other DNA
tcatcttgtccgggaggccggctgtcgttcccgatagggaagtcctctaccgggagttcgatgaaatggaagaatgcgcc

SEQ ID NO: 128181 - DNA, 80 bp, synthetic construct
  source 1..80: mol_type = other DNA
ccaagtaaagtaataacggtaccaagcggtcgtgttgcagttgcaaaccgggatacatctccattagacgcggcttctgt

SEQ ID NO: 128182 - DNA, 80 bp, synthetic construct
  source 1..80: mol_type = other DNA
cgtagtatgctgttcgtactcctacagctggacaggggcacttatcacaccatgtgccgccgaagaggagaagcttccta

SEQ ID NO: 128183 - DNA, 80 bp, synthetic construct
  source 1..80: mol_type = other DNA
agccataataccttaccgaaaaaacagtacaaagccaggcacagcagacacaatctgccgcaagtgcacacttttaatac

SEQ ID NO: 128184 - DNA, 80 bp, synthetic construct
  source 1..80: mol_type = other DNA
gcgtacgactgcacaggtatgctccagactgccgcccattgctccgagatgaagtgactttctctgtcgggctctcgacc

SEQ ID NO: 128185 - DNA, 80 bp, synthetic construct
  source 1..80: mol_type = other DNA
ggagtgcggttgcacaggtatgctcccgcatgccgcccactccttagggaagaagtgaccttctctgtgggcctttccaa

SEQ ID NO: 128186 - DNA, 80 bp, synthetic construct
  source 1..80: mol_type = other DNA
ccaccccctgacgacttattaatgcgtttattttccccatgtattaagcatccttcaatatttcatgcaaatctagaaat

SEQ ID NO: 128187 - DNA, 80 bp, synthetic construct
  source 1..80: mol_type = other DNA
gggtcgggtagtccccttagctacctattccctcactggcctgtggtcctttagcctactgctcctagcattgccccaac

SEQ ID NO: 128188 - DNA, 80 bp, synthetic construct
  source 1..80: mol_type = other DNA
cccgaattcgagcatagtgtatgaggctgaccatcacatcctacacctcccggggtgcttaccctgtgtgaggaacggga

SEQ ID NO: 128189 - DNA, 80 bp, synthetic construct
  source 1..80: mol_type = other DNA
cacggtcccaagacatgtagtaatatctggcatggtacattccccatcaatgcgaccacgacaggccccagcgtgcccat

SEQ ID NO: 128190 - DNA, 80 bp, synthetic construct
  source 1..80: mol_type = other DNA
tgcttttttggtaaccgttttagataaatggagccagacgtcccagctgagttgggattacatgctggattacatggcaa

SEQ ID NO: 128191 - DNA, 80 bp, synthetic construct
  source 1..80: mol_type = other DNA
tcctctaaataagtcactagggccccagggaccacaatgtggtagctgacagcgcgtcgctcaagcattgttagtagaga

SEQ ID NO: 128192 - DNA, 80 bp, synthetic construct
  source 1..80: mol_type = other DNA
ctgtgcagaacgaggtgaccttaactcaccccattaccaagtacatcatggcatgcatgtctgcagatctcgaggtggta

SEQ ID NO: 128193 - DNA, 80 bp, synthetic construct
  source 1..80: mol_type = other DNA
ccagagcccagctaccgtagggccctgtggagagtgtctgctgaggattacgttgaggttgtgcgcgtgggagactgtca

SEQ ID NO: 128194 - DNA, 80 bp, synthetic construct
  source 1..80: mol_type = other DNA
atggaatagaaagatgctgatgactggaacactggctgttttcctccttcttataatgggacaactgacatggaatgatc

SEQ ID NO: 128195 - DNA, 80 bp, synthetic construct
  source 1..80: mol_type = other DNA
tgaggcagacgcttaaaggcgggctgcccgactttatgagccagagcatgttgcaaaactaccgcactttcattctcgag

SEQ ID NO: 128196 - DNA, 80 bp, synthetic construct
  source 1..80: mol_type = other DNA
tcccgcccgtagcgcgcgcgcaccagcgcggcatcgcacccgagcaccagctcccccgtcgtccagatgcccacgggcca

SEQ ID NO: 128197 - DNA, 80 bp, synthetic construct
  source 1..80: mol_type = other DNA
tcactgcctacgctcagcagacacgaggtcttctgggtgccatagtggtgagcctgacgggacgtgacaagacagaacaa

SEQ ID NO: 128198 - DNA, 80 bp, synthetic construct
  source 1..80: mol_type = other DNA
gagaggtgatggatgagaccaccaattggctgtgggcttttctcgcacgagaaaagaagccaaggttgtgcaccagggaa

SEQ ID NO: 128199 - DNA, 80 bp, synthetic construct
  source 1..80: mol_type = other DNA
tgggcgcggccacgatgtgttctgcgctctacgtgggcgatatgtgtggggccgtcttcctcgtgggacaagccttcacg

SEQ ID NO: 128200 - DNA, 80 bp, synthetic construct
  source 1..80: mol_type = other DNA
gccatagcatcgctaatggcatttactgcatcagtcaccagcccgctaaccactcaacaaaccctcctcttcaatatcct

SEQ ID NO: 128201 - DNA, 80 bp, synthetic construct
  source 1..80: mol_type = other DNA
accattcttgaactgactgatgcgttagccttgggcatgatggtcctcaaaatagtgagaaatatggaaaagtaccaatt

SEQ ID NO: 128202 - DNA, 80 bp, synthetic construct
  source 1..80: mol_type = other DNA
cagtacttcatagctcgggcagaggctgctctgcaagtgtgggttccaagcttagcagtgaggaggtggcgtgacgccgt

SEQ ID NO: 128203 - DNA, 80 bp, synthetic construct
  source 1..80: mol_type = other DNA
agaagacatttggcgggtcaattacaaccaccaatgacagtgacagctcgccagcgccgccccagtcagtcaccgacaac

SEQ ID NO: 128204 - DNA, 80 bp, synthetic construct
  source 1..80: mol_type = other DNA
gactgcccgggtgattcgtcggccggtgcgtcctttcggtcgtaccgcccaccccgcctcccacgggcccgccgctgttt

SEQ ID NO: 128205 - DNA, 80 bp, synthetic construct
  source 1..80: mol_type = other DNA
ctcacattgatgcccatttcctctcccagacgaagcaggggggggagaattttgcatatcttgtggcctaccaggccacc

SEQ ID NO: 128206 - DNA, 80 bp, synthetic construct
  source 1..80: mol_type = other DNA
tgccacgcagaccttgggtccatggcacttgggcaaactggagatagactttggagaatgccctggaacaacagtcactg

SEQ ID NO: 128207 - DNA, 80 bp, synthetic construct
  source 1..80: mol_type = other DNA
atgggtggttctcctctttctgctcctggcagatgccagggtctgcgcctgcctctggatgctcatcctactgggccagg

SEQ ID NO: 128208 - DNA, 80 bp, synthetic construct
  source 1..80: mol_type = other DNA
acatattatggaattagtggtgattggaaacagcgaaatgagtatgatgttactgttacaaagacacatttaaatattaa

SEQ ID NO: 128209 - DNA, 80 bp, synthetic construct
  source 1..80: mol_type = other DNA
cttacagaagacatccgaaggcacgctgacattgtcgtggcgacagccacgttgtgttctgcgttgtacgtaggagacgt

SEQ ID NO: 128210 - DNA, 80 bp, synthetic construct
  source 1..80: mol_type = other DNA
gtccggtcgccccgacccctttgtatgtcaccaaaataaaagaccaaaatcaaagcgtttgtcccagcgtcttaatggcg

SEQ ID NO: 128211 - DNA, 80 bp, synthetic construct
  source 1..80: mol_type = other DNA
tctagaaccatctgagcaggggcaaatcggtatggccttactggtggtcatatccgttctcaccctcagcccgacttaca

SEQ ID NO: 128212 - DNA, 80 bp, synthetic construct
  source 1..80: mol_type = other DNA
cccgcgcgatctctgcgagcgcctggcggcggccctgcgcgagtcgccggtggcgtcgttccgcggcatctccgcggacc

SEQ ID NO: 128213 - DNA, 80 bp, synthetic construct
  source 1..80: mol_type = other DNA
caacctactgtggcggcaagagatgggaggcaacattactagggttgagtctgagaacaaggtggtggtcttggattcct

SEQ ID NO: 128214 - DNA, 80 bp, synthetic construct
  source 1..80: mol_type = other DNA
attcccctccccaattactcataacacatttggaattaatgattcaataaagatcacttacttgaaatctgaaagtatgt

SEQ ID NO: 128215 - DNA, 80 bp, synthetic construct
  source 1..80: mol_type = other DNA
agatgaaaagccaaggtctggtcatgacaggcagaaagcaaaaacagatgaaaggcaaaatataaaaacagaagaaaaac

SEQ ID NO: 128216 - DNA, 80 bp, synthetic construct
  source 1..80: mol_type = other DNA
gaaaataaaaaacagatccctccgttcacttacccgcagctgtctctacctcaaaagcgaagaccagttgcaacgcacct

SEQ ID NO: 128217 - DNA, 80 bp, synthetic construct
  source 1..80: mol_type = other DNA
cgacctgtccaccaccgccctggagcacgtcctcctgttttcgctcggttcctgcgacctccccgaatcccacctgaacg

SEQ ID NO: 128218 - DNA, 80 bp, synthetic construct
  source 1..80: mol_type = other DNA
gcaacctcgtgggaggcgacaacctatccccaaggctcgccgacccgagggcaggacctgggcgcagcccgggtacccat

SEQ ID NO: 128219 - DNA, 80 bp, synthetic construct
  source 1..80: mol_type = other DNA
ctttttgcccattattgcacttttggcctttgtctgtgttattaccgctaattatattttaattttcaatcttgataatt

SEQ ID NO: 128220 - DNA, 80 bp, synthetic construct
  source 1..80: mol_type = other DNA
cgcgggcggccgccacgacggcctggacggagacgtccgcggagccgtagaaatcccgcagctccgtcgcggtgacggag

SEQ ID NO: 128221 - DNA, 80 bp, synthetic construct
  source 1..80: mol_type = other DNA
ccaggcaccccgtccgaccttctagttcccgcgttgcatctgggttgcttcaaagtgcaaagggccacggagcgcaaact

SEQ ID NO: 128222 - DNA, 80 bp, synthetic construct
  source 1..80: mol_type = other DNA
caaagtccagatgtccgcgcgcggcggtcggagcttgatgacaacatcgcgcagatgggagctgtccatggtctggagct

SEQ ID NO: 128223 - DNA, 80 bp, synthetic construct
  source 1..80: mol_type = other DNA
caccgcgtgttgttccagtagctggtgatgcactggaccacgagccgggccagggcgcagaagacgtgctcgctgccgtg

SEQ ID NO: 128224 - DNA, 80 bp, synthetic construct
  source 1..80: mol_type = other DNA
atagacggccactttttgtcccagaccaagcagcagggtgagaatttcccctaccttattgcttatcaagccacagtctg

SEQ ID NO: 128225 - DNA, 80 bp, synthetic construct
  source 1..80: mol_type = other DNA
cgctgagagcgacggtgttgaggaggataaccgaggtctccgagccttcgcagaggctatgacgagatactcggctcccc

SEQ ID NO: 128226 - DNA, 80 bp, synthetic construct
  source 1..80: mol_type = other DNA
gcgatgcaatcatcttacttacctgtctacttcatccagccttggggttcgaagtcaccaagatattgcttgcattaata

SEQ ID NO: 128227 - DNA, 80 bp, synthetic construct
  source 1..80: mol_type = other DNA
ccctcctactaaacatcttgggagggtgggttgctgcgcaacttgcaaaccccacagcgtccactgcatttgtagtgagc

SEQ ID NO: 128228 - DNA, 80 bp, synthetic construct
  source 1..80: mol_type = other DNA
gcgcatcttgtcccgatgcgccgcaacggccccgtcgatggtggagccctcgagtcccgggtggtggcgcgccagcctct

SEQ ID NO: 128229 - DNA, 80 bp, synthetic construct
  source 1..80: mol_type = other DNA
gggcccaaatgacccccggcgcaggtcccgcaatctgggtaaggtcatcgataccctcacttgcggcctcgccgacctct

SEQ ID NO: 128230 - DNA, 80 bp, synthetic construct
  source 1..80: mol_type = other DNA
ctcgctcatcaagctgccttatttcatcagggcgcgcgccctgctgagggcgtgcctgctagcgaagcacttggcctgtg

SEQ ID NO: 128231 - DNA, 80 bp, synthetic construct
  source 1..80: mol_type = other DNA
ccattcagcacgatccaagtacggatatggggcgaaggaggtgcgcagcttatctaggagggccgttaaccacatccagt

SEQ ID NO: 128232 - DNA, 80 bp, synthetic construct
  source 1..80: mol_type = other DNA
tgtaaaagcgaccgcagtagtcgcagcgctgcacgctctgtatctcctgaatgagatgcgcttttcgcccgcgcaccaga

SEQ ID NO: 128233 - DNA, 80 bp, synthetic construct
  source 1..80: mol_type = other DNA
attgtaccaacaattcgacgagatggaggagtgctctcagcgcataccctatctcgccgaaggccagcaaatagctgaac

SEQ ID NO: 128234 - DNA, 80 bp, synthetic construct
  source 1..80: mol_type = other DNA
taataatacccccggtgatattttgtttgatttacaattaggacctcatttaaatcccttcttgtctcatttgtctcaga

SEQ ID NO: 128235 - DNA, 80 bp, synthetic construct
  source 1..80: mol_type = other DNA
tagcggaggaggatgatcgggaggtgtccacgccggcggagatcctacggaagagaagagacttccctagggccctgcct

SEQ ID NO: 128236 - DNA, 80 bp, synthetic construct
  source 1..80: mol_type = other DNA
aagtttaactcctctggatgcccagagcggcttgccgcgtgtcggcctctgacggattttaagcagggttggggtcccat

SEQ ID NO: 128237 - DNA, 80 bp, synthetic construct
  source 1..80: mol_type = other DNA
atccagactctgcccggaatatttaagacaaaggatggggacattggagcagttgcgctggactacccagcaggaacttc

SEQ ID NO: 128238 - DNA, 80 bp, synthetic construct
  source 1..80: mol_type = other DNA
cgccccactggcttctcactctctgtgcgctctctgaagttacaaatttgtcccctgacatcatacaggctaatccctct

SEQ ID NO: 128239 - DNA, 80 bp, synthetic construct
  source 1..80: mol_type = other DNA
cacgaagccagagacgtggtcgcacggggaggggtaagccgggcatatacaggtatgtctcgcagggagaacgaccatct

SEQ ID NO: 128240 - DNA, 80 bp, synthetic construct
  source 1..80: mol_type = other DNA
ccatctaacgatggtgcagccggtctcgttccagaggtcaacaacgagacaatggcacttgagccggtagctggggcttc

SEQ ID NO: 128241 - DNA, 80 bp, synthetic construct
  source 1..80: mol_type = other DNA
ggatcccgttccctcacgccgtgcacttgtggcgcgtcggacttatatctagtcacgcgccacgccgatgttataccagt

SEQ ID NO: 128242 - DNA, 80 bp, synthetic construct
  source 1..80: mol_type = other DNA
gggtaacatttaataatgtcagatttgcagcagatggatttaatggcaaggtgtttgcttctaccactcaattaactttg

SEQ ID NO: 128243 - DNA, 80 bp, synthetic construct
  source 1..80: mol_type = other DNA
tcccggtcggcggtcagatcgtcggcggtgtatacttgctgcctcgcaggggcccacgcttgggtgtgcgcgcagctagg

SEQ ID NO: 128244 - DNA, 80 bp, synthetic construct
  source 1..80: mol_type = other DNA
tgtgcgagaggacgagcgggagactccgtacccgcggaaattctgcggaagtctcggagattgctccggcctacccgtgt

SEQ ID NO: 128245 - DNA, 80 bp, synthetic construct
  source 1..80: mol_type = other DNA
gatgatgaattggtcaccgacgggggcgctggtggtcgcccaactcctccgaataccacaggccatcgtggatatggtgg

SEQ ID NO: 128246 - DNA, 80 bp, synthetic construct
  source 1..80: mol_type = other DNA
tgtatcgggggcgcttgttgcattcaagatcatgtgcggtgagaccccgtccgctgaggacatggtcaacctgcttcctg

SEQ ID NO: 128247 - DNA, 80 bp, synthetic construct
  source 1..80: mol_type = other DNA
agaagtggactccggtgatggaaatcacatgtttgcaggacacctcaagtgcaaagtccgcatggagaaattgagaatca

SEQ ID NO: 128248 - DNA, 80 bp, synthetic construct
  source 1..80: mol_type = other DNA
ggcctagcttggtctttgttggtgttcatcctagcatggcatttcaagggtaaaatagtaccgctgggagtgtatgccgc

SEQ ID NO: 128249 - DNA, 80 bp, synthetic construct
  source 1..80: mol_type = other DNA
gtctgaatcacggtcatctggaagaagaacgatgggaatcataatccgaaaacggaatcgggcgattgtgtctcatcaaa

SEQ ID NO: 128250 - DNA, 80 bp, synthetic construct
  source 1..80: mol_type = other DNA
ccgccgcgcccccgcgcccggggcccgcgggcgcggccgccccgccgcacgccgacgcgccccgcctgcgcgcctggctg

SEQ ID NO: 128251 - DNA, 80 bp, synthetic construct
  source 1..80: mol_type = other DNA
ggtgaggtaaagtcctgcacctggccagagacccacacgttgtggggtgatggagtgatcgagagtgagctcattatccc

SEQ ID NO: 128252 - DNA, 80 bp, synthetic construct
  source 1..80: mol_type = other DNA
tggaacacagagagtagtaatcttcattctgatgatgttagtggccccctcttatggaatgagatgcgtaggagttggca

SEQ ID NO: 128253 - DNA, 80 bp, synthetic construct
  source 1..80: mol_type = other DNA
accggccgtgacgacgtctccgcggcggctgggccggcgtgcgcggcgacaggcggtccgtggggtccggatacgcgccg

SEQ ID NO: 128254 - DNA, 80 bp, synthetic construct
  source 1..80: mol_type = other DNA
ggggtagccaaggcggtagacttcgtcccggttgaatctcttgagactaccatgagatcaccagtgttcactgacaactc

SEQ ID NO: 128255 - DNA, 80 bp, synthetic construct
  source 1..80: mol_type = other DNA
ccaccttctcaatatatctctaagcaaatcccgaatattaagtccggccattgtaaaaatctgctccagagcgccctcca

SEQ ID NO: 128256 - DNA, 80 bp, synthetic construct
  source 1..80: mol_type = other DNA
gcgcgtgcccccacgaaccttcggcagcgccccccgcctcacggaggacgactttgggctcctgaactacgcgctcgctg

SEQ ID NO: 128257 - DNA, 80 bp, synthetic construct
  source 1..80: mol_type = other DNA
caataatataccttatactggactagtgccaatattaaaatgaagtgggcgtagtgtgtaatttgattgggtggaggtgt

SEQ ID NO: 128258 - DNA, 80 bp, synthetic construct
  source 1..80: mol_type = other DNA
tataaataggacagcgctgaattgcaatgacagccttaatactggcttcatggcagcgctgttttacctccataaattca

SEQ ID NO: 128259 - DNA, 80 bp, synthetic construct
  source 1..80: mol_type = other DNA
gagcaccgagccaagggctcctgtaagtacgccctcccgctgcgcatccccccgtcagcctgcctctccccccaggccta

SEQ ID NO: 128260 - DNA, 80 bp, synthetic construct
  source 1..80: mol_type = other DNA
tctggaccgccgccatccgggcatgcatggccgccaggcgcccgaccgcggcgcagaagacgcgcttgttaaagccggcc

SEQ ID NO: 128261 - DNA, 80 bp, synthetic construct
  source 1..80: mol_type = other DNA
tgtttgtggtcctgtctactgttttacaccaagccctgtggtactgggtaccaccgataggaggggcaatcctacctaca

SEQ ID NO: 128262 - DNA, 80 bp, synthetic construct
  source 1..80: mol_type = other DNA
aggaccacgcacggcctcgtcagcttgttcacccctgggtcccaacaaaacatccaacttgttaacaccaacggcagttg

SEQ ID NO: 128263 - DNA, 80 bp, synthetic construct
  source 1..80: mol_type = other DNA
gtccggcatgtttgactcagtagtgttatgtgagtgctatgacgcaggctgttcctggtacgaactacagcctgctgaga

SEQ ID NO: 128264 - DNA, 80 bp, synthetic construct
  source 1..80: mol_type = other DNA
acatcaacagtactgccctgaactgcaatgagtccataaacaccgggttcatagctgggttgttttattaccataagttc

SEQ ID NO: 128265 - DNA, 80 bp, synthetic construct
  source 1..80: mol_type = other DNA
cacagtgtgcggccctgtctattgcttcacaccgagccctgtggtggtagggactactgaccgcaggggaaggccaactt

SEQ ID NO: 128266 - DNA, 80 bp, synthetic construct
  source 1..80: mol_type = other DNA
agtgccatactgtcctccctcacaataacaaaccttctcagacgccttcaccagtggatcaacgaggaccatgccactcc

SEQ ID NO: 128267 - DNA, 80 bp, synthetic construct
  source 1..80: mol_type = other DNA
gatattctcccggcgaactcaatcgagtgggagcgtgcctcaggaagcttggggctcccccattgagagcctggagacat

SEQ ID NO: 128268 - DNA, 80 bp, synthetic construct
  source 1..80: mol_type = other DNA
cattctcacagccttggcccatccccacctggcttttgacatcacaaaatacctcctaaccatccttggtcctctctact

SEQ ID NO: 128269 - DNA, 80 bp, synthetic construct
  source 1..80: mol_type = other DNA
tgtctttttatttatacacaagcccagctcccctcccctcccttagagctcgtcttcgtctccggcctcgtcctcgttgt

SEQ ID NO: 128270 - DNA, 80 bp, synthetic construct
  source 1..80: mol_type = other DNA
tgatagtgacaacccttacaggacttggcattattgtggttcctacgtcacaagaacctcagggagtgcagcaagcatga

SEQ ID NO: 128271 - DNA, 80 bp, synthetic construct
  source 1..80: mol_type = other DNA
aaacgtttaaccgtctcaaaatttaacgttagcgtggtaaaacataagttatgggcctgaattatacttggatataaact

SEQ ID NO: 128272 - DNA, 80 bp, synthetic construct
  source 1..80: mol_type = other DNA
tgtaacccagctcctgaggcgactacatcagtggttaagctcggagtgcaccactccatgctccggttcctggctaaggg

SEQ ID NO: 128273 - DNA, 80 bp, synthetic construct
  source 1..80: mol_type = other DNA
ctgccccccggcgcgggcggcgccgcgcccgcgtgccgcagaccacctcgcggcggctcccccgcggcctttcccgtggc

SEQ ID NO: 128274 - DNA, 80 bp, synthetic construct
  source 1..80: mol_type = other DNA
tgcggtccacccagagttagtttttgaaatcaccaagatcttgctcgccatactcggaccgctcgtggtgctccaggctg

SEQ ID NO: 128275 - DNA, 80 bp, synthetic construct
  source 1..80: mol_type = other DNA
cgcgcggcccgaaaacgtctgggtgcccgtggtcacctttctgggtgcgggcgcgcttgccgtcaagacggtgcgagaac

SEQ ID NO: 128276 - DNA, 80 bp, synthetic construct
  source 1..80: mol_type = other DNA
ctcgcgagcttggcagttgtcatagcttgtgcaggagccatgaagttgtcgaatttccaggggaagcttttgatgaccaa

SEQ ID NO: 128277 - DNA, 80 bp, synthetic construct
  source 1..80: mol_type = other DNA
cccatacaaggtggtcgggtatttaattttaggagcggtcctgggtgggtgcatagcggtgctagcccaactgccttgct

SEQ ID NO: 128278 - DNA, 80 bp, synthetic construct
  source 1..80: mol_type = other DNA
ccatatagacgcccacttcctctctcagacgaagcaagcgggcgacaactacccctatttgacggcctaccaggccactg

SEQ ID NO: 128279 - DNA, 80 bp, synthetic construct
  source 1..80: mol_type = other DNA
aggacctggacatgaggaaccgatgcttatgcaaagctatggctggaaccttgtcactatgaagagcggagtggacgtgt

SEQ ID NO: 128280 - DNA, 80 bp, synthetic construct
  source 1..80: mol_type = other DNA
cctctgggagcacgagctggtgcgctgttttaaaattctgtgtcaccgcaacaaccagggccaagagacgtcgatctcgt

SEQ ID NO: 128281 - DNA, 80 bp, synthetic construct
  source 1..80: mol_type = other DNA
taaactcaaggagcacgtccctttcgatgacgtgcattgcagttggcctagtaacattatacctaggagtcatggttcag

SEQ ID NO: 128282 - DNA, 80 bp, synthetic construct
  source 1..80: mol_type = other DNA
tgagagcgacgccgcagcgcgtgtcactcagatcctctccagccttactatcactcagctgctgaggaggctccaccagt

SEQ ID NO: 128283 - DNA, 80 bp, synthetic construct
  source 1..80: mol_type = other DNA
tacatgcccaaggtcattgagaagatggaacagcttcagagaagatttggtggaggactagtgagagtcccgctctccag

SEQ ID NO: 128284 - DNA, 80 bp, synthetic construct
  source 1..80: mol_type = other DNA
ccaagttgtcgattttagtcttgacccaaccttcaccatagagaccaccactctaccccaagacgccgtctctcgcagcc

SEQ ID NO: 128285 - DNA, 80 bp, synthetic construct
  source 1..80: mol_type = other DNA
tggcattcaagatcatgagcggcgaggtcccctccacagaagacctggtcaatctactgcccgccatcctttcgcccgga

SEQ ID NO: 128286 - DNA, 80 bp, synthetic construct
  source 1..80: mol_type = other DNA
ccacccagccgcccgtcctcgccctttcgaacgcccccccacggcgggtctccccgacgcgaggtcggcgccggcatact

SEQ ID NO: 128287 - DNA, 80 bp, synthetic construct
  source 1..80: mol_type = other DNA
agttcaagcaaaaggtcctcggtcttattcagaccaccaccaagcaagcagaggagcttagaccggctgtccattccgct

SEQ ID NO: 128288 - DNA, 80 bp, synthetic construct
  source 1..80: mol_type = other DNA
ggacgcggggcggcgacgcggcgctatgcgcccccgaggacggctgggtgaaggttcaccccacccccgggacgatgttg

SEQ ID NO: 128289 - DNA, 80 bp, synthetic construct
  source 1..80: mol_type = other DNA
ccagcccctaataatgtccaattggcaaaagctggaagttttctggcacaaacatatgtggaactttgtcagtggtatcc

SEQ ID NO: 128290 - DNA, 80 bp, synthetic construct
  source 1..80: mol_type = other DNA
gatggcggacgaggacggaggacgtctccgggccgcggcggagacgaccggcggccccggatctccggatccagccgacg

SEQ ID NO: 128291 - DNA, 80 bp, synthetic construct
  source 1..80: mol_type = other DNA
cccccgcggctcccgccctagttggggcccaaatgacccccggcgtaggtcacgcaatttgggcaaagtcatcgataccc

SEQ ID NO: 128292 - DNA, 80 bp, synthetic construct
  source 1..80: mol_type = other DNA
gactagctttaaaaaggaattaggcacaatgatcaacgtggttaacaatcggggcacaaaaaagaagagaggcaacaatg

SEQ ID NO: 128293 - DNA, 80 bp, synthetic construct
  source 1..80: mol_type = other DNA
cagcgtcacccaattgctgaccagggccaagaaccggagaccctcttgcacgatcggggacgggaagagcaggctgtacg

SEQ ID NO: 128294 - DNA, 80 bp, synthetic construct
  source 1..80: mol_type = other DNA
tacccggtggggtcgcaattaccttgcgagcccgaaccggacgtagccgtgttgacgtccatgctcactgatccctccca

SEQ ID NO: 128295 - DNA, 80 bp, synthetic construct
  source 1..80: mol_type = other DNA
atctggagctctcgtcgcgttcaagatcatgagcggagaggtgccgacaatggaggatgccgtcaaccttctgccggcgc

SEQ ID NO: 128296 - DNA, 80 bp, synthetic construct
  source 1..80: mol_type = other DNA
aaaagctgaactggaagatggagcctatagaatcaagcaaaaagggattcttggatattctcagatcggagctggagttt

SEQ ID NO: 128297 - DNA, 80 bp, synthetic construct
  source 1..80: mol_type = other DNA
gagcatcgattctccgcagcatgcaacttcacgcgcggagatcgctgcagactggaagatagggataggggccagcagag

SEQ ID NO: 128298 - DNA, 80 bp, synthetic construct
  source 1..80: mol_type = other DNA
cacagcggcctacgagatctggccgtggccgtagagccggtcgtcttttcccagatggagaccaagctcattacgtggtg

SEQ ID NO: 128299 - DNA, 80 bp, synthetic construct
  source 1..80: mol_type = other DNA
atataaaaatgcagttgaatttatgcctaatttggtagcctacccaaaacctaccactggctctaaaaaatatgcaaggg

SEQ ID NO: 128300 - DNA, 80 bp, synthetic construct
  source 1..80: mol_type = other DNA
tgtttgtggcccagtgtactgctttacgcccagtccggtagtggttggtactacagaccggaggggccaccccacttaca

SEQ ID NO: 128301 - DNA, 80 bp, synthetic construct
  source 1..80: mol_type = other DNA
cgccttccccccgccctcgctcggggggctgttcgcccactctgcgtcgtcgttgccggcgtagtccgcgtcgtcgctgt

SEQ ID NO: 128302 - DNA, 80 bp, synthetic construct
  source 1..80: mol_type = other DNA
cgtcccataagctgtgaaaatgcgttaagtccagtttcgttccagacgcggctgtacacaactcctccgtcgctgtctct

SEQ ID NO: 128303 - DNA, 80 bp, synthetic construct
  source 1..80: mol_type = other DNA
aagactctgacaaagcccaagaaatccacagcggcggcagcagcaggaggaggagcgctgcgtctggcgcccaacgaacc

SEQ ID NO: 128304 - DNA, 80 bp, synthetic construct
  source 1..80: mol_type = other DNA
gtcacccagacagtcgactttagccttgaccctaccttcaccattgagacaactacgcttccccaggatgctgtctcccg

SEQ ID NO: 128305 - DNA, 80 bp, synthetic construct
  source 1..80: mol_type = other DNA
tcactggaggtcaggggccctcgagatgctattatcatccttatagctctcttccatccccgcctggcctttgacatcac

SEQ ID NO: 128306 - DNA, 80 bp, synthetic construct
  source 1..80: mol_type = other DNA
tcctgcaagaacatcagggactttgaccaaggatggggtgacctgtggtacaatgagactgaaaggccccgagaccagcg

SEQ ID NO: 128307 - DNA, 80 bp, synthetic construct
  source 1..80: mol_type = other DNA
gaccgtgtcctatacgacatatgggccggacaagttgtggaggctgccagaaaaacatacgtcgatttttttgaacatgt

SEQ ID NO: 128308 - DNA, 80 bp, synthetic construct
  source 1..80: mol_type = other DNA
ctcagggctataaggttctagtgcttaacccctctgtagcggccacccttgggttcgggtcatacatgtctactgcccac

SEQ ID NO: 128309 - DNA, 80 bp, synthetic construct
  source 1..80: mol_type = other DNA
agccagcccgactcatcgtataccccgacctcggggtgagggtgtgcgagaaaagggcgctctacgacatcacacgcaag

SEQ ID NO: 128310 - DNA, 80 bp, synthetic construct
  source 1..80: mol_type = other DNA
tcaaagaatggatatcaagaagtatgtccatggaatgacggtcgctatgtctgtaatggagatagcagtactattactaa

SEQ ID NO: 128311 - DNA, 80 bp, synthetic construct
  source 1..80: mol_type = other DNA
ttgaaggtgcagtacttcatactcctggatgtgtcccttgtgaatgggtcgacaacgtgtctcggtgctggatgccagtt

SEQ ID NO: 128312 - DNA, 80 bp, synthetic construct
  source 1..80: mol_type = other DNA
tagcggcgtggatgcgagcgcgggcggcggcacctatgtgaccggcggcaccatggcgcataccgcgaaccgtattgcga

SEQ ID NO: 128313 - DNA, 80 bp, synthetic construct
  source 1..80: mol_type = other DNA
agccgcgtcaggggctcggtgtccacccgaaacatgtcggcgtacgtgtcggccgcggccccaaaggccgcgctccagtc

SEQ ID NO: 128314 - DNA, 80 bp, synthetic construct
  source 1..80: mol_type = other DNA
tgggctaaagttgtgctggtcttgtttctgtttgcgggggtcgatgcctccacccacaccgtgggcggtattgctgctca

SEQ ID NO: 128315 - DNA, 80 bp, synthetic construct
  source 1..80: mol_type = other DNA
attttcttgtctgcggagacgatctggtcgtggtggttagtagtgatggcgtcgacgaggatagagtgaccctggtagct

SEQ ID NO: 128316 - DNA, 80 bp, synthetic construct
  source 1..80: mol_type = other DNA
ttcgggtacagggccttaataaaggccataatctgcttaaaagcttgctgggccttggctccctcgctaaaaaacaggcc

SEQ ID NO: 128317 - DNA, 80 bp, synthetic construct
  source 1..80: mol_type = other DNA
ctggctggccagttgcgacaactaggcctcaatgctgtcgccttctaccggggcgtggacgtggccgtcataccaacctc

SEQ ID NO: 128318 - DNA, 80 bp, synthetic construct
  source 1..80: mol_type = other DNA
aaagacttccgagcgatcccagccccgagagaggcgccagcccataccaaaggcacggccctcctcgggcaggcgctggg

SEQ ID NO: 128319 - DNA, 80 bp, synthetic construct
  source 1..80: mol_type = other DNA
ggaccttagtgtcgtggttgagaaacaggagggaatgtacaagtcagcacctaagcgcctcaccgccaccacggaaaaat

SEQ ID NO: 128320 - DNA, 80 bp, synthetic construct
  source 1..80: mol_type = other DNA
agtctccagactacaaaccaccagttgtgtccgggtgtgcactacccccagaaaaaccagtgccagtgcctccgcccagg

SEQ ID NO: 128321 - DNA, 80 bp, synthetic construct
  source 1..80: mol_type = other DNA
gtaaacccctctgtgaagacagtcagagaagccggcattctcgtgaccgcggcagcggtcacattgtgggagaatggggc

SEQ ID NO: 128322 - DNA, 80 bp, synthetic construct
  source 1..80: mol_type = other DNA
cggctctatctaccggtctcttacacctccaccaaaacatcgtggacgtgcagtacttgtatggcctatcgccggccatt

SEQ ID NO: 128323 - DNA, 80 bp, synthetic construct
  source 1..80: mol_type = other DNA
taccaacatgccaaatgtgaacgatttcatgttcacaaccaaatttaaagctaaggttatggttgccagggaaaaaaata

SEQ ID NO: 128324 - DNA, 80 bp, synthetic construct
  source 1..80: mol_type = other DNA
ggctcaaccaatacttggtcgggtcgcagctcccatgcgagcccgaaccggacgtaacagtgcttacttccatgctcacc

SEQ ID NO: 128325 - DNA, 80 bp, synthetic construct
  source 1..80: mol_type = other DNA
tgtgtaagcagaatatataagtgctgttccctggtgcttcctcgctcactcgagggcttcgccctgtcgctcgactgcgg

SEQ ID NO: 128326 - DNA, 80 bp, synthetic construct
  source 1..80: mol_type = other DNA
gggcggccaacccggcaagcgcgcgcgagtgggccaaaaagcctagcaggtcggagaggcagaccgcgccgtttgcgtgg

SEQ ID NO: 128327 - DNA, 80 bp, synthetic construct
  source 1..80: mol_type = other DNA
tcaggtgtggcctctcttgctgttagtgcttatgctcccatctcgagcgtatgcctttgacggcgagcaggctgcgtcta

SEQ ID NO: 128328 - DNA, 80 bp, synthetic construct
  source 1..80: mol_type = other DNA
caaggttccgttcggaacctgccagcatttcctcgtggcgaaccgatacctcgagacccggtcgatttcacccatcgact

SEQ ID NO: 128329 - DNA, 80 bp, synthetic construct
  source 1..80: mol_type = other DNA
atcagccgctacagtcaacagcaactgatggaaaccagccatcgccatctgctgcacgcggaagaaggcacatggctgaa

SEQ ID NO: 128330 - DNA, 80 bp, synthetic construct
  source 1..80: mol_type = other DNA
ctaacccgccaagtgatcctgacggatctgtgccaacccaacgcggatcgtgctgggacgctgcttctggcgctgcggca

SEQ ID NO: 128331 - DNA, 80 bp, synthetic construct
  source 1..80: mol_type = other DNA
cagcgtacgctgcgcgtcagccgcgtgacccggctcgtcccgcaaaagatctccggcaacatcaccgcggccgtgcggat

SEQ ID NO: 128332 - DNA, 80 bp, synthetic construct
  source 1..80: mol_type = other DNA
ggccccgactcccagacggcgtgggtgccggcgaggagcagcaggaccagatccgcgtacgcccacgtatccggcgactc

SEQ ID NO: 128333 - DNA, 80 bp, synthetic construct
  source 1..80: mol_type = other DNA
cgggaagcggtcgcgcgaagaggagctgatctcgctgccgctggacgagagcaaccccacgccgagcctgaagcccgtga

SEQ ID NO: 128334 - DNA, 80 bp, synthetic construct
  source 1..80: mol_type = other DNA
aatgttgagacatagcattgaaaattcctcagtgaacgtctccctaacagccattgctaaccaagctacagtgctaatgg

SEQ ID NO: 128335 - DNA, 80 bp, synthetic construct
  source 1..80: mol_type = other DNA
ccttgttacgggatgaggtgtcattcagagtaggactgcacgattacccggtggggtcgcaattaccttgcgagccagaa

SEQ ID NO: 128336 - DNA, 80 bp, synthetic construct
  source 1..80: mol_type = other DNA
atggtgtgcggatacatcgttacgcacctaagtgtaaaccactcttgagagacgaaatcacattctccgtaggtatgtcc

SEQ ID NO: 128337 - DNA, 80 bp, synthetic construct
  source 1..80: mol_type = other DNA
gggcagccccggcgggtcgagctggacgccgacgcggcctccggcgccttctacgcgcgctatcgcgacgggtacgtcag

SEQ ID NO: 128338 - DNA, 80 bp, synthetic construct
  source 1..80: mol_type = other DNA
acgggtgtaatgaaacccgccacccttgacctgcctccaccacccacgcccgctccaccgaaggcagctccggtcgtgca

SEQ ID NO: 128339 - DNA, 80 bp, synthetic construct
  source 1..80: mol_type = other DNA
cactagagacagtagccattgatagacctgctgaggtgaggaaagtgtgttacaatgcagttctcactcatgtgaagatt

SEQ ID NO: 128340 - DNA, 80 bp, synthetic construct
  source 1..80: mol_type = other DNA
atttcagcatgcaggccaattgggccaaagtcatcttggtcctattcctctttgcaggggttgatgccgagactcacgtg

SEQ ID NO: 128341 - DNA, 80 bp, synthetic construct
  source 1..80: mol_type = other DNA
aagaagacccctttggggttttcgtacgacacccgttgctttgactctactgtcaccgaacatgacatcaggacggagga

SEQ ID NO: 128342 - DNA, 80 bp, synthetic construct
  source 1..80: mol_type = other DNA
ctaacaccgcaccacccacgaccaaagttcacccacacccacaaaacccgcgaaaatccagcgccgtcagcacttccgca

SEQ ID NO: 128343 - DNA, 80 bp, synthetic construct
  source 1..80: mol_type = other DNA
ggctccccgaagaagcccacctcgccgtacacccgcgaaaacacgcaacgcaggccgccgcgcgccgccgggtactccag

SEQ ID NO: 128344 - DNA, 80 bp, synthetic construct
  source 1..80: mol_type = other DNA
ggcaccatgtgccaaagccttgccaacttatccgggcacggaatgtctgcggcccggtatactgtttcacccccagccct

SEQ ID NO: 128345 - DNA, 80 bp, synthetic construct
  source 1..80: mol_type = other DNA
aaacacataaccaaacttttttaatagatggaccagaaaccacagaatgtccagacaccaatcgagcgtggaactctttg

SEQ ID NO: 128346 - DNA, 80 bp, synthetic construct
  source 1..80: mol_type = other DNA
ggcgctgtgggaaggagcccctttcctagcttaggaagtttgcatagcctacctaactcggtaaacagcggcagggtgag

SEQ ID NO: 128347 - DNA, 80 bp, synthetic construct
  source 1..80: mol_type = other DNA
aaacaagaaacagcacatttttggtagacggaccagatacctctgaatgccctaatgaacgaagagcgtggaactttttt

SEQ ID NO: 128348 - DNA, 80 bp, synthetic construct
  source 1..80: mol_type = other DNA
accacgctgaccggctcgtggaatttggtgaaccgcatgctgtgaaaatggatatttttaaccttggagaccagactggc

SEQ ID NO: 128349 - DNA, 80 bp, synthetic construct
  source 1..80: mol_type = other DNA
gtcttggatcacacaagggttgctgggaattctcttgctctggatggggatcaacgctcgagacaagtctattgccctga

SEQ ID NO: 128350 - DNA, 80 bp, synthetic construct
  source 1..80: mol_type = other DNA
actgatgcggtggccttgggcatgatgatcctcagaatagtgaaaaatatggaaaaatatcaattagcagtgactatcat

SEQ ID NO: 128351 - DNA, 80 bp, synthetic construct
  source 1..80: mol_type = other DNA
catcagaaccggagtcaggaccgttacaacgggagcgcccatcacctactctacctacggcaagttcctggcggacggag

SEQ ID NO: 128352 - DNA, 80 bp, synthetic construct
  source 1..80: mol_type = other DNA
tttacggtaacgagggctgcggctgggcagggtggctcctgtccccccgtggttctcgtccgcattggtgccccaatgac

SEQ ID NO: 128353 - DNA, 80 bp, synthetic construct
  source 1..80: mol_type = other DNA
cagctgcgccagaaaccggtcggcgatgtccggggcggtgatatgccgagtcacgatggagcgcgctaaatcttcgtcgc

SEQ ID NO: 128354 - DNA, 80 bp, synthetic construct
  source 1..80: mol_type = other DNA
agtgctatgatgccggatgcgcttggtatgaactgacaccagctgagacaacaaccaggttgagagcctacttcaacact

SEQ ID NO: 128355 - DNA, 80 bp, synthetic construct
  source 1..80: mol_type = other DNA
ttgcttccgcaagcacccagacgccacctacaccaagtgtgggtcaggaccctggctcactccccggtgtctggtgcatt

SEQ ID NO: 128356 - DNA, 80 bp, synthetic construct
  source 1..80: mol_type = other DNA
cccaaggtgctagaaacctcgcgggtcttttcggcctagggccgaaccagagactggcgcttgtcaactctaacggcagc

SEQ ID NO: 128357 - DNA, 80 bp, synthetic construct
  source 1..80: mol_type = other DNA
taatggagctatcaccagtgaagaaagacaaatccctgaaggggaatggcgtgatggcttcgactggatcaccgagtacg

SEQ ID NO: 128358 - DNA, 80 bp, synthetic construct
  source 1..80: mol_type = other DNA
cctctaccatggaggccagcagagccagctgtcgcggcgagacggcgtccccggcgtcctcgccggcgtcggtgcccgcc

SEQ ID NO: 128359 - DNA, 80 bp, synthetic construct
  source 1..80: mol_type = other DNA
ctgatgagaatagagcgaaggttgagataacgcccaattcaccaagagccgaagccaccctggggggttttggaagccta

SEQ ID NO: 128360 - DNA, 80 bp, synthetic construct
  source 1..80: mol_type = other DNA
ggaagaacgcgctatggcgttatggcttcttgcagggttggtggcttcagcttttcactgggccggcattctgatagtat

SEQ ID NO: 128361 - DNA, 80 bp, synthetic construct
  source 1..80: mol_type = other DNA
cggatgttcataggcggggttgaacacaggctcgaagcagcgtgcaattttacccgtggggaccgttgcaatctggaaga

SEQ ID NO: 128362 - DNA, 80 bp, synthetic construct
  source 1..80: mol_type = other DNA
ggagaggcttcaaaagagtgtgacacaggagtgatgggggcagctgtgaagaacggcaaggccattcacacggaccagag

SEQ ID NO: 128363 - DNA, 80 bp, synthetic construct
  source 1..80: mol_type = other DNA
ggcccctgtttctcctgcttctgatgctgcctgagagggcttatgcatacgaccaggaagtggcagggtcccttggcggc

SEQ ID NO: 128364 - DNA, 80 bp, synthetic construct
  source 1..80: mol_type = other DNA
cgaaggtcatagtcgtggcgctcctctttgccggtgttgatgcggggacgaatgtcatcggaggcacccagagccaagct

SEQ ID NO: 128365 - DNA, 80 bp, synthetic construct
  source 1..80: mol_type = other DNA
acgtaagtgccacttcgctgaggagtgcagcctgtacagccccgggaggaccgggtaaacaaagccgaaaaggcccccac

SEQ ID NO: 128366 - DNA, 80 bp, synthetic construct
  source 1..80: mol_type = other DNA
gcctgctgtccatgccgcgtggcctaggatggaggagttttggaggaaacacatgtggaactttgtcagcgggattcagt

SEQ ID NO: 128367 - DNA, 80 bp, synthetic construct
  source 1..80: mol_type = other DNA
gaactgtacatggccagcaagccacactatcgacaatgatggagttgtggactcccatcttttcctgccagttacccttg

SEQ ID NO: 128368 - DNA, 80 bp, synthetic construct
  source 1..80: mol_type = other DNA
tcgtttgctgctctatgtcatactcctggacgggagcactcatcaccccctgtgctgctgaggaggagaagctgccaatt

SEQ ID NO: 128369 - DNA, 80 bp, synthetic construct
  source 1..80: mol_type = other DNA
tcacctggcccgcggtgatgcctttgagtgtggccgcgtccatctggtcagaaaagacaatctttttgttgtcaagcttg

SEQ ID NO: 128370 - DNA, 80 bp, synthetic construct
  source 1..80: mol_type = other DNA
tcatgcgagaaggatggctatcgtgcctctcgataacctggactctcataaaaaacttggaaaaacctggcttgaaaaga

SEQ ID NO: 128371 - DNA, 80 bp, synthetic construct
  source 1..80: mol_type = other DNA
atttttttttgcatgtatgttttcgtaccgatggagggttaccaggtatacgaccgccccccggtaaggaaatggccaac

SEQ ID NO: 128372 - DNA, 80 bp, synthetic construct
  source 1..80: mol_type = other DNA
agtttacagcattagccccgaccaaggcgcttttgggccgctggagagcagtggaaaaaagtgtggcaatgaaacatctt

SEQ ID NO: 128373 - DNA, 80 bp, synthetic construct
  source 1..80: mol_type = other DNA
tggaactttatcagtgggatacaatatctggcgggcctgtcaacgttgcccggtaatcccgcaattgcatcattgatggc

SEQ ID NO: 128374 - DNA, 80 bp, synthetic construct
  source 1..80: mol_type = other DNA
tgtggcggcgctgttcttgtcgggttaatggcgctgactttgtcaccgcattacaagcgctgtatcagctggtgcttatg

SEQ ID NO: 128375 - DNA, 80 bp, synthetic construct
  source 1..80: mol_type = other DNA
tttgcgtgttgacccttgtgggtgcggtggcagccaatgagatgggttggctggacaagaccaagagtgacataagcggt

SEQ ID NO: 128376 - DNA, 80 bp, synthetic construct
  source 1..80: mol_type = other DNA
ggctcagtaacggtccctcatccaaacatcaccgaggtagccttgtcatctaccggtgaggtgcctttctacgggaaggc

SEQ ID NO: 128377 - DNA, 80 bp, synthetic construct
  source 1..80: mol_type = other DNA
gctctccaaggggctgtcctccgcaaacaggcccgtggtggtgtttggagggcagcgacaggacctagtgcgcacgatcg

SEQ ID NO: 128378 - DNA, 80 bp, synthetic construct
  source 1..80: mol_type = other DNA
gacataacagacaaaggtcttcaaattggaactgatgaaaccaaagaagataataatgaaatttttgcagacaaaacttt

SEQ ID NO: 128379 - DNA, 80 bp, synthetic construct
  source 1..80: mol_type = other DNA
gcaaaatttgaaaaacagctaggccaaataatgttactgatactttgtacatcacagatcctcttgatgcggaccacatg

SEQ ID NO: 128380 - DNA, 80 bp, synthetic construct
  source 1..80: mol_type = other DNA
ctgctgctattcgccggcgtcgatgcgacaacctacaccaccgggggagccgccgcccgcaccgcagctggtcttgccgg

SEQ ID NO: 128381 - DNA, 80 bp, synthetic construct
  source 1..80: mol_type = other DNA
acttcgaggcggaggtggtggagcgcgccgacgtgtactattacgaaacgcgcccgaccctgtactaccgcgtcttcgtg

SEQ ID NO: 128382 - DNA, 80 bp, synthetic construct
  source 1..80: mol_type = other DNA
tgtgcgccagagccaaggcccctcccccgtcctgggacgccatgtggaagtgcctggcccgactcaagcctacgcttgcg

SEQ ID NO: 128383 - DNA, 80 bp, synthetic construct
  source 1..80: mol_type = other DNA
ctacgtgtgtaagcatacatacgtagacagaggttgggggaacggttgtggtttgtttggcaaaggaagcttggtaacat

SEQ ID NO: 128384 - DNA, 80 bp, synthetic construct
  source 1..80: mol_type = other DNA
gtttgattctttgaatctgggtcaccaggcgcttttccaagagaaggtcatcaagactttggatttttccacaccggggc

SEQ ID NO: 128385 - DNA, 80 bp, synthetic construct
  source 1..80: mol_type = other DNA
gtttatcaccgtgctttcactttccgcttcactggactcttccttttcctcttgcgtccgcataccccgcgccactgggt

SEQ ID NO: 128386 - DNA, 80 bp, synthetic construct
  source 1..80: mol_type = other DNA
gcccggggtcaaggcagaatctccagctcgtcaacaccaatggcagctggcacgtcaatcggacggctctaaattgcaat

SEQ ID NO: 128387 - DNA, 80 bp, synthetic construct
  source 1..80: mol_type = other DNA
gctgtatcaggcagaccccacggtcgagctgacccagttgtttccggggctggccgccctgtgcctggacgcccaggcgg

SEQ ID NO: 128388 - DNA, 80 bp, synthetic construct
  source 1..80: mol_type = other DNA
ggttagggcggtgggcatgccaaacatccggagggacttgaggtccggctcctggaggcaaaactgcccccgggcgatcg

SEQ ID NO: 128389 - DNA, 80 bp, synthetic construct
  source 1..80: mol_type = other DNA
acccagtggatgaacaggctcatagcctttgcctctaggggcaaccacgtgtctccgacgcactacgtccctgagactga

SEQ ID NO: 128390 - DNA, 80 bp, synthetic construct
  source 1..80: mol_type = other DNA
aggtgaggggccgggcgccatgtctggggcgccatattggagggcgccatattggagggcgccatgttgaggaactcccg

SEQ ID NO: 128391 - DNA, 80 bp, synthetic construct
  source 1..80: mol_type = other DNA
cctatggatgatgtttatggtaagtcaagttgaggcggctctgtccaacctaattaacatcaatgctgcttcagccgctg

SEQ ID NO: 128392 - DNA, 80 bp, synthetic construct
  source 1..80: mol_type = other DNA
tcactcccatgcccgccttgtcaacagggctcatacacctccaccaaaacgtcgtggacgtacaatacctttatggtgta

SEQ ID NO: 128393 - DNA, 80 bp, synthetic construct
  source 1..80: mol_type = other DNA
tggtcgcagagtacgacgaaagggaaatttccgtacctgcagaatgccacagaccacctagggtgaagtatccaccagcc

SEQ ID NO: 128394 - DNA, 80 bp, synthetic construct
  source 1..80: mol_type = other DNA
gcgtatagacggtaccggccccctgcatacttataaagatagggtggataaactttatgcgttacggactaaattagatc

SEQ ID NO: 128395 - DNA, 80 bp, synthetic construct
  source 1..80: mol_type = other DNA
actgaagtggatcgttctgcagcacaaagggcaagaagagaagggaacattacaggtggtcacccagtctcaaggggtac

SEQ ID NO: 128396 - DNA, 80 bp, synthetic construct
  source 1..80: mol_type = other DNA
tcgtcctttttgtttgcagcgttggcgttccgtcaaaaaagcaaagtacaaccactctcgcaggcttgctaaaatgtatt

SEQ ID NO: 128397 - DNA, 80 bp, synthetic construct
  source 1..80: mol_type = other DNA
ctgctttgtttgccgctgtttcaacagaaatgaccgccccctgggggcggtgctgtttgcgggttggcacaaaaagaccc

SEQ ID NO: 128398 - DNA, 80 bp, synthetic construct
  source 1..80: mol_type = other DNA
atggtccgctgtggtttttcatcttctttacagcggcctggtacttaaagggcagggtggtccccgtggccacgtactct

SEQ ID NO: 128399 - DNA, 80 bp, synthetic construct
  source 1..80: mol_type = other DNA
cgcctcctcctcctgggccctgccgatggcatgcaagacacgggctggagactgcttgcccctgtaacggcatactgtca

SEQ ID NO: 128400 - DNA, 80 bp, synthetic construct
  source 1..80: mol_type = other DNA
gagagaaatggaaaagccgattgaacgcactgggaaaaagtgaattccagatctacaagaaaagtggaatccaggaagtg

SEQ ID NO: 128401 - DNA, 80 bp, synthetic construct
  source 1..80: mol_type = other DNA
ccttgagaacatcatgtggaagcaaatatcaaatgaattgaaccacattctacttgaaaatgacatgaaattcacagtgg

SEQ ID NO: 128402 - DNA, 80 bp, synthetic construct
  source 1..80: mol_type = other DNA
ctggctcctccgtagccgcgctgcgcaccagcgggaggttaaggtgctcgcgaatgtggtttagctcccgcagccggcgg

SEQ ID NO: 128403 - DNA, 80 bp, synthetic construct
  source 1..80: mol_type = other DNA
ggcgaacccctcatgatagtggcaaaacatgaaacggggagacctctcttgtttaagacaacagaggggatcaacaaatg

SEQ ID NO: 128404 - DNA, 80 bp, synthetic construct
  source 1..80: mol_type = other DNA
tcgtggcaggctacgacgggggggacatttatcacagcgtgtcccaggctcgaccccgtctcttactccttggcctactc

SEQ ID NO: 128405 - DNA, 80 bp, synthetic construct
  source 1..80: mol_type = other DNA
ccactccacggatgcaacatccatcttgggcattggcactgtccttgaccaagcagagaccgcgggagcgagattagttg

SEQ ID NO: 128406 - DNA, 80 bp, synthetic construct
  source 1..80: mol_type = other DNA
aacgccgtagctttctatagaggggtcgatgtgtccgtgatcccgactgcaggcgatgtggtcatatgcgccacagacgc

SEQ ID NO: 128407 - DNA, 80 bp, synthetic construct
  source 1..80: mol_type = other DNA
aacaatgaccttatggtacttgtggcagactaagacacaaagatcgggagccctgtgggacgtcccgtccccaacaccaa

SEQ ID NO: 128408 - DNA, 80 bp, synthetic construct
  source 1..80: mol_type = other DNA
ctcacttaaaaaacattactggaactttagaaatgggaactcaactaatgcaaatccatacacaaatgcagttggattta

SEQ ID NO: 128409 - DNA, 80 bp, synthetic construct
  source 1..80: mol_type = other DNA
agggtcgcaggggcaacgtgtactgggtgcgcgactcggttagcggcctgcgcgtgcccgtgcgcacccgccccccgcgc

SEQ ID NO: 128410 - DNA, 80 bp, synthetic construct
  source 1..80: mol_type = other DNA
gtggccagcctgaatgatttgactccagttggcagattggtgacagtcaatccttttgttgccacatccactgccaactc

SEQ ID NO: 128411 - DNA, 80 bp, synthetic construct
  source 1..80: mol_type = other DNA
gcaggaaagaaccaatgctgggttaaagcgatggatgttgggtacatgtgtgccgacacgattacctatgaatgcccaaa

SEQ ID NO: 128412 - DNA, 80 bp, synthetic construct
  source 1..80: mol_type = other DNA
cccgcggaggatccctgatgggattgaagagggctattttgagcttgatagatggtaggggtccaatacgattcgtattg

SEQ ID NO: 128413 - DNA, 80 bp, synthetic construct
  source 1..80: mol_type = other DNA
gagtggtatctctagttggtgcaacgccaacctctttggtggttggtgttggtctggcagcgttccacctggccattgtg

SEQ ID NO: 128414 - DNA, 80 bp, synthetic construct
  source 1..80: mol_type = other DNA
ctctccaggtgagatcaatagggtggcttcatgcctcaggaaacttggggtaccacccttgcgagtctggagacatcggg

SEQ ID NO: 128415 - DNA, 80 bp, synthetic construct
  source 1..80: mol_type = other DNA
cactggtcactctcagctgctaacttgcgcagatggaaactgtcagactctaaaagtgattcatgtggtttcccatcagc

SEQ ID NO: 128416 - DNA, 80 bp, synthetic construct
  source 1..80: mol_type = other DNA
caacaaacccgtggtctagtggggacaattgttaccagcttaactggccgggacaggaatgaagccgagggtgagataca

SEQ ID NO: 128417 - DNA, 80 bp, synthetic construct
  source 1..80: mol_type = other DNA
ctccacctcgcggtccacgacctgcctgacgttgttcaccaccgtatgcagggcctcgcggttggtgatgatggtctcca

SEQ ID NO: 128418 - DNA, 80 bp, synthetic construct
  source 1..80: mol_type = other DNA
cgaacagcatggactccgctgcgtcctcgaacgcgcgttcgagggtgaggtgcatgtactcgtgctggcgaacgaggtcc

SEQ ID NO: 128419 - DNA, 80 bp, synthetic construct
  source 1..80: mol_type = other DNA
ggaccaaagcaaatgttggttggaggagtagtgctcttgggagcaatgctggtcgggcaagtaactctccttgatttgct

SEQ ID NO: 128420 - DNA, 80 bp, synthetic construct
  source 1..80: mol_type = other DNA
tcagaacgtgttggtagagctggagggtgacaacgcgcgtttggccgtactcaaacgcaccattgaagtttcacactttg

SEQ ID NO: 128421 - DNA, 80 bp, synthetic construct
  source 1..80: mol_type = other DNA
gtacgcgctgttgaggcgcaggttgccgggcgtaaagcagatggcgaccttgtccaggctaaggccctgggagcgcgtga

SEQ ID NO: 128422 - DNA, 80 bp, synthetic construct
  source 1..80: mol_type = other DNA
tagccgtgatgggagccgcttatggcttccaatactccccagcgcagcgggtggaatttcttctgactgcttggaagtcg

SEQ ID NO: 128423 - DNA, 80 bp, synthetic construct
  source 1..80: mol_type = other DNA
tctgacttcaagacttggcttaaggccaagcttgtaccagcctcgccgggcatccccttcttctcgtgtcagaggggatt

SEQ ID NO: 128424 - DNA, 80 bp, synthetic construct
  source 1..80: mol_type = other DNA
gtaactggggacaacccggttatccctggcccctatatgggaatgagggctgcggctgggcagtgtggctcctgtctccc

SEQ ID NO: 128425 - DNA, 80 bp, synthetic construct
  source 1..80: mol_type = other DNA
gtgtctgattgactacccgtaccgactgtggcacttcccatgcaccatcaactttaccatttttaagatcaggacatttg

SEQ ID NO: 128426 - DNA, 80 bp, synthetic construct
  source 1..80: mol_type = other DNA
gccaggcagaggttattacccctgttgtccagaccaactggcaaagactcgaagccttctgggcaaagcatatgtggaac

SEQ ID NO: 128427 - DNA, 80 bp, synthetic construct
  source 1..80: mol_type = other DNA
gggctcatgactctaaaactgataacacaatttgagacatatcagttgtggacggcactagtctccttaacatgttcaaa

SEQ ID NO: 128428 - DNA, 80 bp, synthetic construct
  source 1..80: mol_type = other DNA
aaataaacggctttatttgttttttttggctcggtaggctcgggtccacctgtcccggtcgttaaggaccttgtgtatgt

SEQ ID NO: 128429 - DNA, 80 bp, synthetic construct
  source 1..80: mol_type = other DNA
cagtgcaaaattttatgaaattaaaattattgagcttccaacaactagagcacccaccacagttaggacaacacaaccta

SEQ ID NO: 128430 - DNA, 80 bp, synthetic construct
  source 1..80: mol_type = other DNA
tcgctcagggaggtagggccagaatctgtggcatatacctctttaactgggcggtaaaaaccaaaatcaaactcactcca

SEQ ID NO: 128431 - DNA, 80 bp, synthetic construct
  source 1..80: mol_type = other DNA
ggtggtcacgttgtcaccgcagtacaagggaatgattgcccgcttgatatggtggctccagtacttcctgacgagagtgg

SEQ ID NO: 128432 - DNA, 80 bp, synthetic construct
  source 1..80: mol_type = other DNA
cattcccgaaggaagagtcatagacttaggctgtggaagaggaggctggtcatattactgcgcaggactgaaaaaagtta

SEQ ID NO: 128433 - DNA, 80 bp, synthetic construct
  source 1..80: mol_type = other DNA
tcatagattggacggtctgaaaccatgttctcttcttttacagtatgattaaatgagacatgattcctcgagttcttata

SEQ ID NO: 128434 - DNA, 80 bp, synthetic construct
  source 1..80: mol_type = other DNA
tggcttaaggcaaagctcgtgccgtcattgcccggggtccccttcctctcatgccaacgaggcttcagaggcacatggag

SEQ ID NO: 128435 - DNA, 80 bp, synthetic construct
  source 1..80: mol_type = other DNA
agcgaccttgagccctcaataccatcggagtgcatgctccccaggagcgggtttccacgggccttaccggcttgggcacg

SEQ ID NO: 128436 - DNA, 80 bp, synthetic construct
  source 1..80: mol_type = other DNA
atggcagacataacaggctcaagcccaatcatagaagtgaagcaggatgaagatggctctttctccatacgggacgtcga

SEQ ID NO: 128437 - DNA, 80 bp, synthetic construct
  source 1..80: mol_type = other DNA
ctataggaggagtgttttcatctgtgggaaaattggtacaccaggtttttggaaccgcatatggggttttgttcagcggt

SEQ ID NO: 128438 - DNA, 80 bp, synthetic construct
  source 1..80: mol_type = other DNA
gccaacttttcaccatccggcccaggtatcataccatcgttcaggagtgcaactgttccatctatacggggcacgttacg

SEQ ID NO: 128439 - DNA, 80 bp, synthetic construct
  source 1..80: mol_type = other DNA
acctccaacgacggcgatgcaggatccgacgtcgagtcgtactcctccatgcccccccttgagggagagccggtggaccc

SEQ ID NO: 128440 - DNA, 80 bp, synthetic construct
  source 1..80: mol_type = other DNA
gtggccactcctcctgctcgtgctcgcgctcccgcagcgggcgtacgcgtatgaccgggagcaagcagcttccattggac

SEQ ID NO: 128441 - DNA, 80 bp, synthetic construct
  source 1..80: mol_type = other DNA
ttggctagacaagaccaagagtgacataagcagtttgtttgggcaaagaattgaggtcaaggagaatttcagcatgggag

SEQ ID NO: 128442 - DNA, 80 bp, synthetic construct
  source 1..80: mol_type = other DNA
atcgctgtcttcggcttcgctgtttacgagcgccagctgttgcggtgagtacgcgcgctgaaaggcaggtaacacatctg

SEQ ID NO: 128443 - DNA, 80 bp, synthetic construct
  source 1..80: mol_type = other DNA
taggtccaaatgctgggtccctgcgacgcccacgttggctgtccaggacgagtcaacaccagctattgggttccgtggcc

SEQ ID NO: 128444 - DNA, 80 bp, synthetic construct
  source 1..80: mol_type = other DNA
tcaccaagacgtgcggtggtcccccgtgtgacatcgggggggccggcaataacaccctgatctgccccacggattgtttc

SEQ ID NO: 128445 - DNA, 80 bp, synthetic construct
  source 1..80: mol_type = other DNA
ctgcctacgcccaacagactcgtgggttgttaggtacaatagtgacgagcctcagtggccgagataggaatgaggtggtg

SEQ ID NO: 128446 - DNA, 80 bp, synthetic construct
  source 1..80: mol_type = other DNA
atgcaaagcatgcatctcaattagtcagcaaccatagtcccgcccctaactccgcccatcccgcccctaactccgcccag

SEQ ID NO: 128447 - DNA, 80 bp, synthetic construct
  source 1..80: mol_type = other DNA
ctccccagtatataatatcacgcaaaacccacgctatgttaaattcagtttattttacatacatgctttaataataacat

SEQ ID NO: 128448 - DNA, 80 bp, synthetic construct
  source 1..80: mol_type = other DNA
ggtaagggctctcgaggacggaataaattttgcaacagggaaccttcccggttgctctttttctatcttcttgcttgctc

SEQ ID NO: 128449 - DNA, 80 bp, synthetic construct
  source 1..80: mol_type = other DNA
ctccccaacccccgccgatttccgggcgagcgcgtccccgcgtggcgggtcccggtcccggacccggacccgatcccggt

SEQ ID NO: 128450 - DNA, 80 bp, synthetic construct
  source 1..80: mol_type = other DNA
ctcaatgcctccgcttgagggtgagccgggagacccggatctaagttccggctcctggtccaccgttagcgaagaggacg

SEQ ID NO: 128451 - DNA, 80 bp, synthetic construct
  source 1..80: mol_type = other DNA
cttaatgactggcttcaccggcgatttcgactctgtgatagactgcaacacctgtgttgtccagacagtcgatttcagcc

SEQ ID NO: 128452 - DNA, 80 bp, synthetic construct
  source 1..80: mol_type = other DNA
accacaaaaagaactacaactaaagggactacaaaaagcagcactaatgaatcagatgaaaactttgctttgcaacaggg

SEQ ID NO: 128453 - DNA, 80 bp, synthetic construct
  source 1..80: mol_type = other DNA
agactggcttccaatgacagtggcagctatgggagtcccacccctaccactcttcatttttagcttgaaagacacactca

SEQ ID NO: 128454 - DNA, 80 bp, synthetic construct
  source 1..80: mol_type = other DNA
gaaccttgacggtggtcgtcgttttgggcttggtgtccatggctttcgggagatcggcgaccggcaggaacggtggcccg

SEQ ID NO: 128455 - DNA, 80 bp, synthetic construct
  source 1..80: mol_type = other DNA
attataattagaataggatttaaaccccccggtcatttcctgctcaataccattcccctgaacaattgactctatgtggg

SEQ ID NO: 128456 - DNA, 80 bp, synthetic construct
  source 1..80: mol_type = other DNA
ggaattgatgtcgcccagactgtggtgatgtcgcttggcagcagcaaagatcacctgccttcggcatggcaggtgcatcg

SEQ ID NO: 128457 - DNA, 80 bp, synthetic construct
  source 1..80: mol_type = other DNA
ccggttatggcaccgtcacgatggagtgctccccgagaacaggcctcgacttcaatgagatggtgttgctgcagatggaa

SEQ ID NO: 128458 - DNA, 80 bp, synthetic construct
  source 1..80: mol_type = other DNA
aggctgcgggcgcgaggtaggtgggtgggcgggtggtggtggagtgggcccggctgcgtctcgccgccatcccgccagtg

SEQ ID NO: 128459 - DNA, 80 bp, synthetic construct
  source 1..80: mol_type = other DNA
tcattggaagaatggacaagaagatttggaaaggcccaaaatatgaggaagatgtcaacctgggcagcggcacgagagca

SEQ ID NO: 128460 - DNA, 80 bp, synthetic construct
  source 1..80: mol_type = other DNA
tgtggacgctgtcagaaatgctgagaacggctcgaagatcagacttggtcttctctggacaaggaggacgtgagcgtggt

SEQ ID NO: 128461 - DNA, 80 bp, synthetic construct
  source 1..80: mol_type = other DNA
gagtgcgaaaagacgttcaccaagctgctgctgatcgccaagaaaaagtacatcggcgtcatctacgggggtaagatgct

SEQ ID NO: 128462 - DNA, 80 bp, synthetic construct
  source 1..80: mol_type = other DNA
cctgttttctaccaccgagctagcaatcctcccctgtgccttcactaccatgcctgcattgtccaccgggctcatacatc

SEQ ID NO: 128463 - DNA, 80 bp, synthetic construct
  source 1..80: mol_type = other DNA
atcactgaagtggatagaacagaagccaaagaagggttgaaaagaggagaaacaacacatcatgccgtgtcgagaggtag

SEQ ID NO: 128464 - DNA, 80 bp, synthetic construct
  source 1..80: mol_type = other DNA
ccgcgtattcccactagtgggagtgaagagggtagtaatgaacttgctagatggcagagggccaatacggtttgtgttgg

SEQ ID NO: 128465 - DNA, 80 bp, synthetic construct
  source 1..80: mol_type = other DNA
gggaaaatcgtgcaaccagaaaacttggagtacaccattgtgataacacctcactcaggggaagagaatgcagtcggaaa

SEQ ID NO: 128466 - DNA, 80 bp, synthetic construct
  source 1..80: mol_type = other DNA
tctgcaggtacttccagtactgcgtgaggatggcgcggctcaactggccgccgggcagctccacctcgcccagcgcctgg

SEQ ID NO: 128467 - DNA, 80 bp, synthetic construct
  source 1..80: mol_type = other DNA
cgctttgtcgactggccttcttcatctccaccaaaatatcgtggacgtacagtacatgtatggcctgtcacctgctctca

SEQ ID NO: 128468 - DNA, 80 bp, synthetic construct
  source 1..80: mol_type = other DNA
agactcccttagcccgtgcggcttgggagactgctcgccacactccagttaactcctggttgggaaatatcatcatgttc

SEQ ID NO: 128469 - DNA, 80 bp, synthetic construct
  source 1..80: mol_type = other DNA
cacgggtgcgctctgcccccttccgggcagcctccaattccgccgcctaggaggaagaggacagtgcgcctggatgaatc

SEQ ID NO: 128470 - DNA, 80 bp, synthetic construct
  source 1..80: mol_type = other DNA
tggattaaacacacccacccgggaattagcctggaactgcaattggatgttccagtaaaactaataaaacctggtatgtc

SEQ ID NO: 128471 - DNA, 80 bp, synthetic construct
  source 1..80: mol_type = other DNA
ggttcaatccaactttgccaagctcgagcagttctgggccaagcatatgtggaacttcatcagcggcattcaatatcttg

SEQ ID NO: 128472 - DNA, 80 bp, synthetic construct
  source 1..80: mol_type = other DNA
caaatgttaatttcaaaccagacatgataatgtatgcagaaaatgtgaacttggaaaccccagacactcatattgtatac

SEQ ID NO: 128473 - DNA, 80 bp, synthetic construct
  source 1..80: mol_type = other DNA
ggaaggaacattccacacaatgtggcacgtcacacgtggtgctgttctaatgcacaaagggaagaggattgaaccatcat

SEQ ID NO: 128474 - DNA, 80 bp, synthetic construct
  source 1..80: mol_type = other DNA
cggggctccccgcggcccccgtcagcgccgcgttctcgcgcgccaacaggggcgcgtaggcgcggcgcaggctggtcagc

SEQ ID NO: 128475 - DNA, 80 bp, synthetic construct
  source 1..80: mol_type = other DNA
gcccgtgattttcagtcctatggagatcaaggtcatcacttggggtgcggacacaacggcttgtggggacatcctgtgtg

SEQ ID NO: 128476 - DNA, 80 bp, synthetic construct
  source 1..80: mol_type = other DNA
cctgctccccgagaccgcgggtaaccacgtgatgccccccgagtacccgacggcccccgcgtcggagtggaacagcctct

SEQ ID NO: 128477 - DNA, 80 bp, synthetic construct
  source 1..80: mol_type = other DNA
cctacctgaagggctcttcgggtggtccgttgctctgcccttccgggcacgctgtgggcatcttccgggctgctgtgtgc

SEQ ID NO: 128478 - DNA, 80 bp, synthetic construct
  source 1..80: mol_type = other DNA
gatgaacgcaacaggctatacaaagacatgtggtgcaccgccctgtgtcatcgggcccaccaccaatacgtcactgatct

SEQ ID NO: 128479 - DNA, 80 bp, synthetic construct
  source 1..80: mol_type = other DNA
ccctgagagccttcacggaggctatgaccaggtactctgctccccccggcgacatgccccagcctacttacgacttggaa

SEQ ID NO: 128480 - DNA, 80 bp, synthetic construct
  source 1..80: mol_type = other DNA
tgaataggacagcgctcaactgttttgattccatccgaactgggttcttagctgctttgtttgccgggaaggtgaactcc

SEQ ID NO: 128481 - DNA, 80 bp, synthetic construct
  source 1..80: mol_type = other DNA
caccagccttggcaacaccatgacatgcttcataaaggcatcagctgcttgcaaggcagccggcctcaaagatcctgaca

SEQ ID NO: 128482 - DNA, 80 bp, synthetic construct
  source 1..80: mol_type = other DNA
tcaccccgtgtgccgcggaagaacaaaagttgcctatcaacgcactgagcaactcgctactgcgtcatcacaatcttgtg

SEQ ID NO: 128483 - DNA, 80 bp, synthetic construct
  source 1..80: mol_type = other DNA
tcccaccttcaccatagagaccaccactgtgcctcaggatgcggtatctcgctctcagcggcgaggcaggacaggcaggg

SEQ ID NO: 128484 - DNA, 80 bp, synthetic construct
  source 1..80: mol_type = other DNA
tgagtgcatctactccctcctcaagaccctttgcggactccgcgacctcctccccatgaactgatgttgattaaaagccc

SEQ ID NO: 128485 - DNA, 80 bp, synthetic construct
  source 1..80: mol_type = other DNA
tcgtcctctctcctagacaccattggaccacgcaggactgtaactgctccatctacccgggccatataacgggtcaccgt

SEQ ID NO: 128486 - DNA, 80 bp, synthetic construct
  source 1..80: mol_type = other DNA
gcttacaactctttggctccaaagggcgcgcccaatgctagccagtggctgactactaatgacaacaagtcccacacttt

SEQ ID NO: 128487 - DNA, 80 bp, synthetic construct
  source 1..80: mol_type = other DNA
ggacacgaaagttaccaatgcagacttagaggatgaagaacagatcctacgatacatggagggtgagcacaaacaattgg

SEQ ID NO: 128488 - DNA, 80 bp, synthetic construct
  source 1..80: mol_type = other DNA
gacgagggcgacgtgtgcgccgtgtgcacggatgagatcgcgccccacctgcgctgcgacaccttcccgtgcatgcaccg

SEQ ID NO: 128489 - DNA, 80 bp, synthetic construct
  source 1..80: mol_type = other DNA
ggggtctttcccctctcgccaaaggaatgcaaggtctgttgaatgtcgtgaaggaagcagttcctctggaagcttcttga

SEQ ID NO: 128490 - DNA, 80 bp, synthetic construct
  source 1..80: mol_type = other DNA
gctggcgcgctggggcacctttaaaaaaagcggcgcgattaaagtggtgaaaggctttaaaaaagaaattagcaacatgg

SEQ ID NO: 128491 - DNA, 80 bp, synthetic construct
  source 1..80: mol_type = other DNA
tccaaaacctcaaaatgaagatctattaagtgaacgcgctcccctccggtggcgtggtcaaactctacagccaaagaaca

SEQ ID NO: 128492 - DNA, 80 bp, synthetic construct
  source 1..80: mol_type = other DNA
aatggtgttgtcacaaggagtggagcatatgtaagtgctatagcccagaccgaaaaaagcattgaagatagtccagagat

SEQ ID NO: 128493 - DNA, 80 bp, synthetic construct
  source 1..80: mol_type = other DNA
ggtggccgcatgcctcaggaaacttggggtaccgcccttgcgagtctggagacaccgggccaggagcgtccgcgctaagt

SEQ ID NO: 128494 - DNA, 80 bp, synthetic construct
  source 1..80: mol_type = other DNA
ccggcctcatccacctccaccagaacattgtggacgtgcagtacttgtacggggtagggtcaagcatcgcgtcctgggcc

SEQ ID NO: 128495 - DNA, 80 bp, synthetic construct
  source 1..80: mol_type = other DNA
tccaacagtgatggcgttccatctaaccacacgcaacggagaaccacacatgatcgtcggtatacaggagaaagggaaaa

SEQ ID NO: 128496 - DNA, 80 bp, synthetic construct
  source 1..80: mol_type = other DNA
ggccgtgatggcgtcatctgggccgctgtcatgcttcggccagaggtggtgtttgacataaccaagtggttgttggcaat

SEQ ID NO: 128497 - DNA, 80 bp, synthetic construct
  source 1..80: mol_type = other DNA
agtcatttccaacatcgtcaacgccctctacgaccctagactcgggttacccaaccaatgacagcggttccactgaagct

SEQ ID NO: 128498 - DNA, 80 bp, synthetic construct
  source 1..80: mol_type = other DNA
aaaccccagacactcatatttcttacatgcccactattaaggaaggtaactcacgagaactaatgggccaacaatctatg

SEQ ID NO: 128499 - DNA, 80 bp, synthetic construct
  source 1..80: mol_type = other DNA
ggggtctggcgagtggacggcatcatgcacactcgctgccactgtggagctgagatcactggacatgtcaaaaacgggac

SEQ ID NO: 128500 - DNA, 80 bp, synthetic construct
  source 1..80: mol_type = other DNA
gtggcggccacgtttgggtgggcctcgaacagctgggcgaggtctgcgcccggtggctcgggtgagcggcgagtcttcag

SEQ ID NO: 128501 - DNA, 80 bp, synthetic construct
  source 1..80: mol_type = other DNA
tcaagggcatacaatcatatggtagacccactacttagcttctcttactaaaacttagttatttttattttagaaccatg

SEQ ID NO: 128502 - DNA, 80 bp, synthetic construct
  source 1..80: mol_type = other DNA
gcgagatcccgaggtggcactggagatcatcgccggcggtcactggggggtggtgttcggcctagcctatttctccatgc

SEQ ID NO: 128503 - DNA, 80 bp, synthetic construct
  source 1..80: mol_type = other DNA
gctaatcatgtaattaaaataggctgttttaagtctgcggatggttttaagaagcaccacgtcttttggtccggcttgtt

SEQ ID NO: 128504 - DNA, 80 bp, synthetic construct
  source 1..80: mol_type = other DNA
gccctccccggccaagcgcccccgggagacgccgtcgcctgccgaccccccgggaggcgcgtccaagccccgcaagctgc

SEQ ID NO: 128505 - DNA, 80 bp, synthetic construct
  source 1..80: mol_type = other DNA
aagtgggagttcgttgtcctcgtgttcctccttctagcggacgcacgcgtatgcgtagccctctggatgatgttgctgat

SEQ ID NO: 128506 - DNA, 80 bp, synthetic construct
  source 1..80: mol_type = other DNA
cagcagaacatccagctagtcaagatcaatgggagctggcacgtcaacagcacggcgttgaactgtaatgacagccttca

SEQ ID NO: 128507 - DNA, 80 bp, synthetic construct
  source 1..80: mol_type = other DNA
ctctggagcaatggagtattggaaagtgagatgataatcccaaaaaattttgccgggccagtgtcacaacacaactacag

SEQ ID NO: 128508 - DNA, 80 bp, synthetic construct
  source 1..80: mol_type = other DNA
ccgcagagcggtgttatcgttattacgcgagcaatgcatgccggatccacaatcgcatctggagctcagcgagcggctga

SEQ ID NO: 128509 - DNA, 80 bp, synthetic construct
  source 1..80: mol_type = other DNA
gcggagtgagatcagtcaccaggctggaacatcaaatgtgggaagccgtcagagatgagttaaatgtcctactgaaggag

SEQ ID NO: 128510 - DNA, 80 bp, synthetic construct
  source 1..80: mol_type = other DNA
tttgtggggagtgcatgccccggtaggagaaagagcaaccgtgtctagcttgttaactccgaactcccgcctattattac

SEQ ID NO: 128511 - DNA, 80 bp, synthetic construct
  source 1..80: mol_type = other DNA
cccacaccgcctccccgcagaaatcagttccccctgattcagtacttagaagagccccctccccggcccgcttccactgt

SEQ ID NO: 128512 - DNA, 80 bp, synthetic construct
  source 1..80: mol_type = other DNA
acaattgcgctatccccatcacggttatggaatacaccgagtgcccctacaacaagtcgttgggggtctgccccatccga

SEQ ID NO: 128513 - DNA, 80 bp, synthetic construct
  source 1..80: mol_type = other DNA
tattcaacctaaactagtgttgtatagtgaagatgtaaatatggaaaccccagacactcatctttcttataagcctggaa

SEQ ID NO: 128514 - DNA, 80 bp, synthetic construct
  source 1..80: mol_type = other DNA
gccagccccaggaggcaaggccttcatggacatcatcagccggagagaccaaagggggtcaggacaagttgtgacatacg

SEQ ID NO: 128515 - DNA, 80 bp, synthetic construct
  source 1..80: mol_type = other DNA
gtccgaacatcaatcagtcgcatgacgctcggcacgctggtcttgctggcctccctgttgcttctgtgggctggtggagt

SEQ ID NO: 128516 - DNA, 80 bp, synthetic construct
  source 1..80: mol_type = other DNA
ccaaccgtcacattcgtgatttccagcgctctaagggcgccacagatcgtgtttgacatcttcgcgggcggccattggtg

SEQ ID NO: 128517 - DNA, 80 bp, synthetic construct
  source 1..80: mol_type = other DNA
ttttaaggtggtgtaccctgtggatgatcatcactttaaggtgatcctgcactatggcacactggtaatcgacggggtta

SEQ ID NO: 128518 - DNA, 80 bp, synthetic construct
  source 1..80: mol_type = other DNA
ctatttttcatctgctgggcgtggtacgtgcgaggtaggttcgttccggcttgtgcgtacacattcctcaacctgtggcc

SEQ ID NO: 128519 - DNA, 80 bp, synthetic construct
  source 1..80: mol_type = other DNA
attgcaccgccccgtgtgctggttcttggctcaaagatgtctgggactggatatgcgaggtgctgagcgacttcaagagt

SEQ ID NO: 128520 - DNA, 80 bp, synthetic construct
  source 1..80: mol_type = other DNA
gtggaatacttattgataaaaatggtcttcagattggaacagatgaaactaaacccaataacaaggaagtttatgcagac

SEQ ID NO: 128521 - DNA, 80 bp, synthetic construct
  source 1..80: mol_type = other DNA
cgggcagcgggtcgagttcctggtaaaagcctggaaatcaaagaaaaaccctatgggcttctcatatgacacccgctgtt

SEQ ID NO: 128522 - DNA, 80 bp, synthetic construct
  source 1..80: mol_type = other DNA
acatccaaatatcgaagaagtggccttgtccaacactggagaggtccccttctatggcaaagccatccccatcgagacca

SEQ ID NO: 128523 - DNA, 80 bp, synthetic construct
  source 1..80: mol_type = other DNA
aagccttgcggcatcgtgccagcactgaacgtgtgtggtccagtgtactgcttcacgcccagccccgtggtggtgggaac

SEQ ID NO: 128524 - DNA, 80 bp, synthetic construct
  source 1..80: mol_type = other DNA
tggcgattggctcaggaccatctgggactgggtctcgcaggtacttagtgacttctgggcttggcttaaggccaagaccc

SEQ ID NO: 128525 - DNA, 80 bp, synthetic construct
  source 1..80: mol_type = other DNA
taacaactgactcaaggtgtcctacccagggggaagcgattttacctgaggagcaggaccagaactacgtatgtaagcac

SEQ ID NO: 128526 - DNA, 80 bp, synthetic construct
  source 1..80: mol_type = other DNA
gcccctttaaggtgacgtatggatttgtccagtacgccatttgtttgtctttaaaccaaagtataacttccggtactgga

SEQ ID NO: 128527 - DNA, 80 bp, synthetic construct
  source 1..80: mol_type = other DNA
cctccccaccagcttcggcaacacaataacttgctacatcaaggctatggccgcctgtcgagctgctaagctccagagcc

SEQ ID NO: 128528 - DNA, 80 bp, synthetic construct
  source 1..80: mol_type = other DNA
agaccaactggcaaaaatcaatctactgcctgccatcctttcgcccggagccctcgtagtcggtgtggtctgcgcagcaa

SEQ ID NO: 128529 - DNA, 80 bp, synthetic construct
  source 1..80: mol_type = other DNA
cgtagaggagcctccaccggccgtggagacagtgttgccagatgggcgtggcgaaaagcgcccgcgccccgacagggaag

SEQ ID NO: 128530 - DNA, 80 bp, synthetic construct
  source 1..80: mol_type = other DNA
caactgattgcttccgcaagcatccggatgctagctacaccaaatgtggatccgggccctggctcactcccaggtgcttg

SEQ ID NO: 128531 - DNA, 80 bp, synthetic construct
  source 1..80: mol_type = other DNA
tacagcctaccgcagctggtacctgtcctacaactatggtgaccctgaaaaaggagtccgttcctggacactgctcacca

SEQ ID NO: 128532 - DNA, 80 bp, synthetic construct
  source 1..80: mol_type = other DNA
tggttccaatggtgacccagttggctatgacagatacaaccccttttgggcaacagagagtgttcaaggagaaggttgac

SEQ ID NO: 128533 - DNA, 80 bp, synthetic construct
  source 1..80: mol_type = other DNA
actttgcagaacggaatttttggcatgccagctgttcggctcgtggagtttatatcgacggatcaatgatcaccaccctt

SEQ ID NO: 128534 - DNA, 80 bp, synthetic construct
  source 1..80: mol_type = other DNA
cccgacaggtcccaccccccgcgcgatgcccccccgggccgctggccatgtcgtccggtggaggccccgcggaccacgtc

SEQ ID NO: 128535 - DNA, 80 bp, synthetic construct
  source 1..80: mol_type = other DNA
acacatcaggttggttaacatcggtcagtgctaaaaagcgaccgaaatagcccgggggaatacatacccgcaggcgtaga

SEQ ID NO: 128536 - DNA, 80 bp, synthetic construct
  source 1..80: mol_type = other DNA
gaaaccacaaagaaagacctggggattggctatgtggccgccgaaaaccatcaacacgctacaatgctggacgtagacct

SEQ ID NO: 128537 - DNA, 80 bp, synthetic construct
  source 1..80: mol_type = other DNA
ttggcatcacatgatattatccacagcagcatgcgctatttctaatcgcatttcacatggagatggattaggatttttgt

SEQ ID NO: 128538 - DNA, 80 bp, synthetic construct
  source 1..80: mol_type = other DNA
atctggaccacaatcacccgggcgttgccataccatcgtttggataatactccgctcggggggttgtccggtaaatttaa

SEQ ID NO: 128539 - DNA, 80 bp, synthetic construct
  source 1..80: mol_type = other DNA
gacgcggccgcacaggaaggggaaaacccggaacatatcgatacgtctcgccgggcgagcggccgtcaggcatgtttgac

SEQ ID NO: 128540 - DNA, 80 bp, synthetic construct
  source 1..80: mol_type = other DNA
atgccctcatgactggctacaccggcgactttgactcagtgatagactgtaacacgtctgtcatacagactgttgatttc

SEQ ID NO: 128541 - DNA, 80 bp, synthetic construct
  source 1..80: mol_type = other DNA
aacgtatgaatatgcaaagaaggagacaagcgttaaagagttcagtattaagttactgtttgataaaaatggagtgcttt

SEQ ID NO: 128542 - DNA, 80 bp, synthetic construct
  source 1..80: mol_type = other DNA
actggagcccggcggtgggcatggtggtgagccatgtgctgcgtctgccgcagaccctgtttgatattattgcgggcgcg

SEQ ID NO: 128543 - DNA, 80 bp, synthetic construct
  source 1..80: mol_type = other DNA
tggagtgtggtatggagccaagggagtcctgcacaccatgtggcacgtcacaaggggagcagccctggttgtggaagagg

SEQ ID NO: 128544 - DNA, 80 bp, synthetic construct
  source 1..80: mol_type = other DNA
ccctggctcctaaaggcgctccaaatacatctcagtggattgcagaaggtgtaaaaaatggtgaggaagatgcaacagaa

SEQ ID NO: 128545 - DNA, 80 bp, synthetic construct
  source 1..80: mol_type = other DNA
aaggatgtatgtaggtggggtcgaacacaggctcgaagctgcatgcaacttcactcgcggagaccgctgcaacctggagg

SEQ ID NO: 128546 - DNA, 80 bp, synthetic construct
  source 1..80: mol_type = other DNA
acctggacgataagtcggtggaaggggcggtcgttcataatgtaattggtggatgagaagtaggtgacaaagtcgaccag

SEQ ID NO: 128547 - DNA, 80 bp, synthetic construct
  source 1..80: mol_type = other DNA
agtggattttccgcctcgatgtacggggagtccggggcgtctcccggcagggccgccccgccggcaagacgccggcgagg

SEQ ID NO: 128548 - DNA, 80 bp, synthetic construct
  source 1..80: mol_type = other DNA
tggatttcaatgaaatgatcttactaacaatgaagaacaaagcatggatggtacacagacaatggttttttgacctacct

SEQ ID NO: 128549 - DNA, 80 bp, synthetic construct
  source 1..80: mol_type = other DNA
ggttgttgacttcagtctcgacccaactttctccatagagaccaccacagtaccccaggatgctgtctcccggagccaaa

SEQ ID NO: 128550 - DNA, 80 bp, synthetic construct
  source 1..80: mol_type = other DNA
gtgcgtttcaccatacttcggcgcgcgcgtgtgtgtgttttttttttgtggtgtttattttcccccaccccttccttttc

SEQ ID NO: 128551 - DNA, 80 bp, synthetic construct
  source 1..80: mol_type = other DNA
gtttctttcactaggagttggggctgaccaaggatgtgctgttaactttgggaaacgcgagctcaaatgcggagatggca

SEQ ID NO: 128552 - DNA, 80 bp, synthetic construct
  source 1..80: mol_type = other DNA
acgccacaacagccctgtcgccggtatggggcatgatcagacgagccgcgcgccgcgcgttgggccctgtacagctcgcg

SEQ ID NO: 128553 - DNA, 80 bp, synthetic construct
  source 1..80: mol_type = other DNA
ggtcgactaagtgtaccgacgtgaaccccctttcgttcttccatgggcacatcttcatctaaacatttaggggccaaaaa

SEQ ID NO: 128554 - DNA, 80 bp, synthetic construct
  source 1..80: mol_type = other DNA
cctgcagccgttgctctctccggagccggcggtggcaaccccgaggaggaggccatcatggacctggaagagggcgagtg

SEQ ID NO: 128555 - DNA, 80 bp, synthetic construct
  source 1..80: mol_type = other DNA
gaggagcgcgcgcggggccggggccgtgagagcccgcgacggacgccgaacgacacggtcgcgcggtatcccggtactcg

SEQ ID NO: 128556 - DNA, 80 bp, synthetic construct
  source 1..80: mol_type = other DNA
attatgcgacggggaaccttcccggttgctctttctctatcttcttgttagctcttttgtcctgcttcaccgtgccagtt

SEQ ID NO: 128557 - DNA, 80 bp, synthetic construct
  source 1..80: mol_type = other DNA
cgtatataaacatttattttgcgatctcctatgcgctctctcggaattacagacaaaccctaaaattttatttgcccatc

SEQ ID NO: 128558 - DNA, 80 bp, synthetic construct
  source 1..80: mol_type = other DNA
caccacagtattggggataggaactgtgctggaccaagcggagacggccggttgtcgccttacggttttagccactgcta

SEQ ID NO: 128559 - DNA, 80 bp, synthetic construct
  source 1..80: mol_type = other DNA
caggttgtgtctacggccacgcagtccttccttgctaccactgtcaacggggtcctctggaccgtataccatggtgctgg

SEQ ID NO: 128560 - DNA, 80 bp, synthetic construct
  source 1..80: mol_type = other DNA
gccgtgcgtcgtgacgtcagtaacggctctcccaacagccaatcagcggcggccccgccccaaattcaaaagctcatttg

SEQ ID NO: 128561 - DNA, 80 bp, synthetic construct
  source 1..80: mol_type = other DNA
ggggtaacctcatcttcctaggtcctgctgatgatgtaaagggaggaggctggcgactccttgctccaatcacggcctat

SEQ ID NO: 128562 - DNA, 80 bp, synthetic construct
  source 1..80: mol_type = other DNA
gggactcttccgagctgccgtatgcacaaggggtgtagcaaaatccttagactttatcccagtggaaaacatggagacga

SEQ ID NO: 128563 - DNA, 80 bp, synthetic construct
  source 1..80: mol_type = other DNA
gcgcgcacagattttgttgcgcctgtgcctgaccctccgtaccatcgcgggtggaaaatatgtccaggcggtgctcctga

SEQ ID NO: 128564 - DNA, 80 bp, synthetic construct
  source 1..80: mol_type = other DNA
acacagaagcgagtccaagaggtaaaggggtacacgaaaggtggtccaggccacgaggagccgcaattagtgcaaagcta

SEQ ID NO: 128565 - DNA, 80 bp, synthetic construct
  source 1..80: mol_type = other DNA
gagacgatttggttatcatctcagagagtgtgggcgtgtccgaggacattggagcactgcgagccttcacggaggctatg

SEQ ID NO: 128566 - DNA, 80 bp, synthetic construct
  source 1..80: mol_type = other DNA
tcccggcgcacgatcatacacaccatgcacatgtggggccagcgacctttacttggtaacccggaacggtgatgttgtcc

SEQ ID NO: 128567 - DNA, 80 bp, synthetic construct
  source 1..80: mol_type = other DNA
tcgtatgtgccacggacgccctcatgacggggtacacgggtgatttcgatagcgtgatcgattgcaatgttgcagtgacc

SEQ ID NO: 128568 - DNA, 80 bp, synthetic construct
  source 1..80: mol_type = other DNA
agcggcagcggcagcgggtaaggccaaacgcgagcggcgagggtattgctcatggcgggcccacaaaagcagtatcgtga

SEQ ID NO: 128569 - DNA, 80 bp, synthetic construct
  source 1..80: mol_type = other DNA
taaaaactataaaaaaaataattataaaaatatccccgtggataagtggataaccccaagggaagttttttcaggcatcg

SEQ ID NO: 128570 - DNA, 80 bp, synthetic construct
  source 1..80: mol_type = other DNA
acttcatagcacgcgccgaggctgtcctgcaggtgtgggttccaagcatgtccgtgcggggcggtcgagacgctgtgata

SEQ ID NO: 128571 - DNA, 80 bp, synthetic construct
  source 1..80: mol_type = other DNA
caaaagtggttttgtacagtgaagatgtaaatatggaaaccccagacacacatctgtcttacaaacctggaaaaggtgat

SEQ ID NO: 128572 - DNA, 80 bp, synthetic construct
  source 1..80: mol_type = other DNA
ctcccatcactgcttatgcccagcaaacacgaggcctcctgggcgccatagtggtgagtatgacggggcgtgacaggaca

SEQ ID NO: 128573 - DNA, 80 bp, synthetic construct
  source 1..80: mol_type = other DNA
ctatcagctacaccaacggaagcggccccgaacaccgcccttactgctggcactacccccccaaaccctgtggtatcgtg

SEQ ID NO: 128574 - DNA, 80 bp, synthetic construct
  source 1..80: mol_type = other DNA
tcgggaatcctcagcctttccaagtggaagggggtctaaggaatcttcttttttctttttcagtatggtgatcagccatg

SEQ ID NO: 128575 - DNA, 80 bp, synthetic construct
  source 1..80: mol_type = other DNA
ggcacaggagtggcagcaccattgcagtcttgggagacacagcctgggactttggatcagttgggggtgctctcaactca

SEQ ID NO: 128576 - DNA, 80 bp, synthetic construct
  source 1..80: mol_type = other DNA
agggtaaaaacagcatgtccgctaagtagacacataattataaaatgttctgtcttgattcctaaagcctgcatgacccg

SEQ ID NO: 128577 - DNA, 80 bp, synthetic construct
  source 1..80: mol_type = other DNA
cacactgcttggcctaaactcgaacagttctggcataagcatatgtggaacttcataagcggcatacaatacctggccgg

SEQ ID NO: 128578 - DNA, 80 bp, synthetic construct
  source 1..80: mol_type = other DNA
tctcgtagaccgtgcatcatgagcacacttccaaaaccccaaagaaaaaccaaaagaaacactaaccgtcgccctatgga

SEQ ID NO: 128579 - DNA, 80 bp, synthetic construct
  source 1..80: mol_type = other DNA
ctgggtggcagctttatatgtttggagaaacattaagccgggctattattaacggctgtggtctgcttcagcgaatttgc

SEQ ID NO: 128580 - DNA, 80 bp, synthetic construct
  source 1..80: mol_type = other DNA
actcctcacctgcttgctccacccctccttagggtttgacatcaccaaagtgttcttagcactgctgggccctctgtaca

SEQ ID NO: 128581 - DNA, 80 bp, synthetic construct
  source 1..80: mol_type = other DNA
tcttcatgacagctactcccccaggatcagtggaggcctttccacagagcaacgcagttatccaagatgaggaaagagac

SEQ ID NO: 128582 - DNA, 80 bp, synthetic construct
  source 1..80: mol_type = other DNA
tcgaaggaaccaccaacgttggctacgctgcagctggaaccacgcgaagccttgtcggcttgttcgctccgggggcccaa

SEQ ID NO: 128583 - DNA, 80 bp, synthetic construct
  source 1..80: mol_type = other DNA
cccgaacaacatgggcctgatcgccggcgcggtgggcggcagtctcctggcagccctggtcatttgcggaattgtgtact

SEQ ID NO: 128584 - DNA, 80 bp, synthetic construct
  source 1..80: mol_type = other DNA
acaacagacaacatcaagtgcccgtgccaggtcccatcacctgaatttttcactgagctggacggggtgcgccttcacag

SEQ ID NO: 128585 - DNA, 80 bp, synthetic construct
  source 1..80: mol_type = other DNA
cactcctaggtgtctggtggactacccttacagactgtggcactacccttgcactgtcaactacaccattcactcggttc

SEQ ID NO: 128586 - DNA, 80 bp, synthetic construct
  source 1..80: mol_type = other DNA
gcccagggcccgcggtcgcgcgcgtccactcgcccccctcgaccaaacatccctcgatggcctccgcggacaggacgtcg

SEQ ID NO: 128587 - DNA, 80 bp, synthetic construct
  source 1..80: mol_type = other DNA
aatgtgacgcataaaaaggcttttttctcacggaactacttagttttcccacggtatttaacaggaaatgaggtagtttt

SEQ ID NO: 128588 - DNA, 80 bp, synthetic construct
  source 1..80: mol_type = other DNA
caagagtggggcgtgaaaggctatcaagaatggccatcagtggagatgattgcgttgtaaaacctttagatgacagattt

SEQ ID NO: 128589 - DNA, 80 bp, synthetic construct
  source 1..80: mol_type = other DNA
tggtgatgatgacccatttcttcagtatactccagtcccaagaaatgctccataaggccctggactttgacatgtacggg

SEQ ID NO: 128590 - DNA, 80 bp, synthetic construct
  source 1..80: mol_type = other DNA
ttgaaccagcgtcccaaaagcatcccagctgacatacactgtagtgaacccggacgctggcaatgacaatgaataagcca

SEQ ID NO: 128591 - DNA, 80 bp, synthetic construct
  source 1..80: mol_type = other DNA
acgcgtcccaaggatacaaagtactggtacttaatccatcagtggctgccaccctcgggtttggcgcctacatgagcaag

SEQ ID NO: 128592 - DNA, 80 bp, synthetic construct
  source 1..80: mol_type = other DNA
accctgtgtttatttcttgggcgtgtttgtgggtatataagcaggtagaatggttttagtgttagtttattctgatggag

SEQ ID NO: 128593 - DNA, 80 bp, synthetic construct
  source 1..80: mol_type = other DNA
accgctatcatttatccatggcccacacggaggctctgcggatgacaacgaaggcggatcaacatgacataaacgaggaa

SEQ ID NO: 128594 - DNA, 80 bp, synthetic construct
  source 1..80: mol_type = other DNA
aaagctgcccccttgttcacttacatctgcctccagctttggccacttctgctgttggtgttatgcttgccccgtagggc

SEQ ID NO: 128595 - DNA, 80 bp, synthetic construct
  source 1..80: mol_type = other DNA
ggcggaacgtcacgccctcctccgcgcccgcgcggtgcctgccgaggaacgtcaccaggtgcggttgcaggtggcagtcg

SEQ ID NO: 128596 - DNA, 80 bp, synthetic construct
  source 1..80: mol_type = other DNA
aagtccttattggcctctgcttatggtggctcagctacctgttggtcttagctgaggccgccatccaggaatgggtgcca

SEQ ID NO: 128597 - DNA, 80 bp, synthetic construct
  source 1..80: mol_type = other DNA
ccgcgtcacccccccattccagctgggcccagcgacacccaaactcgcgcgtgagagtggtcgcgacgagggcgacgtag

SEQ ID NO: 128598 - DNA, 80 bp, synthetic construct
  source 1..80: mol_type = other DNA
cggcgtttccagtgacgtaccgtccccggtccccaaagaggagcccgatggatctgatgcggggtcagaggctgagtcat

SEQ ID NO: 128599 - DNA, 80 bp, synthetic construct
  source 1..80: mol_type = other DNA
aagaacgttttttgggagaaggcgactttgtcttaattttaccgggaacaagtagattgttaaatgtccgggtaaaataa

SEQ ID NO: 128600 - DNA, 80 bp, synthetic construct
  source 1..80: mol_type = other DNA
acccctatagactgtggcattatccgtgcacggtcaactataccatcttcaaaatacggttgtatgtgggtggtgttgaa

SEQ ID NO: 128601 - DNA, 80 bp, synthetic construct
  source 1..80: mol_type = other DNA
ggcaactggctaaaagttctggctgtcctgttcttatttgcaggggttgaagcaaccaccaccatcggccatcaagtagg

SEQ ID NO: 128602 - DNA, 80 bp, synthetic construct
  source 1..80: mol_type = other DNA
accccatgggtttttcgtatgatacccgatgcttcgactcaaccgtcactgagagagacatcaggaccgaggagtccata

SEQ ID NO: 128603 - DNA, 80 bp, synthetic construct
  source 1..80: mol_type = other DNA
agcagcagaaatggcagaagttttgagagggctcccagtacgatatcaaacttcagcagtgcagagagagcaccaaggga

SEQ ID NO: 128604 - DNA, 80 bp, synthetic construct
  source 1..80: mol_type = other DNA
gcactcaaatgggagtacgtagtcctcgctttcctggttctggcggattctcgcatctgtgcatgcctgtggctgatgtt

SEQ ID NO: 128605 - DNA, 80 bp, synthetic construct
  source 1..80: mol_type = other DNA
acactgcaaaacggcttgccagactttgttagtcagagcattttgcaaaacttccgctcttttatcctcgagcgatccgg

SEQ ID NO: 128606 - DNA, 80 bp, synthetic construct
  source 1..80: mol_type = other DNA
cagcctgacgggtctctggtctctggcgttgctcgtcctcttgctcccccagcgggcgtacgcctggtcaggtgaagaca

SEQ ID NO: 128607 - DNA, 80 bp, synthetic construct
  source 1..80: mol_type = other DNA
attggcctgatgtattacaacagcacaggcaatatgggtgtactggccggacaggcatcccaacttaacgcagtagtgga

SEQ ID NO: 128608 - DNA, 80 bp, synthetic construct
  source 1..80: mol_type = other DNA
aatcccacttgaattcatcaaggggggtaggcacctaatcttttgccattccaagaagaagtgcgatgagcttgccaagc

SEQ ID NO: 128609 - DNA, 80 bp, synthetic construct
  source 1..80: mol_type = other DNA
acaagatggacatagacgtcgaatatctggtttgcaaagccctcaccttcgacggcgcgcttcgccccagcgccgcagag

SEQ ID NO: 128610 - DNA, 80 bp, synthetic construct
  source 1..80: mol_type = other DNA
gaaagccatccctctagaatacatcaagggtggtaggcatctaatattctgtcattcaaaaaagaaatgcgacgagctag

SEQ ID NO: 128611 - DNA, 80 bp, synthetic construct
  source 1..80: mol_type = other DNA
cagctcccctgcgagcctgagccggacacggaggtgttagcatccatgctaacagacccgtcccacattacagcggagac

SEQ ID NO: 128612 - DNA, 80 bp, synthetic construct
  source 1..80: mol_type = other DNA
acgctcactgactcagagactttacgtgggagggcccatgttgaacagcaaggggcaatcctgcggatacaggcgttgcc

SEQ ID NO: 128613 - DNA, 80 bp, synthetic construct
  source 1..80: mol_type = other DNA
tgcgtgcctggactccccgcccccggagccccccaaaccttcccacaccacaccacccggcgatgccgagcgcctgtgtc

SEQ ID NO: 128614 - DNA, 80 bp, synthetic construct
  source 1..80: mol_type = other DNA
ggatgccagccagggcggcggtaatcataaccacgcccagcgcagaggcggccagaaacccgggcgcaattgcggccacg

SEQ ID NO: 128615 - DNA, 80 bp, synthetic construct
  source 1..80: mol_type = other DNA
attatcaggtatgacgatgctgcccgtcatcgctgccggcagtgcgaatgtggcagtagtcatctagaacttcgccccgt

SEQ ID NO: 128616 - DNA, 80 bp, synthetic construct
  source 1..80: mol_type = other DNA
tgagccaaactaccatacagcattgtggagggtctctgcggaggattacgttgaggtcacgcgtgtaggagatcatcact

SEQ ID NO: 128617 - DNA, 80 bp, synthetic construct
  source 1..80: mol_type = other DNA
tctgtgtctttacctactttgagcttccagaggagcacccccaggggccagctcacggtgtcagaataacagttgaaaaa

SEQ ID NO: 128618 - DNA, 80 bp, synthetic construct
  source 1..80: mol_type = other DNA
aggaggtcggaagcctgccagacttatcgtgtaccctgacctaggggtgagggtgtgcgagaagaaggcactttacgaca

SEQ ID NO: 128619 - DNA, 80 bp, synthetic construct
  source 1..80: mol_type = other DNA
tacgctgacccggccggcttggaccagaggccctactgttggcactacgcaccccgaccgtgcggtatcgtacccgcgtc

SEQ ID NO: 128620 - DNA, 80 bp, synthetic construct
  source 1..80: mol_type = other DNA
ttgcaacgacagcttaaacactggcttcttcgctgctctcttctacgtccacaaggtcaactcttcagggtgtcgcgagc

SEQ ID NO: 128621 - DNA, 80 bp, synthetic construct
  source 1..80: mol_type = other DNA
cggttgctctgggggcgcgtatgatatcatcatatgtgacgagtgccactccacggatccgaccacggtcctaggaatcg

SEQ ID NO: 128622 - DNA, 80 bp, synthetic construct
  source 1..80: mol_type = other DNA
tgcgcttctatgtgcatgctccacattggctgcggtcgctcacatcgaagtagactgcattccaccatttacagtatacc

SEQ ID NO: 128623 - DNA, 80 bp, synthetic construct
  source 1..80: mol_type = other DNA
cgtaatgcatatagattggctagcctcttctccaccggccccagccaaaatatccagctcataaactccaatggcagctg

SEQ ID NO: 128624 - DNA, 80 bp, synthetic construct
  source 1..80: mol_type = other DNA
ctacgtgcacttggcctgaatgccgtcgctttctatcggggcgtggatgtggcagtcattccaaccgcaggcgatgtggt

SEQ ID NO: 128625 - DNA, 80 bp, synthetic construct
  source 1..80: mol_type = other DNA
tccttagaaatgacgtgcccatggctggaccattagtggccgggggcttgctgatagcgtgctacgtcataactggcacg

SEQ ID NO: 128626 - DNA, 80 bp, synthetic construct
  source 1..80: mol_type = other DNA
tgtcgtgatttgcgccacagatgctctcatgactggctacaccggcgacttcgacagtgtcatcgactgcaacgtcgctg

SEQ ID NO: 128627 - DNA, 80 bp, synthetic construct
  source 1..80: mol_type = other DNA
atacctggggtgagaatgagtctgacgtgtttctgttggagagcttgcggccgcctaaaggtggctggtatgggtgcacc

SEQ ID NO: 128628 - DNA, 80 bp, synthetic construct
  source 1..80: mol_type = other DNA
aatcaaagcgcagcagtcaaagcttgcacagagaagggtgttccatggcgttgccaagaaccctgtggttgatgggaatc

SEQ ID NO: 128629 - DNA, 80 bp, synthetic construct
  source 1..80: mol_type = other DNA
ccgccagccaactatcagctccgtcgttgaaggccacttgtcaatcacacgggcctcatcccgacgttgaactagtggat

SEQ ID NO: 128630 - DNA, 80 bp, synthetic construct
  source 1..80: mol_type = other DNA
ggctcaaggccaagctcatgcccagtcttccaggcgtccctttcctctcatgtcaacggggttatagggtggcatggcga

SEQ ID NO: 128631 - DNA, 80 bp, synthetic construct
  source 1..80: mol_type = other DNA
gctacgactgaagaccgatagtacggccgtgactgcgcggctgtaacatctgcattggtgccgtaaccttcgctgcttta

SEQ ID NO: 128632 - DNA, 80 bp, synthetic construct
  source 1..80: mol_type = other DNA
cacaaacacaggggttgttcgcccgggtacaggttggcaaacgcagtctcgatacgagcaaaactcgctggcccaaaggt

SEQ ID NO: 128633 - DNA, 80 bp, synthetic construct
  source 1..80: mol_type = other DNA
acagtgttgcctagtagttttcccggagccgccatggccgctgtgagctgagatctggtgtaaaaattatgctgggccgc

SEQ ID NO: 128634 - DNA, 80 bp, synthetic construct
  source 1..80: mol_type = other DNA
cttactatggcactaatgacaaagacgaaagcaaaagatacagagtgaaagtgaacactacaaattctcaagctgtaaaa

SEQ ID NO: 128635 - DNA, 80 bp, synthetic construct
  source 1..80: mol_type = other DNA
gtgggatggcctagcccccccgggactaagtccttagacccttgtacctgcggggccgtagacctctacttggtcacccg

SEQ ID NO: 128636 - DNA, 80 bp, synthetic construct
  source 1..80: mol_type = other DNA
tcacaatcaggttgttcatgatcccatagctgaacacgctccagccaaagctcattcgctccaacagcgccaccgcgtgt

SEQ ID NO: 128637 - DNA, 80 bp, synthetic construct
  source 1..80: mol_type = other DNA
caaatgttatgttggagcccgaggcgttttccagagtgagtttaaatggggtgtttgatttatctgtggaattatgcaag

SEQ ID NO: 128638 - DNA, 80 bp, synthetic construct
  source 1..80: mol_type = other DNA
tgcaccactcatgccaggaacatggcacattgacatggtagatgctaatctcttcatggggggcgaagtcactcggatag

SEQ ID NO: 128639 - DNA, 80 bp, synthetic construct
  source 1..80: mol_type = other DNA
gctgaaccgtggccccggggcggagtggcctctcggtccatgaaccggcgcacgtcctgactgccgccggccattgtttc

SEQ ID NO: 128640 - DNA, 80 bp, synthetic construct
  source 1..80: mol_type = other DNA
caaccgcggccgtagcaggcgccggcgctgtacaacagcagacagagatggacttggaagagggcgaagggctggcgaga

SEQ ID NO: 128641 - DNA, 80 bp, synthetic construct
  source 1..80: mol_type = other DNA
gcaatggagttgagctcggcgatggatcgtacgtcagcgccattgtgcaaggcgaccgtcaagaggaaccagttccagat

SEQ ID NO: 128642 - DNA, 80 bp, synthetic construct
  source 1..80: mol_type = other DNA
tgagcacacttccaaaaccccaaagacaaaccaaaagaaacaccaaccgtcgcccacaggacgtcaagttcccgggtggc

SEQ ID NO: 128643 - DNA, 80 bp, synthetic construct
  source 1..80: mol_type = other DNA
gtgcccggccccgctggttctggttttgcctactcctgctcgctgcgggggtaggcatctacctcctccccaaccgatga

SEQ ID NO: 128644 - DNA, 80 bp, synthetic construct
  source 1..80: mol_type = other DNA
cagtctctaggggcacagcaaaactgagatggctggtcgaacggaggtttctcgaaccggtcggaaaagtgattgacctt

SEQ ID NO: 128645 - DNA, 80 bp, synthetic construct
  source 1..80: mol_type = other DNA
ccggtgagatccaggtcctctctactagtacacagacattcctgggtacttcagtagggggggtcatgtggaccgtctac

SEQ ID NO: 128646 - DNA, 80 bp, synthetic construct
  source 1..80: mol_type = other DNA
cactgccaaggggttgatgtttgacgctacagccatagccattaatgcaggagatgggcttgaatttggttcacctaatg

SEQ ID NO: 128647 - DNA, 80 bp, synthetic construct
  source 1..80: mol_type = other DNA
ccgtccccgctccaaggccggtgtcatagtgcccttaggagcttcccgcccgggcgcatccccccttttgcactatgaca

SEQ ID NO: 128648 - DNA, 80 bp, synthetic construct
  source 1..80: mol_type = other DNA
ttgcaccgtcaactactccttattcaaagtaaggatgtatgtggggggtgtggaacacagactcaccgccgcgtgcaact

SEQ ID NO: 128649 - DNA, 80 bp, synthetic construct
  source 1..80: mol_type = other DNA
ccaccatcaatggcgtgctgtggacggttttccatggggccggttcgaagacccttgctggccccaaaggacctatctgc

SEQ ID NO: 128650 - DNA, 80 bp, synthetic construct
  source 1..80: mol_type = other DNA
cggcaactccagcgggttataccatctaaccaatgattgtccacgctccagcattgtgctggaagcggagaccatgatcc

SEQ ID NO: 128651 - DNA, 80 bp, synthetic construct
  source 1..80: mol_type = other DNA
gttgacaggcctgtggtccctggccttgctcgtcctgttgctcccccagcgcgcgtacgcttggacgggcgatgacaccg

SEQ ID NO: 128652 - DNA, 80 bp, synthetic construct
  source 1..80: mol_type = other DNA
acacatttgtgccgcaagcatatacacatcctggacacagtccggacaattaacacagaacggtctttccgtgttatact

SEQ ID NO: 128653 - DNA, 80 bp, synthetic construct
  source 1..80: mol_type = other DNA
cactatgcacctaggccctgtgaggttgtcgatgcgcggaccgtgtgcgggcctgtctactgttttacacccagcccagt

SEQ ID NO: 128654 - DNA, 80 bp, synthetic construct
  source 1..80: mol_type = other DNA
tggcccaagctagaacaattttggcacaaacacctctggaactttgtcagcggaatccagtacctggcaggtctctccac

SEQ ID NO: 128655 - DNA, 80 bp, synthetic construct
  source 1..80: mol_type = other DNA
ttggtggcaacacggcccagggcgggtcgggcctcgccggtctcttctccgcgggatcccaacagcaccttcggctcgtt

SEQ ID NO: 128656 - DNA, 80 bp, synthetic construct
  source 1..80: mol_type = other DNA
gcggggctcctccctgccggatacgccccgagcctcttagctcctcagacacaaacaccactttgctgtgccccacagac

SEQ ID NO: 128657 - DNA, 80 bp, synthetic construct
  source 1..80: mol_type = other DNA
tgtaacaattgagtaatttcaacatctatggtggcacaacacaaacacacactcatgtatttttttaaaataaacatctc

SEQ ID NO: 128658 - DNA, 80 bp, synthetic construct
  source 1..80: mol_type = other DNA
ctgcccttctttcacctggtgccctggtagtgggggtggtctgtgctgcagtactgcggcggcacgtcggcccgtctgaa

SEQ ID NO: 128659 - DNA, 80 bp, synthetic construct
  source 1..80: mol_type = other DNA
gctggtgttattatatggccactcagaagagagttcaggaggtcagaggatacacgaaaggaggacctggacatgaagaa

SEQ ID NO: 128660 - DNA, 80 bp, synthetic construct
  source 1..80: mol_type = other DNA
actactccttcctcttcttcgctgtctaaaacaatctctggcgacggaggaagaggctttgcggacttcatctttcgttt

SEQ ID NO: 128661 - DNA, 80 bp, synthetic construct
  source 1..80: mol_type = other DNA
tcaagttgttgatttcagcctggatcccacattttcaattgagaccacaactgtcccacaagatgccgtgtcccgcagtc

SEQ ID NO: 128662 - DNA, 80 bp, synthetic construct
  source 1..80: mol_type = other DNA
ctccctccacaaatggatccggctttgagatcttatcaccaacggctccgtctgtatacccccatagcgaggggcgtaaa

SEQ ID NO: 128663 - DNA, 80 bp, synthetic construct
  source 1..80: mol_type = other DNA
aacaaaagccgacattgcaggccttttcagacatgacacccagggtgacagagtgtgggacacatggacaaacattgaca

SEQ ID NO: 128664 - DNA, 80 bp, synthetic construct
  source 1..80: mol_type = other DNA
catcaccgcatacgcccaacagacgcggggactggttggcactatagtgactagtttgaccggccgcgacaagaatgaag

SEQ ID NO: 128665 - DNA, 80 bp, synthetic construct
  source 1..80: mol_type = other DNA
ctctacgggttgtgaggaacggcttgctgcttgcagagggcttgacactttccaccaaggatgggggccccttacttacg

SEQ ID NO: 128666 - DNA, 80 bp, synthetic construct
  source 1..80: mol_type = other DNA
gcctccgcctcttcctcctccgcctcttcctcctcggccccgactcccgcggtggccgcctcttccgccgccggggccgc

SEQ ID NO: 128667 - DNA, 80 bp, synthetic construct
  source 1..80: mol_type = other DNA
cgagcttctggcgtttttattaaaaatcgaagggttcgagggaggggtcctcgtgcccactggtgagggacacgttgcga

SEQ ID NO: 128668 - DNA, 80 bp, synthetic construct
  source 1..80: mol_type = other DNA
gaggagaagcttccaataaatcctctgagcaactccctcataagacaccataacatggtgtattccaccacatcacgcag

SEQ ID NO: 128669 - DNA, 80 bp, synthetic construct
  source 1..80: mol_type = other DNA
ggacggaaaaaccgtgatggacatcatatccagggaagatcagcgggggagcggacaagtggtaacctacgcgctaaaca

SEQ ID NO: 128670 - DNA, 80 bp, synthetic construct
  source 1..80: mol_type = other DNA
gacctgtggggctccgccttgtaacatcaatggcgaacccaacaatacgctcctctgccccacggactgcttccgaaaac

SEQ ID NO: 128671 - DNA, 80 bp, synthetic construct
  source 1..80: mol_type = other DNA
gacacactccagtcaattcatggttggggaacatcatcctgtacgctccttcgatctgggtgcgcatggttctcatgacg

SEQ ID NO: 128672 - DNA, 80 bp, synthetic construct
  source 1..80: mol_type = other DNA
tttccatggcccccctttttctgacaacatccaggcaaaaaacagactgggtaccggtcgcattatcaatctatggttta

SEQ ID NO: 128673 - DNA, 80 bp, synthetic construct
  source 1..80: mol_type = other DNA
ttcgtccgctgccgtttttccagatggctctgacttgccggtttcgcatcccagtttcgtcctaccgaggaagatctcgc

SEQ ID NO: 128674 - DNA, 80 bp, synthetic construct
  source 1..80: mol_type = other DNA
ataactctgaactctccagctatcacggtcaagatgggggactatggggaaatagcagttgaatgcgaacccagaaatgg

SEQ ID NO: 128675 - DNA, 80 bp, synthetic construct
  source 1..80: mol_type = other DNA
tacacctggagtactgtaagcaccaatcttaatgttgtcaggcctgctagtcagccacagcttggggaaagctgtgcagc

SEQ ID NO: 128676 - DNA, 80 bp, synthetic construct
  source 1..80: mol_type = other DNA
acctcaattttgagatgtacggagcagtgtactcagtttcccctctggacctcccagccataattgaaagactccatggg

SEQ ID NO: 128677 - DNA, 80 bp, synthetic construct
  source 1..80: mol_type = other DNA
ctattgctggcactacccaccaaggcagtgtggcgtggtctccgcgaagactgtgtgtggcccagtgtactgtttcaccc

SEQ ID NO: 128678 - DNA, 80 bp, synthetic construct
  source 1..80: mol_type = other DNA
accacgatccttggcattggcacggtccttgaccaggcggagaccgctggagcgcgccttgtcgtgctcgcgaccgccac

SEQ ID NO: 128679 - DNA, 80 bp, synthetic construct
  source 1..80: mol_type = other DNA
ggaagtgaagaaacaacgggccggagtattgtgggacgttccttcacccccacccatgggaaaggctgaactggaagatg

SEQ ID NO: 128680 - DNA, 80 bp, synthetic construct
  source 1..80: mol_type = other DNA
cgtcgcccacggtgcccgaggcaacagagtttactacctcacgcgcgacccccaagtaccgcttgcgagggccgcgtggg

SEQ ID NO: 128681 - DNA, 80 bp, synthetic construct
  source 1..80: mol_type = other DNA
aggccaggcgcgtgagggcaccctggcccagccccaaagtctgctctagggcggtgagggcgtggaactcgtttcgcgcg

SEQ ID NO: 128682 - DNA, 80 bp, synthetic construct
  source 1..80: mol_type = other DNA
gaatctggagtaccggataatgctgtcagttcatggctcccagcacagtgggatgatcgttaatgatacaggacatgaaa

SEQ ID NO: 128683 - DNA, 80 bp, synthetic construct
  source 1..80: mol_type = other DNA
tcctgccagcttgacccagaggcccggaaagtcatagaatctctcactgagaggctttatgttgggggccctatgtacaa

SEQ ID NO: 128684 - DNA, 80 bp, synthetic construct
  source 1..80: mol_type = other DNA
gtggctccagtatctcctgaccagggcagaagcgctcctgcacgtgtgggttccccccctcaacgtccgaggagggcgcg

SEQ ID NO: 128685 - DNA, 80 bp, synthetic construct
  source 1..80: mol_type = other DNA
gccacgaaccggcgatcggcggggcccaggcggcgacacacgtacttgtccgccgtccacagcatccacgaggcccaatg

SEQ ID NO: 128686 - DNA, 80 bp, synthetic construct
  source 1..80: mol_type = other DNA
gatgttagtggcccattatgccataattggaccaggactgcaagcaaaggccactagagaagctcaaaaaaggacagcgg

SEQ ID NO: 128687 - DNA, 80 bp, synthetic construct
  source 1..80: mol_type = other DNA
tccccgttcgcggtaccctgcagcaaagcctgtcgtgtctgcgctttaagcacggccgggcgagtcgcgccacggcgcgg

SEQ ID NO: 128688 - DNA, 80 bp, synthetic construct
  source 1..80: mol_type = other DNA
ctgcggagacgatttggtcgttatctcggagagcgtaggagtcgctgaggatgccaatgcactgagagccttcacggagg

SEQ ID NO: 128689 - DNA, 80 bp, synthetic construct
  source 1..80: mol_type = other DNA
gaggcggccttggagaatcttgtcttgctcaatgcggcgtctttggccgggacgcacggtcttgcgtccttcctcgtgtt

SEQ ID NO: 128690 - DNA, 80 bp, synthetic construct
  source 1..80: mol_type = other DNA
tcgacccgcttgtcgctgaggtcgatgaccgggagatatcggtggctgctgagtgtcatagaccgccacgacctcggtac

SEQ ID NO: 128691 - DNA, 80 bp, synthetic construct
  source 1..80: mol_type = other DNA
ccggggctcttcctcctcggcccccccggtcgcgccgccggcccccagccgcgccagcacgcggcgcagcgcctcctcgt

SEQ ID NO: 128692 - DNA, 80 bp, synthetic construct
  source 1..80: mol_type = other DNA
atcttaatggtgacaagtctaaaccgttgcactttactattacgctaaatggaacagatgaaaccaaccaagtaagcaaa

SEQ ID NO: 128693 - DNA, 80 bp, synthetic construct
  source 1..80: mol_type = other DNA
gcaattcgacgagatggaggagtgctcacggcacatcccctacctcgccgagggtcaacagattgccgaacagttcaagc

SEQ ID NO: 128694 - DNA, 80 bp, synthetic construct
  source 1..80: mol_type = other DNA
cgctcgcctgattgtatacccggacctcggggttcgggtgtgcgaaaagagagctctctacgacgtcacgcgcaaactac

SEQ ID NO: 128695 - DNA, 80 bp, synthetic construct
  source 1..80: mol_type = other DNA
tccatggtctaagcgcgttcacgctccacagttactctccagtagagctcaatagggttgcgggaacactcaggaagctt

SEQ ID NO: 128696 - DNA, 80 bp, synthetic construct
  source 1..80: mol_type = other DNA
ccaagaaaaagtacatcggcgtcatctacgggggtaagatgctcatcaagggcgtggatctggtgcgcaaaaacaactgc

SEQ ID NO: 128697 - DNA, 80 bp, synthetic construct
  source 1..80: mol_type = other DNA
gcagtggtatcttgggcccttaagtgggaatatgtggtgctcgcgttcctgcttctcgcggacgcgagagtctctgccta

SEQ ID NO: 128698 - DNA, 80 bp, synthetic construct
  source 1..80: mol_type = other DNA
tctgcagcctcatcactgtagtgatcgcctttattcaatgcattgactgggtctgtgtgcgcattgcataccttagacac

SEQ ID NO: 128699 - DNA, 80 bp, synthetic construct
  source 1..80: mol_type = other DNA
tcaaaagcgtttaaattcgctgggactcccgctgacactggccatggaacggtggtgttggaactgcaatacaccggaac

SEQ ID NO: 128700 - DNA, 80 bp, synthetic construct
  source 1..80: mol_type = other DNA
attagagctttcttacgcagatccatttgaaactagtgctaataaacttagtttaaaagtagggcatggactaaaagtgt

SEQ ID NO: 128701 - DNA, 80 bp, synthetic construct
  source 1..80: mol_type = other DNA
acgtccatgctcactgacccctcccacataacagcagagacggccgggaggaggttagcaaggggatcacctccttctgt

SEQ ID NO: 128702 - DNA, 80 bp, synthetic construct
  source 1..80: mol_type = other DNA
ggtagcttttgactgttcctcacagggcggtagttggtacttgttgtatggtgccaatctgtagcgataccgtctgtcgc

SEQ ID NO: 128703 - DNA, 80 bp, synthetic construct
  source 1..80: mol_type = other DNA
cgattgtttccggaagcatccagacgctacctatgctaagtgtggctctgggccttggctcactccccggtgcttggtag

SEQ ID NO: 128704 - DNA, 80 bp, synthetic construct
  source 1..80: mol_type = other DNA
ctggctaggcaacatcatcatgtttgcccccactctgtgggttcggatggtcatgatgactcatttcttttccatcctta

SEQ ID NO: 128705 - DNA, 80 bp, synthetic construct
  source 1..80: mol_type = other DNA
aagcctgagagccttcacggaggctatgaccaggtactccgctccccctggggaccccccccaaccagaatacgacttgg

SEQ ID NO: 128706 - DNA, 80 bp, synthetic construct
  source 1..80: mol_type = other DNA
ctgacacgggcactcttcgccttcaaagtgatgcacctcttggactagtagacaaaacactaaaggttttgttttctagc

SEQ ID NO: 128707 - DNA, 80 bp, synthetic construct
  source 1..80: mol_type = other DNA
tgatctccaacccccccatgaatgtgtgtaaccccccccaaaaaaataaagagccgtaacccaaccaaaccaggcgtggt

SEQ ID NO: 128708 - DNA, 80 bp, synthetic construct
  source 1..80: mol_type = other DNA
cttctctcgtgcctgactgttcccgcctcggccatccactatcgcaatgcctcgggcgtctaccatatcaccaatgactg

SEQ ID NO: 128709 - DNA, 80 bp, synthetic construct
  source 1..80: mol_type = other DNA
ctgaagcaaaactgattacagtttctagtgggtctaacttaacattacttgggccagatggaaaggtcacttggtatgat

SEQ ID NO: 128710 - DNA, 80 bp, synthetic construct
  source 1..80: mol_type = other DNA
gagcgaggaggccagtgaggacgtcgtctgctgctcaatgtcctacacatggacaggcgccctgatcacgccgtgcgctg

SEQ ID NO: 128711 - DNA, 80 bp, synthetic construct
  source 1..80: mol_type = other DNA
gtttactatcatgtcttgaaacctggaacgaggatttattctcatgttttcctattaatgaggacctatattccgatatg

SEQ ID NO: 128712 - DNA, 80 bp, synthetic construct
  source 1..80: mol_type = other DNA
tggccgacaaggtggcggccattaattacagcatgcttagcctcggcaagttttacgcccgcaagatttacaaaaccccc

SEQ ID NO: 128713 - DNA, 80 bp, synthetic construct
  source 1..80: mol_type = other DNA
gcttgcggagatatcctttgcgggctgcccgtctctgcgcggttgggccatgaggtgttgttgggacctgctgatgacta

SEQ ID NO: 128714 - DNA, 80 bp, synthetic construct
  source 1..80: mol_type = other DNA
gggcgccgccgaatccggcggtccgacgtcccctggtgagccggccccctcagagacaggttccgcctcctctatgcccc

SEQ ID NO: 128715 - DNA, 80 bp, synthetic construct
  source 1..80: mol_type = other DNA
aggcggatgacgacgacagagagatctctgtgtccgctgactgctttaggaggagaccggcgtttccccccgccctgcca

SEQ ID NO: 128716 - DNA, 80 bp, synthetic construct
  source 1..80: mol_type = other DNA
cagcaagttattcaggataccggcctaaaaattccacatcaaatggacacttcaacgcgctcccccacttacgactcgtg

SEQ ID NO: 128717 - DNA, 80 bp, synthetic construct
  source 1..80: mol_type = other DNA
agcttaggacggagcaaaggaagacctttgtggaactcatgaaaagaggagatcttcctgtttggctggcctatcaggtt

SEQ ID NO: 128718 - DNA, 80 bp, synthetic construct
  source 1..80: mol_type = other DNA
tcagactgcacaggtatgcaccggcatgtcgccctctgcttagggacgagataacatactctgtcgggctctctacctac

SEQ ID NO: 128719 - DNA, 80 bp, synthetic construct
  source 1..80: mol_type = other DNA
cacttgcgcgggccgcctgggagacagcccgccacactccagtcaactcgtggttgggcaacatcattatgtttgccccc

SEQ ID NO: 128720 - DNA, 80 bp, synthetic construct
  source 1..80: mol_type = other DNA
cgtagatctcctcgtcggggccgcggcattttgttcggccatgtacattggagatctttgtggtagcgtattcttggtag

SEQ ID NO: 128721 - DNA, 80 bp, synthetic construct
  source 1..80: mol_type = other DNA
aggaggtacaagtgctagcagtggaaccagggaaaaatccgaagcacgtccaaacgaaaccaggactttttaagaccctc

SEQ ID NO: 128722 - DNA, 80 bp, synthetic construct
  source 1..80: mol_type = other DNA
atatgctgctcaggggtataaagtgctagtgcttaatccctcagtggctgccaccctggggtttgtggcgtacttgtcta

SEQ ID NO: 128723 - DNA, 80 bp, synthetic construct
  source 1..80: mol_type = other DNA
ttacaactggtgctaaactgacctattccacctatggcaagtttcttgcggatggaggttgctccgggggggcatatgat

SEQ ID NO: 128724 - DNA, 80 bp, synthetic construct
  source 1..80: mol_type = other DNA
cgctctcgtggcctttaagatcatgagtggtgaagcccccgcgcttgaggacatggtcaatctcctaccggcccttcttt

SEQ ID NO: 128725 - DNA, 80 bp, synthetic construct
  source 1..80: mol_type = other DNA
tatacatgatctctttgggcatgtctctgttcacaatctggcggtaccatgggaagcgctggttgaacatgcacccgtaa

SEQ ID NO: 128726 - DNA, 80 bp, synthetic construct
  source 1..80: mol_type = other DNA
cagaacttagtccgctgctactatccaccactcagtggcaggtcctcccatgctccttcaccacattgccagcactgtcc

SEQ ID NO: 128727 - DNA, 80 bp, synthetic construct
  source 1..80: mol_type = other DNA
tgatgcaaatggaaagcttaaaagcgaatcaaaccttagtggttattggaactatagaagtgataatagtgttgttagta

SEQ ID NO: 128728 - DNA, 80 bp, synthetic construct
  source 1..80: mol_type = other DNA
ccatattatttaaataaaacatcaggggctcaggaaccaccaccgaaataaaaaccggtcgtaacaaatacattgtgtcc

SEQ ID NO: 128729 - DNA, 80 bp, synthetic construct
  source 1..80: mol_type = other DNA
attctccaggagaactcaatagagtggctgccagcctcaggaagcttggggcaccacctttgagagcctggagacatcgg

SEQ ID NO: 128730 - DNA, 80 bp, synthetic construct
  source 1..80: mol_type = other DNA
acttgcgaaggctgcgtgggaaactgccaaacactccccggttaattcctggctagggaacatcatcatgtacgcgccga

SEQ ID NO: 128731 - DNA, 80 bp, synthetic construct
  source 1..80: mol_type = other DNA
cgggccccggactcggactcgggcgtgcgcggccacgggccgctcgccccggcgtccgcgggcgccgcgcccccgtcggc

SEQ ID NO: 128732 - DNA, 80 bp, synthetic construct
  source 1..80: mol_type = other DNA
gctccatgtcatactcctggaccggggctctaataactccttgtagccccgaggaggaaaagttgccaattaactccttg

SEQ ID NO: 128733 - DNA, 80 bp, synthetic construct
  source 1..80: mol_type = other DNA
tacaaataggaactgccgacgccacagtagcaggtgccggcaaagaaattttcgcagacaaaacttttcaacctgaacca

SEQ ID NO: 128734 - DNA, 80 bp, synthetic construct
  source 1..80: mol_type = other DNA
tatggcttccaatactctccagcgcagcgggtcgactacctcttgtccgcgtgggcttccaagaaggtccccatggggtt

SEQ ID NO: 128735 - DNA, 80 bp, synthetic construct
  source 1..80: mol_type = other DNA
acggacagtctgtgtaacagaccccaataaacgtatgtcgctaccacacccttgtgtgtcaatggacgcctctccgggtg

SEQ ID NO: 128736 - DNA, 80 bp, synthetic construct
  source 1..80: mol_type = other DNA
ttcgcagcttgtccaggagggccgttgaccacatcaagtccgtgtgggaggacctcctggaagaccactgttcaccaatt

SEQ ID NO: 128737 - DNA, 80 bp, synthetic construct
  source 1..80: mol_type = other DNA
aacacccccagcagtgccccagacctaccaggtcgcgcacctacacgcaccaacaggaagtggcaagagcactaaggtcc

SEQ ID NO: 128738 - DNA, 80 bp, synthetic construct
  source 1..80: mol_type = other DNA
ggacctttagaagacagttcagaaattaatttaacacagcagtccatgccaaacaggccaaactacattggcttcaggga

SEQ ID NO: 128739 - DNA, 80 bp, synthetic construct
  source 1..80: mol_type = other DNA
cttctctcctgcatcaccgtgccgacctctgcagctgaggtgaggaacatcagcggcctctacacggtaaccaacgactg

SEQ ID NO: 128740 - DNA, 80 bp, synthetic construct
  source 1..80: mol_type = other DNA
gtttcgtggcctcgacaaggaggcgcccaagcgcccggccgtgcctcgggtggaaggagagcggccgggagacgggaacg

SEQ ID NO: 128741 - DNA, 80 bp, synthetic construct
  source 1..80: mol_type = other DNA
aggtgtcgagggcttgggcctccaaaaactgggttacatcctgcgtgaagttggcacccggcctggtggcaagatctatg

SEQ ID NO: 128742 - DNA, 80 bp, synthetic construct
  source 1..80: mol_type = other DNA
gttcctggctgagagatgtttgggactggatatgcgaggtgttgagcgactttaagacctggattaaggccaagcttatg

SEQ ID NO: 128743 - DNA, 80 bp, synthetic construct
  source 1..80: mol_type = other DNA
tcgcacccgcatacagctttaactgcctaggcatgggcaaccgcgacttcattgaaggagtcagcggagccacgtgggta

SEQ ID NO: 128744 - DNA, 80 bp, synthetic construct
  source 1..80: mol_type = other DNA
tctcccaggcggaaaccaagggctctgcctgcggattaagaaccactgatgtaacagctttggaagtgctaggctcttct

SEQ ID NO: 128745 - DNA, 80 bp, synthetic construct
  source 1..80: mol_type = other DNA
tcccacggtggcagggtgtgcactccccccgcagggtctgccgcccataccgcctccgaggaagaagaagctcgtgcgcc

SEQ ID NO: 128746 - DNA, 80 bp, synthetic construct
  source 1..80: mol_type = other DNA
cggcctctctgaagcataatatggtgaagggctgcacggatgagcgcatgtacaacatgctgacctgcgactcgggggtc

SEQ ID NO: 128747 - DNA, 80 bp, synthetic construct
  source 1..80: mol_type = other DNA
gaaatgctcaaaccttatctagcctgctctcgccgggtgccaagcagaacatccagcttatgaatacgaacgggagttgg

SEQ ID NO: 128748 - DNA, 80 bp, synthetic construct
  source 1..80: mol_type = other DNA
cagcgggcccggagggtacgcgcaggcctgatagcccagggaggtaaagcccgcatatgcggcatttatctctttaattg

SEQ ID NO: 128749 - DNA, 80 bp, synthetic construct
  source 1..80: mol_type = other DNA
acccgcattgaccctaacgcctgggtcgaacgctggaaggcggcgggccattaccaggccgaagcagcgttgttgcagtg

SEQ ID NO: 128750 - DNA, 80 bp, synthetic construct
  source 1..80: mol_type = other DNA
cttaacatgtctgataaattacttacttaaaatcagtcagcaaatctttgtccagcttattcagcatcacctcctttcct

SEQ ID NO: 128751 - DNA, 80 bp, synthetic construct
  source 1..80: mol_type = other DNA
agagaccccatagtgatcagcgactcccccccggcctctccccacaggccccccgcggcgcccatgccaggctccgcctc

SEQ ID NO: 128752 - DNA, 80 bp, synthetic construct
  source 1..80: mol_type = other DNA
cttcctcttggcacttctctcgtgcctaacagtccccacctcggctgcgcattatcgcaatgcgtcgggcgtctatcaca

SEQ ID NO: 128753 - DNA, 80 bp, synthetic construct
  source 1..80: mol_type = other DNA
tgttgcgagagctctcggatgcgcttaaggattggctgcaccccgtgcatagacgtaaaatttaaaaaggcctcggccct

SEQ ID NO: 128754 - DNA, 80 bp, synthetic construct
  source 1..80: mol_type = other DNA
tcttccgacaggtgtaggacggcctcgtggtagtcgataaacccgtcgttcgcctgggcccgctccagcagcccccccgc

SEQ ID NO: 128755 - DNA, 80 bp, synthetic construct
  source 1..80: mol_type = other DNA
caaagtatccaccagcgcttcccatctgggctaggccagactacaatcctccactactagagacgtggaaagatccggat

SEQ ID NO: 128756 - DNA, 80 bp, synthetic construct
  source 1..80: mol_type = other DNA
ggcttgtacctaccagacgacttaaaatacaccccaggaaacataaaactacctgataacaagaacacctacgagtacat

SEQ ID NO: 128757 - DNA, 80 bp, synthetic construct
  source 1..80: mol_type = other DNA
aatatcaccgggatcagaccggagaccctagcgcctcctgcgctctgtgttacatgaaaaagactttcagctttatttac

SEQ ID NO: 128758 - DNA, 80 bp, synthetic construct
  source 1..80: mol_type = other DNA
catggagctggctccaggacactggctggtaacaagaggccagctctgcagatgtacacgaacgttaaccaggacctagt

SEQ ID NO: 128759 - DNA, 80 bp, synthetic construct
  source 1..80: mol_type = other DNA
gcgtatggaattgctgggatattttcccccggcgcccggcagaatttgcagctgatcaacacaaacgggagctggcacat

SEQ ID NO: 128760 - DNA, 80 bp, synthetic construct
  source 1..80: mol_type = other DNA
cattctccttaaagcaactctgctagcagtctcaggggtgtacccattatcaataccagcgaccctttttgtgtggtact

SEQ ID NO: 128761 - DNA, 80 bp, synthetic construct
  source 1..80: mol_type = other DNA
ttgtgctggctcctactagagttgtcctttctgaaatgaaggaagcctttcacggtttagatgtcaagtttcacacacag

SEQ ID NO: 128762 - DNA, 80 bp, synthetic construct
  source 1..80: mol_type = other DNA
tgtgattctgcataccccgggctgcgtgccgtgcgtgcaggtgggcaacaccagcacctgctggaccccggtgaccccga

SEQ ID NO: 128763 - DNA, 80 bp, synthetic construct
  source 1..80: mol_type = other DNA
gtgatcgctccgagataagtcctctcctgcattcaaccactgagttagccatcttgccttgctccttcgcccccattcca

SEQ ID NO: 128764 - DNA, 80 bp, synthetic construct
  source 1..80: mol_type = other DNA
agtggatgactggaagaatgggcgagagacagctgcagaaaattgaaagatggctggtgaggaaccccttctttgcggca

SEQ ID NO: 128765 - DNA, 80 bp, synthetic construct
  source 1..80: mol_type = other DNA
cttccatcgctgctgagtgcctacgcacccgcaagcggtttccagcggccatgcccttctgggcaaggcctgactacaat

SEQ ID NO: 128766 - DNA, 80 bp, synthetic construct
  source 1..80: mol_type = other DNA
aattcgagtattgtgtacgagacggccgacaccatcctacactctccggggtgtgtcccttgcgttcgcgagggtaacgc

SEQ ID NO: 128767 - DNA, 80 bp, synthetic construct
  source 1..80: mol_type = other DNA
ccaaacgcaagttcaaagaagagctgctgcaggccttagcgcctgaaatatatggcccatcggataaccttaccaagcgc

SEQ ID NO: 128768 - DNA, 80 bp, synthetic construct
  source 1..80: mol_type = other DNA
tggggagagtgatggtcatggtgggcgctactatgacggatgacataggcatgggcgtgacctatcttgccctattagca

SEQ ID NO: 128769 - DNA, 80 bp, synthetic construct
  source 1..80: mol_type = other DNA
tggaggcggagacgtatatcactggtggcacccaagcccagaccaccgccagtcttgtcggccttttctctcaaggcccc

SEQ ID NO: 128770 - DNA, 80 bp, synthetic construct
  source 1..80: mol_type = other DNA
cgcaattctacccatgagatgtactgggtgagccacgcttcaggcaacattgtccactccgtgaacatgacaagccaggt

SEQ ID NO: 128771 - DNA, 80 bp, synthetic construct
  source 1..80: mol_type = other DNA
atgctaacatcaccggctcttctgatgacagaccgtactgctggcactacgcacctagaccttgtaacacagtctcggca

SEQ ID NO: 128772 - DNA, 80 bp, synthetic construct
  source 1..80: mol_type = other DNA
atgttttttaacatactcggggggtgggttgctacccatttggcagggccccagagctcttctgcgtttgtggtaagcgg

SEQ ID NO: 128773 - DNA, 80 bp, synthetic construct
  source 1..80: mol_type = other DNA
tactcaacgtgtcagtttctataaacgatgaggatttgatgtttaatcgccccgctgcaatttctttcattaggctttct

SEQ ID NO: 128774 - DNA, 80 bp, synthetic construct
  source 1..80: mol_type = other DNA
aattgggctgtgaagaccaagctcacactcactccaatacccgacgcagccagattcgatttatcgaactggtttgtgtc

SEQ ID NO: 128775 - DNA, 80 bp, synthetic construct
  source 1..80: mol_type = other DNA
cttggccggagctggactcctcttttccatcatgaagaacacaacaaatacaagaagaggaactggcaacataggagaga

SEQ ID NO: 128776 - DNA, 80 bp, synthetic construct
  source 1..80: mol_type = other DNA
tgtccaaagcttatgggatcgaccccaacatccgcactgggacgcgaaccgttacgactggagcaaaactcacgtactcc

SEQ ID NO: 128777 - DNA, 80 bp, synthetic construct
  source 1..80: mol_type = other DNA
aggttccgtttgtgcctccgcggtatatggctcctacggagggcagaaacagcattcgttactcggagctggctccgcag

SEQ ID NO: 128778 - DNA, 80 bp, synthetic construct
  source 1..80: mol_type = other DNA
gacctcgttgtaatggagctgcttcctgacattctcgtattttgcatgacagaacctagccttagcacaacacacttctc

SEQ ID NO: 128779 - DNA, 80 bp, synthetic construct
  source 1..80: mol_type = other DNA
ataacaatttgctacatacaaaagttacaggcgcaatagggtttgatacatctggcaacatggaacttaaaactggagat

SEQ ID NO: 128780 - DNA, 80 bp, synthetic construct
  source 1..80: mol_type = other DNA
tccggacactgattgggaaagagagatacactgactacctgacagtcatggataggtactctgtggatgctgatctgcag

SEQ ID NO: 128781 - DNA, 80 bp, synthetic construct
  source 1..80: mol_type = other DNA
ctgaaagaggaacaggaccaacagtacatttgtcgtagagatgtggtagatagaggatggggcaatggctgtggcttgtt

SEQ ID NO: 128782 - DNA, 80 bp, synthetic construct
  source 1..80: mol_type = other DNA
caagtggaacagtgggcccagagagaatattcaggccagttatgctttctggcctgtaacaaaggacattaagtaaagac

SEQ ID NO: 128783 - DNA, 80 bp, synthetic construct
  source 1..80: mol_type = other DNA
tcctcagctccgagatctggtggtattggaactctccaatttgtggaggaatttactccatctgtttacttcaatccttt

SEQ ID NO: 128784 - DNA, 80 bp, synthetic construct
  source 1..80: mol_type = other DNA
gacgacgacacgtacgtcgccaacagctttcagcacccgtacatcccttcgtacgcccaggacctggagcgcctgtcgcg

SEQ ID NO: 128785 - DNA, 80 bp, synthetic construct
  source 1..80: mol_type = other DNA
atggggtgtgcaacaccacatgcccctgcggtgcaaacatcgtgggtcatgtcaagaacggcaccatgaggatatatggc

SEQ ID NO: 128786 - DNA, 80 bp, synthetic construct
  source 1..80: mol_type = other DNA
ggggaagtgttaaggaggacagactttgctatggaggcccttggaaactgcagcagaaatggaacggagtggatgaagta

SEQ ID NO: 128787 - DNA, 80 bp, synthetic construct
  source 1..80: mol_type = other DNA
tgctacataaaagcgttggcctcctgtagagctgcaaagctccaggaatgcacgcttctggtgtgtggtgatgaccttgt

SEQ ID NO: 128788 - DNA, 80 bp, synthetic construct
  source 1..80: mol_type = other DNA
ttgccgtactgggccggagtgcgtcagaatgtgatgggatctaccttggacggccgacctgtggcacctgctaattcgtc

SEQ ID NO: 128789 - DNA, 80 bp, synthetic construct
  source 1..80: mol_type = other DNA
gatcgcccacggagtgagccaaactacttccggctttgcctcgcttctcacccccggtgccaagcagaatatacaactca

SEQ ID NO: 128790 - DNA, 80 bp, synthetic construct
  source 1..80: mol_type = other DNA
tagcgttgtttttagaagaagtcatgaagagtagaatcggaatcaaacacacaataggaatgacaattataactttcctg

SEQ ID NO: 128791 - DNA, 80 bp, synthetic construct
  source 1..80: mol_type = other DNA
cgcgttgacgtcacccccagggtgcggttgcggttcgttctggacgggagttccgacgacgcgtacgtggcgtcggagga

SEQ ID NO: 128792 - DNA, 80 bp, synthetic construct
  source 1..80: mol_type = other DNA
cgtcttggctgtgggaaatctgggactgggtctgcaccgtattgtctgactttaagacttggctgaaggccaaactattg

SEQ ID NO: 128793 - DNA, 80 bp, synthetic construct
  source 1..80: mol_type = other DNA
tgtcgactggacttctccatctccaccaaaacatcgtggacgtacaatatatgtacggtctgtcgcccgccctcacaaaa

SEQ ID NO: 128794 - DNA, 80 bp, synthetic construct
  source 1..80: mol_type = other DNA
ctgtatgtggggtgcttgttgtattttgggatgagcatagacccgaaacgctttgaagctgttttaataaaatcgatatt

SEQ ID NO: 128795 - DNA, 80 bp, synthetic construct
  source 1..80: mol_type = other DNA
agtggcttccatgacagaggctgcggctgtggggctggcagccatcggacagtttctcagaccggaggcggacacactgt

SEQ ID NO: 128796 - DNA, 80 bp, synthetic construct
  source 1..80: mol_type = other DNA
ctcatcgcccaggggtggaaggccaggatttgtggcctgtacctctttaactgggcggtgaaaaccaagctcaaactcac

SEQ ID NO: 128797 - DNA, 80 bp, synthetic construct
  source 1..80: mol_type = other DNA
tccgtcgcccacaggacgttaagttcccgggtggcggacagatcgttggtggagtatacgtgttgccgcgcaggggccta

SEQ ID NO: 128798 - DNA, 80 bp, synthetic construct
  source 1..80: mol_type = other DNA
acatacccgtcatcggcgcccccgttgggggcgttgccagagctcttgcccatggcgtgagggtcctggaggacggagtg

SEQ ID NO: 128799 - DNA, 80 bp, synthetic construct
  source 1..80: mol_type = other DNA
catcataaccgccttcacgatcacgccggcatataaaatcctcctcacccgacttgtgtggtggacgtgctacatgctgg

SEQ ID NO: 128800 - DNA, 80 bp, synthetic construct
  source 1..80: mol_type = other DNA
acgcaccctcgcacgtcgcatgcaaattaaaatcgtgcacagagccgatccggcctcgggtctgcttgcccctcccccgg

SEQ ID NO: 128801 - DNA, 80 bp, synthetic construct
  source 1..80: mol_type = other DNA
gccagggcccgcgggtcaaacatgagggccggtcgccaggtgacgcggaacagcgggtggtccgtgagctcggccacggc

SEQ ID NO: 128802 - DNA, 80 bp, synthetic construct
  source 1..80: mol_type = other DNA
agacagctgcttgacacttatggcaaacgacaaaccaacattggacgtccgcatgatcaacatcgaagctgtccaacttg

SEQ ID NO: 128803 - DNA, 80 bp, synthetic construct
  source 1..80: mol_type = other DNA
tacaatcctccccttgtggagccatggaagcgcccggactatgaaccacccttagttcacgggtgccccctaccacctcc

SEQ ID NO: 128804 - DNA, 80 bp, synthetic construct
  source 1..80: mol_type = other DNA
agggctgctccccgagctgcagcaggctggagacggcaggctggaagactgccagtgccgacgaactcaggaacggcacg

SEQ ID NO: 128805 - DNA, 80 bp, synthetic construct
  source 1..80: mol_type = other DNA
tgtgagagaaggtaacaactcgcggtgctggataccagtgacgcccaacattgccgtaaggcaaagcggtgcccttacca

SEQ ID NO: 128806 - DNA, 80 bp, synthetic construct
  source 1..80: mol_type = other DNA
tacgagccttcacggaggctatgactaggtactctgccccccccggggacccgccccaaccagcatatgacttggagctg

SEQ ID NO: 128807 - DNA, 80 bp, synthetic construct
  source 1..80: mol_type = other DNA
ccgctggatcttccggctattattcagagactccatggacttagcgcgtttacactccattcatactctccaagtgagat

SEQ ID NO: 128808 - DNA, 80 bp, synthetic construct
  source 1..80: mol_type = other DNA
actcctttgagcctttaaccgctgagtatgacgagagggaaatctcagtatcagctgagtgccataggccacctaggcgc

SEQ ID NO: 128809 - DNA, 80 bp, synthetic construct
  source 1..80: mol_type = other DNA
tccgtttatatccaaggaaacattaaatgagataaaaccacccccggcggtctggatgtacatatccgtggctgttagaa

SEQ ID NO: 128810 - DNA, 80 bp, synthetic construct
  source 1..80: mol_type = other DNA
ttgatgataaaggttatttagtagcatggaacaataaacatgacatccgcacactttggacaactttagacccttctcca

SEQ ID NO: 128811 - DNA, 80 bp, synthetic construct
  source 1..80: mol_type = other DNA
gcacgccctccccggcgccgaactattccagggcgttatggcgtgtggctgctgaggagtacgtggaggtcacgcgggtg

SEQ ID NO: 128812 - DNA, 80 bp, synthetic construct
  source 1..80: mol_type = other DNA
cacggggatttccaagtctccaccccattgacgtcaatgggagtttgttttggcaccaaaatcaacgggactttccaaaa

SEQ ID NO: 128813 - DNA, 80 bp, synthetic construct
  source 1..80: mol_type = other DNA
ggtacaagtattaccctgaaacgccacaaggcctagccaagatcattcagaaagctcataaggaaggagtgtgcggtcta

SEQ ID NO: 128814 - DNA, 80 bp, synthetic construct
  source 1..80: mol_type = other DNA
ctgtcaggagctacgtgggttgatgtggtgctagagcacggtgggtgtgtgaccaccatggctaagaacaagcctacgct

SEQ ID NO: 128815 - DNA, 80 bp, synthetic construct
  source 1..80: mol_type = other DNA
acagaacaagtggttaatttgagagattaggagtgtgagtcaggccagtgaaaactgccaccggatgttggtagacggtg

SEQ ID NO: 128816 - DNA, 80 bp, synthetic construct
  source 1..80: mol_type = other DNA
cgagcggcgtactgacaactagctgcggtaacaccctcacttgctacatcaaggcccaagcagcctgtcgagccgcgggg

SEQ ID NO: 128817 - DNA, 80 bp, synthetic construct
  source 1..80: mol_type = other DNA
ggcggcgctgcaaagccagccgtccggtctagcatcggacgactgggaggccgcgatgcaacgcatcatggccctgacga

SEQ ID NO: 128818 - DNA, 80 bp, synthetic construct
  source 1..80: mol_type = other DNA
aatgagcttgatctgctggcgcagaagtattccatagagcagctgaccacttactggctgcagccaggggatgattttga

SEQ ID NO: 128819 - DNA, 80 bp, synthetic construct
  source 1..80: mol_type = other DNA
cagcgcgttggggatcaccgacgccgaccacatagagtcaaggtccggagagtcgggatcggcgtccgggtcgcgggcgt

SEQ ID NO: 128820 - DNA, 80 bp, synthetic construct
  source 1..80: mol_type = other DNA
aaacgaggtggatttgatatttatctgccctgcggcaatgcttttgatggtggctgaatccatttggtcagaaaatacaa

SEQ ID NO: 128821 - DNA, 80 bp, synthetic construct
  source 1..80: mol_type = other DNA
ggtccgctgctctgcccctcgggacaccttgcgggcctttttagggccgcggtgtgcacccgtggagttgcgaaggcagt

SEQ ID NO: 128822 - DNA, 80 bp, synthetic construct
  source 1..80: mol_type = other DNA
tcgtcctcaatgccgcgtccgccgctagctaccaaggctggctctggtgtcttgcgtttgtgtgttctgcctggtacatc

SEQ ID NO: 128823 - DNA, 80 bp, synthetic construct
  source 1..80: mol_type = other DNA
agcgcatagaaaaagccacctctttcactaaaatgaaaaattgatacaaatacacatgtacgtaatgcattaataaacaa

SEQ ID NO: 128824 - DNA, 80 bp, synthetic construct
  source 1..80: mol_type = other DNA
tgttgtttggtatgggcaaagggatgccattctacgcatgggactttggagtcccgctgctaatgataggttgctactca

SEQ ID NO: 128825 - DNA, 80 bp, synthetic construct
  source 1..80: mol_type = other DNA
gcgttttggctgctttggccgcatattgcctatccacaggctgcgtggtcatagtaggcagagttgttttgtccgggaag

SEQ ID NO: 128826 - DNA, 80 bp, synthetic construct
  source 1..80: mol_type = other DNA
acagtgcttagcgatttcaagacctggctctccgctaagatcatgccaaaagtgccaggcatacctttcatctcttgcca

SEQ ID NO: 128827 - DNA, 80 bp, synthetic construct
  source 1..80: mol_type = other DNA
aagcactgctccgtgtgtgggtcccccccctcaatgtgagggggggtcgtgacgccatcattctcctcatgtgtgtcatc

SEQ ID NO: 128828 - DNA, 80 bp, synthetic construct
  source 1..80: mol_type = other DNA
gaggaagaagacggtggtactcacagagtcctcagtttccaacgccctggcccaactagctaccaagaccttcggcagct

SEQ ID NO: 128829 - DNA, 80 bp, synthetic construct
  source 1..80: mol_type = other DNA
tcaaagagaaggttgacaccaaggctcaggagcctcagcctggcacaaaggtcatcatgagagcagtgaatgactggatt

SEQ ID NO: 128830 - DNA, 80 bp, synthetic construct
  source 1..80: mol_type = other DNA
gcgaatgtgagcggttcatctgatgatagaccgtattgctggcactaccctcctagaccatgcgcagttgagccggccgt

SEQ ID NO: 128831 - DNA, 80 bp, synthetic construct
  source 1..80: mol_type = other DNA
caccatcatggccaagaatgaagttttctgcgtccagcctgagaagggggggcgtaagccggctcgcctcatcgtgttcc

SEQ ID NO: 128832 - DNA, 80 bp, synthetic construct
  source 1..80: mol_type = other DNA
gccgtccgcgtctcagttggacttgtccaattggttcacgggcggctacaacgggggagacatttatcacagcgtgtctc

SEQ ID NO: 128833 - DNA, 80 bp, synthetic construct
  source 1..80: mol_type = other DNA
ggagaggtagaaccggtcggtggaagcatggtatctacagatatgtgtcacccggggagcggccgtctggcatgtttgac

SEQ ID NO: 128834 - DNA, 80 bp, synthetic construct
  source 1..80: mol_type = other DNA
gggaaggccattcccctctcagccatcaagggagggcgacatctaatcttctgccactcaaagaaaaagtgcgacgaact

SEQ ID NO: 128835 - DNA, 80 bp, synthetic construct
  source 1..80: mol_type = other DNA
aatttggaaacactcccacggtttgtgcactgcattgggcattatgttatgtaaagggagaaggtgagcgtttgtttgag

SEQ ID NO: 128836 - DNA, 80 bp, synthetic construct
  source 1..80: mol_type = other DNA
tgctttcttgcttagtccatcctgcagctagtttagagtggcggaatgcatctggcctctacatccttaccaacgactgt

SEQ ID NO: 128837 - DNA, 80 bp, synthetic construct
  source 1..80: mol_type = other DNA
atcaatcccctgagcaactctctcatccgtcaccacaacctggtgtactccaccacttctcggagcgcagcaatgcgcca

SEQ ID NO: 128838 - DNA, 80 bp, synthetic construct
  source 1..80: mol_type = other DNA
gtttccaccagcccaggagagccctcaggaagaatccggtaagggctcttccatcacaacttctgatgatccatcaccac

SEQ ID NO: 128839 - DNA, 80 bp, synthetic construct
  source 1..80: mol_type = other DNA
gagaggctgccggaatcttcatgacagccactcctcccggaagcaaggacccttttccgcagagcaacgctccaataatg

SEQ ID NO: 128840 - DNA, 80 bp, synthetic construct
  source 1..80: mol_type = other DNA
ggatgttcatagggggggtcgagcacaggctccaggctgcgtgcaacttcactcgtggagatcgctgcaacctggaggat

SEQ ID NO: 128841 - DNA, 80 bp, synthetic construct
  source 1..80: mol_type = other DNA
ctaacatatggctgaaattgaaagaaaggcaggatgtatcttgtgactcaaaactcatgtcagcagccataaaagacaac

SEQ ID NO: 128842 - DNA, 80 bp, synthetic construct
  source 1..80: mol_type = other DNA
ggttggaggcagcctgcaacttcacccgtggccagcgctgcaatttagaagacagggataggagtcaactgaatcccttg

SEQ ID NO: 128843 - DNA, 80 bp, synthetic construct
  source 1..80: mol_type = other DNA
cgagcgagtcggccgcggcgacggtgtcggccagcaggtggcgcaggctctggttctggaagagcaggtccgcggcggcg

SEQ ID NO: 128844 - DNA, 80 bp, synthetic construct
  source 1..80: mol_type = other DNA
agcggctagctagctgcttccccatcacccactttgctcaagggtatgggcctatcacctatgtctccaataccagcgga

SEQ ID NO: 128845 - DNA, 80 bp, synthetic construct
  source 1..80: mol_type = other DNA
atgaaatgccggcaaatgttacagctatacccgtcaccgaggtcgttgtatataatacaattacccataggttttttttt

SEQ ID NO: 128846 - DNA, 80 bp, synthetic construct
  source 1..80: mol_type = other DNA
gcagttaaaacgaagctcaaactcactccattgccagccgcgtccaagcttgacttgtcaaattggttcacggctggcta

SEQ ID NO: 128847 - DNA, 80 bp, synthetic construct
  source 1..80: mol_type = other DNA
gattccaatactctccagcgcagcgggtcgatttcctcctggaagcgtggaaaaagaaaagaactccaatggggttctct

SEQ ID NO: 128848 - DNA, 80 bp, synthetic construct
  source 1..80: mol_type = other DNA
ggggcacgtagaaattaccttcctcttcggactcgatatccacgacatcaaagtcgtgggcggtcagcgagacgacctcc

SEQ ID NO: 128849 - DNA, 80 bp, synthetic construct
  source 1..80: mol_type = other DNA
aaaaactatgccagtttactgacagaaccatggtgtggccttattacaatttacattttaactgtgaaaattatgacctt

SEQ ID NO: 128850 - DNA, 80 bp, synthetic construct
  source 1..80: mol_type = other DNA
ccctgagctctgacatgacgcctcctcgcgaggaggctgacagggcttcagacgatggctcctacagctccatgccgccc

SEQ ID NO: 128851 - DNA, 80 bp, synthetic construct
  source 1..80: mol_type = other DNA
cgctgcaaacatgctgtaccctatcccagccaacgcaaccagtgtgccgatttctataccttccagaaattgggcagcat

SEQ ID NO: 128852 - DNA, 80 bp, synthetic construct
  source 1..80: mol_type = other DNA
ggtgcgggaagccgagcgggcgcgggcccgtgcggtcgcggcggcacgccccgcggagcggccccggacggccgcggtcg

SEQ ID NO: 128853 - DNA, 80 bp, synthetic construct
  source 1..80: mol_type = other DNA
caaaggaaatatggcggtgcacagtgacttgtcatactggattgaaagccatctcaatgacacctggaaacttgaaagag

SEQ ID NO: 128854 - DNA, 80 bp, synthetic construct
  source 1..80: mol_type = other DNA
ttgtgtgtgctaccgatgccctcatgactggttatacaggagattttgactcagtgattgactgtaacgtttcagttacc

SEQ ID NO: 128855 - DNA, 80 bp, synthetic construct
  source 1..80: mol_type = other DNA
ctttgattactgccctggcaccaaagtgactgtgagtgcactctgtggaagaagaggccctgctacccgcacaaccacag

SEQ ID NO: 128856 - DNA, 80 bp, synthetic construct
  source 1..80: mol_type = other DNA
gtcccccaggctgacatcggtcggtggggccgtcgacagtctgcgcgtgtgtcccgcggagagaaaggacaggcgcggag

SEQ ID NO: 128857 - DNA, 80 bp, synthetic construct
  source 1..80: mol_type = other DNA
aaaccagctcgcctcatcgtttaccctgacctcggcgtccgggtctgcgagaaaatggccctctatgacattacacaaaa

SEQ ID NO: 128858 - DNA, 80 bp, synthetic construct
  source 1..80: mol_type = other DNA
tccaacgtttccgtagcccacgacaacaccggacagagatactactacctcacaagagaccccgtcacaccgctgacgcg

SEQ ID NO: 128859 - DNA, 80 bp, synthetic construct
  source 1..80: mol_type = other DNA
ctccaatgacagcatcacttggcagctcgaggctgcggttctccacgtccccgggtgcgtcccgtgcgagagagtgggga

SEQ ID NO: 128860 - DNA, 80 bp, synthetic construct
  source 1..80: mol_type = other DNA
tggacaagccacccgtcaacctattggggtgtttggaacaatgaacagccaatatagcgactgcgatcctctaggaaact

SEQ ID NO: 128861 - DNA, 80 bp, synthetic construct
  source 1..80: mol_type = other DNA
acggcgtgtgccataccacttgcacctgcggtgctgcaatcgcgggccatgttaagaacgggactatgaaaatagtcggc

SEQ ID NO: 128862 - DNA, 80 bp, synthetic construct
  source 1..80: mol_type = other DNA
ctggaccctccgtcggaagaggagctggattgaatcagatcctgagatacgatgagaccaagtccagggtgcgcgcttgc

SEQ ID NO: 128863 - DNA, 80 bp, synthetic construct
  source 1..80: mol_type = other DNA
aatactctggaccttgtcgtcatcaactcaacgagaccgtctacctcaccaaccagactgaggtaaaactcaactgcaga

SEQ ID NO: 128864 - DNA, 80 bp, synthetic construct
  source 1..80: mol_type = other DNA
tgatggcgtctaaggacgcccctcaaagcgctgatggcgcaagcggcgcaggtcaactggtgccggaggttaatacagct

SEQ ID NO: 128865 - DNA, 80 bp, synthetic construct
  source 1..80: mol_type = other DNA
ggggaccgtctggtcttcgattcgcccgtccagcggctgtttcccgagatcgtcgcgtgtcactccctccgggaacacgc

SEQ ID NO: 128866 - DNA, 80 bp, synthetic construct
  source 1..80: mol_type = other DNA
gtcaggctacgtgcgtacctgaacacccctgggctccccgtatgccaggatcatttggagttctgggaggcagttttcac

SEQ ID NO: 128867 - DNA, 80 bp, synthetic construct
  source 1..80: mol_type = other DNA
ttgaacaggttcacaacaaggcatagaaaacccacttatgagaaggacgtagatcttggggcaggaacgagaagtgtctc

SEQ ID NO: 128868 - DNA, 80 bp, synthetic construct
  source 1..80: mol_type = other DNA
gcagctggggtataccgagggccaggtggtgtacaacgtcgtccggtccagcgaggcgaccacccggcagctgcaggcgg

SEQ ID NO: 128869 - DNA, 80 bp, synthetic construct
  source 1..80: mol_type = other DNA
ttggagacgtggaaaaagccggactacgaaccgcctgtggtccatggctgcccgcttccacctccacagtcccctcctgt

SEQ ID NO: 128870 - DNA, 80 bp, synthetic construct
  source 1..80: mol_type = other DNA
gctcctttccctgaaagggaaaggtagtgtgaagaagaacctgccttttgtcatggccttggggttgaccgctgtgagga

SEQ ID NO: 128871 - DNA, 80 bp, synthetic construct
  source 1..80: mol_type = other DNA
gtgtgaaggaagaccgcataagctatggaggcccgtggaggttcgaccggaagtggaatggaacagatgatgtgcaagtg

SEQ ID NO: 128872 - DNA, 80 bp, synthetic construct
  source 1..80: mol_type = other DNA
ccggcctcacacacatagatgctcacttcctctcccagacgaaacaagcgggggagaacttcccgtacctggtggcatat

SEQ ID NO: 128873 - DNA, 80 bp, synthetic construct
  source 1..80: mol_type = other DNA
gattaggtggctctaagttaataatcaatcttggtccaggtttacaaacgtctaatggagctattactttagcactagat

SEQ ID NO: 128874 - DNA, 80 bp, synthetic construct
  source 1..80: mol_type = other DNA
attaccagaatgatcacagcaactttttaaccactgtagtgcaaaataatgactattcccctatagaggctggcacgcaa

SEQ ID NO: 128875 - DNA, 80 bp, synthetic construct
  source 1..80: mol_type = other DNA
gacctgctacattaaggcatgcgcagcgtgcaaggccgctgggatcagcaactatgacatgttggtgtgcggggacgatc

SEQ ID NO: 128876 - DNA, 80 bp, synthetic construct
  source 1..80: mol_type = other DNA
gggacatccggactgagaacgacatctatcagtcttgccagctggatcccgtagcaaggagggcagtatcatccctaacg

SEQ ID NO: 128877 - DNA, 80 bp, synthetic construct
  source 1..80: mol_type = other DNA
tctcgccacccgctcaccacctttggttcgggaagcccgggccgtcgtcactcccaggcctcctattcgtccgtcctctg

SEQ ID NO: 128878 - DNA, 80 bp, synthetic construct
  source 1..80: mol_type = other DNA
ggcttattcctattgggccaaatgttcacctttcggcctcgcctccactggaccactcaggactgcaactgttccatcta

SEQ ID NO: 128879 - DNA, 80 bp, synthetic construct
  source 1..80: mol_type = other DNA
tttaaaatccagccattcttggctttaggatttttcctaagaaaactgacatccagagaaaatttattgttaggagttgg

SEQ ID NO: 128880 - DNA, 80 bp, synthetic construct
  source 1..80: mol_type = other DNA
ggcaaaactgcggctatcggcggtgccgcgcgagcggcgtcctgaccactagctgcgggaacacccttacctgctacctg

SEQ ID NO: 128881 - DNA, 80 bp, synthetic construct
  source 1..80: mol_type = other DNA
ctactctgtcaatccgctggatcttccggctattattcagagactccatggacttgacgccttttctatgcacacatact

SEQ ID NO: 128882 - DNA, 80 bp, synthetic construct
  source 1..80: mol_type = other DNA
gtgggcggcgttgagcacaggtttgatgccgcttgcaactggactcgggaggagaggtgcgagctggaagatagggatag

SEQ ID NO: 128883 - DNA, 80 bp, synthetic construct
  source 1..80: mol_type = other DNA
gtgggcagtgtcgtgatctgcggcagaatagtcacgtcagggaagcctgtgccgctacctgatagagaagttctctaccg

SEQ ID NO: 128884 - DNA, 80 bp, synthetic construct
  source 1..80: mol_type = other DNA
tgctggtcagggtgtacgggtactgccccagttgggcctggacgtgattcccgcgaaacccaaattcatgaaagatggtg

SEQ ID NO: 128885 - DNA, 80 bp, synthetic construct
  source 1..80: mol_type = other DNA
aagatcgttggcccgaagatgtgcagcaatacctggcacggcacattccctattaacgccactacgaccggccctggtgt

SEQ ID NO: 128886 - DNA, 80 bp, synthetic construct
  source 1..80: mol_type = other DNA
aactggcgcccccccctccaaccggggccgggatacgcgaagatccttggctggaggtggcgctcggagccccaagcgtg

SEQ ID NO: 128887 - DNA, 80 bp, synthetic construct
  source 1..80: mol_type = other DNA
gcacctgcagttgctgacaaatgtgattcacccctggatagaatattttgtacagcccctggcggagagttacagatccc

SEQ ID NO: 128888 - DNA, 80 bp, synthetic construct
  source 1..80: mol_type = other DNA
ctggcggccggaaccacagccgagcagctcctcatgttcgaccttctccccccaaaggacgtgccggtgggaagcgacgt

SEQ ID NO: 128889 - DNA, 80 bp, synthetic construct
  source 1..80: mol_type = other DNA
ttcgttgtcgcgctctttcagttttcagggcaacgttcagccactcctgcagtccacttaacagctcctcagcccgtgga

SEQ ID NO: 128890 - DNA, 80 bp, synthetic construct
  source 1..80: mol_type = other DNA
accgccgcctcggcgcagatctcggacgtcagcgagggctttgcccccctgttcaccaacctgttcagcaaggtgacccg

SEQ ID NO: 128891 - DNA, 80 bp, synthetic construct
  source 1..80: mol_type = other DNA
ggacgaggctcacttcactgacccagctagcatcgccgcccggggttatattgcaaccaaggtggaactggtggaggcag

SEQ ID NO: 128892 - DNA, 80 bp, synthetic construct
  source 1..80: mol_type = other DNA
ttgaaagaataaaatcagaatacaccgccacttggttccatgatagtgacaacccttacagaacttggcattattgtggt

SEQ ID NO: 128893 - DNA, 80 bp, synthetic construct
  source 1..80: mol_type = other DNA
gaagacaaagctcaaactcactccactgcgtggtgcaggcaccctcgacttatcggggtggtttgcaccaggcggccgcg

SEQ ID NO: 128894 - DNA, 80 bp, synthetic construct
  source 1..80: mol_type = other DNA
cttttgatttttttaccttggacctgaggcccgccactgcttgggccctgtatggaggaagtacagtggtgttgactcca

SEQ ID NO: 128895 - DNA, 80 bp, synthetic construct
  source 1..80: mol_type = other DNA
gtgtacaccatggacggggaatataggctcagaggggaagaacggaagaacttccttgaattcctgagaacagctgattt

SEQ ID NO: 128896 - DNA, 80 bp, synthetic construct
  source 1..80: mol_type = other DNA
gcattgaaacacttaaacggattcaaacgtgatctcggatccatgctggacaccattaaccggcggccaagcaaaaagag

SEQ ID NO: 128897 - DNA, 80 bp, synthetic construct
  source 1..80: mol_type = other DNA
caagactgctagccgagtagcgttgggttgcgaaaggccttgtggtactgcctgatagggcgcttgcgagtgccccggga

SEQ ID NO: 128898 - DNA, 80 bp, synthetic construct
  source 1..80: mol_type = other DNA
tggtggccaggcggccgttgtccaggtatcgttgcatcggcaacaacaaagccaggggcggcgccttttccagcagcacg

SEQ ID NO: 128899 - DNA, 80 bp, synthetic construct
  source 1..80: mol_type = other DNA
ttggaccaagcggagacggcgggggtcaggctcactgtcctcgctaccgctacaccacctggttctgtcaccgtgccaca

SEQ ID NO: 128900 - DNA, 80 bp, synthetic construct
  source 1..80: mol_type = other DNA
ccctggcaggccctaaagggcccgtcctgcagatgtacaccaacatagaccaagatctcgttggctggcccgctcccgcc

SEQ ID NO: 128901 - DNA, 80 bp, synthetic construct
  source 1..80: mol_type = other DNA
gaggagaaacaaccaaacatgcagtgtcgagaggaacagccaaactgaggtggtttgtggagaggaacctcgtgaaacca

SEQ ID NO: 128902 - DNA, 80 bp, synthetic construct
  source 1..80: mol_type = other DNA
cgacgggaacatggtcgctcccgacgtagggcactctatccaattttgtgagaccccccgcaccatggaaggccaaacat

SEQ ID NO: 128903 - DNA, 80 bp, synthetic construct
  source 1..80: mol_type = other DNA
cgacaaatgcgacctcagcccagggcaaccacggcctcagcagcggtggcgctttcgggctctggcgaacaggaagagcc

SEQ ID NO: 128904 - DNA, 80 bp, synthetic construct
  source 1..80: mol_type = other DNA
ttttattagagaattgattacaagactgtttttttttttttattttattaaaaatcaaacggttcctctcgagaatcgcc

SEQ ID NO: 128905 - DNA, 80 bp, synthetic construct
  source 1..80: mol_type = other DNA
gatgagtgccactccacagaccctacgacggtgctgggcgttggcacggttctcgaccaggctgagactgccggggttcg

SEQ ID NO: 128906 - DNA, 80 bp, synthetic construct
  source 1..80: mol_type = other DNA
ttcccgagctgtgaccaccatactcagctccctcaccatcaccagccttctccgcaagctccatgagtggatcaatggag

SEQ ID NO: 128907 - DNA, 80 bp, synthetic construct
  source 1..80: mol_type = other DNA
caattgcttggcggactcggggagttaaacagagaattggggaagtcaaccacgtttccatggaaacggatcgtaggtta

SEQ ID NO: 128908 - DNA, 80 bp, synthetic construct
  source 1..80: mol_type = other DNA
cgtgtgctgttcgatgtcatactcgtggactggggcgcttgtaacaccttgcgcggctgaagaatcaaagctgccaatta

SEQ ID NO: 128909 - DNA, 80 bp, synthetic construct
  source 1..80: mol_type = other DNA
ccgtttgcggcgtcgccggcgacgacccacgactgccatgattgccgctcgagcggtgttaaggcgtgcgcgtcggatag

SEQ ID NO: 128910 - DNA, 80 bp, synthetic construct
  source 1..80: mol_type = other DNA
agcaaaagtgacagcactgctaagctctttgaccgtcacccgattgctccgccgactacatcagtggatcaacgaggact

SEQ ID NO: 128911 - DNA, 80 bp, synthetic construct
  source 1..80: mol_type = other DNA
aatcgcccgccgtacacccgaccggcctggacccgctactacaagatggacatagacgtcgaatatctggtttgcaaagc

SEQ ID NO: 128912 - DNA, 80 bp, synthetic construct
  source 1..80: mol_type = other DNA
tagatgagggagaatacaccctgtaaaacgcacatggctgtgtatcgtagtaataaacatctgtgcgctcaataacctca

SEQ ID NO: 128913 - DNA, 80 bp, synthetic construct
  source 1..80: mol_type = other DNA
cgagactggcctcgagctacatgcccagcagcggtagcagcccctccatccccagttccatcatcgccgaggagaaactg

SEQ ID NO: 128914 - DNA, 80 bp, synthetic construct
  source 1..80: mol_type = other DNA
cgcggaccgggtggcggcgggtgacgtcctgcacggcccgctggaccagcgcgaggatctcctcgttctcttgcgtgatg

SEQ ID NO: 128915 - DNA, 80 bp, synthetic construct
  source 1..80: mol_type = other DNA
ggattgatacacctgcaccaaaacattgtggacgttcaatacctttacggcatatcgcccgcattggtgtcctgggccat

SEQ ID NO: 128916 - DNA, 80 bp, synthetic construct
  source 1..80: mol_type = other DNA
acccccttttacctcttccaatgcttttcaagaaaaaccacccggtgtattatcacttaattacaaagatcccattgtta

SEQ ID NO: 128917 - DNA, 80 bp, synthetic construct
  source 1..80: mol_type = other DNA
ttgctatcgagaaaaatcagaaattcccccaaatttaataatgattgctggaataattaatataatctgctgcaccataa

SEQ ID NO: 128918 - DNA, 80 bp, synthetic construct
  source 1..80: mol_type = other DNA
gcctgagccagatgtagccgtgttgacatcaatgttaactgatccaggacacatgacagctgagacggccaaacggaggc

SEQ ID NO: 128919 - DNA, 80 bp, synthetic construct
  source 1..80: mol_type = other DNA
gggccgccgcgacgaccccgagtccgacagcagcggggagtgttcctcgtcggacgaggacatggaagacccctgcggag

SEQ ID NO: 128920 - DNA, 80 bp, synthetic construct
  source 1..80: mol_type = other DNA
agccgccggtctcgtcccagaggtcaccaatgagaccatggcactggagcccgtcgcaggggcggccctggccgcgcctg

SEQ ID NO: 128921 - DNA, 80 bp, synthetic construct
  source 1..80: mol_type = other DNA
tgcgagtctggagacaccgggccagggctgttcgcgctaggctactgtcccaggtggggaaagccgccatttgcggcaag

SEQ ID NO: 128922 - DNA, 80 bp, synthetic construct
  source 1..80: mol_type = other DNA
ctctcggccaagatcatgcccaagatgccgggcgtgcccttcttttcatgccagcggaggtacaagggtgtgtggcgagg

SEQ ID NO: 128923 - DNA, 80 bp, synthetic construct
  source 1..80: mol_type = other DNA
gacctcgtgggatggcctagcccccccggtaccagatccctggaaccttgcacctgtggggcagttgacctctacctcgt

SEQ ID NO: 128924 - DNA, 80 bp, synthetic construct
  source 1..80: mol_type = other DNA
ggccagatcaagggggaagctggccggtggtagaaaaccccccaacagggtgccaaacggcaacacgccagtgagagtgg

SEQ ID NO: 128925 - DNA, 80 bp, synthetic construct
  source 1..80: mol_type = other DNA
tgcggattcgccgatctcatggggtacatcccgctcgtgggcgctcccgctggtggcgtcgccagggccctggcacacgg

SEQ ID NO: 128926 - DNA, 80 bp, synthetic construct
  source 1..80: mol_type = other DNA
catcatgggctgatgtaaagaaagacttaatctcatacggaggtggatggagactggatggagagtggactgaaggtgag

SEQ ID NO: 128927 - DNA, 80 bp, synthetic construct
  source 1..80: mol_type = other DNA
cgaaccctctatcgcaatacagacggaggtgaggcggtgcggcggtgggggggggcgcgccgcccggtcgcacatcttac

SEQ ID NO: 128928 - DNA, 80 bp, synthetic construct
  source 1..80: mol_type = other DNA
cccctaacgtagctgtgaagcgcagaggtgctctcactagcgggttgagggctcacatagataccatcgtagtggccgcc

SEQ ID NO: 128929 - DNA, 80 bp, synthetic construct
  source 1..80: mol_type = other DNA
acattaacaggactgctctgaactgcaatgacagcctccacactggatttttggccggcctgctttaccatcgcaagttt

SEQ ID NO: 128930 - DNA, 80 bp, synthetic construct
  source 1..80: mol_type = other DNA
atgtagacttggaaaccccagacactcacgtggtgtacaaacctggtacttcagaagaaagttctcatgctaatctcggt

SEQ ID NO: 128931 - DNA, 80 bp, synthetic construct
  source 1..80: mol_type = other DNA
cagaccagaggccgtattgctggcactacgcacctcgaccgtgcggtatcgtgcctgcgtcggaggtgtgtggtccagtg

SEQ ID NO: 128932 - DNA, 80 bp, synthetic construct
  source 1..80: mol_type = other DNA
gagctgctccagcgccggtatggggggggactggtcagaaacccactctcgcggaattccacgcacgagatgtattgtgt

SEQ ID NO: 128933 - DNA, 80 bp, synthetic construct
  source 1..80: mol_type = other DNA
ccaacgtacaggctaacttggaccggatgggtatggatgtaaaggaagcacttgcgcaacgagagcgatttcatcgcgac

SEQ ID NO: 128934 - DNA, 80 bp, synthetic construct
  source 1..80: mol_type = other DNA
ctcggcttgatacaggctaccagcaaacaggcagaagaactcaaaccagcagtacattctgcctggcccaagctcgagca

SEQ ID NO: 128935 - DNA, 80 bp, synthetic construct
  source 1..80: mol_type = other DNA
gtgtatgaggcggagactgtgattctgcaccttcccggatgcaccccttgcgtcaaaactggcaacaaatctgtctgctg

SEQ ID NO: 128936 - DNA, 80 bp, synthetic construct
  source 1..80: mol_type = other DNA
acagaccttctgagagctgtgacaccttgctctgtgacattggggagtcatcatcgagcgctgaagttgaggagcacagg

SEQ ID NO: 128937 - DNA, 80 bp, synthetic construct
  source 1..80: mol_type = other DNA
gtatccgcggcgctagctgcgctagcggagaagtcattcccgtcctcgaaacagcaggaagggaatggttcatcctccgg

SEQ ID NO: 128938 - DNA, 80 bp, synthetic construct
  source 1..80: mol_type = other DNA
ggattttacaggccagcctactcaagataccatacttcgtgcgtgcccatgccctcctaaggatctgcatgttggcgcgc

SEQ ID NO: 128939 - DNA, 80 bp, synthetic construct
  source 1..80: mol_type = other DNA
tctgcgagtgctatgacgccggctgcgcgtggtacgagctaacgccggctgagacaacaaccaggctgagggcgtacttc

SEQ ID NO: 128940 - DNA, 80 bp, synthetic construct
  source 1..80: mol_type = other DNA
gcaggcgcgaccgacgcgcgcgggtcgggagcgccgggcgcggagcgaggacccggggtcccccgcggcaccaacacccg

SEQ ID NO: 128941 - DNA, 80 bp, synthetic construct
  source 1..80: mol_type = other DNA
gagtgagaagaacgacacatggaggctgaagagggcccacctgatcgagatgaaaacatgtgaatggccaaagtcccaca

SEQ ID NO: 128942 - DNA, 80 bp, synthetic construct
  source 1..80: mol_type = other DNA
gcatacgcggcccaagggtacaatgtgctcgtcctgaacccatccgtcgccgccaccttaggttttggggcatatatgtc

SEQ ID NO: 128943 - DNA, 80 bp, synthetic construct
  source 1..80: mol_type = other DNA
ggatatggtgcgggcatttcgggggccctcgtcgcattcaagatcatgtctggcgagaagccctctatggaagatgtcat

SEQ ID NO: 128944 - DNA, 80 bp, synthetic construct
  source 1..80: mol_type = other DNA
gggtaggctcatggaatttctaacagaaatagcagctactttagccagagggtcatccttgtcaatcttctcaacacttc

SEQ ID NO: 128945 - DNA, 80 bp, synthetic construct
  source 1..80: mol_type = other DNA
ggcttatggtatagacccaaatataagaactggcatcaggacagtcaccacaggggggagcattacgtactctacatatg

SEQ ID NO: 128946 - DNA, 80 bp, synthetic construct
  source 1..80: mol_type = other DNA
gcggcattgtagtcttattgactatattgacgctatccccgcattacaaatgctggttgagccgaataatatggtggtta

SEQ ID NO: 128947 - DNA, 80 bp, synthetic construct
  source 1..80: mol_type = other DNA
ctcccccaccctcttgggacacaatgtggaaatgtctaattaggctcaaaccaaccttggtcggtcccacccccctgttg

SEQ ID NO: 128948 - DNA, 80 bp, synthetic construct
  source 1..80: mol_type = other DNA
tcaacatttttgtaggctctacaatttcgggttgatacagttccgcaagttgatcatcaagccatccgagtaaaggttgc

SEQ ID NO: 128949 - DNA, 80 bp, synthetic construct
  source 1..80: mol_type = other DNA
gccgggcttttcgaccagggccccagccaggacatccggctgatcaacaccaacggcagttggcacatcaacaggactgc

SEQ ID NO: 128950 - DNA, 80 bp, synthetic construct
  source 1..80: mol_type = other DNA
cctcctcctgcatcccctcgccttccattctccggccctccgcgagtcccgacgccccccccccgccgcccgacgaagga

SEQ ID NO: 128951 - DNA, 80 bp, synthetic construct
  source 1..80: mol_type = other DNA
ggccaacctagaccgactgacaacggacgtgagagaggcggtggcgcagcgggaacgctttatgcatgacgttaacctag

SEQ ID NO: 128952 - DNA, 80 bp, synthetic construct
  source 1..80: mol_type = other DNA
ggtgtcatgtggactgtttatcatgggcccggttttaagactctcgctggaccgaaaggaccagtgtgtcaaatgtacac

SEQ ID NO: 128953 - DNA, 80 bp, synthetic construct
  source 1..80: mol_type = other DNA
ccacccttcctggcaacccagctgtggcctccatgatgtcctttacagcggctgtcacctcccccttgaccacttccacc

SEQ ID NO: 128954 - DNA, 80 bp, synthetic construct
  source 1..80: mol_type = other DNA
tggcagcatcaccgtgccgcatcccaacatagaggaggttgctcttggccatgaaggggagattcccttctatggcaagg

SEQ ID NO: 128955 - DNA, 80 bp, synthetic construct
  source 1..80: mol_type = other DNA
tggatcaccgatgactgccccattccatgcgccggctcatggctcagcgacgtatgggattgggtttgtactgtcttgac

SEQ ID NO: 128956 - DNA, 80 bp, synthetic construct
  source 1..80: mol_type = other DNA
ggccgtgaaattttcctagggccggccgacaacatcaaaacggcggggtggcgacttctcgcccctatcaccgcgtatgc

SEQ ID NO: 128957 - DNA, 80 bp, synthetic construct
  source 1..80: mol_type = other DNA
tgcccaccacccgtcccatcgcgcccatggctaccggagtgctgggccagcacacgcccgtaacgctggacctgcctccc

SEQ ID NO: 128958 - DNA, 80 bp, synthetic construct
  source 1..80: mol_type = other DNA
cagctctcctctcacctggggctttggtagtgggcgtggtgtgcgctgctgtcttgaggcgccatgtaggaccatcagag

SEQ ID NO: 128959 - DNA, 80 bp, synthetic construct
  source 1..80: mol_type = other DNA
ggccgatggaggttgcagcgggggggcatatgacataatcatctgtgacgagtgccactccaccgactccacaacaatcc

SEQ ID NO: 128960 - DNA, 80 bp, synthetic construct
  source 1..80: mol_type = other DNA
atgcctgctctatcaacaggactcatacacctccaccagaatgtcgtggacgtgcaatacctttacggcgtcgggtctgg

SEQ ID NO: 128961 - DNA, 80 bp, synthetic construct
  source 1..80: mol_type = other DNA
gcggttgttggccccgatcacagcatatacccagcaaactaggggccttcttgggactattgtgaccagcttgactggca

SEQ ID NO: 128962 - DNA, 80 bp, synthetic construct
  source 1..80: mol_type = other DNA
tgattgcatgtagtattccatgggcccggggactaagcaccgttccacgatgaactttttctatgcctttgtttaaaatc

SEQ ID NO: 128963 - DNA, 80 bp, synthetic construct
  source 1..80: mol_type = other DNA
cgtgagacacagctccagctccgactcgcgggaaaaggccgtggtgttgcggagcgccacgacgacgggcgcgcccagga

SEQ ID NO: 128964 - DNA, 80 bp, synthetic construct
  source 1..80: mol_type = other DNA
agccccatggagaagaaagtcatcgtctggtgggctgagacagtggcatgcggggacatcttgcatgggctgcccgtctc

SEQ ID NO: 128965 - DNA, 80 bp, synthetic construct
  source 1..80: mol_type = other DNA
tgggcgcgttatctcagccacccctttggctgagaacaccaatagtgtaaccaacatagaattagaacccccctttgggg

SEQ ID NO: 128966 - DNA, 80 bp, synthetic construct
  source 1..80: mol_type = other DNA
ggaacctgagagtcttcacggaggctatgaccaggtactctgcccctcccggtgacccccctaaagcagaatatgacttg

SEQ ID NO: 128967 - DNA, 80 bp, synthetic construct
  source 1..80: mol_type = other DNA
gacgtaacggttaaagtccacaaaaaacacccagaaaaccgcacgcgaacctacgcccagaaacgaaagccaaaaaaccc

SEQ ID NO: 128968 - DNA, 80 bp, synthetic construct
  source 1..80: mol_type = other DNA
tgcacatcaaccagcgagctgtcgtcgcaccggacaaggaggtcctctatgaggcttttgacgagatggaggagtgtgcc

SEQ ID NO: 128969 - DNA, 80 bp, synthetic construct
  source 1..80: mol_type = other DNA
cggtgggggatggaggctcggagacaaatgggacaaagaagaagatgtccaggtcctagccatagaaccaggaaaaaatc

SEQ ID NO: 128970 - DNA, 80 bp, synthetic construct
  source 1..80: mol_type = other DNA
ggaccatccgttcccacctccactgaggcacagtcctccgatgacgtagagacggcatctgacgctggttcatacagctc

SEQ ID NO: 128971 - DNA, 80 bp, synthetic construct
  source 1..80: mol_type = other DNA
ttccgcaagcatccgggggctacttacaccaaatgtggctccggtccctggctcacccccagatgcttggtggaatatcc

SEQ ID NO: 128972 - DNA, 80 bp, synthetic construct
  source 1..80: mol_type = other DNA
atgctacctgaaggcgacagctgctatcagggcagcaggcctaaaggactgcaccatgctggtttgcggggatgacctag

SEQ ID NO: 128973 - DNA, 80 bp, synthetic construct
  source 1..80: mol_type = other DNA
agacctggtttctggtgcccctcatcgcgctgtcgctggcctcctttcgggggatcaagatcggctacacggcgcacatc

SEQ ID NO: 128974 - DNA, 80 bp, synthetic construct
  source 1..80: mol_type = other DNA
gagcctggcagtagagcaatgaagatggccgagagagatgctccagaggccttcttgacggtggtggagatgatggtgct

SEQ ID NO: 128975 - DNA, 80 bp, synthetic construct
  source 1..80: mol_type = other DNA
acgggaaaaccgtctatcaatatgctgaaacgcgtgagaaaccgtgtgtcaactggatcacagttggcgaagagattctc

SEQ ID NO: 128976 - DNA, 80 bp, synthetic construct
  source 1..80: mol_type = other DNA
ttttttccatagttcttgatttaggaggtattcctccttatccttccagtactcctccaggggaaacccatttgcatctg

SEQ ID NO: 128977 - DNA, 80 bp, synthetic construct
  source 1..80: mol_type = other DNA
ccccagttcgtctggccgggcccagattggtatggccgtgctctctgagtccaccgtcctccaacgccttggaggaactg

SEQ ID NO: 128978 - DNA, 80 bp, synthetic construct
  source 1..80: mol_type = other DNA
ggcgacggtctgcgctagagcgctggcccctccgccaagttgggacaccatgtggaagtgcttgatccggctcaagccca

SEQ ID NO: 128979 - DNA, 80 bp, synthetic construct
  source 1..80: mol_type = other DNA
cgcacctgtgcacggacagataggcgtgggtttgttgatattgatcaccctcttcacactcaccccggggtataagaccc

SEQ ID NO: 128980 - DNA, 80 bp, synthetic construct
  source 1..80: mol_type = other DNA
gggccctccgttcccacttccactgaggcagagtcctctggcggtgtagagacggcgtctgacgctgatttatacagctc

SEQ ID NO: 128981 - DNA, 80 bp, synthetic construct
  source 1..80: mol_type = other DNA
cgtgtagacagtgtaaataggcgtcttatactcgatgttgattatccatttgatgcccaaagccaactacgcctaaaact

SEQ ID NO: 128982 - DNA, 80 bp, synthetic construct
  source 1..80: mol_type = other DNA
cgagctcgagcggtcagagcaaagctcatcgcccaaggtgggaaagccgctatatgcggcaagtacctctttaactgggc

SEQ ID NO: 128983 - DNA, 80 bp, synthetic construct
  source 1..80: mol_type = other DNA
gtgtcaacgctgtggccttctatcgtggcttggatgtcgcggtgatacctacatcaggagatgtcgtagtatgtgccacc

SEQ ID NO: 128984 - DNA, 80 bp, synthetic construct
  source 1..80: mol_type = other DNA
ggaaggaagggatgtggcagactttctccaatacgcttctggccgcaggagtgccatggacatcttcactggacttggtg

SEQ ID NO: 128985 - DNA, 80 bp, synthetic construct
  source 1..80: mol_type = other DNA
acacaaagggcctctaacaatgcactgaaccacaaccaagctatggacgcaacgcagattaccttggttagagaaagcgg

SEQ ID NO: 128986 - DNA, 80 bp, synthetic construct
  source 1..80: mol_type = other DNA
gacagagcaatacaaatttcaagcagactcccctaaaagactggcgacagccatcgcaggcgcttgggaaaatggagtct

SEQ ID NO: 128987 - DNA, 80 bp, synthetic construct
  source 1..80: mol_type = other DNA
ttgaaactcaattggtttaagaagggaagttccatcggccaaatgttcgagacaacaatgagaggagcaaagagaatggc

SEQ ID NO: 128988 - DNA, 80 bp, synthetic construct
  source 1..80: mol_type = other DNA
aaaaagcagctggaaaggagctagtgattgttcccattgagaaagatgaaagcaacagaagctacaacctgatcaaggat

SEQ ID NO: 128989 - DNA, 80 bp, synthetic construct
  source 1..80: mol_type = other DNA
agcgcgacatccgtactgaggaatctatttaccaatgctgccaactggacccgcaggcgcggaaggccataagctcattg

SEQ ID NO: 128990 - DNA, 80 bp, synthetic construct
  source 1..80: mol_type = other DNA
gtctaccacggagcgggtgccagaaacctcgctggccccaagggccccatcatccagatgtacaccaatgtggacctaga

SEQ ID NO: 128991 - DNA, 80 bp, synthetic construct
  source 1..80: mol_type = other DNA
gatagaggaagtcacgagaatggcaatgacagacacaactccttttggacaacaaagagtgttcaaggaaaaagttgaca

SEQ ID NO: 128992 - DNA, 80 bp, synthetic construct
  source 1..80: mol_type = other DNA
tagacacctacgttaacattggcgcgcgctggtctcctgacgtaatggataacataaacccttttaaccaccaccgaaac

SEQ ID NO: 128993 - DNA, 80 bp, synthetic construct
  source 1..80: mol_type = other DNA
ccaaatggtaagtctcacgtacttacagggagatacatctaaacctataacaatgaaagttgcatttaatggcattacgt

SEQ ID NO: 128994 - DNA, 80 bp, synthetic construct
  source 1..80: mol_type = other DNA
ccgccgtcagcaagtgcctccgcaatacagtttgaatgcagaagaagagcgcatactgcgctacattcagcaatcagtga

SEQ ID NO: 128995 - DNA, 80 bp, synthetic construct
  source 1..80: mol_type = other DNA
ggtgtttgactcgtttgagtccctccatcccgagtcaaacgaggaaatctctcctgctgcagaggctctccgacgctcca

SEQ ID NO: 128996 - DNA, 80 bp, synthetic construct
  source 1..80: mol_type = other DNA
tctcaaaccgactttaactggccccactcccctcctgtacaggctgggggccgttcagaatgagatcacactgacacacc

SEQ ID NO: 128997 - DNA, 80 bp, synthetic construct
  source 1..80: mol_type = other DNA
agccgaccctcacaggtcctacccccctcctatatcgtctgggggctgtccaaaatgagatagtaacaacacatccaatc

SEQ ID NO: 128998 - DNA, 80 bp, synthetic construct
  source 1..80: mol_type = other DNA
gacacagcttgggacttcggttcaattggtggggtcttcaactccttgggtaaagccatgcaccaggtctttggaggagc

SEQ ID NO: 128999 - DNA, 80 bp, synthetic construct
  source 1..80: mol_type = other DNA
gcactggaaagttcaaagtagtgaaggagatcgcagagactcagcatggaacaatagtaattagagtacagtatgaagga

SEQ ID NO: 129000 - DNA, 80 bp, synthetic construct
  source 1..80: mol_type = other DNA
tcctgagactgaggaatgcccaacggccaaccgagcatggaacagtatggaggtagaagactttggatttggattgacaa

SEQ ID NO: 129001 - DNA, 80 bp, synthetic construct
  source 1..80: mol_type = other DNA
cctccatgggtattctccaggcgagctcaacagggtagcagcatgcctcaggaagcttggggcgcccccgttaagagctt

SEQ ID NO: 129002 - DNA, 80 bp, synthetic construct
  source 1..80: mol_type = other DNA
cctcccttgtggaccggggaccgtctggtcttcgattcgcccgtacagcggctgtttcccgagatcgtcgcgtgtcactc

SEQ ID NO: 129003 - DNA, 80 bp, synthetic construct
  source 1..80: mol_type = other DNA
gaccagacggggaacgtggcggacctgctgcgggccgcggcccccgcgtggagccgccgcaccctgctccccgagcacgc

SEQ ID NO: 129004 - DNA, 80 bp, synthetic construct
  source 1..80: mol_type = other DNA
aagcggcatccctcggagctgttggtctcttggtgctcaccatctttaccatcacccccatgtacaagaagctgttgacc

SEQ ID NO: 129005 - DNA, 80 bp, synthetic construct
  source 1..80: mol_type = other DNA
gcggcctactgccttacggtgggtagcgttgtcatttgtggcaggatcgtaacctcaggtaagcccgcagtgatgcctga

SEQ ID NO: 129006 - DNA, 80 bp, synthetic construct
  source 1..80: mol_type = other DNA
agatgagtcctctcctgttttcaacaactgagctcgcaatcttgccctgctctttcaccaccatgcccgcgctgtcaacg

SEQ ID NO: 129007 - DNA, 80 bp, synthetic construct
  source 1..80: mol_type = other DNA
tgtcaccgcaacaaccagggccaagagacgtcgatctcgtactccagcggggcgatcgccgcattcgtcgccccctactt

SEQ ID NO: 129008 - DNA, 80 bp, synthetic construct
  source 1..80: mol_type = other DNA
ataagtttggaaacatccgcgccccttacagtcacctcaggcgccctaaccatggccacagcttcgcctttggtggtctc

SEQ ID NO: 129009 - DNA, 80 bp, synthetic construct
  source 1..80: mol_type = other DNA
ccaaccagggttgtggctgctgagatggctgaagcactgagaggactgcccatccggtaccagacatccgcagtgcccag

SEQ ID NO: 129010 - DNA, 80 bp, synthetic construct
  source 1..80: mol_type = other DNA
agaggatggccagctgccgaccccttaccgactttgcccagggctggggccctatcagttatgccaacgtaagcggcccc

SEQ ID NO: 129011 - DNA, 80 bp, synthetic construct
  source 1..80: mol_type = other DNA
atggtggcgagggcccactggggagtcctagcgggccttgcctactattccatggtggcgaactgggctaaggtcttggt

SEQ ID NO: 129012 - DNA, 80 bp, synthetic construct
  source 1..80: mol_type = other DNA
aattacagatggaaatggtgctttgcaaaacggatgggcaaaagatgatgcaatctcgagacaaaaccaaatctgcaagg

SEQ ID NO: 129013 - DNA, 80 bp, synthetic construct
  source 1..80: mol_type = other DNA
catgccaagagcttctacaacgagcaggccgtttactcgcaactcattcgccagtccaccgcgcttacccacgtgttcaa

SEQ ID NO: 129014 - DNA, 80 bp, synthetic construct
  source 1..80: mol_type = other DNA
cgacaggttaaagaggatggcaattagtggagacgattgcgtggtgaaacccctagatgagaggtttggcacctccctcc

SEQ ID NO: 129015 - DNA, 80 bp, synthetic construct
  source 1..80: mol_type = other DNA
tgatgggcaggccgtactccagcaccttcatgaggttaccgaactcgtgctcgacgcaccgtttgttgttaataaaaata

SEQ ID NO: 129016 - DNA, 80 bp, synthetic construct
  source 1..80: mol_type = other DNA
agcggcaacaaaattacatggattaatttgtttaaggtcctccgcaattaatcgagcctcgtgcggtaaagtgtaacggt

SEQ ID NO: 129017 - DNA, 80 bp, synthetic construct
  source 1..80: mol_type = other DNA
atggatttgacaccggttggaagactggtcacggtcaatccttttataagcacagggggagcgaacaacaaggtcatgat

SEQ ID NO: 129018 - DNA, 80 bp, synthetic construct
  source 1..80: mol_type = other DNA
tccagccgtcgaatctattcgcacggctacggagatgtacatggaaacggatgggttgtggccagtaaccggtattcagg

SEQ ID NO: 129019 - DNA, 80 bp, synthetic construct
  source 1..80: mol_type = other DNA
gccgctagctccaacggcttgctgtactttctcttgttcttcatggcggcctggtacatcaaaggccgggtggttcccct

SEQ ID NO: 129020 - DNA, 80 bp, synthetic construct
  source 1..80: mol_type = other DNA
atggcggctgatctagaggtgatcactagcgcttgggtggtcgctggtggaatactcgcagcactagctgcctactgtct

SEQ ID NO: 129021 - DNA, 80 bp, synthetic construct
  source 1..80: mol_type = other DNA
cctaccagagttgttgcagccgagatggccgaggctttgcgaggattgccgatccggtaccaaacctcagcggtgactag

SEQ ID NO: 129022 - DNA, 80 bp, synthetic construct
  source 1..80: mol_type = other DNA
cccactaacccagctccctatttaaaggcaccttacactgacgtaatgaccaaaggtctaaaaaccccgccaaaaaaaac

SEQ ID NO: 129023 - DNA, 80 bp, synthetic construct
  source 1..80: mol_type = other DNA
gagcgcatgcacgataccgacccccccggctccagatcggtcgcgaactggttccgaacaccggtgaccacgatatcgcg

SEQ ID NO: 129024 - DNA, 80 bp, synthetic construct
  source 1..80: mol_type = other DNA
tgcggcggcgttttgttgacctgtttaatggggggtttatatcaacacgctctataaccgtaacattatctgaaggtcct

SEQ ID NO: 129025 - DNA, 80 bp, synthetic construct
  source 1..80: mol_type = other DNA
acggctgaggtaggtggaagggcgtacaatcatgctctcagtgaactgccggagaccctggagacactgcttttactgac

SEQ ID NO: 129026 - DNA, 80 bp, synthetic construct
  source 1..80: mol_type = other DNA
tggcctagacttgagcagttttggcagaaacacctgtggaactttgtcagcgggattcaatacttggcaggcctatcaac

SEQ ID NO: 129027 - DNA, 80 bp, synthetic construct
  source 1..80: mol_type = other DNA
cgcaggccacatcaccggccacaggatggcctgggatatgatgatgaattggagccctaccgccacattggttcttgccc

SEQ ID NO: 129028 - DNA, 80 bp, synthetic construct
  source 1..80: mol_type = other DNA
tgggtgcggccggcgcgtagagcgcactccccgaccaacagggtcgcgatgagctcaacggcaaaccactccttttcctt

SEQ ID NO: 129029 - DNA, 80 bp, synthetic construct
  source 1..80: mol_type = other DNA
cgtggcctctggcgacagcccgccgtcgtcggggtagggcgacgcgccgggcgcaggaacaaaggccgcgtcgctgtcca

SEQ ID NO: 129030 - DNA, 80 bp, synthetic construct
  source 1..80: mol_type = other DNA
acataattatgtttgcccccacgttgtgggcgagaatgatactgatgacccacttcttcagtgtcctcttagccagggat

SEQ ID NO: 129031 - DNA, 80 bp, synthetic construct
  source 1..80: mol_type = other DNA
ttctcaggggtcgatgccaccacatataccaccggtggcagtgtggctcgtggtgcccaagggttagctaggctcttcca

SEQ ID NO: 129032 - DNA, 80 bp, synthetic construct
  source 1..80: mol_type = other DNA
cccgtgagaggagcgggagacggcggcgtcctggagagaggggccgctggcgcgcccggaggccccgtggaggttggagt

SEQ ID NO: 129033 - DNA, 80 bp, synthetic construct
  source 1..80: mol_type = other DNA
tccaggaggacgcggccaatctgagagttttcacggaagctatgaccagatactcggccccccctggcgatctgcctcaa

SEQ ID NO: 129034 - DNA, 80 bp, synthetic construct
  source 1..80: mol_type = other DNA
ccgtcgtttggtccgcgcccaggctttggcgcgaacttacgctgcatgttctcgtaacattgaatgtttaaaacagcacc

SEQ ID NO: 129035 - DNA, 80 bp, synthetic construct
  source 1..80: mol_type = other DNA
tcttccttctggcacttctctcgtgcctgactgtcccggcatcggctgaacactaccggaacgtttcgggcatataccat

SEQ ID NO: 129036 - DNA, 80 bp, synthetic construct
  source 1..80: mol_type = other DNA
gactaacgcctcccaagcagtgactgctatacttagctctctcaccataaccagccttctgcgcaaattgcatgagtgga

SEQ ID NO: 129037 - DNA, 80 bp, synthetic construct
  source 1..80: mol_type = other DNA
gccggaccaaaaggttccctccagccatcccggtttgggcacgtccggactacaaccctccgcttctagagacctggaag

SEQ ID NO: 129038 - DNA, 80 bp, synthetic construct
  source 1..80: mol_type = other DNA
aagcctttgctacgagatgaggtgtcgttcagagtaggactgtacgactacccggtggggtcgcaattaccttgcgagcc

SEQ ID NO: 129039 - DNA, 80 bp, synthetic construct
  source 1..80: mol_type = other DNA
ggcaattcggcgtcacgtcgacttgcttgttggggcggctacactctgctctgctatgtatgtggaggacctctgtgggt

SEQ ID NO: 129040 - DNA, 80 bp, synthetic construct
  source 1..80: mol_type = other DNA
cggaccatcagatgttgtcgtgtcttcgcaccgactacgaatccagcgatgaggattaagggtaaggggcggagcttatt

SEQ ID NO: 129041 - DNA, 80 bp, synthetic construct
  source 1..80: mol_type = other DNA
gcctcactgtaccagcttctgcttacgaggtacggaacacaagcggactctacatcgtgtccaacgattgctccaaccag

SEQ ID NO: 129042 - DNA, 80 bp, synthetic construct
  source 1..80: mol_type = other DNA
ccggtggctccgcagctcgcgctgctagcgggtttgcgagcctgttcgttatgggcccgaagcagaaactgcacttggtg

SEQ ID NO: 129043 - DNA, 80 bp, synthetic construct
  source 1..80: mol_type = other DNA
atgtgcgcacactaatagcgcgagaagaagtggcaattggtttaatgcatctgtgggactttgtagaagcttatgtacat

SEQ ID NO: 129044 - DNA, 80 bp, synthetic construct
  source 1..80: mol_type = other DNA
cgtgggccaaagtcattgccatcctccttcttgttgcgggagtggatgcaaccacctattccagcggccaggaagcgggt

SEQ ID NO: 129045 - DNA, 80 bp, synthetic construct
  source 1..80: mol_type = other DNA
gtcctaggctgtgcccttccccccacacctcaagcgccggtgcccccaccccggaggcgcagcgccaaagtcctcactca

SEQ ID NO: 129046 - DNA, 80 bp, synthetic construct
  source 1..80: mol_type = other DNA
acccatgaaatgtattgggtttcatgtggaacgggaaacattgtgtcggcagtgaacatgacatccagaatgttactgaa

SEQ ID NO: 129047 - DNA, 80 bp, synthetic construct
  source 1..80: mol_type = other DNA
acgaggatcactggatggggagagagaactcaggaggtggtgttgaagggctgggattacaaagactcggatatgtccta

SEQ ID NO: 129048 - DNA, 80 bp, synthetic construct
  source 1..80: mol_type = other DNA
tccaggtggcccacctgcatgcccccaccggcagcggcaagagcactaaggttccagctgcgtatgccagtcagggctac

SEQ ID NO: 129049 - DNA, 80 bp, synthetic construct
  source 1..80: mol_type = other DNA
tgccgacaaaacataccagccagaacctcaagtaggcgaaagtcaatggaacgcttcagtatctaacaatgcaaaagcag

SEQ ID NO: 129050 - DNA, 80 bp, synthetic construct
  source 1..80: mol_type = other DNA
ctgcaggtggtagacaaccattacaatgatgtactcaaggagatcaaagcacgagcatccagagtgaaggcacgcttgct

SEQ ID NO: 129051 - DNA, 80 bp, synthetic construct
  source 1..80: mol_type = other DNA
gctgcgtggttcattaagggcagatatgtgccgtcgaccatctacggcatttgtggggcttggccgttcctactaatagt

SEQ ID NO: 129052 - DNA, 80 bp, synthetic construct
  source 1..80: mol_type = other DNA
cggctccacgggcggatttctgagctcaatcggaaaggcggtgcacactgtcctcggaggcgcattcaacagcgtcttcg

SEQ ID NO: 129053 - DNA, 80 bp, synthetic construct
  source 1..80: mol_type = other DNA
tcaatagcactgccctgaattgcaacgattccctacacaccgggttcatagcaggactcttgtacaggtatcagttcaac

SEQ ID NO: 129054 - DNA, 80 bp, synthetic construct
  source 1..80: mol_type = other DNA
ctgctcggaccgtgtgtggcccagtgtattgtttcacccccagtccagtcgtggtgggcaccaccgacaaatacgggacg

SEQ ID NO: 129055 - DNA, 80 bp, synthetic construct
  source 1..80: mol_type = other DNA
gcgctcacgtgctcttacgcgcttgcttgttagtgcggcgcatggctgggggaaagtatgttcaagcagcactcttgaaa

SEQ ID NO: 129056 - DNA, 80 bp, synthetic construct
  source 1..80: mol_type = other DNA
ttcagcttggaccctacattctccatagagaccaccaccgtgccccaggacgcggtgtctcggagccagcggcggggcag

SEQ ID NO: 129057 - DNA, 80 bp, synthetic construct
  source 1..80: mol_type = other DNA
cggccaggcgtaggttggccaggggatctcccccttccttggccagctcttcagctagtcagttgtctgcgccttccttg

SEQ ID NO: 129058 - DNA, 80 bp, synthetic construct
  source 1..80: mol_type = other DNA
tgatccatattggagggacgtcaagcaggacttggtgtcatattgtgggccttggaagttggatgcagcctgggatggac

SEQ ID NO: 129059 - DNA, 80 bp, synthetic construct
  source 1..80: mol_type = other DNA
gggtaccaacaactagttacaaaataattgaaccaaatggagagggtgcagattggaaagagcctgacataaatggaaca

SEQ ID NO: 129060 - DNA, 80 bp, synthetic construct
  source 1..80: mol_type = other DNA
gaaatgataattccaaagatctatggaggaccaatatctcagcacaactacagaccaggatatttcacacaaacggcagg

SEQ ID NO: 129061 - DNA, 80 bp, synthetic construct
  source 1..80: mol_type = other DNA
agtgggttgccaaagaaaatggtcagggaactgataagacacatacttatggctcagccgccatgggaggaagcaacatc

SEQ ID NO: 129062 - DNA, 80 bp, synthetic construct
  source 1..80: mol_type = other DNA
gttcctcggtggacattgaaatggattctcttgcgtaccttgtcgtacttctgccagcagaaagtggctcgggaacagca

SEQ ID NO: 129063 - DNA, 80 bp, synthetic construct
  source 1..80: mol_type = other DNA
caatgagatcttgctaggcccagctgacgcggagacggagaagggatggaggctccttgcccccatcactgcgtacgcgc

SEQ ID NO: 129064 - DNA, 80 bp, synthetic construct
  source 1..80: mol_type = other DNA
aaatggagtcgctctggggctcatggctcttaaactgataacacaatttgaaacataccaattgtggacggcattagtct

SEQ ID NO: 129065 - DNA, 80 bp, synthetic construct
  source 1..80: mol_type = other DNA
tcaagcccacactgcacggacccacccccctcctttacaggttgggggcggtacagaatgaagtgacactcactcatcct

SEQ ID NO: 129066 - DNA, 80 bp, synthetic construct
  source 1..80: mol_type = other DNA
ccagtggatgaaccggttgatagcgtttgcctcccggggcaaccacgtgtcgcccacgcactatgtgcccgagagcgacg

SEQ ID NO: 129067 - DNA, 80 bp, synthetic construct
  source 1..80: mol_type = other DNA
gtgggtctggccgtacacgtcgagccagatgagcgccgtctcgcgcaggaggctgggctggccggcgctgaagcggcgct

SEQ ID NO: 129068 - DNA, 80 bp, synthetic construct
  source 1..80: mol_type = other DNA
cagtggagaacctggtgtacctgaatgctgtcagccttgcaggcacgcacggcatctggtggcttctcctggttttctgc

SEQ ID NO: 129069 - DNA, 80 bp, synthetic construct
  source 1..80: mol_type = other DNA
caccaatcgcgctaggcaacggcagcaggaacaaaaacacaaagagcttcttgatttgcaaaccgtacaccagtgtaaaa

SEQ ID NO: 129070 - DNA, 80 bp, synthetic construct
  source 1..80: mol_type = other DNA
tatcactgcagaagctgcggcccggcgcctcgaacgggggtcccccccctcgttagcgagttcgtcggccagtcagctgt

SEQ ID NO: 129071 - DNA, 80 bp, synthetic construct
  source 1..80: mol_type = other DNA
cctgggataccatgtggaaatgcctaatccggctcaaacctacactcacaggtcccacgcctctgctttatcgtctgggt

SEQ ID NO: 129072 - DNA, 80 bp, synthetic construct
  source 1..80: mol_type = other DNA
gaaattaacttacaggcaaatttgtggagaagttttctgtattcaaatgtggggctgtacctgcctgacgacttgaaata

SEQ ID NO: 129073 - DNA, 80 bp, synthetic construct
  source 1..80: mol_type = other DNA
cctgcgccaacgacggtattgaaatacccaacaaccttaccagtggactaacttacactaccagaaagactaagctagta

SEQ ID NO: 129074 - DNA, 80 bp, synthetic construct
  source 1..80: mol_type = other DNA
caacacggacgccgcaccggatgggacgtcgtaaggtggcctggggtagctgggtgcggtttgtgcagagcaatcaggga

SEQ ID NO: 129075 - DNA, 80 bp, synthetic construct
  source 1..80: mol_type = other DNA
aatgactgacaccacaccttttggacaacaaagagttttcaaggagaaagtagacacaagagcaaaagaccctcctgctg

SEQ ID NO: 129076 - DNA, 80 bp, synthetic construct
  source 1..80: mol_type = other DNA
ctgttctcttgcttaatccatccagcagccagtttagagtggaggaacacgtctggtctctatgtcctcactaacgactg

SEQ ID NO: 129077 - DNA, 80 bp, synthetic construct
  source 1..80: mol_type = other DNA
aagtatcctcctgcccttcctatctgggctagacccgactataacccgccattgatagagaactggaaggacccgggcta

SEQ ID NO: 129078 - DNA, 80 bp, synthetic construct
  source 1..80: mol_type = other DNA
gcttggccgaaactcgaacaattctggcagaagcacttgtggaatttcgtgagtggcatacaatacctagccggtctatc

SEQ ID NO: 129079 - DNA, 80 bp, synthetic construct
  source 1..80: mol_type = other DNA
acctgggcaaggccagattacaatccaccagtcatagaaacctggaagagaccagactatgacccaccaacggtgtctgg

SEQ ID NO: 129080 - DNA, 80 bp, synthetic construct
  source 1..80: mol_type = other DNA
tgaagatctggaaggtgctgaggtacgatgagacccgcaccaggtgcagaccctgcgagtgtggcggtaaacatattagg

SEQ ID NO: 129081 - DNA, 80 bp, synthetic construct
  source 1..80: mol_type = other DNA
gtatgaccatctcgctcccctgtctgactgggccgctagcggccttaaggatctaacagtggcagtagagccagtcatct

SEQ ID NO: 129082 - DNA, 80 bp, synthetic construct
  source 1..80: mol_type = other DNA
tgcgggggggatggaaccattccaacttggcctcctggtagcattcatagccacccaagaagtgctgaaacgcagatgga

SEQ ID NO: 129083 - DNA, 80 bp, synthetic construct
  source 1..80: mol_type = other DNA
tacccagaaatttgggcgtgcccccgcgagatcactagccgagtagtgttgggtcgcgaaaggccttgtggtactgcctg

SEQ ID NO: 129084 - DNA, 80 bp, synthetic construct
  source 1..80: mol_type = other DNA
ctcgcggctctcggccatcctggggcccaactgatccccggcggagatcgcgcaatctgggtaaagtcatcgataccctg

SEQ ID NO: 129085 - DNA, 80 bp, synthetic construct
  source 1..80: mol_type = other DNA
acaaatgtattgcttgaacctgaggtgttttctagaataagtttaaatggggtgtttgacctgtctgtggaattgtataa

SEQ ID NO: 129086 - DNA, 80 bp, synthetic construct
  source 1..80: mol_type = other DNA
gaaaggaacgacatatggagtgtgctctaaagccttcaaattcgttggcagtcctgctgacacaggacatggaacagtgg

SEQ ID NO: 129087 - DNA, 80 bp, synthetic construct
  source 1..80: mol_type = other DNA
ttcatccgggagaccgcacggccgtgattcaagtgtaaacaggtgttaataaaaacacaaccagtctagttacatttcac

SEQ ID NO: 129088 - DNA, 80 bp, synthetic construct
  source 1..80: mol_type = other DNA
gatataggcattggtaacattgccgctatggaaattaacttgcaggccaatttatggagaagttttctgtattcaaatgt

SEQ ID NO: 129089 - DNA, 80 bp, synthetic construct
  source 1..80: mol_type = other DNA
agacggtcatctcctgtcccagaccaaacaggcaggtgacaactacccttacctggttgcctaccaggcaacagtctgtg

SEQ ID NO: 129090 - DNA, 80 bp, synthetic construct
  source 1..80: mol_type = other DNA
cactttgttgtttgcctttgatgcagctcccccgcgcaggtgcgccggggatgggggggggggaaagtgaggagaaggag

SEQ ID NO: 129091 - DNA, 80 bp, synthetic construct
  source 1..80: mol_type = other DNA
ggacatttctgttgtcgtgcaggatccaaagaatgtttaccagagaggaactcatccattttccagaattcgggatggtc

SEQ ID NO: 129092 - DNA, 80 bp, synthetic construct
  source 1..80: mol_type = other DNA
ctagtggaggaggagatggaagaagaatgggacagccaggcagaggaggacgactgggaggaggaggagagtacagagga

SEQ ID NO: 129093 - DNA, 80 bp, synthetic construct
  source 1..80: mol_type = other DNA
tcaccaacgactgttccaatgggagcatcgtgtatgaggtgccaggcatgatcatgcatctccccgggtgcgtgccctgc

SEQ ID NO: 129094 - DNA, 80 bp, synthetic construct
  source 1..80: mol_type = other DNA
agcggcggtgttgatgttagtggctcattatgccataattggaccaggactgcaagcaaaggctactagagaagctcaaa

SEQ ID NO: 129095 - DNA, 80 bp, synthetic construct
  source 1..80: mol_type = other DNA
gggtccggctgacagctttaccagcaaaggctggcggcttctggcgccaataacagcatacgcgcagcagacgcggggcc

SEQ ID NO: 129096 - DNA, 80 bp, synthetic construct
  source 1..80: mol_type = other DNA
acgaaacagcagatgcaatcctgcacacgccggggtgcgtcccctgcgtcatggagggtaacacctcgagatgttgggta

SEQ ID NO: 129097 - DNA, 80 bp, synthetic construct
  source 1..80: mol_type = other DNA
tgatgacagtgaatgccactgaggtggcagatgtcatttccattcccatcgcctctgggaagaaccaatgcacagtaaga

SEQ ID NO: 129098 - DNA, 80 bp, synthetic construct
  source 1..80: mol_type = other DNA
tcctgcgggactggctcgccatgcgaaagcagatccgctcgcggattccccagagcagccccgaggaggccgtgttcctg

SEQ ID NO: 129099 - DNA, 80 bp, synthetic construct
  source 1..80: mol_type = other DNA
gattaaggcgaaggcatccacagtgaaggtcaatatgctatccgtagaggaagcctgcgacctgacgcccccccattctg

SEQ ID NO: 129100 - DNA, 80 bp, synthetic construct
  source 1..80: mol_type = other DNA
ctaccagtgcggctgtaacaagtacatccagggcacaatagtttaatgtttccttaataaggttgtaatttttttctttc

SEQ ID NO: 129101 - DNA, 80 bp, synthetic construct
  source 1..80: mol_type = other DNA
tgctagggtgttggaatcagatgaccctgccaagtttggccgttgcagtgatgcttttggctatccactatgcattcatg

SEQ ID NO: 129102 - DNA, 80 bp, synthetic construct
  source 1..80: mol_type = other DNA
ggggtcaggctgcacagatatgcacctacgtgccggccactcctccgcgatgaagtgacattctcagtaggactcaatag

SEQ ID NO: 129103 - DNA, 80 bp, synthetic construct
  source 1..80: mol_type = other DNA
ccatgcactcctcgggaaggtctcccccgaggtaggtcacgacgtacgagaccagcgagtagtcgttcacgaacgccgcg

SEQ ID NO: 129104 - DNA, 80 bp, synthetic construct
  source 1..80: mol_type = other DNA
aagggtataaggtacttgtcctgaacccgtccgtcgccgccactttgggtttcggggcgtatatgtctaaagcacatggt

SEQ ID NO: 129105 - DNA, 80 bp, synthetic construct
  source 1..80: mol_type = other DNA
acaggatgtgctcttgacattgggagaagagaattgcggtgcggcagtggtgtgttcgtgcacaatgatgtcgaagcttg

SEQ ID NO: 129106 - DNA, 80 bp, synthetic construct
  source 1..80: mol_type = other DNA
ggtaggggcaggtgaggcatctacaggtttgtgactccaggggaacggccctcgggcatgtttgactcctcggtcctgtg

SEQ ID NO: 129107 - DNA, 80 bp, synthetic construct
  source 1..80: mol_type = other DNA
agaaggtgtaaaaaatctgggaggccacaaaccatggaagctgtacgcatggcgtagtggactagcggttagaggagacc

SEQ ID NO: 129108 - DNA, 80 bp, synthetic construct
  source 1..80: mol_type = other DNA
cgttgaggagagtgggtgcgaggacccccgggtccgcctgccgcgcgggtgtggcagcggagtcctcgggacccgatccg

SEQ ID NO: 129109 - DNA, 80 bp, synthetic construct
  source 1..80: mol_type = other DNA
ctggagcgcactggggcgtgatgttcggcctagcctacttctccatgcaaggggcgtgggccaaggtcgtcgtcatcctc

SEQ ID NO: 129110 - DNA, 80 bp, synthetic construct
  source 1..80: mol_type = other DNA
gtacttcatagctcgtactgaggctatgctgcacgtctgggtcccccctctccgagtacgtgggggccgtgatgctgtca

SEQ ID NO: 129111 - DNA, 80 bp, synthetic construct
  source 1..80: mol_type = other DNA
gtgggatttttatcacagacaacgtgcacacatggacagaacaatacaaattccaaccagaatccccctcaaagctggct

SEQ ID NO: 129112 - DNA, 80 bp, synthetic construct
  source 1..80: mol_type = other DNA
tgcccatcaggccacgccgtaggcttgtttagggctgccgtgtgcacgcggggtgtggcgaaagcgcttgatttcatccc

SEQ ID NO: 129113 - DNA, 80 bp, synthetic construct
  source 1..80: mol_type = other DNA
caatcctgcggttacaggcgttgccgcgcaagcggtgtcttcactaccagcatggggaacaccatgacatgctacattaa

SEQ ID NO: 129114 - DNA, 80 bp, synthetic construct
  source 1..80: mol_type = other DNA
ccgcgcccgctatgcttccactgcaacaagttgttgccggcggctttgtcccagccaatcagcctcgcccaccttctccc

SEQ ID NO: 129115 - DNA, 80 bp, synthetic construct
  source 1..80: mol_type = other DNA
acgccttgatgactggctacaccggcgacttcgactccgtaattgactgtaatgtggctgtcacacaaacagtggacttc

SEQ ID NO: 129116 - DNA, 80 bp, synthetic construct
  source 1..80: mol_type = other DNA
agagcgtatttcaacacgcccggcctacccgtgtgtcaagaccatcttgaattttgggaggcagttttcaccggcctcac

SEQ ID NO: 129117 - DNA, 80 bp, synthetic construct
  source 1..80: mol_type = other DNA
atgtatgtggctggcggtgagcataggttcatggctgcctgcaactggaccaggggagagcggtgcaatttggaagaccg

SEQ ID NO: 129118 - DNA, 80 bp, synthetic construct
  source 1..80: mol_type = other DNA
gccactcttactgctgctgttggcgttgcccccccgggccctcgcctatgacggcactgaagctgcatcaataggcctcg

SEQ ID NO: 129119 - DNA, 80 bp, synthetic construct
  source 1..80: mol_type = other DNA
gactctcaaacaccaattccaactacaatcatggcaaagaatgaggtgttttgcgtggatccatcaaaagggggccgcaa

SEQ ID NO: 129120 - DNA, 80 bp, synthetic construct
  source 1..80: mol_type = other DNA
gcaactactccgagaccatgaccatagaccttatgaacaacgcgatcgtggagcactacttgaaagtgggcaggcagaac

SEQ ID NO: 129121 - DNA, 80 bp, synthetic construct
  source 1..80: mol_type = other DNA
cagtagacaaagagcacagcagtacaagcgccaacagcagtaactaactacttactgacctagctgagtacttaaaggca

SEQ ID NO: 129122 - DNA, 80 bp, synthetic construct
  source 1..80: mol_type = other DNA
accgcctgcggtaccacagacctatcaggtcggatacctccatgccccaacaggtagtgggaagagtaccaaagtgccag

SEQ ID NO: 129123 - DNA, 80 bp, synthetic construct
  source 1..80: mol_type = other DNA
cagtttgatgagatggaagagtgctccaaccatatcccgctagtcgagcatggcctgcacctcgcggagcaattcaaaca

SEQ ID NO: 129124 - DNA, 80 bp, synthetic construct
  source 1..80: mol_type = other DNA
tttgctagttacgcattatgccattataggtccaggactgcaggcaaaagccactcgtgaagctcaaaaaaggacagctg

SEQ ID NO: 129125 - DNA, 80 bp, synthetic construct
  source 1..80: mol_type = other DNA
cagtggactgctaaagaaaatcaaaaagatgttacaaaaacatttggtgtagctccaatgggaggaattaatatatcaaa

SEQ ID NO: 129126 - DNA, 80 bp, synthetic construct
  source 1..80: mol_type = other DNA
cccgaggggctcagcgtctgcccagattccagacgcgcggtcagaagggcgtcgaaactgtcatactctgtgtagtcgtc

SEQ ID NO: 129127 - DNA, 80 bp, synthetic construct
  source 1..80: mol_type = other DNA
ctaagattcaaggcctcctacaacaggccacaagacaggcccaagacatacagccagccatacagtcatcctggcccaag

SEQ ID NO: 129128 - DNA, 80 bp, synthetic construct
  source 1..80: mol_type = other DNA
tccttgaaaggattctctcagaatcctttcaggattctgaggagaatcttttcaggattctgaggagaatcctgaaagga

SEQ ID NO: 129129 - DNA, 80 bp, synthetic construct
  source 1..80: mol_type = other DNA
taagtcccttgagcaactcactattacgccaccacaacatggtgtatgccacgacttcccgttctgccgtcactcggcag

SEQ ID NO: 129130 - DNA, 80 bp, synthetic construct
  source 1..80: mol_type = other DNA
actttgttagtcagagcattttgcaaaactttcgctcttttatcctcgagcgatccggtatcttaccggctatgagctgc

SEQ ID NO: 129131 - DNA, 80 bp, synthetic construct
  source 1..80: mol_type = other DNA
ccaactcggccgcctgtggactattctgctgcatgtttctccacgcctttgccaactggccccaaactcccatggatcac

SEQ ID NO: 129132 - DNA, 80 bp, synthetic construct
  source 1..80: mol_type = other DNA
cgctaaattgcgatgatagcctcaacacaggtttcataacagcgctgttctatcagaaagggctcaacactacagggtgt

SEQ ID NO: 129133 - DNA, 80 bp, synthetic construct
  source 1..80: mol_type = other DNA
cgacgcgctttgcgcaggcgaataaaaggcggatttttgcccgcgttgattcccatcatcgccgccgccataggcgcaat

SEQ ID NO: 129134 - DNA, 80 bp, synthetic construct
  source 1..80: mol_type = other DNA
gagttcccacgtacaactggggggtgaatgagacagatgtgttcgtcctcaactcgaccaggcctcccagcggagcttgg

SEQ ID NO: 129135 - DNA, 80 bp, synthetic construct
  source 1..80: mol_type = other DNA
cggtatccctgaataccatcgccgcgttcaactttaatttttcggccccgggcatgctcatatgcctgaccgtgctgttc

SEQ ID NO: 129136 - DNA, 80 bp, synthetic construct
  source 1..80: mol_type = other DNA
gtgcaggtgggcggacgtgccgggaaagatgacgtacagcatgtggcccccgtaagtgtggtccgggtaaaacaacagcc

SEQ ID NO: 129137 - DNA, 80 bp, synthetic construct
  source 1..80: mol_type = other DNA
gctcctcatgaccaaacctccaacgacggcgacacaggatccgacgttgagtcgtactcctccatgcccccccttgaggg

SEQ ID NO: 129138 - DNA, 80 bp, synthetic construct
  source 1..80: mol_type = other DNA
gtggttctcgtcctacttggggccccaacgacccccggcgtaggtcccgcaacttgggtaaggtcatcgataccctaaca

SEQ ID NO: 129139 - DNA, 80 bp, synthetic construct
  source 1..80: mol_type = other DNA
ctctctgtgctttaggtgatatatttaaaatgtaagccagtatcaataaacttaccttaaatttgacagcaattttttgg

SEQ ID NO: 129140 - DNA, 80 bp, synthetic construct
  source 1..80: mol_type = other DNA
gggcccacacctgggtgagttgtcccttggagtgcactgactagagtgtagagaaaaccactcgcacaacttcaaacagc

SEQ ID NO: 129141 - DNA, 80 bp, synthetic construct
  source 1..80: mol_type = other DNA
ccggggtggccgagcgggtgttcgacacgtggcggaacacgcttaggacgacgctgctggactttgcccacgggttggtc

SEQ ID NO: 129142 - DNA, 80 bp, synthetic construct
  source 1..80: mol_type = other DNA
ttcaacgtaagcggcccatctgaggaaaggccctactgctggcattacccgccgaggccctgtgaggttgtcccagcgga

SEQ ID NO: 129143 - DNA, 80 bp, synthetic construct
  source 1..80: mol_type = other DNA
atccagtaggaaccagcacactcactctgaggtgaagcaatatcaccccatgcggaggaatgtggaaagattcggggcaa

SEQ ID NO: 129144 - DNA, 80 bp, synthetic construct
  source 1..80: mol_type = other DNA
ttgcatggccgttaaaataccatgacgaaatgctcgcatgccggcatgtaaaatacccaatgggatgggttttcttatat

SEQ ID NO: 129145 - DNA, 80 bp, synthetic construct
  source 1..80: mol_type = other DNA
aatgaggtcaccctcacacaccccataaccaaatacatcatggcatgcatgtcggccgacctggaagtcgtcaccagcac

SEQ ID NO: 129146 - DNA, 80 bp, synthetic construct
  source 1..80: mol_type = other DNA
caaaagctgggatacattctccgtgacatagcagggaagcaaggaggtaaaatgtatgccgatgacaccgccgggtggga

SEQ ID NO: 129147 - DNA, 80 bp, synthetic construct
  source 1..80: mol_type = other DNA
ggcagacaccgccgcatgcggtgacatcatccaaggtctgcccgtctccgccagaagggggagggagatactcttggtgc

SEQ ID NO: 129148 - DNA, 80 bp, synthetic construct
  source 1..80: mol_type = other DNA
gtgactcgtacctgggtcatctcatcactctgtaccgcgaggccatcggccaggctcagatcgacgagcatacgtatcag

SEQ ID NO: 129149 - DNA, 80 bp, synthetic construct
  source 1..80: mol_type = other DNA
tatatgcggatttaggggtgctccataccataacgccttatataaagctttaaaatcagtttgggttttaaaacaacaaa

SEQ ID NO: 129150 - DNA, 80 bp, synthetic construct
  source 1..80: mol_type = other DNA
aactacaagcgggcgctgtggcgagtcgccgccagcgactatgtcgaagttgtgcgatttggggatgcacactatgtagt

SEQ ID NO: 129151 - DNA, 80 bp, synthetic construct
  source 1..80: mol_type = other DNA
gtcgtcgggagtgcctgtcctctgccctaggggccacgccgtcggaatcttccgggcggccgtgtgctccaggcgtgtcg

SEQ ID NO: 129152 - DNA, 80 bp, synthetic construct
  source 1..80: mol_type = other DNA
aaacaccaattcccacaaccatcatggccaaaaatgaggtgttctgcgtggaccccgccaaggggggtaagaaaccagct

SEQ ID NO: 129153 - DNA, 80 bp, synthetic construct
  source 1..80: mol_type = other DNA
tggcagtgctggtagctatgatcctgggaggattttcaatgagtgacctggctaagcttgcaattttgatgggtgccacc

SEQ ID NO: 129154 - DNA, 80 bp, synthetic construct
  source 1..80: mol_type = other DNA
cttcgtgtggcaggagcgcacggccgtggttaaccggagtctggttatttacggggtccgagagacggacagcggcctgt

SEQ ID NO: 129155 - DNA, 80 bp, synthetic construct
  source 1..80: mol_type = other DNA
gtatggcgtgggatatgatgatgaactggtcgcccactgtcaccatgatcttggcgtatgccatgcgcgtcccaggcctt

SEQ ID NO: 129156 - DNA, 80 bp, synthetic construct
  source 1..80: mol_type = other DNA
tactttgtgcgcgctcacatactcctgcgcgcttgcctgctcgttcgtaggctagcggggggtaggtacgtgcaggcgtg

SEQ ID NO: 129157 - DNA, 80 bp, synthetic construct
  source 1..80: mol_type = other DNA
tgggtgtcaatgccgttgcctactacaggggtctcgacgtctccgttataccagctcaaggagacgtggtggtcgtcgcc

SEQ ID NO: 129158 - DNA, 80 bp, synthetic construct
  source 1..80: mol_type = other DNA
ctatcacggcgccgggtcaaggtcgcttgctgccagtaagcggcctgcgctccagatgtacaccaatgtggagcaggatc

SEQ ID NO: 129159 - DNA, 80 bp, synthetic construct
  source 1..80: mol_type = other DNA
tggaagtgtttgaaccgcctcaagcccactcttcatgggccaacacctctgctatacagactgggcgctgttcagaatga

SEQ ID NO: 129160 - DNA, 80 bp, synthetic construct
  source 1..80: mol_type = other DNA
cagtgaggaagacttccgaacgatcccagcccagagggaggcgccaacctattcccaaggagcgccgaccgacgggccgg

SEQ ID NO: 129161 - DNA, 80 bp, synthetic construct
  source 1..80: mol_type = other DNA
actccccgggtgctacatgcccgttttggggctggggttggggctggggttggtgctgtggttgtggctgggattggagc

SEQ ID NO: 129162 - DNA, 80 bp, synthetic construct
  source 1..80: mol_type = other DNA
ttccgccgacgaggggcgcggtgggccgaccctcgaacccgggcgccacgtgtccctcgcggtccacctgtgggttggcc

SEQ ID NO: 129163 - DNA, 80 bp, synthetic construct
  source 1..80: mol_type = other DNA
caggagccctggtcgtcggcgtagtctgcgcggccatactgcgaaggcacgtcggcccgggcgaaggggcagtacaatgg

SEQ ID NO: 129164 - DNA, 80 bp, synthetic construct
  source 1..80: mol_type = other DNA
tgtggtgagcggcatggccggtgctgctgtgggaagcatcggcctgggcaaggtcttactggacatactggcaggttatg

SEQ ID NO: 129165 - DNA, 80 bp, synthetic construct
  source 1..80: mol_type = other DNA
tagctttagtgtttctaggttgttggggccaaataaccctgacaactctgcttacagctgtagtgttgggagtggtgcat

SEQ ID NO: 129166 - DNA, 80 bp, synthetic construct
  source 1..80: mol_type = other DNA
cgcgatgtttggccagcagctggcgtccgacgtgcagcagtacctggagcgcctggagaaacagaggcaacagaaggtgg

SEQ ID NO: 129167 - DNA, 80 bp, synthetic construct
  source 1..80: mol_type = other DNA
tataaatatttgccagaaacgcccagatccctagcgaagatcgtccacaaagcgcacaaggaaggcgtgtgcggagtcag

SEQ ID NO: 129168 - DNA, 80 bp, synthetic construct
  source 1..80: mol_type = other DNA
aaccgcccagttagtcctcgtgtcaccacaacagcacgaattcacccaagactgcaactgctccatctacccaggtcatg

SEQ ID NO: 129169 - DNA, 80 bp, synthetic construct
  source 1..80: mol_type = other DNA
ttgatcagggagaagaggagtgcagctgcaaaaaagaaaggagcaagtctgctatgcttggctctggcctcaacaggact

SEQ ID NO: 129170 - DNA, 80 bp, synthetic construct
  source 1..80: mol_type = other DNA
ggagcctggagtggtgatggggtgtgtcacaccaggtgcccctgcggtgctgatattgcgggccacgtcaagaacgggac

SEQ ID NO: 129171 - DNA, 80 bp, synthetic construct
  source 1..80: mol_type = other DNA
atcccatctcccgggctgcctgggaaaccgcccggcacactccagtgaactcatggttgggcaacatcatcatgtacgca

SEQ ID NO: 129172 - DNA, 80 bp, synthetic construct
  source 1..80: mol_type = other DNA
tccgtgtacgcgctggggtttggggtgagggtgctgctgtgcccaccggggtcaacgggggggcggtcgggagatttata

SEQ ID NO: 129173 - DNA, 80 bp, synthetic construct
  source 1..80: mol_type = other DNA
cgcgccgacgccagaggccggcgctggtcttgcggccgatcccgccgtggcccgggacgacgcggaggggctttcggacc

SEQ ID NO: 129174 - DNA, 80 bp, synthetic construct
  source 1..80: mol_type = other DNA
ctgttatgcagagtagccagcggcgttgacctcgctcagaccgtcatcctggagcttgacaagacctcagaacacctacc

SEQ ID NO: 129175 - DNA, 80 bp, synthetic construct
  source 1..80: mol_type = other DNA
tttcctcagctgttcccacctcatgggttccacaaggacgcacaacatggtcgattcatgggaaaggggagtggatgacc

SEQ ID NO: 129176 - DNA, 80 bp, synthetic construct
  source 1..80: mol_type = other DNA
gttgatgcaacagacacctttgttggacaaggaaagttccgtggcgccatctcaacatcaccgtcacatattatgcaaac

SEQ ID NO: 129177 - DNA, 80 bp, synthetic construct
  source 1..80: mol_type = other DNA
caacagttccgggtgtccagagaggctagccagctgcagcagccttgacagcctccaacagggctggtgccctcttggga

SEQ ID NO: 129178 - DNA, 80 bp, synthetic construct
  source 1..80: mol_type = other DNA
gttggctatttgcaccacactcctgccccagcggttctgggtgatcttggttcgctcagggttctccttcagcgcccgtt

SEQ ID NO: 129179 - DNA, 80 bp, synthetic construct
  source 1..80: mol_type = other DNA
cgcccagcagacacgtggcttgatgggtaccatagtcaccagcctcaccggccgcgacaagaacgaggtcgagggtgaaa

SEQ ID NO: 129180 - DNA, 80 bp, synthetic construct
  source 1..80: mol_type = other DNA
agctggaagaaaccagattatgaaccaccgacggtggctgggtgcgctctcccccccccgactaaggcccccactcctcc

SEQ ID NO: 129181 - DNA, 80 bp, synthetic construct
  source 1..80: mol_type = other DNA
tgactgccattacgtcgtgggggctactgctgacaatcttaaatgcccttgccaggtgccggcgccagaattcttcaccg

SEQ ID NO: 129182 - DNA, 80 bp, synthetic construct
  source 1..80: mol_type = other DNA
tctcctcatcagatcgtggtaaacgggccctgcgatatggatgatggcgcagcgagctggattgaatctcggtttgcatt

SEQ ID NO: 129183 - DNA, 80 bp, synthetic construct
  source 1..80: mol_type = other DNA
gcgccccagccaaagccaatgatacgggacgaggtctctttcagcgtgggccttcactcatatgcggtggggtcacaact

SEQ ID NO: 129184 - DNA, 80 bp, synthetic construct
  source 1..80: mol_type = other DNA
gggacttccattacattacgggggctacagaagatgagctcaagtgtccgtgccaagtgccggctgctgagttctttact

SEQ ID NO: 129185 - DNA, 80 bp, synthetic construct
  source 1..80: mol_type = other DNA
ggactcgccatacctgaagacggggtgtagtacagatccccgtactcatcgcgcggaacctcccgcggacccgacttcac

SEQ ID NO: 129186 - DNA, 80 bp, synthetic construct
  source 1..80: mol_type = other DNA
cccgaatacagggacgagaacgtagccagaatcttaagactcctatgaccatgcagactctgctcatactgttatccctc

SEQ ID NO: 129187 - DNA, 80 bp, synthetic construct
  source 1..80: mol_type = other DNA
agacccctcccttacaagtcgcagcaacaatgggggcccaaggcgagatgaagctgtaatctcgttggaaggactagagg

SEQ ID NO: 129188 - DNA, 80 bp, synthetic construct
  source 1..80: mol_type = other DNA
ctatcagccctctcagcaactctatgataaggcaccacaacatggtatactccaccacctcgcgcagcgctagcctccgc

SEQ ID NO: 129189 - DNA, 80 bp, synthetic construct
  source 1..80: mol_type = other DNA
tttgatgtttaagcgacctgctgtaatttccttcataagtccttcttccatttgatcagaaaaaacaatttttttattgt

SEQ ID NO: 129190 - DNA, 80 bp, synthetic construct
  source 1..80: mol_type = other DNA
tcgggggtcaggaccatatcccagggcacagggaactcttgcaggacagtgaacccggccgaacagggcaatcctcgcac

SEQ ID NO: 129191 - DNA, 80 bp, synthetic construct
  source 1..80: mol_type = other DNA
accctcctctgttggagtcatggaagaagccggactacgaaccgcccgtggtacacgggtgtccgctccctcctccaaag

SEQ ID NO: 129192 - DNA, 80 bp, synthetic construct
  source 1..80: mol_type = other DNA
agggaaagactggaacggggctcttgctcatagccctcatgacacagagggatgttgtgattgtacaccacggacttgtg

SEQ ID NO: 129193 - DNA, 80 bp, synthetic construct
  source 1..80: mol_type = other DNA
aggaaaacctttgagagagaataccccacgataaagcagaagaaacctgactttatattggccactgacatagctgaaat

SEQ ID NO: 129194 - DNA, 80 bp, synthetic construct
  source 1..80: mol_type = other DNA
cacatcaaccgcaccgccctgaactgcaatgactccttgcacaccggctttatcgcgtctctgttctacacccacagctt

SEQ ID NO: 129195 - DNA, 80 bp, synthetic construct
  source 1..80: mol_type = other DNA
aacaccgattggtctacgccgtgtagcacctcgtggttgaaggacatttgggactgggtgtgtactgtcctgtctgactt

SEQ ID NO: 129196 - DNA, 80 bp, synthetic construct
  source 1..80: mol_type = other DNA
ggcccaaacctcatctaggatgcaatagatgaggcgtaaggactagaggttagaggagaccccgtggaaaagaagatgcg

SEQ ID NO: 129197 - DNA, 80 bp, synthetic construct
  source 1..80: mol_type = other DNA
cgcacatcgacttgatcgtggtgtccgctacgctttgctccgccctttacgtaggggatgtttgcggcgcggtcatgata

SEQ ID NO: 129198 - DNA, 80 bp, synthetic construct
  source 1..80: mol_type = other DNA
tcactccattgcccgccgcatcccagctggatttatccagttggtttgtggtaggcgccggcggggtggatatttatcac

SEQ ID NO: 129199 - DNA, 80 bp, synthetic construct
  source 1..80: mol_type = other DNA
ttgcctcgtgccccaggaatggatacaacacttttatcaagagtcagccccagcacaatcttcggtggctctgctgaggt

SEQ ID NO: 129200 - DNA, 80 bp, synthetic construct
  source 1..80: mol_type = other DNA
ggacggggcggggcgcttgtgaaacccgaagacgcaataaacggcaacgacctgattaagttttgcagtagcgttgttta

SEQ ID NO: 129201 - DNA, 80 bp, synthetic construct
  source 1..80: mol_type = other DNA
gtcatggacatcataactagaagagaccaacgtggttcaggtcaggtggtgacttacgctctgaacaccctcacgaacat

SEQ ID NO: 129202 - DNA, 80 bp, synthetic construct
  source 1..80: mol_type = other DNA
gatgtctagtgaactatccttatagattgtggcactatccttgcactgtaaactataccatccacaaggtgcggatgttt

SEQ ID NO: 129203 - DNA, 80 bp, synthetic construct
  source 1..80: mol_type = other DNA
cagcgcagcgagtcgagttcctcttgaaagcgtgggcatcgaaaaaggtgcccatgggtttctcctatgacactcgctgc

SEQ ID NO: 129204 - DNA, 80 bp, synthetic construct
  source 1..80: mol_type = other DNA
gtgattggtttgtaggtgtaagtcacgtgatcagagttccctggtggggggctataaaaaggcgtgggacactgatcttc

SEQ ID NO: 129205 - DNA, 80 bp, synthetic construct
  source 1..80: mol_type = other DNA
ctgctagcgagcctgctatatccctctctaatttttgacattacaaagctgctgatagctgtccttgggccgctgtactt

SEQ ID NO: 129206 - DNA, 80 bp, synthetic construct
  source 1..80: mol_type = other DNA
tgtctccactgtctgattgggcgtgtgatggcctacgagatctggctgtcgccgtcgaacctgtcatcttctctcctatg

SEQ ID NO: 129207 - DNA, 80 bp, synthetic construct
  source 1..80: mol_type = other DNA
gttagatgagatcgtagatgttcagtatcaattaaaattccttaattacattttaatgcggataggagcaggagctcatc

SEQ ID NO: 129208 - DNA, 80 bp, synthetic construct
  source 1..80: mol_type = other DNA
acgcacgtgcacacagagatgcaccgcctactggcctcggagtgggccgacgcgggctcgggccccgagcttctcttcta

SEQ ID NO: 129209 - DNA, 80 bp, synthetic construct
  source 1..80: mol_type = other DNA
cagaacctacagcttgtcaacaccaacggaagctggcacatcaacaggaccgcgctcaactgtaacgactcattacagac

SEQ ID NO: 129210 - DNA, 80 bp, synthetic construct
  source 1..80: mol_type = other DNA
ctcggatgaccttatggtcgccgtcattatggccatctacctcgcggcccaggccggacctccgcacacattcgctccta

SEQ ID NO: 129211 - DNA, 80 bp, synthetic construct
  source 1..80: mol_type = other DNA
acctcaaagaaaaaccaaaagaaacaccaaccgtcgcccacaagacgttaagtttccgggcggcggccagatcgttggcg

SEQ ID NO: 129212 - DNA, 80 bp, synthetic construct
  source 1..80: mol_type = other DNA
gcagaggggaaaatcgaccccttgttttggcgggtgccgttcgtcctctttctcttcttgtgcattgtcactaccgcctg

SEQ ID NO: 129213 - DNA, 80 bp, synthetic construct
  source 1..80: mol_type = other DNA
gtccagtgtgtcggcagcactggcagaactggcggagaaaaccttcccaacacctgttacttcatctacgggttacgggt

SEQ ID NO: 129214 - DNA, 80 bp, synthetic construct
  source 1..80: mol_type = other DNA
cgcgattttccgtccgttgagcgggtgtaatatcggcgaggtcttcttgcacgaatactctcgtacagtaggtttctgac

SEQ ID NO: 129215 - DNA, 80 bp, synthetic construct
  source 1..80: mol_type = other DNA
tttatgacatagacaaggttgtgcaatatgatagcggaacggccattatgcagggcatggctcagtttttccagggactt

SEQ ID NO: 129216 - DNA, 80 bp, synthetic construct
  source 1..80: mol_type = other DNA
aggccagtaatcggggaacctcagccactccaagtggatggaggcttaaggaatcttctcttctcttttacagtatggtg

SEQ ID NO: 129217 - DNA, 80 bp, synthetic construct
  source 1..80: mol_type = other DNA
aggtactataactattaaaggtcttaaaggagcactgcgggaaatgaacgataacgctctatctgtaaaacttccctttg

SEQ ID NO: 129218 - DNA, 80 bp, synthetic construct
  source 1..80: mol_type = other DNA
attaaatacatcattttaagcttgcttaccctagcggcagtctgcagtgccgccaaacaggtagagtttaaggagccagc

SEQ ID NO: 129219 - DNA, 80 bp, synthetic construct
  source 1..80: mol_type = other DNA
tgatgaagacttcaaccccgtctacccttatgacaccacaaccactccagccgttcctttcatatcacccccgtttgtaa

SEQ ID NO: 129220 - DNA, 80 bp, synthetic construct
  source 1..80: mol_type = other DNA
gacccgtcatgtgcccgtcagggcacgccgtcgggatcttccgcgccgcagtgtgcaccaggggtgtggccaaggccata

SEQ ID NO: 129221 - DNA, 80 bp, synthetic construct
  source 1..80: mol_type = other DNA
ccaaataaatgaaattgacccctggattacaaataattttgtacaagcccctggtggagagttcacggtatccccttgaa

SEQ ID NO: 129222 - DNA, 80 bp, synthetic construct
  source 1..80: mol_type = other DNA
agcccgggtatccctggcccctgtatgggaatgagggctgtgggtgcgcagggtggctcctgtccccccgcggttctcgc

SEQ ID NO: 129223 - DNA, 80 bp, synthetic construct
  source 1..80: mol_type = other DNA
agacgacggggctgtccctcggcgacctggacaccatcaaggagcggctcggcctggatgcccggccgatgatggccagc

SEQ ID NO: 129224 - DNA, 80 bp, synthetic construct
  source 1..80: mol_type = other DNA
gaccgcgagttgatgcacagcctgcgtcgagcattgacgggggccggcggggatgccaatgccgagtcttactttgacat

SEQ ID NO: 129225 - DNA, 80 bp, synthetic construct
  source 1..80: mol_type = other DNA
cggcctggctactcttggcgtcgtttggtgctttgttgttcgcacctcaattagccggatgatgcttggcacgttggtac

SEQ ID NO: 129226 - DNA, 80 bp, synthetic construct
  source 1..80: mol_type = other DNA
agtactgctatggggggcacacgaatgaagacgactcgaacttcgcccattggactgaggcacgaatcatgctggacaac

SEQ ID NO: 129227 - DNA, 80 bp, synthetic construct
  source 1..80: mol_type = other DNA
aacggcgtgttggagggctatataaataacctgtttggaaccatcgagcgcctgcgcgagaccaacgcgggcctggcgac

SEQ ID NO: 129228 - DNA, 80 bp, synthetic construct
  source 1..80: mol_type = other DNA
cattaataggacggccctcaactgcaatgatagcctgaacaccggcttcattgctggcctaatctacgtccacaagttta

SEQ ID NO: 129229 - DNA, 80 bp, synthetic construct
  source 1..80: mol_type = other DNA
catgcatgtcggctgacctggaggtcgtcaccagcacctgggtcttagtaggcggagtcctcgcagctctggccgcatac

SEQ ID NO: 129230 - DNA, 80 bp, synthetic construct
  source 1..80: mol_type = other DNA
ctcgctttccccggcttataaaatccttctcagccgcagcttatggtggttgtgctacatgctggtcttagcagaggccg

SEQ ID NO: 129231 - DNA, 80 bp, synthetic construct
  source 1..80: mol_type = other DNA
atctccgctccgggtcggggtcccgctcgaccccacagtagatgggacgaaaccgggcgatttccgaaccccaccaccca

SEQ ID NO: 129232 - DNA, 80 bp, synthetic construct
  source 1..80: mol_type = other DNA
gggacatgggccggtactggtattatgactacacggtgtccatgcggtgccaacatcaccggcaacgtccgcttgggcac

SEQ ID NO: 129233 - DNA, 80 bp, synthetic construct
  source 1..80: mol_type = other DNA
gtgtgcctgctccggcccccaactacaagtttgccttgtggagggtaggcgctgcggactacgccgaggtgcgccgcgtg

SEQ ID NO: 129234 - DNA, 80 bp, synthetic construct
  source 1..80: mol_type = other DNA
cgtatcttgcaaatcggtggcggcatcgacaattgaaactagtgtgacaatagatatacacaatccaataagaacctcat

SEQ ID NO: 129235 - DNA, 80 bp, synthetic construct
  source 1..80: mol_type = other DNA
gctgtcgaaggagaacagcctaaggaacttgatattgactttgctttctttgacactgactcaggtgacacagaatataa

SEQ ID NO: 129236 - DNA, 80 bp, synthetic construct
  source 1..80: mol_type = other DNA
atacaatcatatggtagacccactactcagcttctcttactgaaactcagtcactctcatttcagaaccatgaaggcttt

SEQ ID NO: 129237 - DNA, 80 bp, synthetic construct
  source 1..80: mol_type = other DNA
atcaaaactccatcgcatctaatcgttctgaggaaatcatccaagcaatgcaactggattgtgtttcaagcaggagagga

SEQ ID NO: 129238 - DNA, 80 bp, synthetic construct
  source 1..80: mol_type = other DNA
gctcacgtgtttgttccatccagccttggggtttgaagtcactaaaatactgttggcactgatgggacccttatacctgc

SEQ ID NO: 129239 - DNA, 80 bp, synthetic construct
  source 1..80: mol_type = other DNA
gatgctgcgggaccgctggagcctggtggccgagcggcggcggcaggccgggatcgccggacacacctacctccaggcga

SEQ ID NO: 129240 - DNA, 80 bp, synthetic construct
  source 1..80: mol_type = other DNA
ccacatggaggtgtggaccgacaaggacagttccaaatcagaagcttgcttaacacagttctaacagtttgtttagatag

SEQ ID NO: 129241 - DNA, 80 bp, synthetic construct
  source 1..80: mol_type = other DNA
ctacatgtgtatgtgccttccttccaagtccgtggcccgcgggattctttggtcattctcgcggccctggcccaccccct

SEQ ID NO: 129242 - DNA, 80 bp, synthetic construct
  source 1..80: mol_type = other DNA
cccagacaaaacaagccggagacaatttcccctacttggtcgcatatcaggcgaccgtttgtgctagggcgctcgccccc

SEQ ID NO: 129243 - DNA, 80 bp, synthetic construct
  source 1..80: mol_type = other DNA
agaagtgatgaatgagacaacaaactggctatgggcttttttggctcgcaggaagagagcaaggatgtgttctcgcgaag

SEQ ID NO: 129244 - DNA, 80 bp, synthetic construct
  source 1..80: mol_type = other DNA
tggttagcggcctagcaggtgctgctattggcagcatagggttgggcaaagtaatcatcgacatcctcgccggatacggc

SEQ ID NO: 129245 - DNA, 80 bp, synthetic construct
  source 1..80: mol_type = other DNA
actggggcggatgcagcggcgtgtggcgacatcatccaaggcctgcccgtctctgcccgcaggtgtagggaagtactcct

SEQ ID NO: 129246 - DNA, 80 bp, synthetic construct
  source 1..80: mol_type = other DNA
ccagtactaccatcctcctaaacatcatggggggttggctagcttcccagatcgctcccgccgcggaggccaccggcttt

SEQ ID NO: 129247 - DNA, 80 bp, synthetic construct
  source 1..80: mol_type = other DNA
tgaggcgcgcggtggaactgcagacagtggcttttcccgaggcaccaccaccctcttacgaaaccgtgatggcagcagct

SEQ ID NO: 129248 - DNA, 80 bp, synthetic construct
  source 1..80: mol_type = other DNA
cgtggaaagaagactcctatggggttctcctatgacaccagatgctttgattcgactgtgactgagcgcgacattcgcac

SEQ ID NO: 129249 - DNA, 80 bp, synthetic construct
  source 1..80: mol_type = other DNA
aagatacagattgaggtactgaaatgtgtgggcgtggcttaagggtgggaaagaatatataaggtggtggtcttatgtag

SEQ ID NO: 129250 - DNA, 80 bp, synthetic construct
  source 1..80: mol_type = other DNA
gaagaacatagtgaggaaacagaacaaaaaaaggatgggcaaaagcaaaatgaagaacaaaaacatggtgatcaaaaaac

SEQ ID NO: 129251 - DNA, 80 bp, synthetic construct
  source 1..80: mol_type = other DNA
atcagggcccagctccatgtgggtgctaaacaggaaaactggaacacagacataaaaacgctgaaatttgatgctctttc

SEQ ID NO: 129252 - DNA, 80 bp, synthetic construct
  source 1..80: mol_type = other DNA
gacgctgcctgcaactggacgcggggcgaacgttgcaacctggaagacagggacaggtccgagctcagcccgttgctgct

SEQ ID NO: 129253 - DNA, 80 bp, synthetic construct
  source 1..80: mol_type = other DNA
gctttactcctaggcgagaaaaagatggaggaggatcttatacagccgcagccagactccgaaaccttaaccagccccac

SEQ ID NO: 129254 - DNA, 80 bp, synthetic construct
  source 1..80: mol_type = other DNA
gagcttattccaacccgtacagggtccctgtctgaacgaatacgtcttctttgtgaattagtctcggcccgggagacacg

SEQ ID NO: 129255 - DNA, 80 bp, synthetic construct
  source 1..80: mol_type = other DNA
aggcgctgtggtcgatgtggtgggcgtccaacaaccccacgattgtctgtttggtgaggtttttaacgcgccccgccccg

SEQ ID NO: 129256 - DNA, 80 bp, synthetic construct
  source 1..80: mol_type = other DNA
tgaatgaaaagcggaaggccgcagagaagaagaaaggggccgttttgatgagcctagctttgactaccacgggctggtgc

SEQ ID NO: 129257 - DNA, 80 bp, synthetic construct
  source 1..80: mol_type = other DNA
gccatgttcgaagaacaaaaccaatggtcgaacgctcgcgaggcggtggaagaccccaagttctgggaaatggttgacga

SEQ ID NO: 129258 - DNA, 80 bp, synthetic construct
  source 1..80: mol_type = other DNA
gtgcagatggaaactgtcaggctctaagagtgtttcacgtagtatctcatccccgccgcccctggcctgtttttgagcac

SEQ ID NO: 129259 - DNA, 80 bp, synthetic construct
  source 1..80: mol_type = other DNA
tggaggatggtttgggtgcacgtggatgaactctacgggctttaccaagacctgtggtgccccgccatgtcagatagtcc

SEQ ID NO: 129260 - DNA, 80 bp, synthetic construct
  source 1..80: mol_type = other DNA
tcctcatttagccatgttgtacaaatttttttgtacaccgctccctgatctggcaaaaacctaaagctggcacgctcgtc

SEQ ID NO: 129261 - DNA, 80 bp, synthetic construct
  source 1..80: mol_type = other DNA
gctggaggaaagactgtgatggatgtcatttcacgcgaagatcaaagaggaagtggacaagtagtgacctatgctttaaa

SEQ ID NO: 129262 - DNA, 80 bp, synthetic construct
  source 1..80: mol_type = other DNA
cgcgcatctgcagcccagactggggcgacggatgttttaaatgcaaaataaaactcaccaaggccatagcgtgcgttctc

SEQ ID NO: 129263 - DNA, 80 bp, synthetic construct
  source 1..80: mol_type = other DNA
ggaggtggatggcgtgaggatacacaggtatgcccccgagtgcaaacccctccttagggatgaggtgacattcagtgtgg

SEQ ID NO: 129264 - DNA, 80 bp, synthetic construct
  source 1..80: mol_type = other DNA
accgtcgatttcagcctcgaccctacattttccatcgagaccacgacattgcctcaggacgctgtctcccgcagccagcg

SEQ ID NO: 129265 - DNA, 80 bp, synthetic construct
  source 1..80: mol_type = other DNA
cagaaatatctcccttgcttctgtctaccacgcagtggcaagtgctcccttgctcctttaccaccttacccgccctgtcg

SEQ ID NO: 129266 - DNA, 80 bp, synthetic construct
  source 1..80: mol_type = other DNA
cacgcccggggttgtcctcaaaaggcagggtccatactacggaagccgtcgttgtattcgagacctgcctgtgcgacgca

SEQ ID NO: 129267 - DNA, 80 bp, synthetic construct
  source 1..80: mol_type = other DNA
aacaccacctgcccctgcggagcgcagctaacaggacatgtcaagaatgggacaatgaagctcataggtccgaagacctg

SEQ ID NO: 129268 - DNA, 80 bp, synthetic construct
  source 1..80: mol_type = other DNA
cgcaagcgacgatgtcaaagcgcaaaatcaaggaggagatgctccaggtcgtcgccccggagatttacggaccaccccag

SEQ ID NO: 129269 - DNA, 80 bp, synthetic construct
  source 1..80: mol_type = other DNA
cctcctccagccgaacctgaacggcctcggggcccagggcgcgtgggcgcggagccccctgcggggccgccccggccgtg

SEQ ID NO: 129270 - DNA, 80 bp, synthetic construct
  source 1..80: mol_type = other DNA
gttcttcatagcggcctggtacatcaaaggccgggtggtcccgttcactgcttactctttgcttggcatgtggtctttcg

SEQ ID NO: 129271 - DNA, 80 bp, synthetic construct
  source 1..80: mol_type = other DNA
actatctccggtcgccctcgtcgtcggtgtgatatgcgctgccatactacgtcgacacgtaggacctggggagggtgcgg

SEQ ID NO: 129272 - DNA, 80 bp, synthetic construct
  source 1..80: mol_type = other DNA
gaggaggagaacctgagggccggtctggatcctcaaacggaattgtaactgaacctgaccccgaagagggtactagcagt

SEQ ID NO: 129273 - DNA, 80 bp, synthetic construct
  source 1..80: mol_type = other DNA
cttacatgtggagcttccaaccccaaatgggtttggccgcaggtgcggctcaggactactccagcagaatgaattggcta

SEQ ID NO: 129274 - DNA, 80 bp, synthetic construct
  source 1..80: mol_type = other DNA
cccaacatcggctttgacctacggcaatgcatctgggctctactatctgaccaatgattgcgcgaactccagtattgtgt

SEQ ID NO: 129275 - DNA, 80 bp, synthetic construct
  source 1..80: mol_type = other DNA
atgaatttgaaataaaacgttctgtagacggggaaggctacaatgtggcccaatgtaatatgaccaaagattggtttcta

SEQ ID NO: 129276 - DNA, 80 bp, synthetic construct
  source 1..80: mol_type = other DNA
accccaccactcgccggacccgccgacgtcccctctcgagcccgccgaaacccgccgcgtctgttgaaatggccagccgc

SEQ ID NO: 129277 - DNA, 80 bp, synthetic construct
  source 1..80: mol_type = other DNA
ttgatgcgaacacctatatcaccggtagcagcgcggcgtccagtacgagcgcgttcgccaaattgtttcaaccaggagcc

SEQ ID NO: 129278 - DNA, 80 bp, synthetic construct
  source 1..80: mol_type = other DNA
ggcggtgagggccgcgccctcgtggttttcgtcgaacgccaggtgggcggccgcgcgggccacggcgtccacgttccgtg

SEQ ID NO: 129279 - DNA, 80 bp, synthetic construct
  source 1..80: mol_type = other DNA
agacgcccaatggatttgatgacagtgtatatttaaacttcacctctatgcatagcattcaacctatcctctcacggatt

SEQ ID NO: 129280 - DNA, 80 bp, synthetic construct
  source 1..80: mol_type = other DNA
ttactccagggctcacttctgcgtgtcccttactatgtgagggcccacgcattgatcagggcttgcgcacttgtgcgcgg

SEQ ID NO: 129281 - DNA, 80 bp, synthetic construct
  source 1..80: mol_type = other DNA
aggtcatgcggtttttcgggaggctggtgtcgtgggtcacccaggacgagctagcgagcgtcaccgccgtgtgcgccggg

SEQ ID NO: 129282 - DNA, 80 bp, synthetic construct
  source 1..80: mol_type = other DNA
ggaggtttgattttggctcaccctaatgggaaaaggagttggccagcaagtgaggtcttgaccggagtcggattgatgtg

SEQ ID NO: 129283 - DNA, 80 bp, synthetic construct
  source 1..80: mol_type = other DNA
ccgcgggtctcgtcctacttggggccccactgacccccggcatagatcacgtaatttgggcagggtcatcgataccatta

SEQ ID NO: 129284 - DNA, 80 bp, synthetic construct
  source 1..80: mol_type = other DNA
agctcccatgcgagcctgagccagacaccgaggtgttggcctctatgcttactgacccatcccacataacggcggaggcg

SEQ ID NO: 129285 - DNA, 80 bp, synthetic construct
  source 1..80: mol_type = other DNA
ggaggtaacatcacgcgagtggaagccgagaacaaggtcgtgatccttgactcctttgagccgcttaaggcggatgacga

SEQ ID NO: 129286 - DNA, 80 bp, synthetic construct
  source 1..80: mol_type = other DNA
ctgatgatggttgtgcttatacctgaacctgagaagcagcggtcgcagacagacaaccaactggctgtttttctagtgtg

SEQ ID NO: 129287 - DNA, 80 bp, synthetic construct
  source 1..80: mol_type = other DNA
cgtggtctgctgttcgtattcttatagctggacaggagcactcatcactccatgtgcagccgaagaggagaagctaccca

SEQ ID NO: 129288 - DNA, 80 bp, synthetic construct
  source 1..80: mol_type = other DNA
cctcctcggaatgtggcgctcgaagaagacgcctatggggttttcatatgacacccggtgttttgattcaactgtgactg

SEQ ID NO: 129289 - DNA, 80 bp, synthetic construct
  source 1..80: mol_type = other DNA
atcgcggggcaaccacgtggctcccacgcactatgttcctgaaagcgacgctgcagcccgcgtcacccagatactgacat

SEQ ID NO: 129290 - DNA, 80 bp, synthetic construct
  source 1..80: mol_type = other DNA
gacgagatggaggagtgcgcttccaaggccgccctcatcgcagaggggcagcggatagctgagatgttcaaatccaaaat

SEQ ID NO: 129291 - DNA, 80 bp, synthetic construct
  source 1..80: mol_type = other DNA
ttacttagccctaggcctcttgcctgcctcaagggttcctctggaggccctgttatgtgcccctcagggcacgttgcggg

SEQ ID NO: 129292 - DNA, 80 bp, synthetic construct
  source 1..80: mol_type = other DNA
gagccggcaagactcggaagatcttacctcagatcataaaggaagctatcagcaaaagactacggacagccattcttgct

SEQ ID NO: 129293 - DNA, 80 bp, synthetic construct
  source 1..80: mol_type = other DNA
ccctcgggcaggagggtgagatccccttctacgggaaggcgattcctctgtcttacatcaagggaggaagacacttgatc

SEQ ID NO: 129294 - DNA, 80 bp, synthetic construct
  source 1..80: mol_type = other DNA
gcagcagactcgaggcgtgtgtagcaccatcgtgacgagcctcactggcagggacaccaatgacaactgcggcgaggtcc

SEQ ID NO: 129295 - DNA, 80 bp, synthetic construct
  source 1..80: mol_type = other DNA
acatagatgcccatttcctttcacaaaccaagcaggcaggggagaacttcccgtacttggtggcttatcaagccactgtg

SEQ ID NO: 129296 - DNA, 80 bp, synthetic construct
  source 1..80: mol_type = other DNA
caatgcatcttcagtataagatacatgaagcgccatttgatttgctgttagagtggttgtatgtccccatcgatcctaca

SEQ ID NO: 129297 - DNA, 80 bp, synthetic construct
  source 1..80: mol_type = other DNA
gccgtgcgacagcggctggcaggaattcaacgcgggatgcgtcgcgtgggaccccacccccgtcgagcacgagcaggcgg

SEQ ID NO: 129298 - DNA, 80 bp, synthetic construct
  source 1..80: mol_type = other DNA
ctggtttgtcaggccgaagcggccctggagaacgtcattgtcctaaacgcggctgcggctgcggggactcatgggttttt

SEQ ID NO: 129299 - DNA, 80 bp, synthetic construct
  source 1..80: mol_type = other DNA
ggaccggctggtggtggatgtgcgcgaggccgtggcgcagcgtgagcgcgcgcagcagcagggcaacctgggctccatgg

SEQ ID NO: 129300 - DNA, 80 bp, synthetic construct
  source 1..80: mol_type = other DNA
cgggtcaccgcatggcatgggatatgatgatgaactggtcccctacaacagcgctggtagtggctcagctgctcagggtc

SEQ ID NO: 129301 - DNA, 80 bp, synthetic construct
  source 1..80: mol_type = other DNA
ctgggtgcgtcggggtggcgtgggcaaaaagggtgtccggatgggcctgcgagcgctccagaagccactcgccgaagcgt

SEQ ID NO: 129302 - DNA, 80 bp, synthetic construct
  source 1..80: mol_type = other DNA
tgcagctgcaaaaggacgtgcgcccggcgtacgtgcctgcgcagaacctgttcagggaccgcagtggagaggagcccgag

SEQ ID NO: 129303 - DNA, 80 bp, synthetic construct
  source 1..80: mol_type = other DNA
gcccgaactgccatacattcactaactgagaggctatacgtgggaggtcccatgcacaacagcaaggggcaatcctgcgg

SEQ ID NO: 129304 - DNA, 80 bp, synthetic construct
  source 1..80: mol_type = other DNA
cccgggtgagaggccgtctggaatgtttgactcggttgttctctgtgagtgctatgacgcgggctgctcgtggtacgatc

SEQ ID NO: 129305 - DNA, 80 bp, synthetic construct
  source 1..80: mol_type = other DNA
cataggccaagcagaggcggctttggagaatttaattgttctcaatgccgcttccgccgccagcatgcaagggtggatct

SEQ ID NO: 129306 - DNA, 80 bp, synthetic construct
  source 1..80: mol_type = other DNA
ctggcgctcgtgtaaacacagctcctgtttgcgggcgtgaggcggcaggctcttccgggaggcccgacgcaccacgccca

SEQ ID NO: 129307 - DNA, 80 bp, synthetic construct
  source 1..80: mol_type = other DNA
acaggacgttacctttcctggtggcgggcagatcgttggtggagtttacttgttgccgcgcaggtgcccccggttgggtg

SEQ ID NO: 129308 - DNA, 80 bp, synthetic construct
  source 1..80: mol_type = other DNA
cgcgcccgttgtggaacatggcgttgaccgtgttggccaccagattggcgggatgcagcgggtgtgcggggtcggtcacg

SEQ ID NO: 129309 - DNA, 80 bp, synthetic construct
  source 1..80: mol_type = other DNA
cggcggacaacctggccatcgaggggggcatgagcgacctaccggcatacaagctcatgtgcttcgatatcgaatgcaag

SEQ ID NO: 129310 - DNA, 80 bp, synthetic construct
  source 1..80: mol_type = other DNA
tctaccgctttctgtttgccttcctgtcggccgcggacgacctggtgacggaaaacctgggcggcctctccggcctcttc

SEQ ID NO: 129311 - DNA, 80 bp, synthetic construct
  source 1..80: mol_type = other DNA
aaaatttaacattaattaatgtgactagaatttatgacggaacttattatggttctagcaatgatggctcaagtcattac

SEQ ID NO: 129312 - DNA, 80 bp, synthetic construct
  source 1..80: mol_type = other DNA
ccatacggtaggaggggcgccgggccgtggcgcctggaggattgcgtcgctcttttcacctgtggcgaaacagcgcatcc

SEQ ID NO: 129313 - DNA, 80 bp, synthetic construct
  source 1..80: mol_type = other DNA
cgatcctgtgcccttcggggcatgcagtcgggatcttccgcgcggctgtgtgcacccgcggtgttgctaaggccatagac

SEQ ID NO: 129314 - DNA, 80 bp, synthetic construct
  source 1..80: mol_type = other DNA
cccctccagggctgctgcccacacatcatcgggagtgcggtttgggtgccccgcctgcagtgtgtcgggtgtgcccgagg

SEQ ID NO: 129315 - DNA, 80 bp, synthetic construct
  source 1..80: mol_type = other DNA
atgtggtgggcctatacggcaatggagtcgtcctcaacaacggtgcgtatgtgagcgctattgtgcaaggcgatagaatg

SEQ ID NO: 129316 - DNA, 80 bp, synthetic construct
  source 1..80: mol_type = other DNA
gcgagagaaaaaacccggagaattcggaaaagcaaaaggtagtcgcgccatttggttcatgtggctaggagcccgcttcc

SEQ ID NO: 129317 - DNA, 80 bp, synthetic construct
  source 1..80: mol_type = other DNA
aacctacattacgggcggagccgcggctagagctgtatctagcatcgcctcatggtttgcccccggcgcgcggcagaatt

SEQ ID NO: 129318 - DNA, 80 bp, synthetic construct
  source 1..80: mol_type = other DNA
ccgtgatggtgtcgtatgggccatgactatgttttgccccgggctggtatttgacatcaccaaatggctcctggcgatcc

SEQ ID NO: 129319 - DNA, 80 bp, synthetic construct
  source 1..80: mol_type = other DNA
attgccccaacaggcttatgcttatgacgcatctgtgcatggccagataggagcggctctgctggtaatgatcactctct

SEQ ID NO: 129320 - DNA, 80 bp, synthetic construct
  source 1..80: mol_type = other DNA
ccgacttacggaactgcacatggccagccagtcacaccctggacaatgccggtgtcgttgattcaaaactcttccttcca

SEQ ID NO: 129321 - DNA, 80 bp, synthetic construct
  source 1..80: mol_type = other DNA
catgttgacagacccgtcccacattaccgcggaggcggcagccaggagattggccagggggtctcccccttcacaggcca

SEQ ID NO: 129322 - DNA, 80 bp, synthetic construct
  source 1..80: mol_type = other DNA
gggcatcgcatggcgtgggatatgatgatgaactggtctccgaccgcaacccttgtcgtctcctatgccatgcgggtgcc

SEQ ID NO: 129323 - DNA, 80 bp, synthetic construct
  source 1..80: mol_type = other DNA
cctaactgctccatctatgaaacccaagatgcaaatctatttctttgtctgactaaaaacggagctcacgtgttaggtac

SEQ ID NO: 129324 - DNA, 80 bp, synthetic construct
  source 1..80: mol_type = other DNA
cggggaacatcgtgaactcggttagtatgaccagccaggttctcctcggacgcatggagaaaaagacttggaagggtgcc

SEQ ID NO: 129325 - DNA, 80 bp, synthetic construct
  source 1..80: mol_type = other DNA
ctgcggagatcatctggtcgtggtgactgagagagctgccatcgacgaggagggaccagccctgagagtgatcactgagg

SEQ ID NO: 129326 - DNA, 80 bp, synthetic construct
  source 1..80: mol_type = other DNA
cgggtcttggtccactatgagcagcgaagaagcgtccgaagacgttgtctgctgctcaatgtcctactcctggacaggcg

SEQ ID NO: 129327 - DNA, 80 bp, synthetic construct
  source 1..80: mol_type = other DNA
ttacaaaatatatggtcaaatgggagtgggtggtcctcctcttcttgctcctcgcggacgccagagtctgcgcttgcctg

SEQ ID NO: 129328 - DNA, 80 bp, synthetic construct
  source 1..80: mol_type = other DNA
ctgtgacccccttaggagaagctgggaaaccaagcctatagtcaggccgagaacgccatggcacggaagaagccatgctg

SEQ ID NO: 129329 - DNA, 80 bp, synthetic construct
  source 1..80: mol_type = other DNA
gctctttctacaggactaatccacctccaccaaaacatcgtggacgtgcagtacctgtacggcattggttcaatcgtagt

SEQ ID NO: 129330 - DNA, 80 bp, synthetic construct
  source 1..80: mol_type = other DNA
gccctactagcagcctttaaagttagaccaacttttgcagctgggctactcttgagaaagctgacctccaaggaattgat

SEQ ID NO: 129331 - DNA, 80 bp, synthetic construct
  source 1..80: mol_type = other DNA
cgtagccagaatcttaaggctcatctgaccatgcagactctgctcatactgctatccctcctatcccctgtcctcgctga

SEQ ID NO: 129332 - DNA, 80 bp, synthetic construct
  source 1..80: mol_type = other DNA
agagccgaacctaatgacgccgaactctcggtggctgcagagtgcttcaagaaaccgcctaagtatcctccagcccttcc

SEQ ID NO: 129333 - DNA, 80 bp, synthetic construct
  source 1..80: mol_type = other DNA
ggcactttcccagattgctgtaatgggttcaagcgaacaggagctgacggcgattgttcgagatttaggctgtgggccct

SEQ ID NO: 129334 - DNA, 80 bp, synthetic construct
  source 1..80: mol_type = other DNA
ccgcgactccgtgtcgttctctcggcgcaacgccagcggcacggcatcggtgctgccgcggccaaccatcaccatggagt

SEQ ID NO: 129335 - DNA, 80 bp, synthetic construct
  source 1..80: mol_type = other DNA
gcgtacgttgcacaagggtacagcgtcctggtattgaatccatctgtggccgcgacgttggggttcggcgcctacatgtc

SEQ ID NO: 129336 - DNA, 80 bp, synthetic construct
  source 1..80: mol_type = other DNA
cagaacttggctgaaatccaaacttcttccagctatgccgggtcttccattcctctcctgccaacggggttacaggagag

SEQ ID NO: 129337 - DNA, 80 bp, synthetic construct
  source 1..80: mol_type = other DNA
tctaagagacgtgagcaagaaagagggaggagccatgtacgccgacgacacagcaggatgggacacaagaatcacactag

SEQ ID NO: 129338 - DNA, 80 bp, synthetic construct
  source 1..80: mol_type = other DNA
tgaggtaaaactcaactgcaagccaggagataaatatatcctctggctctttgaaaacacttcattcgcagtctccaaca

SEQ ID NO: 129339 - DNA, 80 bp, synthetic construct
  source 1..80: mol_type = other DNA
cgcctaacgtagccgtgggccgtcctggtgctctaaccgagggcttgcgatcgcacatcgacatcatcgtggcgtccgca

SEQ ID NO: 129340 - DNA, 80 bp, synthetic construct
  source 1..80: mol_type = other DNA
gggcgtcatgttatgctgggccctgctgatggcatggaggccaaaggctggagacttctcgcccctatcacagcttacca

SEQ ID NO: 129341 - DNA, 80 bp, synthetic construct
  source 1..80: mol_type = other DNA
cttgctccggatagcaacagcagcgacaggtttgagagagacgatctttcgcttgatcagtcgtgaacgtgttgagaaaa

SEQ ID NO: 129342 - DNA, 80 bp, synthetic construct
  source 1..80: mol_type = other DNA
cccaacaagcaggacagcaagaaggctccatttgctgcctatgtaccagccctgaatgtttgtacactttaataaaaaca

SEQ ID NO: 129343 - DNA, 80 bp, synthetic construct
  source 1..80: mol_type = other DNA
ggtaagtggcttggccggcgctgccatagggggtataggcctgggcagggtcttgcttgacatcttggcaggatacggag

SEQ ID NO: 129344 - DNA, 80 bp, synthetic construct
  source 1..80: mol_type = other DNA
cgataggaggggagcaaggcagaaccaccagtatgtttacgtcccttttttcatctggggcgtctcagaagatccagctt

SEQ ID NO: 129345 - DNA, 80 bp, synthetic construct
  source 1..80: mol_type = other DNA
tccgcagaggtcaatccgaatatttcagcatatttagcaacatggatctcgcagataccgtcatgttcctgtagggtgcc

SEQ ID NO: 129346 - DNA, 80 bp, synthetic construct
  source 1..80: mol_type = other DNA
tatacactgctccgtgaacgcgcgccgaatcttgggattgcgaaggtggcgccggatgccctccggcacgtcatacgcca

SEQ ID NO: 129347 - DNA, 80 bp, synthetic construct
  source 1..80: mol_type = other DNA
gttgcgaacgcgcgagccccctcgccccgatgggagtctccccgcagccagggtgaggaggtgcgggcgtggcgagcagg

SEQ ID NO: 129348 - DNA, 80 bp, synthetic construct
  source 1..80: mol_type = other DNA
gaaaccggaatacgatcctccggccgtacacgggtgcgcccttcctccaggtggcctgcctcccgtccctcctcccagga

SEQ ID NO: 129349 - DNA, 80 bp, synthetic construct
  source 1..80: mol_type = other DNA
gtaccccccttcctgcgccgaactacacgttcgcgctatggagggtgtctgcagaggaatatgtggagataaggcaggtg

SEQ ID NO: 129350 - DNA, 80 bp, synthetic construct
  source 1..80: mol_type = other DNA
ctctttttccgtattttttttttttcctcttttcttggtggctccatcttagccctagtcacggctagctgtgaaaggtc

SEQ ID NO: 129351 - DNA, 80 bp, synthetic construct
  source 1..80: mol_type = other DNA
aactcaacggggtgtagcgcacgcatgtctgcatgcaagcgcattacagattttgaccaggggtgtggtcctctcacgta

SEQ ID NO: 129352 - DNA, 80 bp, synthetic construct
  source 1..80: mol_type = other DNA
gtcgcgatgaaacacctcaccagcttcaaaaaggaactgggaacgctcatcaacgctgtgaataagaggggcaaaaaaca

SEQ ID NO: 129353 - DNA, 80 bp, synthetic construct
  source 1..80: mol_type = other DNA
cgggccccggcccggggccgcgaacgggaggccccgctacgcggcgcgtatccggaccccacggaccgcctgtcgccgcg

SEQ ID NO: 129354 - DNA, 80 bp, synthetic construct
  source 1..80: mol_type = other DNA
ggcctcctcctcttcctcttcttccatgacgacctcttcttctatttcctctaccactgggagtggcgtggcccgacgac

SEQ ID NO: 129355 - DNA, 80 bp, synthetic construct
  source 1..80: mol_type = other DNA
cgggaacatcacccgcgtggagtcagagaataaggtggtgatcctggactcttttgacccgctccaggcggaagaggacg

SEQ ID NO: 129356 - DNA, 80 bp, synthetic construct
  source 1..80: mol_type = other DNA
tttacggaacacaaactcgccgtcttaatggagacgtttcgcctgaagacgcacaacgcctcacggctcattttcagagc

SEQ ID NO: 129357 - DNA, 80 bp, synthetic construct
  source 1..80: mol_type = other DNA
gcggctggcctccctcctgacgtacgccgggcctataaaagcgcccgacgacgccgccgccccgcagaccccggacaccg

SEQ ID NO: 129358 - DNA, 80 bp, synthetic construct
  source 1..80: mol_type = other DNA
ctgaaggttcatgccgtgcatattaaaaagctccgaaagggcgccctctatagccatgcgtagacacaccatcatgactg

SEQ ID NO: 129359 - DNA, 80 bp, synthetic construct
  source 1..80: mol_type = other DNA
gtatgacacgaatgtcaccaacgacgaagacatgaggccctattgttggcattatcctcctaaaccctgtggcatcgtcc

SEQ ID NO: 129360 - DNA, 80 bp, synthetic construct
  source 1..80: mol_type = other DNA
acgctacgagtccttgaaatggtggaagactggttgcatcgagggccaaaggaattttgtgtgaaggtactgtgccccta

SEQ ID NO: 129361 - DNA, 80 bp, synthetic construct
  source 1..80: mol_type = other DNA
ccaagcgccgactccggggtagaccagggaccccctactgaaacttctgaacccgaccccctcatcgcggacgaccaatc

SEQ ID NO: 129362 - DNA, 80 bp, synthetic construct
  source 1..80: mol_type = other DNA
agaatggctattttaggggatacagcctgggattttggatccctgggaggagtgttcacatctataggaaaggccctcca

SEQ ID NO: 129363 - DNA, 80 bp, synthetic construct
  source 1..80: mol_type = other DNA
aacgagttttcaaggagaaagttgatacaaaggcccaagagccacagccaggcaccagagtgatcatgagagctgtgagt

SEQ ID NO: 129364 - DNA, 80 bp, synthetic construct
  source 1..80: mol_type = other DNA
catagggccagggcagtcagagctaagcttattgctcaaggagggaaagccgctacctgcggcaagtacctcttcaactg

SEQ ID NO: 129365 - DNA, 80 bp, synthetic construct
  source 1..80: mol_type = other DNA
tcgacgccgccatcgcgccctttcgccacctgtcgccggcgtctcgcgagggggcgcggcgactggccgccgaggccgag

SEQ ID NO: 129366 - DNA, 80 bp, synthetic construct
  source 1..80: mol_type = other DNA
caccacacccatcatgcagaagaaagtcggacaaatcatgctgatcttggtgtctctagctgcagtagtagtgaacccgt

SEQ ID NO: 129367 - DNA, 80 bp, synthetic construct
  source 1..80: mol_type = other DNA
cgtaaataggacggcgctcaactgcaatgacagccttaacaccggcttctttgcggcgctgttctatgcgcactccttca

SEQ ID NO: 129368 - DNA, 80 bp, synthetic construct
  source 1..80: mol_type = other DNA
ctgggcccaggtcaaagtacaacaggatacctgggtacagtgaacaaacaaaaggaccgtgggaccagactcctctcaga

SEQ ID NO: 129369 - DNA, 80 bp, synthetic construct
  source 1..80: mol_type = other DNA
gctaaggaggttcgctctctcgacaaaaaggcccttaatcacatcaagggcgtgtggcaagacttactgaatgactctga

SEQ ID NO: 129370 - DNA, 80 bp, synthetic construct
  source 1..80: mol_type = other DNA
gaggaagttgaggttaatatgtactttttatgactgggcggaatttctgctgatcagcagtgaactttgggcgctgacgg

SEQ ID NO: 129371 - DNA, 80 bp, synthetic construct
  source 1..80: mol_type = other DNA
tccggcgaaccgagcactcgtgctgatgcttgtaaaagcgtccgcaatactcgcagcgctgcacgggctgtaccttatcc

SEQ ID NO: 129372 - DNA, 80 bp, synthetic construct
  source 1..80: mol_type = other DNA
tggggtaatatttaattccccttcgtcctttgaatataaggctaaatacccagccacgtataacgcttcacagttctctt

SEQ ID NO: 129373 - DNA, 80 bp, synthetic construct
  source 1..80: mol_type = other DNA
gaaacacatgattgcaggggttttcctcacgtttatgctccttctctcagggcaaataacatggagagacatggcgcaca

SEQ ID NO: 129374 - DNA, 80 bp, synthetic construct
  source 1..80: mol_type = other DNA
tacttacacgtggagagagaatgagacggatgtcttcatattgaacagcacccgaccaccgggggggtcatggttcggct

SEQ ID NO: 129375 - DNA, 80 bp, synthetic construct
  source 1..80: mol_type = other DNA
ggacacagcgttccagattgtggaataatagttccctctggtcctgggacataatttccctcacaaatttgcatttccca

SEQ ID NO: 129376 - DNA, 80 bp, synthetic construct
  source 1..80: mol_type = other DNA
acattgaagatgcaaagcagaaagcggcgcaggcaggtggtgagatcagaggagacagtgctgatactagagctgcagag

SEQ ID NO: 129377 - DNA, 80 bp, synthetic construct
  source 1..80: mol_type = other DNA
caggccataggatggcgtgggacatgatgatgaactggtccccgaccctgacctatgtcacctcttcgctgctgaggata

SEQ ID NO: 129378 - DNA, 80 bp, synthetic construct
  source 1..80: mol_type = other DNA
attacaattagcggtttgcaaattggaacagatactacaaatggcaaacaagacccgatatatgctaataagctgtatca

SEQ ID NO: 129379 - DNA, 80 bp, synthetic construct
  source 1..80: mol_type = other DNA
gacctacaagaccttactagcgcagcttctgtggtggatgcagtacttcatagcacgcattgaggcctgcatgcacgtgt

SEQ ID NO: 129380 - DNA, 80 bp, synthetic construct
  source 1..80: mol_type = other DNA
cacacaaaaaaagtttctctgtgaccgtgtgatgtggcgcattccattttctagcaattttatgtcaatgggggccgtta

SEQ ID NO: 129381 - DNA, 80 bp, synthetic construct
  source 1..80: mol_type = other DNA
aattgcagtcatgattggcttgatcgccagcgtgggagcagttaccctctctaacttccaagggaaggtgatgatgactg

SEQ ID NO: 129382 - DNA, 80 bp, synthetic construct
  source 1..80: mol_type = other DNA
gggtcgcgttgttggctctctgtctcgcctaccttggccgtccccaactcatcagtaccaatccacgggtttcgccggca

SEQ ID NO: 129383 - DNA, 80 bp, synthetic construct
  source 1..80: mol_type = other DNA
ctcgttcctgacagagaggtgttgtaccaacaatatgatgagatggaggagtgctcgcaagctgctccatacatcgagca

SEQ ID NO: 129384 - DNA, 80 bp, synthetic construct
  source 1..80: mol_type = other DNA
ttccatgaactggtgttgaaagatgggaggaagatagtggtgccttgcagagatcaagatgaactgatagggagagggag

SEQ ID NO: 129385 - DNA, 80 bp, synthetic construct
  source 1..80: mol_type = other DNA
agcacggcttgctgaatttgagtaagggtgttttggaagtcatctaagtccacaaagcggtgataagagccggtgttaat

SEQ ID NO: 129386 - DNA, 80 bp, synthetic construct
  source 1..80: mol_type = other DNA
tagatttcatccccgtggagaacatggagacatctatgcgatcccccgtgtttactgacaattcatcgccacccgttgtg

SEQ ID NO: 129387 - DNA, 80 bp, synthetic construct
  source 1..80: mol_type = other DNA
cactaagtacatcatgacctgcatgtcagccgacttggaagtcacaacaagtacctgggtgctgttagggggcgttctgg

SEQ ID NO: 129388 - DNA, 80 bp, synthetic construct
  source 1..80: mol_type = other DNA
tacgccccaccttgcaagccccttctgcgggacgaaatcacattctctgtgggcctaaacacgttcgtggtggggtcgca

SEQ ID NO: 129389 - DNA, 80 bp, synthetic construct
  source 1..80: mol_type = other DNA
cgccaaacaacaccgactcgagttccctggtgcccggggcccaggattccgccccgcccggccccacgctaagggagctg

SEQ ID NO: 129390 - DNA, 80 bp, synthetic construct
  source 1..80: mol_type = other DNA
gctcatgttggggatgatggaacccacgtgaccatcgtaccagatgcggcagtatatcaggtgcctgcccctcatgaaca

SEQ ID NO: 129391 - DNA, 80 bp, synthetic construct
  source 1..80: mol_type = other DNA
gatggtggtgttgcatcgtctttgtctgtgccgtatggtatatcaaaggtcgggtggtgccaggtatgacctacatccta

SEQ ID NO: 129392 - DNA, 80 bp, synthetic construct
  source 1..80: mol_type = other DNA
ttggcgtgtgcggcccaccccggactggtctttgacatcaccaagctcctccttgccctcattggccccatgtggctatt

SEQ ID NO: 129393 - DNA, 80 bp, synthetic construct
  source 1..80: mol_type = other DNA
gggagcaaacttccgagccgacagggtaatagacccgaggcggtgcctgaaaccggtaatactaaaagatggcccagagc

SEQ ID NO: 129394 - DNA, 80 bp, synthetic construct
  source 1..80: mol_type = other DNA
tcgcggcgttggccggtttcagctccatgtcggtctcgtggtcgtcccggtgaaacgcggtggtctccaggttgttgcgc

SEQ ID NO: 129395 - DNA, 80 bp, synthetic construct
  source 1..80: mol_type = other DNA
ccttctagttctggctctaccacagcaggcttatgccttggacgccgccgaacagggagaactagggctggtcgtattgg

SEQ ID NO: 129396 - DNA, 80 bp, synthetic construct
  source 1..80: mol_type = other DNA
tgggcgggtagctcccctcaccgtttatgccttgctgcagctttggccgctcctattactagtgctagctttacctcgga

SEQ ID NO: 129397 - DNA, 80 bp, synthetic construct
  source 1..80: mol_type = other DNA
gccgtcgcagcgctccaggtaaaacagcatcttggccagcagcgccggggaaaacccacacagcatggccaggtgctcgc

SEQ ID NO: 129398 - DNA, 80 bp, synthetic construct
  source 1..80: mol_type = other DNA
aaaaccaccaggtgtattagcacttaattacaaagaccccattgtaactgaaaatggaacccttacactcaagctagggg

SEQ ID NO: 129399 - DNA, 80 bp, synthetic construct
  source 1..80: mol_type = other DNA
gcgcctatccctgcgtacgcgcagcagaccagaggcttgttcagtaccatcgtgacgagccttaccggcaaagacaccaa

SEQ ID NO: 129400 - DNA, 80 bp, synthetic construct
  source 1..80: mol_type = other DNA
caggacatcgtatggcttgggatatgatgatgaactggtctccgactgttggcctggtagtgtctcacttgttgcgcctc

SEQ ID NO: 129401 - DNA, 80 bp, synthetic construct
  source 1..80: mol_type = other DNA
gtggaccgcgaggatactgcgtactcgtacaaggcgcggttcaccctagctgtgggtgataaccgtgtgctagacatggc

SEQ ID NO: 129402 - DNA, 80 bp, synthetic construct
  source 1..80: mol_type = other DNA
gaaccagtgccagaggcctacaatcctgagatgctaaagaaaaggcaactaaccgtgctggacctgcacccaggtgctgg

SEQ ID NO: 129403 - DNA, 80 bp, synthetic construct
  source 1..80: mol_type = other DNA
gcgaaacatgaaagggggagacctctcttgtttaagacaacagagggaatcaataagtgcactcttattgccatggacct

SEQ ID NO: 129404 - DNA, 80 bp, synthetic construct
  source 1..80: mol_type = other DNA
acagctttgaattgcaactggcagatgatcaatctaatcaacaggatcaacaaattccatcaactactgtggcaatcgtg

SEQ ID NO: 129405 - DNA, 80 bp, synthetic construct
  source 1..80: mol_type = other DNA
ttggttccgtagtggtggcgcaggaccacggagatagaacgacggctccacagccagtccggccggtcgccgccggccag

SEQ ID NO: 129406 - DNA, 80 bp, synthetic construct
  source 1..80: mol_type = other DNA
gaggatgcggcgagcctacgagtcttcacggaggctatgactaggtactccgccccccccggggacttgccccaaccaga

SEQ ID NO: 129407 - DNA, 80 bp, synthetic construct
  source 1..80: mol_type = other DNA
atcaattcatggctgggaaacatcatccagtatgctccaaccatatgggttcgcatggtcctaatgacacacttcttctc

SEQ ID NO: 129408 - DNA, 80 bp, synthetic construct
  source 1..80: mol_type = other DNA
ctatgtatataggtgatttatgcggaggcatattcctagctgggcaactctttaccatcagaccccggatacaccagacc

SEQ ID NO: 129409 - DNA, 80 bp, synthetic construct
  source 1..80: mol_type = other DNA
ttgactctttcgagcccctgagggccgaagaagacgacacagagctctcgataccggcagagtgcttcaagaaaccgccc

SEQ ID NO: 129410 - DNA, 80 bp, synthetic construct
  source 1..80: mol_type = other DNA
cgccggtagagatccgttctcaacttacgggtgatttctgggcgttatttaaccaatatcgagacattttagaacatccc

SEQ ID NO: 129411 - DNA, 80 bp, synthetic construct
  source 1..80: mol_type = other DNA
agacgtcgatctcgtactccagcggggcgatcgccgcattcgtcgccccctactttgagtcagtgcttcgggccccccgg

SEQ ID NO: 129412 - DNA, 80 bp, synthetic construct
  source 1..80: mol_type = other DNA
acgtcccgcgtgtgttggtcaaaggccggtagcgattccagcaactggaccatgggcacgaccgcggccgaggccacgtg

SEQ ID NO: 129413 - DNA, 80 bp, synthetic construct
  source 1..80: mol_type = other DNA
ccaaactcactccattgcgcgacgcgtccctgcttgacttgtcaggctggttcacgtcgggcttcagcggggaggacatt

SEQ ID NO: 129414 - DNA, 80 bp, synthetic construct
  source 1..80: mol_type = other DNA
tcaaatggtcatcgatatttttgtcggtggtcattggggcattctcgcgggcatactgtattacagcatggtggccaatt

SEQ ID NO: 129415 - DNA, 80 bp, synthetic construct
  source 1..80: mol_type = other DNA
gtaggagtaggcatctacttgctccccaaccgatgaaggggagcttaaacactccggccatttaggccttctgttttttt

SEQ ID NO: 129416 - DNA, 80 bp, synthetic construct
  source 1..80: mol_type = other DNA
gtagcctacggtttgacaggcctctggtcgttggctttgctcgtcctgttgctcccgcaacgtgcttacgcttggacggg

SEQ ID NO: 129417 - DNA, 80 bp, synthetic construct
  source 1..80: mol_type = other DNA
actaaccttacagttgtggctaatgcaaatttatcatcaactgttaaatttagagctgaaagtttatacattggaactga

SEQ ID NO: 129418 - DNA, 80 bp, synthetic construct
  source 1..80: mol_type = other DNA
ggggcctgcctacctccttaaaatgtccctactacgggtgccgtactttgtgagggctcacgctctgctacgagtatgca

SEQ ID NO: 129419 - DNA, 80 bp, synthetic construct
  source 1..80: mol_type = other DNA
ataatgcataccatctgcccttgcggtgcggagcttgccggccacatcaaaaacggttcgatgaggatagtcgggcccaa

SEQ ID NO: 129420 - DNA, 80 bp, synthetic construct
  source 1..80: mol_type = other DNA
tgaaaattgtggcgaggtccaagtgctatccaccgccacgcagtcctttttaggtagtgcgatcaacggcgtcatgtgga

SEQ ID NO: 129421 - DNA, 80 bp, synthetic construct
  source 1..80: mol_type = other DNA
ctggcctaagctagaacaattttggcaaaaacatctctggaactttgtcagcgggatccagtacctggcgggactgtcaa

SEQ ID NO: 129422 - DNA, 80 bp, synthetic construct
  source 1..80: mol_type = other DNA
agtggactaccaaagaaaagcagaccggagtaaatgcaggagacaaagaagttacaaagacatttggacttgccgccatg

SEQ ID NO: 129423 - DNA, 80 bp, synthetic construct
  source 1..80: mol_type = other DNA
ccgcgtccgcaaacagatcgtcgaccaacaggtccatgggtgcggttgggtccgggaataacgatctcgagaggcgaatg

SEQ ID NO: 129424 - DNA, 80 bp, synthetic construct
  source 1..80: mol_type = other DNA
aagaacctacgagagatcctgacaccccatccctttatatagaaaaaaaaaataaatttaaaacatacaccggataaaag

SEQ ID NO: 129425 - DNA, 80 bp, synthetic construct
  source 1..80: mol_type = other DNA
gagcatcgtggtgcaggagaggggcctgagtttagcggacaaggtggcggccattaactattcgatgcagagcctggtga

SEQ ID NO: 129426 - DNA, 80 bp, synthetic construct
  source 1..80: mol_type = other DNA
atggaaaagttgaactcaccggaactacacgtgtgacaacggcctctgcagctcagcgccgagggagagtcggcaggcac

SEQ ID NO: 129427 - DNA, 80 bp, synthetic construct
  source 1..80: mol_type = other DNA
gaccgcgccgtttgcgtgggcggcgttcacgaaagcaaaacccgacgtcgcgagcagccccgttaggcgccagaagagag

SEQ ID NO: 129428 - DNA, 80 bp, synthetic construct
  source 1..80: mol_type = other DNA
accgagagactgtacgtggagggacccatgttcaactctcgcggtgagcgttgtggctaccgcaggtgtagggctagcgg

SEQ ID NO: 129429 - DNA, 80 bp, synthetic construct
  source 1..80: mol_type = other DNA
ggtgatggtgctgcgctggagtgacggcagttatctggaagatcaggatatgtggcggatgagcggcattttccgtgacg

SEQ ID NO: 129430 - DNA, 80 bp, synthetic construct
  source 1..80: mol_type = other DNA
cgggacctccgccggggatcatttgggcaaagtcatcgatgcccttacatgcggcttcgccgacctcatgggatacatcc

SEQ ID NO: 129431 - DNA, 80 bp, synthetic construct
  source 1..80: mol_type = other DNA
cctgccatcgcctctcttatgtcattcaccgcggctgtcacgagccctctgactacccagcaaaccctcctcttcaacat

SEQ ID NO: 129432 - DNA, 80 bp, synthetic construct
  source 1..80: mol_type = other DNA
ctctacttaaaagcaagcgcgcgactggctgctttgcgcgaacatcgcaaaacacgtcggaatgattaaacaacaaaaca

SEQ ID NO: 129433 - DNA, 80 bp, synthetic construct
  source 1..80: mol_type = other DNA
gcgggggcagcaataacaggtaccagcgaaagactggatgtccaattggacgatgatggagactttcatctgctcaatga

SEQ ID NO: 129434 - DNA, 80 bp, synthetic construct
  source 1..80: mol_type = other DNA
taacagacattatacgaattcctttaaacacgcgtttaagggtccgggaactttctctatggtcacatactctcccgcgg

SEQ ID NO: 129435 - DNA, 80 bp, synthetic construct
  source 1..80: mol_type = other DNA
gcacctattacggcctattcccaacagacgcgaggtttgtttggctgcatcatcactagcctcacaggccgggacaagaa

SEQ ID NO: 129436 - DNA, 80 bp, synthetic construct
  source 1..80: mol_type = other DNA
cgcctacgacggcgcgcaagcaacgtcaattggccttcttgttatcataaccttgaccatcttcacactgacgccgactt

SEQ ID NO: 129437 - DNA, 80 bp, synthetic construct
  source 1..80: mol_type = other DNA
aagttcactttcagaagaccggtaagagcgtgagccaggtgcaaatggtacttgatttccaggggggtgttggaagaggc

SEQ ID NO: 129438 - DNA, 80 bp, synthetic construct
  source 1..80: mol_type = other DNA
ctcggcttcatgcgtggcgaagattagaggccgcattttctccaacgcctcccattacggcataaatttgactgaagtcg

SEQ ID NO: 129439 - DNA, 80 bp, synthetic construct
  source 1..80: mol_type = other DNA
cgaggtcaaggtgcgccccatcaagcaggtggcgccgggcctgggcgtgcaaaccgtggacattcagatccccaccgaca

SEQ ID NO: 129440 - DNA, 80 bp, synthetic construct
  source 1..80: mol_type = other DNA
ttcacagcaccatgaatactttgaccagtgtcgtgctgctctctcttttagtcattaatgtggaatgtgccgatcctatt

SEQ ID NO: 129441 - DNA, 80 bp, synthetic construct
  source 1..80: mol_type = other DNA
gaaccgggggaccccgatctcagcgacgggtcttggtctaccgtaagcagtgatggcggtacggaggacgtcgtgtgctg

SEQ ID NO: 129442 - DNA, 80 bp, synthetic construct
  source 1..80: mol_type = other DNA
tcatgtggaagtgtttgactcggctcaagcccacgctcgcgggtcccacacctctcctgtaccgcctgggctctgtcact

SEQ ID NO: 129443 - DNA, 80 bp, synthetic construct
  source 1..80: mol_type = other DNA
ccagactacaatccacccttggttgaaaggtggaagcagccgagctacgaccccccggtcgttcacggctgtgctctacc

SEQ ID NO: 129444 - DNA, 80 bp, synthetic construct
  source 1..80: mol_type = other DNA
tggtagacagaggatggggaaatggatgtggattatttggaaagggaggcattgtgacctgtgctatgttcacatgtaag

SEQ ID NO: 129445 - DNA, 80 bp, synthetic construct
  source 1..80: mol_type = other DNA
agacgaaaccgaaacgcgtaagtcattttactttaatcaggacggactgactggaggccctcaacctttagcggccgcct

SEQ ID NO: 129446 - DNA, 80 bp, synthetic construct
  source 1..80: mol_type = other DNA
gacggcaactaagggtaagtgggcggagctaagggcttataaagacaccataaggaaaacttaagctattttgttatttt

SEQ ID NO: 129447 - DNA, 80 bp, synthetic construct
  source 1..80: mol_type = other DNA
gcccggggagcaccgcgggggcgttttcgtcggtcggatttccgacccgagcgagggtcttgtccgcaggcaccactatg

SEQ ID NO: 129448 - DNA, 80 bp, synthetic construct
  source 1..80: mol_type = other DNA
gtgctgcaggctctaacggcttagtgtggtttgtcatcttcttcattgccgcctggtacatcagaggacgcatagtcccc

SEQ ID NO: 129449 - DNA, 80 bp, synthetic construct
  source 1..80: mol_type = other DNA
taaatcccttgagcaattctctcatccgacaccataacctggtatactccacaacatcccggagtgccgctatgcggcaa

SEQ ID NO: 129450 - DNA, 80 bp, synthetic construct
  source 1..80: mol_type = other DNA
aacttagtgtcagcctatgaacaaaccgttacagaggaacgtaattttcaaaaaagctttaataatcacgtgcgcacgct

SEQ ID NO: 129451 - DNA, 80 bp, synthetic construct
  source 1..80: mol_type = other DNA
cgcgcgacgaggaagacttccgagcgatcccagcccagaggcaggcgccaacctataccaaaggcgcgccagccccaggg

SEQ ID NO: 129452 - DNA, 80 bp, synthetic construct
  source 1..80: mol_type = other DNA
ggtgacatgtgcggggccgtcttccttgtgggacaagccttcacgttcaggccccgtcgccatcaaacggtccagacctg

SEQ ID NO: 129453 - DNA, 80 bp, synthetic construct
  source 1..80: mol_type = other DNA
agcacccacaggtccgcccgcagcgccgccgtgacttccggggggggggcccggacggcatcggccaggtcggtccactc

SEQ ID NO: 129454 - DNA, 80 bp, synthetic construct
  source 1..80: mol_type = other DNA
ctcccctgtgaaccggaaccggacgtggccgtgctaacatccatgcttacagacccagctcacatcactgcggaggctgc

SEQ ID NO: 129455 - DNA, 80 bp, synthetic construct
  source 1..80: mol_type = other DNA
caaagggttttcaaagaaaaggttgacacaaaagctcctgaaccaccgctaggagtcgcccaaatcatggatgtgacaac

SEQ ID NO: 129456 - DNA, 80 bp, synthetic construct
  source 1..80: mol_type = other DNA
ctacccctcctaatccctcttattgctgcggccattggggccgttcccggaattgcttcagtggccttgcaggcttctcg

SEQ ID NO: 129457 - DNA, 80 bp, synthetic construct
  source 1..80: mol_type = other DNA
ctcactctcttccgcatcgctgtctgcgagggccagctgttggggtgagtactccctctcaaaagcgggcatgacttctg

SEQ ID NO: 129458 - DNA, 80 bp, synthetic construct
  source 1..80: mol_type = other DNA
accaccacaggagtttaccgaattatggccagggggattctcggcacttaccaggccggcgttggagtcatgtacgagaa

SEQ ID NO: 129459 - DNA, 80 bp, synthetic construct
  source 1..80: mol_type = other DNA
tctgttatgccccacggactgtttcaggaagcatcctgacgccaattacatcacgtgtggatctgggccttggctcacac

SEQ ID NO: 129460 - DNA, 80 bp, synthetic construct
  source 1..80: mol_type = other DNA
cggcttgattcacctacaccagaatatcgtggatgtccagtacctctacggcattggatctacggttgtatcctgggcac

SEQ ID NO: 129461 - DNA, 80 bp, synthetic construct
  source 1..80: mol_type = other DNA
ttggcctggccactctgggagctgtttggtgtctggttttgcggacttcaattagtcgcatgatgctaggcacgatggtg

SEQ ID NO: 129462 - DNA, 80 bp, synthetic construct
  source 1..80: mol_type = other DNA
atcatggggctggcaacaagaccttggccggccccaagggaccagtcactcagatgtacagcagcgcagaggtggacctc

SEQ ID NO: 129463 - DNA, 80 bp, synthetic construct
  source 1..80: mol_type = other DNA
aaccccccccggtagtataacagtgccacattccaacatcgaagaggtggctttgactaatgatggggagattcccttct

SEQ ID NO: 129464 - DNA, 80 bp, synthetic construct
  source 1..80: mol_type = other DNA
cgaccactggagaagcacacaacacaaagcgggccgaccctaaatacatctgcaagcaaggtgtgactgacagaggatgg

SEQ ID NO: 129465 - DNA, 80 bp, synthetic construct
  source 1..80: mol_type = other DNA
gctcaaacctacactgactggtcctacccccctcctgtatcgcttgggtgccgtgaccaaagaagttaccctgacgcacc

SEQ ID NO: 129466 - DNA, 80 bp, synthetic construct
  source 1..80: mol_type = other DNA
cagcgaagacagctgcgttcccggtcgccggggccgggcaccaccacgccgtattggtattcgtatcggctaaggagatt

SEQ ID NO: 129467 - DNA, 80 bp, synthetic construct
  source 1..80: mol_type = other DNA
aataaaggtttacttttgtatcttttccctgtctgtgttggatgtatcgcggggatgcgtgggagtggtggtgcgtggga

SEQ ID NO: 129468 - DNA, 80 bp, synthetic construct
  source 1..80: mol_type = other DNA
cgcgcgcggatgacggcccgccctgtaccgacgggccctacgtgacgtttgataccctgtttatggtgtcgtcgatcgac

SEQ ID NO: 129469 - DNA, 80 bp, synthetic construct
  source 1..80: mol_type = other DNA
gactcatacacctccaccaaaacatcgtggacgtgcaatacctttacggtgttgggtctggcatagtgggctgggctctt

SEQ ID NO: 129470 - DNA, 80 bp, synthetic construct
  source 1..80: mol_type = other DNA
cacgctcttcagcatccagcgcatcttttcccccggtgcggcacagaggatccaattgatcaacacaaatggatcgtggc

SEQ ID NO: 129471 - DNA, 80 bp, synthetic construct
  source 1..80: mol_type = other DNA
atcagtccactgagcaactccctcattcgccaccacaacctggtatactccacaacatcacggagtgcctctctccgcca

SEQ ID NO: 129472 - DNA, 80 bp, synthetic construct
  source 1..80: mol_type = other DNA
agctctactttcctgcctaacggtcccgacatcggctctgacttacggcaacgcctctggtctttactatctcaccaatg

SEQ ID NO: 129473 - DNA, 80 bp, synthetic construct
  source 1..80: mol_type = other DNA
gaggtgcgccaggtcggcgaccgccagccgcggtttaccgccaccagcatcgcgcgcgtcgacgtcgcacctgggtgccg

SEQ ID NO: 129474 - DNA, 80 bp, synthetic construct
  source 1..80: mol_type = other DNA
tggaaagaaacatggtcgttcccgaaggaagagtcatagacttgggctgtggaagaggaggctggtcatattactgtgca

SEQ ID NO: 129475 - DNA, 80 bp, synthetic construct
  source 1..80: mol_type = other DNA
gagggccttgtatctggacacttacagaatcattcttcttgtcataggaatttgttccctgctgcaagagaggagaaaga

SEQ ID NO: 129476 - DNA, 80 bp, synthetic construct
  source 1..80: mol_type = other DNA
aggtgtggataatgaaatgacctcaagtaccactgaatttatagaagaaattggagacgttttggcgttagacagagcct

SEQ ID NO: 129477 - DNA, 80 bp, synthetic construct
  source 1..80: mol_type = other DNA
aaattgggaaaggacagaaaaaggaggaaaagacaaaaccaaactctagtgatttgggacaaagacaatccagaccaaag

SEQ ID NO: 129478 - DNA, 80 bp, synthetic construct
  source 1..80: mol_type = other DNA
ttcaccataatggcagcactcctggcatacaccataggaacgacatatttccaaagagtcctgattttcatcttactgac

SEQ ID NO: 129479 - DNA, 80 bp, synthetic construct
  source 1..80: mol_type = other DNA
gtgtgatataggagaatcatcaccaaatccaaccatcgaagccgggagaacacttagggttttgaatatggtagaaaatt

SEQ ID NO: 129480 - DNA, 80 bp, synthetic construct
  source 1..80: mol_type = other DNA
ttccagagtgagggaagagaagcctgacttcgtggtgacgactgatatctcggaaatgggagccaatcttgacgtgagtc

SEQ ID NO: 129481 - DNA, 80 bp, synthetic construct
  source 1..80: mol_type = other DNA
gctccttttctatattccttcttgctttactctcttgcttaatccatccagcagctagtctagagtggcggaatacgtcc

SEQ ID NO: 129482 - DNA, 80 bp, synthetic construct
  source 1..80: mol_type = other DNA
gatgagaaaggcgaggacgcgttcaaagaaaaaaataacacagagctccagcagccccggagaagccggatacggcgacc

SEQ ID NO: 129483 - DNA, 80 bp, synthetic construct
  source 1..80: mol_type = other DNA
tagcgttatggttaaccagcaccccgaagaggacgcaaaagtgtgtaaatccagtgataattcaccgctttataacacca

SEQ ID NO: 129484 - DNA, 80 bp, synthetic construct
  source 1..80: mol_type = other DNA
ggctccttcactcaaagccagctgcacccactacaaaggcggccccgacaccgatatggtagacgccaatcttttccttg

SEQ ID NO: 129485 - DNA, 80 bp, synthetic construct
  source 1..80: mol_type = other DNA
gactggcccatggtaagtacatgcaagcttgcctcctcaagatcggtgcttggaccggcacctacctgtatgaccatctg

SEQ ID NO: 129486 - DNA, 80 bp, synthetic construct
  source 1..80: mol_type = other DNA
aattctgggctaaacacatgtggaacttcatcagtggcatccagtacctcgcgggtttgtcaaccttaccagggaatcct

SEQ ID NO: 129487 - DNA, 80 bp, synthetic construct
  source 1..80: mol_type = other DNA
ccgacggagtgtttcagctcggagggtccggacgttcatcctttaccgctcgtcaagcctacctgacactacagagctca

SEQ ID NO: 129488 - DNA, 80 bp, synthetic construct
  source 1..80: mol_type = other DNA
ttgcctgccatcttatcccccggtgctctagtggttggcgtgatctgcgcagccatcctgcgccggcacgttggacctgg

SEQ ID NO: 129489 - DNA, 80 bp, synthetic construct
  source 1..80: mol_type = other DNA
gacttcaagagttggctgaaggccaaattgttccctcgtctaccagggattccttttctatcttgccagcgcggctatag

SEQ ID NO: 129490 - DNA, 80 bp, synthetic construct
  source 1..80: mol_type = other DNA
accagcaaggagctgctcaagcgcgatcccgtcgttttacaacgtcgtgactgggaaaaccctggcgttacccaacttaa

SEQ ID NO: 129491 - DNA, 80 bp, synthetic construct
  source 1..80: mol_type = other DNA
ctccaacggcttcaggaccaaaaacgaccaaaggaacagaatcacgcgctttgaaaagaccggctgggtatggggcggaa

SEQ ID NO: 129492 - DNA, 80 bp, synthetic construct
  source 1..80: mol_type = other DNA
agaccagcgttgctggtatctttcatcttcagagctaattggacaccccgtgaaagcatgctgctggccttggcctcgtg

SEQ ID NO: 129493 - DNA, 80 bp, synthetic construct
  source 1..80: mol_type = other DNA
ggcaaattcctcgccgatgggggctgtgcgggcggcgcctacgacatcatcatatgtgatgaatgccatgccgtggactc

SEQ ID NO: 129494 - DNA, 80 bp, synthetic construct
  source 1..80: mol_type = other DNA
caatctactgcctgggatcctgtctccgggagccctggtggtgagggtcatctgcgcggccattctgcgccgccacgtgg

SEQ ID NO: 129495 - DNA, 80 bp, synthetic construct
  source 1..80: mol_type = other DNA
gcagcatgcgaaagggatggcttcactcttcaccctcggcgctcagcagcggctccaacttgtaaacagcaatggctcct

SEQ ID NO: 129496 - DNA, 80 bp, synthetic construct
  source 1..80: mol_type = other DNA
tctggcttaattatgagcggagtaacacaaacattaaacgtcaatgccaataccggcaaaggtcttgctgttgagaacaa

SEQ ID NO: 129497 - DNA, 80 bp, synthetic construct
  source 1..80: mol_type = other DNA
gttactctccaggcgaactcaacagggtggcagcttgcctcaggaagcttggggcaccaccgttgagagcttggcgacat

SEQ ID NO: 129498 - DNA, 80 bp, synthetic construct
  source 1..80: mol_type = other DNA
agcggatggcggagatgctcaagtctaagatacagggcctcttacaacaggccacaaaacaggcccaagacatacagcca

SEQ ID NO: 129499 - DNA, 80 bp, synthetic construct
  source 1..80: mol_type = other DNA
gatttcgtgcctgtggagaatatggagaccacaatgaggtccccatcattcactgacaactcgtctccccccgcagtacc

SEQ ID NO: 129500 - DNA, 80 bp, synthetic construct
  source 1..80: mol_type = other DNA
accagctgtgccccaaacttaccaggtgggctacctgcacgcaccgacaggtagcgggaagagcaccaaggtccctgccg

SEQ ID NO: 129501 - DNA, 80 bp, synthetic construct
  source 1..80: mol_type = other DNA
aaaggagggaggcatctcatcttttgccattcaaggaagaagtgcgacgagctcgcgagtgctctccggagcatgggcct

SEQ ID NO: 129502 - DNA, 80 bp, synthetic construct
  source 1..80: mol_type = other DNA
acatgtgcaaagttttcctgctcagagaaaataacaggaaacatggtgcaggttgagaacctggaatacacagtggttgt

SEQ ID NO: 129503 - DNA, 80 bp, synthetic construct
  source 1..80: mol_type = other DNA
cggcgccgctggcgccaccacccgcgggctcacctccctcttcagcccggggtctcggcagaacctccagctcatcaaca

SEQ ID NO: 129504 - DNA, 80 bp, synthetic construct
  source 1..80: mol_type = other DNA
tgctcagccgccctcctgacattatgggacaatagtgccagtgcggtgtggaattcgaccacagccacaggcttgtgcca

SEQ ID NO: 129505 - DNA, 80 bp, synthetic construct
  source 1..80: mol_type = other DNA
agatagggcatttgcatgccccaactggcagcggcaagagcaccaaggtccctgcagcctatgcggctcaggggtataag

SEQ ID NO: 129506 - DNA, 80 bp, synthetic construct
  source 1..80: mol_type = other DNA
aagggtggtcaggccaatcttataacaaacggaaccgatcaaactctaacaagcgacgttaacttacagttctttgcctt

SEQ ID NO: 129507 - DNA, 80 bp, synthetic construct
  source 1..80: mol_type = other DNA
gtaaaaagcgttgaattgtagccatagtctgaccggtcaaacgagcgcaatcttgaatgctctaaacatagagagaataa

SEQ ID NO: 129508 - DNA, 80 bp, synthetic construct
  source 1..80: mol_type = other DNA
ggccctgcccgtttgggcgcggccggactataaccccccgctagtggagacgtggaaaaagcccgactacgaaccacctg

SEQ ID NO: 129509 - DNA, 80 bp, synthetic construct
  source 1..80: mol_type = other DNA
tggttatcatcggccaggacccatatcaccaccccggccaggcgcacggacttgcgtttagcgtgcgcgcgaacgtgccg

SEQ ID NO: 129510 - DNA, 80 bp, synthetic construct
  source 1..80: mol_type = other DNA
gcggtgatgactgcgtggtgaaacctttggacgaccgcttcgccacatcactacacttcctaaatgccatgtcaaaggtc

SEQ ID NO: 129511 - DNA, 80 bp, synthetic construct
  source 1..80: mol_type = other DNA
aggcgccaacctattcccaaggagcgccgaccgacgggccggcactgggctcagcctggttatccctggcccctctacgg

SEQ ID NO: 129512 - DNA, 80 bp, synthetic construct
  source 1..80: mol_type = other DNA
caatccgtctgtggaccagtctactgcttcacaccctcaccggtagtggtgggcaccaccgacaagagaggagcaccaac

SEQ ID NO: 129513 - DNA, 80 bp, synthetic construct
  source 1..80: mol_type = other DNA
ccaggtcgtccttgtagaacgcgggtgggggggcctgggtccgcaactgctccagaaacctgtcggcgatatcaggtgcc

SEQ ID NO: 129514 - DNA, 80 bp, synthetic construct
  source 1..80: mol_type = other DNA
gggcgcctcagcttggccgcagggccggtggcctcgggggacgagcggcgacgagacgagcggctcactcgccatcggta

SEQ ID NO: 129515 - DNA, 80 bp, synthetic construct
  source 1..80: mol_type = other DNA
gcgtcgcgaaggccctgcagtttgtgccagtagaggctctggcctctcaggtcagatctccatctttcagtgacaactcg

SEQ ID NO: 129516 - DNA, 80 bp, synthetic construct
  source 1..80: mol_type = other DNA
gcccatggcattgaccctaacatcaggactggggttaggaccatcaccactggtgcggccatcacttattccacctatgg

SEQ ID NO: 129517 - DNA, 80 bp, synthetic construct
  source 1..80: mol_type = other DNA
cgcacccactatcttcatattgttgcagatgaaacgcgccagaccgtctgaagacaccttcaaccccgtgtatccatatg

SEQ ID NO: 129518 - DNA, 80 bp, synthetic construct
  source 1..80: mol_type = other DNA
tgcaattggaccaggggagagccttgtggtttggagcacagggaccgctcagaactgtcacccttgctcttatccactac

SEQ ID NO: 129519 - DNA, 80 bp, synthetic construct
  source 1..80: mol_type = other DNA
gggcggtgcaaggccattccatccggggcctcacgtccctctttacatctgggccggctcagaaaatccagcttgtaaac

SEQ ID NO: 129520 - DNA, 80 bp, synthetic construct
  source 1..80: mol_type = other DNA
ggaggccccgtgctgtgcccctccggccacgtggtaggtatcttccgcgcagccgtgtgtaccaggggcgttgcaaagtc

SEQ ID NO: 129521 - DNA, 80 bp, synthetic construct
  source 1..80: mol_type = other DNA
agggagacttcagtcgccgcagagatcctgaggccgactaagaggttcccccctgctctgccggtctgggcccagccgag

SEQ ID NO: 129522 - DNA, 80 bp, synthetic construct
  source 1..80: mol_type = other DNA
ggaaaagttcattctcatgatcctcatcgagggcatcttttttgccgcctcgtttgccgccatcgcctaccttcgcacca

SEQ ID NO: 129523 - DNA, 80 bp, synthetic construct
  source 1..80: mol_type = other DNA
aatctgccccacagattgctttcggaaacacccggatgcgacttacactcgctgcggctcagggccttggatcacgccgc

SEQ ID NO: 129524 - DNA, 80 bp, synthetic construct
  source 1..80: mol_type = other DNA
gagaaggcgggcaccatcacgtagtagtaaatcttgtggtgcacggtccagtccgccccccggtgcggccggtcgtccgc

SEQ ID NO: 129525 - DNA, 80 bp, synthetic construct
  source 1..80: mol_type = other DNA
tacatcatgacttgtatgtcagcagacttagaggtcgtgacaagcacatgggtcctgctggggggattgctggctgcctt

SEQ ID NO: 129526 - DNA, 80 bp, synthetic construct
  source 1..80: mol_type = other DNA
tggggacggaagtgggtgtgacccaccaggcccgcgggcgaacccgacccatgttcgtctgtcgcttcgagcgagcggac

SEQ ID NO: 129527 - DNA, 80 bp, synthetic construct
  source 1..80: mol_type = other DNA
cgacaggggggcaaatcgcccggcaaacccagcgttttacgagcttctttgacctcgggccgcagcagaaaatccaactt

SEQ ID NO: 129528 - DNA, 80 bp, synthetic construct
  source 1..80: mol_type = other DNA
ggtcaccatacacagagagacaggctcgggtgtcccggaccgtcgcaccaaccacgccttagttaggccgatccgcagtt

SEQ ID NO: 129529 - DNA, 80 bp, synthetic construct
  source 1..80: mol_type = other DNA
ccaccccagccttgtgtttgaagtgacaaagtggcttatggctttagcttgccctctctacctcctccagcactgtgtgc

SEQ ID NO: 129530 - DNA, 80 bp, synthetic construct
  source 1..80: mol_type = other DNA
ttgcctcagcaaagcctatgccaacatgtggtcactgatgtattttcacaaaagggacatgaggctactgtcattggctg

SEQ ID NO: 129531 - DNA, 80 bp, synthetic construct
  source 1..80: mol_type = other DNA
tggacactttcgaccaaggctggggtcccatcacgtatgccaacatcagtggtcccgctatggacaagccctactgctgg

SEQ ID NO: 129532 - DNA, 80 bp, synthetic construct
  source 1..80: mol_type = other DNA
gtgctacggaggagcttggagcctggaggaaaagtggaaaggtgaaatggtacaggtccacgccttcccaccggggaagg

SEQ ID NO: 129533 - DNA, 80 bp, synthetic construct
  source 1..80: mol_type = other DNA
acgataaattttgacgagcggtcccggtggggcggtgatctgaagaccattttgcacaccaacatgcccaatgtgaacga

SEQ ID NO: 129534 - DNA, 80 bp, synthetic construct
  source 1..80: mol_type = other DNA
gaggaagctcttagaggactcccaataagataccaaaccccagctatcaaagccgagcataccgggcgagagattgtgga

SEQ ID NO: 129535 - DNA, 80 bp, synthetic construct
  source 1..80: mol_type = other DNA
gcgcgccgacccacgggccggtcctggggtcaacccgggtacccttggcccctttacgccaatgaaggcctcgggtgtgc

SEQ ID NO: 129536 - DNA, 80 bp, synthetic construct
  source 1..80: mol_type = other DNA
cgtcggaattttccgggcggctgtgtgcaccaggggggtagcaaagtccattgacttcatccctgtcgagtcgcttgaca

SEQ ID NO: 129537 - DNA, 80 bp, synthetic construct
  source 1..80: mol_type = other DNA
gactgtttggtttgttccaagtataaaagcaggaaatgacatagcagcttgtcttagaaaaaatggaaagaaagtgatac

SEQ ID NO: 129538 - DNA, 80 bp, synthetic construct
  source 1..80: mol_type = other DNA
gattcatctgcatcagaacattgtggatgtgcagtatctgtatggcgtgggcagcggcatggtgggctgggcgctgaaat

SEQ ID NO: 129539 - DNA, 80 bp, synthetic construct
  source 1..80: mol_type = other DNA
catgccaaacatccggggggacttgaggtccggctcctggaggcaaaactgcccccgggcgatcgtggagttggagttga

SEQ ID NO: 129540 - DNA, 80 bp, synthetic construct
  source 1..80: mol_type = other DNA
gccccggcctatctcgtacttgaaaggctcctcggggggcccactgctgtgccccgcgggacacgccgtaggcatattta

SEQ ID NO: 129541 - DNA, 80 bp, synthetic construct
  source 1..80: mol_type = other DNA
cttccccggaaaaccaaatacgctgtgagaacctggctctttgagaacggagaagaaagggtgacccgcatggctgtgag

SEQ ID NO: 129542 - DNA, 80 bp, synthetic construct
  source 1..80: mol_type = other DNA
caatgagcaatttggcacttgatttgaggccggcgacagcttgggcgttgtatggtggaagcactgtggttctcactcca

SEQ ID NO: 129543 - DNA, 80 bp, synthetic construct
  source 1..80: mol_type = other DNA
tgaatactccggggcttcccgtgtgccaagatcatcttgaattttgggagggcgtcttcacgggtctcacccatatagat

SEQ ID NO: 129544 - DNA, 80 bp, synthetic construct
  source 1..80: mol_type = other DNA
ctcctccttgcggcatctatggaggggagcagagttctggaagcaataactcgcttatttgccccactgactgcttcagg

SEQ ID NO: 129545 - DNA, 80 bp, synthetic construct
  source 1..80: mol_type = other DNA
acggggggaccgcagggaggcgctgctctccccgaggcctttgtccactctcaaagggtcctcgggagtgcctgtcctct

SEQ ID NO: 129546 - DNA, 80 bp, synthetic construct
  source 1..80: mol_type = other DNA
acaacaatgccttttattctgttcttttattgccgtcatcgccgggaggccttccgttcgggcttccgtgtttgaactaa

SEQ ID NO: 129547 - DNA, 80 bp, synthetic construct
  source 1..80: mol_type = other DNA
accgcctccacgctcgcgtccctctttacaactgggccgcaacagaaggttcagcttataaacaccaatggcaggtggca

SEQ ID NO: 129548 - DNA, 80 bp, synthetic construct
  source 1..80: mol_type = other DNA
ctcgcatcaccgaagggtcctgttgtccagatgtataccaacgtggaccaggaccttgtaggctggcctgcccccccagg

SEQ ID NO: 129549 - DNA, 80 bp, synthetic construct
  source 1..80: mol_type = other DNA
cggcgtcttgcctaccagctttggcaacacaataacctgttacatcaaggccaccgcagccagcagagctgcgggtctca

SEQ ID NO: 129550 - DNA, 80 bp, synthetic construct
  source 1..80: mol_type = other DNA
ggtttcctggaaaaaacaaagaaagattttggattgggaagcatcacaacccagcaacctgagagcaatatcctggacat

SEQ ID NO: 129551 - DNA, 80 bp, synthetic construct
  source 1..80: mol_type = other DNA
ttaacggtgccggcgtgggtgaggcccacgtccaggtggcaggcgacgattcgcgtgggaagcacccgggtgatgaccgc

SEQ ID NO: 129552 - DNA, 80 bp, synthetic construct
  source 1..80: mol_type = other DNA
accatcgaccccgccgttcgggcggttctgcgatccatatccgagcgcgcggcggtcgagcgcatcagcgaaagctttgg

SEQ ID NO: 129553 - DNA, 80 bp, synthetic construct
  source 1..80: mol_type = other DNA
ggattttgtgccggttgaatctcttgagaccacgatgcggtcccccgttttcacagacaattccacgcccccagctgtgc

SEQ ID NO: 129554 - DNA, 80 bp, synthetic construct
  source 1..80: mol_type = other DNA
aaacatcaagtatgaggttgcaatttttgtgcatggttcaacggactctacgtcacatggcaattactctgagcagattg

SEQ ID NO: 129555 - DNA, 80 bp, synthetic construct
  source 1..80: mol_type = other DNA
tgtgcgagaagatggctttgtatgacatcactcagaaactccccttggccacgatgggtgcctcctacgggttccaatat

SEQ ID NO: 129556 - DNA, 80 bp, synthetic construct
  source 1..80: mol_type = other DNA
atgccacagcttgagtaaactgtgcagcctgtagctccacctgagaaggtgtaaaaaatctgggaggccacaaaccatgg

SEQ ID NO: 129557 - DNA, 80 bp, synthetic construct
  source 1..80: mol_type = other DNA
tctctgccacacatggcaagcagccatgggcgtgtggcagcagtgtctcgaggacgagaacctgaaggagctggacaagc

SEQ ID NO: 129558 - DNA, 80 bp, synthetic construct
  source 1..80: mol_type = other DNA
gtcggatgcctcggtgtccccgcgggcggccccgggtgcggcgcgttgcgtcggccgtccgggtgcctctcggtcgcccc

SEQ ID NO: 129559 - DNA, 80 bp, synthetic construct
  source 1..80: mol_type = other DNA
aacgccactggtttcaccaaaacatgtggcgggcccccctgtaacatcgggggccacggcaacaacaccctggtttgtcc

SEQ ID NO: 129560 - DNA, 80 bp, synthetic construct
  source 1..80: mol_type = other DNA
gcctgcatgtctgccgacctcgaggtggtgactagcacatgggttctggtaggcggcctcctagcagccctagctgcgta

SEQ ID NO: 129561 - DNA, 80 bp, synthetic construct
  source 1..80: mol_type = other DNA
tgtcaagaacgggacgatgaggatcgtcggtcctaagacctgtaggaacatgtggagtgggaccttccccatcaatgcct

SEQ ID NO: 129562 - DNA, 80 bp, synthetic construct
  source 1..80: mol_type = other DNA
tcaatcctctgagcaactcccttattcggcaccataacctagtgtattccacctcctcaaaaagcgcaggcctgcgccaa

SEQ ID NO: 129563 - DNA, 80 bp, synthetic construct
  source 1..80: mol_type = other DNA
ttcagattggccagaccctcggcctcgagctgggcccggcgctcgcgcgcggccagcacctcccgcagccccgccgtgac

SEQ ID NO: 129564 - DNA, 80 bp, synthetic construct
  source 1..80: mol_type = other DNA
cttatgcaggtgccctacttcgtacgagctcaagctctgctgagggtgtgcgccctggtgaagaatctcgctggaggcaa

SEQ ID NO: 129565 - DNA, 80 bp, synthetic construct
  source 1..80: mol_type = other DNA
ggggggggttggcggtctctctctcccccccgtgcggtgcgtgcgtgtgcctgtgtcttttcgcctctccgcgccgatcg

SEQ ID NO: 129566 - DNA, 80 bp, synthetic construct
  source 1..80: mol_type = other DNA
gtggaccaagatcttgtcggatggccaagtcctgccgggtctcgctctctcactccgtgcacctgtggtgcgtcagatct

SEQ ID NO: 129567 - DNA, 80 bp, synthetic construct
  source 1..80: mol_type = other DNA
tttctcgcctttttccgttggttattcatcagagatctgctctctaattaaaaaactgttagtctacgtggaccgacaaa

SEQ ID NO: 129568 - DNA, 80 bp, synthetic construct
  source 1..80: mol_type = other DNA
tgcatctgtccgaccccgaagttgcatgagaatttttgctgtactctttgtggtgagtttaataaaagctaaactcttgc

SEQ ID NO: 129569 - DNA, 80 bp, synthetic construct
  source 1..80: mol_type = other DNA
caaaatcagccagatatagttatgtacactgaaaatgtaaaccttgaaactccagacacacatgtggtgtacaagccagg

SEQ ID NO: 129570 - DNA, 80 bp, synthetic construct
  source 1..80: mol_type = other DNA
tacatgacagagacaggattgaaatgagcccgctgcttttctcaactacgcagcttgccatacttccctgttcattttcc

SEQ ID NO: 129571 - DNA, 80 bp, synthetic construct
  source 1..80: mol_type = other DNA
tctgctgtggaggtcaaaaacaccagtcacatatatatggtgaccaatgactgttcaaacagcagtatcacctggcagct

SEQ ID NO: 129572 - DNA, 80 bp, synthetic construct
  source 1..80: mol_type = other DNA
acaaaaactccaaaggtcacaaaaacctgtgcagtgtggacctttaactcatcatatctgccgcaccactttataagctt

SEQ ID NO: 129573 - DNA, 80 bp, synthetic construct
  source 1..80: mol_type = other DNA
aaaaaactacaattcccaatacatgcaagttactccgccctaaaacctacgtcacccgccccgttcccacgccccgcgcc

SEQ ID NO: 129574 - DNA, 80 bp, synthetic construct
  source 1..80: mol_type = other DNA
gtgaacgtggacacggcccgggccgccgatctgtttgtgtcacagatgatggggtcccgctaactcgcctccaggatccg

SEQ ID NO: 129575 - DNA, 80 bp, synthetic construct
  source 1..80: mol_type = other DNA
gagacttcgactccgtgatcgactgcaacgtagcggtcactcaagtcgtagacttcagtttggaccccacattcactata

SEQ ID NO: 129576 - DNA, 80 bp, synthetic construct
  source 1..80: mol_type = other DNA
tgcttgtgtgattgtggaggaacaagtagtgattgaaaattctaccgagccagtggagggctgtagaaaatgccagtacc

SEQ ID NO: 129577 - DNA, 80 bp, synthetic construct
  source 1..80: mol_type = other DNA
aaaatggttctatgaagctagtaggcccccggatgtgcagtaacacctggcacggccgtttccccattaacgcatccacc

SEQ ID NO: 129578 - DNA, 80 bp, synthetic construct
  source 1..80: mol_type = other DNA
aacaccatacgggaggtggaggctcgattcgacgccaccgcggaacccgtgtgcaagcttccttgtttggagaccagacg

SEQ ID NO: 129579 - DNA, 80 bp, synthetic construct
  source 1..80: mol_type = other DNA
ggaaaagtgggcgcgggacggcgtcctgttactaaacacgaccctgaccgtcaagcgcggtgcggcggcgtcccactcta

SEQ ID NO: 129580 - DNA, 80 bp, synthetic construct
  source 1..80: mol_type = other DNA
taccagtgttgtgacctggaccccgaaactcgcaaggtaataaccgcccttacggagagactctataagggcggccccat

SEQ ID NO: 129581 - DNA, 80 bp, synthetic construct
  source 1..80: mol_type = other DNA
gagccagctatcagcaccgtcgctgcgggccacctgcaccacccacagcaacacctatgacgtggacatggtcgatgcca

SEQ ID NO: 129582 - DNA, 80 bp, synthetic construct
  source 1..80: mol_type = other DNA
acggacttgttgtgccctacggattgttttaggaagcatcctgatgccacttatattaagtgtggttctgggccctggct

SEQ ID NO: 129583 - DNA, 80 bp, synthetic construct
  source 1..80: mol_type = other DNA
catcttgcccccctctcagattgggcatgcgacggtttgcgagatcttgctgtcgctgtagagccggtcatcttctcccc

SEQ ID NO: 129584 - DNA, 80 bp, synthetic construct
  source 1..80: mol_type = other DNA
tacaacctttacatcatggatgaagctcatttcacagatccctcaagcatagctgcacgaggatatatatcaacaagggt

SEQ ID NO: 129585 - DNA, 80 bp, synthetic construct
  source 1..80: mol_type = other DNA
acctgaaatacggaagtgaaaactgatgacgacagtttattataggcgcgtaatatttaccgagggcagagtgaactttg

SEQ ID NO: 129586 - DNA, 80 bp, synthetic construct
  source 1..80: mol_type = other DNA
gtccgcgaacagatagttacaaggagattcagttaaatggagaccaagcttggaaagatgtaaatccaaatggtatcagt

SEQ ID NO: 129587 - DNA, 80 bp, synthetic construct
  source 1..80: mol_type = other DNA
ccccatggagaagaagatcatcacctggggggcggacaccgctgcctgcggcgacatcttggcaggcctgccagtttcag

SEQ ID NO: 129588 - DNA, 80 bp, synthetic construct
  source 1..80: mol_type = other DNA
gcgttgagtcttacgggatgggccgtggcgctggtcagttggtaccggaggctaacacttctgacccccttgcaatggat

SEQ ID NO: 129589 - DNA, 80 bp, synthetic construct
  source 1..80: mol_type = other DNA
aagcggccgaccgcaatggctcgctgccagatttcgcagctaacgagggcgtggctgtcccgtcgtttccaagaccccat

SEQ ID NO: 129590 - DNA, 80 bp, synthetic construct
  source 1..80: mol_type = other DNA
agcatgcagcctgacgcccccgcattcagccagatcaaaatttggctatggggcgaaggacgtccgaagcctatccagga

SEQ ID NO: 129591 - DNA, 80 bp, synthetic construct
  source 1..80: mol_type = other DNA
tctcgaagcgctgctctacgtcagaagaaagtcacttttgacaggatgcaagtgctcgatgaccattacaagagtacact

SEQ ID NO: 129592 - DNA, 80 bp, synthetic construct
  source 1..80: mol_type = other DNA
atgacagttcagaaatcaacttggttcagcagtccatgcccaacagacctaactacatcggcttcagggacaactttgtg

SEQ ID NO: 129593 - DNA, 80 bp, synthetic construct
  source 1..80: mol_type = other DNA
gagtgatttccacggacacaacgtcggccgtggccgatggaccctgctcagacgcgtccgatgatgactcttgcagctca

SEQ ID NO: 129594 - DNA, 80 bp, synthetic construct
  source 1..80: mol_type = other DNA
gtgatccggaagttgcctgaggcgataatggggcctgcctacgggttccagtattcgcccgcacagcgagtagaacgcct

SEQ ID NO: 129595 - DNA, 80 bp, synthetic construct
  source 1..80: mol_type = other DNA
agtcactgtcccacatccaaacataacagaaacagctttatctaccacgggggaggttcctttctacgggaaggctattc

SEQ ID NO: 129596 - DNA, 80 bp, synthetic construct
  source 1..80: mol_type = other DNA
gggcagctttttacaataagaccccgcctacacaacacggtccaggactgcaactgctccatatatgtgggtcatataac

SEQ ID NO: 129597 - DNA, 80 bp, synthetic construct
  source 1..80: mol_type = other DNA
atgctggtacggtcggtaacgggagggaagtacttccagatggtcgtattgagcatcggacgatggtttaacacctacct

SEQ ID NO: 129598 - DNA, 80 bp, synthetic construct
  source 1..80: mol_type = other DNA
ccagaagttttttgccattaaaaatctcctcctgttacctggttcctacacctacgagtggaacttcaggaaggacgtta

SEQ ID NO: 129599 - DNA, 80 bp, synthetic construct
  source 1..80: mol_type = other DNA
ggtggaggaggcgcgcaactacacgcccacgccgccaccagtgtccacagtggacgcggccattcagaccgtggtgcgcg

SEQ ID NO: 129600 - DNA, 80 bp, synthetic construct
  source 1..80: mol_type = other DNA
gtgcggggtggtgccagcccgggatgtctgcggtccagtctactgtttcacacctagcccagtggtcgttggcactactg

SEQ ID NO: 129601 - DNA, 80 bp, synthetic construct
  source 1..80: mol_type = other DNA
aaaaatggttggatgaaaatttgcacatggactggagcaacatataaatgtcacaataatggaagcattactatttttgc

SEQ ID NO: 129602 - DNA, 80 bp, synthetic construct
  source 1..80: mol_type = other DNA
agaacactagccaaagaaggtatcaagagaggagaaaccaaccaccacgcagtgtcgaggggttcagcgaaactgagatg

SEQ ID NO: 129603 - DNA, 80 bp, synthetic construct
  source 1..80: mol_type = other DNA
ccgtgccaaccgcagccgagcggacaagcagctggccttgcggcagggcgctgtcatacctgatatcgcctcgctcgacg

SEQ ID NO: 129604 - DNA, 80 bp, synthetic construct
  source 1..80: mol_type = other DNA
cggtggtcgcgggccgccgcctccgggcggccgggccgagccgggactcttgcgcttgcgcccctcccgcggcgcggctg

SEQ ID NO: 129605 - DNA, 80 bp, synthetic construct
  source 1..80: mol_type = other DNA
gtcgcggttaaggcccccgaccgccgcgtcaacgttcatcagcgaagggtggcacacggtcccgatcgcgtgttccagag

SEQ ID NO: 129606 - DNA, 80 bp, synthetic construct
  source 1..80: mol_type = other DNA
gggtggcattgagcacaggctcacagccgcatgcaattggacgcgaggagagcgttgtgacttggaagacagggacagat

SEQ ID NO: 129607 - DNA, 80 bp, synthetic construct
  source 1..80: mol_type = other DNA
aataaattacttacttaaaatcagtcagcaaatctttgtccagcttattcagcatcacctcctttccttcctcccaactc

SEQ ID NO: 129608 - DNA, 80 bp, synthetic construct
  source 1..80: mol_type = other DNA
acaacaaaacatggaaagtttatcaaaagacaacaagtccgaaatattgtacccactacaattaggtaatgctgggactt

SEQ ID NO: 129609 - DNA, 80 bp, synthetic construct
  source 1..80: mol_type = other DNA
aactaagaaaacgcatctttcccacgctgtatgctattttccagcagagtcgcggccagcagctggaactgaaagtaaaa

SEQ ID NO: 129610 - DNA, 80 bp, synthetic construct
  source 1..80: mol_type = other DNA
tatcaccgggaacagaccggagacccaaatgcttcctgcgctctgtgttacatgaaaatgagcttcagctttatttacag

SEQ ID NO: 129611 - DNA, 80 bp, synthetic construct
  source 1..80: mol_type = other DNA
gatgacgggctacaccggggatttcgactccgtcgtggattgcaacgtagcggtcacccaaaccattgacttttctctgg

SEQ ID NO: 129612 - DNA, 80 bp, synthetic construct
  source 1..80: mol_type = other DNA
gaagaagtcaacaccttcacgttactcgtcaaacttggactgataacattatcaggcctgtatcccatttcaataccagc

SEQ ID NO: 129613 - DNA, 80 bp, synthetic construct
  source 1..80: mol_type = other DNA
ctttagctccaaagggcgcgcccaatgccagccaatggctaactacaaacaatggcaacaaaactcacacttttgctcaa

SEQ ID NO: 129614 - DNA, 80 bp, synthetic construct
  source 1..80: mol_type = other DNA
ggatgaagccaatggagacctggtgaccttcaagagcccgaacggagcggaaagaaccttgagaccagtctggagagacg

SEQ ID NO: 129615 - DNA, 80 bp, synthetic construct
  source 1..80: mol_type = other DNA
aagcagcacgacttcttcaagtccgccatgcccgaaggctacgtccaggagcgcaccatcttcttcaaggacgacggcaa

SEQ ID NO: 129616 - DNA, 80 bp, synthetic construct
  source 1..80: mol_type = other DNA
cttccatacctggtatagtgtccttggaagaggtgcctcggattttcgaaggcttggatcgcgatgaaaagcgagcagca

SEQ ID NO: 129617 - DNA, 80 bp, synthetic construct
  source 1..80: mol_type = other DNA
tgccgcctaaaaatggacaagcttaggttgaagggtgtgtcatattccctgtgtaccgcagcgttcacatttaccaaggt

SEQ ID NO: 129618 - DNA, 80 bp, synthetic construct
  source 1..80: mol_type = other DNA
cagatgcaagagtctattcagaccaccaggccttgaaggcgttcaaagattttgcttccggaaagcgctcccaagtagga

SEQ ID NO: 129619 - DNA, 80 bp, synthetic construct
  source 1..80: mol_type = other DNA
aacttaaaacgctcaaattgccttttggaggcctgcccaacggccattatcccttggatctaagattgatttgcggtaac

SEQ ID NO: 129620 - DNA, 80 bp, synthetic construct
  source 1..80: mol_type = other DNA
cccgaggtcctccttgagatcatcggtgggatgcactggggcgtgatgtttggcctagcctattttgctatgcaaggagc

SEQ ID NO: 129621 - DNA, 80 bp, synthetic construct
  source 1..80: mol_type = other DNA
tctgcttaacatcatgggaggctggttggcctcccagatcgcgcctccaacagcggctactggcttcgttgtcagcggcc

SEQ ID NO: 129622 - DNA, 80 bp, synthetic construct
  source 1..80: mol_type = other DNA
gcctccctccgccaaaagaaggtgacattcgaccgtgtccaggtattggatcagcactatcaggatgttcttaaggagat

SEQ ID NO: 129623 - DNA, 80 bp, synthetic construct
  source 1..80: mol_type = other DNA
ggtcgcggccacgccgcccgaggcgcgggaggccgccggggccgccgacgccaccgcggccaccagcgcccccacgacca

SEQ ID NO: 129624 - DNA, 80 bp, synthetic construct
  source 1..80: mol_type = other DNA
cgtcatcccaactagtggcgatgttgtcgtcgtggcaaccgatgctctcatgaccggctttaccggcgacttcgactcgg

SEQ ID NO: 129625 - DNA, 80 bp, synthetic construct
  source 1..80: mol_type = other DNA
ttgtatacccggacctaggtgttcgggtgtgcgagaagagggcgctgtatgacatcacacagaagttgcccattgccgca

SEQ ID NO: 129626 - DNA, 80 bp, synthetic construct
  source 1..80: mol_type = other DNA
tccagtcgtggacctgaccccacgcaacgcccaaaataataacccccacgaaccataaaccattccccatggaggacccc

SEQ ID NO: 129627 - DNA, 80 bp, synthetic construct
  source 1..80: mol_type = other DNA
cccgggtgacgccccacagccagcatatgacctggaactaataacatcatgttcatccaatgtctcggtcgcacatgacg

SEQ ID NO: 129628 - DNA, 80 bp, synthetic construct
  source 1..80: mol_type = other DNA
ccaccacgtaccctatgacaaaaccgattttacccatggctaccagggtgtatggaaaaaatgaacatgcgcctatgact

SEQ ID NO: 129629 - DNA, 80 bp, synthetic construct
  source 1..80: mol_type = other DNA
agacctctgcgggcgtcaatatgtgcaccctcattgcgatggacttgggagagttatgtgaggacacaatgacctacaaa

SEQ ID NO: 129630 - DNA, 80 bp, synthetic construct
  source 1..80: mol_type = other DNA
agacgatttggttgtcgtaactgaaagtgctggagtgaacgaggatatcgctaacctgcgagccttcacggaggctatga

SEQ ID NO: 129631 - DNA, 80 bp, synthetic construct
  source 1..80: mol_type = other DNA
ttccgactcggatgactcggaggacacggactcggagacgctgtcacacgcctcctcggacgtgtccggcggggccacgt

SEQ ID NO: 129632 - DNA, 80 bp, synthetic construct
  source 1..80: mol_type = other DNA
tccagcatataaatctctccttgtgagcacgctctggtggatacagtacttcatcgcgcgtgtggaggctgtcctatatg

SEQ ID NO: 129633 - DNA, 80 bp, synthetic construct
  source 1..80: mol_type = other DNA
cctggccagctgccgctccatcgacaagttcaatcaaggatggggtcccatcacctatgccaagtataatagcttggacc

SEQ ID NO: 129634 - DNA, 80 bp, synthetic construct
  source 1..80: mol_type = other DNA
ctgcgccctcgttgaaggctacgtgcactacgcacagagtccatcccgacgctgagcttcttgaggctaacttgctatgg

SEQ ID NO: 129635 - DNA, 80 bp, synthetic construct
  source 1..80: mol_type = other DNA
gggacctaaaggtgaacgctaagtccccattgcaagttgcaactaataaacagttggagattgcacttgctaaaccattt

SEQ ID NO: 129636 - DNA, 80 bp, synthetic construct
  source 1..80: mol_type = other DNA
acggcgtacgcacaacagacgcggggcctggtgagtactattgtgaccagcttgacaggccgcgataggaacgaagtcga

SEQ ID NO: 129637 - DNA, 80 bp, synthetic construct
  source 1..80: mol_type = other DNA
ccgcccctcgccacaaacgcgtgctgacagcgaagtggttaaatcgaccgtgatgctttattgtctgtcgtctgaacgcg

SEQ ID NO: 129638 - DNA, 80 bp, synthetic construct
  source 1..80: mol_type = other DNA
ggtgcctgctctttttgtgttgcgcttggcacattcgaggcaggttcgtccccgctgtcacctacagcctagtgcagctg

SEQ ID NO: 129639 - DNA, 80 bp, synthetic construct
  source 1..80: mol_type = other DNA
ccgctatcaggacatagcgttggctacccgtgatattgctgaagagcttggcggcgaatgggctgaccgcttcctcgtgc

SEQ ID NO: 129640 - DNA, 80 bp, synthetic construct
  source 1..80: mol_type = other DNA
gggacgttgtggtcgtggccactgatgccctcatgacaggcttcactggcgacttcgactccgtcattgactgcaatgtc

SEQ ID NO: 129641 - DNA, 80 bp, synthetic construct
  source 1..80: mol_type = other DNA
tggcatggcacgtcgcagcgaatgtgtccagcgtcatggatcgaagctggacatgggaagggccggaggcaaatgccgtg

SEQ ID NO: 129642 - DNA, 80 bp, synthetic construct
  source 1..80: mol_type = other DNA
ccaaacttgaacagttttgggcgaagcatatgtggaacttcatcagtggtgttcaataccttgccgggctgtctactttg

SEQ ID NO: 129643 - DNA, 80 bp, synthetic construct
  source 1..80: mol_type = other DNA
cttggttgcgggaggggaggatggtcctattacatggcgacactcaagaacgtgactgaagtgaaaggatatactaaagg

SEQ ID NO: 129644 - DNA, 80 bp, synthetic construct
  source 1..80: mol_type = other DNA
ctgtttgggcagaagcttgaagcgaaggagagcttcagcgtgggggaatttttgcttgacttgagacccgctacagcgtg

SEQ ID NO: 129645 - DNA, 80 bp, synthetic construct
  source 1..80: mol_type = other DNA
cttcatcgtcggtccgggctgccacgaccaagtgacagcaatgctgtttcactggttatgcggcggatccgaaaagaaaa

SEQ ID NO: 129646 - DNA, 80 bp, synthetic construct
  source 1..80: mol_type = other DNA
gccgtgacccgctgcgggtgtccgcggggccgcaggccgacctcgcacacctcgaccaggtccgcgaaggcgccctcctt

SEQ ID NO: 129647 - DNA, 80 bp, synthetic construct
  source 1..80: mol_type = other DNA
gcagcatcggaagggttttccaaaagaccaagaaaggcatagaaagactgacagtgataggagagcacgcctgggacttc

SEQ ID NO: 129648 - DNA, 80 bp, synthetic construct
  source 1..80: mol_type = other DNA
atacaccgccttgcaatcccgttccggagatgggtggtagcaggtggggtccttcgggcagagacagggcgctaactatg

SEQ ID NO: 129649 - DNA, 80 bp, synthetic construct
  source 1..80: mol_type = other DNA
gggctgctgtacggcaagtacattcaaatggccctacttaaggtgggggcctacaccggcacatacatctatgaccacct

SEQ ID NO: 129650 - DNA, 80 bp, synthetic construct
  source 1..80: mol_type = other DNA
cccagtgcggcgtcgaggcgataacaggggaagcttgctttctccccggcccatctcatacctaaaaggatcctcgggag

SEQ ID NO: 129651 - DNA, 80 bp, synthetic construct
  source 1..80: mol_type = other DNA
cgcgaaatccctcgggcgatttccaggcccccccgcgaacgcggccgaagcgaccccatacctcgtcccactccgcctcg

SEQ ID NO: 129652 - DNA, 80 bp, synthetic construct
  source 1..80: mol_type = other DNA
ccgaatgcctgcgcgccatggtccacacgcacgtgtttccccacgaggtcatgcggtttttcgggaggctagtgtcgtgg

SEQ ID NO: 129653 - DNA, 80 bp, synthetic construct
  source 1..80: mol_type = other DNA
caaacatagttgccagcgactctacaagggttgctaacgctggagaggtcagaggagacaattttgcgccaacacctgtt

SEQ ID NO: 129654 - DNA, 80 bp, synthetic construct
  source 1..80: mol_type = other DNA
agggtggacgcaagccggcacgcttaatagtttacccagacttgggcgtgcgggtctgcgagaagatggccctatacgac

SEQ ID NO: 129655 - DNA, 80 bp, synthetic construct
  source 1..80: mol_type = other DNA
gaaacacggaccctggaggccccagcggagggtggatgcggtcgtgaggccccgccggagcagggcccatagctggcagt

SEQ ID NO: 129656 - DNA, 80 bp, synthetic construct
  source 1..80: mol_type = other DNA
cttcttgacaatatctacaccccagaagggatcattccaacactgtttggcccagaaagggaaaaaacccaagccattga

SEQ ID NO: 129657 - DNA, 80 bp, synthetic construct
  source 1..80: mol_type = other DNA
tcctggtgccgacctcattgaagcctacctcttatggggcgccaaggctaccaggatcgagacggaggacaaggtggtgg

SEQ ID NO: 129658 - DNA, 80 bp, synthetic construct
  source 1..80: mol_type = other DNA
ggcaattgagcaagtgagatccttaatagggaaagaagaatacactgactacatgccctccatgaaaaggttcaagcagg

SEQ ID NO: 129659 - DNA, 80 bp, synthetic construct
  source 1..80: mol_type = other DNA
ttaagatcatgagcggcgaggcgcctgcactcgaggacatggtcaacctgttgcctgccctcctgtcaccgggcgcgttg

SEQ ID NO: 129660 - DNA, 80 bp, synthetic construct
  source 1..80: mol_type = other DNA
ttaccggccttcagaggttagtgacacgctcctatgtgacataggtgaatcggcctccagcgctgaagttgaggaacaca

SEQ ID NO: 129661 - DNA, 80 bp, synthetic construct
  source 1..80: mol_type = other DNA
cgatcagagctcccccgctgtagatgatgtgtcagacaccgcgtcattctcatcaatgccaccgctagagggggagccag

SEQ ID NO: 129662 - DNA, 80 bp, synthetic construct
  source 1..80: mol_type = other DNA
cagctcgacacactccagtcaattcctggttggggaacatcatactctacgcgccctcgatatgggctcgcatgatattg

SEQ ID NO: 129663 - DNA, 80 bp, synthetic construct
  source 1..80: mol_type = other DNA
acactatgtccctgagagcgacgcagcagcaaaagtaacaactttgcttagttccctgacagtcacacagctaatgcgcc

SEQ ID NO: 129664 - DNA, 80 bp, synthetic construct
  source 1..80: mol_type = other DNA
agtttaccttcatcaaatttgcccattaactcagtttcaatacggtgcagagccagacaggaaggaataatgtcaagccc

SEQ ID NO: 129665 - DNA, 80 bp, synthetic construct
  source 1..80: mol_type = other DNA
cgtcttagtaatctgctgggaatccgtaagcggctgccgtttcaagaaggttttcaaatcatgtatgaggatttggaggg

SEQ ID NO: 129666 - DNA, 80 bp, synthetic construct
  source 1..80: mol_type = other DNA
ggcacatcaacaggactgctctcaattgcaacgatagcctcaacaccggcttcctggctggcctgttctacacccacaag

SEQ ID NO: 129667 - DNA, 80 bp, synthetic construct
  source 1..80: mol_type = other DNA
atcaagcatgttaaaaaactggaccaaaaaaaagaggaagaaatggccgcagcgctagcggacgaagtcgacttcgtgcg

SEQ ID NO: 129668 - DNA, 80 bp, synthetic construct
  source 1..80: mol_type = other DNA
gcggccgcgacccgacgcggaggagacgaccctgcaggtggacgagcctccctcgtacgaggaggccgtcaaggccggca

SEQ ID NO: 129669 - DNA, 80 bp, synthetic construct
  source 1..80: mol_type = other DNA
acgcttgcgggccccacacctctcctgtaccgtttgggccctattaccaatgaggtcaccctcacacaccctgggacgaa

SEQ ID NO: 129670 - DNA, 80 bp, synthetic construct
  source 1..80: mol_type = other DNA
ctagcctccacgccaccgcccacaccgcctcctcgcagaaatcagttcccactgatacagtacttagaagagccccctcc

SEQ ID NO: 129671 - DNA, 80 bp, synthetic construct
  source 1..80: mol_type = other DNA
gggccggcccggggtagccaacatcaacggttcttctgctgacaggccctattgctggcactacgcgcccaggaagtgcg

SEQ ID NO: 129672 - DNA, 80 bp, synthetic construct
  source 1..80: mol_type = other DNA
agagcgcgaccgtcagcgtcttcgccgacaggaacccgttgttgaacaggtccatgacgcgccgccgcagcaccggttgg

SEQ ID NO: 129673 - DNA, 80 bp, synthetic construct
  source 1..80: mol_type = other DNA
accccgaccacggcgcgctgggcaggcggctcacggatcgcatccgcgcccagggccccgtgatgccccctggcggcctg

SEQ ID NO: 129674 - DNA, 80 bp, synthetic construct
  source 1..80: mol_type = other DNA
tatcaggtaatatggcctccatcaatggaactctaagcagtgtaaacttggttcttagatttgatgacaacggagtgctt

SEQ ID NO: 129675 - DNA, 80 bp, synthetic construct
  source 1..80: mol_type = other DNA
catcaagggccgagtagtccccttggccacttattcatgtctcggtctgtgggcctttagtctcctgctcttggcactgc

SEQ ID NO: 129676 - DNA, 80 bp, synthetic construct
  source 1..80: mol_type = other DNA
atgtgcgaagttttcatgctcggggaagataacgggcaacttagtccaaattgagaaccttgaatacacagtggttgtga

SEQ ID NO: 129677 - DNA, 80 bp, synthetic construct
  source 1..80: mol_type = other DNA
aaggaaggcgatcagtatatttacatgggacagcctctaaacaatgatgaggaccacgcccattggacagaagcaaaaat

SEQ ID NO: 129678 - DNA, 80 bp, synthetic construct
  source 1..80: mol_type = other DNA
atgatgtggcactcagtgaacaaggggagttcaagctgctttctgaagagaaagtgccatgggaccaggttgtgatgacc

SEQ ID NO: 129679 - DNA, 80 bp, synthetic construct
  source 1..80: mol_type = other DNA
aacatgtcaaaaacggaaccatgctgatggttggccccaggacctgcagcaacatgtggcgtggtacgtttcccatcaac

SEQ ID NO: 129680 - DNA, 80 bp, synthetic construct
  source 1..80: mol_type = other DNA
gtggacgcacatacctatgttacgggtgccgttgcgggccgcaccgccctaagtatcgccagcatgctcacccccggtgc

SEQ ID NO: 129681 - DNA, 80 bp, synthetic construct
  source 1..80: mol_type = other DNA
gttctctcaacggctacccagactttccttgcaacttgtgtcaacggtgtaatgtggacagtttaccacggtgcagggtc

SEQ ID NO: 129682 - DNA, 80 bp, synthetic construct
  source 1..80: mol_type = other DNA
gttttggcaaagacaatgttgacagagagcagtatgaggtctccattattagtttattcaaagtaggagcgggccaaaaa

SEQ ID NO: 129683 - DNA, 80 bp, synthetic construct
  source 1..80: mol_type = other DNA
caggggagtcacacaacacgaagcgggcagatcacaattacttgtgcaaacgaggtgtgaccgacagaggctggtgtaat

SEQ ID NO: 129684 - DNA, 80 bp, synthetic construct
  source 1..80: mol_type = other DNA
gttgcctcaaatcatcaaagattgcattcaaaaacgcttgcgaacagctgtgctagcccccacccgggtagtggcttgtg

SEQ ID NO: 129685 - DNA, 80 bp, synthetic construct
  source 1..80: mol_type = other DNA
accagtatttcatcgcgcgcgtagaggcggcactctatgagtgggcgccatcactcagggtcaggtgtggccgtgatgca

SEQ ID NO: 129686 - DNA, 80 bp, synthetic construct
  source 1..80: mol_type = other DNA
tgggtaccctccttgcaggttcggcgtgggcgtgacgccgccatactccttacctgcttattgcatcctcagctgggttt

SEQ ID NO: 129687 - DNA, 80 bp, synthetic construct
  source 1..80: mol_type = other DNA
gatatgatgatgaattggtcccccactacggccctgatcatgtcgcagctgatgcgaattccacaagccatcgtggatat

SEQ ID NO: 129688 - DNA, 80 bp, synthetic construct
  source 1..80: mol_type = other DNA
ccttggtggtgagcggatacagggccttcatgggattgcgttgcagttgcaggacgtagcggaaggcgaagaaggccgcg

SEQ ID NO: 129689 - DNA, 80 bp, synthetic construct
  source 1..80: mol_type = other DNA
cgaaggaaatgatggctttttgtgggatgatgttacagacagtttgtttagtccagcagccattagtcaccatggcaaaa

SEQ ID NO: 129690 - DNA, 80 bp, synthetic construct
  source 1..80: mol_type = other DNA
gcgccctctgccgaggacctgatcaatttgctccctgccatcctctctcctggtgccctggtcgtcggagtcgtgtgtgc

SEQ ID NO: 129691 - DNA, 80 bp, synthetic construct
  source 1..80: mol_type = other DNA
gctctctgaactgcccaactgattgcttcaggaagcatcctgaggccacctacttgaagtgcggatcagggccatggctc

SEQ ID NO: 129692 - DNA, 80 bp, synthetic construct
  source 1..80: mol_type = other DNA
atggatgaagaaagagaaatccctgaacgttcatggaattctggacatgagtgggtcacggattttaaagggaagactgt

SEQ ID NO: 129693 - DNA, 80 bp, synthetic construct
  source 1..80: mol_type = other DNA
tacctgcggcctaccggggggagaaacagcatccgttactctgagttggcacccctattcgacaccacccgtgtgtacct

SEQ ID NO: 129694 - DNA, 80 bp, synthetic construct
  source 1..80: mol_type = other DNA
atcagtcacggtgccgcatcctaacatctcggaagtcgccctacctactacaggggaaatccccttctatgggagtggaa

SEQ ID NO: 129695 - DNA, 80 bp, synthetic construct
  source 1..80: mol_type = other DNA
cgctggtgtggcaggggccttagtagcctttaagatcatgagtggcgagacgccctctttggaggacgcagccaatttgc

SEQ ID NO: 129696 - DNA, 80 bp, synthetic construct
  source 1..80: mol_type = other DNA
agcacatatcctcttcttcagcatctatgaatgtgattggtttgtaggtgtaagtcacgtgatcagagttccctggtggg

SEQ ID NO: 129697 - DNA, 80 bp, synthetic construct
  source 1..80: mol_type = other DNA
gtcggtgccccccttgggggtgtcgcggcggccctggcgcatggcgtcaggaccatcgaggacgggatcaactacgcaac

SEQ ID NO: 129698 - DNA, 80 bp, synthetic construct
  source 1..80: mol_type = other DNA
agccagagcctgacgtgaccgtggtcacctcaatgctcacagaccccgcgcacatcaccgcagagacggcagcaaggcgg

SEQ ID NO: 129699 - DNA, 80 bp, synthetic construct
  source 1..80: mol_type = other DNA
ccttttggacaacaaagagtgttcaaggaaaaagttgacaccagagcaaaggatccaccagcagggaccaggaaaatcat

SEQ ID NO: 129700 - DNA, 80 bp, synthetic construct
  source 1..80: mol_type = other DNA
ccggagcgcctgatgaaaaccttgcaaaacggcctgccggatttcatcagtcaaagcattttgcaaaacttccgctcttt

SEQ ID NO: 129701 - DNA, 80 bp, synthetic construct
  source 1..80: mol_type = other DNA
tgggtgaggcagctgggattttcatgacagccactcccccaggaagtagagatccatttcctcagagcaatgcaccaatc

SEQ ID NO: 129702 - DNA, 80 bp, synthetic construct
  source 1..80: mol_type = other DNA
ctttgctggtgtggatgccgagacccatgttactggggctgctgctggccgcacggcgcatggcctcactagcctcttta

SEQ ID NO: 129703 - DNA, 80 bp, synthetic construct
  source 1..80: mol_type = other DNA
gcggattcgccgacctcatggggtacatccctgtcataggcgctcctcttggcggcgtcgcggcagcgctagcgcacggc

SEQ ID NO: 129704 - DNA, 80 bp, synthetic construct
  source 1..80: mol_type = other DNA
agaagtacggccagtggctgtggccagcttacgaaacccgcgatccagtaactggcaaagcacgctgaacagcattgtgg

SEQ ID NO: 129705 - DNA, 80 bp, synthetic construct
  source 1..80: mol_type = other DNA
gctaggggatggacttgcaatgggcatcatgatgttgaaattactgactgattttcagtcacatcagctatgggctacct

SEQ ID NO: 129706 - DNA, 80 bp, synthetic construct
  source 1..80: mol_type = other DNA
ccatgggacacaataacaaacgtcaccaccatggccatgactgataccacccctttcgggcagcagcgtgtgttcaaaga

SEQ ID NO: 129707 - DNA, 80 bp, synthetic construct
  source 1..80: mol_type = other DNA
ttaaatagttttttaaatatgaggatgctgattttgagagccactcccagatgagcaaggcgcatgcccttctcggagga

SEQ ID NO: 129708 - DNA, 80 bp, synthetic construct
  source 1..80: mol_type = other DNA
cccctcgaccatggccaagctggtgactggcatgggctttacgatccacggagcgctcaccccaggatcggaggtgtgtg

SEQ ID NO: 129709 - DNA, 80 bp, synthetic construct
  source 1..80: mol_type = other DNA
ctgagtgaactccctgatttcctggctaaaaaaggtggagaggcaatggataccatcagtgtgtttctccactctgagga

SEQ ID NO: 129710 - DNA, 80 bp, synthetic construct
  source 1..80: mol_type = other DNA
aaagggaagcctggctgtgcacagtgatttgtcatattggattgaaagcagctttaatgagacttggaaactagagaggg

SEQ ID NO: 129711 - DNA, 80 bp, synthetic construct
  source 1..80: mol_type = other DNA
cgatgatgatgatgcgtcaaacggctggttggttgacacacccccccgcaaatccaagcgaccccgaatcaacctgcgat

SEQ ID NO: 129712 - DNA, 80 bp, synthetic construct
  source 1..80: mol_type = other DNA
agcaattctctcatcagacatcacaacatggtatattccaccacgtcgcgaagcgcaagtctccggcagaagaaggtgac

SEQ ID NO: 129713 - DNA, 80 bp, synthetic construct
  source 1..80: mol_type = other DNA
tctttccaaggccgaagagttcgcgttagggtggtctcggtgacagtgaagggatgcgctccgggctgggcgcttgccag

SEQ ID NO: 129714 - DNA, 80 bp, synthetic construct
  source 1..80: mol_type = other DNA
gaggggggactccagagtctctttactcagaccaagacccataagttaccccaaggggtcttcggggggcccaatattgt

SEQ ID NO: 129715 - DNA, 80 bp, synthetic construct
  source 1..80: mol_type = other DNA
tgcccggttgctctttctctatcttcctcttagctttgctgtcttgtttgaccatcccagtttccgcatacgaagtgcgc

SEQ ID NO: 129716 - DNA, 80 bp, synthetic construct
  source 1..80: mol_type = other DNA
tacatcatggcgtgcatgtcagctgatctggaagtaaccaccagcacctgggtgttgcttggaggggtcctcgcagccct

SEQ ID NO: 129717 - DNA, 80 bp, synthetic construct
  source 1..80: mol_type = other DNA
acttttgacacagaatatcagaagactaaactgaatgattgggactttgtggtgacaactgacatttcagaaatgggggc

SEQ ID NO: 129718 - DNA, 80 bp, synthetic construct
  source 1..80: mol_type = other DNA
cagatatggccactactttttttagtcttggctctacccaggagagcgttcgcgtatgaggggactttaccagcatcggc

SEQ ID NO: 129719 - DNA, 80 bp, synthetic construct
  source 1..80: mol_type = other DNA
gacggctaaacgcaggctggatcgagggtccccaccctctctagccagctcttcagccagccagttatcggccccgtctc

SEQ ID NO: 129720 - DNA, 80 bp, synthetic construct
  source 1..80: mol_type = other DNA
cggagattcgcccaggccctgcccgtttgggcacggccggactataaccccccgctaatagagacgtggaaaaagcctga

SEQ ID NO: 129721 - DNA, 80 bp, synthetic construct
  source 1..80: mol_type = other DNA
catacaccaccggggtcgccgatcgaacagcaggttggtctttaaaaaataccttccgtaaaaatgatgcggtagagcat

SEQ ID NO: 129722 - DNA, 80 bp, synthetic construct
  source 1..80: mol_type = other DNA
aaatgttagaactggggtgagaacaattaccacaggcagccccatcacgtactccacctacggcaagtttcttgccgacg

SEQ ID NO: 129723 - DNA, 80 bp, synthetic construct
  source 1..80: mol_type = other DNA
ccctgacagggaggtgctttaccagcagtttgacgagatggaggagtgctcacaacgcattccatacctcgttgaaggcc

SEQ ID NO: 129724 - DNA, 80 bp, synthetic construct
  source 1..80: mol_type = other DNA
ggccgcacgacatggagcatccacgccagcggggcctggatgaccacagaagacatgctggacgtctggaaccgagtgtg

SEQ ID NO: 129725 - DNA, 80 bp, synthetic construct
  source 1..80: mol_type = other DNA
aggatggagctactacgcagcaaccctgaagaaggtccaggaagtcagaggatacacgaaaggtggggcgggacatgaag

SEQ ID NO: 129726 - DNA, 80 bp, synthetic construct
  source 1..80: mol_type = other DNA
tagtggtgagcttgacggggcgcgataggacagagcaggccggagaggtccaggtcctgtcgacggtcacccagtcgttc

SEQ ID NO: 129727 - DNA, 80 bp, synthetic construct
  source 1..80: mol_type = other DNA
atcgcccggggcgttccgctcaacacggactattacttctcgcacctgctgggtgcggcctgcgtgacgttcaaggccct

SEQ ID NO: 129728 - DNA, 80 bp, synthetic construct
  source 1..80: mol_type = other DNA
caaaccacgggtggagaaccggactccccacaacctgaaaccgggatataaaccacggctggagaaccggactccgcact

SEQ ID NO: 129729 - DNA, 80 bp, synthetic construct
  source 1..80: mol_type = other DNA
ccctcaccccgcactacaaatggctgcttacacagctgctgtggtggaaccaatacttcattgcaaggattgaggctgta

SEQ ID NO: 129730 - DNA, 80 bp, synthetic construct
  source 1..80: mol_type = other DNA
gaggttttggaacactaccattgcagtgtcaatggctaacatctttagggggagctacttggccggagccggacttctct

SEQ ID NO: 129731 - DNA, 80 bp, synthetic construct
  source 1..80: mol_type = other DNA
gttatctttttcatgtctcccaagggtatcagcagaatgtctatggcaatgggcacgatggctggttgtggatacctcat

SEQ ID NO: 129732 - DNA, 80 bp, synthetic construct
  source 1..80: mol_type = other DNA
tgggtctctggagccaaaagtaacatcataaagagtgtgtccaccacaagtcagctcctcttgggacgcatggaagggcc

SEQ ID NO: 129733 - DNA, 80 bp, synthetic construct
  source 1..80: mol_type = other DNA
gttacatctgaggaccttgggaaaaccttctccgttggcacaggcaactgcacaaccaacattctggaggccaaatactg

SEQ ID NO: 129734 - DNA, 80 bp, synthetic construct
  source 1..80: mol_type = other DNA
ctggccttgttgaaaacttgaggaaaaaaaactttatatttataaaaattttacaataaagttttgtgatgcttttgaca

SEQ ID NO: 129735 - DNA, 80 bp, synthetic construct
  source 1..80: mol_type = other DNA
ggtttggcaggagccgcagtaggaagcattggactcgggagggtcattgtggacgttctcgcgggatacggtgcgggcat

SEQ ID NO: 129736 - DNA, 80 bp, synthetic construct
  source 1..80: mol_type = other DNA
tgtgctcgctaccgctactcctccgggctccgtcaccgtgccccatcctaacatccaggaggttgctctgtccaccaccg

SEQ ID NO: 129737 - DNA, 80 bp, synthetic construct
  source 1..80: mol_type = other DNA
gctcagataaggcaggattgcaactgctcaatctatcccgggcacgtcacaggacatcggatggcttgggatatgatgat

SEQ ID NO: 129738 - DNA, 80 bp, synthetic construct
  source 1..80: mol_type = other DNA
tgtcctggaacgctccgggattttgcccgccatgagctgcgcgctaccctctgactttgtccccctctcctaccgcgagt

SEQ ID NO: 129739 - DNA, 80 bp, synthetic construct
  source 1..80: mol_type = other DNA
cgggccgcaggcgggccgcgtactggagggtgtggtacagggcgttaatcatccaccagcaatacaccacggccgtgagg

SEQ ID NO: 129740 - DNA, 80 bp, synthetic construct
  source 1..80: mol_type = other DNA
cctacaagaggttactcacgcacttgctgtggtggaaccagtacttcatagcgctggcagaagccatagtgcacgagtgg

SEQ ID NO: 129741 - DNA, 80 bp, synthetic construct
  source 1..80: mol_type = other DNA
tcggcggacgctggttggccgggccccgccgcgctggcggccgccgattggccagtcccgcccccgaggcgtgcccgccc

SEQ ID NO: 129742 - DNA, 80 bp, synthetic construct
  source 1..80: mol_type = other DNA
cgtctcaagcagcaaagtttactgtaactccaaatgctccctcaataaccctcaagcttggtgattatggagaagtcaca

SEQ ID NO: 129743 - DNA, 80 bp, synthetic construct
  source 1..80: mol_type = other DNA
ggttggacgcggcgtgtaactggacgcggggcgagccgtgtgccttggaagacagggatagaaccgagctaagcccattg

SEQ ID NO: 129744 - DNA, 80 bp, synthetic construct
  source 1..80: mol_type = other DNA
agaccaccgtacgcctgcgggcgtacatgaacacccctgggttaccagtttgccaagatcacctggagttctgggaggtg

SEQ ID NO: 129745 - DNA, 80 bp, synthetic construct
  source 1..80: mol_type = other DNA
agacggagtacccaaagtgcaagaacgatgattgggactttgttatcacaacagacatatctgaaatgggggctaacttc

SEQ ID NO: 129746 - DNA, 80 bp, synthetic construct
  source 1..80: mol_type = other DNA
gggtgtgtggcggggcgatggcatcatgcatacaacctgcacatgcggtgctcaacttacaggacatgtgaagaatgggt

SEQ ID NO: 129747 - DNA, 80 bp, synthetic construct
  source 1..80: mol_type = other DNA
gcgtctatgtcgaaccgatcgggcggctctgatactagcatatgttcagcagcttaacaacatatacgaatatcgtgtgt

SEQ ID NO: 129748 - DNA, 80 bp, synthetic construct
  source 1..80: mol_type = other DNA
tcgtatcgtgcctggcggcagcacccagaacgtcctggaaacgggtaacctcgggcgaggacgtggtgttgcttccggcg

SEQ ID NO: 129749 - DNA, 80 bp, synthetic construct
  source 1..80: mol_type = other DNA
gattaaactttccagtggaaacaataatgttcttaagttgtgtaatggcgacaagtatattaaacacacatgtgatggtc

SEQ ID NO: 129750 - DNA, 80 bp, synthetic construct
  source 1..80: mol_type = other DNA
gcacggactgtgtgtggcccggtgtactgcttcactcccagcccagtcgtggtgggcaccactgatagggctggagcgcc

SEQ ID NO: 129751 - DNA, 80 bp, synthetic construct
  source 1..80: mol_type = other DNA
gcgcagaagcgcgcgcgcgccgcgaagccgttggcgaccgcggcgaaggtcgcgggcagcacctcgccgtggacgctgac

SEQ ID NO: 129752 - DNA, 80 bp, synthetic construct
  source 1..80: mol_type = other DNA
aggagctcagaaaacgcatctttccgacgctgtatgctattttccagcagagccgcggtcaacagctggaactcaaagta

SEQ ID NO: 129753 - DNA, 80 bp, synthetic construct
  source 1..80: mol_type = other DNA
gcccaaggcttggcaggtgcaccgagactggtttgaagacctctccttgccatggcgacacgagggcgcccatgaatgga

SEQ ID NO: 129754 - DNA, 80 bp, synthetic construct
  source 1..80: mol_type = other DNA
aatatatctctaagcaaatcccgaatattaagtccggccattgtaaaaatctgctccagagcgccctccaccttcagcct

SEQ ID NO: 129755 - DNA, 80 bp, synthetic construct
  source 1..80: mol_type = other DNA
ggacgcggcagaggaggacgcggcggaggaggacgcgatcgacgacgagggagaggcgaaggaggacgcgatcgacgacg

SEQ ID NO: 129756 - DNA, 80 bp, synthetic construct
  source 1..80: mol_type = other DNA
ttccattggtgagttggtagcagtgtcaatagcatacaaaagaccttgtccgcggggagctacaatggtaccacgcaggc

SEQ ID NO: 129757 - DNA, 80 bp, synthetic construct
  source 1..80: mol_type = other DNA
aaagggtattccccttgaatacatcaaaggtggtcggcacttgatcttctgtcattcgaagaaaaagtgcgacgagttgg

SEQ ID NO: 129758 - DNA, 80 bp, synthetic construct
  source 1..80: mol_type = other DNA
caggagtgtggtgaaaatgtcttagagcggcttgaaacttggcttgctgaaaacggatgtgacagattgagccgaatggc

SEQ ID NO: 129759 - DNA, 80 bp, synthetic construct
  source 1..80: mol_type = other DNA
gtgactaatgactgtcctaactccagtatagtctggcagcttaaggatgctgtccttcacgtccctgggtgtgtcccctg

SEQ ID NO: 129760 - DNA, 80 bp, synthetic construct
  source 1..80: mol_type = other DNA
agttcccggcctgaaacacacggtcgttgccggccatgccgtagtatttgctgatgctcaaccccaacacgaccatgagg

SEQ ID NO: 129761 - DNA, 80 bp, synthetic construct
  source 1..80: mol_type = other DNA
gtatagagttactgtctatacaataccgcgtaataaaactgttaaaattcaacctcataccacaaaaggaaccacagggg

SEQ ID NO: 129762 - DNA, 80 bp, synthetic construct
  source 1..80: mol_type = other DNA
cacgttacgtcacttctgccattacatgtaactcagccgtatggcgccatattgcccacgtccaaaatggcttccatgtc

SEQ ID NO: 129763 - DNA, 80 bp, synthetic construct
  source 1..80: mol_type = other DNA
gggaagttttaattgatataacaaaacgagtgtttcaaatgggggacgacggtcgcggaggaacatcgacatttaaaacc

SEQ ID NO: 129764 - DNA, 80 bp, synthetic construct
  source 1..80: mol_type = other DNA
aatagataaagataaaggtttacaaattggaactgaagaaacaacagacaatggacaacaaaagatctatgcagataaaa

SEQ ID NO: 129765 - DNA, 80 bp, synthetic construct
  source 1..80: mol_type = other DNA
tttggggttcgaggtcaccaaaatactgctggcactggtaggtcctctctatctgttgcagcatagcctcctgcggctgc

SEQ ID NO: 129766 - DNA, 80 bp, synthetic construct
  source 1..80: mol_type = other DNA
tttatggcatattccagtcaaccttcttgggggcctcccagcgaggagtgggagtggcacagggagtggtgttccacaca

SEQ ID NO: 129767 - DNA, 80 bp, synthetic construct
  source 1..80: mol_type = other DNA
ctgatcatgaaagatggaagaacactggtgactccatgccgagggcaggatgagttagtgggcagagctcgcatctcccc

SEQ ID NO: 129768 - DNA, 80 bp, synthetic construct
  source 1..80: mol_type = other DNA
atacttcttgacaacataacaaccttgcgggggcccgtggccaccttctatggaccagaacaggacaagatgccggaggt

SEQ ID NO: 129769 - DNA, 80 bp, synthetic construct
  source 1..80: mol_type = other DNA
atcagtccactgagcaactcactgctgcgacaccacaacatggtgtacgccacgacctctcgctccgccgccgcccggca

SEQ ID NO: 129770 - DNA, 80 bp, synthetic construct
  source 1..80: mol_type = other DNA
ccttgaccaagccgagacggcgggagttaggttgacggttctggcgacggcaacgccgcctgggtccgttacaacgcctc

SEQ ID NO: 129771 - DNA, 80 bp, synthetic construct
  source 1..80: mol_type = other DNA
agtcgtggttggtggaagatcagccctcccccacagggggggcggaagatttagagtcagactctaagtcatggtctacg

SEQ ID NO: 129772 - DNA, 80 bp, synthetic construct
  source 1..80: mol_type = other DNA
accgcatgcccccgccgccccgccgtggcgttcaccttgtgtcgctcgacgcaccacgcccacagccccgcctatccgac

SEQ ID NO: 129773 - DNA, 80 bp, synthetic construct
  source 1..80: mol_type = other DNA
tatcacattaaatgtaacattgataatactacctggacaagatatcatttaaataagtcaccaaatttaggtcaaccatc

SEQ ID NO: 129774 - DNA, 80 bp, synthetic construct
  source 1..80: mol_type = other DNA
agcaccatatcagaagccctccagcaactggccatcaagacctttggccagcccccctcgagcggtgatgcaggctcgtc

SEQ ID NO: 129775 - DNA, 80 bp, synthetic construct
  source 1..80: mol_type = other DNA
tgccggagagcgatgcagctgcccgcgtcactaccatacttagcagcctcactgtgacccagctcctgaggcgactacac

SEQ ID NO: 129776 - DNA, 80 bp, synthetic construct
  source 1..80: mol_type = other DNA
taatcaactggaagggcagagaacttaaatgtggaagtggcatttttgtcactaatgaagtccacacttggacagagcaa

SEQ ID NO: 129777 - DNA, 80 bp, synthetic construct
  source 1..80: mol_type = other DNA
acggtggcgccgcaaatcccaccaaactggcacataccgtcgatccaggacgccgcgacgccttaccatcccccggccac

SEQ ID NO: 129778 - DNA, 80 bp, synthetic construct
  source 1..80: mol_type = other DNA
ccctggaatacatccgtggcggtaggcacctcattttctgtcactcaaagaagaaatgcgatgagctggccggccagctg

SEQ ID NO: 129779 - DNA, 80 bp, synthetic construct
  source 1..80: mol_type = other DNA
cgtggggctgtggaggggacggcctccatgaagcgacatttactctgctcgcgtttactgacgtcaccatccatcgccac

SEQ ID NO: 129780 - DNA, 80 bp, synthetic construct
  source 1..80: mol_type = other DNA
gcggcttagccgacctcatggggtacatccctgtcctaggggcaccacttggtggagtcgcagctgccctagcacatggc

SEQ ID NO: 129781 - DNA, 80 bp, synthetic construct
  source 1..80: mol_type = other DNA
cggggggctggagataacggcccccggggaacaggggaccggggcttggtatcccgaggtgagtgcgtgggcggcggtgg

SEQ ID NO: 129782 - DNA, 80 bp, synthetic construct
  source 1..80: mol_type = other DNA
gtctgccgtcaccagcccattgaccactagccaaactctcctcttcaacatcttgggggggtgggtggctgcccagcttg

SEQ ID NO: 129783 - DNA, 80 bp, synthetic construct
  source 1..80: mol_type = other DNA
atgcgtgccaaaacctgcgcataacttcaaaactgccatttggagagtggcggcgacggagtatgcggaggttacacaac

SEQ ID NO: 129784 - DNA, 80 bp, synthetic construct
  source 1..80: mol_type = other DNA
ctgtcgcaaatacttccatctcggcgaaaggattccgcgatcacgtggaccttctcgttggatcagcagctctttgctca

SEQ ID NO: 129785 - DNA, 80 bp, synthetic construct
  source 1..80: mol_type = other DNA
tcgaagggacgaccattgtccatcctgcagctcagaccacgcatggacttgccggcctcttttccagtggggccaaacag

SEQ ID NO: 129786 - DNA, 80 bp, synthetic construct
  source 1..80: mol_type = other DNA
cactggaatctggcccctatttctgcttgtggcgatgcttccaacccgggcctatgcgtggacaggtgaggactctgcaa

SEQ ID NO: 129787 - DNA, 80 bp, synthetic construct
  source 1..80: mol_type = other DNA
tgcctacatggtacctggatggcaggctgaggcaatgcgctcagcccagcgacgaacagccgctggaatcatgaaaaacg

SEQ ID NO: 129788 - DNA, 80 bp, synthetic construct
  source 1..80: mol_type = other DNA
tgagaaatgcgtgcttgctttaattgtagaaggggatgctcacattagacataatgcagcttcagaaaatacctgtttta

SEQ ID NO: 129789 - DNA, 80 bp, synthetic construct
  source 1..80: mol_type = other DNA
ctacgaggcgcggatgtcatttgttacaatggaaggcgttatgaactcgaaacaaatttacaacatcgggacggatcgga

SEQ ID NO: 129790 - DNA, 80 bp, synthetic construct
  source 1..80: mol_type = other DNA
gcttaaggcagacattgtcatgtacactgaaaatgtcaacctggaaacacctgacacgcatgttgtttacaaacctggaa

SEQ ID NO: 129791 - DNA, 80 bp, synthetic construct
  source 1..80: mol_type = other DNA
cagaggtgtcgcaaaagccctgcagttcataccagtggaaactctgagtacgcaggtcaggtctccatcttttagtgaca

SEQ ID NO: 129792 - DNA, 80 bp, synthetic construct
  source 1..80: mol_type = other DNA
aacagtacatttgccgtagagatgtggtagacagaggatggggcaatggctgtggcttgtttggaaaaggaggagttgtg

SEQ ID NO: 129793 - DNA, 80 bp, synthetic construct
  source 1..80: mol_type = other DNA
aacagacccgccaactgacgccagctctccaggtcgcaacagaggcagtcaaacaggtcgggccgcatcatctgctcggc

SEQ ID NO: 129794 - DNA, 80 bp, synthetic construct
  source 1..80: mol_type = other DNA
gctggagacgggggcggccgccgccgaagaggcggatgccgcgcgcggggatgagccggcgagtgggagcgacagtgggg

SEQ ID NO: 129795 - DNA, 80 bp, synthetic construct
  source 1..80: mol_type = other DNA
ctgtcacgatggaatgctctccgagaacgggactcgacttcaatgagatggtgttgctgcaaatggaaaacaaagcttgg

SEQ ID NO: 129796 - DNA, 80 bp, synthetic construct
  source 1..80: mol_type = other DNA
agaattatttgcagatactgtaaatttaattaaagatgaggcgttcgtatccatcgaagaagcggtaacgaatccacgaa

SEQ ID NO: 129797 - DNA, 80 bp, synthetic construct
  source 1..80: mol_type = other DNA
ccttggggtgtgggatactgctcttgttcgggctgttcaccctttctccctggtacaagcactggatagcccgcctcatt

SEQ ID NO: 129798 - DNA, 80 bp, synthetic construct
  source 1..80: mol_type = other DNA
tgtaggacagcggccgcatggcccaggggccggcgaagaacgtgtgcgcggggcattgcgtctccagcagccccgccgtg

SEQ ID NO: 129799 - DNA, 80 bp, synthetic construct
  source 1..80: mol_type = other DNA
gagagttatgtgaggacacaatgacctacaaatgcccccggatcactgagacggaaccagatgacgttgactgttggtgc

SEQ ID NO: 129800 - DNA, 80 bp, synthetic construct
  source 1..80: mol_type = other DNA
tcgtagaaaacccatcttggtgtaaccatcccttagcatatttactttcggtaaaacccttaaacggggctaagccgcca

SEQ ID NO: 129801 - DNA, 80 bp, synthetic construct
  source 1..80: mol_type = other DNA
cccacttcgccacgatgagaaaaccctggtgcaatcaaaggttacagcttacaatgctgacatgattgatccttttcagc

SEQ ID NO: 129802 - DNA, 80 bp, synthetic construct
  source 1..80: mol_type = other DNA
gtgggcggcaacataacacgggtcgagtctgagaataagatcatagtcctcgactcgtttgatcccctgatagccgagac

SEQ ID NO: 129803 - DNA, 80 bp, synthetic construct
  source 1..80: mol_type = other DNA
actgctactccgccagggtcagtgactacacctcattccaacatagaggaggtcgccctgccaacaacgggggaaatacc

SEQ ID NO: 129804 - DNA, 80 bp, synthetic construct
  source 1..80: mol_type = other DNA
tacccttggcccctttatggtaacgagggctgcgggtgggcagggtggctcctgtctccccgtggttctcgccctcattg

SEQ ID NO: 129805 - DNA, 80 bp, synthetic construct
  source 1..80: mol_type = other DNA
ctgaccgggaacggtcgatttcggcgacgtagcgcgcgcaggcgcatgaagggcgtggtacttcccctgctaattccact

SEQ ID NO: 129806 - DNA, 80 bp, synthetic construct
  source 1..80: mol_type = other DNA
gccatcacaacatggtgtactccacgacttctcgttctgccgccactcgacagaagaaagtcaccttcgaccgcatgcaa

SEQ ID NO: 129807 - DNA, 80 bp, synthetic construct
  source 1..80: mol_type = other DNA
atatcacatacaccgtctcaggaaaagccgcagaaatgtggattgaaaaagcagcagacatcacatgggaacagaatgcc

SEQ ID NO: 129808 - DNA, 80 bp, synthetic construct
  source 1..80: mol_type = other DNA
gtgccgcgtgcttcgtgcagggttcccgatcaagccccttcccctacggaatcgccggaaccatcgacaccaacgccccc

SEQ ID NO: 129809 - DNA, 80 bp, synthetic construct
  source 1..80: mol_type = other DNA
gtttgtgccaccgatgccctcatgaccggctacacaggtgactttgactccgtaatagactgtaatgttactgtcacaca

SEQ ID NO: 129810 - DNA, 80 bp, synthetic construct
  source 1..80: mol_type = other DNA
atatgtggtcgggtcgcagctcccatgcgagcccgaaccggatacggtgatactcacttccatgctcaccgacccctccc

SEQ ID NO: 129811 - DNA, 80 bp, synthetic construct
  source 1..80: mol_type = other DNA
tagaggaccatctctgagatcaactactgctagtggaagggtcatagaggaatggtgctgtagggaatgcacaatgcctc

SEQ ID NO: 129812 - DNA, 80 bp, synthetic construct
  source 1..80: mol_type = other DNA
aacaatcagtcttgaattcggcccagatttcactccttttctttctcatttgtctcaggaacagggcgagtttaccgtct

SEQ ID NO: 129813 - DNA, 80 bp, synthetic construct
  source 1..80: mol_type = other DNA
tttgtggttgacaacgtgcacacttggacagaacagtacaaattccaaccagagtccccagcgagactagcgtctgcaat

SEQ ID NO: 129814 - DNA, 80 bp, synthetic construct
  source 1..80: mol_type = other DNA
acgtccctctttagttttggggcatctcagaaaatccagctcataaacaccaacggcagctggcacatcaacaggactgc

SEQ ID NO: 129815 - DNA, 80 bp, synthetic construct
  source 1..80: mol_type = other DNA
ttatgattaatgtctaatggagcggccgacagagcgcggctgcgacatttagaccactgtcgccaacctcgctgctttgc

SEQ ID NO: 129816 - DNA, 80 bp, synthetic construct
  source 1..80: mol_type = other DNA
tcttgccttcctgctcctggcagatgcgcgcatttgcgcgtgcttctggatgatgttgctcatggcccaagccgaggccg

SEQ ID NO: 129817 - DNA, 80 bp, synthetic construct
  source 1..80: mol_type = other DNA
agaaacccaacgcaagtcggagacgaatactgctacggagggcacaccaacgaggatgactctaacttcgcccattggac

SEQ ID NO: 129818 - DNA, 80 bp, synthetic construct
  source 1..80: mol_type = other DNA
cggctgatagcattcgcttcccgtggtaaccatgtgtcacccacgcactatgtgcctgagacggacgcatcggccaaggt

SEQ ID NO: 129819 - DNA, 80 bp, synthetic construct
  source 1..80: mol_type = other DNA
tttttaactgtgcaatgcagagtttaggtcctggggtgattggtatgagcggggtaacatttaataatgtcagatttgca

SEQ ID NO: 129820 - DNA, 80 bp, synthetic construct
  source 1..80: mol_type = other DNA
ttacaaaagggctctgtggagggtatccgctgaggagtatgttgaggtggtacgcgtgggagacagccattacgttgtgg

SEQ ID NO: 129821 - DNA, 80 bp, synthetic construct
  source 1..80: mol_type = other DNA
atctgtcacgtccatcttgtggggaggcatactaatgctgggcttgttggtcacaggtctcgtgagagtggaggagatcg

SEQ ID NO: 129822 - DNA, 80 bp, synthetic construct
  source 1..80: mol_type = other DNA
cacgtgggcagaaaacatccaggtagccatcaaccaagtcagagcaatcattggagatgagaagtatgtggattacatga

SEQ ID NO: 129823 - DNA, 80 bp, synthetic construct
  source 1..80: mol_type = other DNA
gtgtttgtgttgtatcgtgcttggcgggaacgcccaaaacgtcctggagacgggtgagtgtcggcgaggacgtttcgttg

SEQ ID NO: 129824 - DNA, 80 bp, synthetic construct
  source 1..80: mol_type = other DNA
tagcctaccaagctacggtgtgcgccagagccaaggcccctcccccgtcctgggacgccatgtggaagtgcctggcccga

SEQ ID NO: 129825 - DNA, 80 bp, synthetic construct
  source 1..80: mol_type = other DNA
cggaccaccccaggcggaccagaaaccccgcaaaatcaagcgggttaaaaaaaaggatgaggcggacgaggtggcagtag

SEQ ID NO: 129826 - DNA, 80 bp, synthetic construct
  source 1..80: mol_type = other DNA
tgaagcaagaaacagcacatttttaatagacggaccagatacctctgaatgcccaaatgaacgaagagcatggaattctt

SEQ ID NO: 129827 - DNA, 80 bp, synthetic construct
  source 1..80: mol_type = other DNA
gggtggcctacgccttctacgggatgtggcctctcctcctgctcctgttggcgttgccccaacgggcatacgccatggac

SEQ ID NO: 129828 - DNA, 80 bp, synthetic construct
  source 1..80: mol_type = other DNA
cctggctcaagtctaagttactccccatgctcccaggagtgcctttcttttcatgtcagaggggctaccggggtgtctgg

SEQ ID NO: 129829 - DNA, 80 bp, synthetic construct
  source 1..80: mol_type = other DNA
aatgacagacacgactccatttggacaacagcgcgttttcaaagagaaagtggacacgagaacccaagaaccaaaagaag

SEQ ID NO: 129830 - DNA, 80 bp, synthetic construct
  source 1..80: mol_type = other DNA
ttgtcttcggcggccattggggtgtggtatttggcctggcctatttttccatgcagggagcgtgggccaaggtctttgcc

SEQ ID NO: 129831 - DNA, 80 bp, synthetic construct
  source 1..80: mol_type = other DNA
gtagtgtgtgcaagtacttttgggggaacgagatagttagtagaaataacagcctttgcgagcactgcaactcctccaca

SEQ ID NO: 129832 - DNA, 80 bp, synthetic construct
  source 1..80: mol_type = other DNA
cacagggcctaaaacctgcatgaacacctggcaggggacctttcctatcaattgctacacggagggccagtgcgcgccga

SEQ ID NO: 129833 - DNA, 80 bp, synthetic construct
  source 1..80: mol_type = other DNA
gtataacaaaattaataggagagaaaaacacataaacacctgaaaaaccctcctgcctaggcaaaatagcaccctcccgc

SEQ ID NO: 129834 - DNA, 80 bp, synthetic construct
  source 1..80: mol_type = other DNA
gagctgcaaagctccaggactgcacgatgctcgtgaacggggacgaccttgtcgttatctgcgaaagcgcgggaacccag

SEQ ID NO: 129835 - DNA, 80 bp, synthetic construct
  source 1..80: mol_type = other DNA
gttcggggctgtgccttttactgctgctggaagggggtggtgtgtcgccccaaaagcagggcttcaattaagaaatgcct

SEQ ID NO: 129836 - DNA, 80 bp, synthetic construct
  source 1..80: mol_type = other DNA
aacgtttccgtagcccacgatggagatggcaaacggtattactacctcacacgtgacccaaccacccctctttctagggc

SEQ ID NO: 129837 - DNA, 80 bp, synthetic construct
  source 1..80: mol_type = other DNA
aacgtatcaacctgaaccacaagtaggggaaacacagtggaacagcgatgtaggcactaatgataaagtggcaggaagag

SEQ ID NO: 129838 - DNA, 80 bp, synthetic construct
  source 1..80: mol_type = other DNA
agctgttcaaggacttcgcggctgggcggagatcacagataggattggtggaagtgattggaaggatgccagagcacttc

SEQ ID NO: 129839 - DNA, 80 bp, synthetic construct
  source 1..80: mol_type = other DNA
acgtcgcgccgcaccgcgtccgcgctcgggggtggtttcgcgctgctcctcttcccgactggccatttccttctcctata

SEQ ID NO: 129840 - DNA, 80 bp, synthetic construct
  source 1..80: mol_type = other DNA
gctggcctcgtggacgggcacttatgtctatgaccacctcaccccactgcaagactgggctcacaaggggctgcgcgatc

SEQ ID NO: 129841 - DNA, 80 bp, synthetic construct
  source 1..80: mol_type = other DNA
cggtatagacccaaacatcagatctggggcgcgtactgttaccactggagccccgatcacttactccacctacgggaaat

SEQ ID NO: 129842 - DNA, 80 bp, synthetic construct
  source 1..80: mol_type = other DNA
gaactatgcaacagggaatattcccggttgctctttctctatcttccttctggccttactatcttgcttgaccgtgcctg

SEQ ID NO: 129843 - DNA, 80 bp, synthetic construct
  source 1..80: mol_type = other DNA
tgtccaacgcgctcaccaaggcgggccaggcggccgccaacgccaagacggtgtacggggaaaatacccatcgcaccttc

SEQ ID NO: 129844 - DNA, 80 bp, synthetic construct
  source 1..80: mol_type = other DNA
cgccgcccgggctctgctgcgccgtgccagacgcactggccgccgggccatgttgcaagccgcgcgtcgcgccgccgccg

SEQ ID NO: 129845 - DNA, 80 bp, synthetic construct
  source 1..80: mol_type = other DNA
tggactctggccagggacacatttctcacgcgtcgacacaagtccagaccccggtttttcgtcccgtaacccaatattgc

SEQ ID NO: 129846 - DNA, 80 bp, synthetic construct
  source 1..80: mol_type = other DNA
ggtccatgtcgtacgcggggaacactatctgtcgttgttgcagcgagaacccgaggggcgcgatgaagccgcggatgttg

SEQ ID NO: 129847 - DNA, 80 bp, synthetic construct
  source 1..80: mol_type = other DNA
gagcggccttcctagcgtatttgcaccagggccccgacagaacgtccagcttatcaataccaacggtagctggcacatca

SEQ ID NO: 129848 - DNA, 80 bp, synthetic construct
  source 1..80: mol_type = other DNA
gactttaagaactggctgtctgcaaaattgctccccaaaatgcccggcctccccttcatctcttgccaaaagggatacag

SEQ ID NO: 129849 - DNA, 80 bp, synthetic construct
  source 1..80: mol_type = other DNA
tgcgccagggcccaagctcctcccccatcatgggatcaaatgtggaagtgtctcatacggctaaagcctacactgcacgg

SEQ ID NO: 129850 - DNA, 80 bp, synthetic construct
  source 1..80: mol_type = other DNA
caagaggctctttgtgcgctcgcggtggcctcgtttttcttgctgatgcttgtgctcgggacgaggaagatgcagctggt

SEQ ID NO: 129851 - DNA, 80 bp, synthetic construct
  source 1..80: mol_type = other DNA
tggcccgatgtacaactcacgtggccaatcatgcgggtatcgcaggtgccgcgctagcggggtgctccctactagcatgg

SEQ ID NO: 129852 - DNA, 80 bp, synthetic construct
  source 1..80: mol_type = other DNA
tggccaatatcgaagatggacataggagttccacttctcgccttagggtgctattcccaggtgaacccattgacattgac

SEQ ID NO: 129853 - DNA, 80 bp, synthetic construct
  source 1..80: mol_type = other DNA
ctaatccactacccgtacaggctctggcactacccctgcactgtcaattataccatccacaaagtccgtgtcttcctagg

SEQ ID NO: 129854 - DNA, 80 bp, synthetic construct
  source 1..80: mol_type = other DNA
ggatgccccagggctagggcggagcgcacggactcgtcccacacggcaacctgaggggccagtcgatccaacgggaatgc

SEQ ID NO: 129855 - DNA, 80 bp, synthetic construct
  source 1..80: mol_type = other DNA
gtatgggcgtgacctatcttgccctactagcagccttcaaagttagaccaacttttgcagctggactactcttgagaaag

SEQ ID NO: 129856 - DNA, 80 bp, synthetic construct
  source 1..80: mol_type = other DNA
cctcgtcctcgtcgtccgcatcctcttcgtcctcgtcgtccgacgaggacgaggacgacgacggcaacgacgcggccgac

SEQ ID NO: 129857 - DNA, 80 bp, synthetic construct
  source 1..80: mol_type = other DNA
tgagtggccctctgtgggcggtgtgggagagtcttataggaagtgcatataaccacaacccatgggtctaaccaatcccc

SEQ ID NO: 129858 - DNA, 80 bp, synthetic construct
  source 1..80: mol_type = other DNA
ccaggttgtttccaccgccacgcagtccttccttgctactgctgtcaatggggttctttggacagtttaccatggtgctg

SEQ ID NO: 129859 - DNA, 80 bp, synthetic construct
  source 1..80: mol_type = other DNA
agatgctaacataaatggtcccagtgaggacagaccatattgctggcactatccacccagaccctgtaacataaccaagc

SEQ ID NO: 129860 - DNA, 80 bp, synthetic construct
  source 1..80: mol_type = other DNA
atggccctttatgacataacacagaagcttcccgtcgcggtgatggggcgctcctacgggttccagtactctccggctca

SEQ ID NO: 129861 - DNA, 80 bp, synthetic construct
  source 1..80: mol_type = other DNA
ccggagtatgccttgcatccatccatcacgccaacgcccggttaccgcggaacaaccttcaaacccagccgcactcgctc

SEQ ID NO: 129862 - DNA, 80 bp, synthetic construct
  source 1..80: mol_type = other DNA
gtatgaccatctctcacccatgactgattgggcggctgagggcttgaaagacctagccgtggccgtcgagcctgtcatct

SEQ ID NO: 129863 - DNA, 80 bp, synthetic construct
  source 1..80: mol_type = other DNA
aatggaaggacaacaacaaaataaaagttagagggcaagctccctttataggaacaaacataaataaagacaatgggatt

SEQ ID NO: 129864 - DNA, 80 bp, synthetic construct
  source 1..80: mol_type = other DNA
gcgcgcaaatcaagccccccccgcgcatggcgggcctacgggtgcgcgtcgctcccgtcgcccgctagtctgggtgcgag

SEQ ID NO: 129865 - DNA, 80 bp, synthetic construct
  source 1..80: mol_type = other DNA
ttccgtggcccacgacaacaatggacagagatattactacctcacgagagacccaaccataccactctcacgagctgctt

SEQ ID NO: 129866 - DNA, 80 bp, synthetic construct
  source 1..80: mol_type = other DNA
aacaagcagggccacctgggcaaagaacatccaaacagcaataaatcaagttagaacctgttgattcaacagcaccattc

SEQ ID NO: 129867 - DNA, 80 bp, synthetic construct
  source 1..80: mol_type = other DNA
cacatgctatctcaaactaagcagggaggggaaaacttcccctacctagtggcctaccaagccacggtgtgcgtccgtgt

SEQ ID NO: 129868 - DNA, 80 bp, synthetic construct
  source 1..80: mol_type = other DNA
ggggcaggcctgcgggggactctaaggccgccacgtcccggaaccactgcagatggagcacttgcgctccgtcgagctgt

SEQ ID NO: 129869 - DNA, 80 bp, synthetic construct
  source 1..80: mol_type = other DNA
ggtcctgtttctgacaacgaaccggaacctgacagcactacggatgacaatgagagaccgtcgcccccagaactgggaga

SEQ ID NO: 129870 - DNA, 80 bp, synthetic construct
  source 1..80: mol_type = other DNA
caatcaataaaggcattttggttacagttaaccccatcgcctcaaccaatgatgatgaagtgctgattgaggtgaaccca

SEQ ID NO: 129871 - DNA, 80 bp, synthetic construct
  source 1..80: mol_type = other DNA
gcctctcctgctactggttttggccctgccccagcgcgcctacgcttacgacagtgagcaggccgcatccattggggcag

SEQ ID NO: 129872 - DNA, 80 bp, synthetic construct
  source 1..80: mol_type = other DNA
gataaaggaccacttgatagggcagccattgaagagagggttgaaagaataaaatcagaatacaccgccacttggttcca

SEQ ID NO: 129873 - DNA, 80 bp, synthetic construct
  source 1..80: mol_type = other DNA
tgtagtttatgtgaaaaacacacgcggccggtatgcgctcacacaacagtacaccgacttagacaacgcatgccgcgatt

SEQ ID NO: 129874 - DNA, 80 bp, synthetic construct
  source 1..80: mol_type = other DNA
catgcccaaagttgttgaaaagatggaggtcctccagcgacgttacggaggaggattggtcagaaatccactttcgcgga

SEQ ID NO: 129875 - DNA, 80 bp, synthetic construct
  source 1..80: mol_type = other DNA
gctggccttggaatgcccgagaggatgttactagaatggccatgacagacacaacagcgtttgggcaacagcgcgttttc

SEQ ID NO: 129876 - DNA, 80 bp, synthetic construct
  source 1..80: mol_type = other DNA
gaccccgggtggcgaagttgccatggctgggcgcgaggggcgcacgcgccagcgaactttacgggacacaatccccgact

SEQ ID NO: 129877 - DNA, 80 bp, synthetic construct
  source 1..80: mol_type = other DNA
accgccggttggtgttggaccctcatcttcctgtgctgcgtgtggcacgtgaaggggcgccttgtgcccgcatgcaccta

SEQ ID NO: 129878 - DNA, 80 bp, synthetic construct
  source 1..80: mol_type = other DNA
aggtcttataacggagttacaaacgaacccgactctacaacaactcatggaatatgatattgcagattcttcccaaacgg

SEQ ID NO: 129879 - DNA, 80 bp, synthetic construct
  source 1..80: mol_type = other DNA
acggcctcggggcccagggggggtgggcgcggagccacctgcggggccgcaccggccggggcgaacattacgcagagggg

SEQ ID NO: 129880 - DNA, 80 bp, synthetic construct
  source 1..80: mol_type = other DNA
gcgctgcccccgcccccctccccggtcggcgccgatttccggcccggcgcgtccccgcgtggccggtccagatcgcggtc

SEQ ID NO: 129881 - DNA, 80 bp, synthetic construct
  source 1..80: mol_type = other DNA
ggcctcggacgcgttggcgctcgcgcccgcgaacaacacgcggctcttgacgcgcagctccttgggaaaccccagggtca

SEQ ID NO: 129882 - DNA, 80 bp, synthetic construct
  source 1..80: mol_type = other DNA
gcggatggaggatgcggggggggggcatacgatatcatcatctgtgacgaatgccactccactgatgcaacaacgatcct

SEQ ID NO: 129883 - DNA, 80 bp, synthetic construct
  source 1..80: mol_type = other DNA
taacggtaacgaccttcggaggtcgggcggctgcagtccgggcggcgcaactcgagctccccgcaccggtagaccgaggc

SEQ ID NO: 129884 - DNA, 80 bp, synthetic construct
  source 1..80: mol_type = other DNA
cggaagacccctacgcgatctcatacggcggccagctcgaccggtacggagattccgacggggagccgatttacgacgag

SEQ ID NO: 129885 - DNA, 80 bp, synthetic construct
  source 1..80: mol_type = other DNA
cgagctgccaaggctgggtgtggtgcatcctcttcgtgtgctgcgcatggtacgtgagaggccgcgctgtgccggcgttc

SEQ ID NO: 129886 - DNA, 80 bp, synthetic construct
  source 1..80: mol_type = other DNA
gcgtgtggagagagatgcatcatctcgtggaatttgagcctccacatgccgcaactatcaaagtgttagcccttggaaac

SEQ ID NO: 129887 - DNA, 80 bp, synthetic construct
  source 1..80: mol_type = other DNA
cggcgacccggatctgggctcagactcttggtccactgtcagcggatcggaagacgtcgtgtgctgctcaatgtcctact

SEQ ID NO: 129888 - DNA, 80 bp, synthetic construct
  source 1..80: mol_type = other DNA
cgtttccaaatgctggttgcctgccacgctcaccatagcggtaccgaatgcgtccgtgccgattcaggggttccgcaagc

SEQ ID NO: 129889 - DNA, 80 bp, synthetic construct
  source 1..80: mol_type = other DNA
gaagtttgcggccgtcccgagtccgggtcggccgcgcatcagggcggccagagggattcccgcggccgccaggcactcgc

SEQ ID NO: 129890 - DNA, 80 bp, synthetic construct
  source 1..80: mol_type = other DNA
tcccccattgtgaaccgaaatggtgaagtggttgggctctatggcaatggaattctggtgggtgataactcctttgtgtc

SEQ ID NO: 129891 - DNA, 80 bp, synthetic construct
  source 1..80: mol_type = other DNA
tgtggaccttctcgtcggtgctgcagccttttgctccgccatgtacatcggggatctatgcggaggcgtcttccttgtgg

SEQ ID NO: 129892 - DNA, 80 bp, synthetic construct
  source 1..80: mol_type = other DNA
tgtcacctggagccttggttgtgggcgtggtttgtgctgccgtattacggcggcacattggcccaactgagggggctact

SEQ ID NO: 129893 - DNA, 80 bp, synthetic construct
  source 1..80: mol_type = other DNA
gaaccggctaataaccttcgcctcccggtggaaccatgtttcccccacgcactacgtgccggagagcgatgcagctgccc

SEQ ID NO: 129894 - DNA, 80 bp, synthetic construct
  source 1..80: mol_type = other DNA
gggaaagaaactaaaaacacatcaagcccacaacccatcccacaaggggggttatggcggacccaccgcaccaccatact

SEQ ID NO: 129895 - DNA, 80 bp, synthetic construct
  source 1..80: mol_type = other DNA
tgggcgaagcacatgtggaacttcatcagcggcatacagtacctggcaggtctatcaacactaccgggaaacccagcaat

SEQ ID NO: 129896 - DNA, 80 bp, synthetic construct
  source 1..80: mol_type = other DNA
ataccatctgagtacctgctacccaagaaaaagagatttccaccggcgttgccaccctgggcgcgacctgattacaatcc

SEQ ID NO: 129897 - DNA, 80 bp, synthetic construct
  source 1..80: mol_type = other DNA
ggcgtagaggggacaactcctttaaccggctcccaggtgggcaggactacaagcggattcgcgagcctcttcacccctgg

SEQ ID NO: 129898 - DNA, 80 bp, synthetic construct
  source 1..80: mol_type = other DNA
tgaagtcagtgtcgtcgcatccgccctgctcccagagcaaaaagtccgtgcgctttttggaacgcgggtttggcagggcg

SEQ ID NO: 129899 - DNA, 80 bp, synthetic construct
  source 1..80: mol_type = other DNA
cagtcccgcgcgaagccgctcccggaagctggatcggcggcgggacccggagcgggctccggagacggcgccgtctcgtg

SEQ ID NO: 129900 - DNA, 80 bp, synthetic construct
  source 1..80: mol_type = other DNA
tagtgacttacgccctgaacaccttcactaatctagcagttcagctggtcagaatgatggagggggagggggtcattgga

SEQ ID NO: 129901 - DNA, 80 bp, synthetic construct
  source 1..80: mol_type = other DNA
acgcgggctttagtcccggcccggacgtcggcggacacacaacaacggcgggccccgtgggttggtaagttggttcggcg

SEQ ID NO: 129902 - DNA, 80 bp, synthetic construct
  source 1..80: mol_type = other DNA
tggaacgatagaaagatatatagttaccccaccaaagtttaaatgtatccttaaataccacgtacgtaaaaaatgtttga

SEQ ID NO: 129903 - DNA, 80 bp, synthetic construct
  source 1..80: mol_type = other DNA
gctttcccttggaaacgtgctgacatttggtgcagtgcagacacttgagggcgtagagtttgggggccaggaagaccgac

SEQ ID NO: 129904 - DNA, 80 bp, synthetic construct
  source 1..80: mol_type = other DNA
tagtagctatgtgtgcaaacaaggcttcactgaccgtgggtgtggcaacggatgtggatttttcgggaagggaagcattg

SEQ ID NO: 129905 - DNA, 80 bp, synthetic construct
  source 1..80: mol_type = other DNA
aggaatgaggatggctgggcttgatgtcatcagatgtttgttgttgataattgggattgtaacacttctgaatgaaagaa

SEQ ID NO: 129906 - DNA, 80 bp, synthetic construct
  source 1..80: mol_type = other DNA
cgaacgcacggccgcttgccagctggccgatctgatttttcccgaacgactcatgcaaacgctgcaaaacggcttgccag

SEQ ID NO: 129907 - DNA, 80 bp, synthetic construct
  source 1..80: mol_type = other DNA
cctgggtcggttacttcgccagtgtcaatgttttctacattgctaagggtaaacggcgtcatcttgcagagttgtcgccc

SEQ ID NO: 129908 - DNA, 80 bp, synthetic construct
  source 1..80: mol_type = other DNA
gatgagcccctgggtcgcggcgtcggtcaggaccgagagccaggccgccaggtcctcggaggcatctagggtctggcccc

SEQ ID NO: 129909 - DNA, 80 bp, synthetic construct
  source 1..80: mol_type = other DNA
caggtgtgcggtccggtgtattgcttcaccccaagccctgttgtggtggggacgaccgaccgtttcggcgcccctgcgta

SEQ ID NO: 129910 - DNA, 80 bp, synthetic construct
  source 1..80: mol_type = other DNA
aggcgtcgactggacatggactttcttggtaatggctttgatggctatggccatggcgacctccatccatcgggataaag

SEQ ID NO: 129911 - DNA, 80 bp, synthetic construct
  source 1..80: mol_type = other DNA
caccaactggttgtgggcgtttttggccagagagaaacgtcccagaatgtgctctcgagaggaattcataagaaaggtca

SEQ ID NO: 129912 - DNA, 80 bp, synthetic construct
  source 1..80: mol_type = other DNA
acttccaaaccatgccaggcacattccagactacaacaggggaaataggagcaattgcactggatttcaagcctggaact

SEQ ID NO: 129913 - DNA, 80 bp, synthetic construct
  source 1..80: mol_type = other DNA
ggcaatactatcacatgctttctgaaagcgaaagccgcttgccgcgctgcgggcttcaccaactttgacatgttggtctg

SEQ ID NO: 129914 - DNA, 80 bp, synthetic construct
  source 1..80: mol_type = other DNA
gtgtggaccagtatactgcttcacccccagtcccgtggtggtcggcacgaccgatcggcaaggcgccgcgacgtacacct

SEQ ID NO: 129915 - DNA, 80 bp, synthetic construct
  source 1..80: mol_type = other DNA
tcttctatcctgcctgacagtccctgcttcggccgtcggagtgcgcaactcttcgggggtgtaccatgtcaccaatgatt

SEQ ID NO: 129916 - DNA, 80 bp, synthetic construct
  source 1..80: mol_type = other DNA
ttttgggcatagggaccgtcttggaccaggcggagactgcaggagtaaggcttgtggtcctcgccactgccacccctcct

SEQ ID NO: 129917 - DNA, 80 bp, synthetic construct
  source 1..80: mol_type = other DNA
gggtctccatcaccaggcaaagctataccctgatcgcaaggaatagaggctacaggagaccgggcaagaagaactcctcg

SEQ ID NO: 129918 - DNA, 80 bp, synthetic construct
  source 1..80: mol_type = other DNA
taggcatcttcctgcttcccgctcggtaagcgggaagcccaaagcaacactccaataattcgccttttcgcttttttttt

SEQ ID NO: 129919 - DNA, 80 bp, synthetic construct
  source 1..80: mol_type = other DNA
agttgctcctcctggtccgcaagacgatcgtccacggcgtccaggcgctcaccaagcgccggatcgaggtaccgtcggtg

SEQ ID NO: 129920 - DNA, 80 bp, synthetic construct
  source 1..80: mol_type = other DNA
ctggggtaagaaccgcaagcagacgcgtcggggctactgctcgtggcgggctcacaaaagtaacattgtggcctgcctac

SEQ ID NO: 129921 - DNA, 80 bp, synthetic construct
  source 1..80: mol_type = other DNA
tcgaaggggggtcgtaagccggcccgcctgatcgtatacccggaccttagtgtgcgggtgtgcgaaaagagagccttata

SEQ ID NO: 129922 - DNA, 80 bp, synthetic construct
  source 1..80: mol_type = other DNA
cggttgggtggaggcttcctgcccgcgctgatccccatcatcgccgcggcgatcggggcgatccccggcattgcttccgt

SEQ ID NO: 129923 - DNA, 80 bp, synthetic construct
  source 1..80: mol_type = other DNA
tgattttattgaccgttcgttcgcccggcggtgccgtcgccgcgcgcagagggaatatgcaagcgggcgtggtgtggagg

SEQ ID NO: 129924 - DNA, 80 bp, synthetic construct
  source 1..80: mol_type = other DNA
aaccacgaggctggaaaacatcatgtggaagcaaataaccaacgagctaaactatgttctctgggaaggaggacatgacc

SEQ ID NO: 129925 - DNA, 80 bp, synthetic construct
  source 1..80: mol_type = other DNA
ggggtggtggttggcctctcagatcgcgcccccggcaggggctactggcttcgtagtcagcggcctggtggtgtcagcgg

SEQ ID NO: 129926 - DNA, 80 bp, synthetic construct
  source 1..80: mol_type = other DNA
gtacgtcgatggctcaaggaccagatgcggacccctgttctcgccaatgttactaaactttaccatcgcaaataaatttc

SEQ ID NO: 129927 - DNA, 80 bp, synthetic construct
  source 1..80: mol_type = other DNA
tggtgtacactaccgtcgtgaccgttggattgagttttgacatggctcattttcatagcatgtttgcttacataaagcca

SEQ ID NO: 129928 - DNA, 80 bp, synthetic construct
  source 1..80: mol_type = other DNA
tgctcaatgatccatcacatattacagcagaggcggctgctaggaggctcgcgagagggtcccccccctcggaagccagc

SEQ ID NO: 129929 - DNA, 80 bp, synthetic construct
  source 1..80: mol_type = other DNA
caggctactcacaactgaggaagcctgtgacctaacacccccaaagtcggctcgatcaaagttcggctatggggccaagg

SEQ ID NO: 129930 - DNA, 80 bp, synthetic construct
  source 1..80: mol_type = other DNA
cggcggcgcggggcactgcgagtgtcgtcagtctgttctctactggccccaaacaggacatcaagctcgttaactccaat

SEQ ID NO: 129931 - DNA, 80 bp, synthetic construct
  source 1..80: mol_type = other DNA
caccgtggcgcccgtcgggtgcgggcacacgtaaaactgggcatcggcgttctcgaccttgatttcccgcaggtgcgcgc

SEQ ID NO: 129932 - DNA, 80 bp, synthetic construct
  source 1..80: mol_type = other DNA
caattaggaccggcgttaccgcgggcattgcgataaactggatttgcgcactgaaaaaccagcaaacatggatacttaat

SEQ ID NO: 129933 - DNA, 80 bp, synthetic construct
  source 1..80: mol_type = other DNA
aggaattaaaaaatgacgatggtgtaacaaacaaaggagtcggcttgcgtgtaagacttggagatgacggcgggctgaca

SEQ ID NO: 129934 - DNA, 80 bp, synthetic construct
  source 1..80: mol_type = other DNA
tgctcacagaccccacgcacatcaccgcagagacggcagcacggcggttgaagagggggtcccccccctccttagccagc

SEQ ID NO: 129935 - DNA, 80 bp, synthetic construct
  source 1..80: mol_type = other DNA
ctcttgagtttcaagagagagctgggagctctgaccaacactatcaatcgacggagcgctaaacagaagaaaagaggagg

SEQ ID NO: 129936 - DNA, 80 bp, synthetic construct
  source 1..80: mol_type = other DNA
catcctttggggtgagcatcgtgtcggtggccccgggtgtgctgcgagaccgccgggtgtgcttgcgcccggcggtcaag

SEQ ID NO: 129937 - DNA, 80 bp, synthetic construct
  source 1..80: mol_type = other DNA
gcgacgagaaaagcttcggaacggtcccagcccagaggcaggcgtcagcctatccccaaggcgcgccatgccgcgggccg

SEQ ID NO: 129938 - DNA, 80 bp, synthetic construct
  source 1..80: mol_type = other DNA
tcaagctacgtctagcttcgtcaacctgttcagttccgggcctcaacaacacctccagctcgtcaacaccaacggcagct

SEQ ID NO: 129939 - DNA, 80 bp, synthetic construct
  source 1..80: mol_type = other DNA
acaaggtgtactgtacaacatcaaagagcgcctcacagagggctaaaaaggtaacttttgacaggacgcaagtgctcgac

SEQ ID NO: 129940 - DNA, 80 bp, synthetic construct
  source 1..80: mol_type = other DNA
ggactgcaattggcagagcaattcaagcagaaagccctcggcgtgctgagtgtcgccagcaagcaggccaaggaggcaac

SEQ ID NO: 129941 - DNA, 80 bp, synthetic construct
  source 1..80: mol_type = other DNA
cctcacccgcgaccctgagattcctttggccagagctgcctgggaaacagctcgacacactccagttaattcctggttgg

SEQ ID NO: 129942 - DNA, 80 bp, synthetic construct
  source 1..80: mol_type = other DNA
ctaaaactctggcaggcccgaagggaccggtatgccagatgtacaccaatgtcgaccaggacatggtgggttggccagcg

SEQ ID NO: 129943 - DNA, 80 bp, synthetic construct
  source 1..80: mol_type = other DNA
tccagccgcggcgccactggactacgcaggactgcaattgttccatctacgcggggcacgttacgggccacaggatggca

SEQ ID NO: 129944 - DNA, 80 bp, synthetic construct
  source 1..80: mol_type = other DNA
aggttcggaaagacatacctcaatggcagccatcaaagggatggcatgattggcaacaggttcctttctgctcccaccac

SEQ ID NO: 129945 - DNA, 80 bp, synthetic construct
  source 1..80: mol_type = other DNA
agttctatgccgcctcttgagggcgagcctggcgatcctgacctctccgatgggtgaggttcggggtcgtggtctacggt

SEQ ID NO: 129946 - DNA, 80 bp, synthetic construct
  source 1..80: mol_type = other DNA
atcaagtgggaatatgttgtcctgatcttcctcgtgctggctgatgcgcgcgtctgcgcgtgcttatggcttatgttact

SEQ ID NO: 129947 - DNA, 80 bp, synthetic construct
  source 1..80: mol_type = other DNA
ccaccgtctgcaaacatcgtcccaattttgctaatgtgcgtagaaatttcacggatgttggccataaccccgaaacgacg

SEQ ID NO: 129948 - DNA, 80 bp, synthetic construct
  source 1..80: mol_type = other DNA
ctagacacactccagttaactcctggctaggcaacatcattatgtttgcccccacattgtgggttcggatgatcctgatg

SEQ ID NO: 129949 - DNA, 80 bp, synthetic construct
  source 1..80: mol_type = other DNA
gctggcctgggacgactgggcccgcataacgcgggacgctcgcctggccgaagcggtcgtgtccgccgaagcggcggcgc

SEQ ID NO: 129950 - DNA, 80 bp, synthetic construct
  source 1..80: mol_type = other DNA
aaaaaaggttcccatgggtttctcctatgacactcgctgttttgactccacagtgactgaaagagacatcagggtcgagg

SEQ ID NO: 129951 - DNA, 80 bp, synthetic construct
  source 1..80: mol_type = other DNA
ggacgtagacgatatcgtcgcgcggccccagggcctccatcagctgcgcggaggtggtggtcttccccaccccgtggtgt

SEQ ID NO: 129952 - DNA, 80 bp, synthetic construct
  source 1..80: mol_type = other DNA
gtgctagaaagtgagatgataattccaaagaattttgctggaccagtatcacaacataattacagaccaggctatcacac

SEQ ID NO: 129953 - DNA, 80 bp, synthetic construct
  source 1..80: mol_type = other DNA
cgactgtcactgaacaggacatcagggtggaagaggagatataccaatgctgtaaccttgaaccggaggccaagaaagtg

SEQ ID NO: 129954 - DNA, 80 bp, synthetic construct
  source 1..80: mol_type = other DNA
ttctctcgtgcttgaccgtcccgacctcagcagttccctaccgaaatgcctccggagtttatcacgtcaccaatgactgc

SEQ ID NO: 129955 - DNA, 80 bp, synthetic construct
  source 1..80: mol_type = other DNA
ctgggcagtaaaaaccaagctcaaactcactccacagccggctgcaagccagctggacttgtccagctggttcactgccg

SEQ ID NO: 129956 - DNA, 80 bp, synthetic construct
  source 1..80: mol_type = other DNA
ccccccgagcgggcgcgctcatcaccggctccgatgtcatcctaggtgaggaggagttatgggaggcggtctttaagaaa

SEQ ID NO: 129957 - DNA, 80 bp, synthetic construct
  source 1..80: mol_type = other DNA
acagcagcgtcctggatttgggagggagtggcaacccgtttgcgcaccttcgccccaggctggggagaatgttttaaaaa

SEQ ID NO: 129958 - DNA, 80 bp, synthetic construct
  source 1..80: mol_type = other DNA
ctcacaacaccaaaaggagtgacccaacatttgtctgcaaaagagatgttgtggaccgcggatggggtaacggatgtggc

SEQ ID NO: 129959 - DNA, 80 bp, synthetic construct
  source 1..80: mol_type = other DNA
agtctttgccgtaagaccagagaaaggaggccggaagccagctcgcttaatcgtatacccagatctgggcgtgcgagttt

SEQ ID NO: 129960 - DNA, 80 bp, synthetic construct
  source 1..80: mol_type = other DNA
atcccgcgtgaaccccttgacggggttgaagaggatacttggaagtctgctggatggccgtggacccgtgcggttcatac

SEQ ID NO: 129961 - DNA, 80 bp, synthetic construct
  source 1..80: mol_type = other DNA
catcgtggctgctacatcagataacttgaaatgcccgtgtcaggtgccgtcccctgagtttttcaccgaggtggacggca

SEQ ID NO: 129962 - DNA, 80 bp, synthetic construct
  source 1..80: mol_type = other DNA
gacctcgttggatggccagcccctccaggggccaagtctcttgaaccatgcacctgcggtgctgcagacttatacctggt

SEQ ID NO: 129963 - DNA, 80 bp, synthetic construct
  source 1..80: mol_type = other DNA
cagaactgagacgcattttgacaattacagaggatggacaggggctaaagggggtaaagagggagcgtgtggcttgtgag

SEQ ID NO: 129964 - DNA, 80 bp, synthetic construct
  source 1..80: mol_type = other DNA
tttttgcaagatgtgacgtttccttgtaacagggaagctgggggagtggtaagaacaacaaagtttcagccaacgtgcca

SEQ ID NO: 129965 - DNA, 80 bp, synthetic construct
  source 1..80: mol_type = other DNA
ctaatcctttatcccccatttgttactggatggtatatgtgcgttggctccggtttaaatcctagttgctttcataagtg

SEQ ID NO: 129966 - DNA, 80 bp, synthetic construct
  source 1..80: mol_type = other DNA
cccatcacagcatacgcacagcagacccgcggcttgttcagcaccatcgtaacgagcctcactggcagggacaccaatga

SEQ ID NO: 129967 - DNA, 80 bp, synthetic construct
  source 1..80: mol_type = other DNA
cgacccacacactcacatcaatgttcaatcaaggcccctctcaaaccatccagctcatcaacaccaacggtagctggcac

SEQ ID NO: 129968 - DNA, 80 bp, synthetic construct
  source 1..80: mol_type = other DNA
cgccccctccaccttcataagcaggcagaccttcataatagcaacagatctggctgttcgatcacctgcagcgtattcag

SEQ ID NO: 129969 - DNA, 80 bp, synthetic construct
  source 1..80: mol_type = other DNA
cagtcggctccggtaaccccgcgtccttcatttcttgtacatacctttgtggtaagtcacaagagccaagggaaaacagt

SEQ ID NO: 129970 - DNA, 80 bp, synthetic construct
  source 1..80: mol_type = other DNA
agtatcgcctgaagggtgagtccaggaagactttcgtggaactcatgaggaggggtgaccttccagtttggttagcccat

SEQ ID NO: 129971 - DNA, 80 bp, synthetic construct
  source 1..80: mol_type = other DNA
gcgtgtatgcgaaaaaagagctctatatgacatagtgaggaagctccctcaagccgtgatgggtgattcttacgggttcc

SEQ ID NO: 129972 - DNA, 80 bp, synthetic construct
  source 1..80: mol_type = other DNA
gggccagagcggtcagagccaaactcattgctcagggagggaaggcagccatttgcggcaagtacctcttcaactgggca

SEQ ID NO: 129973 - DNA, 80 bp, synthetic construct
  source 1..80: mol_type = other DNA
acatccaccagggtttggcttaaactcagagaggaaaatacctcggagtgtgacagcaccattattgggaccgcagttaa

SEQ ID NO: 129974 - DNA, 80 bp, synthetic construct
  source 1..80: mol_type = other DNA
gggcttattgccgttggggttttgtgtgtgcgggggggcttgccttcaaccgaatatgttattcggagtcggttggctcg

SEQ ID NO: 129975 - DNA, 80 bp, synthetic construct
  source 1..80: mol_type = other DNA
acaatttgcatctcaccactgaagcccccttagttataaactctggcggtgccctaactgttgctactacggaacccctt

SEQ ID NO: 129976 - DNA, 80 bp, synthetic construct
  source 1..80: mol_type = other DNA
gaaacaacaggggtcattacgatccccacggcagcaggcaaaaatctttgcaccatcagagcgatggacgtgggattcat

SEQ ID NO: 129977 - DNA, 80 bp, synthetic construct
  source 1..80: mol_type = other DNA
ccttctaccctgactcaggacaagttacttgtccttttggcccagctggaggctttgacccaacgtctgggtgaactttc

SEQ ID NO: 129978 - DNA, 80 bp, synthetic construct
  source 1..80: mol_type = other DNA
gcatggtagtggcgcacgttttgcgcctgcctcagaccttgttcgacataatagctggagctcactggggtgtcttggcg

SEQ ID NO: 129979 - DNA, 80 bp, synthetic construct
  source 1..80: mol_type = other DNA
gccgccgcccgggcctcggacgcgcgtcggggcccgcggtcaccccgggcgtcccggcgacggcgcgggtgcggctcttc

SEQ ID NO: 129980 - DNA, 80 bp, synthetic construct
  source 1..80: mol_type = other DNA
ccccggtcccgctcccccgctacatcagccctcccccgcacacgcccacccccctccgccgccgccgggacccacgcctc

SEQ ID NO: 129981 - DNA, 80 bp, synthetic construct
  source 1..80: mol_type = other DNA
gggtcgggtggtgtacttagacccccagaccggcgaggaactcaacccgtccacactctccgtcgaagcagcccccccga

SEQ ID NO: 129982 - DNA, 80 bp, synthetic construct
  source 1..80: mol_type = other DNA
gctggctgaaagaacatggagaagagcgtcttggaagaatgctcgtcagtggtgacgattgtgtggtgaggcccttggat

SEQ ID NO: 129983 - DNA, 80 bp, synthetic construct
  source 1..80: mol_type = other DNA
ctcaaagcaaaaatagcaccatctctcccgggtatccccttcctctcatgccaacgagggtatcgggggacgtggcgtgg

SEQ ID NO: 129984 - DNA, 80 bp, synthetic construct
  source 1..80: mol_type = other DNA
aaaggattctaaacttacgttgacacttacaaagtgtggaagtcaggttctgggaaatgtatctttacttgcagttacag

SEQ ID NO: 129985 - DNA, 80 bp, synthetic construct
  source 1..80: mol_type = other DNA
ctggaaatctaaaaaggcccctatgggtttttcttatgacacccgctgctttgactcaacagtcaccgagaatgacatcc

SEQ ID NO: 129986 - DNA, 80 bp, synthetic construct
  source 1..80: mol_type = other DNA
ctaagacacttgctggccccaaaggacccgtgtgccaaatgtacactaatgttgaccaagatcttgtaggttggcccgcc

SEQ ID NO: 129987 - DNA, 80 bp, synthetic construct
  source 1..80: mol_type = other DNA
cctttatgacattgcacaaaaacttcctcgagcggtgatgggggatgcctacggattccagtattccccggaccagcggg

SEQ ID NO: 129988 - DNA, 80 bp, synthetic construct
  source 1..80: mol_type = other DNA
aaacatccgacagccacctagtgagatcctgggtgactgcaggagaagttcatgcagtaccctttggactggtgagcatg

SEQ ID NO: 129989 - DNA, 80 bp, synthetic construct
  source 1..80: mol_type = other DNA
agaggaacaacgaggtggcgtcggagtcttcgtcgtcagagacatacagagtctgaagcagcgacacgggcgggggggta

SEQ ID NO: 129990 - DNA, 80 bp, synthetic construct
  source 1..80: mol_type = other DNA
gccatactttgtcagagctcaggctttgctccgtgtgtgtgccttggtgaggcgtctcgtgggaggtaagtatgtccagg

SEQ ID NO: 129991 - DNA, 80 bp, synthetic construct
  source 1..80: mol_type = other DNA
tgggctgtgggagaggaggctggagctactacgcagccaccatgaagcgagtgcaggaagtgcgcggctacacgaaaggt

SEQ ID NO: 129992 - DNA, 80 bp, synthetic construct
  source 1..80: mol_type = other DNA
tgtgcagcaacacctggcatgggacattcccaataaatgccaccacgtccgggccaagcataccaacgccacaccacagt

SEQ ID NO: 129993 - DNA, 80 bp, synthetic construct
  source 1..80: mol_type = other DNA
aatatagcacaattcgcaacggttgacggccgatataaaataaacctctcacgggcagtttttgtaaataatggccggtc

SEQ ID NO: 129994 - DNA, 80 bp, synthetic construct
  source 1..80: mol_type = other DNA
acgtaaatagcactgctctgaactgcaacgactcgttgcaaactggcttcatagcggggttattctacagttacaaattc

SEQ ID NO: 129995 - DNA, 80 bp, synthetic construct
  source 1..80: mol_type = other DNA
gagggggaggctcggcgtctacaggttcgtgtcgccggtggagcgaccatctggcatgtttgactcgtcggtgctctgtg

SEQ ID NO: 129996 - DNA, 80 bp, synthetic construct
  source 1..80: mol_type = other DNA
gcggcggattggcgatagccatttcgtggtgggggctactgctgacaacctgaagtgcccctgccaagtaccttctccag

SEQ ID NO: 129997 - DNA, 80 bp, synthetic construct
  source 1..80: mol_type = other DNA
caaatacagtcaagctctccacgggttctcgcctctgttgtagtctgccaacgtaaacgggcagtaccgctccatcaagc

SEQ ID NO: 129998 - DNA, 80 bp, synthetic construct
  source 1..80: mol_type = other DNA
tcctcttaaacatccttggagggtgggtggcgtcccagctggccccgccaacagcacctacggcgtttgtcgtaagcgtg

SEQ ID NO: 129999 - DNA, 80 bp, synthetic construct
  source 1..80: mol_type = other DNA
aattcctctaaacgtggccattactaaagctattaatggtacaagaaaccatgttttcccatgtctacgtggtaccaaaa

SEQ ID NO: 130000 - DNA, 80 bp, synthetic construct
  source 1..80: mol_type = other DNA
caaggagataaaactccgcgcgtccacggcgtctgcgcaactcctctccattgaggaggcatgcgatctcactccgcgcc

SEQ ID NO: 130001 - DNA, 80 bp, synthetic construct
  source 1..80: mol_type = other DNA
ccaggtcgtgtccaccgctacccagtccttctttgctaccactgtcaacggcgtcctatggacagtctatcatggggccg

SEQ ID NO: 130002 - DNA, 80 bp, synthetic construct
  source 1..80: mol_type = other DNA
gagtctggtggtgctgctgctattcgccagcgttgacgcggaaacccacgtcaccggaggacgcgctggtcacaccgtag

SEQ ID NO: 130003 - DNA, 80 bp, synthetic construct
  source 1..80: mol_type = other DNA
cctgcggagcaaacttggccgggcatgtcaaaaatggttcgatgaggatcgtcggacccaagacctgcagtaatgtgtgg

SEQ ID NO: 130004 - DNA, 80 bp, synthetic construct
  source 1..80: mol_type = other DNA
aatgtgagtggatcatctgatgataggccatattgctggcactatgcgccccggccctgtaccgttgtcccagccagctc

SEQ ID NO: 130005 - DNA, 80 bp, synthetic construct
  source 1..80: mol_type = other DNA
gcccatggttgacccctcgctgcatggtggactacccctacaggctgtggcattatccatgcacactcaattacactcgc

SEQ ID NO: 130006 - DNA, 80 bp, synthetic construct
  source 1..80: mol_type = other DNA
cgcatacagaacacaagatgatgtggacattatagttgatgcgagactggatttgtcatccacgcttaatgcaagatttg

SEQ ID NO: 130007 - DNA, 80 bp, synthetic construct
  source 1..80: mol_type = other DNA
cacgggtcgtgcatgtcgtcacggtgaccgcgtgcccacgtcgccccgccgtggcattcgccctgtgtcgcgcgaccgac

SEQ ID NO: 130008 - DNA, 80 bp, synthetic construct
  source 1..80: mol_type = other DNA
ccacacccagccaacctacacattcgttctgcgagtcacacacgggaggagcgggaagagctggaagaaccatgtttttt

SEQ ID NO: 130009 - DNA, 80 bp, synthetic construct
  source 1..80: mol_type = other DNA
ctcagggatacaaggtcctagtgctaaatccgtctgttgcggctacgttggggtttggctcatatatgtcaacagctcat

SEQ ID NO: 130010 - DNA, 80 bp, synthetic construct
  source 1..80: mol_type = other DNA
ccagttaattcctggttgggcaacatcatactttacgcgcccacaatatgggtacgcatggtactgatgacccacttctt

SEQ ID NO: 130011 - DNA, 80 bp, synthetic construct
  source 1..80: mol_type = other DNA
ccgggttcttggccgccttgtttgcaaaggaagtcaattcttcgggttgcccctatgctatggcaccgtgcaaggaccta

SEQ ID NO: 130012 - DNA, 80 bp, synthetic construct
  source 1..80: mol_type = other DNA
tgtggcaaactcgggagcgtactgttttacgagggtcataaatgcaattaatagctcgaattcactatcaaactccagca

SEQ ID NO: 130013 - DNA, 80 bp, synthetic construct
  source 1..80: mol_type = other DNA
gcgcggcggttcccaacgtagcacaggccacgagcgttcccagggacggtcctattaacacgtgtatataatgcgccaaa

SEQ ID NO: 130014 - DNA, 80 bp, synthetic construct
  source 1..80: mol_type = other DNA
atggcacccagtatcatgcctttgacagtcctgcaccccttggttttccagactttggcaattgtgattggcatgtgaca

SEQ ID NO: 130015 - DNA, 80 bp, synthetic construct
  source 1..80: mol_type = other DNA
gcgtgggcgggggtgctcgtcgatcgaccgggctcagtggggtcgtgggctgagtgggagaagtcgagaagactggggtg

SEQ ID NO: 130016 - DNA, 80 bp, synthetic construct
  source 1..80: mol_type = other DNA
agtgggatgctaaagaaaaaaatggtggagctgaaactaccaaaacttatacatacggtgtggctgccatgggaggactt

SEQ ID NO: 130017 - DNA, 80 bp, synthetic construct
  source 1..80: mol_type = other DNA
tgtgtggggacgatttagtcattatatccgagagtgcgggggtttcggaggatgctagtgctctgcgagctttcacggaa

SEQ ID NO: 130018 - DNA, 80 bp, synthetic construct
  source 1..80: mol_type = other DNA
acagtatatgacatttcgaaatttactcatggtacggttaggcttgtatgcaagttatgctgagatttttccacccgcgt

SEQ ID NO: 130019 - DNA, 80 bp, synthetic construct
  source 1..80: mol_type = other DNA
gctcctctcatttgaggaagcctgcaagcttacacccccccactcggcccgttccaagtacggatacggtgccaaggagg

SEQ ID NO: 130020 - DNA, 80 bp, synthetic construct
  source 1..80: mol_type = other DNA
gtaaccccgccattgcttcattgatggcttttacagctgccgtcaccagcccactaaccactagtcaaacaggcgccggt

SEQ ID NO: 130021 - DNA, 80 bp, synthetic construct
  source 1..80: mol_type = other DNA
cctctttaactgggcagtgaagaccaaactaaaactcactccattggtctccgcgagcaagcttgacttatcaggctggt

SEQ ID NO: 130022 - DNA, 80 bp, synthetic construct
  source 1..80: mol_type = other DNA
cccctcctgtgtccgtcaggccatgtggttgggctcttccgtgccgccgtctgcacacggggcgtagccaaagctttgga

SEQ ID NO: 130023 - DNA, 80 bp, synthetic construct
  source 1..80: mol_type = other DNA
ggccttccgggtgggatggggcgccttgcaatatgaggataatgtcaccaatccagaggatatgagaccctattgctggc

SEQ ID NO: 130024 - DNA, 80 bp, synthetic construct
  source 1..80: mol_type = other DNA
tccccgcaaggcgcaggtgggacacccgcgccggactcctgagtcccaggcctttggccaccctcaaaggatcatccggg

SEQ ID NO: 130025 - DNA, 80 bp, synthetic construct
  source 1..80: mol_type = other DNA
gcttggaggaaacacaacgcaacgggtggtttttgccatactgctgctgctggtagcacctgcctacagcttcaactgcc

SEQ ID NO: 130026 - DNA, 80 bp, synthetic construct
  source 1..80: mol_type = other DNA
caggaggccaccagccggggcagtgccgcccgtaaacgccgctggcacgacaggcagcggggactgatgtgggacgatga

SEQ ID NO: 130027 - DNA, 80 bp, synthetic construct
  source 1..80: mol_type = other DNA
ctctccaactgacacttctagctcggtcccccccatcgaggacgacaagtctgaagatgggtctttctcatcaatgcctc

SEQ ID NO: 130028 - DNA, 80 bp, synthetic construct
  source 1..80: mol_type = other DNA
atgatgaactggtcgcctactgccaccatgatcttggcgtacgcgacgcgcatcccagaggccatcctggatattatcac

SEQ ID NO: 130029 - DNA, 80 bp, synthetic construct
  source 1..80: mol_type = other DNA
cgcggaggccgagatgctgtcatcctccttacctgcctactgcacccatcattaggctttgagatgactaagatactgct

SEQ ID NO: 130030 - DNA, 80 bp, synthetic construct
  source 1..80: mol_type = other DNA
tggatcaatgaggactacccaagccagtgcagcggcggttggctacgcgacatctgggattgggtctgcacagtgctcta

SEQ ID NO: 130031 - DNA, 80 bp, synthetic construct
  source 1..80: mol_type = other DNA
tcctcactgctttggtattcccacatgtggcttttgaaaccacaaaacatctccttgccatccttggtcctttgtacata

SEQ ID NO: 130032 - DNA, 80 bp, synthetic construct
  source 1..80: mol_type = other DNA
ggcatctttttacttcccgctcgatagacggggagcataaagctacactccattaggcttttttttttttttccgttttt

SEQ ID NO: 130033 - DNA, 80 bp, synthetic construct
  source 1..80: mol_type = other DNA
ctttatcagactgggcagccgaggggcttaatgacctagcggtggcacttgagccggtcgtgtttacagccatggagaag

SEQ ID NO: 130034 - DNA, 80 bp, synthetic construct
  source 1..80: mol_type = other DNA
gtttctgtgtatcgcaagcgtgagtaagcccgagagtcaaaaacatagtcattgcaggtgcgtactaggtattgatagcc

SEQ ID NO: 130035 - DNA, 80 bp, synthetic construct
  source 1..80: mol_type = other DNA
aggggattcgtgttttaacacaatatgcaggatggcttcttccgtttaatgttatgtggaatcagattcaaaatagctca

SEQ ID NO: 130036 - DNA, 80 bp, synthetic construct
  source 1..80: mol_type = other DNA
ccgcccgtctaatcgtatacccggacttaggtgtgcgggtgtgcgagaagagggcgctctacgacatgacgaagaagctt

SEQ ID NO: 130037 - DNA, 80 bp, synthetic construct
  source 1..80: mol_type = other DNA
gtggcttcagccctcagaaaacttggggcgccacccctcagggtgtggaagagtcgggctcgcgcagtcagggcgtccct

SEQ ID NO: 130038 - DNA, 80 bp, synthetic construct
  source 1..80: mol_type = other DNA
gcacatcaacaggactgccctgaactgcaatgactccctcaacactggattcctcgccgcgctgttctacacacacaggt

SEQ ID NO: 130039 - DNA, 80 bp, synthetic construct
  source 1..80: mol_type = other DNA
ttgatgggtcggctgagaaaggcgcccgagagtttggcgtacatgttttgggccgcaatgcgcgtggcgcccgtcaccac

SEQ ID NO: 130040 - DNA, 80 bp, synthetic construct
  source 1..80: mol_type = other DNA
ttggcagggcccagatcctggtacaacaggatacccggttattcagaacaggtgaaagggccatggaagcacacgcctat

SEQ ID NO: 130041 - DNA, 80 bp, synthetic construct
  source 1..80: mol_type = other DNA
cctgcctgctggcggccctgggcaaccggctctgcgggcccgccacggccgcctggtcgggcaactggaccggcgccccc

SEQ ID NO: 130042 - DNA, 80 bp, synthetic construct
  source 1..80: mol_type = other DNA
cagccagctgcagacgctgactctgggacggggttcacctctccaactgacacttcaaccccggactcccctgatgcaga

SEQ ID NO: 130043 - DNA, 80 bp, synthetic construct
  source 1..80: mol_type = other DNA
ctttcccatcaattgctacacggaaggccagtgcgtgccgaaacccgcgccaaacttcaagaccgccatctggagggtgg

SEQ ID NO: 130044 - DNA, 80 bp, synthetic construct
  source 1..80: mol_type = other DNA
tcaatggcaaaagaaaacaaatgtgcactggtcttgatgacagcaacgccgccgggaaagggtgagcccttcccagagtc

SEQ ID NO: 130045 - DNA, 80 bp, synthetic construct
  source 1..80: mol_type = other DNA
gtcgccgttcacgtctacggcacgcggcagtacttttacatgaacaaggcggaggtggatcggcacctgcagtgccgtgc

SEQ ID NO: 130046 - DNA, 80 bp, synthetic construct
  source 1..80: mol_type = other DNA
tatggagactccggaagctatcctgttttcccccggggagacgttcagcacgaacgtctccatccatgccatcgcccacg

SEQ ID NO: 130047 - DNA, 80 bp, synthetic construct
  source 1..80: mol_type = other DNA
gttgtccactagggggtccactcgctccagggtgtgaagacacatgtcgccctcttcggcatcaaggaaggtgattggtt

SEQ ID NO: 130048 - DNA, 80 bp, synthetic construct
  source 1..80: mol_type = other DNA
gcaaccacagtgctgactcccttgttgaagcacctaatcacatctgattacatcaacacgtcgctaacatcaataaatgt

SEQ ID NO: 130049 - DNA, 80 bp, synthetic construct
  source 1..80: mol_type = other DNA
ccactgacctggatggcccacctgctggctcagattctggctgcggcaccacagacacggcgtcaagccctcctccagac

SEQ ID NO: 130050 - DNA, 80 bp, synthetic construct
  source 1..80: mol_type = other DNA
taaggtccacgtggaggaaacatgtggaacaagaggaccatctctgagatcaaccactgcaagcggaagggtgatcgagg

SEQ ID NO: 130051 - DNA, 80 bp, synthetic construct
  source 1..80: mol_type = other DNA
gtccccagaagcgcacgcgtatgcagtttagggtcagcagcatgtgaaggatgttaaggctgtccgagagacacgccagc

SEQ ID NO: 130052 - DNA, 80 bp, synthetic construct
  source 1..80: mol_type = other DNA
ctggtgcgctatgtggtggcagtggggatcacattccaccttgagctagggccagagatcgtggccttgatgctactcca

SEQ ID NO: 130053 - DNA, 80 bp, synthetic construct
  source 1..80: mol_type = other DNA
ctatgacattgcacagaaactcccccgggcggtaatggggcagtcttatggatttcaatactccccagcagagcgggtcg

SEQ ID NO: 130054 - DNA, 80 bp, synthetic construct
  source 1..80: mol_type = other DNA
aagtggcttaggggggactcagtcaagacgcatctgacacgtgtggaaggctgggtatggaagaataagctcctgacgat

SEQ ID NO: 130055 - DNA, 80 bp, synthetic construct
  source 1..80: mol_type = other DNA
gcacacagagcgctcgcgcgcgggcggcgtccgacagcccggcggcgtggggcaggtaccgtcgcagctcgttggcgtcc

SEQ ID NO: 130056 - DNA, 80 bp, synthetic construct
  source 1..80: mol_type = other DNA
gtcctcggtgtggccggtgctctgccctaggggccacgtcgttgggctcttccgagcagctgtgtgctctcggtgcgtgg

SEQ ID NO: 130057 - DNA, 80 bp, synthetic construct
  source 1..80: mol_type = other DNA
gtgttctgctccgcgatgtatgtgggggacctatgcggatcccttttcctcgtgggccaactgtttaccctctctccccg

SEQ ID NO: 130058 - DNA, 80 bp, synthetic construct
  source 1..80: mol_type = other DNA
acgtcatcggggccgaaggtcctcccagatcccccggccgccgagtcccaatgcaggcgcgcggccatggtgctgcacag

SEQ ID NO: 130059 - DNA, 80 bp, synthetic construct
  source 1..80: mol_type = other DNA
acgcagcatgggtcgtactcctatgtaacaggactgaccactgacaatctgaaaattccttgccaactaccttctccaga

SEQ ID NO: 130060 - DNA, 80 bp, synthetic construct
  source 1..80: mol_type = other DNA
gagtcggccgcatttgctgggcgaggacgagtacctgaacgactcgctgctgcggccgccgcgggccaagaacgccatgg

SEQ ID NO: 130061 - DNA, 80 bp, synthetic construct
  source 1..80: mol_type = other DNA
acttcctcctcaggggtcggtacagaatccaccgctgagtctggcgactcgcctgaacctggcgaagagtcggacgctga

SEQ ID NO: 130062 - DNA, 80 bp, synthetic construct
  source 1..80: mol_type = other DNA
tctatcagccagaacctcaagtaggagaagaaaacctgcaagatgttgaaaattactatggaggcagagcccttaaaaag

SEQ ID NO: 130063 - DNA, 80 bp, synthetic construct
  source 1..80: mol_type = other DNA
gctcatcccggggtcggaggggtgtgtctttgatagcagccacccgaactaccctcatcgggtaatcgtcaaggcgtggt

SEQ ID NO: 130064 - DNA, 80 bp, synthetic construct
  source 1..80: mol_type = other DNA
aaaaggcggtccaggacacgaagaaccagtgcctatgtcaacatacggatggaacatagttaaattaatgagtggaaagg

SEQ ID NO: 130065 - DNA, 80 bp, synthetic construct
  source 1..80: mol_type = other DNA
gatctgtctgaatagcaagacttttgacaaggattatggcagagtccatgaggaaaaacctgacttcgtcgtgacaactg

SEQ ID NO: 130066 - DNA, 80 bp, synthetic construct
  source 1..80: mol_type = other DNA
catgggccaaagtcattgccatcctcctccttgtagcgggagtggatgcagacacctacaccaccggccaacaagcgggt

SEQ ID NO: 130067 - DNA, 80 bp, synthetic construct
  source 1..80: mol_type = other DNA
ccgatgatacccgcccaaggaaacatgatgcccggggtataacacctcgcgtccctggacgttcgtcgggtggcaaacct

SEQ ID NO: 130068 - DNA, 80 bp, synthetic construct
  source 1..80: mol_type = other DNA
caactagccggagcaaagtacattcaggcctgtttgctgagggttggagcatggactggcacttacatctatgaccatct

SEQ ID NO: 130069 - DNA, 80 bp, synthetic construct
  source 1..80: mol_type = other DNA
acgctgagtcctgttcctccatgccccccctggaggtggagcctggggatccggatcttagcgatgggtcatggtcgacg

SEQ ID NO: 130070 - DNA, 80 bp, synthetic construct
  source 1..80: mol_type = other DNA
ccgtggtctcgcggcagcacgcctacctggcctgcgaggtgctgcccgccgtgcagtgcgccgtgcgctggccggcggcg

SEQ ID NO: 130071 - DNA, 80 bp, synthetic construct
  source 1..80: mol_type = other DNA
cacccgtaaatgactctcctgaaccacacggccagcagggtgcctcccgcccggcactgcagggagccaggggatgaaca

SEQ ID NO: 130072 - DNA, 80 bp, synthetic construct
  source 1..80: mol_type = other DNA
cgccggcgcgacatcggaccggaggtatttttcgacgaaaagacccacctcctccgtctcggcggcctgggccggcagcg

SEQ ID NO: 130073 - DNA, 80 bp, synthetic construct
  source 1..80: mol_type = other DNA
gacaaagaggtcctctatgaggcgttcgacgagatggaagaatgtgcctctagagcggctctcattgaagaggggcagcg

SEQ ID NO: 130074 - DNA, 80 bp, synthetic construct
  source 1..80: mol_type = other DNA
ttatgcgaggtggttggttgtcttgtttgtccatcacttggacccttgtgaaaaacatggagaaacccgggttgaagaga

SEQ ID NO: 130075 - DNA, 80 bp, synthetic construct
  source 1..80: mol_type = other DNA
tctggagacccgaacgcatcatgcgctctgtgctatatgaaacagactttcagctttatttacagtaagtggagtgaatg

SEQ ID NO: 130076 - DNA, 80 bp, synthetic construct
  source 1..80: mol_type = other DNA
gacttggggggggtgtgtgttttcatatattttaaataaacaaacaaccggacaaaagtatacccacttcgtgtgcttgt

SEQ ID NO: 130077 - DNA, 80 bp, synthetic construct
  source 1..80: mol_type = other DNA
aactcctccgggtgtccagagcggatggctagctgtaagccccttgccaaattcgaccagggctggggaactatcagcta

SEQ ID NO: 130078 - DNA, 80 bp, synthetic construct
  source 1..80: mol_type = other DNA
gtctccgtggcccatgacaataccggacagagatactattacctcaccagagacccgaccgtgcctctttcacgggctgc

SEQ ID NO: 130079 - DNA, 80 bp, synthetic construct
  source 1..80: mol_type = other DNA
agctccacctggatcacgctcattaacaccatgcgcctgcgggtcgagtgacctctaccttgtcacgaggaatgccgatg

SEQ ID NO: 130080 - DNA, 80 bp, synthetic construct
  source 1..80: mol_type = other DNA
cttgccgcaatgttcttttgtgccgtggttatcataggggtccttcaccagaatttcaaggacacctccatgcagaagac

SEQ ID NO: 130081 - DNA, 80 bp, synthetic construct
  source 1..80: mol_type = other DNA
tccgcccgaagggggaaggagatacttctggggccggccgatagcctcgaaggacaggtgtggcgactcctcgcgcctat

SEQ ID NO: 130082 - DNA, 80 bp, synthetic construct
  source 1..80: mol_type = other DNA
ggccagctcctcggctagccagctgtccgccccgtccctcaaggcaacttgcgcaaccaaccacgaatcccctgattccg

SEQ ID NO: 130083 - DNA, 80 bp, synthetic construct
  source 1..80: mol_type = other DNA
acatcaccaagttgctattggcattaatagggccattgtacttgctgcaagccagtttactgcggacgccgtattacgtg

SEQ ID NO: 130084 - DNA, 80 bp, synthetic construct
  source 1..80: mol_type = other DNA
acatcgagctggggggcaagccagcactcgttccagacaaagaggtgttgtatcaacaatacgatgagatggaggagtgc

SEQ ID NO: 130085 - DNA, 80 bp, synthetic construct
  source 1..80: mol_type = other DNA
aaacggatccgtggtacgaattcgtggcccctaccagccgtccacgctcccggaaatacacaaccgctaattcgatttta

SEQ ID NO: 130086 - DNA, 80 bp, synthetic construct
  source 1..80: mol_type = other DNA
ggtgtggactttttggcaaagggagcttggtgacatgtgccaagtttacgtgctccaagaaaatgacaggcaagagcatc

SEQ ID NO: 130087 - DNA, 80 bp, synthetic construct
  source 1..80: mol_type = other DNA
tgatatgaagttttgattgtattttgagattggcaatgttacctgccaaatctcttcttggattcatattgtggagaacc

SEQ ID NO: 130088 - DNA, 80 bp, synthetic construct
  source 1..80: mol_type = other DNA
aagcaaaaagtgctcggcctgatacaagctacaacaaaacaagctgaggagctcaagccggctgttcattcagcttggcc

SEQ ID NO: 130089 - DNA, 80 bp, synthetic construct
  source 1..80: mol_type = other DNA
ctacctactgaccatagcagaggcaatggtccaggagtgggcaccctcgctgcaggcgcgaggaggccgcgacggtgtga

SEQ ID NO: 130090 - DNA, 80 bp, synthetic construct
  source 1..80: mol_type = other DNA
atggctctcaccgtggccatcgtccacaacgcccccgcccgcgtcggcagcggcagcaccgcccccctgtatgagcccgg

SEQ ID NO: 130091 - DNA, 80 bp, synthetic construct
  source 1..80: mol_type = other DNA
cacgactccaaacttagcattgccacccaaggacccctcacagtatcagaaggaaagctagccctgcaaacatcaggccc

SEQ ID NO: 130092 - DNA, 80 bp, synthetic construct
  source 1..80: mol_type = other DNA
atacatcgccacttgtatgcaagcggacctcgaaatcttgacgagctcgtgggtccttgcagggggtgtgctcgctgcta

SEQ ID NO: 130093 - DNA, 80 bp, synthetic construct
  source 1..80: mol_type = other DNA
tgcccacatccaaaatggcttccatgtccggccacgcctccgcggcgaccgtcggccgtgcgtcgtgacgtcatttgcat

SEQ ID NO: 130094 - DNA, 80 bp, synthetic construct
  source 1..80: mol_type = other DNA
caggacatatgtcggcgtggttgagcaccgccttgaggcggcatgcaattggaccaggggagagccatgcggcttggagc

SEQ ID NO: 130095 - DNA, 80 bp, synthetic construct
  source 1..80: mol_type = other DNA
ccgatgatactgctggatgggacacacgaatcaccatgactgaccttgagaacgaagcgaaggttttggaattgctcgac

SEQ ID NO: 130096 - DNA, 80 bp, synthetic construct
  source 1..80: mol_type = other DNA
aaaaaccagttttcgcaggcgcgcggtcaccgcgatctggctgttgaggacgtaagtgacgtcgttgcgggccacgacca

SEQ ID NO: 130097 - DNA, 80 bp, synthetic construct
  source 1..80: mol_type = other DNA
ccagagtgccttattttgtgcgtgcgcacgtcctcctccgcatatgcatgctagtgcgaagggcggcgtgtggccagtac

SEQ ID NO: 130098 - DNA, 80 bp, synthetic construct
  source 1..80: mol_type = other DNA
cacctactcctggggtggtggtgataaggatgtcttcctgctaaatagcacccggccaccgaaaggcgcctggtttgggt

SEQ ID NO: 130099 - DNA, 80 bp, synthetic construct
  source 1..80: mol_type = other DNA
tcatttttccaggaaattgtgatcaaaaacttagatttttcttcccccggccgtacggtttctgggcttgctttcatttg

SEQ ID NO: 130100 - DNA, 80 bp, synthetic construct
  source 1..80: mol_type = other DNA
tgtggtgtgctgttcgtattcgtactcctggacgggagctcttgtgacaccttgcgctgcggaggaggagaaactgccca

SEQ ID NO: 130101 - DNA, 80 bp, synthetic construct
  source 1..80: mol_type = other DNA
caagctgcccacggccataatgggggcagcatatggtttccagtactcacccagtcaacgggtagagtatctcctcaaga

SEQ ID NO: 130102 - DNA, 80 bp, synthetic construct
  source 1..80: mol_type = other DNA
cacttcccagaaaattaccaacatactcagttccctgaccgtgaccagtcttctgcggaagctacacgcgtggatcaacg

SEQ ID NO: 130103 - DNA, 80 bp, synthetic construct
  source 1..80: mol_type = other DNA
aactttcctggcaacgtgcatcgatggggtatgctggactgtctaccacggggccggaacgaggaccatcgcatcaccta

SEQ ID NO: 130104 - DNA, 80 bp, synthetic construct
  source 1..80: mol_type = other DNA
ttgggtataggcacggtcttagatcaggctgagacggctggggtgaggctgacggttctagcgacagcaactcccccagg

SEQ ID NO: 130105 - DNA, 80 bp, synthetic construct
  source 1..80: mol_type = other DNA
cacaggctgcgtggtcatagtaggcaggattgtcttgtccgggaagccggcagtcatacccgacagggaagtcctctacc

SEQ ID NO: 130106 - DNA, 80 bp, synthetic construct
  source 1..80: mol_type = other DNA
cggtctacgcttcgcgttgcacacacttggaaaacagggactttgtgactggtactcaggggactacgagggtcaccttg

SEQ ID NO: 130107 - DNA, 80 bp, synthetic construct
  source 1..80: mol_type = other DNA
agtcacttattatcactagcgctcgccgcagccgtgtaaccgagcatagcgagcgaactggcgaggaagcaaagaagaac

SEQ ID NO: 130108 - DNA, 80 bp, synthetic construct
  source 1..80: mol_type = other DNA
gaggaggaagaaggtcgtacagcttagcgagagcgccgtagctcaggcgctggctcagctagccgaacgaaccttcccaa

SEQ ID NO: 130109 - DNA, 80 bp, synthetic construct
  source 1..80: mol_type = other DNA
catggcaaggcatctcgcggggggcaggtacgtccagatggcgctactagcccttggcaggtggactggcacttacatct

SEQ ID NO: 130110 - DNA, 80 bp, synthetic construct
  source 1..80: mol_type = other DNA
gagtcgggtggctcgagaggtgggggatatattaaaggtgccttgtgtgccgctcccgtctgacgatcttgattggcgtt

SEQ ID NO: 130111 - DNA, 80 bp, synthetic construct
  source 1..80: mol_type = other DNA
gccaggatcagggttaaagatgtaagtatcaaggttacaagacaggtttaaggagaccaatagaaactgggcttgtcgag

SEQ ID NO: 130112 - DNA, 80 bp, synthetic construct
  source 1..80: mol_type = other DNA
gttgaggcccaggttccggataaggcgtggagcaccgggtatgagtggatcaccaacttcacagggaggactgtgtggtt

SEQ ID NO: 130113 - DNA, 80 bp, synthetic construct
  source 1..80: mol_type = other DNA
gacttggtgggttggcccgcacctccgggagtaaagtccttggccccatgcacctgtggctcgtcggacctgttcctggt

SEQ ID NO: 130114 - DNA, 80 bp, synthetic construct
  source 1..80: mol_type = other DNA
aaaacgagtggtagcgtctacccgaccttcatactttttcaactccgggtgaaagttatcacaaagataatttgtaaatt

SEQ ID NO: 130115 - DNA, 80 bp, synthetic construct
  source 1..80: mol_type = other DNA
cgagccctgttcctgtggtgcagcggatgcctacttggtaacgcgccatgctgatgtcctccccctcaggaggagaggag

SEQ ID NO: 130116 - DNA, 80 bp, synthetic construct
  source 1..80: mol_type = other DNA
agcggtgagagtcacgccggcggcgtatgagggtccgcccccttcttacgaaagcgtgatgggatcagcgaacgtgccgg

SEQ ID NO: 130117 - DNA, 80 bp, synthetic construct
  source 1..80: mol_type = other DNA
ggattcccgaatatgcggaagacccctacgcgatctcatacggcggccagctcgaccggtacggagattccgacggggag

SEQ ID NO: 130118 - DNA, 80 bp, synthetic construct
  source 1..80: mol_type = other DNA
ccgtcctcggacccctttggattcttcaaaccagtctgctcaaagtgccctacttcgtgcgcgtccaaggccttctccgg

SEQ ID NO: 130119 - DNA, 80 bp, synthetic construct
  source 1..80: mol_type = other DNA
aggaagcagtggagaatgcaactaaagccaatggagccacaagaggagatagcagtgtcccaagagctgtagaaaaggct

SEQ ID NO: 130120 - DNA, 80 bp, synthetic construct
  source 1..80: mol_type = other DNA
cggagtcaacggagaggccgcactgggagtggtaagctgggcacatatcggttcgtcaccccgggagaaaggccatccgg

SEQ ID NO: 130121 - DNA, 80 bp, synthetic construct
  source 1..80: mol_type = other DNA
ggatgacgttgcgacccccattccctacctacccacatacgccgaggccgtggcagacgcgccccccccttacagaagcc

SEQ ID NO: 130122 - DNA, 80 bp, synthetic construct
  source 1..80: mol_type = other DNA
acggcctacacggccacagtgtgcgctagggcaaagtcccctcctcctccgtgggacgtgatgtggaaatgtcgaactag

SEQ ID NO: 130123 - DNA, 80 bp, synthetic construct
  source 1..80: mol_type = other DNA
catttcttcagcatcttacagagccaggagacgctggagaaggctcttgccttcgaaatgtatggctcagtctactcagt

SEQ ID NO: 130124 - DNA, 80 bp, synthetic construct
  source 1..80: mol_type = other DNA
tttttactgaagaaaatagatggagctcagcaaaagaagctgtggaggatgaagccttctgggatctcgtagatagagag

SEQ ID NO: 130125 - DNA, 80 bp, synthetic construct
  source 1..80: mol_type = other DNA
gatccctcccatataacagcagaggcggccgggcgaaggttggcgaggggatcacccccctctgtggccagctcctcggc

SEQ ID NO: 130126 - DNA, 80 bp, synthetic construct
  source 1..80: mol_type = other DNA
gcggtttcccgctctcagcggagaggccgcaccggcagggggaggttaggcatatatagatttgtcactccgggagagag

SEQ ID NO: 130127 - DNA, 80 bp, synthetic construct
  source 1..80: mol_type = other DNA
atagctggactgatgtttgctgctttcgtgatttctggaaagtcgactgacatgtggattgaaagagtggctgacatctc

SEQ ID NO: 130128 - DNA, 80 bp, synthetic construct
  source 1..80: mol_type = other DNA
tgcaacggtttttcagcgacgtggagacgctacgcaaaatcggggagtccctgcactacaccttccgccagggctacgtc

SEQ ID NO: 130129 - DNA, 80 bp, synthetic construct
  source 1..80: mol_type = other DNA
gtcggtcacggccgggaagcagagcgcgtactgcagtggcgttccatccgggaccaaaaagctggtggcgaacggccgat

SEQ ID NO: 130130 - DNA, 80 bp, synthetic construct
  source 1..80: mol_type = other DNA
gtaaatatcaggaattgttgctacatttctgggaacggggccgaggtggagatagatacggaggatagggtggcctttag

SEQ ID NO: 130131 - DNA, 80 bp, synthetic construct
  source 1..80: mol_type = other DNA
ctccttcgttgaaggccacatgcaccacgactgatagacaccctgacgctgagctactcgaggctaaccttctgtggaag

SEQ ID NO: 130132 - DNA, 80 bp, synthetic construct
  source 1..80: mol_type = other DNA
aggaggaaaagttgccaattagtcctttgagcaacactcttatccgacatcataatatggtttactccactacatcacgt

SEQ ID NO: 130133 - DNA, 80 bp, synthetic construct
  source 1..80: mol_type = other DNA
gggttttcctcttagtgactctgaagatgagcaggatgtacgcggaatggcattggtgtccgcatctgctatggctgctg

SEQ ID NO: 130134 - DNA, 80 bp, synthetic construct
  source 1..80: mol_type = other DNA
atgggcgaaagtcgttgtcatccttctgctgaccgctggggtggacgcgcatacccgcagcattgcgggtagcgtcgcgc

SEQ ID NO: 130135 - DNA, 80 bp, synthetic construct
  source 1..80: mol_type = other DNA
aggttcttgaatgatatgggaaaagttaggaaggacacacaagagtggaaaccctcaactggatgggacaactgggaaga

SEQ ID NO: 130136 - DNA, 80 bp, synthetic construct
  source 1..80: mol_type = other DNA
cctgccgtcgcggccgtcgtgccgagagtggcctctcttccccctgcggccggcgggtggcgcgcgcaggcgcggcgtgt

SEQ ID NO: 130137 - DNA, 80 bp, synthetic construct
  source 1..80: mol_type = other DNA
tagaacctggaactatcacggcagttatgatgtgaaacctacaggctccgccagctcgctggtcaatggagtggttaggc

SEQ ID NO: 130138 - DNA, 80 bp, synthetic construct
  source 1..80: mol_type = other DNA
acacgacatctaccaatgttgcaaacttgacccggtggcacgcaaggccattacatccctgactgagcggctgtactgcg

SEQ ID NO: 130139 - DNA, 80 bp, synthetic construct
  source 1..80: mol_type = other DNA
tagccctgctaacacccgggctgagatgcttgaatctggatgtgtacaggatactgctgttgatggtcggaataggcagc

SEQ ID NO: 130140 - DNA, 80 bp, synthetic construct
  source 1..80: mol_type = other DNA
tgtcatggcagtcgggatggtgagcattttagccagttctctcctaaagaatgacattcccatgacaggtccattagtgg

SEQ ID NO: 130141 - DNA, 80 bp, synthetic construct
  source 1..80: mol_type = other DNA
gcggcccatctacaggccagtaatcggggaacctcagccactccaagtggatggaggcttaaggaatcttctcttctctt

SEQ ID NO: 130142 - DNA, 80 bp, synthetic construct
  source 1..80: mol_type = other DNA
gtggaaccagcacatgtggaacttcataagcggcattcaatatctggccggcttgtccactttgccgggcaaccctgtgg

SEQ ID NO: 130143 - DNA, 80 bp, synthetic construct
  source 1..80: mol_type = other DNA
aggtgtctggcgaggtacaagtcgtctcgacagctacccagagcttcctcgcgactaccatcaatggcgtgctctggaca

SEQ ID NO: 130144 - DNA, 80 bp, synthetic construct
  source 1..80: mol_type = other DNA
cgtctgtgggcctgtctactgcttcacacctagccccgtggtagtgggaactaccgatcagagaggtatccccacttaca

SEQ ID NO: 130145 - DNA, 80 bp, synthetic construct
  source 1..80: mol_type = other DNA
tcgtcttttcccagatggagaccaagctcattacgtggggggcggacaccgccgcgtgtggtgacatcatcgacggcctg

SEQ ID NO: 130146 - DNA, 80 bp, synthetic construct
  source 1..80: mol_type = other DNA
ggctaacttagaccggatgggtacagatgtaaaggaggcgctggctcaacgagagcgctttcatcgcgatggtaatcttg

SEQ ID NO: 130147 - DNA, 80 bp, synthetic construct
  source 1..80: mol_type = other DNA
tgacgagctcgcggcggcccttcggggcatgggcttgaatgccgtggcatactatagagggttggacgtctccataatac

SEQ ID NO: 130148 - DNA, 80 bp, synthetic construct
  source 1..80: mol_type = other DNA
agcagtattgtgtacgaggccgacgacgtcattttgcacacacctggctgtataccttgtgtccaggacggcaatacgtc

SEQ ID NO: 130149 - DNA, 80 bp, synthetic construct
  source 1..80: mol_type = other DNA
agcctatagtagtcaccaactggcagaaacttgaagctttctggcacaagcatatgtggaattttgtgagtgggatccag

SEQ ID NO: 130150 - DNA, 80 bp, synthetic construct
  source 1..80: mol_type = other DNA
gtggaggggggacggcatttgccacaccacttgcccttgtggagcgaagatcaccggacatgtgaagaacgggactatga

SEQ ID NO: 130151 - DNA, 80 bp, synthetic construct
  source 1..80: mol_type = other DNA
taaaatataaaataaccgggtgggtggcattaaacccacaagtacccgggcggcaatccgctagactgtttttctgctca

SEQ ID NO: 130152 - DNA, 80 bp, synthetic construct
  source 1..80: mol_type = other DNA
ctgttggggcgcaagagcgacagcgagcgcgaggtggccggcgccgcgcgggtcgttaacaaggtgttgggtgaggacga

SEQ ID NO: 130153 - DNA, 80 bp, synthetic construct
  source 1..80: mol_type = other DNA
attgtggacgtgcagtacttgtatggcatagggtcggtggtggtatcctgggctctcaagtgggagtacgtagtgctctt

SEQ ID NO: 130154 - DNA, 80 bp, synthetic construct
  source 1..80: mol_type = other DNA
ctttacctgccctctccaccggcttgatccacctccaccaaaatatcgtggacgtccagtacctctatggtgttggatct

SEQ ID NO: 130155 - DNA, 80 bp, synthetic construct
  source 1..80: mol_type = other DNA
ttcaaggccctgtttgggaataacgccaagatcaccgagagtctgttaaaaaggtttattcccgaagtgtggcacccccc

SEQ ID NO: 130156 - DNA, 80 bp, synthetic construct
  source 1..80: mol_type = other DNA
gcgctgaccccgcagagcctgcgtgcgattagcgtgcgtcgtcgtcagagcattcagtgctgcgatctggatccgcaggc

SEQ ID NO: 130157 - DNA, 80 bp, synthetic construct
  source 1..80: mol_type = other DNA
gttggcgaagagctaacacaagacgactacgtatgcgaggacggtcaggatctaatgggctcgcctgtaatcccgctggc

SEQ ID NO: 130158 - DNA, 80 bp, synthetic construct
  source 1..80: mol_type = other DNA
catagatagcatagatttattataatataaacacacacgtgatatactttagtgatatgagatgccataaaacagtcaat

SEQ ID NO: 130159 - DNA, 80 bp, synthetic construct
  source 1..80: mol_type = other DNA
aggtactcgtccaccagggccaacgtaaagagggcccgtgtgaggggagtgagggtcgcgtcgtctatgcgctggaggtg

SEQ ID NO: 130160 - DNA, 80 bp, synthetic construct
  source 1..80: mol_type = other DNA
ctgcagcggatacacgggtatgcggtgaacctccgcgtccccgatggttaccttgtccatcccgcccaggtgcaggaagg

SEQ ID NO: 130161 - DNA, 80 bp, synthetic construct
  source 1..80: mol_type = other DNA
ccaacggatccataggtgcgaggggagtgaagagggagaggagcgatggtggcaataccgggatgatgaccgagctgact

SEQ ID NO: 130162 - DNA, 80 bp, synthetic construct
  source 1..80: mol_type = other DNA
aatgactccctgcagaccggcttcatcgcatccttgttctacgccaacagtttcaactcatcgggctgccccgagcgcat

SEQ ID NO: 130163 - DNA, 80 bp, synthetic construct
  source 1..80: mol_type = other DNA
cagcgtcacgcctttgttcaggactgcaactgttccatttacccgggccacattacgggacaccgcatggcatgggatat

SEQ ID NO: 130164 - DNA, 80 bp, synthetic construct
  source 1..80: mol_type = other DNA
gtgtagaaaaaccatctagatcttttactaaaaatgcggcggttaaacctaaattagaggattcaccgaagcgagctccc

SEQ ID NO: 130165 - DNA, 80 bp, synthetic construct
  source 1..80: mol_type = other DNA
cgtccatcaaggaccggatcccgtacgtgatcgtggcccagacccgcgaggtagaggagacggtcgcgcggctggccgcc

SEQ ID NO: 130166 - DNA, 80 bp, synthetic construct
  source 1..80: mol_type = other DNA
tgtgccaggacggccagggcatacgcggtgtgaaaaaaggcgtcgggggcggtcccctcgacggcgcgcatcaggttctc

SEQ ID NO: 130167 - DNA, 80 bp, synthetic construct
  source 1..80: mol_type = other DNA
gtctccctgtgagtcggccagatagcaacgaagcatgaggtcgtagctgagggactcggccgcgtgtcccttggcgcgca

SEQ ID NO: 130168 - DNA, 80 bp, synthetic construct
  source 1..80: mol_type = other DNA
agagcgttcacgtacccgtcctgggcacttagcgcaaagagccgggggattagcgtaaggatgatggtggttccctccgt

SEQ ID NO: 130169 - DNA, 80 bp, synthetic construct
  source 1..80: mol_type = other DNA
ctcgcacgtagtcgtacatctcgtgagagggagccatgagcccgtctcccaagtgggtcttgcggggtttttcggcccgg

SEQ ID NO: 130170 - DNA, 80 bp, synthetic construct
  source 1..80: mol_type = other DNA
ggacgacgtgaccgcgcggctccgggccgcagggttcggcgcggtgggtgccggcgctacggcggaggaaactcgtcgaa

SEQ ID NO: 130171 - DNA, 80 bp, synthetic construct
  source 1..80: mol_type = other DNA
acccagcttttgtgtgtaaacaaggagtagtggacaggggttggggcaacggctgtggactatttggtaaaggaagcatt

SEQ ID NO: 130172 - DNA, 80 bp, synthetic construct
  source 1..80: mol_type = other DNA
aagacctgcaggaacatgtggagtggaaccttccccatcaacgcctacaccacgggcccctgcaccccccttcctgcgcc

SEQ ID NO: 130173 - DNA, 80 bp, synthetic construct
  source 1..80: mol_type = other DNA
gagaatttctatgtgcaggttttacttttcgtatgtatccccgtacccgctcgggtactcttcttacggcaccgtagaac

SEQ ID NO: 130174 - DNA, 80 bp, synthetic construct
  source 1..80: mol_type = other DNA
agatcgctcggagctttcgcccttgcttctttccaccacgcagtggcaggtgctcccctgttctttcacaactttgcccg

SEQ ID NO: 130175 - DNA, 80 bp, synthetic construct
  source 1..80: mol_type = other DNA
acaagcttggatctcatctgcaacaccgcctttcacgaagccttctttctgccaataagtgggattaattattatatttt

SEQ ID NO: 130176 - DNA, 80 bp, synthetic construct
  source 1..80: mol_type = other DNA
ttctagtgcagcatttgtatttgtactaatcatgcttagtattttagtctttgtttttttacctttcctcctacatgctc

SEQ ID NO: 130177 - DNA, 80 bp, synthetic construct
  source 1..80: mol_type = other DNA
taccgaacagatttatactgctatctagctgcaaagcgcaacctccccatatgtgacattttagcaattcagcgatctgt

SEQ ID NO: 130178 - DNA, 80 bp, synthetic construct
  source 1..80: mol_type = other DNA
gacttacacatatagacgcccacttcctttcccaaacaaaacaaggaggggaaaacttcgcgtacctggtggcctaccag

SEQ ID NO: 130179 - DNA, 80 bp, synthetic construct
  source 1..80: mol_type = other DNA
tccacgaccatgccttccctaacgtcgatagctgaggaatcggagccaggtccagtcgtgctgctgtccgtcagtcctcg

SEQ ID NO: 130180 - DNA, 80 bp, synthetic construct
  source 1..80: mol_type = other DNA
cagggcgctgtggagggtctctgctgaggaatacgtggaggtgcggcggattggtgatagccactttgtggttggtgcta

SEQ ID NO: 130181 - DNA, 80 bp, synthetic construct
  source 1..80: mol_type = other DNA
ccgttagctccctcgcgagcattttcaacccgggatcggctcagagaatccagcttgtgaacaccaatgggcaggtggca

SEQ ID NO: 130182 - DNA, 80 bp, synthetic construct
  source 1..80: mol_type = other DNA
ggaatgaattcacgtagcacctcactgtctgtgtcgctagtattggtgggagtcgtgacactatacctgggagctatggt

SEQ ID NO: 130183 - DNA, 80 bp, synthetic construct
  source 1..80: mol_type = other DNA
ggcagatggggggtgctctggaggggcttatgacgtcatcatatgtgacgaatgccactcaaccgaccctactaccatct

SEQ ID NO: 130184 - DNA, 80 bp, synthetic construct
  source 1..80: mol_type = other DNA
tatcaccagattttatacccaacgacgttcccgttagatgtaaaaccacggttacgtttaggaaaaatacgcctaagagt

SEQ ID NO: 130185 - DNA, 80 bp, synthetic construct
  source 1..80: mol_type = other DNA
cagtcgcatggccgtcagcggtgatgactgcgtggtgaaacctttggacgaccgcttcgccacatcactacacttcctaa

SEQ ID NO: 130186 - DNA, 80 bp, synthetic construct
  source 1..80: mol_type = other DNA
ggctgcgcgctccccccgaaagggttgccgccggtgcctccgcctaggcggaggaaaaccgttcggcttgatgacgcgtc

SEQ ID NO: 130187 - DNA, 80 bp, synthetic construct
  source 1..80: mol_type = other DNA
tgtagggctcttccgagctgccatatgcacaaggggtgtagcaaagtccttagatttcatcccagtggaaaacatggaaa

SEQ ID NO: 130188 - DNA, 80 bp, synthetic construct
  source 1..80: mol_type = other DNA
actcagctttcccagcgcggcgccgcgctcggttcccagctcggggaccgagcgccagggcgccaggtggtcggtttcgg

SEQ ID NO: 130189 - DNA, 80 bp, synthetic construct
  source 1..80: mol_type = other DNA
acccgctgctttgactcaacagtgactgaacaggatatccgaacagaggaatctttgtaccaatgttgtgacttggcccc

SEQ ID NO: 130190 - DNA, 80 bp, synthetic construct
  source 1..80: mol_type = other DNA
cctcggacttaacccgtgttctactatcatccaacacatcatgttctatcaagtataacaaaacatcggaaacatatgac

SEQ ID NO: 130191 - DNA, 80 bp, synthetic construct
  source 1..80: mol_type = other DNA
ggtccgtaaccaaaggtggtctgcgtcctttggattccgacccctcgtctccccccctgtcccccgctctcgggctcagg

SEQ ID NO: 130192 - DNA, 80 bp, synthetic construct
  source 1..80: mol_type = other DNA
aacgaccaaaggaacagaatcacgcgctttgaaaagaccggctgggtatggggcggaagacgcgagtatgccgaactgac

SEQ ID NO: 130193 - DNA, 80 bp, synthetic construct
  source 1..80: mol_type = other DNA
tgctggcccgtgggccggtagagggcgttgggtggagcggtgggtgacgcctcgcgccccaccgagtggctcagcgtctg

SEQ ID NO: 130194 - DNA, 80 bp, synthetic construct
  source 1..80: mol_type = other DNA
gagaacagcatgttctcagtcacaaagcggtcctgtcggacgacggtgaacccaaacccgggatggaggcccgtcttgag

SEQ ID NO: 130195 - DNA, 80 bp, synthetic construct
  source 1..80: mol_type = other DNA
aaacacgcttggggcgccctccgtcggcccggcggcgatttgctgctgtgtgttgtccgtatccaccagcaacacagaca

SEQ ID NO: 130196 - DNA, 80 bp, synthetic construct
  source 1..80: mol_type = other DNA
cggcggcctcggggaccaccgacgccatggcgcccggcgcgccggacttctgcgaggaggaggcccactcgcaccgcgcc

SEQ ID NO: 130197 - DNA, 80 bp, synthetic construct
  source 1..80: mol_type = other DNA
gcgaagctgctcgcatgccgcgcgaaatccctcgggcgatttccaggcccccccgcgaacgcggccgaagcgaccccata

SEQ ID NO: 130198 - DNA, 80 bp, synthetic construct
  source 1..80: mol_type = other DNA
tggccgtgatgacagcaggagttttcttgctcctcgttcagaggagaggcataggtaagctggggcttggcggtatggtg

SEQ ID NO: 130199 - DNA, 80 bp, synthetic construct
  source 1..80: mol_type = other DNA
gtaccatcagaatacatgctcccacgaaagaggttcccaccagcgctgccagcctgggcagcgccggagtacaacccacc

SEQ ID NO: 130200 - DNA, 80 bp, synthetic construct
  source 1..80: mol_type = other DNA
gggccaggaaacgtcgatctcgtactctagcggggcgatcgcctccttcgtggccccgtatttcgagtacgtgcttcgcg

SEQ ID NO: 130201 - DNA, 80 bp, synthetic construct
  source 1..80: mol_type = other DNA
cctggggagagaatgaaaccgacgtgttcattctggagagcgtgcggcccccacagggtggatggttcggctgtacctgg

SEQ ID NO: 130202 - DNA, 80 bp, synthetic construct
  source 1..80: mol_type = other DNA
cctctcgcccgaggtcagatcctccacgctggacggtggggtccaggtgggccggcggcgcttgggcaagccggtagaat

SEQ ID NO: 130203 - DNA, 80 bp, synthetic construct
  source 1..80: mol_type = other DNA
aataccattacgggggtgcaaccaatgaggacgaccacgatttggccaactggactgaagcaaagattctccttgataac

SEQ ID NO: 130204 - DNA, 80 bp, synthetic construct
  source 1..80: mol_type = other DNA
ctgtaactgcatcacccccgctaactactgccacgggtagcttgggcattaacatggaagatcctatttatgtaaataat

SEQ ID NO: 130205 - DNA, 80 bp, synthetic construct
  source 1..80: mol_type = other DNA
gctgtgtcacgcagccaacggcgtggccgtactggcaggggtaaacatggcatatacaggtttgtctcccagggtgagag

SEQ ID NO: 130206 - DNA, 80 bp, synthetic construct
  source 1..80: mol_type = other DNA
agaacagatgcgcgtttgttctgatgacagctactccaccgggcaagagtgaggcattccccgagtccaaaggagccata

SEQ ID NO: 130207 - DNA, 80 bp, synthetic construct
  source 1..80: mol_type = other DNA
caccccgacgcacgcattgccatcagaaatctcactgagagattgtacgtcggagggcccctgactaattcaaaagggga

SEQ ID NO: 130208 - DNA, 80 bp, synthetic construct
  source 1..80: mol_type = other DNA
cgcctttgaacactttattaaaaagtttaactccgggggcgtcatggcctcccaggagatcgtttccgcgacggtgcgcc

SEQ ID NO: 130209 - DNA, 80 bp, synthetic construct
  source 1..80: mol_type = other DNA
gcattgcggtggcagcagtgaggagcattggtctggggaaggtgctaattgacatactggcgtgctacggcgcgggagtc

SEQ ID NO: 130210 - DNA, 80 bp, synthetic construct
  source 1..80: mol_type = other DNA
tctaaaacagaacctcttatgccgattccttactagttttcttttttcttacagtatggtgacggttcttctcatctttt

SEQ ID NO: 130211 - DNA, 80 bp, synthetic construct
  source 1..80: mol_type = other DNA
aagtcactcaccaacctgtccacagtatatatacacaagccctaaactgacgtaatggggctaaaagtacacaaaatccc

SEQ ID NO: 130212 - DNA, 80 bp, synthetic construct
  source 1..80: mol_type = other DNA
gataaggttagggaagctgatgtggccgaaagaataactgctctcaaaacccaatatggtgactcctggcacgtggataa

SEQ ID NO: 130213 - DNA, 80 bp, synthetic construct
  source 1..80: mol_type = other DNA
taagcgtttatactcggatgttgtaagtcccagtctcttataatcggtaagacaatttttataaattcattcctttttaa

SEQ ID NO: 130214 - DNA, 80 bp, synthetic construct
  source 1..80: mol_type = other DNA
cccgagcctaactaccgtacggctctgtggagggtgtctgctgaggattacgttgaggttcagcgtattaatgactgcca

SEQ ID NO: 130215 - DNA, 80 bp, synthetic construct
  source 1..80: mol_type = other DNA
gcacgccaccgacaacccgagctccagaaagcgcacgagcgacagggtgttgcaatacgaccccagcagggcgtcgaact

SEQ ID NO: 130216 - DNA, 80 bp, synthetic construct
  source 1..80: mol_type = other DNA
agtgcgccgagtgggggatgctcactacgtgataggggccacagatgatggtctgaagtgcccgtgtcaggtacccgcac

SEQ ID NO: 130217 - DNA, 80 bp, synthetic construct
  source 1..80: mol_type = other DNA
ctacagcgagcggcaagctggtcactgattggtgttgcaggagctgttccctgccaccactgcgatacaccacaaaagat

SEQ ID NO: 130218 - DNA, 80 bp, synthetic construct
  source 1..80: mol_type = other DNA
agaaaggcgcccgagagtttggcgtacatgttttgggccgcaatgcgcgtggcgcccgtcaccacacagtccaagacctc

SEQ ID NO: 130219 - DNA, 80 bp, synthetic construct
  source 1..80: mol_type = other DNA
gcccgtagtcagcggaggggccgcacaggtaggggtaagccggtggtgtataggtacgtctcgcagggcgaaagaccatc

SEQ ID NO: 130220 - DNA, 80 bp, synthetic construct
  source 1..80: mol_type = other DNA
acccattacagcctacgcccagcagacacgaggtctgttaggaaccatagtgaccagcctcacgggtcgagataagaatg

SEQ ID NO: 130221 - DNA, 80 bp, synthetic construct
  source 1..80: mol_type = other DNA
agaggacctatgcactcttattaagaccctgtgtggtcttagagatcttattccctttacctaataaacaatcaaatgtt

SEQ ID NO: 130222 - DNA, 80 bp, synthetic construct
  source 1..80: mol_type = other DNA
aaagtggtcagatccttagatttttcatctgtgggacgaacggttgcttctattgcttttttggcaaccatattggataa

SEQ ID NO: 130223 - DNA, 80 bp, synthetic construct
  source 1..80: mol_type = other DNA
gaccaatatctcagcacaactacaggccagggtatttcacacaaacagcagggccatggcacctaggtaagctggaactg

SEQ ID NO: 130224 - DNA, 80 bp, synthetic construct
  source 1..80: mol_type = other DNA
aaagacgggcgggtggagggaaagctggggaagaagaagccaattttacagagacaggccctttagcggtgaggcgtcgt

SEQ ID NO: 130225 - DNA, 80 bp, synthetic construct
  source 1..80: mol_type = other DNA
atagcggccagagggtacatatcaactcgtgttggaatgggagaggcagccgcaatcttcatgacagcaacgccccctgg

SEQ ID NO: 130226 - DNA, 80 bp, synthetic construct
  source 1..80: mol_type = other DNA
tgatgatgatgacagtggacttgtgcagtggaaagaggcgcaaatacttcttgacaacataacaaccttgcggggtcctg

SEQ ID NO: 130227 - DNA, 80 bp, synthetic construct
  source 1..80: mol_type = other DNA
gaatggcacctgtgtgatcctggcgacagacatgggggcatggtgtgaagactccttgtcatacgaatgtgtgaccatag

SEQ ID NO: 130228 - DNA, 80 bp, synthetic construct
  source 1..80: mol_type = other DNA
ccctcaattccatcagagtacttactccgaaggagagcctttccacctgcattgcctgtctgggctaggccagactataa

SEQ ID NO: 130229 - DNA, 80 bp, synthetic construct
  source 1..80: mol_type = other DNA
gaccccgcgggcgagggcgtctaaggcctcgcgcatctcgcgggcctccgcctcgacccgcatctcttcgccccgggcaa

SEQ ID NO: 130230 - DNA, 80 bp, synthetic construct
  source 1..80: mol_type = other DNA
actttttccccacggccattttctccggcgtcaccacgtagaaagtgcaggggcggtcgttccagacgtcccatcggagc

SEQ ID NO: 130231 - DNA, 80 bp, synthetic construct
  source 1..80: mol_type = other DNA
gtggtggccccatgtacaattcacgaggccaatcatgcgggtatcggagatgccgcgcaagcggcgtccttcccactagt

SEQ ID NO: 130232 - DNA, 80 bp, synthetic construct
  source 1..80: mol_type = other DNA
ctcctcaaggaggtcctccttgtgactccatatttcgtgagggcgcaggttctattaaggatttgcactctcgtgagggg

SEQ ID NO: 130233 - DNA, 80 bp, synthetic construct
  source 1..80: mol_type = other DNA
gggtagcggggcacaggcacactgacatacatctttttaaaatttttatttcctctggggtcaagatcatatcccaggtg

SEQ ID NO: 130234 - DNA, 80 bp, synthetic construct
  source 1..80: mol_type = other DNA
ggcagctcactaacgcggttctccaccttcctggatgtgttccatgtgagaatgataatggcaccttgcgctgctggata

SEQ ID NO: 130235 - DNA, 80 bp, synthetic construct
  source 1..80: mol_type = other DNA
cagccggaggccgttggccctaagcacggctcccacggccgtctcgatggcccgccgggcgtcctcgatcaccccggaag

SEQ ID NO: 130236 - DNA, 80 bp, synthetic construct
  source 1..80: mol_type = other DNA
catctctactaccataatggcaaagaacgaggtgttttgtgtcgacccccaaaagggggggcggaagccagcccggctga

SEQ ID NO: 130237 - DNA, 80 bp, synthetic construct
  source 1..80: mol_type = other DNA
cgcgggtacacattctcccaccaccagcccattttacagtgtaaacaattctctcagcacgggtggccttaaatagggga

SEQ ID NO: 130238 - DNA, 80 bp, synthetic construct
  source 1..80: mol_type = other DNA
gcccgacgcggaggagacaatcctgcaagtggacgagccgccctcgtacgaggaggccgtcaaggccggcatgcccacca

SEQ ID NO: 130239 - DNA, 80 bp, synthetic construct
  source 1..80: mol_type = other DNA
cagaaacaatggaaacactcctactcttaggactcatgatcttactgacaggtggagcaatgcttttcttgatatcaggt

SEQ ID NO: 130240 - DNA, 80 bp, synthetic construct
  source 1..80: mol_type = other DNA
acaactgctcctggaaattttcctggagggccattggggtgtcatcggggccttggcttactactctatggtggcaaact

SEQ ID NO: 130241 - DNA, 80 bp, synthetic construct
  source 1..80: mol_type = other DNA
atttggtggaaccaatacgccatttgtaggagcgaggctgctcttcaggtgtgggttcctcccctgctcgcacgcggagg

SEQ ID NO: 130242 - DNA, 80 bp, synthetic construct
  source 1..80: mol_type = other DNA
cccgacaccgtcagcgctgcgtccctgacctcgtttgccgccatcacgcggttctgttgcacgagccagtacgcccgcgg

SEQ ID NO: 130243 - DNA, 80 bp, synthetic construct
  source 1..80: mol_type = other DNA
tgcacaaacaccacccgggttgcatccgcggaggcgagtgttttgataaggccgttccgcgccttgatataacctttgat

SEQ ID NO: 130244 - DNA, 80 bp, synthetic construct
  source 1..80: mol_type = other DNA
gtgtttgtgatcccccccgcctgcaaagacgttccggcgtttgtcgccgcgcacgccgacccgcggcgcttccattttca

SEQ ID NO: 130245 - DNA, 80 bp, synthetic construct
  source 1..80: mol_type = other DNA
gacactgtcgtcctctgcgaggcctatgacactggcctctcttggtatgacctcaccccctcagagaccactgtaaggct

SEQ ID NO: 130246 - DNA, 80 bp, synthetic construct
  source 1..80: mol_type = other DNA
ttgacaggtgtgccgtacttcgtcagagcgcatgctttactacggctatgctccatggtaaaacacatcatgggaggcaa

SEQ ID NO: 130247 - DNA, 80 bp, synthetic construct
  source 1..80: mol_type = other DNA
tcgaagaagaccccaatggggttttcttatgacaccagatgctttgactccacagtcacagagcgcgacatcagaactga

SEQ ID NO: 130248 - DNA, 80 bp, synthetic construct
  source 1..80: mol_type = other DNA
aagaggtagtgggcaagttggtacctatggactcaatactttcaccaatatggaagcccaattaatcagacagatggagg

SEQ ID NO: 130249 - DNA, 80 bp, synthetic construct
  source 1..80: mol_type = other DNA
cgggataaattatgcaacagggaatttgcctggttgctctttttctatcttcctacttgctcttctgtcatgcatcacag

SEQ ID NO: 130250 - DNA, 80 bp, synthetic construct
  source 1..80: mol_type = other DNA
aacactctatttatcagtgctgtcagttagaccccacagcacggaaggccattacatctctcaccgagcggctgtactgc

SEQ ID NO: 130251 - DNA, 80 bp, synthetic construct
  source 1..80: mol_type = other DNA
cgccatcaactttggcaagagagagctcaagtgcggagatggtatcttcatatttagagactctgatgactggctgaaca

SEQ ID NO: 130252 - DNA, 80 bp, synthetic construct
  source 1..80: mol_type = other DNA
tccgaacggtcccagcccagaggtaggcgtcaacctatacccaaggcacgccaccagacgggccgtacctggggtcagcc

SEQ ID NO: 130253 - DNA, 80 bp, synthetic construct
  source 1..80: mol_type = other DNA
ttgagagcgtggagacatcgggcccgagcagtccgcgccctcatcgcccagggtggagccaaaatctgtggcatatacct

SEQ ID NO: 130254 - DNA, 80 bp, synthetic construct
  source 1..80: mol_type = other DNA
ttgtatatccatttgcagtatagcctgcttttttataacaatctttcaagccgccgactatctttacgtgcgaattgctt

SEQ ID NO: 130255 - DNA, 80 bp, synthetic construct
  source 1..80: mol_type = other DNA
tggcgtggaagacgagctccccaactattgctttcctcttaatgggcaaggaatatctaacagttaccaaggcgtaaaga

SEQ ID NO: 130256 - DNA, 80 bp, synthetic construct
  source 1..80: mol_type = other DNA
gagcaggctggcgaggggatcacccccctctctggccagttcatcggccagccagctgtcagcgccatctctaaaggcca

SEQ ID NO: 130257 - DNA, 80 bp, synthetic construct
  source 1..80: mol_type = other DNA
caatgcacccaaagagctgctggatctcgctgagcccgtggccggggggcgtccgcgcgggcacccccgccaccaaaaac

SEQ ID NO: 130258 - DNA, 80 bp, synthetic construct
  source 1..80: mol_type = other DNA
aaagccagccgtaggtgggacaccgtctccatcgccggatcgccaacagccccagctggtaagcagcctaagcgcgcacg

SEQ ID NO: 130259 - DNA, 80 bp, synthetic construct
  source 1..80: mol_type = other DNA
ggaagactgggacagcctagacgaagcttccgaggccgaagaggtgtcagacgaaacaccgtcaccctcggtcgcattcc

SEQ ID NO: 130260 - DNA, 80 bp, synthetic construct
  source 1..80: mol_type = other DNA
tctaactttagtgggaccattagacctgccagttacatggtatgatggaaagggaatgcagttttgtgatggaaatacaa

SEQ ID NO: 130261 - DNA, 80 bp, synthetic construct
  source 1..80: mol_type = other DNA
cgacggcggcgcacgcggtgcgtcgggctggttatcgcctgtctcgtcgtggccctcctatctggagggttcgtggcact

SEQ ID NO: 130262 - DNA, 80 bp, synthetic construct
  source 1..80: mol_type = other DNA
cgacctcatgggatacatcccgctcgtgggcgcccccgtgggtggcgtcgctagagctctggcgcatggcgtcagagctc

SEQ ID NO: 130263 - DNA, 80 bp, synthetic construct
  source 1..80: mol_type = other DNA
gacctcggtgtgccgctgctagcaataggatgttattctcaagtgaacccaacaaccttgacagcatccctagtcatgct

SEQ ID NO: 130264 - DNA, 80 bp, synthetic construct
  source 1..80: mol_type = other DNA
gtatgccgcccaggggtacaaagtactagtgcttaacccctcggtagctgccaccctggggtttggtgcgtacctatcca

SEQ ID NO: 130265 - DNA, 80 bp, synthetic construct
  source 1..80: mol_type = other DNA
ccatacactcgctcactgagagactctacgtaggaggacccatgacaaacagcaaagggcaatcctgcggttacaggcgc

SEQ ID NO: 130266 - DNA, 80 bp, synthetic construct
  source 1..80: mol_type = other DNA
ttttagaacactttttggtggcatgtcttggataacacaaggattgatgggagcactgctgctgtggatgggtatcaatg

SEQ ID NO: 130267 - DNA, 80 bp, synthetic construct
  source 1..80: mol_type = other DNA
agagtgattgacccaagaagatgtctcaagccagtaattttgacagatggacccgagcgagtgatcctggccggaccaat

SEQ ID NO: 130268 - DNA, 80 bp, synthetic construct
  source 1..80: mol_type = other DNA
tccttctcacgtgtgcattccatccagagctgatctttgacatcaccaagctcttgctcgccatattcggcccgatcatg

SEQ ID NO: 130269 - DNA, 80 bp, synthetic construct
  source 1..80: mol_type = other DNA
ccgtccagacgggcccgacggccgcgggcaggtctaacagttggatgattttagtggcgggatgccaccgcgccaccgcc

SEQ ID NO: 130270 - DNA, 80 bp, synthetic construct
  source 1..80: mol_type = other DNA
cccgccctcgagatgtgccttccagttccacggccaggatgggtccgacgaggccttcccgatcgagtacgtcctgcggc

SEQ ID NO: 130271 - DNA, 80 bp, synthetic construct
  source 1..80: mol_type = other DNA
tccaagaccttagcgggcccgaaagggcccatctgccagatgtacaccaatgtagatcaagacatggtaggatggccggc

SEQ ID NO: 130272 - DNA, 80 bp, synthetic construct
  source 1..80: mol_type = other DNA
tcaaagaaagtccctatgggattttcctatgacaccagatgctttgactcgacagtcacagagcgcgacatccgcactga

SEQ ID NO: 130273 - DNA, 80 bp, synthetic construct
  source 1..80: mol_type = other DNA
ctacaccggaccaacctaaggcaacttcagactcaggccacggcacgaatggcgcggagtcctcatcaccaactgaggag

SEQ ID NO: 130274 - DNA, 80 bp, synthetic construct
  source 1..80: mol_type = other DNA
ttccaatggcagtggcagctatgggagttccacctctaccactttttatttttagcttgaaagacacactcaaaaggaga

SEQ ID NO: 130275 - DNA, 80 bp, synthetic construct
  source 1..80: mol_type = other DNA
tcgctgcagcagtgttagctgtgctcgtccggcctgggatctgttcgatcaaagaatttggggtcttagggtcagcagcc

SEQ ID NO: 130276 - DNA, 80 bp, synthetic construct
  source 1..80: mol_type = other DNA
gctatgggggcattgattttcagagcttgcacagcagaggaaaagaccggtgttggacttctgctcatggctctcatgac

SEQ ID NO: 130277 - DNA, 80 bp, synthetic construct
  source 1..80: mol_type = other DNA
gtatggcgttactagcctcttctccttcgggcccaggcaaactatccagctcatcaataccaacggcagctggcacatta

SEQ ID NO: 130278 - DNA, 80 bp, synthetic construct
  source 1..80: mol_type = other DNA
cgagattgagctccacatgccgggcaaagacggcgtagtttcgcaggcgctgaaagaggtagttgagggtggtggcggtg

SEQ ID NO: 130279 - DNA, 80 bp, synthetic construct
  source 1..80: mol_type = other DNA
agcacccgaggctttactagcttcttttccgctgggccctctcagaagttgcagctcatcaacaccaatggtagctggca

SEQ ID NO: 130280 - DNA, 80 bp, synthetic construct
  source 1..80: mol_type = other DNA
gggtgtgcgggatggctcctgtccccccgtggctctcggcctagttggggccctacagacccccggcgtaggtcgcgcaa

SEQ ID NO: 130281 - DNA, 80 bp, synthetic construct
  source 1..80: mol_type = other DNA
gctttcctcctgggcgagtgacggcctacgcgacctcgctgtagcggtagagcctgtcatcttttcgcccatggagaaga

SEQ ID NO: 130282 - DNA, 80 bp, synthetic construct
  source 1..80: mol_type = other DNA
ttgccgcgcaggggccccaggttgggtgtgcgcgcgacaaggaagacttcggagcggtctcagccacgtggaaggcgcca

SEQ ID NO: 130283 - DNA, 80 bp, synthetic construct
  source 1..80: mol_type = other DNA
gcggctttgccgacctcatggggtacattcccgtcatcggtgcccccctcggaggcgtcgcggcagccctggcccacggg

SEQ ID NO: 130284 - DNA, 80 bp, synthetic construct
  source 1..80: mol_type = other DNA
aatataactttagtggggccctcagatacgccagtcacctggtatgataaacagggaatgcagttctgtgatggaaatac

SEQ ID NO: 130285 - DNA, 80 bp, synthetic construct
  source 1..80: mol_type = other DNA
ctgtctacaacagagtggcagatactgccctgttccttcactaccctaccggccctgtcgtacattccgctcgtcggcgc

SEQ ID NO: 130286 - DNA, 80 bp, synthetic construct
  source 1..80: mol_type = other DNA
agcttataacatcttgctcttccaacgtatccgtggctctggaccatcgaggtcgccgcaggtactacctgactagagac

SEQ ID NO: 130287 - DNA, 80 bp, synthetic construct
  source 1..80: mol_type = other DNA
ggaggtttcgctacgtggcagtaccacgagaaggctcaaaggtcccatttattgtactcctcagcgttttcgctgggtat

SEQ ID NO: 130288 - DNA, 80 bp, synthetic construct
  source 1..80: mol_type = other DNA
cggcgaacaccgacgagagaaacgttccgtggcactggccccacacgtgggacttggtctagaaacaagaaccgaaacat

SEQ ID NO: 130289 - DNA, 80 bp, synthetic construct
  source 1..80: mol_type = other DNA
caaccaatacgacaatgcagtgccgtttatgccaaacctaaaagcttatcctaatcctaaaacttcaactgtcttgccat

SEQ ID NO: 130290 - DNA, 80 bp, synthetic construct
  source 1..80: mol_type = other DNA
gtcatccaacgccccactcccgcctggcacttatgagcccgcttacctaggcggaaaagacccaagagtcaagggtggac

SEQ ID NO: 130291 - DNA, 80 bp, synthetic construct
  source 1..80: mol_type = other DNA
ggcgccggggggctccggggcgcggcgggcccccagcgtctcgagcacggacggcgacgacggtctcgcgtgctcgtcat

SEQ ID NO: 130292 - DNA, 80 bp, synthetic construct
  source 1..80: mol_type = other DNA
acgcagtcagcgccgcgggcgcacaggtagaggaagacagggcacttataggtatgtttccactggtgaacgagcctcag

SEQ ID NO: 130293 - DNA, 80 bp, synthetic construct
  source 1..80: mol_type = other DNA
acggatgttcataggaggagtcgagcataggctcgaagcggcatgcaattttacccgtggggaccgttgcaacctggaag

SEQ ID NO: 130294 - DNA, 80 bp, synthetic construct
  source 1..80: mol_type = other DNA
gtgcagacacggcggcgtgcggggacatcctcgaaggactgccagtctctgcccgtttggtgagggaggtgctattagtg

SEQ ID NO: 130295 - DNA, 80 bp, synthetic construct
  source 1..80: mol_type = other DNA
ttagcgtcccagatcgcaccacccgcggaggccaccggctttgtcgtcagtggcctggtggaggctgccgtgggcagcat

SEQ ID NO: 130296 - DNA, 80 bp, synthetic construct
  source 1..80: mol_type = other DNA
gtgtggctttgccgacctcatggggtacatacccgtcgtgggcgcaccagttggtggcgtagccagggccctggcgcatg

SEQ ID NO: 130297 - DNA, 80 bp, synthetic construct
  source 1..80: mol_type = other DNA
aaatccagctcgttaacaccaatggcagctggcacatcaaccgcaccgccctgaactgcaatgactccttgcacaccggc

SEQ ID NO: 130298 - DNA, 80 bp, synthetic construct
  source 1..80: mol_type = other DNA
cttcgcccagacactatttataccattaagaaaactgttaatatacgtaaatgtgcctatgtaattggaaatggagccgt

SEQ ID NO: 130299 - DNA, 80 bp, synthetic construct
  source 1..80: mol_type = other DNA
cattggggggtgcttggcgctctcctgtacttctctatggtcgcaaattgggcgaaggtggccgctgttctcattctctt

SEQ ID NO: 130300 - DNA, 80 bp, synthetic construct
  source 1..80: mol_type = other DNA
tactgtcatacgcaggcacaccttcatggttgaaaaagatcaggttcccgtgtcacctgcagttcatttaaaagattaac

SEQ ID NO: 130301 - DNA, 80 bp, synthetic construct
  source 1..80: mol_type = other DNA
tgtgccccaccctaacatcgaggaggttgctctgtccactactggagagatccccttttacggcaaggctatccccctag

SEQ ID NO: 130302 - DNA, 80 bp, synthetic construct
  source 1..80: mol_type = other DNA
aggacaaagtgcgaacgcttcgcgttctcacgtttttttataatagcggccacgcccaccggctacgtcacgctcctgtc

SEQ ID NO: 130303 - DNA, 80 bp, synthetic construct
  source 1..80: mol_type = other DNA
tacagccacaaccacacagcctactactagggaaacaacgcagcctagcactgtgcccactactcaaccaaccaccacaa

SEQ ID NO: 130304 - DNA, 80 bp, synthetic construct
  source 1..80: mol_type = other DNA
gagacgtggtggttgttgccactgacgctctcatgactgggtacactggtgatttcgactctgtggtagactgcaacgta

SEQ ID NO: 130305 - DNA, 80 bp, synthetic construct
  source 1..80: mol_type = other DNA
acgcctccgggatcggtcaccgtgccacatcccaacatcgaagaggtaggcctgtccaacactggagaggtccccttcta

SEQ ID NO: 130306 - DNA, 80 bp, synthetic construct
  source 1..80: mol_type = other DNA
aatgcagaaggcataccacgctaaagtggtaaaagttgcccggccctcccgagatggaggctgcatcatggatgtcatca

SEQ ID NO: 130307 - DNA, 80 bp, synthetic construct
  source 1..80: mol_type = other DNA
gaacggtcccagcctagaggcaggcgccagcccataccaaaggcgcgccagccgacaggccgtagctggggtcaacctgg

SEQ ID NO: 130308 - DNA, 80 bp, synthetic construct
  source 1..80: mol_type = other DNA
ggatgtatgtggagggagttgagcacagggtgaatgctgcgtgcaatttcacccgtggggaccgctgtaacctagaagac

SEQ ID NO: 130309 - DNA, 80 bp, synthetic construct
  source 1..80: mol_type = other DNA
ttttgacacccccgttttccgggacggaccaagattcgggccacccgaccaccagcaagagttcagaccagacggacgag

SEQ ID NO: 130310 - DNA, 80 bp, synthetic construct
  source 1..80: mol_type = other DNA
cggttacagcgggggggacatttatcacagcgtgtcccaggcccgtccccgcattttactcctaagcctactcctacttg

SEQ ID NO: 130311 - DNA, 80 bp, synthetic construct
  source 1..80: mol_type = other DNA
ggcaatgcatttgtggagggcatggctgaagaggagggtttgcatttactcgctggcgcggcctctaaccatgccgccgt

SEQ ID NO: 130312 - DNA, 80 bp, synthetic construct
  source 1..80: mol_type = other DNA
ttgatgctgagcgcaagctccatcaacaggggcgatgccagtcttgtgtctataacatgatgggaaaaagagagaaaaaa

SEQ ID NO: 130313 - DNA, 80 bp, synthetic construct
  source 1..80: mol_type = other DNA
gctggagctattccagccactgttagcagctcaaccctaaccttgcaatcagggcatctgaaatgcagagctaagcttga

SEQ ID NO: 130314 - DNA, 80 bp, synthetic construct
  source 1..80: mol_type = other DNA
cagcattactaatagtatcaggtatctttccatactccatacccgcaacattgttggtctggcatacttggcaaaagcaa

SEQ ID NO: 130315 - DNA, 80 bp, synthetic construct
  source 1..80: mol_type = other DNA
catcaggactggggtgaggacaatcactactggcagccccatcacgtactccacctacggcaagttccttgccgacggcg

SEQ ID NO: 130316 - DNA, 80 bp, synthetic construct
  source 1..80: mol_type = other DNA
agtggccgggggcccagacgggagtccgcgtcgccctcgccctggtcgccgcctttgccctcggcatggccgtgctccgc

SEQ ID NO: 130317 - DNA, 80 bp, synthetic construct
  source 1..80: mol_type = other DNA
tatgaatataatctctggtacttaataacatttgacggccaattgtagtgacagtggccgctacgtataaacatggcaga

SEQ ID NO: 130318 - DNA, 80 bp, synthetic construct
  source 1..80: mol_type = other DNA
caacaatctatgcccaacagacccaactacattggctttagagataactttattggacttatgtactacaacagtactgg

SEQ ID NO: 130319 - DNA, 80 bp, synthetic construct
  source 1..80: mol_type = other DNA
gaggatagtccccgctgcctgcaccgcaccgagcgctttggggcggtcagcgtccccgttgtcattctggaaggcgtggt

SEQ ID NO: 130320 - DNA, 80 bp, synthetic construct
  source 1..80: mol_type = other DNA
cactgttcggaggcatgtcctggataacgcaaggattgctgggggctctcctgttgtggatgggcatcaatgctcgtgat

SEQ ID NO: 130321 - DNA, 80 bp, synthetic construct
  source 1..80: mol_type = other DNA
aactacgcttccccaggatgctgtctcccgcactcaacgccgaggcaggactggcagagggaagccaggcatctacagat

SEQ ID NO: 130322 - DNA, 80 bp, synthetic construct
  source 1..80: mol_type = other DNA
ctccagcacggcccgggcccagggctccgagggtgcggccgccaccagcgcgtccagcctttccaggcccgcccgccccc

SEQ ID NO: 130323 - DNA, 80 bp, synthetic construct
  source 1..80: mol_type = other DNA
ctttcgagctacgccctggggtcccaactcccatgcgagccggaaccagacactgtggtactcacagccatgctgactga

SEQ ID NO: 130324 - DNA, 80 bp, synthetic construct
  source 1..80: mol_type = other DNA
tacatttacatcagaatgtggtggacgtgcagtacctctacggagtgtccacaaacatagtgtcgtgggcagtgaagtgg

SEQ ID NO: 130325 - DNA, 80 bp, synthetic construct
  source 1..80: mol_type = other DNA
tcgacttcctgctaaaagcgtggaagagcaagaagacccctatggggttctcgtatgacactcgctgttttgactcaaca

SEQ ID NO: 130326 - DNA, 80 bp, synthetic construct
  source 1..80: mol_type = other DNA
gccaaactcattgcccaaggaggtagggctgccatatgcggcaggtacctctttaactgggcagtgaggacaaagctcaa

SEQ ID NO: 130327 - DNA, 80 bp, synthetic construct
  source 1..80: mol_type = other DNA
tcctggggtctgcctacctccttagagcgtccctgctacgggtgccatactttgtgagggctcacgccctgctacgagta

SEQ ID NO: 130328 - DNA, 80 bp, synthetic construct
  source 1..80: mol_type = other DNA
atacgacttggagttgataacatcatgttcctccaatgtgtcggtcgcgcacgatgcatctggcaaaagggtgtactacc

SEQ ID NO: 130329 - DNA, 80 bp, synthetic construct
  source 1..80: mol_type = other DNA
agggtgacagagtgtgggacacatggacaaacattgacatacagcccgcccgatcctgggggacctatgtgtttatcgtg

SEQ ID NO: 130330 - DNA, 80 bp, synthetic construct
  source 1..80: mol_type = other DNA
ccatcgctgcgtactgcctagcgactggctgcgtgtccataattgggcgactacatctcaatcaaaggactgtagttgcc

SEQ ID NO: 130331 - DNA, 80 bp, synthetic construct
  source 1..80: mol_type = other DNA
cgtcttcacgtgcctcctgcgccttgcgggccagaagggcttcatcctgccggacacccagaggcggtttcggggcctcg

SEQ ID NO: 130332 - DNA, 80 bp, synthetic construct
  source 1..80: mol_type = other DNA
taccacatatgtgggctcttcagtcagccagagtgccgctggtctcgccagtatgttcagtcctggtgcaaagcagcagt

SEQ ID NO: 130333 - DNA, 80 bp, synthetic construct
  source 1..80: mol_type = other DNA
ccggcaccacggtcaccatcacggagacttgcgggaaaagaggtccttccatcagaacgacgaccaatagtggtcgcctg

SEQ ID NO: 130334 - DNA, 80 bp, synthetic construct
  source 1..80: mol_type = other DNA
gggggctgcagcccacaccgccaatactcttacctcactcttcactcgaggctcccagcagaacatccaactggtgaaca

SEQ ID NO: 130335 - DNA, 80 bp, synthetic construct
  source 1..80: mol_type = other DNA
atttgttgagggaggaaagtactactgaacagacagaggctacctcaagtgccttcagcagcactgcaaatttaacttcg

SEQ ID NO: 130336 - DNA, 80 bp, synthetic construct
  source 1..80: mol_type = other DNA
aatactttatcaccagagccgaggcgcacatgcaagtgtgggtcccccccctcaacgttcggggaggccgcgatgccatc

SEQ ID NO: 130337 - DNA, 80 bp, synthetic construct
  source 1..80: mol_type = other DNA
aagactgtggaaatagaggaccctctttaagaacaactaccgcttctggaaaactcataacagaatggtgttgccgatcc

SEQ ID NO: 130338 - DNA, 80 bp, synthetic construct
  source 1..80: mol_type = other DNA
cgggcgacaaggtcggagcgtgtacttgctccggtacttgctccggtacttgcaagtttttgcgcagctttttcttggga

SEQ ID NO: 130339 - DNA, 80 bp, synthetic construct
  source 1..80: mol_type = other DNA
agtgccattctactgacgcgacctcgattttgggcatcgggacggtcctggatcaggcggagacggctggagcgcgtctt

SEQ ID NO: 130340 - DNA, 80 bp, synthetic construct
  source 1..80: mol_type = other DNA
tgccgtacttcgtcagggctcacgctctactgaggatgtgcaccatggcaaggcatctcgcggggggcaggtacgtccag

SEQ ID NO: 130341 - DNA, 80 bp, synthetic construct
  source 1..80: mol_type = other DNA
caacgcgcggcggcggccctgcttaaccgcgcacgtcgcaccggccgacgggcggccatgcgggccgctcgaaggctggc

SEQ ID NO: 130342 - DNA, 80 bp, synthetic construct
  source 1..80: mol_type = other DNA
ggtattgcggctgacaacacgacaacgtcctctgagcccgccccttctggctgccccccagactccgacgctgaatccta

SEQ ID NO: 130343 - DNA, 80 bp, synthetic construct
  source 1..80: mol_type = other DNA
acaagatttgctggtcacattcaagacagctcatgcaaagaaacaggaagtagtcgtactgggatcacaagaaggagcaa

SEQ ID NO: 130344 - DNA, 80 bp, synthetic construct
  source 1..80: mol_type = other DNA
ggacgccctggccgaccggagcgaaacccccctcagcgtcgaggagctgtgtcgggcctacgagctcaacctcttctcac

SEQ ID NO: 130345 - DNA, 80 bp, synthetic construct
  source 1..80: mol_type = other DNA
agtctggaagggaggaaaggtggacagtcgataagtcggtagcgggggacgcgcacctgttccgcctgtcgcacccacag

SEQ ID NO: 130346 - DNA, 80 bp, synthetic construct
  source 1..80: mol_type = other DNA
tcgcccgccatctcctccagagcctctagctcgctgtcgtcatccccgcggaacaccgcacgcaggtaccccatgaaccc

SEQ ID NO: 130347 - DNA, 80 bp, synthetic construct
  source 1..80: mol_type = other DNA
ggaccgcggtcccagcttcaaaccctactcgggcacggcttacaacagcctggctcccaagggcgcccccaatcccagtc

SEQ ID NO: 130348 - DNA, 80 bp, synthetic construct
  source 1..80: mol_type = other DNA
atcagcaccgtcgctgcgggccacctgcaccacccacagcaacacctatgacgtggacatggtcgatgccaacctgctca

SEQ ID NO: 130349 - DNA, 80 bp, synthetic construct
  source 1..80: mol_type = other DNA
ttactctcaccccagcttataagatcctgcttgctcaactgctttggtggattcagtacttcatagcactgattgaggcc

SEQ ID NO: 130350 - DNA, 80 bp, synthetic construct
  source 1..80: mol_type = other DNA
caactccacccccccagccgtcccagagtcctatcaggtggggtatctccatgctcctaccggtagtggtaaaagtacca

SEQ ID NO: 130351 - DNA, 80 bp, synthetic construct
  source 1..80: mol_type = other DNA
tgaggggtggaatggtcgccccactctatggcgttgaaggaactaaaacaccagtttcccctggtgaaatgagactgagg

SEQ ID NO: 130352 - DNA, 80 bp, synthetic construct
  source 1..80: mol_type = other DNA
gttcggacggcccctcgctccccgcgtaattactccctcggggttccgggttatgctgattactttcttggcagaacacg

SEQ ID NO: 130353 - DNA, 80 bp, synthetic construct
  source 1..80: mol_type = other DNA
tcaatgctgtctctgtctctggccattatggtcctggttacgctattgccttcatctgcgtggcttggtacatcaagggc

SEQ ID NO: 130354 - DNA, 80 bp, synthetic construct
  source 1..80: mol_type = other DNA
cgggcgctttcgccgcgcgaggagctgacccaggagtcgaacggatacgcgtacatatgggcgtcccacccgcgttcgag

SEQ ID NO: 130355 - DNA, 80 bp, synthetic construct
  source 1..80: mol_type = other DNA
gcacatggatgaacgggacgggatttactaagacctgtggcgcgccaccttgccgcatcaggccggacttcaacaccagc

SEQ ID NO: 130356 - DNA, 80 bp, synthetic construct
  source 1..80: mol_type = other DNA
tgacttcaagacatggctcaaagcaaaactcttcccagccctcccagggatccccttctactcgtgccaacggggttata

SEQ ID NO: 130357 - DNA, 80 bp, synthetic construct
  source 1..80: mol_type = other DNA
tacggggctaaggaggtccgtagcttggacaggaaggccattaaccacatcaactccgtgtgggaggacttactgtcaga

SEQ ID NO: 130358 - DNA, 80 bp, synthetic construct
  source 1..80: mol_type = other DNA
gcggtgcccgtcgactgggtccctactggccgcacgacctggagcattcatgctagcggagcctggatgaccacagagga

SEQ ID NO: 130359 - DNA, 80 bp, synthetic construct
  source 1..80: mol_type = other DNA
actgttccatctaccccggccatataacgggccaccgcatggcatgggatatgatgatgaactggtcacctacaacggcg

SEQ ID NO: 130360 - DNA, 80 bp, synthetic construct
  source 1..80: mol_type = other DNA
gagagaatgtcgatccaacgaaggatttcgacattgatatggctttcttcgatcttaagcaaacagacactggaacaacg

SEQ ID NO: 130361 - DNA, 80 bp, synthetic construct
  source 1..80: mol_type = other DNA
gccgcagtgggcgtacatgcacatcgccgggcaggacgcctcggagtacctgagcccgggtctggtgcagtttgcccgcg

SEQ ID NO: 130362 - DNA, 80 bp, synthetic construct
  source 1..80: mol_type = other DNA
cctcgaccagcatcgaggtgcagaccgacccctggctcccagcttccaccgccgccacggctaccgagcctcccaggagg

SEQ ID NO: 130363 - DNA, 80 bp, synthetic construct
  source 1..80: mol_type = other DNA
tggtgcgcggggtggcatgcggcaaatactaccaaatggcattgctcaagctgggtgctcttacgggtacctatgtgtac

SEQ ID NO: 130364 - DNA, 80 bp, synthetic construct
  source 1..80: mol_type = other DNA
ataggatgaacaaaccaccccgtacctcccgcacccaagggtgcgggtggctcatcggcatctgtccggtatgggttgtt

SEQ ID NO: 130365 - DNA, 80 bp, synthetic construct
  source 1..80: mol_type = other DNA
gtgccgttcacctaggtgctagacgcggcgtgtttatgccttaccaatgtaactttagccatactaagattttgctggaa

SEQ ID NO: 130366 - DNA, 80 bp, synthetic construct
  source 1..80: mol_type = other DNA
ggcgcactacagccggtgttgcttttgtggtgtttctggttgacaaatggagccagcaaacccacctaaccagggattac

SEQ ID NO: 130367 - DNA, 80 bp, synthetic construct
  source 1..80: mol_type = other DNA
tgatcatccttgctgcccttttccatccccagcttatttttgagatcactaagcacttcatagccatcctggggccactt

SEQ ID NO: 130368 - DNA, 80 bp, synthetic construct
  source 1..80: mol_type = other DNA
aatccaacagcaatatacttcacaacattagcgaaggcgaagaaaataaggagctggccgctaaatgaagctgtgatggc

SEQ ID NO: 130369 - DNA, 80 bp, synthetic construct
  source 1..80: mol_type = other DNA
ccagccctggctgtctgcggtcgtggccgataccagctccgtggaacgcccgggcccatccgattctggtgcgggtcgcg

SEQ ID NO: 130370 - DNA, 80 bp, synthetic construct
  source 1..80: mol_type = other DNA
tgcagttatgatagcggcccaagcattcatcatttccccgcagcaccccacctttgttcaggactgcaattgttccatct

SEQ ID NO: 130371 - DNA, 80 bp, synthetic construct
  source 1..80: mol_type = other DNA
tgccgctattgcagcctactgtctaacagtgggcagcgttgttatctgcggcagagttaccacctccggcagacctgcag

SEQ ID NO: 130372 - DNA, 80 bp, synthetic construct
  source 1..80: mol_type = other DNA
cggggcgtggccgcgcataatgcggttccacctgtgggcggaaccccggcgagccggcgcgcggcggcgtcgatcgctcc

SEQ ID NO: 130373 - DNA, 80 bp, synthetic construct
  source 1..80: mol_type = other DNA
acgggcttgactcatatagatgctcacttcttgtcccagacgaagcagtcaggtgagaatttgccctatctggttgccta

SEQ ID NO: 130374 - DNA, 80 bp, synthetic construct
  source 1..80: mol_type = other DNA
gcattgttcctggaggaaatgcttaggacccgagtaggaacgaaacatgcaatactactagttgcagtttcttttgtgac

SEQ ID NO: 130375 - DNA, 80 bp, synthetic construct
  source 1..80: mol_type = other DNA
agtacagctcctcgtgggtcccgcgcggcgcttcccgcggacacgacttgacggagcggcgagaggtcatggtctatcgg

SEQ ID NO: 130376 - DNA, 80 bp, synthetic construct
  source 1..80: mol_type = other DNA
ggatagagtccgagacgaaggtagttatgctcgactccctggactcaatgactgaggaggaggacgaacgggagccctca

SEQ ID NO: 130377 - DNA, 80 bp, synthetic construct
  source 1..80: mol_type = other DNA
ggggcctgtcccatccgaacgcagccccgctggaactactatgacagcttcagcgccgtcagcgaggataacctggggtt

SEQ ID NO: 130378 - DNA, 80 bp, synthetic construct
  source 1..80: mol_type = other DNA
attcgcgagggtaacacctcacggtgttggataccgcttactcccaccgtagccaccagagacggtaaactcccgacttc

SEQ ID NO: 130379 - DNA, 80 bp, synthetic construct
  source 1..80: mol_type = other DNA
gctggccgagcagtttaagcagaaggtgcttggtttgattcaaaccacaacaaaacaagcagaagaactcaagccagccg

SEQ ID NO: 130380 - DNA, 80 bp, synthetic construct
  source 1..80: mol_type = other DNA
gcactttgtgcgggactttgcccagctgcttaaaacctccttccgggcctccagcctcacggagaccacgggccccccca

SEQ ID NO: 130381 - DNA, 80 bp, synthetic construct
  source 1..80: mol_type = other DNA
cgctccatctctcaaggcaacttgtactgctcaccatgactcccctgacgctgacctaatcgaggccaacctcttatgga

SEQ ID NO: 130382 - DNA, 80 bp, synthetic construct
  source 1..80: mol_type = other DNA
cgtaccagaatacgatgagcgggagatatcggttgctgcctcttgccaccgacctcctcggccaaaatttccaccggccc

SEQ ID NO: 130383 - DNA, 80 bp, synthetic construct
  source 1..80: mol_type = other DNA
gctaaggttctgattgtgatgctactcttcgctggcgttgacggagggacctatacagtaggaggggcgagtgcctttac

SEQ ID NO: 130384 - DNA, 80 bp, synthetic construct
  source 1..80: mol_type = other DNA
gggtccgtggtcatagttggcaggatagtcctttccgggaaaccggtcgtcatacccgatagggaggtactgtaccaaca

SEQ ID NO: 130385 - DNA, 80 bp, synthetic construct
  source 1..80: mol_type = other DNA
tttggccggcccttttagccgttggcgccggcgagaagacgaccaggatgactccgccgatgacaatagcgttctggact

SEQ ID NO: 130386 - DNA, 80 bp, synthetic construct
  source 1..80: mol_type = other DNA
ccatcctcatagctcaggagcaactccacaaggccctagattgcgaaatctatggggctcaacactccgtcaacccgttg

SEQ ID NO: 130387 - DNA, 80 bp, synthetic construct
  source 1..80: mol_type = other DNA
ccgcagcttccagagtgtctatctccggccgacgcgccgtgcgccgtaagttcctgggcgtaccgcctggcggtccgcag

SEQ ID NO: 130388 - DNA, 80 bp, synthetic construct
  source 1..80: mol_type = other DNA
gaagatgatgaatatggaggctgccaacctggcagaggtccgcagttattgctatttggctaccgtcagcgatctctcca

SEQ ID NO: 130389 - DNA, 80 bp, synthetic construct
  source 1..80: mol_type = other DNA
tgacggcagaaccgggccacgatctccgcgaaggagaccgtcgacgaaaaaatgcagatgttatcgcccccgccaaggcg

SEQ ID NO: 130390 - DNA, 80 bp, synthetic construct
  source 1..80: mol_type = other DNA
taagcccaccctgcacgggcccacgcccctcctctacagactggggtctgtgcagaatgaagtggtgctcacccatccca

SEQ ID NO: 130391 - DNA, 80 bp, synthetic construct
  source 1..80: mol_type = other DNA
gtttctaattaccataccgggaagccggcgcgaggcggtcgccggggcggagtccgggcccgcgcggcggcgcgcggttg

SEQ ID NO: 130392 - DNA, 80 bp, synthetic construct
  source 1..80: mol_type = other DNA
ctggctctcccgtggaagcatgatggaaacccacactggaacaatgcagagagattggttgagtttggtgttcctcatgc

SEQ ID NO: 130393 - DNA, 80 bp, synthetic construct
  source 1..80: mol_type = other DNA
cggtaggggtggagctgggccgtggcactcaagggcttacatccctcttttcgtctgggtcgcgacagaatatccagctt

SEQ ID NO: 130394 - DNA, 80 bp, synthetic construct
  source 1..80: mol_type = other DNA
atttgcaagatgagataccagacagggcatggagcagtggatacgaatggatcacagaatatgcgggtaaaaccgtgtgg

SEQ ID NO: 130395 - DNA, 80 bp, synthetic construct
  source 1..80: mol_type = other DNA
caagacgtttcctcccacagatcttggccgagtgcgcacggagacgcttgcgcactcttgtgttggcccccaccagggtt

SEQ ID NO: 130396 - DNA, 80 bp, synthetic construct
  source 1..80: mol_type = other DNA
cccatctccccattgagcaacacccttatccggcatcacaacatggtgtattccactacatcccgtagtgctggcttgcg

SEQ ID NO: 130397 - DNA, 80 bp, synthetic construct
  source 1..80: mol_type = other DNA
agagaagaggcaggactgggagggggaaacacggggattatcgatatgtctcacaaggagagcggccatctggcctcttc

SEQ ID NO: 130398 - DNA, 80 bp, synthetic construct
  source 1..80: mol_type = other DNA
acagcgtgtcccaggcccgaccccgcatgttactcctttgcctactcctactttccgtaggggtaggcatctttttgctt

SEQ ID NO: 130399 - DNA, 80 bp, synthetic construct
  source 1..80: mol_type = other DNA
ttatagggtgctaaagttcaccgccccctgcatcatgggccaggcctcggtggggagctccgacagcgccgcctccagga

SEQ ID NO: 130400 - DNA, 80 bp, synthetic construct
  source 1..80: mol_type = other DNA
gaaggagacattggtcactttcaaaaatccccatgcaaagaaacaggatgttgttgttctaggatcccaagaaggggcta

SEQ ID NO: 130401 - DNA, 80 bp, synthetic construct
  source 1..80: mol_type = other DNA
gatttcttgcacttgctattgtcactgtgttcactctcaccccaggctacaaacaactgctcgtaagtgtgatttggtgg

SEQ ID NO: 130402 - DNA, 80 bp, synthetic construct
  source 1..80: mol_type = other DNA
ggatataggaggtgcagggccagtggagtgttccccactagcatggggaataccatgacgtgctacattaaggccacagc

SEQ ID NO: 130403 - DNA, 80 bp, synthetic construct
  source 1..80: mol_type = other DNA
ggtctcacacacatagatgcccatttcttatcccaaaccaaacaagctggggacaattttgcatacttggtcgcatatca

SEQ ID NO: 130404 - DNA, 80 bp, synthetic construct
  source 1..80: mol_type = other DNA
gcaaggctcctcaccttggaggaggcgtgccagttgactccaccccattctgcaagatccaagtatggattcggggccaa

SEQ ID NO: 130405 - DNA, 80 bp, synthetic construct
  source 1..80: mol_type = other DNA
tgcctcaacaggcacacgctttggatgtggcagagcaaggccagattggattggtgctgcttgcagttatctctgccttt

SEQ ID NO: 130406 - DNA, 80 bp, synthetic construct
  source 1..80: mol_type = other DNA
cactgggctcagcctggttatccctggcccctttatggtaacgagggctgcgggtgtgcagggtggctcttgtctccccg

SEQ ID NO: 130407 - DNA, 80 bp, synthetic construct
  source 1..80: mol_type = other DNA
gagtggtcggccgccaccatcctcaagcaggccatcgccggggaccgcagcctggtcgaggcggccgaggcgattagcca

SEQ ID NO: 130408 - DNA, 80 bp, synthetic construct
  source 1..80: mol_type = other DNA
atgtaaacccttttaaccatcaccgaaacgcagggttgcgctacagatccatgttgctaggcaatgggagatttgttcct

SEQ ID NO: 130409 - DNA, 80 bp, synthetic construct
  source 1..80: mol_type = other DNA
gcctcccaagtagtcatcgtgtcaccgcagcaccatacattcacccaggactgcaactgctccatctacccaggtcatgt

SEQ ID NO: 130410 - DNA, 80 bp, synthetic construct
  source 1..80: mol_type = other DNA
attttttgggcacctttgacaaacgttttccgggttttgtgtctcgcgaccgcttatcatgcgctattgttaacactgcc

SEQ ID NO: 130411 - DNA, 80 bp, synthetic construct
  source 1..80: mol_type = other DNA
ggtgaagggtcgcctactctcgttcgaggaagcgtgttcccttgtccctccccactctgcccggtcaaagtacgggtata

SEQ ID NO: 130412 - DNA, 80 bp, synthetic construct
  source 1..80: mol_type = other DNA
aggcatggtgggccagcaggcgtctgggcttaccgggctcttcagtccaggggctaagcagaacatccagctcgttaata

SEQ ID NO: 130413 - DNA, 80 bp, synthetic construct
  source 1..80: mol_type = other DNA
accctcgaggtcgccgccggtattacctgactagagacccatgcactccactcgccagggcagcctgggagactgcaaaa

SEQ ID NO: 130414 - DNA, 80 bp, synthetic construct
  source 1..80: mol_type = other DNA
agattaccaaacacctacttgccctgctgggtcctctttacatactccaggcctccctcctgcaggtcccttacttcgta

SEQ ID NO: 130415 - DNA, 80 bp, synthetic construct
  source 1..80: mol_type = other DNA
gtactacgtacgggcgcatgctttgttgcgggcttgcttgctcgtacggcgcttctgcgccggtaagtatgtgcaggctg

SEQ ID NO: 130416 - DNA, 80 bp, synthetic construct
  source 1..80: mol_type = other DNA
gactgtatggttcgtagcgagtgtaaaaatgggaaatgagattgcgcaatgcttgcagcgcgcaggaaagagagtgatcc

SEQ ID NO: 130417 - DNA, 80 bp, synthetic construct
  source 1..80: mol_type = other DNA
atgcccccgaggctttcctgacggtggctgagatgatggttctgggtttggcgaccctgggtgtcgtctggtgtttcgtc

SEQ ID NO: 130418 - DNA, 80 bp, synthetic construct
  source 1..80: mol_type = other DNA
cacaaactgggcaagtgtggaagctgtgtttacaacatgatgggcaagagagagaagaaacttggagagtttggcaaagc

SEQ ID NO: 130419 - DNA, 80 bp, synthetic construct
  source 1..80: mol_type = other DNA
ttacatcaaaggtggtagacacctgattttttgccattcaaagaagaagtgcgatgagctcgcagcggcccttcggggca

SEQ ID NO: 130420 - DNA, 80 bp, synthetic construct
  source 1..80: mol_type = other DNA
tttacctgtgggcgtgcctggccgccccagcccctcccacgcccaccggctacgtcacgctcctgtcggccgccggcggt

SEQ ID NO: 130421 - DNA, 80 bp, synthetic construct
  source 1..80: mol_type = other DNA
cagaatgatggcaaatgccatttgttcagctgtcccagtcaactgggtcccaactggacgtaccacatggtcaattcatg

SEQ ID NO: 130422 - DNA, 80 bp, synthetic construct
  source 1..80: mol_type = other DNA
atgcagatgtgatcccggctaggagacgaggagaccgacgcggagctctgctctctccgaggcctctttcaaccttgaag

SEQ ID NO: 130423 - DNA, 80 bp, synthetic construct
  source 1..80: mol_type = other DNA
agttatgatgacggtaaatgctactgacgtcacagatgtcatcacgattccaacagctgctggaaagaatctatgcattg

SEQ ID NO: 130424 - DNA, 80 bp, synthetic construct
  source 1..80: mol_type = other DNA
acctacgactggggagtgaatgagactaacgtctttatactaaactccaccaggcctcccagtggtgggtggtttgggtg

SEQ ID NO: 130425 - DNA, 80 bp, synthetic construct
  source 1..80: mol_type = other DNA
gcatggccaaaacttgaacaattctggcagaagcacctatggaattttgtcagtggcatccagtacctggctggcttgtc

SEQ ID NO: 130426 - DNA, 80 bp, synthetic construct
  source 1..80: mol_type = other DNA
ctcttgcttgacggtcccagcgtctgcctacgaggtgcgcaacgtctcggggatctaccacgtcaccaacgactgcccga

SEQ ID NO: 130427 - DNA, 80 bp, synthetic construct
  source 1..80: mol_type = other DNA
gcggctctcgccctacgtggggtccaaatgacccccggcgcagatcccgcaatttgggtaaggtcatcgataccctcaca

SEQ ID NO: 130428 - DNA, 80 bp, synthetic construct
  source 1..80: mol_type = other DNA
gagccagaaaagcaaagatctccccaggacaaccaaatggcaatcatcatcatggtagcagtaggtcttctgggcttgat

SEQ ID NO: 130429 - DNA, 80 bp, synthetic construct
  source 1..80: mol_type = other DNA
tttacagacgctatgatcagatactcagctcccccaggagatgcgccacagcccacatacgaccttgagctgataacatc

SEQ ID NO: 130430 - DNA, 80 bp, synthetic construct
  source 1..80: mol_type = other DNA
gttccaaatgcttccgtgccggtaagggggttccgtacccatgtggatctcctggttggttcagcagcgctttgttcagc

SEQ ID NO: 130431 - DNA, 80 bp, synthetic construct
  source 1..80: mol_type = other DNA
cccgcgcccgcccccgcgcggcaggacggggactagcaggctcactcactcggctaccccgcgcccgcccgccccaaaga

SEQ ID NO: 130432 - DNA, 80 bp, synthetic construct
  source 1..80: mol_type = other DNA
ggcattggaacctggaaaaaatccaagagccgtccaaacgaaacctggaatttttaaaaccaacaccggaaccataggcg

SEQ ID NO: 130433 - DNA, 80 bp, synthetic construct
  source 1..80: mol_type = other DNA
gcgcaggggccccaggttgggtgtgcgcgcgacgaggaagacttccgagcggtcgcaacctcgaggtagacgtcagccta

SEQ ID NO: 130434 - DNA, 80 bp, synthetic construct
  source 1..80: mol_type = other DNA
tcccgcggcgccgccccctccggcgccgccccgctcccctccgccgtctctgtcgagcaggaggcggcggtgcgtccgag

SEQ ID NO: 130435 - DNA, 80 bp, synthetic construct
  source 1..80: mol_type = other DNA
tgatagggttgagatgagcccgctcctcttctccacgactgagctagcgattctcccctgctcgttcacgacgatgccag

SEQ ID NO: 130436 - DNA, 80 bp, synthetic construct
  source 1..80: mol_type = other DNA
tgcgggagggaccgtcgaggggttcgcatcggaactactggtgcggatagtcgcgtgcatcgaaacccactttcccgaac

SEQ ID NO: 130437 - DNA, 80 bp, synthetic construct
  source 1..80: mol_type = other DNA
gaatgtctgtggccctgtctattgcttcaccccaagtccggttgtggtggggaccactgatcggaaggggaacccaacgt

SEQ ID NO: 130438 - DNA, 80 bp, synthetic construct
  source 1..80: mol_type = other DNA
cgtacatctaagcggttccccaagcctctgccagtgtgggcccgcccggattacaacccaccgttgctggaggtgtggaa

SEQ ID NO: 130439 - DNA, 80 bp, synthetic construct
  source 1..80: mol_type = other DNA
cctgaccatccaatggataaaaatcccactatgaatctactaactggggttccaaatagtatgttacaaagtccgcaggt

SEQ ID NO: 130440 - DNA, 80 bp, synthetic construct
  source 1..80: mol_type = other DNA
ccaagacccatccttccttgtctgcggggacgatttggtcatagtagctgagagctgcggcgttgaggaggatagagcgg

SEQ ID NO: 130441 - DNA, 80 bp, synthetic construct
  source 1..80: mol_type = other DNA
ccataaataacacttccttgggcatgccacaatttacaatttctcgataccaagggaatcttaagttatacagtgaacca

SEQ ID NO: 130442 - DNA, 80 bp, synthetic construct
  source 1..80: mol_type = other DNA
tgccccatctctgaaagccacctgcaccactcacgccgaccacccggacatggaacttctggaggccaacctcttatgga

SEQ ID NO: 130443 - DNA, 80 bp, synthetic construct
  source 1..80: mol_type = other DNA
gagggctgttgaggacggaatcaattatgcaacagggaatctcccgggttgctccttttctatcttcctcttggctttac

SEQ ID NO: 130444 - DNA, 80 bp, synthetic construct
  source 1..80: mol_type = other DNA
agagtacaaaagaagtggaatactagaagtggataggactgaagccaagtctgccttaagagatggatctaaaatcaagc

SEQ ID NO: 130445 - DNA, 80 bp, synthetic construct
  source 1..80: mol_type = other DNA
catcacgtactccacctacggcaagttccttgctgacggcggctgttcgggcggcgcgtatgacataatcatatgtgatg

SEQ ID NO: 130446 - DNA, 80 bp, synthetic construct
  source 1..80: mol_type = other DNA
tgacttcgtgcccgtagagaacatggagacctcgatgagatcaccggtcttcactgacaactcctctcctcccgcagtgc

SEQ ID NO: 130447 - DNA, 80 bp, synthetic construct
  source 1..80: mol_type = other DNA
ggagacacagggcccgagcagtcagagctaaattaatcgcccagggagggaaagccgctatttgcggcaagtacctcttt

SEQ ID NO: 130448 - DNA, 80 bp, synthetic construct
  source 1..80: mol_type = other DNA
cgggccgccctgcgacacaatcacccgtccgtggtttcgaatctacacgacaggcccgcagacgcggctaacacacacgc

SEQ ID NO: 130449 - DNA, 80 bp, synthetic construct
  source 1..80: mol_type = other DNA
atcttgcatctacgaacgcaacctgttctccccacgtgtgccccctaaacggcaagccaacggcacatgcgagccaaatc

SEQ ID NO: 130450 - DNA, 80 bp, synthetic construct
  source 1..80: mol_type = other DNA
aacagacagaggctacctcaagtgccttcagcagcactgcaaatttaacttcgcttgcttcgactaatgaaaccggagta

SEQ ID NO: 130451 - DNA, 80 bp, synthetic construct
  source 1..80: mol_type = other DNA
actccacaggatgtcccgagcgccttagcgcctgcaagtccatcacacaattcgcccaggggtggggacctgtcacctat

SEQ ID NO: 130452 - DNA, 80 bp, synthetic construct
  source 1..80: mol_type = other DNA
ccgggttgatacacctgcatcaaaacgtggtggacgtccagtacctatatgggataacaccggctgttgtatccctggtc

SEQ ID NO: 130453 - DNA, 80 bp, synthetic construct
  source 1..80: mol_type = other DNA
tagacatatatcgcattttactgctcatggtaggagtgggaagcttggtcaaggaaaggcggagtgcagtggcaaaaaag

SEQ ID NO: 130454 - DNA, 80 bp, synthetic construct
  source 1..80: mol_type = other DNA
actgcaatgctagccttgacaccggctggctagcagggcttttctattacaacagattcaactcctcaggctgtcccgag

SEQ ID NO: 130455 - DNA, 80 bp, synthetic construct
  source 1..80: mol_type = other DNA
ggaggaagtggtgaaccccgaaacaattactacgtccaaacatacctcaggggaaatgttcagagaccgattaccctcac

SEQ ID NO: 130456 - DNA, 80 bp, synthetic construct
  source 1..80: mol_type = other DNA
cacgctaccaggcaacccggcggtagcttcactgatgtcattctcagcctccttgactagcccactgtcaacatctacaa

SEQ ID NO: 130457 - DNA, 80 bp, synthetic construct
  source 1..80: mol_type = other DNA
agatagatccgaacccatatctcgccgtcatggtgtctgcagcaaacaaagtcaactggcgtgaatataaaccggtactg

SEQ ID NO: 130458 - DNA, 80 bp, synthetic construct
  source 1..80: mol_type = other DNA
cgcgaggaaactttaaccgccccgtcccccgtcagcgacgaagatgtcatcgtcgaacaggacccgggctacgttacgcc

SEQ ID NO: 130459 - DNA, 80 bp, synthetic construct
  source 1..80: mol_type = other DNA
ttgggagacggccaggcactctccagtaaactcatggttgggtaacattatcatgtacgcgcccaccatatgggtgcgca

SEQ ID NO: 130460 - DNA, 80 bp, synthetic construct
  source 1..80: mol_type = other DNA
atgtttcctaactggatgctgtccgaggaccacagtgctgacagcggtgcggcttcgggcgattctggggttggagaaga

SEQ ID NO: 130461 - DNA, 80 bp, synthetic construct
  source 1..80: mol_type = other DNA
gtatgaggagaatgttaccaacgacgaggacatgaggccctattgttggcattacccacccagaccgtgtggcattgttc

SEQ ID NO: 130462 - DNA, 80 bp, synthetic construct
  source 1..80: mol_type = other DNA
gatcatcccggcggtgaggcgcaacagggcgtctcgacacccgacgggcgactgatcgtaatccaggacaaatagatgca

SEQ ID NO: 130463 - DNA, 80 bp, synthetic construct
  source 1..80: mol_type = other DNA
cctttttcgatatgggcgcagatctaaagtggcagccaagcgcccgcgccctggaggcggctggccaggataatgatgat

SEQ ID NO: 130464 - DNA, 80 bp, synthetic construct
  source 1..80: mol_type = other DNA
tactcctactaaccgtaggggtaggcatcttcctgcttcctgctcggtagacaggaagccttagcaacactccatattac

SEQ ID NO: 130465 - DNA, 80 bp, synthetic construct
  source 1..80: mol_type = other DNA
gaatcttcccggttgctccttttctatcttccttctggcacttctctcctgcctcactgtgccaactacggccatcaact

SEQ ID NO: 130466 - DNA, 80 bp, synthetic construct
  source 1..80: mol_type = other DNA
catgtcagagtagatgtagagcctcctagaccccgtgctacttgggctcctcctcaggacataactattaagtatggttc

SEQ ID NO: 130467 - DNA, 80 bp, synthetic construct
  source 1..80: mol_type = other DNA
cggtcctgtgtactgtttcacaccatcaccagtggtcgtgggcactactgatgctaagggcgccccgacctacaactggg

SEQ ID NO: 130468 - DNA, 80 bp, synthetic construct
  source 1..80: mol_type = other DNA
tagtcctgggtgcggcatgtctgcttgagctcctgcgtcgtacgtgccgcgggtggtggcgttaccatccctacatggac

SEQ ID NO: 130469 - DNA, 80 bp, synthetic construct
  source 1..80: mol_type = other DNA
tagacccatcatcgtcgctatcgtcttcaccaccatcatcagatacgtcacattccagtgcgctcctatgcaaaggaaca

SEQ ID NO: 130470 - DNA, 80 bp, synthetic construct
  source 1..80: mol_type = other DNA
gtgcgtgcttatgcgcggcgcgtttcttctgtctctagggaatccgaggccaggactttaacctgctctttgtcgacgag

SEQ ID NO: 130471 - DNA, 80 bp, synthetic construct
  source 1..80: mol_type = other DNA
ttctggagcaggtgtaaccagctgggccgaaagcaagttacgcaatagctgcgatttaccgcaaccagtaggtccgtaaa

SEQ ID NO: 130472 - DNA, 80 bp, synthetic construct
  source 1..80: mol_type = other DNA
gcaagcaccgtgtgtggtccggtttactgcttcacccctagtccagtcgttgtgggcactaccgacaggcgcggagtgcc

SEQ ID NO: 130473 - DNA, 80 bp, synthetic construct
  source 1..80: mol_type = other DNA
acggtaaggcgatccctctggcaaccatcaagggggggaggcacctcatattttgtcattcaaagaaaaagtgtgacgag

SEQ ID NO: 130474 - DNA, 80 bp, synthetic construct
  source 1..80: mol_type = other DNA
ctttcaccaacctggccgtccagctggtgaggatgatggaaggggaaggagtgattggcccagatgatgtggagaaactc

SEQ ID NO: 130475 - DNA, 80 bp, synthetic construct
  source 1..80: mol_type = other DNA
ttagagtgtgatccagccgtcattggaacagccgctaagggaaaggaggctgtgcacagtgatctaggctactggattga

SEQ ID NO: 130476 - DNA, 80 bp, synthetic construct
  source 1..80: mol_type = other DNA
gtctgcggaccggtttattgcttcacaccaagccccgtggtattgggcactactgatatgaagggtaatccgacctacca

SEQ ID NO: 130477 - DNA, 80 bp, synthetic construct
  source 1..80: mol_type = other DNA
gaactgcaaaagctacccccccattgtattgctgggacatctaccttatctcgagtagtaaaggatcttcataaactcgt

SEQ ID NO: 130478 - DNA, 80 bp, synthetic construct
  source 1..80: mol_type = other DNA
ccttcaaagacctaggaagagtggtggttatggtaggcgcaacaatggcggatgacataggtatgggcgtgacttatctt

SEQ ID NO: 130479 - DNA, 80 bp, synthetic construct
  source 1..80: mol_type = other DNA
ctgggtggacggggttcagatccatcggtttgcccccacgccaaagccgtttttcagagatgaggtttcgttcagcgtgg

SEQ ID NO: 130480 - DNA, 80 bp, synthetic construct
  source 1..80: mol_type = other DNA
gaatgacaaatgctaggcgggttttggcaaaaatggtaccaccaatccctccttttctgggagccaaccaccacgcaact

SEQ ID NO: 130481 - DNA, 80 bp, synthetic construct
  source 1..80: mol_type = other DNA
acccaggtagagcttactcgtagcctaattcgggagtttaccctgcgccccctgctagtggagcgggagagaggtccctg

SEQ ID NO: 130482 - DNA, 80 bp, synthetic construct
  source 1..80: mol_type = other DNA
aagttggaactggattttgatttgtgtgaaggtaccacagttgttgtggatgaacactgtggaaatcggggtccatctct

SEQ ID NO: 130483 - DNA, 80 bp, synthetic construct
  source 1..80: mol_type = other DNA
taccatggggccggaacaaggacccttgcgtcaccaaagggtcccgttatccagatgtatactaacgtggacctagacct

SEQ ID NO: 130484 - DNA, 80 bp, synthetic construct
  source 1..80: mol_type = other DNA
gcagagcgatccctcttgacttggttaaagggggcagacaccttatcttttgtcattcaaagaagaaatgtgacgagttg

SEQ ID NO: 130485 - DNA, 80 bp, synthetic construct
  source 1..80: mol_type = other DNA
ctcgagcagctaaataacctcaccgaaaccgtctcccccaacactgacgtccgtacgtattccggaaaacggaacggcgc

SEQ ID NO: 130486 - DNA, 80 bp, synthetic construct
  source 1..80: mol_type = other DNA
acacctggggcgagaatgtgtccgatgtcttcttgctgacaagcttgcgtcccccaaaaggagcatggttcggatgtact

SEQ ID NO: 130487 - DNA, 80 bp, synthetic construct
  source 1..80: mol_type = other DNA
tgggctaaggtagcgctggtcttgttcttgtttgccggggtcgatgccgagacccaggttgtggccggtgccgctgctcg

SEQ ID NO: 130488 - DNA, 80 bp, synthetic construct
  source 1..80: mol_type = other DNA
ttatcaacgacatacattagagtgtttaacaaccataaaactccctcatataaaaaccgacgcattttttccaaaggtcc

SEQ ID NO: 130489 - DNA, 80 bp, synthetic construct
  source 1..80: mol_type = other DNA
tctgggatgttcgactctgtcgttctctgcgaggcgtatgatacaggctgcgcgtggtatgagttgacaccatcagagac

SEQ ID NO: 130490 - DNA, 80 bp, synthetic construct
  source 1..80: mol_type = other DNA
aggatcgcgaccgcagcgagcaacacccgctgctgcattcaacgaccgagctcgctatactgccttgctccttcacgccc

SEQ ID NO: 130491 - DNA, 80 bp, synthetic construct
  source 1..80: mol_type = other DNA
gaatttaacccagacatggtcatgtatgctgagaatatgaatctggagacgccagatacacatgtggtgtacaaacctgg

SEQ ID NO: 130492 - DNA, 80 bp, synthetic construct
  source 1..80: mol_type = other DNA
cgtgtgtcccaaatgcagtgatactgcgaaacgcatggaaggtgagttgcacgatattggcagtggtgtccgtttctcca

SEQ ID NO: 130493 - DNA, 80 bp, synthetic construct
  source 1..80: mol_type = other DNA
ccacccttcaatctggggcctgaactggagatcagctgtggatctccagaagagggactagtggttagaggagacccccc

SEQ ID NO: 130494 - DNA, 80 bp, synthetic construct
  source 1..80: mol_type = other DNA
cgggtccatgaggatggtggggtcgagcctatgcgctaacatgtggcacggcacctttcctataaatgaatacaccacag

SEQ ID NO: 130495 - DNA, 80 bp, synthetic construct
  source 1..80: mol_type = other DNA
aatgttggcaattgtcattatcaccatatttactcttactccagcatacaagaccctcctcataagcacgctctggtgga

SEQ ID NO: 130496 - DNA, 80 bp, synthetic construct
  source 1..80: mol_type = other DNA
aacttggggtcccgcccttgcgagcttggagacaccgggcccggagcgtccgcgctaagcttctgtccagaggaggcagg

SEQ ID NO: 130497 - DNA, 80 bp, synthetic construct
  source 1..80: mol_type = other DNA
ctctcggctccatcactgaaggccacatgcaccacacatggccgacatcctgatgcggagctgattgaagcgaacctgct

SEQ ID NO: 130498 - DNA, 80 bp, synthetic construct
  source 1..80: mol_type = other DNA
atcaccgccccacccggtggactcctggtgtacgacagcgcccccaacctaacggacccccacgtgctctgggcggagtg

SEQ ID NO: 130499 - DNA, 80 bp, synthetic construct
  source 1..80: mol_type = other DNA
acgggtggctcggcgaccgggtcgttcgcatccggaagcggaggccccgcgccgtccgcgcggcgcctccggaacctccg

SEQ ID NO: 130500 - DNA, 80 bp, synthetic construct
  source 1..80: mol_type = other DNA
tctagaagccttcgcacagggctggggcgagcttggggtcgctaacgtcagtggaccgtctgaggacaggccttactgct

SEQ ID NO: 130501 - DNA, 80 bp, synthetic construct
  source 1..80: mol_type = other DNA
ccttggcataggcacggtcctggatcaagcggaaaccgctggagtgcgcctcgccgtgctcgcgaccgctaccccaccag

SEQ ID NO: 130502 - DNA, 80 bp, synthetic construct
  source 1..80: mol_type = other DNA
gtccggttgtatgtgggcgggatcgagcatcggtttgatgccgcgtgcaattggactcgtggagagcgctgcgagctgga

SEQ ID NO: 130503 - DNA, 80 bp, synthetic construct
  source 1..80: mol_type = other DNA
tccgacgacggtgacgcaggatccgacgttgagtcgtactcctccatgcccccccttgagggagagccggaggatcccga

SEQ ID NO: 130504 - DNA, 80 bp, synthetic construct
  source 1..80: mol_type = other DNA
acccatgtcacgaacgactgctccaactcaagcattgtgtatgaggcagcggacgtgatcatgacactccgccatgaatc

SEQ ID NO: 130505 - DNA, 80 bp, synthetic construct
  source 1..80: mol_type = other DNA
aaccagggacccccaacagttgcaagagaggcgcaagatgatgatggcggccgtgctggtcaccgtggagctggaatgcc

SEQ ID NO: 130506 - DNA, 80 bp, synthetic construct
  source 1..80: mol_type = other DNA
aggggggtcgtaagccagctcgtctcatcgtgtaccccgacttgagcgtgcgcgtgtgcgagaagatggctctgtacgac

SEQ ID NO: 130507 - DNA, 80 bp, synthetic construct
  source 1..80: mol_type = other DNA
aggaggtgaaggagcgagcgtctggggtgaaagggcgtctactcacttttgaggaggcatgtgccctagtccctccccac

SEQ ID NO: 130508 - DNA, 80 bp, synthetic construct
  source 1..80: mol_type = other DNA
cctccaacgtatccgtggcccacgaccacactggacagagatattactacctcacacgtgacccgactaccgtcttggca

SEQ ID NO: 130509 - DNA, 80 bp, synthetic construct
  source 1..80: mol_type = other DNA
ccagcgtcgacataacctcgtccagaacgaggacgtcgtagttgttcagaaggttggggcccacgcgatgaaggctttcc

SEQ ID NO: 130510 - DNA, 80 bp, synthetic construct
  source 1..80: mol_type = other DNA
catattacttatgtgcgccttccacccacgcttgatgtttgacatcactaagctcttactggccatcattggaccggtgt

SEQ ID NO: 130511 - DNA, 80 bp, synthetic construct
  source 1..80: mol_type = other DNA
tcatctctacagcccatactgcaccggcggcagcagcagcaacagcagcggccacacagaagcaaaggcgaccggatagc

SEQ ID NO: 130512 - DNA, 80 bp, synthetic construct
  source 1..80: mol_type = other DNA
tgacaaaaccttgggacgttgtccctatggtgacacagatggcaatgacagacacgactccatttggacaacaacgcgtt

SEQ ID NO: 130513 - DNA, 80 bp, synthetic construct
  source 1..80: mol_type = other DNA
catcaaccgcaccgcactgaactgcaacgactccttacagacggggttcattgctgggttgttctactaccggaggttca

SEQ ID NO: 130514 - DNA, 80 bp, synthetic construct
  source 1..80: mol_type = other DNA
tagctgatggaggatgcggggggggagcatacgacataatcatctgtgacgaatgccactccactgattccactacgatc

SEQ ID NO: 130515 - DNA, 80 bp, synthetic construct
  source 1..80: mol_type = other DNA
acaggcggctgacggtcaaatgcccccggtggcgcgcagatgtggtgggcgtggccaccggctgccgtgtagtggtgcgg

SEQ ID NO: 130516 - DNA, 80 bp, synthetic construct
  source 1..80: mol_type = other DNA
cagggccagcggggtccttcctaccagcatgggcaataccctgacttgctatatcaaggccgtggccgcctgtagggcag

SEQ ID NO: 130517 - DNA, 80 bp, synthetic construct
  source 1..80: mol_type = other DNA
tggccagaggatagagaatataaaaaatgaacacaaatcaacatggcattatgatgaggacaatccatacaaaacatggg

SEQ ID NO: 130518 - DNA, 80 bp, synthetic construct
  source 1..80: mol_type = other DNA
ctattgcaggcgggaagtatgctcaagcagcacttttgaagctgggagcctggactgggacatacatatacgaccactta

SEQ ID NO: 130519 - DNA, 80 bp, synthetic construct
  source 1..80: mol_type = other DNA
ctgctcgacttattgtgttccccgaccttggagtgagggtatgcgagaagcgagcactttacgacatcacgcgcaagctt

SEQ ID NO: 130520 - DNA, 80 bp, synthetic construct
  source 1..80: mol_type = other DNA
ggtcgtgtgtgccaccgacgcccttatgactggctacacgggtaactttgactccgtgatagactgcaatgtctccgtca

SEQ ID NO: 130521 - DNA, 80 bp, synthetic construct
  source 1..80: mol_type = other DNA
agtccaccgtctcagacgccttggcggacttggcggcaaagtcctttggccgcccggagtcagaacctgattccggggca

SEQ ID NO: 130522 - DNA, 80 bp, synthetic construct
  source 1..80: mol_type = other DNA
cctcgtcggctggcaggccccgcaaggggcccgctccctggttccatgcacctgcggtgcttctgacatgtacttggtca

SEQ ID NO: 130523 - DNA, 80 bp, synthetic construct
  source 1..80: mol_type = other DNA
atcccagagcccaactacaagagggctctttggcgggtgtccgcggaggaatatgtcgaagtggcgagggtgtgcgacag

SEQ ID NO: 130524 - DNA, 80 bp, synthetic construct
  source 1..80: mol_type = other DNA
acctgcgactctggggtctgccatatcctgaagaacatccatgtgacctcccaccctaggaagaggtggccatcatttga

SEQ ID NO: 130525 - DNA, 80 bp, synthetic construct
  source 1..80: mol_type = other DNA
aaagcaagcgggggacaacttcgcgtacttggcggcctaccaagccaccgtgtgcgccagggcaaaagcccctcccccgt

SEQ ID NO: 130526 - DNA, 80 bp, synthetic construct
  source 1..80: mol_type = other DNA
gcccccacacaagggtcagcgtcctctctaataaacggggttgtcaggctcctgtcaaaaccctgggatgtggtgactgg

SEQ ID NO: 130527 - DNA, 80 bp, synthetic construct
  source 1..80: mol_type = other DNA
cctagccctgtagtggttgggaccactgacagaaaggggcttcccacttacacttggggagaaaatgagagcgacgtctt

SEQ ID NO: 130528 - DNA, 80 bp, synthetic construct
  source 1..80: mol_type = other DNA
gaaagtcaggggtccgaagaggatgagcgaaatctgagagtcttcacggaggctatgaccagatattctgcccctcccgg

SEQ ID NO: 130529 - DNA, 80 bp, synthetic construct
  source 1..80: mol_type = other DNA
ccatcttcgtcccttagcaaagattattggaattacagaagtgatgattctattgtatctcaaaaatataataatgcagt

SEQ ID NO: 130530 - DNA, 80 bp, synthetic construct
  source 1..80: mol_type = other DNA
tctcccgtagtcaacgcagagggagaactggaagggggcgactgggcatttacaggtatgtttcatcaggtgagaggccg

SEQ ID NO: 130531 - DNA, 80 bp, synthetic construct
  source 1..80: mol_type = other DNA
gaagaactggctcaacggggtgatccggaagctaggcggtccgcgactcgcgtaatggatgtctgtagcaatgcgagttc

SEQ ID NO: 130532 - DNA, 80 bp, synthetic construct
  source 1..80: mol_type = other DNA
tttttcccgcgcccgcccccgcgcggcaggacggggactagcaggctagcaggctgtgccacagcaggccccctcctcac

SEQ ID NO: 130533 - DNA, 80 bp, synthetic construct
  source 1..80: mol_type = other DNA
tcccactatgcgggagggacaagcctaccccgccaactatccctaccctcttataggaaaaacagctgtacagagcgtca

SEQ ID NO: 130534 - DNA, 80 bp, synthetic construct
  source 1..80: mol_type = other DNA
cgggcaatcagcggctggtggacctcgaactgtacgcgcccctcgttcatgtaggccagctccggaaacttggtacacac

SEQ ID NO: 130535 - DNA, 80 bp, synthetic construct
  source 1..80: mol_type = other DNA
cgggggcggcgacaagtcgtccgcgtacggcattacttacgttcttcacccccgggtcgcgtcagaaccttcagctcata

SEQ ID NO: 130536 - DNA, 80 bp, synthetic construct
  source 1..80: mol_type = other DNA
cttcgtcaacagggcgctgagggcggcgacgttcgtcgggccgtcgttggccagcgcgttggtccggtggcgcgcgggca

SEQ ID NO: 130537 - DNA, 80 bp, synthetic construct
  source 1..80: mol_type = other DNA
aggctttcatctcggagggggggatcatgtcaacctgcggggcgaagaaaaaaatgattttcggggggggggtgatgagc

SEQ ID NO: 130538 - DNA, 80 bp, synthetic construct
  source 1..80: mol_type = other DNA
aggggaataaaaagagaaatggaagatctgcagcctaccatccagctcatggttcctaaacggcagaggctggaagaggt

SEQ ID NO: 130539 - DNA, 80 bp, synthetic construct
  source 1..80: mol_type = other DNA
aggccacgctcggctttaccgcaatgttcaggcggggttctcagcagaacgtacagctcactaacaccaacgggagctgg

SEQ ID NO: 130540 - DNA, 80 bp, synthetic construct
  source 1..80: mol_type = other DNA
tagatcaaaatctaaattttgagatgtacggggcagtatactcagtcagtcctttggacttgccagccataattgagagg

SEQ ID NO: 130541 - DNA, 80 bp, synthetic construct
  source 1..80: mol_type = other DNA
gtggatgtgatgtgtcacgccacgcttacacagaagctgttgacaccaactcgggttcccaactaccaagtgtacatcat

SEQ ID NO: 130542 - DNA, 80 bp, synthetic construct
  source 1..80: mol_type = other DNA
ggggaagcgccttcggtacgccagcaacaaccccaacgtgtcgggactgacgcctccggagacgaaggattcgtgcgcca

SEQ ID NO: 130543 - DNA, 80 bp, synthetic construct
  source 1..80: mol_type = other DNA
taactcttacattcataaacagaacacatcatggaacatactatggttttggctatgacaatcaaaattcaaaagtgtat

SEQ ID NO: 130544 - DNA, 80 bp, synthetic construct
  source 1..80: mol_type = other DNA
gcccagaaggcatattgggttaacccctttttatttgtggcgggttttttggaggacttgagttaccccgcgtttcctgc

SEQ ID NO: 130545 - DNA, 80 bp, synthetic construct
  source 1..80: mol_type = other DNA
caacagctcaggatgtccgcagaggctcgcctcgtgcaagcgcttggaggacttcccgcagggctggggccggcttggcg

SEQ ID NO: 130546 - DNA, 80 bp, synthetic construct
  source 1..80: mol_type = other DNA
ccgttgggtagcgaaagggcgctaacaatgcatcttattaattgcggtgtaggggacgtaagcacttcaagatcgaccgg

SEQ ID NO: 130547 - DNA, 80 bp, synthetic construct
  source 1..80: mol_type = other DNA
tgtgagcgggatagccggtgctgccgttggtagcatcggcctggggaaagtcatcgtggatgtccttgctggctatggtg

SEQ ID NO: 130548 - DNA, 80 bp, synthetic construct
  source 1..80: mol_type = other DNA
cttcacgactgccatctggagggtagcggcgtcagaatacgctgagataacacagcacggctcgcacgcgtatgtgacag

SEQ ID NO: 130549 - DNA, 80 bp, synthetic construct
  source 1..80: mol_type = other DNA
ggtgacgcacagctcctcgaaacagaccgcgcacgggtgggacgggtcgctcagctccggtggcacgatgaggcccgacc

SEQ ID NO: 130550 - DNA, 80 bp, synthetic construct
  source 1..80: mol_type = other DNA
tcggtgacggtccctcatccaaacatcacagaagtcgccctacctacaacgggggaaatccctttctatgggaaggtgat

SEQ ID NO: 130551 - DNA, 80 bp, synthetic construct
  source 1..80: mol_type = other DNA
aacgcagtagatcttagtgtggtggtggacaaaccagtgggaagataccgaccagcgccactgcggctatccatgaccca

SEQ ID NO: 130552 - DNA, 80 bp, synthetic construct
  source 1..80: mol_type = other DNA
tactgccccaccgattgtttcaggaagcatccggagaccacttacgccaagtgcgggtcggggccttggatcacaccacg

SEQ ID NO: 130553 - DNA, 80 bp, synthetic construct
  source 1..80: mol_type = other DNA
atggttcgttgagagaaacatggtcacaccagaagggaaagtagtggacctcggttgtggcagaggaggctggtcatact

SEQ ID NO: 130554 - DNA, 80 bp, synthetic construct
  source 1..80: mol_type = other DNA
cccggccgtaccgcagacattccaaataggccatctacacgcccctactggcagcgggaaaagcactaaggtgccagctg

SEQ ID NO: 130555 - DNA, 80 bp, synthetic construct
  source 1..80: mol_type = other DNA
caggaccatctcgccgtacgtcaccggcacgtcggcttcggtgtcctccactttcaggaaggactgcaggaggcgctgtt

SEQ ID NO: 130556 - DNA, 80 bp, synthetic construct
  source 1..80: mol_type = other DNA
gcgttgtcgggctgcatgaactgctccgcggtcatctggcactcggcgacccaccggacccggccgtgggcgaggcgctg

SEQ ID NO: 130557 - DNA, 80 bp, synthetic construct
  source 1..80: mol_type = other DNA
acgacaacctgcggtccatgggaatcggcatgcagggcctgcacacggcctgcctgaagctggggctggatctggagtct

SEQ ID NO: 130558 - DNA, 80 bp, synthetic construct
  source 1..80: mol_type = other DNA
gcataggatggcgtgggacatgatgatgaattggtcccccacagtggccctgatcacatccagcattttgagggtcccca

SEQ ID NO: 130559 - DNA, 80 bp, synthetic construct
  source 1..80: mol_type = other DNA
acgagtctgacgtcttcttgatggccagcatgcggccaccagctggcgggtggtatgggtgtacgtggatgaatgctacg

SEQ ID NO: 130560 - DNA, 80 bp, synthetic construct
  source 1..80: mol_type = other DNA
tagtcgttctggattccctcgactcaatggccgaggaaaagagcgacctcgagccttcgataccatcggagtacatgctc

SEQ ID NO: 130561 - DNA, 80 bp, synthetic construct
  source 1..80: mol_type = other DNA
aagacttgctggaggacactgttacaccaattcctactaccattatggcgaagaacgaggtgtttagcgtgaaccctgcc

SEQ ID NO: 130562 - DNA, 80 bp, synthetic construct
  source 1..80: mol_type = other DNA
ttaataaactccccgggcagctcacttaagttcatgtcgctgtccagctgctgagccacaggctgctgtccaacttgcgg

SEQ ID NO: 130563 - DNA, 80 bp, synthetic construct
  source 1..80: mol_type = other DNA
gaggacggtgatgctgaccgactccaacgtttctgctgccctggcggagctcgccacgaggactttcggcagctcggaca

SEQ ID NO: 130564 - DNA, 80 bp, synthetic construct
  source 1..80: mol_type = other DNA
acactttttcatacattgcccaagaataaagaatcgttgtgttatgtttcaacgtgtttatttttcaattgcagaaaatt

SEQ ID NO: 130565 - DNA, 80 bp, synthetic construct
  source 1..80: mol_type = other DNA
cgctacagatcagggccaaattggtatttcattgctgataattatatctctctttacgcttaccccagcgtataagaccc

SEQ ID NO: 130566 - DNA, 80 bp, synthetic construct
  source 1..80: mol_type = other DNA
ctcgggcgtctatcacatcaccaatgattgccctaactctagtataatctatgaggctgaccatcacatactacatcttc

SEQ ID NO: 130567 - DNA, 80 bp, synthetic construct
  source 1..80: mol_type = other DNA
gcctggccacgggctgcacggcagtggtcggccgcatacgcatcaaccagcgtgcggttatcgcccccgacaaggaggtc

SEQ ID NO: 130568 - DNA, 80 bp, synthetic construct
  source 1..80: mol_type = other DNA
atctcgacactttatacagctcaaaagataccatagagacgtatataatggtgagatatgctcgttgtcgccaaaagtcc

SEQ ID NO: 130569 - DNA, 80 bp, synthetic construct
  source 1..80: mol_type = other DNA
gagtaatgtggccgcccggttttggggccgcggagacggtgttggaggggagcgacggaacacggttcgtgttcggacac

SEQ ID NO: 130570 - DNA, 80 bp, synthetic construct
  source 1..80: mol_type = other DNA
tgggccaaggtgtttctcgtgttatgtctattctccggagtggacgctagcacgacgataactggtggcgtcgcggccag

SEQ ID NO: 130571 - DNA, 80 bp, synthetic construct
  source 1..80: mol_type = other DNA
gttccttgccgatggtgggtgtcatggtggggcatatgatatcatcatctgcgatgagtgccattcgacagacgcaacta

SEQ ID NO: 130572 - DNA, 80 bp, synthetic construct
  source 1..80: mol_type = other DNA
aactcctctctgtagaggaggcatgcgaccttaccccgcgccattcagcccgctccaaatacgggtatggcgcccaggac

SEQ ID NO: 130573 - DNA, 80 bp, synthetic construct
  source 1..80: mol_type = other DNA
aatacctttgctcaggcaccgtttattagcgacactattaccgctgccgatggtattaaagttggaacagacaccgccca

SEQ ID NO: 130574 - DNA, 80 bp, synthetic construct
  source 1..80: mol_type = other DNA
ttttggaccgcggtcccagctttaaaccctactcgggcacggcttacaacagtttggcccccaagggcgccccaaactcc

SEQ ID NO: 130575 - DNA, 80 bp, synthetic construct
  source 1..80: mol_type = other DNA
agcttattgcccagggaggtaaggccaaaatctgtggcatatacctctttaactgggcagtaaaaaccaagcttaaactc

SEQ ID NO: 130576 - DNA, 80 bp, synthetic construct
  source 1..80: mol_type = other DNA
gtggacatgcaaactctgaccccagttgggaggttgataaccgctaaccctgtaatcactgaaagcactgagaactccaa

SEQ ID NO: 130577 - DNA, 80 bp, synthetic construct
  source 1..80: mol_type = other DNA
gccagctcctcggctagccagctgtccgctccatctctcaaggcaacttgcaccatcaaccatgactcccctgacgccga

SEQ ID NO: 130578 - DNA, 80 bp, synthetic construct
  source 1..80: mol_type = other DNA
acatggccagttcgctcacgttattgggggccaggttgataaagttaatcgcgccgtagtccagggagaacctcttaatg

SEQ ID NO: 130579 - DNA, 80 bp, synthetic construct
  source 1..80: mol_type = other DNA
tttggtggttctgcctcttcttcttctgcactctctggggaaagaggtatcgcagccatagatttcttgacttttttctt

SEQ ID NO: 130580 - DNA, 80 bp, synthetic construct
  source 1..80: mol_type = other DNA
gtgtagaacatcccacatgacttgctagagaactggttagcagcacatccggcatcattcacacaacagcgagcgtcgtt

SEQ ID NO: 130581 - DNA, 80 bp, synthetic construct
  source 1..80: mol_type = other DNA
tagtatgttgttcaatgtcatattcatggacaggggcacttgtaacaccaaacgcagcggaggagtccaagctgcccatc

SEQ ID NO: 130582 - DNA, 80 bp, synthetic construct
  source 1..80: mol_type = other DNA
ggcctcctcttcttcctgttccataacgacctcttcttgtatttcttctgggtgcggtggtggtggcgaggcccgacgac

SEQ ID NO: 130583 - DNA, 80 bp, synthetic construct
  source 1..80: mol_type = other DNA
gcaggatccgctatgagcgtaagtgaggcgcttgcgcgttgaacccggccaaagacccccagacacggagaggagtcttt

SEQ ID NO: 130584 - DNA, 80 bp, synthetic construct
  source 1..80: mol_type = other DNA
agtatgtccaggtgatgctaattacccttggcaagtggacgggcacatacatctatgaccatctgtcccccatggcagac

SEQ ID NO: 130585 - DNA, 80 bp, synthetic construct
  source 1..80: mol_type = other DNA
cacattgacgcccacttcttgtcacagtgtaaacagagcggggagaaccttgcgtatctggtggcataccaagccacggt

SEQ ID NO: 130586 - DNA, 80 bp, synthetic construct
  source 1..80: mol_type = other DNA
ccactccacgggagagcccaccacagacaccactgaccaggtacctcaggatgatctcattgattccgagactggttcca

SEQ ID NO: 130587 - DNA, 80 bp, synthetic construct
  source 1..80: mol_type = other DNA
ctacgtcatattgaccatcctcaccattattggtctaatagcagccaacgagatggggctgatagaaaagacaaaaacgg

SEQ ID NO: 130588 - DNA, 80 bp, synthetic construct
  source 1..80: mol_type = other DNA
aaccagcctaggcaacacacttacctgttacatcaaggcgatggctgcttgtcgagctgcaaagctccaagatccgtcgt

SEQ ID NO: 130589 - DNA, 80 bp, synthetic construct
  source 1..80: mol_type = other DNA
cagatgatacagccggatgggacacaagaataacagaggatgatcttcagaatgaggctaaaatcactgacatcatggag

SEQ ID NO: 130590 - DNA, 80 bp, synthetic construct
  source 1..80: mol_type = other DNA
tgaaaaacacgataataccatggcgcctattacggcctactcccaacagacgcgaggcctacttggctgcatcatcacta

SEQ ID NO: 130591 - DNA, 80 bp, synthetic construct
  source 1..80: mol_type = other DNA
gacttcgtgcctgtggaaagcatggagaccacaatgcggtccccggtctttactgacaactccactccgcctgcggttcc

SEQ ID NO: 130592 - DNA, 80 bp, synthetic construct
  source 1..80: mol_type = other DNA
tgagccagctgacactgtgctctgtgacattggagagtcaaacccaagctgtgaggtggaggaagcccgaacagcaagag

SEQ ID NO: 130593 - DNA, 80 bp, synthetic construct
  source 1..80: mol_type = other DNA
acaggccacacgggtcctccacgagttcgcggcaccccgggtggcgcttaaactgtacgtcgctggtggcggtggccatg

SEQ ID NO: 130594 - DNA, 80 bp, synthetic construct
  source 1..80: mol_type = other DNA
atcagccacgcgtcttgagaacatcatgtggaagcaaatatcaaatgaattgaaccacattctgcttgagaatgacatga

SEQ ID NO: 130595 - DNA, 80 bp, synthetic construct
  source 1..80: mol_type = other DNA
ctggctgcttactgcctgacaacgggctgcgtggtcattgtgggcagaatcatcttgtccgggaggccggctatcgtccc

SEQ ID NO: 130596 - DNA, 80 bp, synthetic construct
  source 1..80: mol_type = other DNA
agcacacttcctaaacctcaaagacaaaccaaaagaaacacaccccgtcgcccacagaacgttaagttcccgggcggcgg

SEQ ID NO: 130597 - DNA, 80 bp, synthetic construct
  source 1..80: mol_type = other DNA
tactcatgacccatttctttcaaatactccaagcacaggagactttagatagggcacttgacttcgacatctacggagtc

SEQ ID NO: 130598 - DNA, 80 bp, synthetic construct
  source 1..80: mol_type = other DNA
gagcccgagcggtcagagccaagcttatcgcccagggagggaaagctgcaatatgcggcaagtacctcttcaactgggcg

SEQ ID NO: 130599 - DNA, 80 bp, synthetic construct
  source 1..80: mol_type = other DNA
agctcctgtgaggctattatatttccggagttaaatcgtttaacaaaatagtctacggccggcgttttttgtttttgtaa

SEQ ID NO: 130600 - DNA, 80 bp, synthetic construct
  source 1..80: mol_type = other DNA
gacatcatcatctgtgacgagtgccactccacagaccccacgacggtgttgggcattggcacggttctcgaccaggctga

SEQ ID NO: 130601 - DNA, 80 bp, synthetic construct
  source 1..80: mol_type = other DNA
accaggttgtgatgacctcgctggccttggttggggctgccctccatccatttgctcttctgctggtccttgctgggtgg

SEQ ID NO: 130602 - DNA, 80 bp, synthetic construct
  source 1..80: mol_type = other DNA
cacgtatgcacgttctcttcggcgaggtcgctgggttcgtggaagataaagcgccgcgtgtcggcgccggcctcgccgcc

SEQ ID NO: 130603 - DNA, 80 bp, synthetic construct
  source 1..80: mol_type = other DNA
gcccatggcatagacccgaacatcaggaccggtgccaggaccatcacaacagggggccccatcacgtactccacctatgg

SEQ ID NO: 130604 - DNA, 80 bp, synthetic construct
  source 1..80: mol_type = other DNA
ttgttctgtggagtctcggggagcccggcacgcagccggaggccccggccccgggcccggccacccagtgcctggcgctg

SEQ ID NO: 130605 - DNA, 80 bp, synthetic construct
  source 1..80: mol_type = other DNA
gcgccaacctataccaaaggcgcgccagccccagggcaggcactgggctcagcccggatacccttggcccctttatggaa

SEQ ID NO: 130606 - DNA, 80 bp, synthetic construct
  source 1..80: mol_type = other DNA
gcgctaaaacggcaagattttaattccactataaaacaaacggtctttccggcaccactggattccgtttgtataataca

SEQ ID NO: 130607 - DNA, 80 bp, synthetic construct
  source 1..80: mol_type = other DNA
tcctcccaactctggtatctcagccgccttttagctgcaaactttctccaaagtttaaatgggatgtcaaattcctcatg

SEQ ID NO: 130608 - DNA, 80 bp, synthetic construct
  source 1..80: mol_type = other DNA
attgacacctgggattagactaggagatcttctgatctatctcaacatcagctacaaggcaccgagcgccgaagtatgta

SEQ ID NO: 130609 - DNA, 80 bp, synthetic construct
  source 1..80: mol_type = other DNA
gtgggagtcgtttgtgccgctgtgatcaagaggcactctggctcaagtgagggagccacgcagtggatgaaccgtctcat

SEQ ID NO: 130610 - DNA, 80 bp, synthetic construct
  source 1..80: mol_type = other DNA
tttgcctggatgcttgccatgtgtaaaggtcggcaatcagtccacctgctggcatgctgtgtcccccaccctagccatac

SEQ ID NO: 130611 - DNA, 80 bp, synthetic construct
  source 1..80: mol_type = other DNA
cgttccaccactggaggttaggggctctcgagacgccgtcatcattcttacggctctcgtccacccccatttggccttcg

SEQ ID NO: 130612 - DNA, 80 bp, synthetic construct
  source 1..80: mol_type = other DNA
gccaccgcccgcgggattgtgactgactttgctttcctgagcccgcttgcaagcagtgcagcttcccgttcatccgcccg

SEQ ID NO: 130613 - DNA, 80 bp, synthetic construct
  source 1..80: mol_type = other DNA
caaatgcttccacgcccgcaacgggatttcgcaggcatgtggatcttctcgcgggcgccgcagtggtttgctcatccttg

SEQ ID NO: 130614 - DNA, 80 bp, synthetic construct
  source 1..80: mol_type = other DNA
tgggcaagatgaggtgcaaatgattgtggtggaaccagggaagaatgtcaagaacgtccagactaagccggtggtgttca

SEQ ID NO: 130615 - DNA, 80 bp, synthetic construct
  source 1..80: mol_type = other DNA
gcaggagatgggtggcaacatcacacgggtcgagtctgagaacaaggtcgtcattttggactcatttgaaccacttcgtg

SEQ ID NO: 130616 - DNA, 80 bp, synthetic construct
  source 1..80: mol_type = other DNA
tgggaggtgggtgtttgtatgtgtgggagactcgggcgtcgggaccgagtctcggctctggtgtgtaagcgtccgagtta

SEQ ID NO: 130617 - DNA, 80 bp, synthetic construct
  source 1..80: mol_type = other DNA
ttagctggcgccgccatcggcagcgttggactggggaaggtcctcgtggacattcttgcagggtatggcgcgggcgtggc

SEQ ID NO: 130618 - DNA, 80 bp, synthetic construct
  source 1..80: mol_type = other DNA
ctctttaactgggcgacaaaaaccaaagccagactcactccattgcccgccgctgccaaactcgactcactccatttgcc

SEQ ID NO: 130619 - DNA, 80 bp, synthetic construct
  source 1..80: mol_type = other DNA
ttgtgcgctgccttcagattttgtacctatttactttaaagaatgtcctcctcccctgtggagccattgctacctactac

SEQ ID NO: 130620 - DNA, 80 bp, synthetic construct
  source 1..80: mol_type = other DNA
ttcatcaggcggcccagtcatgtgcccttccgggcacgtggtgggtgttttcagggctgccgtgtgcacgcggtgtgtcg

SEQ ID NO: 130621 - DNA, 80 bp, synthetic construct
  source 1..80: mol_type = other DNA
ccctcgagtgcatccgcggtggtaggcacctcatcttctgtcactcaaagaaaaaatgcgacgaactggcttgccagttg

SEQ ID NO: 130622 - DNA, 80 bp, synthetic construct
  source 1..80: mol_type = other DNA
ggggtacaagggtgtatggcgcggggatggagtgaactccaccaagtgtccttgcggagcgacgatatctggtcacgtga

SEQ ID NO: 130623 - DNA, 80 bp, synthetic construct
  source 1..80: mol_type = other DNA
agggtggcttgaacacaggttccaagcggcgtgtaactggacccgtggggacagatgtgagcttgaagacagggacaggt

SEQ ID NO: 130624 - DNA, 80 bp, synthetic construct
  source 1..80: mol_type = other DNA
actgaatctgttggacaagcgacagtttgagttgtataaaaggaccgacattgtggaggtggatcgtgatacggcacgca

SEQ ID NO: 130625 - DNA, 80 bp, synthetic construct
  source 1..80: mol_type = other DNA
ctactcctacttaccgtaggggtaggcattttcctcctacctgctcggtgagctggtaggttaacaccccaaccctgtgt

SEQ ID NO: 130626 - DNA, 80 bp, synthetic construct
  source 1..80: mol_type = other DNA
cccatatcgatgcccactttctctcccagacgaagcaggcgggggaaaatttcgcgtacctggtggcctatcaggctaca

SEQ ID NO: 130627 - DNA, 80 bp, synthetic construct
  source 1..80: mol_type = other DNA
gggccctcccgaccgtggcaccaggccctgcggggtcttaagcacctacggtttggcccccccgcgctcgttttggcggc

SEQ ID NO: 130628 - DNA, 80 bp, synthetic construct
  source 1..80: mol_type = other DNA
gaatccagcgaacagtctttttcattctaatgatgctggtcgccccatcttacggaatgcgatgcgtaggagtagggaac

SEQ ID NO: 130629 - DNA, 80 bp, synthetic construct
  source 1..80: mol_type = other DNA
cgctgtctggaaccacttcgggtgacggaggcaaaactggaacttgctccggtacgggatccggcacttgaacattcttg

SEQ ID NO: 130630 - DNA, 80 bp, synthetic construct
  source 1..80: mol_type = other DNA
ttgggactttggttctgtgggaggagtgctcacgtccgtggggcaggctatacatcaagtgtttggaggagcatttagat

SEQ ID NO: 130631 - DNA, 80 bp, synthetic construct
  source 1..80: mol_type = other DNA
cccctttggattcttcaaaccagcctgctcagagtgccctattttgtgcgcgtccaaggccttctccggctctgcgcact

SEQ ID NO: 130632 - DNA, 80 bp, synthetic construct
  source 1..80: mol_type = other DNA
agcaggacttctattctccataatgaaaaacacagtcactggaagacggggaactggagtggccggagagactcttggag

SEQ ID NO: 130633 - DNA, 80 bp, synthetic construct
  source 1..80: mol_type = other DNA
cggtcttcacgggtctcagacacattgatgcccacttcccctcccagaacaacttcggaggagaaaactttgcgtatcta

SEQ ID NO: 130634 - DNA, 80 bp, synthetic construct
  source 1..80: mol_type = other DNA
ctgctcgtggcgctgcctcaacaggcttacgccttcgatgcggcagaacaaggccagattggcatagcactactggtcat

SEQ ID NO: 130635 - DNA, 80 bp, synthetic construct
  source 1..80: mol_type = other DNA
ctccggcctgtatctgtgcgtggtgtacgtcaacgaccatattcacgcatggggccacattaccatcagcaccgcggcgc

SEQ ID NO: 130636 - DNA, 80 bp, synthetic construct
  source 1..80: mol_type = other DNA
ggggaggtgcttaaggagttggccgagaagacctttggtcagactccaccaagcggcgactctggctgctccaccggagc

SEQ ID NO: 130637 - DNA, 80 bp, synthetic construct
  source 1..80: mol_type = other DNA
gggtgagtttggagtcgctaaaggcagcagggccatctggtacatgtggcttgggagccgtttccttgagtttgaagtcc

SEQ ID NO: 130638 - DNA, 80 bp, synthetic construct
  source 1..80: mol_type = other DNA
ggactactacagttatggccactcttcttgctagtgctggcgttgcctcagagggcatttgcctatgatcatgagcaggc

SEQ ID NO: 130639 - DNA, 80 bp, synthetic construct
  source 1..80: mol_type = other DNA
acatccttctggttggccccgccgacgacgccaagagcaagggctggaggctgctcgcccccataacagcttaccaccaa

SEQ ID NO: 130640 - DNA, 80 bp, synthetic construct
  source 1..80: mol_type = other DNA
aatttgaagaggcacatgccacaaaacaatctgttgtagctcttgggtcacaggagggaggcctccatcaagcgttggca

SEQ ID NO: 130641 - DNA, 80 bp, synthetic construct
  source 1..80: mol_type = other DNA
gacgaggaggaggaatcctgggacgacagccaggcagaggaagtttcagacgaggaggaaatggagagctgggaaagtct

SEQ ID NO: 130642 - DNA, 80 bp, synthetic construct
  source 1..80: mol_type = other DNA
ttgctcattccagagccagaaaagcagagaacaccccaagacaaccaattaacttacgttgtcatagccatcctcacagt

SEQ ID NO: 130643 - DNA, 80 bp, synthetic construct
  source 1..80: mol_type = other DNA
gtgcggcctcttgtggtttgttatctttttcatagccgcctggtacatcaaaggtagggcagttcccatggccacctact

SEQ ID NO: 130644 - DNA, 80 bp, synthetic construct
  source 1..80: mol_type = other DNA
attgccaggtaacccagcagtagcttctctcatgtcattctctgccgctctaaccagtccgctgtccaccaccactaccc

SEQ ID NO: 130645 - DNA, 80 bp, synthetic construct
  source 1..80: mol_type = other DNA
tgcatgtctgggtgccaaatttgagagtccgaggaggtcgtgatgctgtcatcttgctcacatgcttgttccatccctcc

SEQ ID NO: 130646 - DNA, 80 bp, synthetic construct
  source 1..80: mol_type = other DNA
cgcgccgccccttttagccgttaaccccgcagccaatcaccacacagcgcgcacttttttaaattacctcatttacatgt

SEQ ID NO: 130647 - DNA, 80 bp, synthetic construct
  source 1..80: mol_type = other DNA
ttgatgtattctggtgatagcgggtttttcgggtacatagttattgtatatacaacacgatgcgctggtatgtatggctt

SEQ ID NO: 130648 - DNA, 80 bp, synthetic construct
  source 1..80: mol_type = other DNA
agcccgcgcggtccgagcgaagcttatcgcccagggagggaacgcagcgatttgcggcaagtacctctttaattggtcgg

SEQ ID NO: 130649 - DNA, 80 bp, synthetic construct
  source 1..80: mol_type = other DNA
accctaaactgtgacaggattgaaaacaaaggaatgcagttcgtgtcagacgcaatagtcattaccaccaacgcccctgg

SEQ ID NO: 130650 - DNA, 80 bp, synthetic construct
  source 1..80: mol_type = other DNA
ttacaagtatagttttccagcgccatgtgccattgccgcgcggccaatgcgcgttcataggggttaaggggtggacccca

SEQ ID NO: 130651 - DNA, 80 bp, synthetic construct
  source 1..80: mol_type = other DNA
ctcgcttcacttttcacccctgggccgcagcagaacttgcagctcataaataccaacgggagctggcacatcaacagaac

SEQ ID NO: 130652 - DNA, 80 bp, synthetic construct
  source 1..80: mol_type = other DNA
tttttcacagaggttgatggggtacgcctacacaggtatgccccacaatgtaaacctctcatacgggaggaggtcagttt

SEQ ID NO: 130653 - DNA, 80 bp, synthetic construct
  source 1..80: mol_type = other DNA
ttaaggtcacggtcgccagggccgtgtgcagcgcgtacaccgcagcgcccagcacggcgttgagcccgctgttggcgagc

SEQ ID NO: 130654 - DNA, 80 bp, synthetic construct
  source 1..80: mol_type = other DNA
agactcgaagctgcttgtaacttcactcgtggggaccgctgcaatctcgaggacagggataggtgtcaactaagcccgtt

SEQ ID NO: 130655 - DNA, 80 bp, synthetic construct
  source 1..80: mol_type = other DNA
catgctcaccatcagtggatgaccacagaggacatgcttactgtttggaacagggtgtggattgaggacaatccatggat

SEQ ID NO: 130656 - DNA, 80 bp, synthetic construct
  source 1..80: mol_type = other DNA
tcaatgaggatcatcgggccgaagacctgcagcaacacctggcatggaaccttccccataaacgcctacactactgggcc

SEQ ID NO: 130657 - DNA, 80 bp, synthetic construct
  source 1..80: mol_type = other DNA
tacccttggcagagatggccatgagaaacctatgaatgtccaaagcttgggatggaatattgtgacttttaaggacaaga

SEQ ID NO: 130658 - DNA, 80 bp, synthetic construct
  source 1..80: mol_type = other DNA
cctgggtggtcgcggaagcctgggtggcgcgcgccagggagcgtgcccggcggtgtcggcgcgcgcgcgacccggacgaa

SEQ ID NO: 130659 - DNA, 80 bp, synthetic construct
  source 1..80: mol_type = other DNA
catcctcaatacagagacacggccatagctgagcttcttagaattctttaattatgaaaattacttggattttcttacta

SEQ ID NO: 130660 - DNA, 80 bp, synthetic construct
  source 1..80: mol_type = other DNA
ccccaggcagaaaatccagctcgttaacaccaatggcagctggcacatcaaccgcaccgccctgaactgcaatgactcct

SEQ ID NO: 130661 - DNA, 80 bp, synthetic construct
  source 1..80: mol_type = other DNA
tgtgatctggacgacagggacaggtccgagctcagcccgctgctgttgtccaccacgcagtggcaggtcctcccgtgttc

SEQ ID NO: 130662 - DNA, 80 bp, synthetic construct
  source 1..80: mol_type = other DNA
atctttcattttcagagctaattggacaccccgtgagagcatgctgctggccttggcctcgtgtcttctgcaaactgcga

SEQ ID NO: 130663 - DNA, 80 bp, synthetic construct
  source 1..80: mol_type = other DNA
cccaacaaactcgaggcttgcttggcaccattgtcaccagtctcaccggccgggacaaaaatgaggtcgagggcgagata

SEQ ID NO: 130664 - DNA, 80 bp, synthetic construct
  source 1..80: mol_type = other DNA
cccgtacaggctatggcactacccttgcactgtcaacttcaccgtgcacaaggtgcgtctctatgtgggaggggtcgaac

SEQ ID NO: 130665 - DNA, 80 bp, synthetic construct
  source 1..80: mol_type = other DNA
gaagatgtctgaccaactagaaatcgacgggcagtgcactgagcagcttatccttgctcggcgaaaactcaaacaacaaa

SEQ ID NO: 130666 - DNA, 80 bp, synthetic construct
  source 1..80: mol_type = other DNA
aactgatagtggatgttggtatggaatggaaatcagacctttgaagcatgatgagaagacgttggttcaatctagggtga

SEQ ID NO: 130667 - DNA, 80 bp, synthetic construct
  source 1..80: mol_type = other DNA
ttgcattggccattgatagatctacttccgttcaggacattgtcacgcagtttgcattgctgttagggcgtctggaagaa

SEQ ID NO: 130668 - DNA, 80 bp, synthetic construct
  source 1..80: mol_type = other DNA
gtccgaaaaaaggcccggtggtccgcgggcagcatctgcaggtgcgcgagggcctgggcgttgagagggtacaactcgga

SEQ ID NO: 130669 - DNA, 80 bp, synthetic construct
  source 1..80: mol_type = other DNA
aggagggcgggatgccatcatcctgcttgcgtgcgtggtccatccccacctcatgtttgacatcaccaagctgctgttgg

SEQ ID NO: 130670 - DNA, 80 bp, synthetic construct
  source 1..80: mol_type = other DNA
gtgatcgaggtgatcgccggaggccattggggcgtactttttggcttagcctatttcggagtgcagggcgcctggctgaa

SEQ ID NO: 130671 - DNA, 80 bp, synthetic construct
  source 1..80: mol_type = other DNA
taaatgcccaggagaacgacccaaacgaagaggctgtgaatttaatatttccagaatctatgattcttcaggctgacata

SEQ ID NO: 130672 - DNA, 80 bp, synthetic construct
  source 1..80: mol_type = other DNA
tttaagcagggatggggccccatcacctacgatgagtctggcggcctggaccagaggccctattgctggcactacgcacc

SEQ ID NO: 130673 - DNA, 80 bp, synthetic construct
  source 1..80: mol_type = other DNA
acgtacacggacgagctgtagtgcgatggcgtcagtttcagggacaccgcggtacccccgagccccgtcgtgcgagaacc

SEQ ID NO: 130674 - DNA, 80 bp, synthetic construct
  source 1..80: mol_type = other DNA
ttgacataaccaagtggctcttggcgatacttgggccttcttatctcctgagagatgcgttaacgcgcgtgccgtacttc

SEQ ID NO: 130675 - DNA, 80 bp, synthetic construct
  source 1..80: mol_type = other DNA
acatcacagatcctcctgatgcggaccacatgggccttgtgtgaatccatcacactagccactggacctctgactacgct

SEQ ID NO: 130676 - DNA, 80 bp, synthetic construct
  source 1..80: mol_type = other DNA
tgtttcgcgtgtgggacataggccagagccacttccagaagcgcagcaagataaaggtgaacggcatggtgaacatcgac

SEQ ID NO: 130677 - DNA, 80 bp, synthetic construct
  source 1..80: mol_type = other DNA
cacccgttgttcatgggtgttcgctaccaccagctcgccctacaccggtgcctcccccccgcaagaagcggacagttcag

SEQ ID NO: 130678 - DNA, 80 bp, synthetic construct
  source 1..80: mol_type = other DNA
gatcaggatgtttgtgggaggagtggaacaccggttccaagccgcttgcaactggacgaggggagagcgctgcgatcttg

SEQ ID NO: 130679 - DNA, 80 bp, synthetic construct
  source 1..80: mol_type = other DNA
cggacatatggaatttcttagactgctatcaggagaaaattgatatgccctcctattacttggtgattgttggggtagtc

SEQ ID NO: 130680 - DNA, 80 bp, synthetic construct
  source 1..80: mol_type = other DNA
ggttgaagactacggctttggagtgttcaccaccaatatatggctaaaattgaaagaaaaacaggatgcattctgcgact

SEQ ID NO: 130681 - DNA, 80 bp, synthetic construct
  source 1..80: mol_type = other DNA
tgttctgcccgggtgtagtgtttgacataacaaagtggctcctggcgatcctggggcctggctacctcttgagggaggtc

SEQ ID NO: 130682 - DNA, 80 bp, synthetic construct
  source 1..80: mol_type = other DNA
cttgggtaacaccatgacttgctacttaaaggccactgccgcctgcagggcggctggtctcaaggactttgacatgttgg

SEQ ID NO: 130683 - DNA, 80 bp, synthetic construct
  source 1..80: mol_type = other DNA
tgcacttaaagaaggtgtcttcattacattaccaagcgaaggtttattgattcgggctatagagtattttacaactttcg

SEQ ID NO: 130684 - DNA, 80 bp, synthetic construct
  source 1..80: mol_type = other DNA
atgttgagagacccttctcatatcaccgccgcgacggcagcgcgccgccttgcgcgcgggtcccctccatcagaggcaag

SEQ ID NO: 130685 - DNA, 80 bp, synthetic construct
  source 1..80: mol_type = other DNA
aatttaaacagaaagtcaacagccatgcagcactcggagcaatgtttgaagagcagaaccaatggaagaatgcacgagaa

SEQ ID NO: 130686 - DNA, 80 bp, synthetic construct
  source 1..80: mol_type = other DNA
gcagcattggagaaactaatcatcttgcattcagccagcgctgccagtgctaatggagtgcattggtttggcatcttctt

SEQ ID NO: 130687 - DNA, 80 bp, synthetic construct
  source 1..80: mol_type = other DNA
aaaaggcattagtcccgaagaccgccggtgtgtgatgatttcgccataacacccaaaccccggatggggcccgggtataa

SEQ ID NO: 130688 - DNA, 80 bp, synthetic construct
  source 1..80: mol_type = other DNA
ccttgatgaccggctacaccggcgactttgactcggtgatagactgcaacacttgcgtaacacaagcggtcgacttcagt

SEQ ID NO: 130689 - DNA, 80 bp, synthetic construct
  source 1..80: mol_type = other DNA
gaaaagggcccggtgtccaaaagcccctccccacagggatccgggtgcgggttgcgtggtcctccgcgcccgcccgaacc

SEQ ID NO: 130690 - DNA, 80 bp, synthetic construct
  source 1..80: mol_type = other DNA
ggtgctcttgcttttcgggttctttaccttgtcaccatggtacaaacactggattgcccgtcttatctggtggaaccaat

SEQ ID NO: 130691 - DNA, 80 bp, synthetic construct
  source 1..80: mol_type = other DNA
cgggtgggagacgcccactacattgtgggggccacagatgacaacttgaaatgcccatgtcaggtgccagcaccagagtt

SEQ ID NO: 130692 - DNA, 80 bp, synthetic construct
  source 1..80: mol_type = other DNA
actgccgcgtgtggtgacatcttgagtggcctcccggtgtcagcgaggttggggaatttggtgctactgggacccgcgga

SEQ ID NO: 130693 - DNA, 80 bp, synthetic construct
  source 1..80: mol_type = other DNA
tcgacgcctcgcccggcagcgcggcggggagccgacgatccgccacccgcgaccaccggcgtgtggtcgcgcctcgggac

SEQ ID NO: 130694 - DNA, 80 bp, synthetic construct
  source 1..80: mol_type = other DNA
atggccaagaacgaggtgttctgcgtagatcccaccaagggtgggaagaaaccagctcgcctcatagtctatccagacct

SEQ ID NO: 130695 - DNA, 80 bp, synthetic construct
  source 1..80: mol_type = other DNA
acaaaagggaaaggacccaaagtcaggacctggctgtttgagaatggggaagaaagactcagccgcatggctgtcagtgg

SEQ ID NO: 130696 - DNA, 80 bp, synthetic construct
  source 1..80: mol_type = other DNA
ctctcgtggccttcaagatcatgagcggcgaggcccctacagcggaggatatggtcaacttgttacccgcccttttgtct

SEQ ID NO: 130697 - DNA, 80 bp, synthetic construct
  source 1..80: mol_type = other DNA
ttggtgcgagggtgtgatttgccagtgtggttggcatggcaagtggcaaaagccggcctgaagaccaatgaccgcaaatg

SEQ ID NO: 130698 - DNA, 80 bp, synthetic construct
  source 1..80: mol_type = other DNA
cggggttgggatgggaccttaactccatataaagcgagtctggaagggtggaaaggcggacagtcgataagtcggtagcg

SEQ ID NO: 130699 - DNA, 80 bp, synthetic construct
  source 1..80: mol_type = other DNA
ctgcgagtaccaccggaatagtactggaaacactgacttaatgtgctctttgtgttatctgcgagcctacagcatgttta

SEQ ID NO: 130700 - DNA, 80 bp, synthetic construct
  source 1..80: mol_type = other DNA
tttgttggatggctgaagttccaggaacgaagatcgccggaatgttgctgctttcccttctcttgatgattgtgctaatc

SEQ ID NO: 130701 - DNA, 80 bp, synthetic construct
  source 1..80: mol_type = other DNA
ggttcgctcctacgccaaaggcgtttatgagggacgaggtatcgttcagcgtgggtctcaactcctacgtgatcgggtca

SEQ ID NO: 130702 - DNA, 80 bp, synthetic construct
  source 1..80: mol_type = other DNA
ccgcagacgtcttcgccaccgccgtcgtagaccaaccgctgctatgcgcgccgccagagctttggttcgacgcgccagac

SEQ ID NO: 130703 - DNA, 80 bp, synthetic construct
  source 1..80: mol_type = other DNA
taactgctgagacagcgggtcgacgcctcgcacgaggatccccgccatccttagctagctcttctgcaagtcaactctct

SEQ ID NO: 130704 - DNA, 80 bp, synthetic construct
  source 1..80: mol_type = other DNA
attgacttcgtgccggtagagaacatggaaaccaccatgaggtccccggtcttcactgacaactcgtctcctccggccgt

SEQ ID NO: 130705 - DNA, 80 bp, synthetic construct
  source 1..80: mol_type = other DNA
atgtcacagctgaggacttgggaaagacgttctcattgggaaccgggaactgcaccaccaacatccttgaggcaaagtat

SEQ ID NO: 130706 - DNA, 80 bp, synthetic construct
  source 1..80: mol_type = other DNA
atcctcaacaagcccgttttcatcacgatggacggggcggttcgccggaccgccgatttgtttctggccgattccttcat

SEQ ID NO: 130707 - DNA, 80 bp, synthetic construct
  source 1..80: mol_type = other DNA
cggttgcacgccgtgtgtcaggaaaggcaatgctacagcttgttgggtgccagcgaccccgactcttgcaattcctgccg

SEQ ID NO: 130708 - DNA, 80 bp, synthetic construct
  source 1..80: mol_type = other DNA
actttgcccagctgcttaaaacctccttccgggcctccagcctcacggagaccacgggcccccccaaaaaacgggccaag

SEQ ID NO: 130709 - DNA, 80 bp, synthetic construct
  source 1..80: mol_type = other DNA
tgtcgcaggctcttatagtatcgccagaacgccacaactttacccaagagtgcaactgttccatctaccaaggtcatatc

SEQ ID NO: 130710 - DNA, 80 bp, synthetic construct
  source 1..80: mol_type = other DNA
actctcctccttaacatcttgggagggtgggtcgccagccagcttgctccacccgtcgcagccaccgcgtttgtcgtctc

SEQ ID NO: 130711 - DNA, 80 bp, synthetic construct
  source 1..80: mol_type = other DNA
ccgcagcaccatacatttgtccaggactgcaactgctccatatacccggggcatgttacgggacaccgcatggcctggga

SEQ ID NO: 130712 - DNA, 80 bp, synthetic construct
  source 1..80: mol_type = other DNA
ggccatcggggggggcatgagcgacctaccggaatacaagctcatttttttcgatatcgaatgcaaggcggggggggggg

SEQ ID NO: 130713 - DNA, 80 bp, synthetic construct
  source 1..80: mol_type = other DNA
tgtgccttttactgctgctggaagggggtggtgtgtcgccccaaaagcagggcttcaattaagaaatgcctgtttgaaag

SEQ ID NO: 130714 - DNA, 80 bp, synthetic construct
  source 1..80: mol_type = other DNA
tgtttgactgttccaacatcggctttgacctacggtaatgcttctggactttactatcttacaaatgattgcccgaattc

SEQ ID NO: 130715 - DNA, 80 bp, synthetic construct
  source 1..80: mol_type = other DNA
taatgaaacccgctacccttgacctgcctccaccacccacgcccgctccaccaaaagcagctccggttgtgcagccccct

SEQ ID NO: 130716 - DNA, 80 bp, synthetic construct
  source 1..80: mol_type = other DNA
gaatgccatgcccaagatgctactagcatattgggtataggcacggtcttggatcaggccgagacggctggggtgaggtt

SEQ ID NO: 130717 - DNA, 80 bp, synthetic construct
  source 1..80: mol_type = other DNA
ttagctgcaattacccatttgtatttatcggttggcgcggtggatgttactacggatgatattgtcgatcaaaccctgag

SEQ ID NO: 130718 - DNA, 80 bp, synthetic construct
  source 1..80: mol_type = other DNA
agcggtcttgcgggtgccgctgtagggagtgtcggcctcgggaaggtgataatagatttgctggcgggttatggtgctgg

SEQ ID NO: 130719 - DNA, 80 bp, synthetic construct
  source 1..80: mol_type = other DNA
ccggaaattccccatggccttgcccatttgggcacggccggactacaaccccccgttgctggaggcgtggaaaaaaccgg

SEQ ID NO: 130720 - DNA, 80 bp, synthetic construct
  source 1..80: mol_type = other DNA
ggaatcaataaaatcacttacttaaattcagttagcaggtctctgtccactttattcaacagcacctcatttccctcctc

SEQ ID NO: 130721 - DNA, 80 bp, synthetic construct
  source 1..80: mol_type = other DNA
ggccgactcccttgttgtacaggctgggtggtgtccaaaatgaggtcaccctgacgcacccagtgacaaaatacatcatg

SEQ ID NO: 130722 - DNA, 80 bp, synthetic construct
  source 1..80: mol_type = other DNA
tcgaccaacactatcaggatgtactaaaggagattaagcttcgagcgtccacggtgcaggcgaaactcctatccatagag

SEQ ID NO: 130723 - DNA, 80 bp, synthetic construct
  source 1..80: mol_type = other DNA
tggaaaacgtggggaaaggcaaaaatagtgacagcagaaacacaaaattcctctttcataatagacgggccaaacacacc

SEQ ID NO: 130724 - DNA, 80 bp, synthetic construct
  source 1..80: mol_type = other DNA
ttcgtcctgccccactggtacatggcccggtacctgctggccaacaacccgccccccgttctctcggccctgttctgtgc

SEQ ID NO: 130725 - DNA, 80 bp, synthetic construct
  source 1..80: mol_type = other DNA
gcctctggactggaccacgtttcggcgtgtgtttctgatcgacgacgcgtggcggcccctgttggagcctgagctggcga

SEQ ID NO: 130726 - DNA, 80 bp, synthetic construct
  source 1..80: mol_type = other DNA
tgtccagacaaaccaaaattgaaacgaccaataatggaaagaggctgagcaaaaggtcccaatgtaccaggacgccactg

SEQ ID NO: 130727 - DNA, 80 bp, synthetic construct
  source 1..80: mol_type = other DNA
aggcggtggattttatccccgtagagagcctagagacaaccatgaggtccccagtgttcacagacaattcctccccaccg

SEQ ID NO: 130728 - DNA, 80 bp, synthetic construct
  source 1..80: mol_type = other DNA
aaactcacagaaccctagtattcaacctgccacctccctcccaacacacagagtacacagtcctttctccccggctggcc

SEQ ID NO: 130729 - DNA, 80 bp, synthetic construct
  source 1..80: mol_type = other DNA
aggtgcagaccgcagtggacttcagtaacagttacattgcagagatggagaaagagagctggattgtggataaacagtgg

SEQ ID NO: 130730 - DNA, 80 bp, synthetic construct
  source 1..80: mol_type = other DNA
acgtcctcgctcgggcagggcagggtgacccctgcccggacaagctcggcggccgccgccgggtcgttgcgcaccgcgga

SEQ ID NO: 130731 - DNA, 80 bp, synthetic construct
  source 1..80: mol_type = other DNA
atgctccatatttaatccttcgaaaacccggggatcaaacggaagcagcaaaggcaaccatgcaggacacttatagggct

SEQ ID NO: 130732 - DNA, 80 bp, synthetic construct
  source 1..80: mol_type = other DNA
ctccgcctcggcctcctcaagagacctccgcagggcctcgacgcggcgacgggtgtcgaagagcgcctgcaggcgcgcgc

SEQ ID NO: 130733 - DNA, 80 bp, synthetic construct
  source 1..80: mol_type = other DNA
gatagaggattcctgtggacacagaggcccctctcttagaacaacaacagcttcaggaaaattgattactcagtggtgtt

SEQ ID NO: 130734 - DNA, 80 bp, synthetic construct
  source 1..80: mol_type = other DNA
ctccacagaggacctggtcaatctactgcctgccatcctttcgcccggagccctcgtagtcggcgtggtttgcgcagcaa

SEQ ID NO: 130735 - DNA, 80 bp, synthetic construct
  source 1..80: mol_type = other DNA
agtgggagtggtggcatatggagagaaatgcaccaccttgttgagtttgagcccccacatgctgccacaattagggtgct

SEQ ID NO: 130736 - DNA, 80 bp, synthetic construct
  source 1..80: mol_type = other DNA
actaactgagaggctatacgtgggaggtcccatgcaaaacagcaaggggcaatcctgcggatacaggcgctgccgcgcca

SEQ ID NO: 130737 - DNA, 80 bp, synthetic construct
  source 1..80: mol_type = other DNA
ttggcttggggttcaacggtcacggggcggcgcgggaaggtgacgtatgcgtgggtgtggctaagatgcaagctgtcgcg

SEQ ID NO: 130738 - DNA, 80 bp, synthetic construct
  source 1..80: mol_type = other DNA
tactccaccagggtccgtgaccactccccatcccaatatcgaggaggtcgccctgccgacaacaggtgaaattcctttct

SEQ ID NO: 130739 - DNA, 80 bp, synthetic construct
  source 1..80: mol_type = other DNA
gggggccccgaaccaagccttgatactcaactcaatccgggcccagctgggggcggtcatcgtgaggaacaggggggggg

SEQ ID NO: 130740 - DNA, 80 bp, synthetic construct
  source 1..80: mol_type = other DNA
gcccactgctctgcccttcggggcacgttgtgggcatcttccgggccgctgtatgcacccggtgggtcgcaaaagcggtg

SEQ ID NO: 130741 - DNA, 80 bp, synthetic construct
  source 1..80: mol_type = other DNA
caaacactggactactcaggactgcaactgttccatctatgcaggccatgttaccggccaccgcatggcgtgggacatga

SEQ ID NO: 130742 - DNA, 80 bp, synthetic construct
  source 1..80: mol_type = other DNA
tacctggggggagaacgagaccgatgttttcatcatggagagcttacgccccccaacgggaggatggtatggctgtacgt

SEQ ID NO: 130743 - DNA, 80 bp, synthetic construct
  source 1..80: mol_type = other DNA
ccttttcctgttacatacctggcaaactgggatgggtgtttggcagcaatgcttggaagaaaaaaaccttcgagaactaa

SEQ ID NO: 130744 - DNA, 80 bp, synthetic construct
  source 1..80: mol_type = other DNA
aactagcatctggggtaaaggctgagctgctctctgtagaagaagcgtgccgccttgtcccctctcactccgccagatcg

SEQ ID NO: 130745 - DNA, 80 bp, synthetic construct
  source 1..80: mol_type = other DNA
ctactaactgtaggggtaggcatctttctcctgccagcacgataagctggtaggataacactccattccttttcccttgt

SEQ ID NO: 130746 - DNA, 80 bp, synthetic construct
  source 1..80: mol_type = other DNA
aaatcctcgcattaccgcaaatcttggcgacgttatagcgggaaccaacgccagtggtctctctgtaccagtaaattcat

SEQ ID NO: 130747 - DNA, 80 bp, synthetic construct
  source 1..80: mol_type = other DNA
agagggcgaccagcgccggggcggagaacccgtcgccggcgctcacgaagtagtcgtagccgcgcggcagcagcacccgc

SEQ ID NO: 130748 - DNA, 80 bp, synthetic construct
  source 1..80: mol_type = other DNA
tggcctgccatctggattgccatgcacctcacaagtaaacagcattaaccattggatctatactttgtgtgccttatcag

SEQ ID NO: 130749 - DNA, 80 bp, synthetic construct
  source 1..80: mol_type = other DNA
ctgctttgattcaacggtgactgaagctgatatccgtatggaggagagcatctaccaatgctgtgacctgccccccgaag

SEQ ID NO: 130750 - DNA, 80 bp, synthetic construct
  source 1..80: mol_type = other DNA
ggacgtcgagctatgctgcgagcagccaggcaagctgtaacgcctgccggtagagcgcggagacaggccgcagctgcggc

SEQ ID NO: 130751 - DNA, 80 bp, synthetic construct
  source 1..80: mol_type = other DNA
cttgccctgtgtgagggtcggtaatcagtccacctgctggcatgctgtgtcccccaccctagccacaccaaatgcttcca

SEQ ID NO: 130752 - DNA, 80 bp, synthetic construct
  source 1..80: mol_type = other DNA
ccacgctttgctccgccctttacataggggatgtttgtggcgcggtcatgatagcggcccaagcggtcatcatctcgccg

SEQ ID NO: 130753 - DNA, 80 bp, synthetic construct
  source 1..80: mol_type = other DNA
ggggccggccagatggacctgtccaactggttcaccgccggttacagcggaggagacatatatcacagcgtgtctcatgc

SEQ ID NO: 130754 - DNA, 80 bp, synthetic construct
  source 1..80: mol_type = other DNA
ggaacagcagcgtccccacctcaccacactataaggtgtttctcgctgggctcatctggtggttacaatactttatcacc

SEQ ID NO: 130755 - DNA, 80 bp, synthetic construct
  source 1..80: mol_type = other DNA
aagaatgaggttttctgcgtagcgcccgagaagggaggacgaaagccagcaaggctcatcgtgtatcccgacctgggcgt

SEQ ID NO: 130756 - DNA, 80 bp, synthetic construct
  source 1..80: mol_type = other DNA
gtgctgtatcaacttccttgctgggtcgaaatcagggtatttatctgctgggtcagacattgtggggaggaaccatgaag

SEQ ID NO: 130757 - DNA, 80 bp, synthetic construct
  source 1..80: mol_type = other DNA
tcaggtcgtgtccactgccacgcaatctttccttgccactactgtcaatggagtcctctggacggtctatcatggtgccg

SEQ ID NO: 130758 - DNA, 80 bp, synthetic construct
  source 1..80: mol_type = other DNA
tcccctcgaatacatcaaagggggcaggcacctcatattttgtcatcccaagaagaagtgtgacgagctcgccaaacagc

SEQ ID NO: 130759 - DNA, 80 bp, synthetic construct
  source 1..80: mol_type = other DNA
acaacatgatgggtaagagagagaaaaaacctggtgaatttggaaaagcgaaaggaagccgagccatatggttcatgtgg

SEQ ID NO: 130760 - DNA, 80 bp, synthetic construct
  source 1..80: mol_type = other DNA
agaggaaatgaaagtactactgatcagacagaggctacctcaagtgccttcagcagcactgcaaatttaacttcgcttgc

SEQ ID NO: 130761 - DNA, 80 bp, synthetic construct
  source 1..80: mol_type = other DNA
acttacaactggggagaaaacgagacggatgtgttcatgctagagagcctgcggcctccgcaaggaggttggttcgggtg

SEQ ID NO: 130762 - DNA, 80 bp, synthetic construct
  source 1..80: mol_type = other DNA
cggataccggaggagacagcgtccagcagccctctggcgagactgccgcttcagatgcgggatcactgtcctccatgcct

SEQ ID NO: 130763 - DNA, 80 bp, synthetic construct
  source 1..80: mol_type = other DNA
ggctccgtcacagtgcctcatcctaatattactgagacagccctacctaccacaggagaggtccccttttatggtaaggc

SEQ ID NO: 130764 - DNA, 80 bp, synthetic construct
  source 1..80: mol_type = other DNA
gactagaggttagaggagaccccgcggtttaaagtgcacggcccagcctggctgaagctgtaggtcaggggaaggactag

SEQ ID NO: 130765 - DNA, 80 bp, synthetic construct
  source 1..80: mol_type = other DNA
ccctatggaatgtacacgccggtggcgcactatcgccctcaggtgggggagccggaaccaacaacgacccacccggccct

SEQ ID NO: 130766 - DNA, 80 bp, synthetic construct
  source 1..80: mol_type = other DNA
gaagtacccaagatttttgaaggtcttggcaaggacgaaaaacgggcggcaaatgctctgcaaaaaaacgaaaccgagaa

SEQ ID NO: 130767 - DNA, 80 bp, synthetic construct
  source 1..80: mol_type = other DNA
tgttacgtcgccgcccgcgatggagcttagctacgccaccaccatgcactaccgggacgttgtgttttacgtcacaacgg

SEQ ID NO: 130768 - DNA, 80 bp, synthetic construct
  source 1..80: mol_type = other DNA
ttgtggccgcttttgcttttgctgttgtgcttgccccagagagcatttgctctcaacaatgaggaggcggcgtccatggg

SEQ ID NO: 130769 - DNA, 80 bp, synthetic construct
  source 1..80: mol_type = other DNA
aaggcttcaagaaggagatctcaaacatgctgagccattcacatgcatttttgccttagttattgtagtactctgtctcg

SEQ ID NO: 130770 - DNA, 80 bp, synthetic construct
  source 1..80: mol_type = other DNA
agcgtagggctgttcctgatgcaggagggggccacccccagcgccgcgctggacatgaccgcgcgcaacatggaacctag

SEQ ID NO: 130771 - DNA, 80 bp, synthetic construct
  source 1..80: mol_type = other DNA
atcgagccagagcggtcagggccaagctcattgtccaggggggaaaagctgcaatatgcggcaagtacctcttcaactgg

SEQ ID NO: 130772 - DNA, 80 bp, synthetic construct
  source 1..80: mol_type = other DNA
cccagggaaagtagctcttccaagctgcggaaatgcttcagtggttttaggccatcggccatggtcattttttcaaggga

SEQ ID NO: 130773 - DNA, 80 bp, synthetic construct
  source 1..80: mol_type = other DNA
agccagcgtcgaggccgtacggggagtggcaagccgggagtatacaggtatgtctcgcaaggagaacgcccctctgggat

SEQ ID NO: 130774 - DNA, 80 bp, synthetic construct
  source 1..80: mol_type = other DNA
aacaggaactgatcagacactaattggacctcctgggcaaaaaattgattggcatgtgagcagtaatgatggtcagttta

SEQ ID NO: 130775 - DNA, 80 bp, synthetic construct
  source 1..80: mol_type = other DNA
cggccccccaaccccaacccaacccgggccgggaaaaaccccacaccacaaaaaaaagcacgccgcacgaccgacaacga

SEQ ID NO: 130776 - DNA, 80 bp, synthetic construct
  source 1..80: mol_type = other DNA
cgtccggagtccgccccgcgccgccgccgcccccgtggtgtctgcgagcgcggacgcggccgggcccgcgccgcccgccg

SEQ ID NO: 130777 - DNA, 80 bp, synthetic construct
  source 1..80: mol_type = other DNA
cttaccccgcggtgcttggttgactacccgtaccggctctggcactacccttgcactgtgaacttcaccattcacaaggt

SEQ ID NO: 130778 - DNA, 80 bp, synthetic construct
  source 1..80: mol_type = other DNA
ggatacaaggtcctcgtgctcaacccgtctgtggctgccactttgtccttcggctcctacctgagccgagcccatggcat

SEQ ID NO: 130779 - DNA, 80 bp, synthetic construct
  source 1..80: mol_type = other DNA
tgaaacacctcaggggctggccaaaatagtccagacagcacatgcagaaggtatatgtggcatcaggtccgtctctagat

SEQ ID NO: 130780 - DNA, 80 bp, synthetic construct
  source 1..80: mol_type = other DNA
ccgcagactcccaaatggtccctgcgtacgactcgggaaccgcggtcgagagcgcgccggccgcgtcctcgctcctgcgg

SEQ ID NO: 130781 - DNA, 80 bp, synthetic construct
  source 1..80: mol_type = other DNA
tgttgcctctacccgtacccccccagcccaacctgtagcccaataaaaactaaaaaaatcagaaaactgtgttagaatct

SEQ ID NO: 130782 - DNA, 80 bp, synthetic construct
  source 1..80: mol_type = other DNA
ggcggtgggactcacgcgccgccctcttgagcccacggccaatcagttatctgaaggggtcatcgggaggtccaattctg

SEQ ID NO: 130783 - DNA, 80 bp, synthetic construct
  source 1..80: mol_type = other DNA
agaagaagctgatcacctggggggccgacactgccgcttgtggagacatcttggctggcctgccggtttcagcccgtctg

SEQ ID NO: 130784 - DNA, 80 bp, synthetic construct
  source 1..80: mol_type = other DNA
actgtcccaatctcagtccaagagaggagccagatgacattgattgctggtgctatggggtggaaaacgttagagtcgca

SEQ ID NO: 130785 - DNA, 80 bp, synthetic construct
  source 1..80: mol_type = other DNA
acccgcggccttgcttcactgttcacgcccggcgccaagcaaaacctccagctcatcaataccaacgggagttggcacat

SEQ ID NO: 130786 - DNA, 80 bp, synthetic construct
  source 1..80: mol_type = other DNA
ggggcaagctcggggccgctaacatcacaggctcctctgatgatagaccttactgctggcactacgcgccccgcccatgt

SEQ ID NO: 130787 - DNA, 80 bp, synthetic construct
  source 1..80: mol_type = other DNA
gcctcagcactccattggtcaggcatccttggtgtgatgggactgtggacactcacagaaataatgaggtcatccagacg

SEQ ID NO: 130788 - DNA, 80 bp, synthetic construct
  source 1..80: mol_type = other DNA
actacgaaccaccagtggtccatggctgcccacttccacctccacagtcccctcctgtgcctccgccccggaagaagcgg

SEQ ID NO: 130789 - DNA, 80 bp, synthetic construct
  source 1..80: mol_type = other DNA
gtcatcgtcgtcggctcgaaaggcggtggtccggtgcggcgaggccgcgaggtcgggcgtcgggatcgtccggacggcct

SEQ ID NO: 130790 - DNA, 80 bp, synthetic construct
  source 1..80: mol_type = other DNA
attccggaaggggacacgggctaccctcactatcgagggcgcttggtcgggaggccgcatcgaacgcacacccccatccg

SEQ ID NO: 130791 - DNA, 80 bp, synthetic construct
  source 1..80: mol_type = other DNA
tgaagtggccatctttgttcatggcccaaccaatgtggaatctcacggaaattactctatgcagactggcgccacgcaag

SEQ ID NO: 130792 - DNA, 80 bp, synthetic construct
  source 1..80: mol_type = other DNA
gcactggcctggttgggactgaacacaaggaaccccacaatgtccatgagctttctcctggctggaggtctggtcttggc

SEQ ID NO: 130793 - DNA, 80 bp, synthetic construct
  source 1..80: mol_type = other DNA
tggattactttttatttacaagtcgaatgggttctgacgagaatcagaatgacccgcaggcagtgatacgttgcggaatt

SEQ ID NO: 130794 - DNA, 80 bp, synthetic construct
  source 1..80: mol_type = other DNA
gtgatgctttattgtctgtcgtctgaacgcggccggagtcgctactcgagggggcggcgggtgcgggaagccgagcaggc

SEQ ID NO: 130795 - DNA, 80 bp, synthetic construct
  source 1..80: mol_type = other DNA
ttgtgggataggcacgcccagagggcgtattgggttaacccctttttgtttggtgcgggttttttggaggacttgagtca

SEQ ID NO: 130796 - DNA, 80 bp, synthetic construct
  source 1..80: mol_type = other DNA
cgctaaagcccaagtcgtcgaggagacggttaaagagggcggcgggggggacgggcatgcgtggagaaggcatgagctgt

SEQ ID NO: 130797 - DNA, 80 bp, synthetic construct
  source 1..80: mol_type = other DNA
aaagcagtagacttcgtgcccgtcgagtctctggaaacatccatgagatccccagtgttctctgacaactctacgcctcc

SEQ ID NO: 130798 - DNA, 80 bp, synthetic construct
  source 1..80: mol_type = other DNA
aaccttagcaaaagaaggtatcaaaagaggagaaacggaccatcacgctgtgtcgcgaggctcagcaaaactgagatggt

SEQ ID NO: 130799 - DNA, 80 bp, synthetic construct
  source 1..80: mol_type = other DNA
aaagagggactgaaaagaggagaaacaaccaaacacgcagtgtcgagaggaacagctaaactgaggtggtttgtggagag

SEQ ID NO: 130800 - DNA, 80 bp, synthetic construct
  source 1..80: mol_type = other DNA
tgggacaccgtttccatcgcaggatctccaccagccccagttggtaagcagccgcaaactcggcgggggtattgttcctg

SEQ ID NO: 130801 - DNA, 80 bp, synthetic construct
  source 1..80: mol_type = other DNA
ccagctcgccgaccactggctcctccgcgagctgttcggtggttgggtcggaggtttcctccggggtggtggccgcccgt

SEQ ID NO: 130802 - DNA, 80 bp, synthetic construct
  source 1..80: mol_type = other DNA
agcccaccctccatgggccaacacccctgctgtacaggctgggcgctgttcagaatgaagtcaccctgacgcacccggtc

SEQ ID NO: 130803 - DNA, 80 bp, synthetic construct
  source 1..80: mol_type = other DNA
cgcgaagtctatagacttcatacccgtagagtcacttgataccatcaccaggtcacccaacttcactgacaacagtacac

SEQ ID NO: 130804 - DNA, 80 bp, synthetic construct
  source 1..80: mol_type = other DNA
tcgcgcgcatgcactactgcgagcctgtctgctggtacgccagcttgctggctcaaagtatattcaagcttgcctgttga

SEQ ID NO: 130805 - DNA, 80 bp, synthetic construct
  source 1..80: mol_type = other DNA
ggggtgcgggcacgagaagccgcccccacccccgaggcctgttggtctttatcatagaacagagccggtgcccggcctgc

SEQ ID NO: 130806 - DNA, 80 bp, synthetic construct
  source 1..80: mol_type = other DNA
aggtgggatacctccacgccccgaccggtagtggtaagagcacgaaagtgccagcggcgtacgcctcgcaggggtataag

SEQ ID NO: 130807 - DNA, 80 bp, synthetic construct
  source 1..80: mol_type = other DNA
ccaacggctcgtggcacatcaacaggactgccctgaactgcaatgattccctgaacacagggttcttagctgggctgttt

SEQ ID NO: 130808 - DNA, 80 bp, synthetic construct
  source 1..80: mol_type = other DNA
tttgtgccacagatgctctcatgactgggtacacgggtgatttcgacagtgtgatcgactgcaacgttgcggtaacgcaa

SEQ ID NO: 130809 - DNA, 80 bp, synthetic construct
  source 1..80: mol_type = other DNA
atcatgtgtgacatcggagaaagcaacccagatgccgtggtggagggtgagaggacacggaaagtgattctgctcatgga

SEQ ID NO: 130810 - DNA, 80 bp, synthetic construct
  source 1..80: mol_type = other DNA
aaaatgatcacagcaactttctaaccactgtagtccaaaacaacgactattcccctatagaagccggtacacaaactatt

SEQ ID NO: 130811 - DNA, 80 bp, synthetic construct
  source 1..80: mol_type = other DNA
acgtcctccatgccccctctggaaggggagccggtggaccccgatctagagctagaggtcgggaagccctccccccctcc

SEQ ID NO: 130812 - DNA, 80 bp, synthetic construct
  source 1..80: mol_type = other DNA
tgctcagtggatgaataggctgatagcgtttgcctcaaggggcaaccacgtgtcgcctacccactacgtgcctgagaccg

SEQ ID NO: 130813 - DNA, 80 bp, synthetic construct
  source 1..80: mol_type = other DNA
tctacttccttctgctggttctggagctgggattgccaagcgagggccttggggccctctggaaatggagagatgcactg

SEQ ID NO: 130814 - DNA, 80 bp, synthetic construct
  source 1..80: mol_type = other DNA
caatgagaggagtgtgatatgcacagtagtcatcaaatgcgagcatacatgtcctctcaacatcacattcaagaataaga

SEQ ID NO: 130815 - DNA, 80 bp, synthetic construct
  source 1..80: mol_type = other DNA
ccggacgcgcacgtggggcctctcgacggagagccggaccgggatgcgatctccccgcttacgtcgagcgtggccggcga

SEQ ID NO: 130816 - DNA, 80 bp, synthetic construct
  source 1..80: mol_type = other DNA
tgagacggacctcttctgccccactgactgcttcagaaaacatcctgaggccacatacagccggtgtggtgcgggcccct

SEQ ID NO: 130817 - DNA, 80 bp, synthetic construct
  source 1..80: mol_type = other DNA
gtacatcaagggcagagcggtccccttggccacttatgccctccttggccaatggccttttgtcctgctgctcctagcgt

SEQ ID NO: 130818 - DNA, 80 bp, synthetic construct
  source 1..80: mol_type = other DNA
gggtcgggcggtccctttggccgtctactccctcactggcctatggcccttctgcctactgctcctagcattgccccagc

SEQ ID NO: 130819 - DNA, 80 bp, synthetic construct
  source 1..80: mol_type = other DNA
gcgagcgttcacggacgctatgaccaggtactcggcaccccctggggacgagccgcgtccagagtatgatctagagcata

SEQ ID NO: 130820 - DNA, 80 bp, synthetic construct
  source 1..80: mol_type = other DNA
gggcgcatgcgccattacctctcggatggccgcggcgcgctggtcggccgagctgaccaagggcgccacgaccacggcgc

SEQ ID NO: 130821 - DNA, 80 bp, synthetic construct
  source 1..80: mol_type = other DNA
ggctttgccgtccccctcgtagtcggtgggctgtgcgccgtagtcctgggggcggcgtgtctgcttgagctcctgcgtcg

SEQ ID NO: 130822 - DNA, 80 bp, synthetic construct
  source 1..80: mol_type = other DNA
tacctacgtctgctgatcctactctgtccccaacccctaatttttggcttgaatacagcggacttatagcttttacttta

SEQ ID NO: 130823 - DNA, 80 bp, synthetic construct
  source 1..80: mol_type = other DNA
acattacagcagagacggccaagcgtaggctggccagggggtctcccccctccctggctagctcttcagctagtcagttg

SEQ ID NO: 130824 - DNA, 80 bp, synthetic construct
  source 1..80: mol_type = other DNA
gcgctacgaccggtgcttcgtacgtagcgtcgcgacaagacggcatttgcctgtacgggcaaggggccaaattgcgagtg

SEQ ID NO: 130825 - DNA, 80 bp, synthetic construct
  source 1..80: mol_type = other DNA
tcgagctaaccgcagccgcgcagatgagcttcttgctttaagggctggcgcttccatacctgggattgtgtccttggaag

SEQ ID NO: 130826 - DNA, 80 bp, synthetic construct
  source 1..80: mol_type = other DNA
catgccgcaagacttgccggaaaactgattggccggacaggccgcgtcgtgcacgcagcaccttgcgtcagtgttggaga

SEQ ID NO: 130827 - DNA, 80 bp, synthetic construct
  source 1..80: mol_type = other DNA
tcccgacaatgttgaagaaagggatgacaaccattcttgatttccatcctggagctgggaaaacaagacgttttcttcct

SEQ ID NO: 130828 - DNA, 80 bp, synthetic construct
  source 1..80: mol_type = other DNA
cactttctatcccagacaaagcagagcggggaaaaccttccttacctggtagcgtaccaagccaccgtgtgcgctagagc

SEQ ID NO: 130829 - DNA, 80 bp, synthetic construct
  source 1..80: mol_type = other DNA
acgtgacaggctttaaaaaggaattaggaacaatgatcaacgtggttaacaatcggggcacgaaaaagaagagaggcagc

SEQ ID NO: 130830 - DNA, 80 bp, synthetic construct
  source 1..80: mol_type = other DNA
aacgatctttgcggcctcagcctactgagctaaagtattcatggaaaacatggggtaaagcaaaaatgctctccacagag

SEQ ID NO: 130831 - DNA, 80 bp, synthetic construct
  source 1..80: mol_type = other DNA
cccctcccccgtcctgggatactatgtggaagtgtcttatccggcttaagcctacactaacaggcccaacacctttgcta

SEQ ID NO: 130832 - DNA, 80 bp, synthetic construct
  source 1..80: mol_type = other DNA
tcataccggacagagatactactacctcacaagagacccagtcacgccgttgtcccgagccgcttgggagacggctcggc

SEQ ID NO: 130833 - DNA, 80 bp, synthetic construct
  source 1..80: mol_type = other DNA
atgaaaccatgctatggatcttatgccaggcctacaaatccttttggtggtcaatccgttctggttccggatgaaaaagg

SEQ ID NO: 130834 - DNA, 80 bp, synthetic construct
  source 1..80: mol_type = other DNA
tgatggctacatttaagatccagccagttttcatggttgcgacgttcgtgaaggctaggtggacgaaccaggagaacatc

SEQ ID NO: 130835 - DNA, 80 bp, synthetic construct
  source 1..80: mol_type = other DNA
gagaggacatcaacggccccctcgagagcaccctcgcgacagatccgggaccgtcatggagtccatcccgaggtggactg

SEQ ID NO: 130836 - DNA, 80 bp, synthetic construct
  source 1..80: mol_type = other DNA
agattcagatgactggctgaacaagtattcatactatccagaggacccagtaaaacttgcttcaatagtgaaggcttcct

SEQ ID NO: 130837 - DNA, 80 bp, synthetic construct
  source 1..80: mol_type = other DNA
gaacaacaaacagagactgtggtgccatccattggaacatcggacgtttactgtaaaatgtgtgaccttaactttgatgg

SEQ ID NO: 130838 - DNA, 80 bp, synthetic construct
  source 1..80: mol_type = other DNA
tgggggggccgttattctaataatcactgtcttcactctcaccccggcttacaagaccatgctgacgcaagtcgtgtggt

SEQ ID NO: 130839 - DNA, 80 bp, synthetic construct
  source 1..80: mol_type = other DNA
cgagaccacagaacatggaacaattgcaaccataacacctcaagctcccacggcggaaatacagctgactgactacggag

SEQ ID NO: 130840 - DNA, 80 bp, synthetic construct
  source 1..80: mol_type = other DNA
ggcatactacagcacggtgtgcgctaggcccaaagccccccccccgtcatgggacacaatgtggaaatgtcttattagac

SEQ ID NO: 130841 - DNA, 80 bp, synthetic construct
  source 1..80: mol_type = other DNA
ttcggtcactcggtctgaatgcagtcgcattctacagaggcatcgacgtgtcagtgattcccacgtcgggagatgtggtc

SEQ ID NO: 130842 - DNA, 80 bp, synthetic construct
  source 1..80: mol_type = other DNA
actgtccagacagagaccctatagcatggctccagaaccccaagctgaccggtgtcaactcggccctgaaccagttctac

SEQ ID NO: 130843 - DNA, 80 bp, synthetic construct
  source 1..80: mol_type = other DNA
gtgaattgctcaacagtatgggcatttcgcagcctaccgtggtgttcgtttccaaaaaggggttgcaaaaaattttgaac

SEQ ID NO: 130844 - DNA, 80 bp, synthetic construct
  source 1..80: mol_type = other DNA
gccgaacggccatcaagtccctcaccgagagactctacgtcggggggcccctgaccaattctcgagggcagagctgtggc

SEQ ID NO: 130845 - DNA, 80 bp, synthetic construct
  source 1..80: mol_type = other DNA
gggaggattaataagctgggaggaaagcaggttccgcagaagctgggatttgccgcagccagtggtgccataaatgaccc

SEQ ID NO: 130846 - DNA, 80 bp, synthetic construct
  source 1..80: mol_type = other DNA
ggtctaccgctaccagggttgagacggacgagaaggtaataatactagactcttttgagtcatgtgtggctgagccaaat

SEQ ID NO: 130847 - DNA, 80 bp, synthetic construct
  source 1..80: mol_type = other DNA
ctgtgccacggacgccctcatgacgggcttcactggtgactttgactccgtgatagactgtaatacgtctgtcgtgcaaa

SEQ ID NO: 130848 - DNA, 80 bp, synthetic construct
  source 1..80: mol_type = other DNA
cgccgtgaccaggttggccccgttcaggaccatctcgccgtacgtcaccggcacgtcggcttcggtgtcctccactttca

SEQ ID NO: 130849 - DNA, 80 bp, synthetic construct
  source 1..80: mol_type = other DNA
cggacttacacacatagacgcccactttctgtcccagacaaagcaggggggggaaaactttgcgtaccttgtggcttacc

SEQ ID NO: 130850 - DNA, 80 bp, synthetic construct
  source 1..80: mol_type = other DNA
ctttcccacctatctagaatgtacaatggttgggttggtaatatgaaagtgagagtcatgttggcacgcaatgccatctc

SEQ ID NO: 130851 - DNA, 80 bp, synthetic construct
  source 1..80: mol_type = other DNA
gataaaactaaacctatgatacttaccattacacttaatggcactagtgaatccacagaaactagcgaggtaagcactta

SEQ ID NO: 130852 - DNA, 80 bp, synthetic construct
  source 1..80: mol_type = other DNA
ccaacagccacatgaccctgcacggctgtaatttctttggctttaacaacatgtgtgcagaagtctggggtgcttccaag

SEQ ID NO: 130853 - DNA, 80 bp, synthetic construct
  source 1..80: mol_type = other DNA
tcatgaacgactgggccgatgtgccctgcaacccctacctgcgcgtgcagaacaccggcgtttcggtgctgtttcaggtg

SEQ ID NO: 130854 - DNA, 80 bp, synthetic construct
  source 1..80: mol_type = other DNA
ctcaaactcactccaatagcggccgctggccggctggacttgtccggttggttcacggctggctacagcgggggagacat

SEQ ID NO: 130855 - DNA, 80 bp, synthetic construct
  source 1..80: mol_type = other DNA
cgaggtccaggtactatccactgccacacagtccttccttgggaccgctgtgaatggcgtcatgtggactgtttaccatg

SEQ ID NO: 130856 - DNA, 80 bp, synthetic construct
  source 1..80: mol_type = other DNA
gcaggatcgtgtggacgaaaaaaagctcgggctggccaagaatcccggccaagaggtcctggagtgtggcgttgtggcgg

SEQ ID NO: 130857 - DNA, 80 bp, synthetic construct
  source 1..80: mol_type = other DNA
ttatgtcaccggggtaacacaagacaacatcaagtgcccctgccaagttccggctccagagttcttcacagaggtggacg

SEQ ID NO: 130858 - DNA, 80 bp, synthetic construct
  source 1..80: mol_type = other DNA
gttgcggttcgttctggacgggagtcccgaggacgcctatgtgacgtcggaggattactttaagcgctgctgcggccagt

SEQ ID NO: 130859 - DNA, 80 bp, synthetic construct
  source 1..80: mol_type = other DNA
gaaggtggcgaccttccccacccttcaatctggggcctgaactggagatcagctgtggatctccagaagagggactagtg

SEQ ID NO: 130860 - DNA, 80 bp, synthetic construct
  source 1..80: mol_type = other DNA
acggagggtgctcggggggcgcctatgacattatcatttgtgatgagtgccattctaccgaccctactacagtgttggtg

SEQ ID NO: 130861 - DNA, 80 bp, synthetic construct
  source 1..80: mol_type = other DNA
aacagaggcatttacctctaataccttgcttctatatagtggtcttgtggctcttactctatttctaatttctaacttgt

SEQ ID NO: 130862 - DNA, 80 bp, synthetic construct
  source 1..80: mol_type = other DNA
aatttggtccagattgaaaaccttgaatacacggtagttgtgacagtccacaatggagacacccatgcagtgggaaatga

SEQ ID NO: 130863 - DNA, 80 bp, synthetic construct
  source 1..80: mol_type = other DNA
ttggtctgcggagacgatttggtagtcatctctgagagcttaggggtctcggaggacgctagtgccctgcgagcgttcac

SEQ ID NO: 130864 - DNA, 80 bp, synthetic construct
  source 1..80: mol_type = other DNA
ggatcactgaagattgcccagtcccatgttcggggtcttggctccgggacatttgggagtgggtatgttccattctcaca

SEQ ID NO: 130865 - DNA, 80 bp, synthetic construct
  source 1..80: mol_type = other DNA
tcctttcccagacgaagcaggcaggggagaatttcccgtacctggtggcctatcaggccacggcgtgcgccagagctaaa

SEQ ID NO: 130866 - DNA, 80 bp, synthetic construct
  source 1..80: mol_type = other DNA
aggtgctagtggacattctggcgggctatggggcaggtgtggctggcgcgctcgtggccttcaaggtcatgagcggcgag

SEQ ID NO: 130867 - DNA, 80 bp, synthetic construct
  source 1..80: mol_type = other DNA
tcataggagtagagccgggacaattgaaactcaattggttcaagaagggaagttccattggccaaatgtttgagacaaca

SEQ ID NO: 130868 - DNA, 80 bp, synthetic construct
  source 1..80: mol_type = other DNA
aaccgaatctaatttataactcgagagttttaatttttcagttgcaattgcatacatatccagagatatgagaccgttga

SEQ ID NO: 130869 - DNA, 80 bp, synthetic construct
  source 1..80: mol_type = other DNA
cgaacccagcctcgtgccccgcgaggctttcccgagcagcggtcgtcgcgcgggccgcggcatcgatgaggtcggcatgg

SEQ ID NO: 130870 - DNA, 80 bp, synthetic construct
  source 1..80: mol_type = other DNA
atgcagactgcaggccagcaagcggaagtgcttactcctaccatccaatccaattggcagaagctcgagtctttttgggc

SEQ ID NO: 130871 - DNA, 80 bp, synthetic construct
  source 1..80: mol_type = other DNA
ctgctgctattcgccggcgttgacgcgacaacttacaccaccgggggagccgccggccacaccgtggctggctttgccag

SEQ ID NO: 130872 - DNA, 80 bp, synthetic construct
  source 1..80: mol_type = other DNA
gtcttcactggactcacccatatagacgcccactttctatctcagacaaagcagagtggggaaaatcttccttacctggt

SEQ ID NO: 130873 - DNA, 80 bp, synthetic construct
  source 1..80: mol_type = other DNA
tccaaaagcgtgccaggaagaaattggcagaggcggcaaagctgtccgccgccgccacccacatcgaggccccggccaca

SEQ ID NO: 130874 - DNA, 80 bp, synthetic construct
  source 1..80: mol_type = other DNA
tccacaaaaactccaaaggtcagaaaaaccgccacatgaacacttccgcatactgtttcacatatcgtcacttccgccgc

SEQ ID NO: 130875 - DNA, 80 bp, synthetic construct
  source 1..80: mol_type = other DNA
cagaggcgctcaagggaatgccaataaggtaccaaacaacagcagtgaagagtgaacacacaggaaaagagatagttgac

SEQ ID NO: 130876 - DNA, 80 bp, synthetic construct
  source 1..80: mol_type = other DNA
caattccgactaccattatggcgaagaatgaagtcttcgccgtgaagcctgaaaaaggcggtcggaagccagctcgctta

SEQ ID NO: 130877 - DNA, 80 bp, synthetic construct
  source 1..80: mol_type = other DNA
tcgcacttcgtcctaatagtatatatattattagggcaaagtgcgagcgctggcgccctgcccggggcccgcgtcatccc

SEQ ID NO: 130878 - DNA, 80 bp, synthetic construct
  source 1..80: mol_type = other DNA
gtatgcgcgcgggcaaaggccccccccccctcctgggatgtgatgtggaaatgtctcatacggcttaagcctgtacttac

SEQ ID NO: 130879 - DNA, 80 bp, synthetic construct
  source 1..80: mol_type = other DNA
tggccatggaacggtggtgttggaactgcaatacaccggaacagacggtccctgcaaagtgcccatttcttccgtagctt

SEQ ID NO: 130880 - DNA, 80 bp, synthetic construct
  source 1..80: mol_type = other DNA
ttgaaggccaggattctgcgttgggtactagcagccaacacgattcggggcctgaggagaagcgtgatgacaactcggac

SEQ ID NO: 130881 - DNA, 80 bp, synthetic construct
  source 1..80: mol_type = other DNA
ccacccatatagaacctggaactatcacggcagttatgatgtgaagcccacaggttctgccagttcgctggttaatggag

SEQ ID NO: 130882 - DNA, 80 bp, synthetic construct
  source 1..80: mol_type = other DNA
tggcactcccagtgacacgacgtccccggcccccaaagaggagctcgatggatctgacgcagggtctgaggctgagtcat

SEQ ID NO: 130883 - DNA, 80 bp, synthetic construct
  source 1..80: mol_type = other DNA
gcctcatgttagtgtcctatgttatctcgggaaaagccacagacatgtggcttgaaagagcagcagatgtgtcatgggaa

SEQ ID NO: 130884 - DNA, 80 bp, synthetic construct
  source 1..80: mol_type = other DNA
ccagagattgaagatgacatctttcgaaaaaaaagattgaccattatggacctccacccaggagcgggaaagacgaaaag

SEQ ID NO: 130885 - DNA, 80 bp, synthetic construct
  source 1..80: mol_type = other DNA
cctcaatggacccatggcaatcacatcagcgagcgcagcacagcgcagaggccgcattggaagaaatccttcgcagattg

SEQ ID NO: 130886 - DNA, 80 bp, synthetic construct
  source 1..80: mol_type = other DNA
gtatccgccccaaatccgacattgggacaagacgcgcccgcggggcgtacctttgatggggatttagcgcgcgtaagcgt

SEQ ID NO: 130887 - DNA, 80 bp, synthetic construct
  source 1..80: mol_type = other DNA
aaactcactccattgccggcggcacgcctcctggacttgtccagctggttcaccgtcagcgctggcggtggcgacatata

SEQ ID NO: 130888 - DNA, 80 bp, synthetic construct
  source 1..80: mol_type = other DNA
tgggagagagtgcattgacactccattggttcaggaaagggagctctattggtaagatgtttgagtccacgtacagaggt

SEQ ID NO: 130889 - DNA, 80 bp, synthetic construct
  source 1..80: mol_type = other DNA
tcaccatcactgacgcccgccgccggacctgtccctacgtttacaaagcactgggcatagtttctccacgagtgctttct

SEQ ID NO: 130890 - DNA, 80 bp, synthetic construct
  source 1..80: mol_type = other DNA
tctcccccgagcacgtcgcgtaccttggtgcgttcctgagcgtgctgtacgctggccgcgggcgcatgtccgcagcaacg

SEQ ID NO: 130891 - DNA, 80 bp, synthetic construct
  source 1..80: mol_type = other DNA
gcgcccattacagcgtatgcccagcagactcgtggtctgttgggcactattgtcaccagtttgaccggccgagacaagaa

SEQ ID NO: 130892 - DNA, 80 bp, synthetic construct
  source 1..80: mol_type = other DNA
ccctgaactaccagaacgaccacagcaactttctaaccacggtcattcaaaacaatgactacagcccgggggaggcaagc

SEQ ID NO: 130893 - DNA, 80 bp, synthetic construct
  source 1..80: mol_type = other DNA
gtcaccgggtccgaccccgcgaacaacatgtccaaattttgcgatctcgcctccatgtttgcggggtatggaaattaagc

SEQ ID NO: 130894 - DNA, 80 bp, synthetic construct
  source 1..80: mol_type = other DNA
gtacagaggagtctatctaccaatgctgccagctagacccgcaggctcgcaaagctataacatccctgactgaacggctc

SEQ ID NO: 130895 - DNA, 80 bp, synthetic construct
  source 1..80: mol_type = other DNA
ctcctattcctgctgcttgcagacgctcgcgtctgtgcctgcttgtggatggcgttactcgtatcccaggtagaggcggc

SEQ ID NO: 130896 - DNA, 80 bp, synthetic construct
  source 1..80: mol_type = other DNA
aggtgatctccactgctacccaaacattcctaggcaccacaattaatggggtgctgtggacggtctaccacggcgcaggg

SEQ ID NO: 130897 - DNA, 80 bp, synthetic construct
  source 1..80: mol_type = other DNA
gatatggtactgacagagtgcattatgaggttacaataatagatggcttcgaaaatgcggggcagcaaaaagatgatgag

SEQ ID NO: 130898 - DNA, 80 bp, synthetic construct
  source 1..80: mol_type = other DNA
ccattattgtcagcctagcattttactgcttttgcaagcccaaaaaacctaagtttgaaaaacttaaactaaaacctgtc

SEQ ID NO: 130899 - DNA, 80 bp, synthetic construct
  source 1..80: mol_type = other DNA
ccgagctgagcccacttctacacaccactacacagtgggccatattgccgtgctcgttcacacccacgtctgctcttagc

SEQ ID NO: 130900 - DNA, 80 bp, synthetic construct
  source 1..80: mol_type = other DNA
cgcacgtgtgtatgcggatcaccaggctctgaagtggttcaaggacttcgcggcagggaagagatcagctgtcagctttc

SEQ ID NO: 130901 - DNA, 80 bp, synthetic construct
  source 1..80: mol_type = other DNA
gtgcacggagaaagctctttatccaacaggaaaggagcttggctagatagcaccaaagcgtcacgatacctaatgaaggc

SEQ ID NO: 130902 - DNA, 80 bp, synthetic construct
  source 1..80: mol_type = other DNA
tcccccaggatcggtggaggcctttccacagagcaatgcagttatccaagatgaggaaagagacattcctgagagatcat

SEQ ID NO: 130903 - DNA, 80 bp, synthetic construct
  source 1..80: mol_type = other DNA
aatgaccagtctttcaacgattacttgtgcgcggcgaacatgttgtatcccattccagcaaatgccaccagcgtgcccat

SEQ ID NO: 130904 - DNA, 80 bp, synthetic construct
  source 1..80: mol_type = other DNA
tgacgcggccgtctggttcgaggatatgacccccgccgagctggaggttgtcttcccgactacggacgccaagctaaact

SEQ ID NO: 130905 - DNA, 80 bp, synthetic construct
  source 1..80: mol_type = other DNA
ttttcaagcaacactgtcaagttgacatcgggtcatttgaagtgtagagtgaagatggaaaaattgcagttgaagggaac

SEQ ID NO: 130906 - DNA, 80 bp, synthetic construct
  source 1..80: mol_type = other DNA
gtgaatccagcaaagggactcccgtctcgccttccactgacacatcatcacctgatgacgacggggcggcgtcggaggct

SEQ ID NO: 130907 - DNA, 80 bp, synthetic construct
  source 1..80: mol_type = other DNA
cttcgagcatgaggaaaacagattggctcccaatgactgtggcagctatgggagttccacccttaccactttttatcttc

SEQ ID NO: 130908 - DNA, 80 bp, synthetic construct
  source 1..80: mol_type = other DNA
attgagacagaaccaccttttggtgagagctacatcgtggtaggggcaggcgaaaaagctttgaaactaagctggttcaa

SEQ ID NO: 130909 - DNA, 80 bp, synthetic construct
  source 1..80: mol_type = other DNA
tgacatctctaggtctaaatgctgtagcctactacagaggcttagacgtttcggtgatccctgcgtctggggacgtcgtg

SEQ ID NO: 130910 - DNA, 80 bp, synthetic construct
  source 1..80: mol_type = other DNA
tacttttctggttgtctgtgggatctttattcttgcggttcttctgtactttgtctgctgcaaagccagagagaaatcta

SEQ ID NO: 130911 - DNA, 80 bp, synthetic construct
  source 1..80: mol_type = other DNA
cgctccggtggcattggaactctacaatttattgaggagttcgtgccctcggtctacttcaacccattctcgggacctcc

SEQ ID NO: 130912 - DNA, 80 bp, synthetic construct
  source 1..80: mol_type = other DNA
tgtggatgaactccacgggatttgtcaagacgtgcggagcccctccttgtgatatctatgggcgtggggaaaatccccgg

SEQ ID NO: 130913 - DNA, 80 bp, synthetic construct
  source 1..80: mol_type = other DNA
attggagcttacctggaagaacaagaacagtggaagactgccaatgaggctgtccaagacccaaagttctgggaactggt

SEQ ID NO: 130914 - DNA, 80 bp, synthetic construct
  source 1..80: mol_type = other DNA
caggaagcttggggtgcccccattgagagcgcggagacatcgggcccgagcagtccgcgccaagctcatcgctcagggag

SEQ ID NO: 130915 - DNA, 80 bp, synthetic construct
  source 1..80: mol_type = other DNA
ccccccgcatcggtggccgtagggccccccggaggcttgggaggcggttttttctggacatgtcggcggaatccaccacg

SEQ ID NO: 130916 - DNA, 80 bp, synthetic construct
  source 1..80: mol_type = other DNA
tttgatatgtatggagtcacgtactccatcactccattagatttaccacaaatcatccagcgtttacacggcatggccgc

SEQ ID NO: 130917 - DNA, 80 bp, synthetic construct
  source 1..80: mol_type = other DNA
tatcgcaggctttcatagtgtcgccgaaacaccacaacttcacccaagaatgcaactgttccatctaccaaggtcatatc

SEQ ID NO: 130918 - DNA, 80 bp, synthetic construct
  source 1..80: mol_type = other DNA
ttgctactcgtggcgttgccccaacaggcttacgctctcgacacggcagagcagggccagattggcgtggtgctactggt

SEQ ID NO: 130919 - DNA, 80 bp, synthetic construct
  source 1..80: mol_type = other DNA
ctggtttaatccacctccaccaaaacatcgtggatatccagtatctctatggcatagggtccactgtggtgtcatgggcc

SEQ ID NO: 130920 - DNA, 80 bp, synthetic construct
  source 1..80: mol_type = other DNA
aaaatttaaatgctacagagaggcaggctttattttttgcctcaatgattttattaaatttccgcgaaggactagaaaat

SEQ ID NO: 130921 - DNA, 80 bp, synthetic construct
  source 1..80: mol_type = other DNA
cccccgtcccgcggccccagttgcttaaaatcaaacgcacgctcgccgggggcgcctgcgtcggctattaccgacgcctg

SEQ ID NO: 130922 - DNA, 80 bp, synthetic construct
  source 1..80: mol_type = other DNA
ctgtccacctacgtggtgggatcgcaattaccctgtgagcctgagccagacgtgctggtagtgacatcaatgttgaggga

SEQ ID NO: 130923 - DNA, 80 bp, synthetic construct
  source 1..80: mol_type = other DNA
ggaccatctgtaacgatacattgtcttggagtcttattgcggctattaacacaacggtcatactatccgatatttgtatt

SEQ ID NO: 130924 - DNA, 80 bp, synthetic construct
  source 1..80: mol_type = other DNA
caacccccctctagtagtggcctcggccactccattggaggggacaccccgaacaccgtaggcgatccatccccggatga

SEQ ID NO: 130925 - DNA, 80 bp, synthetic construct
  source 1..80: mol_type = other DNA
tattcaaattaacgtaccaaaacaaggtggtgcgtgtgcaaagaccaacaccaagaggcacagtaatggacatcatatcg

SEQ ID NO: 130926 - DNA, 80 bp, synthetic construct
  source 1..80: mol_type = other DNA
taaatttgatatcagttgtttgtcaagtttttccagcagcaccacctgcccttcctcccaactttcgtacgggatgtgcc

SEQ ID NO: 130927 - DNA, 80 bp, synthetic construct
  source 1..80: mol_type = other DNA
taggggctctaatgtggttcctgaggcacaagcccaggtacggaaatctggaaaaggaaaaattgctataaatgtttttc

SEQ ID NO: 130928 - DNA, 80 bp, synthetic construct
  source 1..80: mol_type = other DNA
cattacaattactgccactgctaatattacttctggcacaatcaaggcagaaagctataaaaatgaaatgaaaaaaatgg

SEQ ID NO: 130929 - DNA, 80 bp, synthetic construct
  source 1..80: mol_type = other DNA
gcgcgcagcatttctcccaggtcgcgatcgcgtccgcgcatgtgcgcctggcggtgcagctgccggacgctggcgcgcag

SEQ ID NO: 130930 - DNA, 80 bp, synthetic construct
  source 1..80: mol_type = other DNA
ccctggaggtggagcctggggatccggatcttagcgacgggtcatggtcaacggtcagtagtgaggccaacgcggaggat

SEQ ID NO: 130931 - DNA, 80 bp, synthetic construct
  source 1..80: mol_type = other DNA
gccccctgagcaattcacttttgcgccatcacaatatggtgtatgccacgaccacccgttctgctgtgacacggcagaag

SEQ ID NO: 130932 - DNA, 80 bp, synthetic construct
  source 1..80: mol_type = other DNA
atgactaacgctggggcacagcttgcgggcggtgcacgtcacagtttcaggtataaaggtcgcactgagccctatccgtc

SEQ ID NO: 130933 - DNA, 80 bp, synthetic construct
  source 1..80: mol_type = other DNA
gcaacgaggaagacttctgaacggtcccagcccagaggtaggcgccagcccatcccaaaggtgcgccgccaaacgggccg

SEQ ID NO: 130934 - DNA, 80 bp, synthetic construct
  source 1..80: mol_type = other DNA
taagttatcaccagatttggcgcttgatacgctggcatatcgatgtgtcctggcgccatatatactcccatctgacatcc

SEQ ID NO: 130935 - DNA, 80 bp, synthetic construct
  source 1..80: mol_type = other DNA
cttacatgcccagagtgattgagaagatggaaacactccaaaggcgatatggaggtggccttgtgagaaaccccctttca

SEQ ID NO: 130936 - DNA, 80 bp, synthetic construct
  source 1..80: mol_type = other DNA
ggtcctcgggggggccagtgctttgccctagaggtcatgctgtgaggattttccgagcagccatctgcaccagaggtgct

SEQ ID NO: 130937 - DNA, 80 bp, synthetic construct
  source 1..80: mol_type = other DNA
cgactcggaaagaggtccccacgtgtcttaaccctaaggcccagttgtcagaccacacgcaagtgtgctactctgcgaag

SEQ ID NO: 130938 - DNA, 80 bp, synthetic construct
  source 1..80: mol_type = other DNA
tacgccactcagattttgggtccttggcacttaggaaagctagaaatggattttggtgaatgtccaggaacatcagtgaa

SEQ ID NO: 130939 - DNA, 80 bp, synthetic construct
  source 1..80: mol_type = other DNA
ctcaaactcactccattaccgtccgcgtctcagttggacttgtccaattggttcacgggcggttacagcgggggagacat

SEQ ID NO: 130940 - DNA, 80 bp, synthetic construct
  source 1..80: mol_type = other DNA
acgtccggccccgttggttcctctggtgcctactcctactttcagtaggggtaggcatctatctccttcccaaccgataa

SEQ ID NO: 130941 - DNA, 80 bp, synthetic construct
  source 1..80: mol_type = other DNA
ccggcagccggcgggcgattggtcgtaatccaggataaagacgtgcatgggacggaggcgtttggccaagacgtccaaag

SEQ ID NO: 130942 - DNA, 80 bp, synthetic construct
  source 1..80: mol_type = other DNA
cccatttctttagcgtcctcatagccagggatcagcttgaacaggctcttaactgtgagatctacggagcctgctactcc

SEQ ID NO: 130943 - DNA, 80 bp, synthetic construct
  source 1..80: mol_type = other DNA
gtgtgcatttctggcaacccgcatatttgggcgaaggagtatcccagtgaatgaggcactcgcagcagctggtctagtgg

SEQ ID NO: 130944 - DNA, 80 bp, synthetic construct
  source 1..80: mol_type = other DNA
tcgtctatgaggctgaagacctgatcttacacgcacctggttgcgtgccctgtgttaggcagggtaatgtcagtaggtgc

SEQ ID NO: 130945 - DNA, 80 bp, synthetic construct
  source 1..80: mol_type = other DNA
ctagaagtcatcactagcacgtgggtcctgatgggaggagtccttgctgccctcgcggcttactgtctaaccgtgggctg

SEQ ID NO: 130946 - DNA, 80 bp, synthetic construct
  source 1..80: mol_type = other DNA
gccttatctgaagtgacaggactaggtcctgacatcatacaggccaactccatgtactccttctatggcgatgacgagac

SEQ ID NO: 130947 - DNA, 80 bp, synthetic construct
  source 1..80: mol_type = other DNA
cctccaacatgcccagctaaacgtcacctctggccacccttatcccccacacccgcgaaaacatatcagttccatgcaag

SEQ ID NO: 130948 - DNA, 80 bp, synthetic construct
  source 1..80: mol_type = other DNA
tggatccatgaagactatgcctcaccttgctcaacgtcttggttgagggatatctgggactgggtgtgtactgtactctc

SEQ ID NO: 130949 - DNA, 80 bp, synthetic construct
  source 1..80: mol_type = other DNA
tccagagttaagtcatcgtaggacagcttaacaaatttagggcgcaatgttccagattggggtattaaagttccttggtg

SEQ ID NO: 130950 - DNA, 80 bp, synthetic construct
  source 1..80: mol_type = other DNA
gacaacggccggcccggccccgcccgagaccgaggacgcctggggagtggtggtgccgctttcccccatccccagggaca

SEQ ID NO: 130951 - DNA, 80 bp, synthetic construct
  source 1..80: mol_type = other DNA
ggcaacatgggctgagaacatctacgcggcaataaaccaagtgagggccatcattggaaaagaaaattatgttgattaca

SEQ ID NO: 130952 - DNA, 80 bp, synthetic construct
  source 1..80: mol_type = other DNA
accagcggcgacgcccagcgaaccggactccgtcgtgtgttcctgcgccgacaagatcgggctgcgcgtgtgcctaccgg

SEQ ID NO: 130953 - DNA, 80 bp, synthetic construct
  source 1..80: mol_type = other DNA
cgcagctgttcctcgagatggtactcgaggggcactggggcgttctcggtgctctgctgtattacagcatggtggcaaat

SEQ ID NO: 130954 - DNA, 80 bp, synthetic construct
  source 1..80: mol_type = other DNA
tcgcatgccgcgcgaaatccctcgggcgatttccaggcccccccgcaaacgcggccgaagcgaccccatacctcgtccca

SEQ ID NO: 130955 - DNA, 80 bp, synthetic construct
  source 1..80: mol_type = other DNA
caccgttttcagctacagtggggtggaggacttgtgagagtccctttctcacggaattccacacatgagatgtattattc

SEQ ID NO: 130956 - DNA, 80 bp, synthetic construct
  source 1..80: mol_type = other DNA
atacaatatctggcgggcctgtcaacgctgcctggtaatcccgctatcgcatcattgatggcttttacagctgccgtcac

SEQ ID NO: 130957 - DNA, 80 bp, synthetic construct
  source 1..80: mol_type = other DNA
gccggccggggcgccgcgcagcagctcgccgcccggatccgccagacaaacaaggcccttgcacatgccggcccgggcga

SEQ ID NO: 130958 - DNA, 80 bp, synthetic construct
  source 1..80: mol_type = other DNA
agaggccactcttgagtgcgagcgagtagagttttctcctccgttgctgccgagatgagaatgctgccagacttcttcac

SEQ ID NO: 130959 - DNA, 80 bp, synthetic construct
  source 1..80: mol_type = other DNA
acatggagaaattggagccgtgagcttggattacccgattggaacttcaggatccccaatagtcaatagcaatggagaaa

SEQ ID NO: 130960 - DNA, 80 bp, synthetic construct
  source 1..80: mol_type = other DNA
agtattttctgaccagagtagaagcgcaactgcacgtgtgggttccccccctcaacgtccggggggggcgcgatgccgtc

SEQ ID NO: 130961 - DNA, 80 bp, synthetic construct
  source 1..80: mol_type = other DNA
gcctcactcagcacgatcaaagtatggatatggggcaaaggaggtacgcagcttgtccaggagggccattaaccacatca

SEQ ID NO: 130962 - DNA, 80 bp, synthetic construct
  source 1..80: mol_type = other DNA
cccccccctcccgggagagccatagtggtctgcggaaccggtgagtacaccggaattgccgggaagactgggtcctttct

SEQ ID NO: 130963 - DNA, 80 bp, synthetic construct
  source 1..80: mol_type = other DNA
ccttactttgtgcgcgcccacatacttctgcgtgcttgtctgcttgttcgtaggctggcagggggtaagtacgtgcaggc

SEQ ID NO: 130964 - DNA, 80 bp, synthetic construct
  source 1..80: mol_type = other DNA
catgccatcgcccacgacgaccagacctacgccatggacgtcgtctggttgaggttcgacgtgccgacctcgtgtgccga

SEQ ID NO: 130965 - DNA, 80 bp, synthetic construct
  source 1..80: mol_type = other DNA
gtgtgcctctgtcctctgcgtacaagatctcggaccattctgagacaaaagcccgggtccaggctaaaacaaaggaggcg

SEQ ID NO: 130966 - DNA, 80 bp, synthetic construct
  source 1..80: mol_type = other DNA
cacatcgatgggtcacaccatcggggggcttactggcctctttgttcacggccccaagcagaaaatcaatttgatcaaaa

SEQ ID NO: 130967 - DNA, 80 bp, synthetic construct
  source 1..80: mol_type = other DNA
tgttacttgaaggccactgcggcctgtcgagctgccaagctccaggactgcacaatgctcgtgtgcggagacgaccttgt

SEQ ID NO: 130968 - DNA, 80 bp, synthetic construct
  source 1..80: mol_type = other DNA
ccagcccatccccaaagatcggcgcaccacaggcaagtcctggggacgtccaggatatccctggcccctgtatgggaatg

SEQ ID NO: 130969 - DNA, 80 bp, synthetic construct
  source 1..80: mol_type = other DNA
actgagctgccttgttctttgaccgccacggcaccagtaagacccaccccatgcagagtttcctgtagacgacgcccagc

SEQ ID NO: 130970 - DNA, 80 bp, synthetic construct
  source 1..80: mol_type = other DNA
taccaaagctgagttctgtgcaaggtgacacttgcatcatttatttcctctcaagcagcgggtgtcatacgagaaacccc

SEQ ID NO: 130971 - DNA, 80 bp, synthetic construct
  source 1..80: mol_type = other DNA
ctaaactcttaccccgcatgccaggccttcccttcttgtcctgtcaaaagggcttcaagggggagtggcgcgtggacgga

SEQ ID NO: 130972 - DNA, 80 bp, synthetic construct
  source 1..80: mol_type = other DNA
ggtggccactggggcgtgatgtttggcatgcattactttgctatgcaggtggcatgggccaaggtcgttgttattatcat

SEQ ID NO: 130973 - DNA, 80 bp, synthetic construct
  source 1..80: mol_type = other DNA
tctcccgtggtcattgcaggaggcgttgtaggacgccgtcttcgatttgacagggatcgatcacggtgttttcttgaact

SEQ ID NO: 130974 - DNA, 80 bp, synthetic construct
  source 1..80: mol_type = other DNA
caagacaatctgcggcccgaaaggacccgtcaaccaaatgtataccaatgttgaccaagaccttgtggggtggcctgcgc

SEQ ID NO: 130975 - DNA, 80 bp, synthetic construct
  source 1..80: mol_type = other DNA
ggcttacccatattgacgcccatttcctctcacagactaaacaggggggggaaaactttgcttatttagtggcctaccaa

SEQ ID NO: 130976 - DNA, 80 bp, synthetic construct
  source 1..80: mol_type = other DNA
tgctccaggcggacttccgtggctttttgctgccggcgagggcgcaacgccgtacgtcggttgttatggccgcgagaacg

SEQ ID NO: 130977 - DNA, 80 bp, synthetic construct
  source 1..80: mol_type = other DNA
ggcgtggtttgcaagtttgccgaagccggatgtgacgcgtgtgggagccgggcgcgccggatgtgacgcgttagtcgcca

SEQ ID NO: 130978 - DNA, 80 bp, synthetic construct
  source 1..80: mol_type = other DNA
atgatgatggcgtctaaggacgctacaccaagcgcagatggcgccactggcctggtaccggaggttaatactgaccctat

SEQ ID NO: 130979 - DNA, 80 bp, synthetic construct
  source 1..80: mol_type = other DNA
ggccggtggtcgggttcgggaccgagaggctctggtcgtcgggagcgcgctggtacaccggatgccccgggaatagctcc

SEQ ID NO: 130980 - DNA, 80 bp, synthetic construct
  source 1..80: mol_type = other DNA
tgtactgtttcaccccgagccctgtcgtactgggtaccactgatcgaagaggcaaccctacttacaactggggggacaac

SEQ ID NO: 130981 - DNA, 80 bp, synthetic construct
  source 1..80: mol_type = other DNA
gcgccggcgtccaggaggatgctgcgagcctgagagccttcacggaggctatgaccaggtactccgctcctccaggagac

SEQ ID NO: 130982 - DNA, 80 bp, synthetic construct
  source 1..80: mol_type = other DNA
gacccatcccacatcacggccgaaacggccgcgcggcgtctggccaggggatctcccccctcagaggctagttcgtccgc

SEQ ID NO: 130983 - DNA, 80 bp, synthetic construct
  source 1..80: mol_type = other DNA
gagcctgggcaacctttggacttgagctgtaaacgccccaggccataaggtgtaaacctgtgattgtgtgtgtggttaac

SEQ ID NO: 130984 - DNA, 80 bp, synthetic construct
  source 1..80: mol_type = other DNA
gctgattgccttcttcatcattgcctggcacctcaaaggacggtttgccccagcctgcgcttactcactccttggcttat

SEQ ID NO: 130985 - DNA, 80 bp, synthetic construct
  source 1..80: mol_type = other DNA
cggcctcctagtccttgggattattaccatattctccctcaccccaggctataagaagactctaattaccatgctctggt

SEQ ID NO: 130986 - DNA, 80 bp, synthetic construct
  source 1..80: mol_type = other DNA
tggtcgccggatgtgctctccctcctcctggaaccaccccagtgccgcctcctaggaggcggcgagctgtggtgctggac

SEQ ID NO: 130987 - DNA, 80 bp, synthetic construct
  source 1..80: mol_type = other DNA
gcgccgcgttctcgcgcgccagcaggggcgcgtaggcgcggcgcaggctggtcagcaggaagcccttctgcgcgcggtcg

SEQ ID NO: 130988 - DNA, 80 bp, synthetic construct
  source 1..80: mol_type = other DNA
cccgacccgcgcgcgtcggtcgcgcctgcccggcccagactctgtgcttgggtgtcggtctgagcctgggtcatgcgcga

SEQ ID NO: 130989 - DNA, 80 bp, synthetic construct
  source 1..80: mol_type = other DNA
tcgaaggggcgaccactgttcaacatgcagctcggaccacgcagggacttgtcagcttcttttcccgtgggcccaaacag

SEQ ID NO: 130990 - DNA, 80 bp, synthetic construct
  source 1..80: mol_type = other DNA
tgctgtcttcaaagtgcagccagcatttttggcgggtctgtttttaagaatgcagtggagcaaccaggaaaacatcttga

SEQ ID NO: 130991 - DNA, 80 bp, synthetic construct
  source 1..80: mol_type = other DNA
aaggcgcgcgcgggctcgcttcacttttcacccctgggccgcagcagaacttgcagctcataaataccaacgggagctgg

SEQ ID NO: 130992 - DNA, 80 bp, synthetic construct
  source 1..80: mol_type = other DNA
tttactgtttcactcctagccctgttgtcgtaggcaccactgacaagcagggcgtacccacctacagctggggggaaaat

SEQ ID NO: 130993 - DNA, 80 bp, synthetic construct
  source 1..80: mol_type = other DNA
gcctgattggcacaagagcccgagccacgtgggcagaaaacatccaggtggctatcaaccaagtcagagcaatcatcgga

SEQ ID NO: 130994 - DNA, 80 bp, synthetic construct
  source 1..80: mol_type = other DNA
ccgcaacttcccacccggagctttcttccggcctcgatgacgtcccggctctccgatcccaactcctcagcgcgatccga

SEQ ID NO: 130995 - DNA, 80 bp, synthetic construct
  source 1..80: mol_type = other DNA
agaccgtcgcgaaacttgaagttcctcccctccaccaggttgcgcatcagctgctccacctcgcggtccacgacctgcct

SEQ ID NO: 130996 - DNA, 80 bp, synthetic construct
  source 1..80: mol_type = other DNA
tttatcaaataatggtggaaatatatgtgttagagttggagaaggcggcggcttatcatttaatgacaatggagacttgg

SEQ ID NO: 130997 - DNA, 80 bp, synthetic construct
  source 1..80: mol_type = other DNA
gtgattggtcaactccatgtgctggttcatggttgcgggacatctgggactgggtttgcactgtgctctccgatttcaag

SEQ ID NO: 130998 - DNA, 80 bp, synthetic construct
  source 1..80: mol_type = other DNA
ttaactccgggggcgtcatggcctcccaggagatcgtttccgcgacggtgcgcctgcagaccgacccggtcgagtatctg

SEQ ID NO: 130999 - DNA, 80 bp, synthetic construct
  source 1..80: mol_type = other DNA
ggctagttcttactttgacattcgaggggtactggatcgtggtcccagttttaagccctattccggaactgcctacaatt

SEQ ID NO: 131000 - DNA, 80 bp, synthetic construct
  source 1..80: mol_type = other DNA
tttcacagtttacctgctttacggatttgtcacccttatcctcatctgcagcctcgtcactgtagtcatcgccttcattc

SEQ ID NO: 131001 - DNA, 80 bp, synthetic construct
  source 1..80: mol_type = other DNA
tgacgtctattaatgttcaagccagcgccttatttactttggctcgaggatttcctttcgttgacgtgggtatatcttcc

SEQ ID NO: 131002 - DNA, 80 bp, synthetic construct
  source 1..80: mol_type = other DNA
tcatgaagctgtgctccatgtccccggctgtgtcccctgtgagaaccacaacggaacgttccggtgttggatcccggtca

SEQ ID NO: 131003 - DNA, 80 bp, synthetic construct
  source 1..80: mol_type = other DNA
agagacaaccattacatcgtgggggttacagctgacaacgttaaatgcccctgccaggtgcctgcgcccgagttcttcac

SEQ ID NO: 131004 - DNA, 80 bp, synthetic construct
  source 1..80: mol_type = other DNA
ctattagactcttactatgactcaaccttaaaggacatcaagctagcggcctccaaggttagcgctaggctcctctccgt

SEQ ID NO: 131005 - DNA, 80 bp, synthetic construct
  source 1..80: mol_type = other DNA
acctgcatggccgctgatctagaggtgattaccagcacgtgggtaatagctggaggggttctcgcagctctggcggccta

SEQ ID NO: 131006 - DNA, 80 bp, synthetic construct
  source 1..80: mol_type = other DNA
aaataatacccccggtgatattttgtttgatttacaactaggcccacatctaaaccctttcttgtcacatttgtcccaaa

SEQ ID NO: 131007 - DNA, 80 bp, synthetic construct
  source 1..80: mol_type = other DNA
gcaaacgtacctgacagacatcgcggccctgttcgtcgcggacgtccagcacgcagcgctgcccccgcccccctccccgg

SEQ ID NO: 131008 - DNA, 80 bp, synthetic construct
  source 1..80: mol_type = other DNA
gtggcgttaatgggagccgcatacggcttccagtactcgcccaagcaaagggtagatcaactcctcaaaatgtggcgctc

SEQ ID NO: 131009 - DNA, 80 bp, synthetic construct
  source 1..80: mol_type = other DNA
acagccagcagctccgggtcttcttcgtctacacagacaaacatccatgttggaggaagagatgagggagaccatggacg

SEQ ID NO: 131010 - DNA, 80 bp, synthetic construct
  source 1..80: mol_type = other DNA
cggttttggaatgtttactacactcggatatttgatatgtggatttcgagtcgtcttaatgtatagatttgaagaagagc

SEQ ID NO: 131011 - DNA, 80 bp, synthetic construct
  source 1..80: mol_type = other DNA
tccaatggcatgcttgcgctcaaaatgggcaacggcctctctctggacgaggccggcaaccttacctcccaaaatgtaac

SEQ ID NO: 131012 - DNA, 80 bp, synthetic construct
  source 1..80: mol_type = other DNA
aggggcttggactggcactggcatcatgacaacacggtgcccatgcggagctgtcgtttcgggcaatgtccgtcacggtt

SEQ ID NO: 131013 - DNA, 80 bp, synthetic construct
  source 1..80: mol_type = other DNA
ctcaaggggtcctcaggaggtccgatcctctgcccctcgggccacgccgtcggcatatttcgcgcggcggtctgcacccg

SEQ ID NO: 131014 - DNA, 80 bp, synthetic construct
  source 1..80: mol_type = other DNA
aaatttgcaaaacgacgatggtagtagcagaggggttggtataaatgtaagactcggcacagatggaggtctgtcctttg

SEQ ID NO: 131015 - DNA, 80 bp, synthetic construct
  source 1..80: mol_type = other DNA
gggacaactcttcacgtttcggccccgacaatataatactgtccaagagtgcaactgctctatttacagcggacacatca

SEQ ID NO: 131016 - DNA, 80 bp, synthetic construct
  source 1..80: mol_type = other DNA
gatagtgccccaggaggactgggttaacaaaggcaaaccaacgccccacgcggccctagccttggtaatggtgttaacca

SEQ ID NO: 131017 - DNA, 80 bp, synthetic construct
  source 1..80: mol_type = other DNA
gcctaaccagagtgccgtacttcgtgcgcgctcaggggcttatccgtgcatgcatgttggtgcgtaaggtcgctggtggt

SEQ ID NO: 131018 - DNA, 80 bp, synthetic construct
  source 1..80: mol_type = other DNA
ccctgcgatatggataatggcggagcaaggttgattgttccttggtgctcattgtagtgcaccctcttgcgtacctcgtt

SEQ ID NO: 131019 - DNA, 80 bp, synthetic construct
  source 1..80: mol_type = other DNA
gatatgatgatgaactggtcccccacggcaacatacatcctctccagcattatgcggataccccaggtcctttttgacgt

SEQ ID NO: 131020 - DNA, 80 bp, synthetic construct
  source 1..80: mol_type = other DNA
gtgggacacgtactggcacaactggctgaaaagagcttcccaaccacagagcaccatcctcatgacaattcagattctgg

SEQ ID NO: 131021 - DNA, 80 bp, synthetic construct
  source 1..80: mol_type = other DNA
cttcgcggtactactcccccagggcgaccccgacgtccagctgcgcctcacgaagccccagctcacgaaggtggtgaacg

SEQ ID NO: 131022 - DNA, 80 bp, synthetic construct
  source 1..80: mol_type = other DNA
aaccttccatactttatttaaacccgcgtagtctttaaccagcgacaataaccgcgctttactttccatcgataaaaccc

SEQ ID NO: 131023 - DNA, 80 bp, synthetic construct
  source 1..80: mol_type = other DNA
ggccaccaatgactgttccaataacagcattgtgcttgagacatcatctgccattcttcacacacctggttgcgtcccat

SEQ ID NO: 131024 - DNA, 80 bp, synthetic construct
  source 1..80: mol_type = other DNA
gtctgccacgctttgctcggcgctgtatgtcggagacatgtgtggggccgtcttccttgttggtcagctattcaccttct

SEQ ID NO: 131025 - DNA, 80 bp, synthetic construct
  source 1..80: mol_type = other DNA
aaaaataccagcctgagccgcaggtaggggcaagtgaatggaataccagtattacaaacgttaaagcaggtggtagggca

SEQ ID NO: 131026 - DNA, 80 bp, synthetic construct
  source 1..80: mol_type = other DNA
tgtggatctcatggtgggggcagctgccttctgctcggctatgtacataggtgacctgtgcggcggtatattcttggtag

SEQ ID NO: 131027 - DNA, 80 bp, synthetic construct
  source 1..80: mol_type = other DNA
tacctgaaggcgcgaggcctgtgcggcctggacgaactgtgttcgcggcggcgtctggcggacattaaggacattgcatc

SEQ ID NO: 131028 - DNA, 80 bp, synthetic construct
  source 1..80: mol_type = other DNA
tagtgggccaactctttacatttaggccccggcatcatcaaacggtccaagattgcaattgttccatctacatagggcat

SEQ ID NO: 131029 - DNA, 80 bp, synthetic construct
  source 1..80: mol_type = other DNA
gataaagaggtgctgtatcaacaatacgatgagatggaggagtgcgcctctagggcagcgctcatcgaagaggggcagcg

SEQ ID NO: 131030 - DNA, 80 bp, synthetic construct
  source 1..80: mol_type = other DNA
tcctcctcctataccaaattccccctcatccgaggggtggcggttcttgttctccctgagccaccatcacccagacacag

SEQ ID NO: 131031 - DNA, 80 bp, synthetic construct
  source 1..80: mol_type = other DNA
agactagatccatactggggtagcgtcaaggaagatcggctctgctatggaggtccatggaagctgcagcacaagtggaa

SEQ ID NO: 131032 - DNA, 80 bp, synthetic construct
  source 1..80: mol_type = other DNA
gacccctggctcctagcctccaccgccgccacggccaccgagcctcccaggaggcgaagatggggccctgccaaccggtt

SEQ ID NO: 131033 - DNA, 80 bp, synthetic construct
  source 1..80: mol_type = other DNA
aggtacgataaagttcatgtccgtacaacatcaactccggccaagatgtgttttgttttatccccggaaaacatccaccg

SEQ ID NO: 131034 - DNA, 80 bp, synthetic construct
  source 1..80: mol_type = other DNA
gcacccctctctgactgggccagcgatggtttgcgcgagcttgccgttgctgttgagccagtcatcttctcgcccatgga

SEQ ID NO: 131035 - DNA, 80 bp, synthetic construct
  source 1..80: mol_type = other DNA
catatgggaagtttctggccgatgggggatgttcaggaggagcatatgatatcatcatctgtgacgagtgccactccaca

SEQ ID NO: 131036 - DNA, 80 bp, synthetic construct
  source 1..80: mol_type = other DNA
agttgaatcggaaatcctatgacaccgagtaccctaaatgtaagaatggggattgggattttgtcatcaccacggacatt

SEQ ID NO: 131037 - DNA, 80 bp, synthetic construct
  source 1..80: mol_type = other DNA
accaagatcatcacctggggggcagacaccgcggcgtgcggggacatcatccttggtctgccagtctccgcccgaaggtg

SEQ ID NO: 131038 - DNA, 80 bp, synthetic construct
  source 1..80: mol_type = other DNA
cgattgcttccggaagcaccccgaagcaacctacagaaagtgtggatcaggcccctggcttacacccagatgcttggtcg

SEQ ID NO: 131039 - DNA, 80 bp, synthetic construct
  source 1..80: mol_type = other DNA
ggctgctgcagacagcaacaaagcaggcagaggccgccgccccaattgtgcagtccaggtggcaaagcctggaaaccttc

SEQ ID NO: 131040 - DNA, 80 bp, synthetic construct
  source 1..80: mol_type = other DNA
tggatgaactccaccggctatgtcaaaacatgtggagcaccaccgtgtaacatcggccctggcactaacacctcacttaa

SEQ ID NO: 131041 - DNA, 80 bp, synthetic construct
  source 1..80: mol_type = other DNA
cgcccatgtcggtatattaggcccgtggtccgatcttcactcactcgcctgtctgcggacctatgcacggcgggacggcg

SEQ ID NO: 131042 - DNA, 80 bp, synthetic construct
  source 1..80: mol_type = other DNA
ggcatcccaacggccgcctaccggcgggtggttcggttgtacttggatgaactccacggggtttgttaagacctgcggtg

SEQ ID NO: 131043 - DNA, 80 bp, synthetic construct
  source 1..80: mol_type = other DNA
tcatggttgctggaaggcggtggtgggaagaattaaaagtgtcatgtctgtgaagaaatgcatatttgaacgctgtgtga

SEQ ID NO: 131044 - DNA, 80 bp, synthetic construct
  source 1..80: mol_type = other DNA
tctgtgccagggcctcggccccccctccatcatgggatgctatgtggaaatgccttatccgcctcaaacccaccttacat

SEQ ID NO: 131045 - DNA, 80 bp, synthetic construct
  source 1..80: mol_type = other DNA
tcaaaccgctggacgacagattcgccacagccctccacttcctcaacgcaatgtcaaaggtcagaaaagacatccaggaa

SEQ ID NO: 131046 - DNA, 80 bp, synthetic construct
  source 1..80: mol_type = other DNA
atgaaagagggtagtaatacatttagttttaaaaacaaccaagccaatgtggtttatgttcgggtcttgaattctggtaa

SEQ ID NO: 131047 - DNA, 80 bp, synthetic construct
  source 1..80: mol_type = other DNA
agcatggagctgaacggttggggaggatgctggtgagtggagacgactgcgtcgtcaaacccatcgacgacaggtttgga

SEQ ID NO: 131048 - DNA, 80 bp, synthetic construct
  source 1..80: mol_type = other DNA
tcgtggctgggcaacatcattatgtttgcccccacgatatgggtgcgcatggttctgatgacccattttttctccatact

SEQ ID NO: 131049 - DNA, 80 bp, synthetic construct
  source 1..80: mol_type = other DNA
ctaacagcagcatcatttttgaggcgccggatgtcatcttgcatgcccctggatgtgttccttgtgtgagagtcggcaac

SEQ ID NO: 131050 - DNA, 80 bp, synthetic construct
  source 1..80: mol_type = other DNA
ccctggcccccaaaggtgctcccaatcctagccagtggacaaaccaaaacaaaacaaactcctttggacaagctccctat

SEQ ID NO: 131051 - DNA, 80 bp, synthetic construct
  source 1..80: mol_type = other DNA
gagtcgatgtcttttttactccgccagaaaagtgtgacacattgctgtgtgacataggggagtcgtcaccaaaccccacg

SEQ ID NO: 131052 - DNA, 80 bp, synthetic construct
  source 1..80: mol_type = other DNA
aatgtcttgtggctggtgaaggtgagaggaaggccgcgatgctcctcgttaagccacgtttggcaaattttgcgataaac

SEQ ID NO: 131053 - DNA, 80 bp, synthetic construct
  source 1..80: mol_type = other DNA
caacaggaccgcgctcaactgtaacgactcattacagactggtttcatcgcaggcctgttctactacaacaaattcaatt

SEQ ID NO: 131054 - DNA, 80 bp, synthetic construct
  source 1..80: mol_type = other DNA
ttccattgtggcaataggcacagaatcctcagagggaggtggaagacggtgggtttggtacgaactcagtctgcagcaaa

SEQ ID NO: 131055 - DNA, 80 bp, synthetic construct
  source 1..80: mol_type = other DNA
accaagacctgcggtgcaccaccttgccgcattaggagagacttcaacgccagtgaggacctactctgccctacagattg

SEQ ID NO: 131056 - DNA, 80 bp, synthetic construct
  source 1..80: mol_type = other DNA
cttcgagatgtacggagctacttatgcagtcactccattagatttaccagcaatcattgaaagactccatggcttgaacg

SEQ ID NO: 131057 - DNA, 80 bp, synthetic construct
  source 1..80: mol_type = other DNA
cgccacagatgcccttatgacagggtacacaggtgatttcgacagcgtgatagactgcaacgtggcagtaacacaggtcg

SEQ ID NO: 131058 - DNA, 80 bp, synthetic construct
  source 1..80: mol_type = other DNA
acacccgctttggtgtcgtgggccattaagtgggagtacattgtcctcatctttctgcttttagcagacgcccgcatatg

SEQ ID NO: 131059 - DNA, 80 bp, synthetic construct
  source 1..80: mol_type = other DNA
ccagccatgccagtatgggcgcgcccggactacaacccacccttgatagagacgtggaagaagccggactacgagcctcc

SEQ ID NO: 131060 - DNA, 80 bp, synthetic construct
  source 1..80: mol_type = other DNA
cgctgacggcgggtgctctggcggagcctatgatgtcatcatctgtgatgagtgtcactcgaccgatcctaccacggtct

SEQ ID NO: 131061 - DNA, 80 bp, synthetic construct
  source 1..80: mol_type = other DNA
ggtcctgttatgtgcccttcggggcatgttgcggggatctttagggctgctgtgtgcaccagaggtgtagcaaaagccct

SEQ ID NO: 131062 - DNA, 80 bp, synthetic construct
  source 1..80: mol_type = other DNA
gttgcaaatcagcctgacattattatgtacgctgaaaacgtgaatctggaaacaccagacactcacgtcgtttacaagcc

SEQ ID NO: 131063 - DNA, 80 bp, synthetic construct
  source 1..80: mol_type = other DNA
ccgggctgcgcgtgcgggcgcaggacagaatcatcgagttgtttgaacacccaacgatagtcaacgtttcctcgcacttt

SEQ ID NO: 131064 - DNA, 80 bp, synthetic construct
  source 1..80: mol_type = other DNA
cactccacttgatcttccacaaatcattcaaagactccacggaatggccgctttttccctacatgggtattccccgggcg

SEQ ID NO: 131065 - DNA, 80 bp, synthetic construct
  source 1..80: mol_type = other DNA
aggagctggatggaacgtgcgggatactgcctgcctggcgaagtcctacgctcaaatgtggctcctcctgtacttccata

SEQ ID NO: 131066 - DNA, 80 bp, synthetic construct
  source 1..80: mol_type = other DNA
aaccccccacgaactacaagaccgccatctggagggtggcggcctcggagtacgcggaggtgacgcagcatgggtcgtac

SEQ ID NO: 131067 - DNA, 80 bp, synthetic construct
  source 1..80: mol_type = other DNA
gtaccgatatgtcgcccctggtgaaagaccgtcaggaatgtttgactcggttgttctctgtgagtgctatgacgcaggct

SEQ ID NO: 131068 - DNA, 80 bp, synthetic construct
  source 1..80: mol_type = other DNA
ctggcaggggaaggtgttgagcccgaagttgactggcatgggcgactacccggcgattgatatcttgaatctgtcggcgt

SEQ ID NO: 131069 - DNA, 80 bp, synthetic construct
  source 1..80: mol_type = other DNA
aaccggcccgcctaatcgtgtacccagaccttagtgtgcgggtgtgcgaaaagaaggccctatatgacattacacgcaaa

SEQ ID NO: 131070 - DNA, 80 bp, synthetic construct
  source 1..80: mol_type = other DNA
gtgggcggtgttgagcaaaggttcgacgccgcctgcaattggactaggggtgatccatgtgagttagacgacagagacag

SEQ ID NO: 131071 - DNA, 80 bp, synthetic construct
  source 1..80: mol_type = other DNA
acgggaaattcctggcggacggtgggtgtagcgggggcgcttatgacatcatcatctgtgacgaatgccatgcgcaggat

SEQ ID NO: 131072 - DNA, 80 bp, synthetic construct
  source 1..80: mol_type = other DNA
gtgccgcgcgggtcgttaacaaggtgttgggtgaggacgacgagaccaaggccgggtcggccgcctcgcgcctcgtgcgg

SEQ ID NO: 131073 - DNA, 80 bp, synthetic construct
  source 1..80: mol_type = other DNA
aggccgctatatgcggccggtacctcttcaactgggctgttaagaccaagctcaaactcactccattgcgcgacgctcac

SEQ ID NO: 131074 - DNA, 80 bp, synthetic construct
  source 1..80: mol_type = other DNA
gtctttcgacgctgccggggaatccagccatcgcatcactcatgtccttttcagcttcactcaccagccctttccaaacc

SEQ ID NO: 131075 - DNA, 80 bp, synthetic construct
  source 1..80: mol_type = other DNA
gaacctatacactgacgtaatcgaacaaagtctaaaaaaaaatcccgccaaaaccagcacacgcccagaaactgtgtcat

SEQ ID NO: 131076 - DNA, 80 bp, synthetic construct
  source 1..80: mol_type = other DNA
gcggcttcgccgacctcatggggtacatccctgttctaggagcgccgcttggcggcgtcgcggctgccctcgcacatggt

SEQ ID NO: 131077 - DNA, 80 bp, synthetic construct
  source 1..80: mol_type = other DNA
gctatgggccctccttggaacgaagaaaaatcccagactgtgcacaagggaagagttcatctcaaaagttagatcaaacg

SEQ ID NO: 131078 - DNA, 80 bp, synthetic construct
  source 1..80: mol_type = other DNA
ggccccacacctctcctgtaccgtttgggccctattaccaatgaggtcaccctcacacaccctgggacgaagtacatcgc

SEQ ID NO: 131079 - DNA, 80 bp, synthetic construct
  source 1..80: mol_type = other DNA
cacatggatgaacggtacaggtttcaccaagacctgcggcggacctccgtgtcgcgtacgagccaaaaccccctggaact

SEQ ID NO: 131080 - DNA, 80 bp, synthetic construct
  source 1..80: mol_type = other DNA
tgacacatccaattaccaaatacatcatgacatgcatggcagctgacttggaaatcgtcaccagtacctggatactggtg

SEQ ID NO: 131081 - DNA, 80 bp, synthetic construct
  source 1..80: mol_type = other DNA
ttaaacctactctgacaggacctaccccattactgtacaggctgggagccgtgcagaatgagataaccacaacacacccc

SEQ ID NO: 131082 - DNA, 80 bp, synthetic construct
  source 1..80: mol_type = other DNA
cacatcgacgcccacttcctttcacaaaccaaacaggggggggagaacttcgcatacctggtggcttaccaggccacggt

SEQ ID NO: 131083 - DNA, 80 bp, synthetic construct
  source 1..80: mol_type = other DNA
tgttttgcagcagccgccgccatgagcgccaactcgtttgatggaagcattgtgagctcatatttgacaacgcgcatgcc

SEQ ID NO: 131084 - DNA, 80 bp, synthetic construct
  source 1..80: mol_type = other DNA
tggtccgacagaaacgctcctggctgtccaccgcggcccgcagatactcgttgttcaggctgtcggtggcccagacgccg

SEQ ID NO: 131085 - DNA, 80 bp, synthetic construct
  source 1..80: mol_type = other DNA
ggctcattgccgcagtatcgagcatttccggattgggtggggcgctcttgaatatgaggaaaatgtcatcaacgaggaag

SEQ ID NO: 131086 - DNA, 80 bp, synthetic construct
  source 1..80: mol_type = other DNA
cgatctccgggaccaccatgttctgcagggtggcgtatacgcggtcgaagcgaacccccgcggtgcagcagcggccccgc

SEQ ID NO: 131087 - DNA, 80 bp, synthetic construct
  source 1..80: mol_type = other DNA
atctagccaatcgcagtcacaaggtaggctgagttttgtttgatttgcagaatcagaatggtctccaatgctgctaatga

SEQ ID NO: 131088 - DNA, 80 bp, synthetic construct
  source 1..80: mol_type = other DNA
actgaggcacaaatggatggcaccgtggtgccggccagctggtaccagaggcaaacacagctgagcctattgctatggac

SEQ ID NO: 131089 - DNA, 80 bp, synthetic construct
  source 1..80: mol_type = other DNA
gcaatgaatggattaccgacttcgccgggaaaacggtgtggtttgtccccagcatcaaagccggaaatgacatagcaaac

SEQ ID NO: 131090 - DNA, 80 bp, synthetic construct
  source 1..80: mol_type = other DNA
gcaggcaacagagcagcccgtcgccgcaccatccgcgccggcagccccgccggtcacggatacaacctccgctacggtca

SEQ ID NO: 131091 - DNA, 80 bp, synthetic construct
  source 1..80: mol_type = other DNA
ccactacaaagccgtggttaaggaggtgaaggcgaaggcatctactgtgaaggctcgcttgctttccattgaggaagcat

SEQ ID NO: 131092 - DNA, 80 bp, synthetic construct
  source 1..80: mol_type = other DNA
agctggataacaaaggtcatcatgggggtagtcctcatatgggttggcattaacacaaggaatatgacaatgtccatgag

SEQ ID NO: 131093 - DNA, 80 bp, synthetic construct
  source 1..80: mol_type = other DNA
ttcagcatatgctcaacaaaccagaggcctcctcgggaccatagtcacaagccttacaggtagagacagaaatgaggtta

SEQ ID NO: 131094 - DNA, 80 bp, synthetic construct
  source 1..80: mol_type = other DNA
acccagtgtccagaggctccgcaaagctgagatggatggtagaacgccaatttgtcaaaccaattggcaaggtggttgac

SEQ ID NO: 131095 - DNA, 80 bp, synthetic construct
  source 1..80: mol_type = other DNA
acgagatatctggtgaagacagaatcatggatactgagaaacccgggctacgccctcgttgcagcggtcattggatggat

SEQ ID NO: 131096 - DNA, 80 bp, synthetic construct
  source 1..80: mol_type = other DNA
caaacaccaattcctacaaccatcatggccaagaacgaggtattctgtgtggatccgtcgaagggagggcgaaagccagc

SEQ ID NO: 131097 - DNA, 80 bp, synthetic construct
  source 1..80: mol_type = other DNA
cgaccccattggcgcgcggaccacagtcacgcacctggccgtcggggcgctcgcgttggtgaaggtgacgggtccgtgct

SEQ ID NO: 131098 - DNA, 80 bp, synthetic construct
  source 1..80: mol_type = other DNA
ccagggccatagggtcgatgtcaatgttggcctccgcgaccaggagagcggcgcgaggagcggcgcgcgggccccacgac

SEQ ID NO: 131099 - DNA, 80 bp, synthetic construct
  source 1..80: mol_type = other DNA
aggggctggatggaatgttcgagacactgcttgcttagccaaatcttatgctcagatgtggttgctcctgtacttccaca

SEQ ID NO: 131100 - DNA, 80 bp, synthetic construct
  source 1..80: mol_type = other DNA
cccggaaagtctttcgcaccacccgcgatcggcacggccgcgcccccgcttttataaaggctcagatgacgcagcaaaaa

SEQ ID NO: 131101 - DNA, 80 bp, synthetic construct
  source 1..80: mol_type = other DNA
gcggcgccagtctgccagccgcgtgccgaacatgaggccccgggtcggagggcctccggccgaaaacgctggcagcacgc

SEQ ID NO: 131102 - DNA, 80 bp, synthetic construct
  source 1..80: mol_type = other DNA
tcatgctagtgaaaagcgtggctgtgattaagcataacatggtatgtggcaactgcgaggacagggcctctcagatgctg

SEQ ID NO: 131103 - DNA, 80 bp, synthetic construct
  source 1..80: mol_type = other DNA
ggcggggccgggcggaaggagcaaagcagaaaccaaagccgtgggcgcggactcctgggggggcggctggtcgggaggac

SEQ ID NO: 131104 - DNA, 80 bp, synthetic construct
  source 1..80: mol_type = other DNA
agcagcagtcaagcaagcctgggaagatgggatctgtgggatctcctctgtttcaagaatggaaaacatcatgtggagat

SEQ ID NO: 131105 - DNA, 80 bp, synthetic construct
  source 1..80: mol_type = other DNA
agtacttagccggcctctccacacttccaggtaaccctgctgtagcatccctcatggcattcactgcttcggttactagc

SEQ ID NO: 131106 - DNA, 80 bp, synthetic construct
  source 1..80: mol_type = other DNA
tgaaaccccagaagatttgcctggactggctgggtcatagccaggggtctccttcagccgggagctcggcctcccgggcc

SEQ ID NO: 131107 - DNA, 80 bp, synthetic construct
  source 1..80: mol_type = other DNA
gtcatacagctggaccggggcgctcatcaccccttgctccgcggaggaggaaaaattacctatcaatcctttaagcaaca

SEQ ID NO: 131108 - DNA, 80 bp, synthetic construct
  source 1..80: mol_type = other DNA
ctgggttagtggagcggctggaaacatcatacatgccgtcagtatgactagccaagtgctcatgggaaggatggacaaac

SEQ ID NO: 131109 - DNA, 80 bp, synthetic construct
  source 1..80: mol_type = other DNA
agacatatcaggtggggtatctccatgccccgacaggcagcggcaagagcacgaaggtgccggcagcctatgcctctcag

SEQ ID NO: 131110 - DNA, 80 bp, synthetic construct
  source 1..80: mol_type = other DNA
tccgttgtgtctgtatgtattcgctgtaaaatgtacgatagagcatttttggctgtcaaacctcgtgtatatgttgagga

SEQ ID NO: 131111 - DNA, 80 bp, synthetic construct
  source 1..80: mol_type = other DNA
ctccgaagttacagacctctctcctgacattgtgcaagccaactccttcttctcctttgatggtgatgatgaaatcgtca

SEQ ID NO: 131112 - DNA, 80 bp, synthetic construct
  source 1..80: mol_type = other DNA
gattctcaatgagtgacctggctaagcttgtgatcctgatgggtgctactttcgcagaaatgaacactggaggagatgta

SEQ ID NO: 131113 - DNA, 80 bp, synthetic construct
  source 1..80: mol_type = other DNA
cggtggcaaaattggaagaaccatttttattccaaacggtctcgaaggacgataaagtgcaagtcacgcaggtgacagcg

SEQ ID NO: 131114 - DNA, 80 bp, synthetic construct
  source 1..80: mol_type = other DNA
aaacctcgacacaactgatttttacccaacggagccactatttaagtctcccgttcaagttgttagaagttccaaatgta

SEQ ID NO: 131115 - DNA, 80 bp, synthetic construct
  source 1..80: mol_type = other DNA
cgggaatagggaccgttcttgaccaggcggaaactagcggagtgagactgacggtcctcgcgaccgccactccgcctggt

SEQ ID NO: 131116 - DNA, 80 bp, synthetic construct
  source 1..80: mol_type = other DNA
aattgctataaattttttttgttttttcacagcaccatgaatactttaaccagtgtcgtgctgctctctcttcttgtagc

SEQ ID NO: 131117 - DNA, 80 bp, synthetic construct
  source 1..80: mol_type = other DNA
ctggcaaaaacttgagaccttctggtacaaacatatgtggaattttgtgagtgggatccagtacctggcaggcctctcca

SEQ ID NO: 131118 - DNA, 80 bp, synthetic construct
  source 1..80: mol_type = other DNA
ctggtggcgcgatttctggagttcgaggccctggggttcctaaatgaggatcactggcttggcagagaaaattcaggagg

SEQ ID NO: 131119 - DNA, 80 bp, synthetic construct
  source 1..80: mol_type = other DNA
gtccacggcgtagaggaggccgtgtccgcgcggggctaccaccgtgccccgaggagactttatctcactcgtcgagggcg

SEQ ID NO: 131120 - DNA, 80 bp, synthetic construct
  source 1..80: mol_type = other DNA
tgtctggaacaaacaaagcccccttacacgaagcagcggttaatggggcgggtgccgggattgactgtgatggtgcagct

SEQ ID NO: 131121 - DNA, 80 bp, synthetic construct
  source 1..80: mol_type = other DNA
gtgatgaaaaatacatagattatatgagtactttaaggagatatgaagatgccagtgtagtggaggattcagttttgtaa

SEQ ID NO: 131122 - DNA, 80 bp, synthetic construct
  source 1..80: mol_type = other DNA
ggggagccttgtaggtatgtttacgaatggaccccagcagcgacttcagcttatcgacaccaatggcagctggcacatca

SEQ ID NO: 131123 - DNA, 80 bp, synthetic construct
  source 1..80: mol_type = other DNA
aacacctggcacgggaccttccccatcaacgcgtacaccacaggccccggcgtgcccatcccagcgccaaactactcgtt

SEQ ID NO: 131124 - DNA, 80 bp, synthetic construct
  source 1..80: mol_type = other DNA
actgtccagaagaaatatctattacggttcttcctaaacttccacgactaagctgggtatgcgcgtctaaacaaagagca

SEQ ID NO: 131125 - DNA, 80 bp, synthetic construct
  source 1..80: mol_type = other DNA
gggcgtggtgctggatgatgtccttaaggaggagactgatggccacggggagccccttggtgtaggtgttggcaaagcgg

SEQ ID NO: 131126 - DNA, 80 bp, synthetic construct
  source 1..80: mol_type = other DNA
tccttgaccaggccgagacagcgggagctaggttggtagtcttggccacggcgaccccgccagggtccgtgacgacccct

SEQ ID NO: 131127 - DNA, 80 bp, synthetic construct
  source 1..80: mol_type = other DNA
cagggatatcgccagatacgactcccgcagattccattcgggaggccgctgtggcctcacctgaccaacctttacacggg

SEQ ID NO: 131128 - DNA, 80 bp, synthetic construct
  source 1..80: mol_type = other DNA
ctataaagcgacacgctgtatgctcttattcacagccgggttacttctgacgattctacatcactttcgacttattatta

SEQ ID NO: 131129 - DNA, 80 bp, synthetic construct
  source 1..80: mol_type = other DNA
ggtcgctgtctgcgggactcatccatccttcggccaggtcgccgtctccccacagagaagcgttggtcgctgcttcctcg

SEQ ID NO: 131130 - DNA, 80 bp, synthetic construct
  source 1..80: mol_type = other DNA
catttcgccgcgacggcggcgcatagtttcggttactgctcgaccgttttcacgtggtcgtaactcaaaaactccacctc

SEQ ID NO: 131131 - DNA, 80 bp, synthetic construct
  source 1..80: mol_type = other DNA
cagtcacgtcgcagcagacgttctcttacggttcagactcatggagaaagcactcttgccaacaaaaaaggagcctggat

SEQ ID NO: 131132 - DNA, 80 bp, synthetic construct
  source 1..80: mol_type = other DNA
aaccttgcaggttcacccctgttgggttaggtggggacaacaaccgggatttcaaccagtggggtctgccagcctatggt

SEQ ID NO: 131133 - DNA, 80 bp, synthetic construct
  source 1..80: mol_type = other DNA
gcgtgggcgaaggtcatcgccattctcctattgactgcaggagtggaagccagcacgacaatttcaggcggtcgtgcggc

SEQ ID NO: 131134 - DNA, 80 bp, synthetic construct
  source 1..80: mol_type = other DNA
tgagcaacgccctcattcgccaccacaacctggtgtactccaccacgtcgcgcagcgcgtccctccgccagaagaaagtg

SEQ ID NO: 131135 - DNA, 80 bp, synthetic construct
  source 1..80: mol_type = other DNA
gacggggtgttgcacccatccccgtctcgataacaatcgccgggtaccccgtctggttcacaagaatcggtgctctcctc

SEQ ID NO: 131136 - DNA, 80 bp, synthetic construct
  source 1..80: mol_type = other DNA
aagtacgtccagatgatgctgctaacccttggtagatggactggcacctacatttatgaccatctcactccactgcggga

SEQ ID NO: 131137 - DNA, 80 bp, synthetic construct
  source 1..80: mol_type = other DNA
agggccgaatacgatgagagggaggtatctgttccagccgagtgccatcggcctccccgcccaaaatatccacctgcact

SEQ ID NO: 131138 - DNA, 80 bp, synthetic construct
  source 1..80: mol_type = other DNA
ggcacatcaacaggacatctctgaactgcaatgacagcctcaacaccggctggttggcagcgctattttacacccaacga

SEQ ID NO: 131139 - DNA, 80 bp, synthetic construct
  source 1..80: mol_type = other DNA
gaggccagctccggtgccgccacctcggagaaagaggatggtggtactggatgagtccacagtatcatctgctctggctg

SEQ ID NO: 131140 - DNA, 80 bp, synthetic construct
  source 1..80: mol_type = other DNA
acatagatgcccacttcttgtcccagactaaacaggcaggagacaacttcccctacctgacggcgtaccaggctacggtg

SEQ ID NO: 131141 - DNA, 80 bp, synthetic construct
  source 1..80: mol_type = other DNA
acgggtcctccacgagttcgcggcaccccgggtggcgcttaaactgtacgtcgctggcggcggtggccgtggacaccgcc

SEQ ID NO: 131142 - DNA, 80 bp, synthetic construct
  source 1..80: mol_type = other DNA
actgacactggccatggcactgttgtgatgcaggtgaaagtgtcaaaaggagccccctgcaggattccagtgatagtagc

SEQ ID NO: 131143 - DNA, 80 bp, synthetic construct
  source 1..80: mol_type = other DNA
cagtctcggtgttgggtgcaggcttccccgactttggcagtgccgaacgcgtctacgccaatcaccgggttccgcagaca

SEQ ID NO: 131144 - DNA, 80 bp, synthetic construct
  source 1..80: mol_type = other DNA
aggattcttcctgctcatgatgcagagaaagggcataggaaaaatgggtctaggggctctagtgctcacgctggccacct

SEQ ID NO: 131145 - DNA, 80 bp, synthetic construct
  source 1..80: mol_type = other DNA
aaagaagacccctatggggttctcctatgacaccaggtgttttgactcaacagtcacggagcgcgacatacagactgaac

SEQ ID NO: 131146 - DNA, 80 bp, synthetic construct
  source 1..80: mol_type = other DNA
gaaacgggcggttgtgcttactgagtcgagcgtctccaacgctctggcagagttggccgcacggtccttcggtaccactg

SEQ ID NO: 131147 - DNA, 80 bp, synthetic construct
  source 1..80: mol_type = other DNA
tgaggctttctacgggtatttccaattcccctcggtcggccatgcgtgtggaaccaaacccgcgcaggggctgcagcagg

SEQ ID NO: 131148 - DNA, 80 bp, synthetic construct
  source 1..80: mol_type = other DNA
acgactggattactgattttccaggtaaaacagtctggtttgttccaagcattaaatcaggaaatgacattgccaactgt

SEQ ID NO: 131149 - DNA, 80 bp, synthetic construct
  source 1..80: mol_type = other DNA
tcgacaagcaacaggccgccatcaaggtggtgtgcaactcggtgtacgggttcaccggggtgcagcacggtcttctgccc

SEQ ID NO: 131150 - DNA, 80 bp, synthetic construct
  source 1..80: mol_type = other DNA
ggtcgaaaacgctggcaggtccgaaagggcccatatgccagatgtacaccaatgttgaccaggacctggtgggttggcca

SEQ ID NO: 131151 - DNA, 80 bp, synthetic construct
  source 1..80: mol_type = other DNA
tcgcagtatggcagctgatttcagcttctacaatcacttggcttcgaatgctgtgacacgcaccgcagttcgagaggaca

SEQ ID NO: 131152 - DNA, 80 bp, synthetic construct
  source 1..80: mol_type = other DNA
ggcagacggtggctgttcgggtggagcgtatgacatcataatatgtgatgagtgccactccaccgacccaacaacaatcc

SEQ ID NO: 131153 - DNA, 80 bp, synthetic construct
  source 1..80: mol_type = other DNA
gtctggaagacgaggaggtggaagaagcagtcgccgccagaccgtcgtcctcggcggagaaagcaagcagcacggatacc

SEQ ID NO: 131154 - DNA, 80 bp, synthetic construct
  source 1..80: mol_type = other DNA
atgaggtttacgctgacgaagacattcttgagcaggccgcccaacaggttggggaattcgcctacggcaagcgcggccgc

SEQ ID NO: 131155 - DNA, 80 bp, synthetic construct
  source 1..80: mol_type = other DNA
taaactcccgaacgcgctccagcgcggcggtggcgccgcgcgagggggtgatgaggtggcagtagtttagctgctttaga

SEQ ID NO: 131156 - DNA, 80 bp, synthetic construct
  source 1..80: mol_type = other DNA
gacgatggcaaaaaataaaccaacattggattttgaactgataaaaacagaagccaaacaacctgccactctaaggaagt

SEQ ID NO: 131157 - DNA, 80 bp, synthetic construct
  source 1..80: mol_type = other DNA
gtatgtgcagatggcactcatcaaacttggggcatggacgggcacctacatatatgatcatctctcgccgctgcgcggct

SEQ ID NO: 131158 - DNA, 80 bp, synthetic construct
  source 1..80: mol_type = other DNA
tccttgtctgcggagacgacttggtcgtgattgctgagagtgcagggatcgatgaggacaaaagtgccttgagagctttc

SEQ ID NO: 131159 - DNA, 80 bp, synthetic construct
  source 1..80: mol_type = other DNA
ggggggccacttcgttaagcatgtccctgactcgcatgttttccctgaccaaatccgccagaaggcgctcgccgcccagc

SEQ ID NO: 131160 - DNA, 80 bp, synthetic construct
  source 1..80: mol_type = other DNA
aggctgcgcgcctgtgtcagctgcaggagatcttggcccagatgcacagcgacgaggactaccccatcgtggacgccgcg

SEQ ID NO: 131161 - DNA, 80 bp, synthetic construct
  source 1..80: mol_type = other DNA
ggggtacactggagactttgactccgtgatcgactgcaatgtagcggtcacccaagctgtcgacttcagcctggacccca

SEQ ID NO: 131162 - DNA, 80 bp, synthetic construct
  source 1..80: mol_type = other DNA
ttggatcaggcatacaatatgataacaatggagctatggttgcaaaacttggaacaggcctcagttttgacaactccgga

SEQ ID NO: 131163 - DNA, 80 bp, synthetic construct
  source 1..80: mol_type = other DNA
gcgttgagcgcatgtccagctgccgacctctgagcagttttgaccaggggtggggtgagatctcttacgcacacatatcg

SEQ ID NO: 131164 - DNA, 80 bp, synthetic construct
  source 1..80: mol_type = other DNA
ccgtgatggcatcatatgggtcgccaccatactctgtccgggtgtagtgtttgacataaccaagtggctcctggcaattc

SEQ ID NO: 131165 - DNA, 80 bp, synthetic construct
  source 1..80: mol_type = other DNA
tgcggacgccatgtcggtggcgttcgtgatcgggagcaccggcctggggttcctccgcgccccccccgcgttcgcccggc

SEQ ID NO: 131166 - DNA, 80 bp, synthetic construct
  source 1..80: mol_type = other DNA
aagtgcttggcctcattggcacggccggtcagaaagctgagactctgaaaccggcagccacgtccatgtggaacagggct

SEQ ID NO: 131167 - DNA, 80 bp, synthetic construct
  source 1..80: mol_type = other DNA
acccggcgctggtcgggcggatgacgctttccgcgccgtcccggcccacgacgacctcgtgcaggtgggccgtgatgcgc

SEQ ID NO: 131168 - DNA, 80 bp, synthetic construct
  source 1..80: mol_type = other DNA
ttcattgctgtctggcacatcaagggtcgagtggtccctctggctacttactcgtaccttggcttgtggtccttcagcct

SEQ ID NO: 131169 - DNA, 80 bp, synthetic construct
  source 1..80: mol_type = other DNA
cgcaaaatcaaggaggagatgctccaggtcgtcgccccggagatttacggacccccggaccagaaaccccgcaaaatcaa

SEQ ID NO: 131170 - DNA, 80 bp, synthetic construct
  source 1..80: mol_type = other DNA
gatgcagccatactcctcacctgcttggtccacccgtccttggggtttgatattactaaggtgcttttagcactaatagg

SEQ ID NO: 131171 - DNA, 80 bp, synthetic construct
  source 1..80: mol_type = other DNA
tgacttccctcagaagatatgaggatgtattgattcaggaggacagggtcatttagataggatcaagttatgtgtgtaat

SEQ ID NO: 131172 - DNA, 80 bp, synthetic construct
  source 1..80: mol_type = other DNA
tggggatgtcatcaacccattcggggagggggaggcaaaacctgctctatatgaaaggaaaatgagtctggtgttagcca

SEQ ID NO: 131173 - DNA, 80 bp, synthetic construct
  source 1..80: mol_type = other DNA
caccagggttacccgtctgccaggaccacctggagttctgggagagcgtctttacaggcctcacccacatagacgcccac

SEQ ID NO: 131174 - DNA, 80 bp, synthetic construct
  source 1..80: mol_type = other DNA
aattgtagaattgatgtggacaaggactctaaactaacattggtccttacaaagtgcggaagtcagatattggctaatgt

SEQ ID NO: 131175 - DNA, 80 bp, synthetic construct
  source 1..80: mol_type = other DNA
ggatgcgcggacaattaggcctgggttcggacggcgagggtggtgcaggtgtggagaggttgagcgataggagcggcccg

SEQ ID NO: 131176 - DNA, 80 bp, synthetic construct
  source 1..80: mol_type = other DNA
gacgagctcgctgcaaaactggtcgcgttgggcgtcaatgccgtggcttactaccgcggccttgacgtatccgtcattcc

SEQ ID NO: 131177 - DNA, 80 bp, synthetic construct
  source 1..80: mol_type = other DNA
ctgcctatccaccggcagcgtggtcatagtgggcaggattacattgtccggcaagccagcagtcatacctgacagacaag

SEQ ID NO: 131178 - DNA, 80 bp, synthetic construct
  source 1..80: mol_type = other DNA
aacttgagcttgtttatgatgatccatttgaggttagcaccaataaacttagtttaaaagtaggacatggattaaaagta

SEQ ID NO: 131179 - DNA, 80 bp, synthetic construct
  source 1..80: mol_type = other DNA
aggaggtcagtgtccgtggtgtacacgtacgcgaccgtgttggtgtgatagaggttggcgcaggcatcgtccgcctccaa

SEQ ID NO: 131180 - DNA, 80 bp, synthetic construct
  source 1..80: mol_type = other DNA
ttgagtatggcaatttgtcactatcgggaatagcccaatctgcctcagttctttcatttatggacaaaggaattcccttc

SEQ ID NO: 131181 - DNA, 80 bp, synthetic construct
  source 1..80: mol_type = other DNA
gagtcctacggaaagtgccattgttattatactacattttgacaattatggagtgcgaattctcaattatcccactttgg

SEQ ID NO: 131182 - DNA, 80 bp, synthetic construct
  source 1..80: mol_type = other DNA
tgccgtccacaccgatcagagtctctggatgaagtcacacaggaacgcaacgggagtgttcatatcagaactgatagtga

SEQ ID NO: 131183 - DNA, 80 bp, synthetic construct
  source 1..80: mol_type = other DNA
ggacttgctagaagactctgatactccaattcccacaaccatcatggctaagaatgaagtcttctgcgtagatccgtcga

SEQ ID NO: 131184 - DNA, 80 bp, synthetic construct
  source 1..80: mol_type = other DNA
ttggagctcctctctggaggccactggggtatcctcgcggggatagcttacttcagcatgcaggctaattgggctaaggt

SEQ ID NO: 131185 - DNA, 80 bp, synthetic construct
  source 1..80: mol_type = other DNA
ggacagggttacatctggtacctgattgcgttctgcgctgcgtggcacatccgggggaagcttgttccgctgataaccta

SEQ ID NO: 131186 - DNA, 80 bp, synthetic construct
  source 1..80: mol_type = other DNA
agcttatgctcaagaccaggaacaggcagctagcatcggggtctcagtcatcttgctccttaccatcttcactctcaccc

SEQ ID NO: 131187 - DNA, 80 bp, synthetic construct
  source 1..80: mol_type = other DNA
gaatgtcaaagacaatccgcggcgttcctcattcaaccaggtctgacatatcttgcgataaacggcgttttgttcaggaa

SEQ ID NO: 131188 - DNA, 80 bp, synthetic construct
  source 1..80: mol_type = other DNA
atcgactcggggtaccgcggaaccgttatggccgtggtcgtagcgcctaaaaggacgcgggaatttgcccccgggaccct

SEQ ID NO: 131189 - DNA, 80 bp, synthetic construct
  source 1..80: mol_type = other DNA
gtctggccaactatttggcccaccactctgatcttatggaagactctagcggcgacggactgctagaatgtcactgccgt

SEQ ID NO: 131190 - DNA, 80 bp, synthetic construct
  source 1..80: mol_type = other DNA
gaagaaggtcatcacatggggggccgacaccgctgcttgcggcgacatacttcagggtctgccggtctctgcgcggctag

SEQ ID NO: 131191 - DNA, 80 bp, synthetic construct
  source 1..80: mol_type = other DNA
cggtctaacaggcctgtggcccctggccctacttgtcctcctactccctcaacgtgcttacgcttggacgggagaggacg

SEQ ID NO: 131192 - DNA, 80 bp, synthetic construct
  source 1..80: mol_type = other DNA
agtcatacgagaccgaataccccaaatgtaagaatgatgactgggactttgtgatcaccacagatatttctgaaatgggc

SEQ ID NO: 131193 - DNA, 80 bp, synthetic construct
  source 1..80: mol_type = other DNA
agaaagtcacagaagtgaagggatatacgaaaggaggacctggacatgaggagccaattccaatggcgacctatggatgg

SEQ ID NO: 131194 - DNA, 80 bp, synthetic construct
  source 1..80: mol_type = other DNA
cgcgcatcatcgcgccgctggccacgggtgtaatgaaacccgctacccttgacctgcctccaccacccacgcccgctcca

SEQ ID NO: 131195 - DNA, 80 bp, synthetic construct
  source 1..80: mol_type = other DNA
gctccaacaacagcattacgtggcaacttgaaggtgcggtactacatgttcctggttgcgttccatgcgagtcgacgggc

SEQ ID NO: 131196 - DNA, 80 bp, synthetic construct
  source 1..80: mol_type = other DNA
caacagcaggagttttggccagatggggaaccttcaagaagtcgggtgccattaaggttctgaaaggcttcaagaaggag

SEQ ID NO: 131197 - DNA, 80 bp, synthetic construct
  source 1..80: mol_type = other DNA
tgtccctaacgcatccactcccattaccgggttccgtaaacacgtggatctcatggtgggagcggctgcgttttgttcgg

SEQ ID NO: 131198 - DNA, 80 bp, synthetic construct
  source 1..80: mol_type = other DNA
gggtcccctccctgaacgctcggggaggccgcgacgctgtcatccttctcgcggccgcgatccacccttggctgctcttt

SEQ ID NO: 131199 - DNA, 80 bp, synthetic construct
  source 1..80: mol_type = other DNA
atacgcggcttgcggaatgtggcccttgctcctcctgctcctcgcgttgcccgaacgagcttacgcgtacgaccaggaag

SEQ ID NO: 131200 - DNA, 80 bp, synthetic construct
  source 1..80: mol_type = other DNA
acccagtccttccttggcaccacaatctcgggggttctctggaccgtgttccacggcgccggcaacaagacgttggctgg

SEQ ID NO: 131201 - DNA, 80 bp, synthetic construct
  source 1..80: mol_type = other DNA
tccatttgatcagaaaaaactatttttttgttatctagtttggtagcaaaagatccgtacaaggcattggaaagcagctt

SEQ ID NO: 131202 - DNA, 80 bp, synthetic construct
  source 1..80: mol_type = other DNA
ggttggaaaccaaaggagtggagaggttaaaaagaatggccattagcggggatgattgcgtagtgaaaccaattgatgac

SEQ ID NO: 131203 - DNA, 80 bp, synthetic construct
  source 1..80: mol_type = other DNA
ggtattgaccccaacatccgcaccagggtgagaaccattactacggggggggcgattacttactctacttatggcaaatt

SEQ ID NO: 131204 - DNA, 80 bp, synthetic construct
  source 1..80: mol_type = other DNA
caccatccccgctccccaagcatcaaccacgcccttccccacgggagatccaaaaccacaacctcccggggtcaaccacg

SEQ ID NO: 131205 - DNA, 80 bp, synthetic construct
  source 1..80: mol_type = other DNA
tcagtaaccgtcccacatccaaacattactgagacagccctgtccaccacgggggagattcccttctatgggaaggctat

SEQ ID NO: 131206 - DNA, 80 bp, synthetic construct
  source 1..80: mol_type = other DNA
atagaaacgtgtacgtttgtaaatgtattggggtgtaaagcgagtatgtggcctaagcattgagtcacgcaacgccctat

SEQ ID NO: 131207 - DNA, 80 bp, synthetic construct
  source 1..80: mol_type = other DNA
gctcctcatacggattccagtactctcctggacagcgggttgagttcctggtgaatgcctggaagtcaaagaaatgccct

SEQ ID NO: 131208 - DNA, 80 bp, synthetic construct
  source 1..80: mol_type = other DNA
gactccacgaatacccggtagggtcgcaattaccttgcgagcccgaaccggacgtggccgtgttgacgtccatgctcact

SEQ ID NO: 131209 - DNA, 80 bp, synthetic construct
  source 1..80: mol_type = other DNA
attattgtcacattacaattaattgtacaaactctcgctatcctaacaaggttatctttaacaatgtcactagatcttat

SEQ ID NO: 131210 - DNA, 80 bp, synthetic construct
  source 1..80: mol_type = other DNA
caatgtacgccgatgacaccgcaggatgggacacaagaatcacgctagaggacttgaaaaatgaagaaatggtgacaaac

SEQ ID NO: 131211 - DNA, 80 bp, synthetic construct
  source 1..80: mol_type = other DNA
ggacatgtgaagaatgggtctatgcggcttgcagggccgcgtacatgtgctaacatgtggtacggtacttttcccatcaa

SEQ ID NO: 131212 - DNA, 80 bp, synthetic construct
  source 1..80: mol_type = other DNA
cactagagggggagcccggtgacccggacttgacatcagactcttggtccactgttagcggatcggaggacgtcgtgtgc

SEQ ID NO: 131213 - DNA, 80 bp, synthetic construct
  source 1..80: mol_type = other DNA
tgccactccacggatgcaacatctatcttgggcatcggcaccgtccttgaccaagcagagactgcgggggtgagactgac

SEQ ID NO: 131214 - DNA, 80 bp, synthetic construct
  source 1..80: mol_type = other DNA
gccgttgccgcgctccagggcacgcgcggtcagctccatcatctcctcgcttaggtactcgtcctccaggagcgccagcc

SEQ ID NO: 131215 - DNA, 80 bp, synthetic construct
  source 1..80: mol_type = other DNA
taccaacagcttcgtgagcctctttagatcaggggcgtctcagaacctcaaacttgtaaattccaacggcagttggcaca

SEQ ID NO: 131216 - DNA, 80 bp, synthetic construct
  source 1..80: mol_type = other DNA
ccacatgtgggaatgggattggagacacgaactgaaacatggatgtcatcagaaggggcctggaaacacgcccagagaat

SEQ ID NO: 131217 - DNA, 80 bp, synthetic construct
  source 1..80: mol_type = other DNA
cacggcatagaccctaatgtccgcacaggggtacgcacaataaccactggtgctcccatcacttactccacttacggcaa

SEQ ID NO: 131218 - DNA, 80 bp, synthetic construct
  source 1..80: mol_type = other DNA
taaatcctgtcccactgaaagtagggatggaagcattggaaggggtgttgggcaatgacacagcacttactatgcatttt

SEQ ID NO: 131219 - DNA, 80 bp, synthetic construct
  source 1..80: mol_type = other DNA
cactggactctcatcctgcccggaataaaagcgcagcagtcaaagctggcacagaggagggtgtttcatggtgttgctaa

SEQ ID NO: 131220 - DNA, 80 bp, synthetic construct
  source 1..80: mol_type = other DNA
ggcaccatgatgaaaaccacccctacaggacttggaactaccatggaagctatgaggtaaaccctctggtctccgcaagc

SEQ ID NO: 131221 - DNA, 80 bp, synthetic construct
  source 1..80: mol_type = other DNA
ggtgctgccacagcttttgtgggcgccggaataacaggcgcagctattggcagcataggcttgggaaagatgctcgtaga

SEQ ID NO: 131222 - DNA, 80 bp, synthetic construct
  source 1..80: mol_type = other DNA
ccactgataagatcaagtgtccatgccaggtcccctcacccgagtttttcacagaggtggacggggtgcgcctacacagg

SEQ ID NO: 131223 - DNA, 80 bp, synthetic construct
  source 1..80: mol_type = other DNA
actgacgacctaaatctagaaatggacggaattagtaccgagcaacgcctgctacacaggcgcagggcagcggccgaaca

SEQ ID NO: 131224 - DNA, 80 bp, synthetic construct
  source 1..80: mol_type = other DNA
gtcaccgccatactcacctccctaacagtgacttcccttctcagacgactccataagtggatcaatgaagactgctccac

SEQ ID NO: 131225 - DNA, 80 bp, synthetic construct
  source 1..80: mol_type = other DNA
ctctgttttaccgcgtctacgtccgaagcgggcgcgtgctgtcgtacctgtgcgacaacttctgcccggccatcaagaag

SEQ ID NO: 131226 - DNA, 80 bp, synthetic construct
  source 1..80: mol_type = other DNA
gatttagaaaatgaagctaaggtactggagctcctagacggcgagcaccgcaggctcgcccgagccataattgaactgac

SEQ ID NO: 131227 - DNA, 80 bp, synthetic construct
  source 1..80: mol_type = other DNA
cttctccctggggcctcagcagaaactagagcttgtgaacaccaatgggagttggcacatcaaccggacagctctcaact

SEQ ID NO: 131228 - DNA, 80 bp, synthetic construct
  source 1..80: mol_type = other DNA
cgtgcgggacttcgcccagttgttgaaaacctcgttccgggcctctagtctcgcggagactacgggccccccgaagaaac

SEQ ID NO: 131229 - DNA, 80 bp, synthetic construct
  source 1..80: mol_type = other DNA
ttaactgcgcccgcgtcggcctaccaagtacgcaactcctcgggcctttaccacctcaccaatgactgccctaactcgag

SEQ ID NO: 131230 - DNA, 80 bp, synthetic construct
  source 1..80: mol_type = other DNA
ctgatgtcctgcgatatgtcattctcgtcggcgccgcgtttgctgaagcaaactcaggaggagacgttgtgcacttggca

SEQ ID NO: 131231 - DNA, 80 bp, synthetic construct
  source 1..80: mol_type = other DNA
tcggggcaaccaccgtttcgatacgcagtcatgtggacctattagtgggtgcggccacaatgtgttccgcgctctacgtg

SEQ ID NO: 131232 - DNA, 80 bp, synthetic construct
  source 1..80: mol_type = other DNA
tgccttgacgcgcacgccatacttcgttagggcgaacgcccttctgaggatatgtgcaatggtgaagcagctcgcgggag

SEQ ID NO: 131233 - DNA, 80 bp, synthetic construct
  source 1..80: mol_type = other DNA
gacgctcggcgatgggatgtgggcgtggcttccgacgcgcgccgtcgtcgggctcgcgggccttcccgtcgacggcgcac

SEQ ID NO: 131234 - DNA, 80 bp, synthetic construct
  source 1..80: mol_type = other DNA
cggacgatgaagcgggcctgcagccgaagcccctcaccacgccgtcgcccatcatcgccacgtcggaccccaccccgcga

SEQ ID NO: 131235 - DNA, 80 bp, synthetic construct
  source 1..80: mol_type = other DNA
cagcagacccgtggcttgctagggacgatcgtcactagcctcacgggccgtgacaaaaacgaagtcgagggcgaggtgca

SEQ ID NO: 131236 - DNA, 80 bp, synthetic construct
  source 1..80: mol_type = other DNA
ttggagcagctttccttcaaatggcagccaacgatctgaagcttgaggtccttccgattctcaatgccatgtccattgca

SEQ ID NO: 131237 - DNA, 80 bp, synthetic construct
  source 1..80: mol_type = other DNA
tcatctcagagagccaaggtaacgaggaggacgagcgaaacctgagagccttcacggaggctatgaccaggtactccgcc

SEQ ID NO: 131238 - DNA, 80 bp, synthetic construct
  source 1..80: mol_type = other DNA
agtccttgtcatcggcgtcttgaccatcttcaccataacgccgctgtataaagtaatgcttgcccgcctgatatggtgga

SEQ ID NO: 131239 - DNA, 80 bp, synthetic construct
  source 1..80: mol_type = other DNA
gccccgaccaccgccgcgtctgtgtcatcaccgcaggcgagtctctttcccgccgccccccggaggacccagagcgaccc

SEQ ID NO: 131240 - DNA, 80 bp, synthetic construct
  source 1..80: mol_type = other DNA
ctgcgcctgcttgtggatgctcatcttgttgggccaggccgaagcagcattggagaagttggtcgtcttgcacgctgcga

SEQ ID NO: 131241 - DNA, 80 bp, synthetic construct
  source 1..80: mol_type = other DNA
tctttcaagaatgtacaacggacatgccggcggaatgtacaacggacatgcaggcggatgtacaacggacatgcaggcgg

SEQ ID NO: 131242 - DNA, 80 bp, synthetic construct
  source 1..80: mol_type = other DNA
tggtagattacccgtaccgactgtggcactacccttgcaccctgaacttctccatattcaaagtcagaatgtttgtggga

SEQ ID NO: 131243 - DNA, 80 bp, synthetic construct
  source 1..80: mol_type = other DNA
tggcctgggacaacgaaaacgacaggcgcactctatggacaactccagacacatctccaaattgcaaaatgagtaaagaa

SEQ ID NO: 131244 - DNA, 80 bp, synthetic construct
  source 1..80: mol_type = other DNA
gacggacatttacaaggtccccctggacgggtacggccgcatgaacggccggggcgtgtttcgcgtgtgggacataggcc

SEQ ID NO: 131245 - DNA, 80 bp, synthetic construct
  source 1..80: mol_type = other DNA
gcgttctcgctccacagttactctcctactgagctcaacagggtggccggcgctctcagaaagcttgggtgccctcccct

SEQ ID NO: 131246 - DNA, 80 bp, synthetic construct
  source 1..80: mol_type = other DNA
attcgtggtaagcggcttggccggcgctgccatagggggtataggcctgggcagggtcttgattgacatcctggcaggat

SEQ ID NO: 131247 - DNA, 80 bp, synthetic construct
  source 1..80: mol_type = other DNA
gatcaacaagtgggagtggctatcgtcgatgtgatgtgccatgcaacctatgtcaacaggcgcctgctcccgcaggggag

SEQ ID NO: 131248 - DNA, 80 bp, synthetic construct
  source 1..80: mol_type = other DNA
gctctccaggtcgcaacagaggcagtcaaacaggtcgggccgcatcatctgctcggcgtacgcggcccataggatctcgc

SEQ ID NO: 131249 - DNA, 80 bp, synthetic construct
  source 1..80: mol_type = other DNA
tccagcatcgtctcgtgggccgttaagtgggaatacataatgctggtctttttactacttgctgatgcccgtatctgcac

SEQ ID NO: 131250 - DNA, 80 bp, synthetic construct
  source 1..80: mol_type = other DNA
tcttcaggatgctcagagcggatgtcggcatgtaaaaacatcatggacttcgaccagggatggggtccaatcacatacgc

SEQ ID NO: 131251 - DNA, 80 bp, synthetic construct
  source 1..80: mol_type = other DNA
tggacaaacagaacagaagtgggcctcgctacgaggaagatgtgaatttgggaagcggaacgcgctctgttggaaagctc

SEQ ID NO: 131252 - DNA, 80 bp, synthetic construct
  source 1..80: mol_type = other DNA
acgtacaattactcgcgcgccctgtggcgcgtggcctcagacagttatgtcgaggtgcgcagggggggtgatatccactt

SEQ ID NO: 131253 - DNA, 80 bp, synthetic construct
  source 1..80: mol_type = other DNA
ctgacaaccacctggacctcgagatggacggccaggcctccgagcagcgcatcctgcaactgcgcgtccgtcagcagcag

SEQ ID NO: 131254 - DNA, 80 bp, synthetic construct
  source 1..80: mol_type = other DNA
tcgccttgatgacttctcccagggctggggaccgctaacttataacagttcttccacggccgggatcaacaggccttatt

SEQ ID NO: 131255 - DNA, 80 bp, synthetic construct
  source 1..80: mol_type = other DNA
tctttgaaccagagagagagaagagtgcagcaatagacggggagtacagactgcggggagaagcaaggaaaacgtttgtg

SEQ ID NO: 131256 - DNA, 80 bp, synthetic construct
  source 1..80: mol_type = other DNA
cgcggcacctgcccgacgacgagcccatctatgacaccgttggggggtacgaccccgagcccgccgaggaccccgtgtac

SEQ ID NO: 131257 - DNA, 80 bp, synthetic construct
  source 1..80: mol_type = other DNA
cgccggagtcgtcagacgcgagctcctccaggccgtgaatccatgcccacatgcgagggtggacgggctcgccggtggtg

SEQ ID NO: 131258 - DNA, 80 bp, synthetic construct
  source 1..80: mol_type = other DNA
tccggtcgatgggactgaatgccgtcgcattttacaggggtgttgatgtggcggtgatccccacggtcggggacgttgtc

SEQ ID NO: 131259 - DNA, 80 bp, synthetic construct
  source 1..80: mol_type = other DNA
gaggaatgcccaggcaccaaggtccacgtggaggaaacatgtggaacaagaggaccatctctgagatcaaccactgcaag

SEQ ID NO: 131260 - DNA, 80 bp, synthetic construct
  source 1..80: mol_type = other DNA
agaccgtggagtggttcgcgtcagaactgctggggcgaatagtcgcgtgcatcgaggcccactttcccgagcacgcgcgg

SEQ ID NO: 131261 - DNA, 80 bp, synthetic construct
  source 1..80: mol_type = other DNA
cagggcacgcgcggtcagctccatcatctcctcgcttaggtactcgtcctccaggagcgccagccagtcctcgatctgca

SEQ ID NO: 131262 - DNA, 80 bp, synthetic construct
  source 1..80: mol_type = other DNA
tgggacgaagtacatcgccacatgcatgcaagctgaccttgaggtcatgaccagcacgtgggtcctagctggaggagtcc

SEQ ID NO: 131263 - DNA, 80 bp, synthetic construct
  source 1..80: mol_type = other DNA
agtgctaatatactccattaattccaccggtgtggttgattcgggcggaatgatgtattccttgtagccatgttgacata

SEQ ID NO: 131264 - DNA, 80 bp, synthetic construct
  source 1..80: mol_type = other DNA
gtatcaccccagtgccgccccaaacctcgtgacttccccaccgctccgggcggcccgtcccccgcgcccggaagggaggc

SEQ ID NO: 131265 - DNA, 80 bp, synthetic construct
  source 1..80: mol_type = other DNA
ccgacacactccagttaattcttggctagggaacatcatactttacgcgcctacaatctgggtgcgcatggtattgatga

SEQ ID NO: 131266 - DNA, 80 bp, synthetic construct
  source 1..80: mol_type = other DNA
acctccgcaaagcgcgcgcgaccctcccctgcggcgttgcgacatacaaaatacaccagggcgtggaagtactcgcgagc

SEQ ID NO: 131267 - DNA, 80 bp, synthetic construct
  source 1..80: mol_type = other DNA
aagaaagtgacgtttgaccgtatgcagatgctggaccaacattattatgatgtccttaaggagattaagctccgggcgtc

SEQ ID NO: 131268 - DNA, 80 bp, synthetic construct
  source 1..80: mol_type = other DNA
gggcagcaactcgccgagcagtttaaacagaaggtgctcggcttaatccaaaccaccacaaaacaggcagaggagcttaa

SEQ ID NO: 131269 - DNA, 80 bp, synthetic construct
  source 1..80: mol_type = other DNA
ggcgtgaggattcaccgctacgcgccaccctgcaaccccctcctaagggaggaggtctgcttctccgtggggctgcactc

SEQ ID NO: 131270 - DNA, 80 bp, synthetic construct
  source 1..80: mol_type = other DNA
gggacacggcggcgacgacggcgcaccgggaggcggtcgacaaagcgctcgatcatctccccgcggcgacggcgcatggt

SEQ ID NO: 131271 - DNA, 80 bp, synthetic construct
  source 1..80: mol_type = other DNA
ttgatgaaagaacggtagctgccaacctcgccgacattatttttccagaaaggctattgattaccctgcaaaacggactg

SEQ ID NO: 131272 - DNA, 80 bp, synthetic construct
  source 1..80: mol_type = other DNA
cgcgcgaacgtgccgcctcccccgagtcttcggaatgtcttggcggccgtcaagaactgttatcccgaggcacggatgag

SEQ ID NO: 131273 - DNA, 80 bp, synthetic construct
  source 1..80: mol_type = other DNA
ctggatttaccaaagtgtgcggagcacctccttgcgtcatcggaggggtgggcaacaacaccctgcactgccccactgac

SEQ ID NO: 131274 - DNA, 80 bp, synthetic construct
  source 1..80: mol_type = other DNA
attgacgtcaatgacggtaaatggcccgcctggcattatgcccagtacatgaccttatgggactttcctacttggcagta

SEQ ID NO: 131275 - DNA, 80 bp, synthetic construct
  source 1..80: mol_type = other DNA
atcaagtgggagtatgtggtccttgctttcttgctactggctgatgcgcgcctgtgtgcatgtctctggcttatgatgct

SEQ ID NO: 131276 - DNA, 80 bp, synthetic construct
  source 1..80: mol_type = other DNA
tgatcataactgctttcacccttaccccggcatacaggctactcctcagtcggagcctgtggtggctgtgctatatgctg

SEQ ID NO: 131277 - DNA, 80 bp, synthetic construct
  source 1..80: mol_type = other DNA
ccacctctgcctatgaggtgcacagcacaaccgatggctaccatgtcactaatgactgttccaacggcagcatcgtatat

SEQ ID NO: 131278 - DNA, 80 bp, synthetic construct
  source 1..80: mol_type = other DNA
actgggtgtcctcagaggcttagtagctgcaagcccatcacttccttcaaccaagggtggggtcctttgacagatgctaa

SEQ ID NO: 131279 - DNA, 80 bp, synthetic construct
  source 1..80: mol_type = other DNA
cggcattatccacaggcctattgcacctccaccagaacatcgtggatgtgcagtacctctatggacttagtccggctatc

SEQ ID NO: 131280 - DNA, 80 bp, synthetic construct
  source 1..80: mol_type = other DNA
aagtacaacgaccaactccaaaaggcacggtaatggacatcatatctaggaaagaccaaagaggcagtggacaggtgggg

SEQ ID NO: 131281 - DNA, 80 bp, synthetic construct
  source 1..80: mol_type = other DNA
ccaggtcgtatctacggccactcaatctttccttgccaccaccgttaacggcgttctgtggacagtctatcatggggccg

SEQ ID NO: 131282 - DNA, 80 bp, synthetic construct
  source 1..80: mol_type = other DNA
aaaaaattacaaaggcattaagccaaataacggaggaggaggaggctggactgccgacaacactgtcagtgaaaacaacc

SEQ ID NO: 131283 - DNA, 80 bp, synthetic construct
  source 1..80: mol_type = other DNA
ggatggagtgatggcaacacgctgcccttgtggacgggaaataacaggacacgtaaaaaatgggtccatgaggatagcgg

SEQ ID NO: 131284 - DNA, 80 bp, synthetic construct
  source 1..80: mol_type = other DNA
catggccaacgccatctgctcagcggtaccagtggactgggttccaacaggacgcactacgtggtctatccacgctaaag

SEQ ID NO: 131285 - DNA, 80 bp, synthetic construct
  source 1..80: mol_type = other DNA
agcagaacactctggtgcctcacacaacatactagtggaggtccaagatgatggaaccatgaagataaaggatgaagaga

SEQ ID NO: 131286 - DNA, 80 bp, synthetic construct
  source 1..80: mol_type = other DNA
ggtggtctccacggccacccaaaccttcttggcgaccggcattaatggggtgctctggacggtttaccacggcgctggct

SEQ ID NO: 131287 - DNA, 80 bp, synthetic construct
  source 1..80: mol_type = other DNA
ggccattctgcgccgccacgtgggaccgggggagggcgcggtccaatggatgaacaggcttattgcctttgcttccagag

SEQ ID NO: 131288 - DNA, 80 bp, synthetic construct
  source 1..80: mol_type = other DNA
cggtcgttctctgtgaggcgtatgatactggggcagcatggtacgagttaacacccgcagagaccacggtcaggctgcgt

SEQ ID NO: 131289 - DNA, 80 bp, synthetic construct
  source 1..80: mol_type = other DNA
gggtaggaagaactcaggaggaggagttgaaggcttaggactgcagaagcttgggtacatcttgaaggaagttggaacaa

SEQ ID NO: 131290 - DNA, 80 bp, synthetic construct
  source 1..80: mol_type = other DNA
ccctgggatgtggtgactggagtcacaggaatagccatgaccgacaccacaccgtatggtcagcaaagagttttcaagga

SEQ ID NO: 131291 - DNA, 80 bp, synthetic construct
  source 1..80: mol_type = other DNA
gaccgcaaaggcccccctccccgacacgtgacccggaaggcactgcgggtcatccggccccaccagagagcgaccccccc

SEQ ID NO: 131292 - DNA, 80 bp, synthetic construct
  source 1..80: mol_type = other DNA
acttattatgcaaaaactcatgtgggaaatacgtccctaagtttgccgaaattaccgtacaacaagaggatttatgtcgc

SEQ ID NO: 131293 - DNA, 80 bp, synthetic construct
  source 1..80: mol_type = other DNA
actagagaagctcaaaaaaggacagcggccggaataatgaaaaatccaaccgttgatggaattgttgcaatagatttgga

SEQ ID NO: 131294 - DNA, 80 bp, synthetic construct
  source 1..80: mol_type = other DNA
acatggatatacagtcttttaatatatttgatggtgtacacgaaactgaagccgaagcctctgtggcattgtgcgcagaa

SEQ ID NO: 131295 - DNA, 80 bp, synthetic construct
  source 1..80: mol_type = other DNA
gtggctttgccgatctcatggggtacattcccgtcgtcggcgccccgttgggcggcgtagcggcagcccttgcacatggt

SEQ ID NO: 131296 - DNA, 80 bp, synthetic construct
  source 1..80: mol_type = other DNA
tgtacccgcgttaccgggagtccccttcttttcctgccagcgaggctatcgtggagtgtggcggggcgacggaatcaata

SEQ ID NO: 131297 - DNA, 80 bp, synthetic construct
  source 1..80: mol_type = other DNA
ggtcaggtgtcagaaccatctcaactggtgcgcctatcacatactccacctatgggaagttcctagcggatggaggatgt

SEQ ID NO: 131298 - DNA, 80 bp, synthetic construct
  source 1..80: mol_type = other DNA
agtggatgaatcgcctcattgcgttcgcttcgcgaggcaatcatgtggcgcccacgcactacgtccccgagtctgacgcg

SEQ ID NO: 131299 - DNA, 80 bp, synthetic construct
  source 1..80: mol_type = other DNA
agcggaaggaatagtactgtcatctgccgcccttggacctctcattgaggggaacactagtctgttgtggaatggcccaa

SEQ ID NO: 131300 - DNA, 80 bp, synthetic construct
  source 1..80: mol_type = other DNA
gtagaaggcgttacttttgcacagagacttgcctggaaatatattagggagcttgtgtttgcaaccacactattcacctc

SEQ ID NO: 131301 - DNA, 80 bp, synthetic construct
  source 1..80: mol_type = other DNA
tctatgagatggacggtatgatcatgcactacccagggtgcgtgccctgcgttcgggaggataaccatctccgctgctgg

SEQ ID NO: 131302 - DNA, 80 bp, synthetic construct
  source 1..80: mol_type = other DNA
ctcgaacctgtttttacgggccccggacatcacccacgtcgcccccccgtactgtctgaatgccacgtggcaggccgaaa

SEQ ID NO: 131303 - DNA, 80 bp, synthetic construct
  source 1..80: mol_type = other DNA
cgggtttatagcaggcctcatctatgccaccaaattcaattcctcagggtgccgagagcgcatgtcagcttgcaaaaaca

SEQ ID NO: 131304 - DNA, 80 bp, synthetic construct
  source 1..80: mol_type = other DNA
ggatcccggcctcccattacaaccagctcgtcgccggccacgccgcgccccaaccccagccgcattccgcgtttggtttc

SEQ ID NO: 131305 - DNA, 80 bp, synthetic construct
  source 1..80: mol_type = other DNA
caacctgaaggttcaactgattaggatggcggaggcagagatggtgatacaccaccagcatgtccaggactgtgacgaca

SEQ ID NO: 131306 - DNA, 80 bp, synthetic construct
  source 1..80: mol_type = other DNA
ccgcgggtacagatccacggggacgccgaccgactccccgcccccgggacatacgcgcacgacgcgtctccagtattgct

SEQ ID NO: 131307 - DNA, 80 bp, synthetic construct
  source 1..80: mol_type = other DNA
ttttgtgcaagctccccagggagagtttaccgtctcccctcgcaatacccccggagagatccttctgagaataccattag

SEQ ID NO: 131308 - DNA, 80 bp, synthetic construct
  source 1..80: mol_type = other DNA
aaaaagatactaaaatgaagccatgctatggttcctttgctaaacccacaaacaaggaaggtggccaggctaaattgaaa

SEQ ID NO: 131309 - DNA, 80 bp, synthetic construct
  source 1..80: mol_type = other DNA
accaggcgctgctgcgcatggcctgcgaggtgcgccaggtcagcgatcgccagccgcggtttaccgcgaccagcgtcctg

SEQ ID NO: 131310 - DNA, 80 bp, synthetic construct
  source 1..80: mol_type = other DNA
atatctcctcgtttcgcgggttggagcggctttcgctgtacggcagtagtcggtgctcgtccagacgggccagggtcatg

SEQ ID NO: 131311 - DNA, 80 bp, synthetic construct
  source 1..80: mol_type = other DNA
aatagcttgctacgccatcacaacctcgtgtactgtacatcgtcacgaagtgcggggcttaggcaaaagaaggtcacctt

SEQ ID NO: 131312 - DNA, 80 bp, synthetic construct
  source 1..80: mol_type = other DNA
gctcgtctcgcagaagcttcgctttagctcggcgaccagggtcgcccgggccaccctggtggccaggcggccgttgtcca

SEQ ID NO: 131313 - DNA, 80 bp, synthetic construct
  source 1..80: mol_type = other DNA
gagctgaatctgaggacaaggtagtcatcttcgattccctcgactcagtggtcgaggctgaggatgaacgagaaccttca

SEQ ID NO: 131314 - DNA, 80 bp, synthetic construct
  source 1..80: mol_type = other DNA
aaagccgcggcggcccaattgccggagaccctagagaccattatgcttttggggttgctgggaacagtctcgctgggaat

SEQ ID NO: 131315 - DNA, 80 bp, synthetic construct
  source 1..80: mol_type = other DNA
cagccatgggcgccgttttcacagaggagaaccaatgggacagtgcgaaagctgctgttgaggatgaagaattttggaaa

SEQ ID NO: 131316 - DNA, 80 bp, synthetic construct
  source 1..80: mol_type = other DNA
gccatgtgcaagtgttgtccaccaccacgcaaacgttcctaggcactcccgtgtcgggcgtcatgtggagcgtgtaccat

SEQ ID NO: 131317 - DNA, 80 bp, synthetic construct
  source 1..80: mol_type = other DNA
gtcaatttaccaatgttgtgacttggcccccgaagccagacaggtcataaggtcgctcacagagcggctttatgtcgggg

SEQ ID NO: 131318 - DNA, 80 bp, synthetic construct
  source 1..80: mol_type = other DNA
ggcctttgatgagatggaagaatgcgcctccaaagccgccctcatcgaggaagggcagcggatggcggagatgctcaagt

SEQ ID NO: 131319 - DNA, 80 bp, synthetic construct
  source 1..80: mol_type = other DNA
cagatggagaccaagctcattacatggggggcggacaccgccgcatgcggtgacatcatcgacggcttgcccgtctcagc

SEQ ID NO: 131320 - DNA, 80 bp, synthetic construct
  source 1..80: mol_type = other DNA
tttgctgaaaaaagtctggatcttcaaacacctgcagtaaattcagtagatttacattaggctccacaccttgctctcgc

SEQ ID NO: 131321 - DNA, 80 bp, synthetic construct
  source 1..80: mol_type = other DNA
cggtcaggttggtggtgaaggtggtggatatggcgtcggaggagaatcggaaggagccgccgtactcggagcgcagcatc

SEQ ID NO: 131322 - DNA, 80 bp, synthetic construct
  source 1..80: mol_type = other DNA
tcactcaggtcgtcgactttagccttgacccaactttcacaattgagaccaccaccgtgccccaggacgctgtggccaga

SEQ ID NO: 131323 - DNA, 80 bp, synthetic construct
  source 1..80: mol_type = other DNA
cttataggcaatgaagagtttctggactacatgccttcaatgaagagatttaggaaggaggaggagtcggagggagccat

SEQ ID NO: 131324 - DNA, 80 bp, synthetic construct
  source 1..80: mol_type = other DNA
ttcacggtgatagctctttttttagcgcatgctataggaacatccatcactcaaaaagggatcattttcatcttgctgat

SEQ ID NO: 131325 - DNA, 80 bp, synthetic construct
  source 1..80: mol_type = other DNA
tgcggccaactcctcatatctcaggtgccctaccgattgcttcaggaaacaccccgaggccacatatgcccgttgcgggt

SEQ ID NO: 131326 - DNA, 80 bp, synthetic construct
  source 1..80: mol_type = other DNA
gctgcatcgtaaacaacagacttgcgagcgtcttcgtacttaaaaaaacaaaaccacgtacgaccactggttatcgcacc

SEQ ID NO: 131327 - DNA, 80 bp, synthetic construct
  source 1..80: mol_type = other DNA
cctttgcatgctcgtgcgctccatgatggggggaaaatacttccagatgatcatactgagcataggcaggtggttcaaca

SEQ ID NO: 131328 - DNA, 80 bp, synthetic construct
  source 1..80: mol_type = other DNA
aggtggtggacgggctggcctcgggcattaacggcgtggtggacatcgcgaaccaggccgtgcagcgcgagataaacagc

SEQ ID NO: 131329 - DNA, 80 bp, synthetic construct
  source 1..80: mol_type = other DNA
gatcccgacctaagtgacgggtcctggtcgacggtcagcgaggaggctggcgaggatgtggtgtgctgctcaatgtccta

SEQ ID NO: 131330 - DNA, 80 bp, synthetic construct
  source 1..80: mol_type = other DNA
cgatctcatggggtacatccccgtcttaggagcccccctaggtggtgtcgcggcagccctcgcgcatggcgtgcgggcta

SEQ ID NO: 131331 - DNA, 80 bp, synthetic construct
  source 1..80: mol_type = other DNA
ctcgcgctgtccggacgcacctgggcgcccggcgtggaggcgctgacccacacgctgctttccaccgccgttaacaacat

SEQ ID NO: 131332 - DNA, 80 bp, synthetic construct
  source 1..80: mol_type = other DNA
gtcgtttctggggtcacgtgtctggtcctccccaagtatcactgcgacctgtatacctatctgagcaagcgcccgtctcc

SEQ ID NO: 131333 - DNA, 80 bp, synthetic construct
  source 1..80: mol_type = other DNA
cgtggacgccatggtgggggctgccgtggtgtgctcagccatgtatgtgggagacttatgtggaggtgttttcctagtcg

SEQ ID NO: 131334 - DNA, 80 bp, synthetic construct
  source 1..80: mol_type = other DNA
acactcgttgcccgtgtggagccgcaatagctggacatgtcaagaacggttcgatgagaatcgtcggccctaagacttgt

SEQ ID NO: 131335 - DNA, 80 bp, synthetic construct
  source 1..80: mol_type = other DNA
ccaatagccattatgggaggtgcctacgggttccaatactctccccaacagcgggtcgattatctcttgaaggcatggaa

SEQ ID NO: 131336 - DNA, 80 bp, synthetic construct
  source 1..80: mol_type = other DNA
tcctcaagaaaagtcaaaacagaaagacaggacaaagagtttagataggaaagcagaaaaacaaaaaacaaaagacgagg

SEQ ID NO: 131337 - DNA, 80 bp, synthetic construct
  source 1..80: mol_type = other DNA
cgcgattttaaatccgcattggttaccacctcctggtttttatactggagaatttgatttaccggagggaaacgatggct

SEQ ID NO: 131338 - DNA, 80 bp, synthetic construct
  source 1..80: mol_type = other DNA
gatgcctactaatggttactttaggtttgaagcttgggtcaaccctttctatactctcgcccccgtgggatctggaaagg

SEQ ID NO: 131339 - DNA, 80 bp, synthetic construct
  source 1..80: mol_type = other DNA
cttgggagtgtgggtggcctcgcagatcgccacccccacggcatctacggcttttgtcgtaagtggcttgacgggtgcgg

SEQ ID NO: 131340 - DNA, 80 bp, synthetic construct
  source 1..80: mol_type = other DNA
acctatgtgctggggtctcaactcccatgcgaacctgaaccagacgtcatggtcgtcacgtcgatgttgacggatccgtc

SEQ ID NO: 131341 - DNA, 80 bp, synthetic construct
  source 1..80: mol_type = other DNA
ctacaaaataaatgcattatttggttttcttcatcgttttcagttacttcacgtgggcgtttagttgggattacttgcgt

SEQ ID NO: 131342 - DNA, 80 bp, synthetic construct
  source 1..80: mol_type = other DNA
gatgatgaactggtccccaacggccaccatggtcatggcgtacctcatgcgcatccctgaagtcatcctggacatcatca

SEQ ID NO: 131343 - DNA, 80 bp, synthetic construct
  source 1..80: mol_type = other DNA
aggaggctccagttgagtgctttgaaccctcgatgctgaggaagaagcagctaacagtcttggatctgcatccaggagcc

SEQ ID NO: 131344 - DNA, 80 bp, synthetic construct
  source 1..80: mol_type = other DNA
ccaaccagaacctcaagtgggagaagaaaactggcaggaaacatttgttttttatggcggtagagctcttaagaaggaca

SEQ ID NO: 131345 - DNA, 80 bp, synthetic construct
  source 1..80: mol_type = other DNA
gcgatcattgcctgcttgcaagactgcggggggaacattgcttttgcccgccgctacctgcttttccaccgcgtggtaaa

SEQ ID NO: 131346 - DNA, 80 bp, synthetic construct
  source 1..80: mol_type = other DNA
gtgtgatgacactattgcatacgagtgtcctgcactcatggaaggaaatgatccggaagacattgactgctggtgcacca

SEQ ID NO: 131347 - DNA, 80 bp, synthetic construct
  source 1..80: mol_type = other DNA
gtctgtgaggtgctgtctgacttcaaaacgtggctgaaatccaagcttctaccacaattgcccggagtccctttcctatc

SEQ ID NO: 131348 - DNA, 80 bp, synthetic construct
  source 1..80: mol_type = other DNA
gcttggcctaaacttgagcagttttggcataagcacatgtggaattttgttagtggcattcaatatctggcagggctaac

SEQ ID NO: 131349 - DNA, 80 bp, synthetic construct
  source 1..80: mol_type = other DNA
aagaaggtgacctttgacagggtccaactcttggaccagcattaccatgacaccctcaaggagattaaggaacgggcttc

SEQ ID NO: 131350 - DNA, 80 bp, synthetic construct
  source 1..80: mol_type = other DNA
tcttttggctctgggtgttatcaccatcttcaccctcaccccggcttataaacacctccttgtgaacgcgctctggtgga

SEQ ID NO: 131351 - DNA, 80 bp, synthetic construct
  source 1..80: mol_type = other DNA
ccggccacaggatggcgtgggacatgatgcagaactgggcgccggccttgtcaatggttgccgcttacgctgtgagagtg

SEQ ID NO: 131352 - DNA, 80 bp, synthetic construct
  source 1..80: mol_type = other DNA
tgaaggctaagctattgccccgcgtgcctggcatccccttcctctcctgtcaaagggggtacagaggagtatggcgtgga

SEQ ID NO: 131353 - DNA, 80 bp, synthetic construct
  source 1..80: mol_type = other DNA
tggatgaactccactgggttcgtcaagacgtgtggagcacccccatgcaacatcagacccgccgcctccaaggggaacaa

SEQ ID NO: 131354 - DNA, 80 bp, synthetic construct
  source 1..80: mol_type = other DNA
gaaccatgaaggctttcacagcttgcgttctgattagcatagtcacacttagtctttctcaaatcattaatgtaaatgtt

SEQ ID NO: 131355 - DNA, 80 bp, synthetic construct
  source 1..80: mol_type = other DNA
gcttattctataacatttaccttcacttggcaaaaagactattctgcccaacagtttgatgttacatcttttaccttctc

SEQ ID NO: 131356 - DNA, 80 bp, synthetic construct
  source 1..80: mol_type = other DNA
aagctctgggctttcttaacgaagaccactggcttggaagaaagaactcaggaggcggggtcgagggcttgggcctccaa

SEQ ID NO: 131357 - DNA, 80 bp, synthetic construct
  source 1..80: mol_type = other DNA
ggtgactctctccagagctctgacgcggtgctttctcccgggggagacgatgctggctctgaagctggctcgttcagttc

SEQ ID NO: 131358 - DNA, 80 bp, synthetic construct
  source 1..80: mol_type = other DNA
acaatgaccccggcaaccattaaagccgtaaaggatacatttgaagaccgcgcatacccaactattttctacatgctaga

SEQ ID NO: 131359 - DNA, 80 bp, synthetic construct
  source 1..80: mol_type = other DNA
ccaggagggccgtcaaccacatcaagtccgtgtgggaggacctcctggaagaccagtcaacactaattcctacaaccatt

SEQ ID NO: 131360 - DNA, 80 bp, synthetic construct
  source 1..80: mol_type = other DNA
ttcaccaatttccgacttacagactgagatcccggatcgagcttggaactctggatacgaatggatcacagaatacaccg

SEQ ID NO: 131361 - DNA, 80 bp, synthetic construct
  source 1..80: mol_type = other DNA
actctgaccccagttgggaggttgataaccgctaaccccgtaatcactgaaagcactgagaactctaagatgatgctgga

SEQ ID NO: 131362 - DNA, 80 bp, synthetic construct
  source 1..80: mol_type = other DNA
tcgatgagtcaagagtggcgcaagctttggcagagctggcatcccgggcgttctcaacacctccagagcagcccgacaac

SEQ ID NO: 131363 - DNA, 80 bp, synthetic construct
  source 1..80: mol_type = other DNA
cgggcagaatacgatgagagggaaatatcggtagcagccgaatgccacaggcctccaaggcctcgcttcccacctgcact

SEQ ID NO: 131364 - DNA, 80 bp, synthetic construct
  source 1..80: mol_type = other DNA
ccgggagcaggcgcaattgccagcgggagaccaatttccttcagcactgcaccaaaaaccgcaacaagctcgtggtgcgg

SEQ ID NO: 131365 - DNA, 80 bp, synthetic construct
  source 1..80: mol_type = other DNA
gctatgaccaggtactcggcccctcctggagacgagccgcatgctgagtatgacctagagcacattacatcttgctcttc

SEQ ID NO: 131366 - DNA, 80 bp, synthetic construct
  source 1..80: mol_type = other DNA
gggcgtggcggcaaaacaccctcgcccaggtgggtacgtcgccggcctccggcccggcggcccccggtctccgtccctcg

SEQ ID NO: 131367 - DNA, 80 bp, synthetic construct
  source 1..80: mol_type = other DNA
cagggtcgttgccgctgagatggaggaagccctaagaggactgccggtgcgttacatgacaacagcagtcaacgtcaccc

SEQ ID NO: 131368 - DNA, 80 bp, synthetic construct
  source 1..80: mol_type = other DNA
tttgtgtcgcgccagtacgtgcgggccaaccccagaccgtgcaaaaaccacgggtcgatttgctccgtccagtacgtgtc

SEQ ID NO: 131369 - DNA, 80 bp, synthetic construct
  source 1..80: mol_type = other DNA
cgaggcgtagccgacggtcaatttctgtgcagcaccatggagattccacactggcaacaaagaacacgccatggttggac

SEQ ID NO: 131370 - DNA, 80 bp, synthetic construct
  source 1..80: mol_type = other DNA
ccagagctcttccgcgttcgtggtaagcggcttggctggcgccgccataggaggtataggcctgggcagggtcttgcttg

SEQ ID NO: 131371 - DNA, 80 bp, synthetic construct
  source 1..80: mol_type = other DNA
aggaggtagtgaatctcggctctggcacgcgggctgtggtaagctgcgctgaagctcccaacatgaagatcattggtaac

SEQ ID NO: 131372 - DNA, 80 bp, synthetic construct
  source 1..80: mol_type = other DNA
tgtgaaaggccgccttgtgcctgcgtgtacctacatggcactgggaatgtggccgttgctcctgacaatcttggccttgc

SEQ ID NO: 131373 - DNA, 80 bp, synthetic construct
  source 1..80: mol_type = other DNA
gtgtccgcgagactaggggacttggtgctgctgggacccgcggatgacatgcgtcacggaggttggaagcttctggctcc

SEQ ID NO: 131374 - DNA, 80 bp, synthetic construct
  source 1..80: mol_type = other DNA
ttcaactcctcggggtgcccagaaaggcttgccagttgcaagcccctcggtggctttccccagggctggtgtacgcttgg

SEQ ID NO: 131375 - DNA, 80 bp, synthetic construct
  source 1..80: mol_type = other DNA
aaggcagtccatgctgacatggggtactggatagaaagtgaaaagaatgaaacctggaagctggcgagagcctccttcat

SEQ ID NO: 131376 - DNA, 80 bp, synthetic construct
  source 1..80: mol_type = other DNA
catccttcatagaggtgaaaacctgtacttggccaaaatcacacactctttggagcaatggtgtactagagagtgacatg

SEQ ID NO: 131377 - DNA, 80 bp, synthetic construct
  source 1..80: mol_type = other DNA
ctcttacaacacatcagaccctcctttttaatattctaggagggtgggtggcctcacagatcgcgccacccacggccgcc

SEQ ID NO: 131378 - DNA, 80 bp, synthetic construct
  source 1..80: mol_type = other DNA
ctgaggaatccatctatcagtgctgccagctggacccgaaggctcgcaaagtaataacatcacttactgagcggctttac

SEQ ID NO: 131379 - DNA, 80 bp, synthetic construct
  source 1..80: mol_type = other DNA
acccagtggatgaacaggctaatcgcttttgcctctaggggcaaccacgtctcccccacacattacgtgcctgagactga

SEQ ID NO: 131380 - DNA, 80 bp, synthetic construct
  source 1..80: mol_type = other DNA
ggcttccccgttgcgggcactgcggaggagagcggggtcgctggcgcaggtgagcgggtaggcctcctgaaacaggccac

SEQ ID NO: 131381 - DNA, 80 bp, synthetic construct
  source 1..80: mol_type = other DNA
gatgaacttgctacaaagctaagaagtagtggccttaacgctgttgcatactatcgcggtctcgatgtgtccgtaatacc

SEQ ID NO: 131382 - DNA, 80 bp, synthetic construct
  source 1..80: mol_type = other DNA
gctctcttactataaccagcctactcagaagactccacaattggataactgaggactgccccatcccatgctccggatcc

SEQ ID NO: 131383 - DNA, 80 bp, synthetic construct
  source 1..80: mol_type = other DNA
cagtcaattcctggttgggtaatatcatactttacgcgcccacaatttgggtgcgcatgatattgatgacccatttcttc

SEQ ID NO: 131384 - DNA, 80 bp, synthetic construct
  source 1..80: mol_type = other DNA
tcttcttcttcttcttttccggcaccggccgatatgaaccccgtttcggcatcgggcgccccggcccctccgccgcccgg

SEQ ID NO: 131385 - DNA, 80 bp, synthetic construct
  source 1..80: mol_type = other DNA
cccattccgctaaatcaaagtacggatttggggcgaaggaggttcgcagcttgtccaggagggctgttaaccacatcaag

SEQ ID NO: 131386 - DNA, 80 bp, synthetic construct
  source 1..80: mol_type = other DNA
atggtgaacggggtagtaaaactgctgacaaaaccttgggatgtggttccaatggtgactcagttggccatgacagacac

SEQ ID NO: 131387 - DNA, 80 bp, synthetic construct
  source 1..80: mol_type = other DNA
cggccggattacaaccccccgttgctggagacgtggaaaaagccggactatgaaccacctgtggtccatggctgcccact

SEQ ID NO: 131388 - DNA, 80 bp, synthetic construct
  source 1..80: mol_type = other DNA
aaatttgggccaacgcaaaactgatgaaaaccataaaaatggaatgcatcagaaagtcgaacaaaatcatgaaactaaga

SEQ ID NO: 131389 - DNA, 80 bp, synthetic construct
  source 1..80: mol_type = other DNA
ggagttaggctgcacagatacgcgcctgcgtgtcgaccactcctccgcgatgacctgacattctcagtggggctcaatag

SEQ ID NO: 131390 - DNA, 80 bp, synthetic construct
  source 1..80: mol_type = other DNA
tcacctacgccctaaacactttcaccaacctggccgtccagctggtgaggatgatggaaggggaaggagtgattggccca

SEQ ID NO: 131391 - DNA, 80 bp, synthetic construct
  source 1..80: mol_type = other DNA
cttcaagacatggctctctgctaagatcatgccagcgctccctgggctgcccttcatttcttgtcaaaaggggtacaagg

SEQ ID NO: 131392 - DNA, 80 bp, synthetic construct
  source 1..80: mol_type = other DNA
acgcgtaaatgattgctataattatttgatatttatggtgacatatgagaaaggatttcaacatcgacggaaaatatgta

SEQ ID NO: 131393 - DNA, 80 bp, synthetic construct
  source 1..80: mol_type = other DNA
ttgccgaggtggatgacagagaaatctcaacggctgctgagtgtcaccgcccgccgagacaaaaatatccacccgccttg

SEQ ID NO: 131394 - DNA, 80 bp, synthetic construct
  source 1..80: mol_type = other DNA
acggcaatgagggctgcgtgtgggcaggatggctcttgtccccccgtggctccaggccgagttggggcccctctgacccc

SEQ ID NO: 131395 - DNA, 80 bp, synthetic construct
  source 1..80: mol_type = other DNA
ggctgtcatcatacacccacgccttacatttgagatcacaaaatggttgttagcatttctggggcctgcctacctcctta

SEQ ID NO: 131396 - DNA, 80 bp, synthetic construct
  source 1..80: mol_type = other DNA
tttatagcggtttgtgggaggggaggctaagaggcgaagccacagatcatggaatgatgcggcagcgcgcgagagcgacg

SEQ ID NO: 131397 - DNA, 80 bp, synthetic construct
  source 1..80: mol_type = other DNA
tcttcaccagaacatcgtggatgtccagtacctatatggtattggatcttcggtggtgtcgtgggcgctcaagtgggagt

SEQ ID NO: 131398 - DNA, 80 bp, synthetic construct
  source 1..80: mol_type = other DNA
ttcccccacctttggctttgttaagagggttaacatggtttgatgatttttcgattacggctcccgtattcaccgttatg

SEQ ID NO: 131399 - DNA, 80 bp, synthetic construct
  source 1..80: mol_type = other DNA
gcgcatgtttctgcatccgcagctgctgctgccgctgatagggaacgtgaggagtttcagttagaccatccagagttgcc

SEQ ID NO: 131400 - DNA, 80 bp, synthetic construct
  source 1..80: mol_type = other DNA
ccttcgatccgctaacggcggaggaggacgaacgggaggtctccgtgcccgcagagatcctgcggaagtctcggagattc

SEQ ID NO: 131401 - DNA, 80 bp, synthetic construct
  source 1..80: mol_type = other DNA
tccaggagtcaacggcggggtcgcactggtaggtggagaccggggatctaccggtttgtcaccccggaggagaggccgtc

SEQ ID NO: 131402 - DNA, 80 bp, synthetic construct
  source 1..80: mol_type = other DNA
ttttatgtttaccaccaaatttaaggctagggtaatggtggctaggaaaacaaacaacgaaggccaaaccattttagaat

SEQ ID NO: 131403 - DNA, 80 bp, synthetic construct
  source 1..80: mol_type = other DNA
cacgcgaccgcgcccaggcggcgggtacagtggaaaggtcgacgcgtaagacgtgttttgcgacccggcaccaccgtagt

SEQ ID NO: 131404 - DNA, 80 bp, synthetic construct
  source 1..80: mol_type = other DNA
atgcagaaaatgtggacctggaatctccagatactcatgttgtgtacaaacctgaagtttcagatgctagttcaaatgct

SEQ ID NO: 131405 - DNA, 80 bp, synthetic construct
  source 1..80: mol_type = other DNA
ttatttactttacaacccgtggtgaatttttatacgtttcaaataactgaacatttttcggtgttaccatggtgcgattt

SEQ ID NO: 131406 - DNA, 80 bp, synthetic construct
  source 1..80: mol_type = other DNA
tggcggtgttgatacagcgggtaataatcttacgtgaaatattttccgcatcagccagcgcagaaatatttccagcaaat

SEQ ID NO: 131407 - DNA, 80 bp, synthetic construct
  source 1..80: mol_type = other DNA
aacctttaaacttgtccttaaagcgccccaagtcctcttgagattatgtagtaataaaattattgacgtttagcctgtgt

SEQ ID NO: 131408 - DNA, 80 bp, synthetic construct
  source 1..80: mol_type = other DNA
atgacacatttcttcgctctcctcctttcagaggagcgattgagcgaaccactggactttgaaatctacggggtcaccca

SEQ ID NO: 131409 - DNA, 80 bp, synthetic construct
  source 1..80: mol_type = other DNA
tatatacagatcatggatcttggacacatgtgtgatgccaccatgagctatgaatgccctatgctggatgagggggtaga

SEQ ID NO: 131410 - DNA, 80 bp, synthetic construct
  source 1..80: mol_type = other DNA
ggcttccaatactcgcctcagcagcgggtcgaatacctcctagaagcatggaggtctaagaaaacccctatggggttctc

SEQ ID NO: 131411 - DNA, 80 bp, synthetic construct
  source 1..80: mol_type = other DNA
ccaagctgcaaatgaaaccaacgagaacaggaaaacggcccagttcacggtggcatctgagaaggtgatcttaaatctag

SEQ ID NO: 131412 - DNA, 80 bp, synthetic construct
  source 1..80: mol_type = other DNA
gacataataggaaagagaatagagaaaataaagcaagagcatgaaacatcatggcactatgaccaagaccacccatacaa

SEQ ID NO: 131413 - DNA, 80 bp, synthetic construct
  source 1..80: mol_type = other DNA
atcatgtgaatatgttggtggccccgccaacgctgtgctcagcactatacgtcgaagacgccttcggggccgtgtccctt

SEQ ID NO: 131414 - DNA, 80 bp, synthetic construct
  source 1..80: mol_type = other DNA
ggcgtcaggaccatcacgacaggcgccgcgatcacctattctacttatggcaagttcctcgccgatggtggttgttcggg

SEQ ID NO: 131415 - DNA, 80 bp, synthetic construct
  source 1..80: mol_type = other DNA
gtcaccccgcgtcaccgcacgtcaccccggccccgcctcgctcctccccgctcattatcatattggcacgtttccagttt

SEQ ID NO: 131416 - DNA, 80 bp, synthetic construct
  source 1..80: mol_type = other DNA
agaggtggccagcttaccaacatttctgtcctcgagagcgaaacaagccctagacaacattgtcatgctacatacatctg

SEQ ID NO: 131417 - DNA, 80 bp, synthetic construct
  source 1..80: mol_type = other DNA
atcaacaggggacgtcgtcgtcgtagcgacagacgccttgatgaccggatttaccggtgactttgactcggtgatagact

SEQ ID NO: 131418 - DNA, 80 bp, synthetic construct
  source 1..80: mol_type = other DNA
gaggctgcttgcaactggacgcgaggggagcgctgcgacttggaggacagagacaggtctgaacttagtccgctgttgtt

SEQ ID NO: 131419 - DNA, 80 bp, synthetic construct
  source 1..80: mol_type = other DNA
tttgcggggacgacctagtcatcatctctgagagtggaggcgtcgaagaagacgctcgagccctccgagctttcacggag

SEQ ID NO: 131420 - DNA, 80 bp, synthetic construct
  source 1..80: mol_type = other DNA
cagatccattggcactcaaggaattcaaggactttgcggctggcagaaagtcaatcgcccttgatcttgtgacagaaata

SEQ ID NO: 131421 - DNA, 80 bp, synthetic construct
  source 1..80: mol_type = other DNA
gctctacgcgtacatccagcataagaatcacattaaaggctggacctccatcgatttcatcaatcatcaggttacactca

SEQ ID NO: 131422 - DNA, 80 bp, synthetic construct
  source 1..80: mol_type = other DNA
acgttgaggtgcgccgggtgggggacttccattacatcacggaggccacagaagatgagctcaagtgtccgtgccaagta

SEQ ID NO: 131423 - DNA, 80 bp, synthetic construct
  source 1..80: mol_type = other DNA
ccttgtggtcatttccgagagtatgggggtcgccgaggatgctagtgcactgagagctttcacggaagctatgaccaggt

SEQ ID NO: 131424 - DNA, 80 bp, synthetic construct
  source 1..80: mol_type = other DNA
ccttcgcagcaccagggccaggcgggccggacaagtcatcatcaggagtcagcacacagtctgttggtgggtctacggat

SEQ ID NO: 131425 - DNA, 80 bp, synthetic construct
  source 1..80: mol_type = other DNA
gccgcgccaaccgtacacgcggtgacggccttttgcatctcaaagctggagctcacatacctgagatcgtttctttagaa

SEQ ID NO: 131426 - DNA, 80 bp, synthetic construct
  source 1..80: mol_type = other DNA
acgcggaacgctgatgtcatcccggctcggagacgcggggacaagcggggagcattgctctccccgagacccatttcgac

SEQ ID NO: 131427 - DNA, 80 bp, synthetic construct
  source 1..80: mol_type = other DNA
cacgacaattgtgcttaataaatcgtctatagtacctcttcaccaaaacgttggtgaaagtgtatccttggaagcaaccc

SEQ ID NO: 131428 - DNA, 80 bp, synthetic construct
  source 1..80: mol_type = other DNA
actcgagaccttctgggcgaagcatatgtggaacttcatcagtgggatacagtacctggcgggcctgtcaacgttgcctg

SEQ ID NO: 131429 - DNA, 80 bp, synthetic construct
  source 1..80: mol_type = other DNA
taccaccgggataagaccggagacacgaacgcctcctgcgctctgtgttacatgaaaaagaacttcagctttatttacag

SEQ ID NO: 131430 - DNA, 80 bp, synthetic construct
  source 1..80: mol_type = other DNA
tctatgtggcccaagctcgagcagttctggcataaacacatgtggaacttcgtgagcggaatacagtacctcgcggggtt

SEQ ID NO: 131431 - DNA, 80 bp, synthetic construct
  source 1..80: mol_type = other DNA
tctatcttccttcttgctctgttctcttgcttaatccatccaacagccagtctagagtggcggaatacgtctggcctcta

SEQ ID NO: 131432 - DNA, 80 bp, synthetic construct
  source 1..80: mol_type = other DNA
ggaggtgtgggcaacaacaccttgcactgccctactgactgtttccgcaagcatccggaagccacgtacgcgcggtgtgg

SEQ ID NO: 131433 - DNA, 80 bp, synthetic construct
  source 1..80: mol_type = other DNA
acaacacagcgtctctactgtccccacgaccagtgtcttacctcaagggctcgtcggggggccctatactatgtccctcg

SEQ ID NO: 131434 - DNA, 80 bp, synthetic construct
  source 1..80: mol_type = other DNA
ctgcagagggcgctggcgggcgccggggacgaggagcgcgaggcttacttcgacatgggagccgatctgcagtggcgtcc

SEQ ID NO: 131435 - DNA, 80 bp, synthetic construct
  source 1..80: mol_type = other DNA
cccccaaagtcgtcaatgcccagggcatcggtaaacatctgttcaaactcaaaatcgtccacgtccaaagccccatacga

SEQ ID NO: 131436 - DNA, 80 bp, synthetic construct
  source 1..80: mol_type = other DNA
cgtgcgtcttcccagattcgacacacaccccccttctccttaaataaacacaaaccacacgctcgttggttggttaatgc

SEQ ID NO: 131437 - DNA, 80 bp, synthetic construct
  source 1..80: mol_type = other DNA
agctcgattgttcctcggtgctcattgtagtgcaccctcttgcgtaccttgtcgtacttctgccagcagaaagtggccct

SEQ ID NO: 131438 - DNA, 80 bp, synthetic construct
  source 1..80: mol_type = other DNA
ggtgctaaggaggttcgagcccatgccagcaaagccattaaccacatcaactccgtgtgggaggacttgctggaagacaa

SEQ ID NO: 131439 - DNA, 80 bp, synthetic construct
  source 1..80: mol_type = other DNA
agaggaaggttaccttcgacaggctgcaggtgctcgacgaccattacaagactgtactacaggaggtaaaggagcgagcg

SEQ ID NO: 131440 - DNA, 80 bp, synthetic construct
  source 1..80: mol_type = other DNA
gctgggtgctgtccagaatgaagtaaccctgacacacccagtgaccaaatacatcatgacttgcatgtcggctgacctag

SEQ ID NO: 131441 - DNA, 80 bp, synthetic construct
  source 1..80: mol_type = other DNA
atcatcccaaagagtctagctggtcctatttcacaacacaatcacaggcccgggtaccacacccaaacggcaggaccttg

SEQ ID NO: 131442 - DNA, 80 bp, synthetic construct
  source 1..80: mol_type = other DNA
actgctggcccacggccatcttttcggaggtgatgcagtaaaaggtaagggggtcccgctcccagcgatcccagcgtaaa

SEQ ID NO: 131443 - DNA, 80 bp, synthetic construct
  source 1..80: mol_type = other DNA
atggcttatgttactcataggccaagctgaggcagcgttagagaacctcatcgtcctcaacgcggcttcagccgccagtg

SEQ ID NO: 131444 - DNA, 80 bp, synthetic construct
  source 1..80: mol_type = other DNA
acctctttaactgggcggtgaagacaaagctcaaactcactccattgcccgaggcgagccgcctagatttatctgggtgg

SEQ ID NO: 131445 - DNA, 80 bp, synthetic construct
  source 1..80: mol_type = other DNA
ttgatgaatgaagagttagttgtggaacagatgggaacagaacagagagccctggccacggcgatttttaagcttactta

SEQ ID NO: 131446 - DNA, 80 bp, synthetic construct
  source 1..80: mol_type = other DNA
attatgtggtaggggctactaccgacaatctgaagtgcccctgccaggtaccagcaccagagttcttcactgaggtggaa

SEQ ID NO: 131447 - DNA, 80 bp, synthetic construct
  source 1..80: mol_type = other DNA
atcacaatcatgtccaaagacaaaccaaccattgacatcaagatgttgagtatgagtgcaaccaacttggcggaagttcg

SEQ ID NO: 131448 - DNA, 80 bp, synthetic construct
  source 1..80: mol_type = other DNA
cagccttggattatttctacaaattgttggtgtaagtccactccgcacatgtggaaaagttcccacagcgccccctccac

SEQ ID NO: 131449 - DNA, 80 bp, synthetic construct
  source 1..80: mol_type = other DNA
gagccgcagaagccgcgccaggggctcgatgtccacccgaaacatgtcggcgtacgtgtcggccgcggccccgaaggccg

SEQ ID NO: 131450 - DNA, 80 bp, synthetic construct
  source 1..80: mol_type = other DNA
cacggctgagataacgcctcaggcatcaactatcttgcctgaatatggaacccttgggctagaatgctcaccacggacat

SEQ ID NO: 131451 - DNA, 80 bp, synthetic construct
  source 1..80: mol_type = other DNA
ttgtggtggttgtgctatcttctgaccctggtggaagctatggtccaggagtgggcaccacctatgcaggtgcgcggtgg

SEQ ID NO: 131452 - DNA, 80 bp, synthetic construct
  source 1..80: mol_type = other DNA
ctaataggtcaagagaagttcacagactacctcaccgtcatggacaggtattctgttgatgccgaccttcagccaggaga

SEQ ID NO: 131453 - DNA, 80 bp, synthetic construct
  source 1..80: mol_type = other DNA
gtcgctgctgccgggacacatggtattggctggtacctggtagctttttgcgcggcgtggtacgtgcggggtaaacttgt

SEQ ID NO: 131454 - DNA, 80 bp, synthetic construct
  source 1..80: mol_type = other DNA
tgtgcacgatggatggggagtacaggcttaggtgggaagaacggaaaaacttcctagagctgctgaggacagctgactta

SEQ ID NO: 131455 - DNA, 80 bp, synthetic construct
  source 1..80: mol_type = other DNA
cagtacgtcgcgttgtacaaagggggcgcacactaatacttccatccgtgcgttaccaccctagcattctctaacaagct

SEQ ID NO: 131456 - DNA, 80 bp, synthetic construct
  source 1..80: mol_type = other DNA
gttcgctccgcggcggcgcgtaaattggaaggggcgcagggtgcagcgcgtgttgcggcccggcacggcggtggtgttca

SEQ ID NO: 131457 - DNA, 80 bp, synthetic construct
  source 1..80: mol_type = other DNA
gacacggtacgcgcctacttggacgaggcggtgtggcacctgatcgacacccccgccgtcgaccacaccctccctgggtt

SEQ ID NO: 131458 - DNA, 80 bp, synthetic construct
  source 1..80: mol_type = other DNA
ccacgatgtaatattaccacaggcaatgagaggagtataatatgcacagtagttattaaatgcgagcataaatgtcctct

SEQ ID NO: 131459 - DNA, 80 bp, synthetic construct
  source 1..80: mol_type = other DNA
gggcagttgttcacgttcagacccaggatgtatgagaccactcaagactgtaactgttccatttatgcgggccacatcac

SEQ ID NO: 131460 - DNA, 80 bp, synthetic construct
  source 1..80: mol_type = other DNA
gcctacctacacctggggggagaatgagacagacgttttcctcctaaacagcacgcgaccaccgcgagggccatggttcg

SEQ ID NO: 131461 - DNA, 80 bp, synthetic construct
  source 1..80: mol_type = other DNA
gcagaaaatttcaagtcatttttcattcagtagtatagccccaccaccacatagcttatattgatcaccgtaccttaatc

SEQ ID NO: 131462 - DNA, 80 bp, synthetic construct
  source 1..80: mol_type = other DNA
taccccattgccgacaaccatcatggcaaaaaacgaggtgttcgcagtggagccgtccaagggggggaagaagccggcac

SEQ ID NO: 131463 - DNA, 80 bp, synthetic construct
  source 1..80: mol_type = other DNA
aggatggctcttgtccccccgtggctctcgaccgtcttggggcccaaatgatccccgcgggaggtcccgcaatttgggta

SEQ ID NO: 131464 - DNA, 80 bp, synthetic construct
  source 1..80: mol_type = other DNA
ggggctatccagcacgaaggccagctgatagcccagcgcgtgtaatgccaagctctgttcgcgctccagaatctcggcca

SEQ ID NO: 131465 - DNA, 80 bp, synthetic construct
  source 1..80: mol_type = other DNA
gggatgtgcgatagacgtgggaaggagagagttgcgctgtggacaagggatttttatccacaatgatgttgaagcgtggg

SEQ ID NO: 131466 - DNA, 80 bp, synthetic construct
  source 1..80: mol_type = other DNA
agctacgtggctcaagggtatactgtgcttgtgctgaacccatccgtcgccgctacccttgggttcggcaggtttatgtc

SEQ ID NO: 131467 - DNA, 80 bp, synthetic construct
  source 1..80: mol_type = other DNA
ccgccaaggatgtttgtggccctgtctactgtttcacaccaagcccggtcgtcttgggcaccaccaatgctgagggcaag

SEQ ID NO: 131468 - DNA, 80 bp, synthetic construct
  source 1..80: mol_type = other DNA
gaacgcagtggcttattacagagggcttgacgtctcggtgataccaacacagggagacgtggtggtcgtggccaccgacg

SEQ ID NO: 131469 - DNA, 80 bp, synthetic construct
  source 1..80: mol_type = other DNA
cggctgctcgggcggcgcgtatgatgttatcatttgtgacgagtgccattccatcgatcccacgaccatcttgggcatag

SEQ ID NO: 131470 - DNA, 80 bp, synthetic construct
  source 1..80: mol_type = other DNA
ctgttggggcacaagccagaagctagagagacgactctgggagttgagagcttcttactagatctgcggccggccacagc

SEQ ID NO: 131471 - DNA, 80 bp, synthetic construct
  source 1..80: mol_type = other DNA
agagcgatgccgcagcgagggtcaccgcgttgctgagttctctaactgtcacaagtctgctccggcggttacatcagtgg

SEQ ID NO: 131472 - DNA, 80 bp, synthetic construct
  source 1..80: mol_type = other DNA
ccatgggtgtgctttacctccccagaaggcaactcccattccaccacctaggaggaagagaactatacaccttgaccaat

SEQ ID NO: 131473 - DNA, 80 bp, synthetic construct
  source 1..80: mol_type = other DNA
ggaactgatcatgaaggacggcaggacgttggtggtcccgtgtcgtggacaagacgagttgattggacgggccagaatct

SEQ ID NO: 131474 - DNA, 80 bp, synthetic construct
  source 1..80: mol_type = other DNA
tgttggcgccgctagggttgagacagacgccaaggtggtggtcctggactcctttgagccactaagggccgaggcagatg

SEQ ID NO: 131475 - DNA, 80 bp, synthetic construct
  source 1..80: mol_type = other DNA
tctagcatgaactcatcaggggggtccgcatctatggtaaatattcccggtagcaaatctttgtcaaaatagctgatggt

SEQ ID NO: 131476 - DNA, 80 bp, synthetic construct
  source 1..80: mol_type = other DNA
gtgttcacaatatccccaaataatacccccggagatgtactttttgatttgcagatagggactcatttgaatcctttcct

SEQ ID NO: 131477 - DNA, 80 bp, synthetic construct
  source 1..80: mol_type = other DNA
gtctcttatccccagtgagagttcccaattacaacatgattattatggatgaagcacattttaccgatccagccagcata

SEQ ID NO: 131478 - DNA, 80 bp, synthetic construct
  source 1..80: mol_type = other DNA
ataactcccaaataattttctgcttgccacccgcgcaacacatccattaaaatttcttgtagactggcgccatgcaattc

SEQ ID NO: 131479 - DNA, 80 bp, synthetic construct
  source 1..80: mol_type = other DNA
aagaacaactactgcttctggaaaactcataacagaatggtgctgccgatcttgcacattaccaccgctaaggtacagag

SEQ ID NO: 131480 - DNA, 80 bp, synthetic construct
  source 1..80: mol_type = other DNA
actgaaagagacatcagagttgaggagtccatttatctgtcctgttcgcttcccgaggaggcccggactgcaatacactc

SEQ ID NO: 131481 - DNA, 80 bp, synthetic construct
  source 1..80: mol_type = other DNA
ggcacgacacgcgcggagagaaggaaacattacaggtggccatcccgtctcgcgaggcacagcaaaactcaggtggctcg

SEQ ID NO: 131482 - DNA, 80 bp, synthetic construct
  source 1..80: mol_type = other DNA
cgtcgctctctggatgatgctgatgatcacccaagcggaagcggcaatggaaaatctgattatactgaatgccatctccg

SEQ ID NO: 131483 - DNA, 80 bp, synthetic construct
  source 1..80: mol_type = other DNA
cagtcgggacagtgtgatcctgctagcgagcttgctatatccctctctaatttttgacatcacaaagctgctgatagctg

SEQ ID NO: 131484 - DNA, 80 bp, synthetic construct
  source 1..80: mol_type = other DNA
gatcctcggagatccttcatccatcaccgcggccagtgcagcccaaagaaggggacgcatagggcgcaaccctgcacagg

SEQ ID NO: 131485 - DNA, 80 bp, synthetic construct
  source 1..80: mol_type = other DNA
agtaacacactccatgtagtaacgatcacaggacacctcacttgaatcaccattcaacactactaaaacggtctcttggt

SEQ ID NO: 131486 - DNA, 80 bp, synthetic construct
  source 1..80: mol_type = other DNA
ctctctgcagatcatgtctagatatcgctcaatactgaccatttaaatcatacctgacctccatagcagaaagtcaaaag

SEQ ID NO: 131487 - DNA, 80 bp, synthetic construct
  source 1..80: mol_type = other DNA
cggcgccctcacagcttttaaaatcatgagcggcgagacccctgctatggaagacataatcaatctcttgcctgccctct

SEQ ID NO: 131488 - DNA, 80 bp, synthetic construct
  source 1..80: mol_type = other DNA
tgaatatccttttgggaaaagagttgggttagagagcccaaattaacatttaccagatcatctgccgccgataaaaatgt

SEQ ID NO: 131489 - DNA, 80 bp, synthetic construct
  source 1..80: mol_type = other DNA
ggcgccttggcggaaatcgccgctcggcgtccgggcggaggagaccgacggtttggtccacccagcggagtggaggcgct

SEQ ID NO: 131490 - DNA, 80 bp, synthetic construct
  source 1..80: mol_type = other DNA
tgcccccccccaggaggcgacgcaccgtggcactagaccagagcaccgtgggggaagctcttagagagctggccattaaa

SEQ ID NO: 131491 - DNA, 80 bp, synthetic construct
  source 1..80: mol_type = other DNA
acggcgtacggttgcaccgtttcgcacctgcctgcaagcctctcctgagagatgagatctccttcttagtaggcctcaac

SEQ ID NO: 131492 - DNA, 80 bp, synthetic construct
  source 1..80: mol_type = other DNA
tcaaccagatgacaaaagaggagttcactaggtaccgcaaagaggccatcattgaagtcgatcgctcagcagcaaaacac

SEQ ID NO: 131493 - DNA, 80 bp, synthetic construct
  source 1..80: mol_type = other DNA
tgctgggcgccatagtggtaagtctaactgggcgcgacaagacggagcaagctggcgaagtccaggttttgtccaccatc

SEQ ID NO: 131494 - DNA, 80 bp, synthetic construct
  source 1..80: mol_type = other DNA
tccatccacgctggaggagagtggatgacaacggaagacatgctggaggtctggaatcgtgtctggattgaggaaaatga

SEQ ID NO: 131495 - DNA, 80 bp, synthetic construct
  source 1..80: mol_type = other DNA
ccaacagtagcatcgtgtacgaggcggaaagcatgatcctccaccttccgggctgtgtgccctgtgtcatgactggcaat

SEQ ID NO: 131496 - DNA, 80 bp, synthetic construct
  source 1..80: mol_type = other DNA
tccgctcggctgggtaaggaggtgctactaggacccgccgataactacaagcacatggggtggcgcttgctcgctcccat

SEQ ID NO: 131497 - DNA, 80 bp, synthetic construct
  source 1..80: mol_type = other DNA
tcagcaaaactccgttggctcgtggagaaaggatttgtctcgccaataggaaaagtcattgatctagggtgtgggcgtgg

SEQ ID NO: 131498 - DNA, 80 bp, synthetic construct
  source 1..80: mol_type = other DNA
tccttgtccagacggacagcaccaaccggaatgccgatggggactggcaagcggccgtagctattcgcgggtgcggagtc

SEQ ID NO: 131499 - DNA, 80 bp, synthetic construct
  source 1..80: mol_type = other DNA
agtggctggcactgatttgttggtggatacaatatttcattgctagggccgaggcgctactgcacatttatgttccatca

SEQ ID NO: 131500 - DNA, 80 bp, synthetic construct
  source 1..80: mol_type = other DNA
cgaccgccctggggtcggggcgagccgagagcgggtgcacgcgcgcgggcctcgtgtcgtttaacttcctggtgacggcg

SEQ ID NO: 131501 - DNA, 80 bp, synthetic construct
  source 1..80: mol_type = other DNA
tctggctgcggcccgcatggccatgccgcacgccacgctgatcgccggaaacgtctgctcttggttgctgcagatcaccg

SEQ ID NO: 131502 - DNA, 80 bp, synthetic construct
  source 1..80: mol_type = other DNA
acgagatggaggacttatgcttcgacgacatgcaatatcgctggtctccctcgaacacaccctatcgaagtatgtctagg

SEQ ID NO: 131503 - DNA, 80 bp, synthetic construct
  source 1..80: mol_type = other DNA
tggggattggaggtagagtaaggaggaattggtctgggcaaaaacgggatccgacaggagaggagcatcttttccccggt

SEQ ID NO: 131504 - DNA, 80 bp, synthetic construct
  source 1..80: mol_type = other DNA
cacattaacaggacggctcttaactgcaatgacactttgcagactggattcatagctgccctgttttatgtgcaccattt

SEQ ID NO: 131505 - DNA, 80 bp, synthetic construct
  source 1..80: mol_type = other DNA
acggcccacggttctcccacccacgcgtctggggtcttgatggcgataaatcttaccccgagccggattttttgggcgta

SEQ ID NO: 131506 - DNA, 80 bp, synthetic construct
  source 1..80: mol_type = other DNA
gccaaatctgtatgtggtccggtgtattgtttcacccccagtcccgtggtggtgggcacgaccgacagacttggggtgcc

SEQ ID NO: 131507 - DNA, 80 bp, synthetic construct
  source 1..80: mol_type = other DNA
ccgaggtagaggacgaacgcgaaccttctataccatcagagtaccttctcccgaagaagaggtttccacccgcactaccg

SEQ ID NO: 131508 - DNA, 80 bp, synthetic construct
  source 1..80: mol_type = other DNA
ggccccgcatgttactcctgtgcctactcctacttgccgtaggggtaggcatcttcctgctccccgcccgataggcgtgg

SEQ ID NO: 131509 - DNA, 80 bp, synthetic construct
  source 1..80: mol_type = other DNA
acactgtgggaaggaaatccagggaggttctggaacactaccattgcagtatcaatggctaacatctttaggtggagcta

SEQ ID NO: 131510 - DNA, 80 bp, synthetic construct
  source 1..80: mol_type = other DNA
gaacgctcgtggaattcaggcaatgaatggattaccgactttgttgggaagacggtgtggtttgtccctagcatcaaagc

SEQ ID NO: 131511 - DNA, 80 bp, synthetic construct
  source 1..80: mol_type = other DNA
cacaaatggataaatgaggattgctccaccccctgctctgactcttggctcaagaccatctgggactgggtttgtgaagt

SEQ ID NO: 131512 - DNA, 80 bp, synthetic construct
  source 1..80: mol_type = other DNA
tgggctaaggttatcggcatcctcctcctgttctcgggcgtggacgcgaacacatacgccgttggggctcagacagcgcg

SEQ ID NO: 131513 - DNA, 80 bp, synthetic construct
  source 1..80: mol_type = other DNA
ctgccggaggcgggccggctggacttgtccagctggttcaccgtcggcgcctgcggtggcgacatttatcacagcgtgtc

SEQ ID NO: 131514 - DNA, 80 bp, synthetic construct
  source 1..80: mol_type = other DNA
gtgcaggcatctcaggagctctcgtcgcatttaagatcatgtctggcgagaagccatccatggaggacgtcgttaatttg

SEQ ID NO: 131515 - DNA, 80 bp, synthetic construct
  source 1..80: mol_type = other DNA
cgcggtcggcacgctccttggcggcgatattaagatgaacgtactcctttgccacgcagcgccactcgggaaagacagtg

SEQ ID NO: 131516 - DNA, 80 bp, synthetic construct
  source 1..80: mol_type = other DNA
ttttccaaactcttcccgatccatatccaaatccaatggaagttggagattaaaattcattaagcctgttaataaaatat

SEQ ID NO: 131517 - DNA, 80 bp, synthetic construct
  source 1..80: mol_type = other DNA
gtagatgccgcgcgagcggtgtttacaccacgagcttcgggaacacactgacgtgcttcctcaaggccacagcggccgcc

SEQ ID NO: 131518 - DNA, 80 bp, synthetic construct
  source 1..80: mol_type = other DNA
ctcgacgcggggaggctgaagcctgagagcgagagagcggatttgggagctgtccagggagtccaggaaggcttcgctga

SEQ ID NO: 131519 - DNA, 80 bp, synthetic construct
  source 1..80: mol_type = other DNA
ccagcctttaactacattaaattggtttcgattggcaatgttgtctcccgattgatttttgggtgggtggggagtgggtg

SEQ ID NO: 131520 - DNA, 80 bp, synthetic construct
  source 1..80: mol_type = other DNA
ctggaagacccccaaacgccgattccgacaacaatcatggcaaagaatgaggtgttctgcgtggatgtgtcaaaggggtg

SEQ ID NO: 131521 - DNA, 80 bp, synthetic construct
  source 1..80: mol_type = other DNA
ctccgcctccgaggcggacagcacggacacggaactgttcgagacggggctgctggagccgcagggcgtggatggcgtgg

SEQ ID NO: 131522 - DNA, 80 bp, synthetic construct
  source 1..80: mol_type = other DNA
gcccgccatcctctctcccggtgctctcgtggtggaggtgatctgtgcggccattctgcgccgccacgtgggacaaggtg

SEQ ID NO: 131523 - DNA, 80 bp, synthetic construct
  source 1..80: mol_type = other DNA
tcctggacctgcatgtcgtctccggggtcacgtgtctggtcctccccaagtaccaggccgacctgtatacctatctgagt

SEQ ID NO: 131524 - DNA, 80 bp, synthetic construct
  source 1..80: mol_type = other DNA
aggtgaagcctaccttgacaagcagtcagacactcaatatgtctgcaagagaacattggtggatagaggttggggaaatg

SEQ ID NO: 131525 - DNA, 80 bp, synthetic construct
  source 1..80: mol_type = other DNA
ctcatttgcgcccagacgtagggtacagtggaagggacggcaagtaaaacgcattttgcggccgggcaccacagtggttt

SEQ ID NO: 131526 - DNA, 80 bp, synthetic construct
  source 1..80: mol_type = other DNA
tggctttcatcacatttttaaggatgctctcgattccacccacagcagggattctgaagagatggggacagctacggaag

SEQ ID NO: 131527 - DNA, 80 bp, synthetic construct
  source 1..80: mol_type = other DNA
tttctgcagacatcatgaacgggaccggcggggcctttgaagggaggctttttagcccttatttgacaacccgcctgccg

SEQ ID NO: 131528 - DNA, 80 bp, synthetic construct
  source 1..80: mol_type = other DNA
ctgcctgccatactctcgccaggagctctcgtggtcggcgtgatttgcgctgcaattttgcgccgccatgtgggtcccgg

SEQ ID NO: 131529 - DNA, 80 bp, synthetic construct
  source 1..80: mol_type = other DNA
tacccggcggccccgcccccttggtgcggtcccgcccgccggccaatggtgaggcggcaaggcggccggcccttgagccg

SEQ ID NO: 131530 - DNA, 80 bp, synthetic construct
  source 1..80: mol_type = other DNA
gggccctcggccgccaacgtttcggtcgccgcgaccaccgccacgcccggaacccggggcaccgcccgtacccccccaac

SEQ ID NO: 131531 - DNA, 80 bp, synthetic construct
  source 1..80: mol_type = other DNA
gccctaaattgggtgtgcgcgcgactcggaagaattcggaacggtcgcaaccccgtggacggcgccagcctattcccaag

SEQ ID NO: 131532 - DNA, 80 bp, synthetic construct
  source 1..80: mol_type = other DNA
tgacgcccccagaggatatggaggaagactgggacagtcaggcagaggaggagatggaagattgggacagccaggcagag

SEQ ID NO: 131533 - DNA, 80 bp, synthetic construct
  source 1..80: mol_type = other DNA
tgggattgtgtggtatgtgacgtcaattgcccgaggcgcataaagggccggtggtccgcctagccgcagcaaattaaaaa

SEQ ID NO: 131534 - DNA, 80 bp, synthetic construct
  source 1..80: mol_type = other DNA
gaggacgcgggggatatataaagcggtagaaagcgcgggaatgggcatattggacccgcgtgattcggttgctcgcggtt

SEQ ID NO: 131535 - DNA, 80 bp, synthetic construct
  source 1..80: mol_type = other DNA
gtcatctgctgttcaatgtcctactcttggacgggggccatcataacaccttgtgcaccggaggaagagaagctgcctat

SEQ ID NO: 131536 - DNA, 80 bp, synthetic construct
  source 1..80: mol_type = other DNA
caaagcaacagggagatggtgctgtcactagaggcgatacccacctcactgtagctcaagaaaaagcagctgaaaaggag

SEQ ID NO: 131537 - DNA, 80 bp, synthetic construct
  source 1..80: mol_type = other DNA
aagttgaagacgaaactaaaaatgcagctgcggccacagccgatacaaccactaggggtgatacatttgcaactccagcg

SEQ ID NO: 131538 - DNA, 80 bp, synthetic construct
  source 1..80: mol_type = other DNA
gcacgtggatgaactccactggtttcaccaagacttgtggcgcgccaccttgccgcaccagagctgacttcaacgccagc

SEQ ID NO: 131539 - DNA, 80 bp, synthetic construct
  source 1..80: mol_type = other DNA
gcagcgcggccctccgtcaaaagaaggtcaccttcgacagacagcaggtgcttgacaaacattaccatgagactcttgag

SEQ ID NO: 131540 - DNA, 80 bp, synthetic construct
  source 1..80: mol_type = other DNA
agtacatcatggcatgcatgtcggctgacttggaggtcgtcacgagcacttgggtgctagtaggcggagtccttgcagct

SEQ ID NO: 131541 - DNA, 80 bp, synthetic construct
  source 1..80: mol_type = other DNA
ccgtcttcgtgggcccgggcccgggcccgggcccgagctcgggcctcgggctccaggcacggtccgatgaccgcctcggc

SEQ ID NO: 131542 - DNA, 80 bp, synthetic construct
  source 1..80: mol_type = other DNA
attatgttcccgagagcgatgctgctgcgaaagtgacggcattattgagctccctgactgtcacacgactactacgccgg

SEQ ID NO: 131543 - DNA, 80 bp, synthetic construct
  source 1..80: mol_type = other DNA
aggaaggcgtcaatccagtcacagtcacaaggtaggctaagttttgtttgctgtgaatcaccgggatgttgaactatgtt

SEQ ID NO: 131544 - DNA, 80 bp, synthetic construct
  source 1..80: mol_type = other DNA
ttgctcaagtcacttgctggcgttcctgtggcgcacattgatggaaccaagtaccacctgaaaagtggccacgtgacatg

SEQ ID NO: 131545 - DNA, 80 bp, synthetic construct
  source 1..80: mol_type = other DNA
gttgtgttaacccctctcctgaagcacctaatcacctcagaatacgtcaccacatcgctagcttcaatcagttcacaagc

SEQ ID NO: 131546 - DNA, 80 bp, synthetic construct
  source 1..80: mol_type = other DNA
tggtgtataatgattaaaaatataaattgatatgttttacaagcatgaaataggtatttactattctaacaggtaaatat

SEQ ID NO: 131547 - DNA, 80 bp, synthetic construct
  source 1..80: mol_type = other DNA
gcgtatatgtctaaggcacatggtaccgaccctaacataagaactggggtaaggaccatcaccacgggcgcccccatcac

SEQ ID NO: 131548 - DNA, 80 bp, synthetic construct
  source 1..80: mol_type = other DNA
agtactcaccgaagcagcgggtcgacttcctggtgcaaacctggaaatccaagagaactcccatggggttttcgtatgac

SEQ ID NO: 131549 - DNA, 80 bp, synthetic construct
  source 1..80: mol_type = other DNA
cggagcctgctactccatagaaccactagacctacctccaatcatccaaagactccatggccttagcgcattctctctcc

SEQ ID NO: 131550 - DNA, 80 bp, synthetic construct
  source 1..80: mol_type = other DNA
cctcagacctaccaggtcgcgcacctacatgcaccaacagggagtggcaaaagcaccaaggtcccagcagcatacgctgc

SEQ ID NO: 131551 - DNA, 80 bp, synthetic construct
  source 1..80: mol_type = other DNA
tttatcgaggtccttggaaagatgcctgaacatttcatggggaagacatgggaagcactcgacaccatgtatgttgtagc

SEQ ID NO: 131552 - DNA, 80 bp, synthetic construct
  source 1..80: mol_type = other DNA
gacagctgcaaagacagcaaaataatccctctgggagcaagcacaaaatcctccggtgaaaaaagaacatacatattaga

SEQ ID NO: 131553 - DNA, 80 bp, synthetic construct
  source 1..80: mol_type = other DNA
gacggtaaaagaacggcccacaccgcctcccactccgtccgtggggtgaccaacatattctctgtggggcctcgtcaacc

SEQ ID NO: 131554 - DNA, 80 bp, synthetic construct
  source 1..80: mol_type = other DNA
cgggcaggatgaggtgcagatgattgtggtggaacctggcaagaacgttaagaacgtccagacgaaaccaggggtgttca

SEQ ID NO: 131555 - DNA, 80 bp, synthetic construct
  source 1..80: mol_type = other DNA
ggcggtcctggctgccatcaccgtccttactttgacaccgcattacaagcagttgcttgtacagctcatgtggtggaccc

SEQ ID NO: 131556 - DNA, 80 bp, synthetic construct
  source 1..80: mol_type = other DNA
aacccattgacaaagatgcaaacttgcaagacccggaggcaacagatgatggaaagccggttgtaagcgacgagcaatta

SEQ ID NO: 131557 - DNA, 80 bp, synthetic construct
  source 1..80: mol_type = other DNA
accgtagagggcaccaccgagtctcacctggtcaggttcttcacccagcagcccttcctggtcgagcgggaccggggcgc

SEQ ID NO: 131558 - DNA, 80 bp, synthetic construct
  source 1..80: mol_type = other DNA
gcgcgtacctcaacactcccggcctccccgtatgcgaagaccatctcgagttctgggagggagtgttcacaggcctcact

SEQ ID NO: 131559 - DNA, 80 bp, synthetic construct
  source 1..80: mol_type = other DNA
cctcagggttggggccctatcacgtatgccaacgtgagcggtccctcatctgagaagccatactgctggcattacgcccc

SEQ ID NO: 131560 - DNA, 80 bp, synthetic construct
  source 1..80: mol_type = other DNA
tggccgctcctgctccttgtattggcgttgcctcagcgggctttcgcctttgataacgagcaggctgcttccatgggagc

SEQ ID NO: 131561 - DNA, 80 bp, synthetic construct
  source 1..80: mol_type = other DNA
gttccgaacgcctcggcgcctctcaccgggttccgcaagcatgtggacctgatggtgggcgctgccgcgttttgttcagc

SEQ ID NO: 131562 - DNA, 80 bp, synthetic construct
  source 1..80: mol_type = other DNA
cggcgttgccggcgcagtagtcaccttcaagatcatgagcggcgagatgccaacaacggaggacatggtcaacctactcc

SEQ ID NO: 131563 - DNA, 80 bp, synthetic construct
  source 1..80: mol_type = other DNA
ccactagaccgatagcccctatggctaccggggtaatgaaaccttctcagttgcatcgacccgtcactttggatttgccc

SEQ ID NO: 131564 - DNA, 80 bp, synthetic construct
  source 1..80: mol_type = other DNA
cggtagctagtggcttgctctgggtggcagaaatccagccccagtggatagcggcctcaatcatattggagttttttctc

SEQ ID NO: 131565 - DNA, 80 bp, synthetic construct
  source 1..80: mol_type = other DNA
ctgatgttgggtgctcggtggacttctcaaaaaaggaaacgagatgtggcacgggggtgttcgtctacaatgacgttgaa

SEQ ID NO: 131566 - DNA, 80 bp, synthetic construct
  source 1..80: mol_type = other DNA
cagacaaagaagtgctataccagcagtatgatgagatggaagaatgttctcgagcggctccttacatcgagcaagctcag

SEQ ID NO: 131567 - DNA, 80 bp, synthetic construct
  source 1..80: mol_type = other DNA
gggcaggttggctcctgtccccccgcggctcccggccacactggggccccaatgacccccggcgtcgatcccggaatttg

SEQ ID NO: 131568 - DNA, 80 bp, synthetic construct
  source 1..80: mol_type = other DNA
gcttaccactcagaccttatgacggattccagcggagaaggattaatggagtgtcactgtcgctgcaatttatgcactcc

SEQ ID NO: 131569 - DNA, 80 bp, synthetic construct
  source 1..80: mol_type = other DNA
aatccagggagattctggaatacaacaattgcagtgtcaatggctaacattttcagaggaagttacttggctggagctgg

SEQ ID NO: 131570 - DNA, 80 bp, synthetic construct
  source 1..80: mol_type = other DNA
tcgtggtcggagagaagatgcatttctacctccccggggcctgcatggcgggcctgatcgaaatcctagacacgcaccgc

SEQ ID NO: 131571 - DNA, 80 bp, synthetic construct
  source 1..80: mol_type = other DNA
cgcgagggggtgatgaggtggcagtagtttagctgctttagaaagttctcgacgtcgtgcaggaaacacagctccatatg

SEQ ID NO: 131572 - DNA, 80 bp, synthetic construct
  source 1..80: mol_type = other DNA
aaccttcctggttgctctttctctatctttatcctggcactgctctcgtgcctcactacaccagcctcggcgctcacata

SEQ ID NO: 131573 - DNA, 80 bp, synthetic construct
  source 1..80: mol_type = other DNA
cagcccttgttttactagatacccccccttaatgggtgcggggggggtcaggtctgcgtggttgggattggaccttaact

SEQ ID NO: 131574 - DNA, 80 bp, synthetic construct
  source 1..80: mol_type = other DNA
gccgccccttgagggtgagcctggtgaccccgatctcgattctgcgtcgtggtccacagtcagcgaggaaggcgacagtg

SEQ ID NO: 131575 - DNA, 80 bp, synthetic construct
  source 1..80: mol_type = other DNA
atggccaagaatgaggtcttctccgtaaaaccggagaagggcggcagaaagccggctcgtctaatcgtatacccggacct

SEQ ID NO: 131576 - DNA, 80 bp, synthetic construct
  source 1..80: mol_type = other DNA
tagctactgctacctcgctgccattagtgacctttcgaccaaggcagcatgtccaacaatgggagaggcccacaacgaca

SEQ ID NO: 131577 - DNA, 80 bp, synthetic construct
  source 1..80: mol_type = other DNA
actttaaaaactggctgacctccaagttgttcccaaagatgcccggcctcccctttatctcctgccaaaaggggtacagg

SEQ ID NO: 131578 - DNA, 80 bp, synthetic construct
  source 1..80: mol_type = other DNA
tcatttcgtctcacgagcctgttcagccccggtgccaggcagaacctacagcttgtcaacaccaacggaagctggcatat

SEQ ID NO: 131579 - DNA, 80 bp, synthetic construct
  source 1..80: mol_type = other DNA
gtatctcctccaagaaagccttctgcgggttccgtactttgtgcgtgcacatgcactattgcgggtgtgcatacttttcc

SEQ ID NO: 131580 - DNA, 80 bp, synthetic construct
  source 1..80: mol_type = other DNA
agcttatgcccaccatgccaggcatcccctttctctcttgccagaagggattcaaaggggagtggcgtggagatggcgta

SEQ ID NO: 131581 - DNA, 80 bp, synthetic construct
  source 1..80: mol_type = other DNA
ccctccgtcgcccgcccccccgcgggcccttgagggtgcggtgaccacgtcggcggcgacgtcctcgtcgagcgtaccga

SEQ ID NO: 131582 - DNA, 80 bp, synthetic construct
  source 1..80: mol_type = other DNA
tcccccaaaaactccgcataggcccgcgacatatactgggcgtagttcgtgctctcctcggggtagccggccacccgccg

SEQ ID NO: 131583 - DNA, 80 bp, synthetic construct
  source 1..80: mol_type = other DNA
ggagattttcccgactgtttcgttcgcttctcagtggataacagccagcttctctgtttaacagacaaaaacagcatatc

SEQ ID NO: 131584 - DNA, 80 bp, synthetic construct
  source 1..80: mol_type = other DNA
tcctatcaacccagagttcgacgacagggagctgtccgtggctgcagagtgtcataagcctcctaggcctaaatatccgc

SEQ ID NO: 131585 - DNA, 80 bp, synthetic construct
  source 1..80: mol_type = other DNA
gatgttttattcgatctgagtttaggtccccatcttaatcccttcttgctacacctgtcacaaatgtataatggctgggt

SEQ ID NO: 131586 - DNA, 80 bp, synthetic construct
  source 1..80: mol_type = other DNA
gttaggatacatcgccacgcccctgactgcaaacctctgctgagggatgaggttaccttcacggtgggcctcaactcttt

SEQ ID NO: 131587 - DNA, 80 bp, synthetic construct
  source 1..80: mol_type = other DNA
tcctgatcttggagtcagggtgtgcgaaaagcgggccctttacaacgtggtccagaagctcccccaggccgtgatgggtg

SEQ ID NO: 131588 - DNA, 80 bp, synthetic construct
  source 1..80: mol_type = other DNA
gaacacgcgttgaataatgacaacacgccatctaccggagtattgagggctaattttcccgtggccattgatgtttcagc

SEQ ID NO: 131589 - DNA, 80 bp, synthetic construct
  source 1..80: mol_type = other DNA
gcgggaccccattgctcccggcccacatcacagcaactctggacttggaggcgacgtttgcgctccacgctaacatcatc

SEQ ID NO: 131590 - DNA, 80 bp, synthetic construct
  source 1..80: mol_type = other DNA
tcagaaatgggtgccaacttcagggctgagagggttatagaccccagacgttgcatgaaaccagttatactaacagatgg

SEQ ID NO: 131591 - DNA, 80 bp, synthetic construct
  source 1..80: mol_type = other DNA
ttgggcacggcctgactacaacccgccgctcgtggaatcgtggaggaggccagattaccaaccgcccaccgttgctggtt

SEQ ID NO: 131592 - DNA, 80 bp, synthetic construct
  source 1..80: mol_type = other DNA
tatcaggccactgtgtgcgctcgtgccaaggctccccccccatcatgggacactatgtggaagtgcctcttgcggcttaa

SEQ ID NO: 131593 - DNA, 80 bp, synthetic construct
  source 1..80: mol_type = other DNA
ggcgaggacgcacggggagaggcaagccaggggtgtatagatacgtctcgcaaggcgagaggccgtctggtctttttgac

SEQ ID NO: 131594 - DNA, 80 bp, synthetic construct
  source 1..80: mol_type = other DNA
atcctcacactgtcaccacactacaagcactggctggccctgatcatgtggtggttgcagtactttatagctagagtgga

SEQ ID NO: 131595 - DNA, 80 bp, synthetic construct
  source 1..80: mol_type = other DNA
aggtcctatccacggcaacacaaacattccttggtacttgcatcaatggggtgatgtggaccgtcttccacggggccggc

SEQ ID NO: 131596 - DNA, 80 bp, synthetic construct
  source 1..80: mol_type = other DNA
ttgtccagttggttcaccgtcggcgctggcgggggcgacatatatcacagcgtgtcgcgagcccgaccccgcattttact

SEQ ID NO: 131597 - DNA, 80 bp, synthetic construct
  source 1..80: mol_type = other DNA
agaacggaaccatgagaatcgtcggcccgaagctgtgcagtaacacctggcaaggcaccttcccaatcaacgccacaaca

SEQ ID NO: 131598 - DNA, 80 bp, synthetic construct
  source 1..80: mol_type = other DNA
cgccccggagccgtccatgtaaatcagtagctcccccttgcggagggtgcgcacccgtcccagggactggtacacggaca

SEQ ID NO: 131599 - DNA, 80 bp, synthetic construct
  source 1..80: mol_type = other DNA
tggcatagacccaaatatacgtactggggttaggaccatcaccactggaggagcgatcacctactccacctatgggaaat

SEQ ID NO: 131600 - DNA, 80 bp, synthetic construct
  source 1..80: mol_type = other DNA
ttgcgctctgccacctgagcgtatagctccggtgcctcctcctaggccgaaacgtaggttggtcaaattgacggacagca

SEQ ID NO: 131601 - DNA, 80 bp, synthetic construct
  source 1..80: mol_type = other DNA
gacgggaggcggtggaaaaagggggaagagagagggaggtagggagaagagagaagaagggcgcgccggtgcgcggagca

SEQ ID NO: 131602 - DNA, 80 bp, synthetic construct
  source 1..80: mol_type = other DNA
cgttgttacaaggtctcccactttcagtgacaacagcacgccaccggctgtgccccagacctatcaggtcgggtacttgc

SEQ ID NO: 131603 - DNA, 80 bp, synthetic construct
  source 1..80: mol_type = other DNA
cgctgatccgtaatggaaatgaaaccttcagaaacatcgtccaacagcacggtggagtccaaagcagagctctgcaaaaa

SEQ ID NO: 131604 - DNA, 80 bp, synthetic construct
  source 1..80: mol_type = other DNA
tgaccgcgtgcggcctgccggccgcggggacggtggcctacggacaccccggcgccggcccgtccccgcactacccgcct

SEQ ID NO: 131605 - DNA, 80 bp, synthetic construct
  source 1..80: mol_type = other DNA
acaagttacacctaatgtagccgtgaaataccgcggcgcactcactcacaacctgcgaacacatgtcgatgtgattgtaa

SEQ ID NO: 131606 - DNA, 80 bp, synthetic construct
  source 1..80: mol_type = other DNA
tggcctgcgcctccaggggcaaagtcgttgacaccgtgcacgtgcggtgctagcgatctctaccttgtcaccagaaatgc

SEQ ID NO: 131607 - DNA, 80 bp, synthetic construct
  source 1..80: mol_type = other DNA
tggggtgaccgggtcctttcttggaacaacccgctcaatacccagaaatttgggcgtgcccccgcgagatcactagccga

SEQ ID NO: 131608 - DNA, 80 bp, synthetic construct
  source 1..80: mol_type = other DNA
atccttcccatataacagcagaggcgccgggagaaggttggcgggggatcaccccccttggccagctcttcggctggcca

SEQ ID NO: 131609 - DNA, 80 bp, synthetic construct
  source 1..80: mol_type = other DNA
cggtgtcagactgcacaggtatgccccgccatgcaagcctctactcagagatgaggtaagctacagcgtagggcttaaca

SEQ ID NO: 131610 - DNA, 80 bp, synthetic construct
  source 1..80: mol_type = other DNA
ctgcctactcctgcttgccgcaggggtaggcgtctacctccttcccaaccgatgaaggttggggtaaacactccggcctc

SEQ ID NO: 131611 - DNA, 80 bp, synthetic construct
  source 1..80: mol_type = other DNA
ttacatccatttctaccaggtgctctttacgcaccatttctatgccatgcaaacacctaagctctccctcccgctcggtg

SEQ ID NO: 131612 - DNA, 80 bp, synthetic construct
  source 1..80: mol_type = other DNA
gccacgatctccgcgaaggagaccgtcgacgaaaaaatgcagatgttatcgcccccgccaaggcgcgcttccagctcccc

SEQ ID NO: 131613 - DNA, 80 bp, synthetic construct
  source 1..80: mol_type = other DNA
tgttgtgcccctccgggcacgccgtgggcctctttagggccgcggtgtgtacccgtggggtcgcgaaggcggttgacttc

SEQ ID NO: 131614 - DNA, 80 bp, synthetic construct
  source 1..80: mol_type = other DNA
ttcttgcccctacccgggtggttctgaaggagatggagaaggcgcttgctggcaagaaggtccgcttccactcacccgcg

SEQ ID NO: 131615 - DNA, 80 bp, synthetic construct
  source 1..80: mol_type = other DNA
gcttaaggcagaagaaagtcacatttgacagacggcaggttctggacagccactaccaggacgtgctcaaggaggttaag

SEQ ID NO: 131616 - DNA, 80 bp, synthetic construct
  source 1..80: mol_type = other DNA
gtggtcttggtctttttgggatgttggggccaagtgtcgttaacaactctgatcactgcggcagctctggctaccctcca

SEQ ID NO: 131617 - DNA, 80 bp, synthetic construct
  source 1..80: mol_type = other DNA
gcttatgtggcggtaagtacgtgcaggcgtgtctcttgaggcttggagcctggacaggcacctacatctatgatcacctg

SEQ ID NO: 131618 - DNA, 80 bp, synthetic construct
  source 1..80: mol_type = other DNA
cggcgcaagggtacaaagtcttggtgctcaacccctcggttgctgccaccctcggattcggggcctacatgtcgactgca

SEQ ID NO: 131619 - DNA, 80 bp, synthetic construct
  source 1..80: mol_type = other DNA
taagtgctcaaggagattaaggcacgagcatccagagaggcacgcttgcttaccacagaggaagcttgcgacccgccccc

SEQ ID NO: 131620 - DNA, 80 bp, synthetic construct
  source 1..80: mol_type = other DNA
ggccgcttgggtggagaggctattcggctatgactgggcacaacagacaatcggctgctctgatgccgccgtgttccggc

SEQ ID NO: 131621 - DNA, 80 bp, synthetic construct
  source 1..80: mol_type = other DNA
ctctcggggtcgccgccggtacttcctaaccagagaccctaccactccaatcacccgagctgcttgggaaacagcaagac

SEQ ID NO: 131622 - DNA, 80 bp, synthetic construct
  source 1..80: mol_type = other DNA
ctgtgcacggccgacgccgcggtatccctgaataccatcgccgcgttcaactttaatttttcggccccgggcatgctcat

SEQ ID NO: 131623 - DNA, 80 bp, synthetic construct
  source 1..80: mol_type = other DNA
acggctcctctgacgctaggccatattgctgggactacgcgccgcggccctgcggggtcgtgccggcttccagagtgtgt

SEQ ID NO: 131624 - DNA, 80 bp, synthetic construct
  source 1..80: mol_type = other DNA
gaaccacgatcagggattgacaccaatgcatattacgttatgaccgttggaacaaagacgttcttggtccatcgtgagtg

SEQ ID NO: 131625 - DNA, 80 bp, synthetic construct
  source 1..80: mol_type = other DNA
taacttcgcttgcttcggtaaatgagacgatcgtgccgatgatgtatggccaacattacccaggtttggatatacaaatt

SEQ ID NO: 131626 - DNA, 80 bp, synthetic construct
  source 1..80: mol_type = other DNA
cattcgctcccatcacacgcgtttcgtgagcgcccaataaacacacccaggtatgctacgcacgaccacggtgtcgcctg

SEQ ID NO: 131627 - DNA, 80 bp, synthetic construct
  source 1..80: mol_type = other DNA
tcctaacaatcccaccaacagcagggatattgaagagatggggaacaattaaaaaatcaaaagccattaatgttttgaga

SEQ ID NO: 131628 - DNA, 80 bp, synthetic construct
  source 1..80: mol_type = other DNA
gctgtgacgctggtgcgtttacaggaggtcacggggatgcgttaaaatatgttacggggacctttgactctgaaattcca

SEQ ID NO: 131629 - DNA, 80 bp, synthetic construct
  source 1..80: mol_type = other DNA
caccagcttcggaaacacaatcacctgttacctcaaagcaaaggcagccaccagagccgcagggattaaaaatccatcat

SEQ ID NO: 131630 - DNA, 80 bp, synthetic construct
  source 1..80: mol_type = other DNA
ttatgtaatcacggccgtattgttgttggccgcggccgtgtatgccgtggtcggcgccgtgacctcccgctacgaccgcg

SEQ ID NO: 131631 - DNA, 80 bp, synthetic construct
  source 1..80: mol_type = other DNA
gtcatactcgcgtgtacgtgtttttcttttttatatatgcgtcatttattaccacatcctttaatcccgcctttatctcc

SEQ ID NO: 131632 - DNA, 80 bp, synthetic construct
  source 1..80: mol_type = other DNA
caaaaaggctgtcggtgtccccgtagaccgacttgagggggcgatcttccaaaggtgttccgagatcttccgcgtacagg

SEQ ID NO: 131633 - DNA, 80 bp, synthetic construct
  source 1..80: mol_type = other DNA
cgccgcagacggctgcgtcgccggcgtagaccaactaccgccatgcgcgcggccagagcgttggttcgacgcgccaggcg

SEQ ID NO: 131634 - DNA, 80 bp, synthetic construct
  source 1..80: mol_type = other DNA
gcaggtacgtgcaggcagtgctactgcacctgggcaggctgactggcacttacatatatgatcacttgagccccatgaag

SEQ ID NO: 131635 - DNA, 80 bp, synthetic construct
  source 1..80: mol_type = other DNA
agacattaggagtgaacatggtgaggaggggggtgagaagtctcagtaataaaataaaacaaaaaacaaaacaaattgga

SEQ ID NO: 131636 - DNA, 80 bp, synthetic construct
  source 1..80: mol_type = other DNA
gatagggaatctcaccaacccactgttgagtgggagacaacaagtcggtatgcgtgtaaattggggtagtataattgttg

SEQ ID NO: 131637 - DNA, 80 bp, synthetic construct
  source 1..80: mol_type = other DNA
ggccctcttggaggaccccgtggggacggtggtgccgcaaatcccaccaaactggcacataccgtcgatccaggacgccg

SEQ ID NO: 131638 - DNA, 80 bp, synthetic construct
  source 1..80: mol_type = other DNA
gcggggatacctgcagccctatggaaaggtcattgatcttggatgtggcagaggtggctggagttactacgccgccacca

SEQ ID NO: 131639 - DNA, 80 bp, synthetic construct
  source 1..80: mol_type = other DNA
cgagcggcggcgcgagtacagcagctgtccccgcccccgcgccgaccctccgtgcagtccaggagacgggcgcaatcctt

SEQ ID NO: 131640 - DNA, 80 bp, synthetic construct
  source 1..80: mol_type = other DNA
gcttgggaaggccggccgagtagcgtgcccggtgccgaccaaccgggacgacgcccatctccaggacccgcatgtcgtcg

SEQ ID NO: 131641 - DNA, 80 bp, synthetic construct
  source 1..80: mol_type = other DNA
aagacgcggtgtcccgcagccagcgtaggggccgtacgggtcgaggtaggactggtatctaccgatttgtcactccagga

SEQ ID NO: 131642 - DNA, 80 bp, synthetic construct
  source 1..80: mol_type = other DNA
ttctgacattcttccgatttacagctctacagccaactgaggcgctgaagcgcagatggagggctgtagataagagaacg

SEQ ID NO: 131643 - DNA, 80 bp, synthetic construct
  source 1..80: mol_type = other DNA
caccccccccgctaatgacgctggcgattgcccccccgcccgcggacccccgcgccccggccccggagcgaaaggcgctc

SEQ ID NO: 131644 - DNA, 80 bp, synthetic construct
  source 1..80: mol_type = other DNA
ggcacccctcaacacctgggccagtgacgggttgcgtgacctggctgttgctgtggaaccagtaatattctctcctatgg

SEQ ID NO: 131645 - DNA, 80 bp, synthetic construct
  source 1..80: mol_type = other DNA
ttcaaaacttggctcaaagccaagcttgtgccagtcctaccgggtatccccttcctatcgtgccaacgaggatttcgggg

SEQ ID NO: 131646 - DNA, 80 bp, synthetic construct
  source 1..80: mol_type = other DNA
ctggacgggcaacccgcggacggccccgcgctccctgtcgctgggaggacacacggtccgcgccctgtcgcccacccccc

SEQ ID NO: 131647 - DNA, 80 bp, synthetic construct
  source 1..80: mol_type = other DNA
tgattgaggtgaacccaccttttggagacagctacattatcgttgggagaggagattcacgtctcacttaccagtggcac

SEQ ID NO: 131648 - DNA, 80 bp, synthetic construct
  source 1..80: mol_type = other DNA
ccggggacttcgattctgtcatagattgcaacgtggctgtcgaacagtatgttgacttcagtttagaccccaccttttcc

SEQ ID NO: 131649 - DNA, 80 bp, synthetic construct
  source 1..80: mol_type = other DNA
ctaccgtcgctgtcgcgccagtggggtgcttcctaccagtcttggcaacacaataacctgttacataaaagctctagctg

SEQ ID NO: 131650 - DNA, 80 bp, synthetic construct
  source 1..80: mol_type = other DNA
caccgtcgtcctttgtgaagcctacgatgtcggctgcgcatggtatgagctgacaccccaagaaaccactgttaggctgc

SEQ ID NO: 131651 - DNA, 80 bp, synthetic construct
  source 1..80: mol_type = other DNA
cgtttgtggccctgtttactgctttacaccatctcctgtagtcgtcggcactacggatagggtaggtctccccacttaca

SEQ ID NO: 131652 - DNA, 80 bp, synthetic construct
  source 1..80: mol_type = other DNA
cgcgagaccggtcgatcgcactggcctttcttgctacaggaggcgtgctcttgtttctggctaccaatgtccacgctgac

SEQ ID NO: 131653 - DNA, 80 bp, synthetic construct
  source 1..80: mol_type = other DNA
acagggcctactccagcaggccacccggcaggcgcaggacatacagcccgccgtgcaagcatcatggcccaagctcgagc

SEQ ID NO: 131654 - DNA, 80 bp, synthetic construct
  source 1..80: mol_type = other DNA
gctgaaacacatgtttttttctcttacagtatgattaaatgaaacatgattcctcgagttcttatattcttgacccttgt

SEQ ID NO: 131655 - DNA, 80 bp, synthetic construct
  source 1..80: mol_type = other DNA
tgcatcggctggtcgcaccacttcggggatagctggttttttttctctcggtgcccagcagaagctcagtctgattaaca

SEQ ID NO: 131656 - DNA, 80 bp, synthetic construct
  source 1..80: mol_type = other DNA
aaaaaaataaaataaaaagaaatccacttaccagagccatagcaacagcgtccgtccctttgtctgttttttccctcttc

SEQ ID NO: 131657 - DNA, 80 bp, synthetic construct
  source 1..80: mol_type = other DNA
gatcgggaggttatgtaccagcagtatgacgagatggaagagtgctctcgtcacctcccatacttggttgaaggacagca

SEQ ID NO: 131658 - DNA, 80 bp, synthetic construct
  source 1..80: mol_type = other DNA
ccgcaggactttccggagaaagaattattcccgcagccaacatcatgaaaacagcagcgggcatcgtcgtttttaatttg

SEQ ID NO: 131659 - DNA, 80 bp, synthetic construct
  source 1..80: mol_type = other DNA
ggggcgatggcgtctgctctacgacgtgcccctgcggagctgtaatcactggtcatgtcaagaatgggtcgatgagaatt

SEQ ID NO: 131660 - DNA, 80 bp, synthetic construct
  source 1..80: mol_type = other DNA
agagggcccaaccatgaagaccccagtgaaaccttgataccacatgcgcagagacccgtgcagctcatggcactactggg

SEQ ID NO: 131661 - DNA, 80 bp, synthetic construct
  source 1..80: mol_type = other DNA
gtgcccgacggcccaaggtccaccgaaagacacgacggacccggacccaaagaggcgtgggatgctgtgtgagaggccgg

SEQ ID NO: 131662 - DNA, 80 bp, synthetic construct
  source 1..80: mol_type = other DNA
cttgattcacctccaccagaacatcgtcgatgtccaatacctctatggtgttggctcagctgtggtatcttgggccctta

SEQ ID NO: 131663 - DNA, 80 bp, synthetic construct
  source 1..80: mol_type = other DNA
ttactaaacatattattataaattggagagaaaccctcactgcactccgttacctgtgcagatgaaactgtgggcattaa

SEQ ID NO: 131664 - DNA, 80 bp, synthetic construct
  source 1..80: mol_type = other DNA
atggggcgccgccagccggctgatgcccaactacgtgttgcatccttccatcatcccgacgccgggctaccgcggcaccc

SEQ ID NO: 131665 - DNA, 80 bp, synthetic construct
  source 1..80: mol_type = other DNA
cttcgttccagtcgaatctctcgaaacgacaatgaggtctccggtgttcactgacaattccaccccccccgctgtgcccc

SEQ ID NO: 131666 - DNA, 80 bp, synthetic construct
  source 1..80: mol_type = other DNA
gtatggtgcttatgacccacttcttcgggatattacagtcccaagagcagttggagaaagcactggacttcgacatatac

SEQ ID NO: 131667 - DNA, 80 bp, synthetic construct
  source 1..80: mol_type = other DNA
ccgtccaaccttactttaacataaatcaggtgtctgccgcgtacaaacatgctacccgcatacagaacctcccggggcag

SEQ ID NO: 131668 - DNA, 80 bp, synthetic construct
  source 1..80: mol_type = other DNA
gggacaggccaggacgaacttgcgggtgcggtcaaaaataaggagcgggcacgcgtttttgccgcccatcaggctggccc

SEQ ID NO: 131669 - DNA, 80 bp, synthetic construct
  source 1..80: mol_type = other DNA
gacgactggcagcgttgtcatctgtggaagaatcaccacctccggaagacccgcagtggttcctgaccgagaggtaatgt

SEQ ID NO: 131670 - DNA, 80 bp, synthetic construct
  source 1..80: mol_type = other DNA
atcaatttcagtgtcatttactgcagcctgcctcaaaatttcctgaatatcccctgagttatcttggtaggcaatttctg

SEQ ID NO: 131671 - DNA, 80 bp, synthetic construct
  source 1..80: mol_type = other DNA
agaataccccacgataaagcagaagaaacctgactttatattggccactgacatagctgaaatgggagccaacctttgcg

SEQ ID NO: 131672 - DNA, 80 bp, synthetic construct
  source 1..80: mol_type = other DNA
ggcgtcagactccatcggtacgctcccccatgcaagcccttgctaagggacgaggtaacattctcagtaggtctcaacac

SEQ ID NO: 131673 - DNA, 80 bp, synthetic construct
  source 1..80: mol_type = other DNA
ttttatacacaacaccaacctttccttcgacccccccccacccccgcccctagagcatatccaacgtcaggtcctttttc

SEQ ID NO: 131674 - DNA, 80 bp, synthetic construct
  source 1..80: mol_type = other DNA
tacgccatagggtcccagctcccttgcgagccggagccggacgttctggtactgacttccatgctttctgacccagacca

SEQ ID NO: 131675 - DNA, 80 bp, synthetic construct
  source 1..80: mol_type = other DNA
gcaagcaaccagccccaattggcacccctgacttcaaggccgtgatagttggctttgcagctaggcccctcacatccggg

SEQ ID NO: 131676 - DNA, 80 bp, synthetic construct
  source 1..80: mol_type = other DNA
cggctacagcgggggggacatttatcacagcgtgtcccatgcccggccccgctggctcatgttttgcctactcctacttg

SEQ ID NO: 131677 - DNA, 80 bp, synthetic construct
  source 1..80: mol_type = other DNA
tacaactggggcagtaacgagacagacgtctttcttttgaacaatacgaggccacctactggcaattggtttggctgcac

SEQ ID NO: 131678 - DNA, 80 bp, synthetic construct
  source 1..80: mol_type = other DNA
cgcctgtgactacccgggaaataggtttgcaaacggacccaaggtacgagtctgttacttccacccgccgctcacgcgta

SEQ ID NO: 131679 - DNA, 80 bp, synthetic construct
  source 1..80: mol_type = other DNA
cagcatttttccaaatggcttattatgatgccaggcacatcctcggctggggaattccggatgtgatgaattctctggcc

SEQ ID NO: 131680 - DNA, 80 bp, synthetic construct
  source 1..80: mol_type = other DNA
cggcctggttttgcgtggccgcctcgtaaaaccccatgaggggccgaggcgccacggcgtccgcggcggccggtgtggcg

SEQ ID NO: 131681 - DNA, 80 bp, synthetic construct
  source 1..80: mol_type = other DNA
ttggcgttgccccagcgggcgtacgctatggaccaggagttggccgcgtcctgtgggggcgtagtcctcatatgtctgac

SEQ ID NO: 131682 - DNA, 80 bp, synthetic construct
  source 1..80: mol_type = other DNA
cgggtagaagcgcgccgcgaccctcacagatcgttgacgaccgccccggcgtaggaggtgctgcgacactcgaaaaaatt

SEQ ID NO: 131683 - DNA, 80 bp, synthetic construct
  source 1..80: mol_type = other DNA
acagacccatcacacatcacagcggaaacggcagcgcgacgcctggcacggggctctcccccctctgaagccagctcctc

SEQ ID NO: 131684 - DNA, 80 bp, synthetic construct
  source 1..80: mol_type = other DNA
ggagtgtccaagtgcctcaagagcatggaatgtgtgggaggtagaagattacgggttcggagtcttcacaaccaacatat

SEQ ID NO: 131685 - DNA, 80 bp, synthetic construct
  source 1..80: mol_type = other DNA
gcaaccacgtcccatctatctcttaaaagcatattgttcacggctgtggataataacaccttggcgagtttatcttcgct

SEQ ID NO: 131686 - DNA, 80 bp, synthetic construct
  source 1..80: mol_type = other DNA
gattgtgaggcaagatcaggaatcaacacagaggactattatgtcttcacagttaaggagaagtcatggctagtaaacag

SEQ ID NO: 131687 - DNA, 80 bp, synthetic construct
  source 1..80: mol_type = other DNA
gcattcgtcgtgagcggcttggcgggtgcggcagttggcagtgtgggccttggcaaaattttggtggacattctgcccgg

SEQ ID NO: 131688 - DNA, 80 bp, synthetic construct
  source 1..80: mol_type = other DNA
aggcatatggaataaatcccaacatcaggactggagttcgtaccgtgacaacaggagagtctgtcacctattccacctac

SEQ ID NO: 131689 - DNA, 80 bp, synthetic construct
  source 1..80: mol_type = other DNA
gggagacggcatcatgcaaaccacctgcccatgtggagcacaaatcaccggacatgtcaaaaacggttccatgagaatcg

SEQ ID NO: 131690 - DNA, 80 bp, synthetic construct
  source 1..80: mol_type = other DNA
aaccaggaaaaaattaggaagagaatccagaagctgaaagaggaattcgccacaacctggcacaaagaccccgagcatcc

SEQ ID NO: 131691 - DNA, 80 bp, synthetic construct
  source 1..80: mol_type = other DNA
ccgcccgcgtcgcgccggcgccccctcccggcgcttccggggcctttccttccttccccgccgcgaccccggcctcgccc

SEQ ID NO: 131692 - DNA, 80 bp, synthetic construct
  source 1..80: mol_type = other DNA
agtctccgccatagaggtcagaaacaccagtacctcctacatggtgaccaacgattgctctaacaccagcatcgtttggc

SEQ ID NO: 131693 - DNA, 80 bp, synthetic construct
  source 1..80: mol_type = other DNA
tttctaaccaacgattcgaaatgctcagggcacgtaaattgtttatatctggacactccggcctgtaaaaaaaatgactg

SEQ ID NO: 131694 - DNA, 80 bp, synthetic construct
  source 1..80: mol_type = other DNA
attgactgatgcgttagccttaggcatgatggtccttaaaatagtaagaaacatggaaaagtatcaattagcagtgacta

SEQ ID NO: 131695 - DNA, 80 bp, synthetic construct
  source 1..80: mol_type = other DNA
cgaaatcgccgaggatactcccgtgttcgcaccgagaatgtaacgggggtgtaaatagccaggaggtttgttttaattta

SEQ ID NO: 131696 - DNA, 80 bp, synthetic construct
  source 1..80: mol_type = other DNA
cgacagtgtcgttctctgtgaggcgtacgacgtaggatgcgcgtggtatgaactgacaccttcagaaaccacagttaggt

SEQ ID NO: 131697 - DNA, 80 bp, synthetic construct
  source 1..80: mol_type = other DNA
taggggtcttgatgtatccgttataccaacagtgggagatgtcgtagtttgcgctaccgatgccctcatgactggataca

SEQ ID NO: 131698 - DNA, 80 bp, synthetic construct
  source 1..80: mol_type = other DNA
ctttccgagggcgagctcagcttttaccgcttcctcttcgctttcctgtcggccgccgacgacctggttacggaaaacct

SEQ ID NO: 131699 - DNA, 80 bp, synthetic construct
  source 1..80: mol_type = other DNA
ccctaaagggccggtcacgcagatgtataccagtgccgagggagacctcgtaggatggcccgcaccccccgggacaaaat

SEQ ID NO: 131700 - DNA, 80 bp, synthetic construct
  source 1..80: mol_type = other DNA
aaaatgcagccactgcaaatgatgcgcccaggggagatacttttgtcaatgaagctcaagagaaggcagctcagaagcag

SEQ ID NO: 131701 - DNA, 80 bp, synthetic construct
  source 1..80: mol_type = other DNA
tccccgagagcgatgctgcagcgaaggttactgcattgctgagttctctaactgtcacaagtctgctccggcgactgcac

SEQ ID NO: 131702 - DNA, 80 bp, synthetic construct
  source 1..80: mol_type = other DNA
cagatgtcttcctgctcaacagcacccgcccaccgaagggtgcttggtttgggtgtacgtggatgaatggcaccgggttc

SEQ ID NO: 131703 - DNA, 80 bp, synthetic construct
  source 1..80: mol_type = other DNA
tgtttgctgccagacctaaagttaacagcaccgggtgttcggagcggctagccagatgccatcccatcactcactttgct

SEQ ID NO: 131704 - DNA, 80 bp, synthetic construct
  source 1..80: mol_type = other DNA
gtcaaggacgtcatgacgtcgcccaaggggttccgcacccatgtggaccttatggttggtgccgcggcgttttgttcggc

SEQ ID NO: 131705 - DNA, 80 bp, synthetic construct
  source 1..80: mol_type = other DNA
cggccgactccctagataagggaagctggaggctcctggcccccatcacggcctatgcccaacagacacgtggtgtcctt

SEQ ID NO: 131706 - DNA, 80 bp, synthetic construct
  source 1..80: mol_type = other DNA
caccaggaaacacatgatattggttgtggtaatcactttctgtgctatcatcctaggaggtctcacatgggtggacttac

SEQ ID NO: 131707 - DNA, 80 bp, synthetic construct
  source 1..80: mol_type = other DNA
gctcccacaatatgggtgcgcatggtgctgatgacccattttttctcaatactccaaagccaggaagccctgaaagcact

SEQ ID NO: 131708 - DNA, 80 bp, synthetic construct
  source 1..80: mol_type = other DNA
acggagctgctcgagatgggccagggcgaggtgcggttggagaggctgtaggtctgggaacggacacgcggggacacgat

SEQ ID NO: 131709 - DNA, 80 bp, synthetic construct
  source 1..80: mol_type = other DNA
tccgtggcccacgatggagacggcaggagatattactacctcactcgtgaccctgtcaccccactggcgagggcggcgtg

SEQ ID NO: 131710 - DNA, 80 bp, synthetic construct
  source 1..80: mol_type = other DNA
cgcatctcaaagggtcacatccatactcagttccctcaccgtgaccagccttctacggaagctacatgcatggatcaacg

SEQ ID NO: 131711 - DNA, 80 bp, synthetic construct
  source 1..80: mol_type = other DNA
ttccctggtgcccggggcccaggattccgccccgcccggccccacgctaagggagctgtggtgggtgttttatgccgcag

SEQ ID NO: 131712 - DNA, 80 bp, synthetic construct
  source 1..80: mol_type = other DNA
caagtgggagtatgtggtccttgcatttctagtgctagcagacgcgcgcatctgtgcgtgcttgtggcttatgatgcttg

SEQ ID NO: 131713 - DNA, 80 bp, synthetic construct
  source 1..80: mol_type = other DNA
tgctcactgatccctcccatataacagcagaggcggctgggagaaggttagcaagaggatcgcccccttctgaggccagc

SEQ ID NO: 131714 - DNA, 80 bp, synthetic construct
  source 1..80: mol_type = other DNA
cttccgggccgctgtatgcacccggggggttgcaaaggcggtggattttgtccccgttgagtccatggaaactactatgc

SEQ ID NO: 131715 - DNA, 80 bp, synthetic construct
  source 1..80: mol_type = other DNA
gcgctgacgatgcatcttatcaattgcggtgtaggggacgtgagcgcgtcgagatcgaccggatcggagaatctttcgag

SEQ ID NO: 131716 - DNA, 80 bp, synthetic construct
  source 1..80: mol_type = other DNA
cctgagagccttcacggaggctatgaccaggaattccgcccctcccggcgaccccccaaaacctgaatatgacttggagc

SEQ ID NO: 131717 - DNA, 80 bp, synthetic construct
  source 1..80: mol_type = other DNA
cctgtccacagtatatatacacaagccctaaactgacgtaatggggctaaaagtacacaaaatcccgccaaacccaacac

SEQ ID NO: 131718 - DNA, 80 bp, synthetic construct
  source 1..80: mol_type = other DNA
ggtttgcatggtgttatccgacttcaagacatggctctctgctaagatcatgccagcgctccctgggctgccctttattt

SEQ ID NO: 131719 - DNA, 80 bp, synthetic construct
  source 1..80: mol_type = other DNA
attttgtttgattttaaattaggtccacttttaaatcccttttttgtcatttttgcccaaaatgtttatggttgggttgg

SEQ ID NO: 131720 - DNA, 80 bp, synthetic construct
  source 1..80: mol_type = other DNA
gtgcgcaggatcataggtgatgaagaaaagtacatggactacctatccacccaagttcgctacttaggtgaagaagggtc

SEQ ID NO: 131721 - DNA, 80 bp, synthetic construct
  source 1..80: mol_type = other DNA
ttttctgtgtgcctgtactcaaaaggtcataccccgtaaacggcgggctccagtcccggcccggcggttggcgtgaacgc

SEQ ID NO: 131722 - DNA, 80 bp, synthetic construct
  source 1..80: mol_type = other DNA
cggataatgctgtcagttcatggctcccagcacagtgggatgatcggacatgaaactgatgagaatagagcgaaggttga

SEQ ID NO: 131723 - DNA, 80 bp, synthetic construct
  source 1..80: mol_type = other DNA
tctgctacgaagagctaggcgcgtggggcgaagagccatgcttagggcggccagacgtgcagcttcgggcgccagcgccg

SEQ ID NO: 131724 - DNA, 80 bp, synthetic construct
  source 1..80: mol_type = other DNA
atttattacacccccgtttgcttcctccaacggcttgcaagaaaaacctccgggagtcctcagcctgaaatacactgatc

SEQ ID NO: 131725 - DNA, 80 bp, synthetic construct
  source 1..80: mol_type = other DNA
gcgtgtatgacctgttggcgcaggcgtgcctggcgggcggttaaaagcagggcctcgggtaagtggcccacgtacattcg

SEQ ID NO: 131726 - DNA, 80 bp, synthetic construct
  source 1..80: mol_type = other DNA
tcggcgcatgtactacctgaccagagaccctagcactccactcgccagggctgcctgggagacagctagacactcccctg

SEQ ID NO: 131727 - DNA, 80 bp, synthetic construct
  source 1..80: mol_type = other DNA
cgtcccttactatgtgagggcccacgccttagtcaagatctgtggctttgtgcgcaacatggcgcatggcaaatacatcc

SEQ ID NO: 131728 - DNA, 80 bp, synthetic construct
  source 1..80: mol_type = other DNA
agttggcgaagagattctcaagaggattgctgaacggccaaggaccaatgaaattggttatggctttcatagctttcctc

SEQ ID NO: 131729 - DNA, 80 bp, synthetic construct
  source 1..80: mol_type = other DNA
catagcggcctggtacatcaaaggccgcctggtcccagcagccacctattccctgctaggcttatggtctttcctcttct

SEQ ID NO: 131730 - DNA, 80 bp, synthetic construct
  source 1..80: mol_type = other DNA
cccgcaattcccctggggaggttttgctaaatttagaattgggccctgaattgaatccttacctatcccatcttgcccgc

SEQ ID NO: 131731 - DNA, 80 bp, synthetic construct
  source 1..80: mol_type = other DNA
aatgcaggggccgcagtctgacaacaacaccgcaacaagtttcaggctcaccccagggctatggacttcagcgtatctgc

SEQ ID NO: 131732 - DNA, 80 bp, synthetic construct
  source 1..80: mol_type = other DNA
gtttgtaccgtttcactccccagtcatttatccagagtaagcaaacgggccagaccgggagaaacggttaatctgccgtt

SEQ ID NO: 131733 - DNA, 80 bp, synthetic construct
  source 1..80: mol_type = other DNA
aagggtggaggttgctggcgcccatcacggcatatgcccagcagacaaggggcctcttgggatgcatagtcaccagcttg

SEQ ID NO: 131734 - DNA, 80 bp, synthetic construct
  source 1..80: mol_type = other DNA
gcgcggaagcggcgacccgggcgaccggggcggggagtgccggcgtacgccacacctcgggggtggcggaggcccgggtc

SEQ ID NO: 131735 - DNA, 80 bp, synthetic construct
  source 1..80: mol_type = other DNA
aacttggatattaactacaacaaaggcctttacttgtttacagcttcaaacaattccaaaaagcttgaggttaacctaag

SEQ ID NO: 131736 - DNA, 80 bp, synthetic construct
  source 1..80: mol_type = other DNA
cccacatcgacgctcatttcctctcgcagacaaagcaggcaggggagaacttcgcatatctcgttgcttaccaggcgacg

SEQ ID NO: 131737 - DNA, 80 bp, synthetic construct
  source 1..80: mol_type = other DNA
ggtctgagggcgtttctcaagcagcacccgctgacccgccagctggccacggtcgcggaggccgcggagcgcgccggccc

SEQ ID NO: 131738 - DNA, 80 bp, synthetic construct
  source 1..80: mol_type = other DNA
cggacagacattgtggaagtggaccgtgacacagctcgccgacacctggccgaagggaaagtggacaccggagtggccgt

SEQ ID NO: 131739 - DNA, 80 bp, synthetic construct
  source 1..80: mol_type = other DNA
gtgggtggacccatgattaactctcgaggtgaaaggtgcggataccgccgttgcagagcaagcggggtccttcctactag

SEQ ID NO: 131740 - DNA, 80 bp, synthetic construct
  source 1..80: mol_type = other DNA
catcatggctaagaacgaagttttctgcgttcagcctgaaaagggaggtcgtaagccagctcgtctcatcgtgttccccg

SEQ ID NO: 131741 - DNA, 80 bp, synthetic construct
  source 1..80: mol_type = other DNA
gggggccccatgttcaactcgaagggccaagcctgcggctaccgcaggtgcagggctagcggagtcctgcccaccagcat

SEQ ID NO: 131742 - DNA, 80 bp, synthetic construct
  source 1..80: mol_type = other DNA
agagggagcaatgcataccgcactgacaggagccacagaaatccaaaactcaggaggcacaagcatttttgcggggcact

SEQ ID NO: 131743 - DNA, 80 bp, synthetic construct
  source 1..80: mol_type = other DNA
gtgggtcgcggaaaccggtgacgggggggcggttttggaggttggagtgagagtgggaaacggcccgggtccggggacca

SEQ ID NO: 131744 - DNA, 80 bp, synthetic construct
  source 1..80: mol_type = other DNA
gggccaaggtcttagtcgttctcctcatgtttgcgggggtggatgcttctacctacatttctggcagctcagctggtagc

SEQ ID NO: 131745 - DNA, 80 bp, synthetic construct
  source 1..80: mol_type = other DNA
ctccttgttcttccacatagggcgttcgctctcgacaatgagcaggtggctacgctgggagtggcggtaaccttggtgat

SEQ ID NO: 131746 - DNA, 80 bp, synthetic construct
  source 1..80: mol_type = other DNA
cccacagcaatcgaaaaacggcatcttttacaacgcagtccgagaagaccatcttgacactgggagattatggagacatc

SEQ ID NO: 131747 - DNA, 80 bp, synthetic construct
  source 1..80: mol_type = other DNA
aacctcaaattggcgaatctcagtggaacgaagctgatgctaatgcggcaggagggagagtgcttaaaaaaacaactccc

SEQ ID NO: 131748 - DNA, 80 bp, synthetic construct
  source 1..80: mol_type = other DNA
ctgccaaaaaggttgagtttaaggaaccagcttgcaatgttacatttaaatccgaagctaatgaatgcaccactctcata

SEQ ID NO: 131749 - DNA, 80 bp, synthetic construct
  source 1..80: mol_type = other DNA
tgtgagaatacatcggtacgcaccggagtgcaagccaatccttagagatgaggtaacatttagcgtcgggctttccacct

SEQ ID NO: 131750 - DNA, 80 bp, synthetic construct
  source 1..80: mol_type = other DNA
atgtggctaccgtagatgccgcgctagcggggtgctgcccacgagcatgggaaacaccctcacatgctatctgaaggcac

SEQ ID NO: 131751 - DNA, 80 bp, synthetic construct
  source 1..80: mol_type = other DNA
cagtagtgggggttgaattgctgccagtacacgccaaaagtttctacaatgagcaggccgtttactctcagcttatccgc

SEQ ID NO: 131752 - DNA, 80 bp, synthetic construct
  source 1..80: mol_type = other DNA
gagacggatcctgtgtcgcgccgccgagcaggctattacccgtcgccgccgaacccggcggtcccgggaggcgtacggtg

SEQ ID NO: 131753 - DNA, 80 bp, synthetic construct
  source 1..80: mol_type = other DNA
ccaactcaagcatcgtgtatgaatctgaggctgtcattttgcacctgccaggatgtgtgccgtgtgtcaaggtgggcaac

SEQ ID NO: 131754 - DNA, 80 bp, synthetic construct
  source 1..80: mol_type = other DNA
atagcggttgggattactttccacttggagctgggaccagagatcatggcccttgtgatgctgcaggcagtttttagcat

SEQ ID NO: 131755 - DNA, 80 bp, synthetic construct
  source 1..80: mol_type = other DNA
ggcttatctaccttaccaggaaacccagctgtggcatctatgatggcgtttagcgccgccctcaccagcccattatccac

SEQ ID NO: 131756 - DNA, 80 bp, synthetic construct
  source 1..80: mol_type = other DNA
gatgacgagcccggagactgctggcgtgggcgacgacgcggcggttgaggtcctggatgtgctgtctctgcgtgaagacc

SEQ ID NO: 131757 - DNA, 80 bp, synthetic construct
  source 1..80: mol_type = other DNA
gccaacctacacattcgttcttcgagtcacacacgggaggagcgggaagagttggcagtgttgtggttttggattatctt

SEQ ID NO: 131758 - DNA, 80 bp, synthetic construct
  source 1..80: mol_type = other DNA
acgtgaaatcaagcatgtaacaaaacgagaaaaaaaagaggaagaagctgcagcgctagcagacggcgtggagttcgttc

SEQ ID NO: 131759 - DNA, 80 bp, synthetic construct
  source 1..80: mol_type = other DNA
ctgggcgactgcatcggccgggatgcccgcgaggccatcgaccgcatgtttgcgcgcaagtacaacgccacgcacatcaa

SEQ ID NO: 131760 - DNA, 80 bp, synthetic construct
  source 1..80: mol_type = other DNA
ccttccggtaccccatactccgataccctggacattgcggatcccaaaaatataatattaacaggatttgcttatacttt

SEQ ID NO: 131761 - DNA, 80 bp, synthetic construct
  source 1..80: mol_type = other DNA
actcttcggggtgtctggagcgtctgagcgcttgcaagcccatcacccattttgaccaggggtgtggcgcgctgacctat

SEQ ID NO: 131762 - DNA, 80 bp, synthetic construct
  source 1..80: mol_type = other DNA
atgaaaaatccaaccgtagacgggattgttgcaatagacttggatcctgtggtttatgatgcaaaatttgaaaaacagct

SEQ ID NO: 131763 - DNA, 80 bp, synthetic construct
  source 1..80: mol_type = other DNA
aacacccttacatgctacttgaaggcctctgcggcctgtcgagctgcaaagctccaggactgcacgatgctcgtgtgcgg

SEQ ID NO: 131764 - DNA, 80 bp, synthetic construct
  source 1..80: mol_type = other DNA
atactccccaggtgaactcaatcgagtgggagcatgcctcaggaaacttggggctcccccgttgagagcctggaggcaca

SEQ ID NO: 131765 - DNA, 80 bp, synthetic construct
  source 1..80: mol_type = other DNA
acacgtcgcgatgttgggtgccggtggctcccaccctcgctgtacctaatgtctccaccccggccagagggttccgccac

SEQ ID NO: 131766 - DNA, 80 bp, synthetic construct
  source 1..80: mol_type = other DNA
attcctggttgggcatcatactgtacgcgcccacgatatgggttcgcatggtgttgatgacccatttcttttcgatactc

SEQ ID NO: 131767 - DNA, 80 bp, synthetic construct
  source 1..80: mol_type = other DNA
cgtgtccgaccgggaattcattacgtacatctacctggcccactttgagtgcttcagccccccgcgcctggccacgcatc

SEQ ID NO: 131768 - DNA, 80 bp, synthetic construct
  source 1..80: mol_type = other DNA
gcggagacgatttggtcattatctcggagagtgtgggagtacaggaggatgctaatgcactgcgagctttcacggaggct

SEQ ID NO: 131769 - DNA, 80 bp, synthetic construct
  source 1..80: mol_type = other DNA
tggccccgcgacacggctcgcgcccgttcatgggaaactggcaagatatcggcaccagcaatatgagcggtggcgccttc

SEQ ID NO: 131770 - DNA, 80 bp, synthetic construct
  source 1..80: mol_type = other DNA
agtcagtggatgaacaggctgatagctttcgcctccaggggtaaccatgtgtctccaactcactacatccccgaaacgga

SEQ ID NO: 131771 - DNA, 80 bp, synthetic construct
  source 1..80: mol_type = other DNA
aaaataaagtggtaaaagtcctcagacccacaccgaaaggagcagtgatggacattatatccaggaaagatcaaagaggt

SEQ ID NO: 131772 - DNA, 80 bp, synthetic construct
  source 1..80: mol_type = other DNA
ttttcggcggcctgcggccttttctgctgcatgtttttacatgcttttgtaaactggcccaccagtcccatggagcgcaa

SEQ ID NO: 131773 - DNA, 80 bp, synthetic construct
  source 1..80: mol_type = other DNA
gggaacggggtccatgccacggtccactcgggcaaaaaccgagtcggcacggcccacggttctcccacccacgcgtctgg

SEQ ID NO: 131774 - DNA, 80 bp, synthetic construct
  source 1..80: mol_type = other DNA
ccctggcccctctacgggaacgagggctgcggctgggcaggatggctcttgtccccccgcggctctcgccctagttggtg

SEQ ID NO: 131775 - DNA, 80 bp, synthetic construct
  source 1..80: mol_type = other DNA
ggcagctcgtcaccatgaggccccggctgcaccagaccgtgcaagaatgcaattgctccatctacacgggacacattacc

SEQ ID NO: 131776 - DNA, 80 bp, synthetic construct
  source 1..80: mol_type = other DNA
aacgccatcctgcaccggccggggtgcgtgccctgcgtcctcgagggcaatgttagcaggtgctgggaaccaatagctcc

SEQ ID NO: 131777 - DNA, 80 bp, synthetic construct
  source 1..80: mol_type = other DNA
agattctgtgataatactcgcgactttggcgcatccccgcctcacctttgaaaccaccaaactcctgctggccttgctgg

SEQ ID NO: 131778 - DNA, 80 bp, synthetic construct
  source 1..80: mol_type = other DNA
cccgcgcggcctgggagactgctcgccacactccagttaactcctggttgggaaatatcattatgtacgcacccactctc

SEQ ID NO: 131779 - DNA, 80 bp, synthetic construct
  source 1..80: mol_type = other DNA
cgggcccacgataactacttcagcctggggaacaagttcagaaacccccctgtgggttcccccccagaagtaaccaccga

SEQ ID NO: 131780 - DNA, 80 bp, synthetic construct
  source 1..80: mol_type = other DNA
gtccccgaaaaccgcaaaacaagctattgcgcagcaacgctcaaagaagcagctacaacagcaggaaatctgggaggaag

SEQ ID NO: 131781 - DNA, 80 bp, synthetic construct
  source 1..80: mol_type = other DNA
ccgtcacggtcccccaccccaatatacaagaaacggcgctccccctaacaggagaggtgccgttttatgggaaggctatc

SEQ ID NO: 131782 - DNA, 80 bp, synthetic construct
  source 1..80: mol_type = other DNA
ggatagttcaggcatcacctatagagatgaacttccgttttgtgggattggagaccatctatccccgagaacagcccatt

SEQ ID NO: 131783 - DNA, 80 bp, synthetic construct
  source 1..80: mol_type = other DNA
cctaagctggaacagttctggcagaaacatctatggaactttgtcagcgggatacagtatctagcgggtctctccaccct

SEQ ID NO: 131784 - DNA, 80 bp, synthetic construct
  source 1..80: mol_type = other DNA
agtcacattctccggatcaaagccatgcaggatcccggtgagagcagtggcacatggatctcctgatgtcaatgtagcca

SEQ ID NO: 131785 - DNA, 80 bp, synthetic construct
  source 1..80: mol_type = other DNA
gcctgaaccgcgagcggttgctgcgcgaggaggactttgagcccgacgcgcggaccgggattagtcccgcgcgcgcacac

SEQ ID NO: 131786 - DNA, 80 bp, synthetic construct
  source 1..80: mol_type = other DNA
gacacccacgggctcacgtccctcttccgacctgggccggctcagaaaatacagcttgtaaacaccaatggcaggtggca

SEQ ID NO: 131787 - DNA, 80 bp, synthetic construct
  source 1..80: mol_type = other DNA
acagcgatgaaacatctagctagtttcaaaaaagaacttggcaccctgattgacgtggtcaacagaaggagcaagaaaca

SEQ ID NO: 131788 - DNA, 80 bp, synthetic construct
  source 1..80: mol_type = other DNA
atttatcaatgctgtgacctcgagccggaagccaggaaagccatccgatcactaacggagcgactgtacatcggagggcc

SEQ ID NO: 131789 - DNA, 80 bp, synthetic construct
  source 1..80: mol_type = other DNA
cttgtacatcggggacctttgtggtggtgttttcctggtgggacagctcttcacctttcgtcccagggtgcatcaaacca

SEQ ID NO: 131790 - DNA, 80 bp, synthetic construct
  source 1..80: mol_type = other DNA
gatgtgggaatgattagcacttacgtagatttaaacttaacacttcttaaagatagagagtttatgccgctgcaagtata

SEQ ID NO: 131791 - DNA, 80 bp, synthetic construct
  source 1..80: mol_type = other DNA
gccgatggagaaaaaggtgatagtctggggcgctgacaccgctgcctgcggcgacatcatcaggggcttgcccgtgtcgg

SEQ ID NO: 131792 - DNA, 80 bp, synthetic construct
  source 1..80: mol_type = other DNA
tcctttgtgttgtcgttatataaaaaatatcaggctttacaacaagaaattacgaatacccataagttgactgaattaca

SEQ ID NO: 131793 - DNA, 80 bp, synthetic construct
  source 1..80: mol_type = other DNA
atcgcctggagctttagtagtgggcgtggtctgcgccgctattttgcggcgccatgtaggacccggcgaaggagccgtgc

SEQ ID NO: 131794 - DNA, 80 bp, synthetic construct
  source 1..80: mol_type = other DNA
gcgggggccccggcctccaggcccgcgccgacctgcggggcccaggcgacagccccctgcacgccggggggacggcggga

SEQ ID NO: 131795 - DNA, 80 bp, synthetic construct
  source 1..80: mol_type = other DNA
ggcggacgccgctgcatgcggtgacatcatcgatggcttgcccgtctctgcccgtaggggccgagagatattgcttgggc

SEQ ID NO: 131796 - DNA, 80 bp, synthetic construct
  source 1..80: mol_type = other DNA
actggccacagaatggcctgggacatgatgatgaactggagtccaacaaccaccttaattctcgcccaggtcatgaggat

SEQ ID NO: 131797 - DNA, 80 bp, synthetic construct
  source 1..80: mol_type = other DNA
ggggggctacctggttaagcatgtctctgacttggaggttttcccgaacaagctcgctaaggaggcggtccccgcccagc

SEQ ID NO: 131798 - DNA, 80 bp, synthetic construct
  source 1..80: mol_type = other DNA
accgtccttgaccaagcagagactgcgggggcgagactggttgtgctcgccaccgctactcctccgggctccatcaccgt

SEQ ID NO: 131799 - DNA, 80 bp, synthetic construct
  source 1..80: mol_type = other DNA
ttgaaccaggacagctaaaaatgaattggtttaaaaaagggagtagcatcggccaaatgttcgagactacaatgagagga

SEQ ID NO: 131800 - DNA, 80 bp, synthetic construct
  source 1..80: mol_type = other DNA
cccttgcctgccctgtctacgggactgatccatctccaccaaaacatcgtggatgtacagtacttgtacggcgtgggctc

SEQ ID NO: 131801 - DNA, 80 bp, synthetic construct
  source 1..80: mol_type = other DNA
ccccccccccccctcaaccccggcgattgtgggttttttaaaaacgacacgcgtgcgaccgtatacagaacattgttttg

SEQ ID NO: 131802 - DNA, 80 bp, synthetic construct
  source 1..80: mol_type = other DNA
cactggaggagccacacaatattcgcgaattccgattccctcctgccatgtggtttcggggagtttcccccccattttat

SEQ ID NO: 131803 - DNA, 80 bp, synthetic construct
  source 1..80: mol_type = other DNA
tgaaacccagggacgtggcggagcgtattggagccttgagggaacaatactcagagtcatggcacgaggacaaagaacat

SEQ ID NO: 131804 - DNA, 80 bp, synthetic construct
  source 1..80: mol_type = other DNA
tccacactgggtttttggccggcctgttttactatcacaaatttaatgcctctggctgtccggcgcgcatgagttcgtgc

SEQ ID NO: 131805 - DNA, 80 bp, synthetic construct
  source 1..80: mol_type = other DNA
cgtttcctccgttccggctactcgtcccagaatttagccaggacgtccttgtaaaacgcgggcgcgggcgcgtgggccca

SEQ ID NO: 131806 - DNA, 80 bp, synthetic construct
  source 1..80: mol_type = other DNA
tcctggggcccgcccacctccttaaagtgtctctgctacgggtaccatactttgtgagggcccacgccctgctacggcta

SEQ ID NO: 131807 - DNA, 80 bp, synthetic construct
  source 1..80: mol_type = other DNA
ttcgcaccaacaacccccggggacgacgcgggaggcggcactgccgccccccagacctgcggaatcgtcaagcgcctcct

SEQ ID NO: 131808 - DNA, 80 bp, synthetic construct
  source 1..80: mol_type = other DNA
tctctggatctagctggtgcagcaacatctggcatggcactttccccatcaatgcaaccacgactggtcccagcgtgccc

SEQ ID NO: 131809 - DNA, 80 bp, synthetic construct
  source 1..80: mol_type = other DNA
tcacagaggcagaccttgatgatgaacaggagatcttgaactacatgagcccacatcacaaaaaactggcacaagcagtg

SEQ ID NO: 131810 - DNA, 80 bp, synthetic construct
  source 1..80: mol_type = other DNA
gcaccgctcatggcctcgcctccttcctcagccctggatcgaagcaaaacatccagctcatccacacaaatggcagttgg

SEQ ID NO: 131811 - DNA, 80 bp, synthetic construct
  source 1..80: mol_type = other DNA
tggatatcaagctgttaccggtacaagagttagtgagaatactctttatatagccgaccgcctttatacagaagacgatt

SEQ ID NO: 131812 - DNA, 80 bp, synthetic construct
  source 1..80: mol_type = other DNA
gcctacgcccttgttatacaggctaggtgctgttcagaatgagatcacgaccacccatccaattactaagtacatcatga

SEQ ID NO: 131813 - DNA, 80 bp, synthetic construct
  source 1..80: mol_type = other DNA
aagtaccagttgtcagtgaccatcatggccatgctatgcattccaaatgccataatactccaacatgcatggaaagtgag

SEQ ID NO: 131814 - DNA, 80 bp, synthetic construct
  source 1..80: mol_type = other DNA
cggccgccgagtcccaatgcaggcgcgcggccatggtgctgcacaggcacaacagctcccagacggaggttacgttcagg

SEQ ID NO: 131815 - DNA, 80 bp, synthetic construct
  source 1..80: mol_type = other DNA
gacatgccgcccaagggaaccgccaagcagctgatcgctcggcagagagcgaagaagcaagagctgctccagcagcaggt

SEQ ID NO: 131816 - DNA, 80 bp, synthetic construct
  source 1..80: mol_type = other DNA
tcacttgcatgtcggcagacctggaagtcataaccagcacctgggtgctgctaggtggggttctcgcagcgctagcagct

SEQ ID NO: 131817 - DNA, 80 bp, synthetic construct
  source 1..80: mol_type = other DNA
actcactcgggtggctgccgctctcagaaaacttggggcgcccccccttagagcgtggaagagtcgagctcgtgcagtga

SEQ ID NO: 131818 - DNA, 80 bp, synthetic construct
  source 1..80: mol_type = other DNA
acagcaagacttttgacaaagactatgacagagtccgtgaagaaaaacctgactttgttgtgacgaccgacatctcagaa

SEQ ID NO: 131819 - DNA, 80 bp, synthetic construct
  source 1..80: mol_type = other DNA
cacttccaataatacaatgtctaaatcagtaatcggcatcgctgctgccgcgatagtgggattaatgattataattctat

SEQ ID NO: 131820 - DNA, 80 bp, synthetic construct
  source 1..80: mol_type = other DNA
aatccctgcgcaactccagtaaaaccgtacacggaattacaaactacttttatcgcggcttgttgtttgtctaataacac

SEQ ID NO: 131821 - DNA, 80 bp, synthetic construct
  source 1..80: mol_type = other DNA
ccccgcccgcactttggcgatgaacgcgggggtgccctccggaaggccgtgcgggtcaaaaaggtatgcggtgtcgccgt

SEQ ID NO: 131822 - DNA, 80 bp, synthetic construct
  source 1..80: mol_type = other DNA
gacagctcttcactttccgacctcggcaacacactaccgtccaggagtgtaactgttccatctacaccgggcatattacg

SEQ ID NO: 131823 - DNA, 80 bp, synthetic construct
  source 1..80: mol_type = other DNA
atgggcgacgcctatggtttccaatactcccccaaacagcgggtggaacgactcctcaagatgtggcgttctaagaagac

SEQ ID NO: 131824 - DNA, 80 bp, synthetic construct
  source 1..80: mol_type = other DNA
cggctcccgcctccccccgcccccccgaggtcttggcccagcgcccccgaagtctcacatgtgcgtggtgtgaccgtgcg

SEQ ID NO: 131825 - DNA, 80 bp, synthetic construct
  source 1..80: mol_type = other DNA
caggaaaaagctcgtctcgcagaagcttcgctttagctcggcgaccagggtcgcccgggccaccctggtggccaggcggc

SEQ ID NO: 131826 - DNA, 80 bp, synthetic construct
  source 1..80: mol_type = other DNA
gaatcgtgggctgggcgttaaagtgggagtttgttgtcctcatattcctgctcttggcggatgcacgtgtgtgcgtcgcc

SEQ ID NO: 131827 - DNA, 80 bp, synthetic construct
  source 1..80: mol_type = other DNA
cagtacgccatatgtagatgcgaagccgcccttcaagtgtgggtccctcccttacttgcacgcgggagtagggacggtgt

SEQ ID NO: 131828 - DNA, 80 bp, synthetic construct
  source 1..80: mol_type = other DNA
actgctggcacctggaatgcgcttactctatatggatacatacagaatcgtgcttctgctaatcggagttagtagcttgt

SEQ ID NO: 131829 - DNA, 80 bp, synthetic construct
  source 1..80: mol_type = other DNA
gctggcgctccccgccggccgccgccatgaccgcaccacgctcgcgggcccccactacgcgtgcgcggggtgacacggaa

SEQ ID NO: 131830 - DNA, 80 bp, synthetic construct
  source 1..80: mol_type = other DNA
ggcctgtacctctttaactgggcggtacgcaccaaaataaaactcactccattgccgtctgcaggccgcctggacttgtc

SEQ ID NO: 131831 - DNA, 80 bp, synthetic construct
  source 1..80: mol_type = other DNA
cactaacaccacaacccatggagctaaaatactcatggaaaacgtggggaaaggcaaaaatagtgacagctgaaacacaa

SEQ ID NO: 131832 - DNA, 80 bp, synthetic construct
  source 1..80: mol_type = other DNA
ggggcgggcgcgggcaagcagccccgcggcgcgcgggcggaggagcggcgcccgcgggggagcggccggatccgagggag

SEQ ID NO: 131833 - DNA, 80 bp, synthetic construct
  source 1..80: mol_type = other DNA
agagcgtcttcacaggcctcacccacatagacgcccatttcttgtcccagactaaacaggcaggggacaacttcccctac

SEQ ID NO: 131834 - DNA, 80 bp, synthetic construct
  source 1..80: mol_type = other DNA
accatgccggccttgtcaaccggcctcatccacctgcatcagaacatagtggacgtgcagtacctctacggagtctcctc

SEQ ID NO: 131835 - DNA, 80 bp, synthetic construct
  source 1..80: mol_type = other DNA
tgagtcagagaacaaagtggtggttctggactccttcgatccgcttgtggcgggggaggatgaacgggaggtctccgtgc

SEQ ID NO: 131836 - DNA, 80 bp, synthetic construct
  source 1..80: mol_type = other DNA
ctcaacaccgggtttattgcggggctgctttactatcacaaatttaactcatcggggtgtaccgagagaatggccgcctg

SEQ ID NO: 131837 - DNA, 80 bp, synthetic construct
  source 1..80: mol_type = other DNA
ggtaccgtcggtgtgcggttagaaagtcacgacgcgccgcttgctcctccacgcgaattttaacacaggtcgcgcgctgt

SEQ ID NO: 131838 - DNA, 80 bp, synthetic construct
  source 1..80: mol_type = other DNA
cacaagttaatgtcactaggggtgggaatgctacactagatggaccatttaacaataacacatggacaagatatcatgac

SEQ ID NO: 131839 - DNA, 80 bp, synthetic construct
  source 1..80: mol_type = other DNA
gttcctccatgcctcccctggagggggaacctggggatccggatctcagcgacgggtcatggtcgacagttagtggagcc

SEQ ID NO: 131840 - DNA, 80 bp, synthetic construct
  source 1..80: mol_type = other DNA
tgaacgcccacaaagatggggtctgtggaattagatcaaccacgaggctggaaaatgtcatgtggaagcaaataaccaat

SEQ ID NO: 131841 - DNA, 80 bp, synthetic construct
  source 1..80: mol_type = other DNA
cccacttcctctcccagacgaaacaaggaggagacaattttgcgtatctagtggcctatcaggccacagtatgcgctagg

SEQ ID NO: 131842 - DNA, 80 bp, synthetic construct
  source 1..80: mol_type = other DNA
ggtttattttggtttggaaacgagagtttctggtcatgaaaaacccaaaaaagaaatccggtttattttggatttggaaa

SEQ ID NO: 131843 - DNA, 80 bp, synthetic construct
  source 1..80: mol_type = other DNA
tggcacagctcacgtcttctacacaacaacgggcatcgtcattcttcagttgaaccacgctgcgcccccaccggttttgt

SEQ ID NO: 131844 - DNA, 80 bp, synthetic construct
  source 1..80: mol_type = other DNA
aaggcctcctggaaggctcaccaggagtcaggccattttagagcccccgggcataactcgggaggagcgtggaagacaat

SEQ ID NO: 131845 - DNA, 80 bp, synthetic construct
  source 1..80: mol_type = other DNA
gtcgtcctcctattcctgcttttggcggacgctagggtctgcgcctgcctctggatgctcatcctattgggtcaggctga

SEQ ID NO: 131846 - DNA, 80 bp, synthetic construct
  source 1..80: mol_type = other DNA
gggagctcttgtagcattcaagatcatgagcggtgaggtcccctccacggaggacctggtcaatctgctgcccgccatcc

SEQ ID NO: 131847 - DNA, 80 bp, synthetic construct
  source 1..80: mol_type = other DNA
gcacacggcctcctccggcgggccggcggccggccgccggaggattcgtctcagcgcgtcgcgcataacctcggccgccg

SEQ ID NO: 131848 - DNA, 80 bp, synthetic construct
  source 1..80: mol_type = other DNA
gctggctacagcgggggagacatttatcacagcgtgtctcgtgcccggccccgctggttttggttctgcctactcctgct

SEQ ID NO: 131849 - DNA, 80 bp, synthetic construct
  source 1..80: mol_type = other DNA
tctgctcgcttgggtcgagaagtgctgctaggccctgccgacgggtacacctccaaagggtggaagctcctcgcgcccat

SEQ ID NO: 131850 - DNA, 80 bp, synthetic construct
  source 1..80: mol_type = other DNA
tggagcgcctcccctcagagcgtggaagagtcgggcgcgtgcggtgagggcctcccttatcgcgcagggagtgagtgcgg

SEQ ID NO: 131851 - DNA, 80 bp, synthetic construct
  source 1..80: mol_type = other DNA
ttgcctcgtagaagtcgaccgcgaagttgaagaactgggagttgcgcgccgcaaacgtcaactcctcttgcaagagccga

SEQ ID NO: 131852 - DNA, 80 bp, synthetic construct
  source 1..80: mol_type = other DNA
agacagacgtcttcctgctcaacagcacccgcccaccgaaggtgggatggtttgggtgcacgtggatgaacagctccggg

SEQ ID NO: 131853 - DNA, 80 bp, synthetic construct
  source 1..80: mol_type = other DNA
agcgaatgagaccgacgtgtttatcctgaattcgactaggccgcctaatggcgcttggttcggatgcgtgtggatgaaca

SEQ ID NO: 131854 - DNA, 80 bp, synthetic construct
  source 1..80: mol_type = other DNA
gcaggctgccacgttggggttgttggttaccttactggtcactgccttcaccttgtctcccatgtacaagaccttactcg

SEQ ID NO: 131855 - DNA, 80 bp, synthetic construct
  source 1..80: mol_type = other DNA
ttactctacatacggcaaattccttgccgatgggggatgttctgggggtgcatatgatgtgatcatttgtgatgagtgcc

SEQ ID NO: 131856 - DNA, 80 bp, synthetic construct
  source 1..80: mol_type = other DNA
tgctacgtgaaagctaaggcggcgtgcaacgccgcaggcattgttgcccccaccatgttggtgtgcggcgacgacctggt

SEQ ID NO: 131857 - DNA, 80 bp, synthetic construct
  source 1..80: mol_type = other DNA
agaaacgctggcttggtcaagagacgtgggggtggaacaggagagaccctgggagagaaatggaaggcccgcttgaacca

SEQ ID NO: 131858 - DNA, 80 bp, synthetic construct
  source 1..80: mol_type = other DNA
aaacatagacaaagacaatgggattcagataggaacagacgcaacgaagcctatttatgccgacaaaacatatcaaccag

SEQ ID NO: 131859 - DNA, 80 bp, synthetic construct
  source 1..80: mol_type = other DNA
ggaacggctctacgtcgggggccccatgttcaacagcaagggactcaaatgtggatatcgccgttgccgtgccagtggcg

SEQ ID NO: 131860 - DNA, 80 bp, synthetic construct
  source 1..80: mol_type = other DNA
cgctgacagatgccaacataaccggccccagtgaggacagaccatattgctggcactacccacctaaaccctgcttcaca

SEQ ID NO: 131861 - DNA, 80 bp, synthetic construct
  source 1..80: mol_type = other DNA
tccagggcatctcggtactgccccagcagcccccacatgtccgcccgcagcgccgccgtaacctcagggagcgccccccg

SEQ ID NO: 131862 - DNA, 80 bp, synthetic construct
  source 1..80: mol_type = other DNA
cagaaccatgaaggctttcacagcttgcgttctgattagcataatcacacttagtttagctgcttacactcaagttagtg

SEQ ID NO: 131863 - DNA, 80 bp, synthetic construct
  source 1..80: mol_type = other DNA
cgggagaaggctgcggcctcgttccaggagaacccagtgtccccaacagacccggggacgtgggatcccaggccttatat

SEQ ID NO: 131864 - DNA, 80 bp, synthetic construct
  source 1..80: mol_type = other DNA
ggaaaaataggaattaaaataagcggtcctttgcaagtagcacaaaactccgatacactaacagtagttactggaccagg

SEQ ID NO: 131865 - DNA, 80 bp, synthetic construct
  source 1..80: mol_type = other DNA
gttgatggtcgtcctgtcgcccctgccaactcgacaacccttacctacgccactattggatcgtcggtggataccgctgc

SEQ ID NO: 131866 - DNA, 80 bp, synthetic construct
  source 1..80: mol_type = other DNA
tcccactttttccattgagaccaccacgctgccccaggacgctgtaagccgctcacaacggagaggcaggaccggcagag

SEQ ID NO: 131867 - DNA, 80 bp, synthetic construct
  source 1..80: mol_type = other DNA
atgacagcgggtatttttattcgtttatcccacatgtataaaattctaacaactctggagtctccaaatgatgtaaccta

SEQ ID NO: 131868 - DNA, 80 bp, synthetic construct
  source 1..80: mol_type = other DNA
gcggcccggagacgtcccccgtcctcgtccgccatcgcgacctcggccccgcggccctgcgtcgtcgtcgtcgtcttctt

SEQ ID NO: 131869 - DNA, 80 bp, synthetic construct
  source 1..80: mol_type = other DNA
ccgccccttctctcaaggccacatgcaccgctcatcatgactcccctggtgttgatctcctcgaggctaacctcttgtgg

SEQ ID NO: 131870 - DNA, 80 bp, synthetic construct
  source 1..80: mol_type = other DNA
ggttgacccccagatgcctggtgcattacccgtatagattgtggcactatccgtgcactgtgaattttaccatcttcaag

SEQ ID NO: 131871 - DNA, 80 bp, synthetic construct
  source 1..80: mol_type = other DNA
aaagacatgcaaatcgatttcttccggggacacggccagcaaacgcgaacagcggaccacgggcatgaagcagctgcgcc

SEQ ID NO: 131872 - DNA, 80 bp, synthetic construct
  source 1..80: mol_type = other DNA
cagccggagcagagagccttgggtccggtttctatgccaaaccttgtaccggaggtgatcgatcttacctgccacgaggc

SEQ ID NO: 131873 - DNA, 80 bp, synthetic construct
  source 1..80: mol_type = other DNA
tctctcacgtgccgggtgactagtggagtggatcctgcccaaactgtggtattggaactggacaagacagcggaacactt

SEQ ID NO: 131874 - DNA, 80 bp, synthetic construct
  source 1..80: mol_type = other DNA
agacccctcccatgacacaacgcagcagcggggcccgagcactgagggaagctgtacctccctgcaaaggtctacccttt

SEQ ID NO: 131875 - DNA, 80 bp, synthetic construct
  source 1..80: mol_type = other DNA
ggatcttggggttcgggtttgcgagaagagggcgcttcacgacgtcgtcaaacagctacctgaggccgtgatgggagccg

SEQ ID NO: 131876 - DNA, 80 bp, synthetic construct
  source 1..80: mol_type = other DNA
ctctcacagcggcagtacttctgctagtcacacattatgccattataggtccaggattgcaggctaaagccactcgtgaa

SEQ ID NO: 131877 - DNA, 80 bp, synthetic construct
  source 1..80: mol_type = other DNA
taacctctttaggtttggtccccaacagaaaatccagttaatcaacaccaatggcagctggcacataaaccgaactgccc

SEQ ID NO: 131878 - DNA, 80 bp, synthetic construct
  source 1..80: mol_type = other DNA
gtttttgtttgagagggggggggtggagtgggggggaaagtgtgccgaatgaaaaaaaaattagttcagaggggtgaggg

SEQ ID NO: 131879 - DNA, 80 bp, synthetic construct
  source 1..80: mol_type = other DNA
gcggctcggacagcgcccccctcggcgcccatcgggccacacggcagcagtaacaccaacaccaccaccaacagcagcgg

SEQ ID NO: 131880 - DNA, 80 bp, synthetic construct
  source 1..80: mol_type = other DNA
cgccttcaagatcatgtgcggggagaagccgacagccgaagacctagtaaacctcctgccttcaatactctgccctggag

SEQ ID NO: 131881 - DNA, 80 bp, synthetic construct
  source 1..80: mol_type = other DNA
atggatacgccgccgatgcagcgctctacaccccaacgcgcggggtcgcctgatactttggagttaatggacctgttgga

SEQ ID NO: 131882 - DNA, 80 bp, synthetic construct
  source 1..80: mol_type = other DNA
gacccagccagtatagccgcacgaggatacattgctaccaaggtggaattaggggaggcagcagccatctttatgacagc

SEQ ID NO: 131883 - DNA, 80 bp, synthetic construct
  source 1..80: mol_type = other DNA
gagatgacacactcaccattctcctcaaagcaactctgctagcaatctcaggggtatacccaatgtcaataccggcgacc

SEQ ID NO: 131884 - DNA, 80 bp, synthetic construct
  source 1..80: mol_type = other DNA
gtaaggcgctgatggtgagccgcgaacacgcggcgacctcgcgggccagggcggcggagcacgcggtgaacttaaccgcc

SEQ ID NO: 131885 - DNA, 80 bp, synthetic construct
  source 1..80: mol_type = other DNA
acggttcaggactgcaactgctccatatatgtgggccacataacggggcataggatggcatgggatatgatgatgaactg

SEQ ID NO: 131886 - DNA, 80 bp, synthetic construct
  source 1..80: mol_type = other DNA
cccaaacctatcaggttgcccacttgcatgcaccgacgggaagcggcaagagcactaaggtcccagcagcatatgctgcc

SEQ ID NO: 131887 - DNA, 80 bp, synthetic construct
  source 1..80: mol_type = other DNA
tcccaggaaacactccacaaagcgctcgatttcgatatgtacggggtcacctattcagtcactccacttgatctaccaca

SEQ ID NO: 131888 - DNA, 80 bp, synthetic construct
  source 1..80: mol_type = other DNA
ctagacctgacggagtctttcagcttggaggcgccgggcggtcttccttcactcctcgccaggcgtacttaacgcttcag

SEQ ID NO: 131889 - DNA, 80 bp, synthetic construct
  source 1..80: mol_type = other DNA
acccatcatgcagatccgcaacctgattgggaacgaaaaatacagagattacatggttgcccagaatagattcagcaagg

SEQ ID NO: 131890 - DNA, 80 bp, synthetic construct
  source 1..80: mol_type = other DNA
acagctgttggcctgatatgtgcactggccggagggtttgccaaggcagacatagagatggctgggcccatggctgcagt

SEQ ID NO: 131891 - DNA, 80 bp, synthetic construct
  source 1..80: mol_type = other DNA
tcacaggggggacggcgtctcacaccaccagacactttgcgtccctcttctcaagcggagcgtcccagagagtccagctt

SEQ ID NO: 131892 - DNA, 80 bp, synthetic construct
  source 1..80: mol_type = other DNA
gcaatcttatccttcttgggcccgctgatgacatgaagagtcagggctggcgtctgctagccccgatcactgcctacact

SEQ ID NO: 131893 - DNA, 80 bp, synthetic construct
  source 1..80: mol_type = other DNA
tcggagcgctgccgcaaggcgcccacggccgcgctaaggagcccctccggggtgtggagcagacacccgccgaagatgcg

SEQ ID NO: 131894 - DNA, 80 bp, synthetic construct
  source 1..80: mol_type = other DNA
gtccgctcccttagcaggaaagccctcactcacatcgagggcgtgtggcaggacttgcttgaggacagcgaaaccccaat

SEQ ID NO: 131895 - DNA, 80 bp, synthetic construct
  source 1..80: mol_type = other DNA
ggatgacataggtatgggagtgacttaccttgccctactagcagctttcaaagttagaccaacttttgcagctggactac

SEQ ID NO: 131896 - DNA, 80 bp, synthetic construct
  source 1..80: mol_type = other DNA
cgattgttggtgcaacacgacgtcaacttgggttgtgtacggaacctgccatcacaaaaaaggtgaagcacggagatcta

SEQ ID NO: 131897 - DNA, 80 bp, synthetic construct
  source 1..80: mol_type = other DNA
cctgggaaacagcacgccacactccagtgaattcatggttgggcaacatcatcatgttcgcgcctaccatttgggtgcgc

SEQ ID NO: 131898 - DNA, 80 bp, synthetic construct
  source 1..80: mol_type = other DNA
gaacaccctgacatgctacctgaaggcacaagcagcttgcagagcagcagggctcaaaaaatttgacatgttggtctgcg

SEQ ID NO: 131899 - DNA, 80 bp, synthetic construct
  source 1..80: mol_type = other DNA
tgtactcgagcgttccggcatcttgccggctatgagttgtgctttgccctccgattttgtccccctctgctaccgcgaat

SEQ ID NO: 131900 - DNA, 80 bp, synthetic construct
  source 1..80: mol_type = other DNA
aacataagtggttcgtctcacgacagaccgtattgctggcattatccccctaagccctgtgagatcttgcgcgcagcaac

SEQ ID NO: 131901 - DNA, 80 bp, synthetic construct
  source 1..80: mol_type = other DNA
gtttgagaagtgctacctggccgtgtctaccgagggcaatgctagagtgagacattgctcttccatggagacgggctgct

SEQ ID NO: 131902 - DNA, 80 bp, synthetic construct
  source 1..80: mol_type = other DNA
agaggacactaaagggagagcttaacttgtatgtgccttaccgccagagaacgcgcgaagatggccaccccctcgatgat

SEQ ID NO: 131903 - DNA, 80 bp, synthetic construct
  source 1..80: mol_type = other DNA
tatgaggcaagcttatggcgtggagccgaatatccggaccggggtcaggactgtgactacaggtggtgctattacgtact

SEQ ID NO: 131904 - DNA, 80 bp, synthetic construct
  source 1..80: mol_type = other DNA
cccagtacagggacaggactatagctgagcttcttagaattctttaattatgaaatttactgtgacttttctgctgatta

SEQ ID NO: 131905 - DNA, 80 bp, synthetic construct
  source 1..80: mol_type = other DNA
ccgaactcgctgagctatccttccccaaggatttggctgcgactgacagcacctcagactctggactgccattggcgagt

SEQ ID NO: 131906 - DNA, 80 bp, synthetic construct
  source 1..80: mol_type = other DNA
tgctcttggacaacatctacaccccagaaggaataattccaacattatttggccccgaacaggaaaagagtcaagctata

SEQ ID NO: 131907 - DNA, 80 bp, synthetic construct
  source 1..80: mol_type = other DNA
acgaggcgcgactgctgaggcgactggaccaccccgcgatcctgcccctcctggacctgcatgtcgtctccggggtcacg

SEQ ID NO: 131908 - DNA, 80 bp, synthetic construct
  source 1..80: mol_type = other DNA
gaaaaaacccggagagttcggaaaggctaaagggagtagggctatctggttcatgtggctcggagctcggtacctagagt

SEQ ID NO: 131909 - DNA, 80 bp, synthetic construct
  source 1..80: mol_type = other DNA
ccgtagccgcgctgcgcaccagcgggaggttaaggtgctcgcgaatgtggtttagctcccgcagccggcgggcctcgatt

SEQ ID NO: 131910 - DNA, 80 bp, synthetic construct
  source 1..80: mol_type = other DNA
ccccaggagcgcggcgtaagcggccgcggccccgcgcaccaggtcccgtgccgactcggccgtggccggcacggtgaacg

SEQ ID NO: 131911 - DNA, 80 bp, synthetic construct
  source 1..80: mol_type = other DNA
gagcagcagctccgcctgcccagcgggagacagctggtggtggcgcacgacgcgttctgcggcgcaggcctcggtcaggg

SEQ ID NO: 131912 - DNA, 80 bp, synthetic construct
  source 1..80: mol_type = other DNA
agacgaggagctggaggacaaaccccccaaggacgaggaggaagaaatcatcgccagcgctgcggcgccgtcttccaaag

SEQ ID NO: 131913 - DNA, 80 bp, synthetic construct
  source 1..80: mol_type = other DNA
gctgaacctgctggacaaacagcagtttgagctgtataaacggacagacattgtggaggtggaccgtgacacagctcgcc

SEQ ID NO: 131914 - DNA, 80 bp, synthetic construct
  source 1..80: mol_type = other DNA
agctcgtgccgagcttaccgggggttcccttcatctcgtgccaacggggttaccgtggcgtttggaaaggtgatggtatt

SEQ ID NO: 131915 - DNA, 80 bp, synthetic construct
  source 1..80: mol_type = other DNA
acggcgtgaactacgcaacagggaatctgcccggttgctctttctctatcttcctcttggctttgctgtcttgtttgacc

SEQ ID NO: 131916 - DNA, 80 bp, synthetic construct
  source 1..80: mol_type = other DNA
ccctcgatgaaagtcaggagcagcgccccgaggacgcccggcccgtggtcagcgacgagatgctcgcgcgctggctcggg

SEQ ID NO: 131917 - DNA, 80 bp, synthetic construct
  source 1..80: mol_type = other DNA
ctggagccaatgacactgatttcttcctgctcaacaatacaagaccaccactgggcaattggtttggatgctcgtggatg

SEQ ID NO: 131918 - DNA, 80 bp, synthetic construct
  source 1..80: mol_type = other DNA
ctacaattgaaccagtggcagcggattccaaagggcgcagttacaacttgcttccagacaaaaaaaatactgagtatcgc

SEQ ID NO: 131919 - DNA, 80 bp, synthetic construct
  source 1..80: mol_type = other DNA
tggagtcagagttctggaagacggcgtgaactatgcgacagggaatcttcccggttgctctttctctatcttccttcttg

SEQ ID NO: 131920 - DNA, 80 bp, synthetic construct
  source 1..80: mol_type = other DNA
ctttgcgccgggcggcccaagcggaccgaccagcttccccaaatatatcgactggctgacgtgtctggggctggttccca

SEQ ID NO: 131921 - DNA, 80 bp, synthetic construct
  source 1..80: mol_type = other DNA
cgaccactctttctgccagcacggcttgctgaatttgagtaagggtgttttggaagtcatctaagtccacaaagcggtga

SEQ ID NO: 131922 - DNA, 80 bp, synthetic construct
  source 1..80: mol_type = other DNA
tgccggggatccccttcctctcgtgccaaacgggatataggggagtctgggcaggcgacggtgtgtgccacaccacttgt

SEQ ID NO: 131923 - DNA, 80 bp, synthetic construct
  source 1..80: mol_type = other DNA
gcatacaatgaggaaatgctccggaagagaaaactaacggtgctagaactgcacccaggagctggaaagaccagaaaggt

SEQ ID NO: 131924 - DNA, 80 bp, synthetic construct
  source 1..80: mol_type = other DNA
gcctaaaaatgtctttcagtagcaagctgattgccaggggcaggcccttggtgtaagtgtttacaaagcggttaagctgg

SEQ ID NO: 131925 - DNA, 80 bp, synthetic construct
  source 1..80: mol_type = other DNA
cacgcgcgataacccgaacgcgctatccggacacgggtaaaacccggccggatgccccagggctagggctgagcgcacgg

SEQ ID NO: 131926 - DNA, 80 bp, synthetic construct
  source 1..80: mol_type = other DNA
aatttgcaaggtttgtggggggttcgtgctccagtaggcgatcgttcaactctgtccagtttactaacaccaaactcgcg

SEQ ID NO: 131927 - DNA, 80 bp, synthetic construct
  source 1..80: mol_type = other DNA
agtcaacacactcatgaaataaaggaaaatagaagatcaaacaaagtgagaagtcaggccagattaagccatagtacgga

SEQ ID NO: 131928 - DNA, 80 bp, synthetic construct
  source 1..80: mol_type = other DNA
tatgctataggatcccaacttccctgcgagcccgagcccaatgtaatggtactcacgtccatgctcactgaccctgacca

SEQ ID NO: 131929 - DNA, 80 bp, synthetic construct
  source 1..80: mol_type = other DNA
atcgagactcgcactgccccccaagacgcagtttcccgcagccaacgtcggggccgcacgggccgtggtagacctggcac

SEQ ID NO: 131930 - DNA, 80 bp, synthetic construct
  source 1..80: mol_type = other DNA
aacgtctccgtagcccacgatggaacaggacagagatattactacctcacacgtgacccaaccacacccattgctcgagc

SEQ ID NO: 131931 - DNA, 80 bp, synthetic construct
  source 1..80: mol_type = other DNA
aagaaggtgacttttgaccgagttcagctcgtggaccaacattactatgacactttacaggagattaagctccgggcctc

SEQ ID NO: 131932 - DNA, 80 bp, synthetic construct
  source 1..80: mol_type = other DNA
acccctcgcacatcaccgctgagacggcacgacgccgactcgacaggggctccccaccatcgcttgctagttcatcagca

SEQ ID NO: 131933 - DNA, 80 bp, synthetic construct
  source 1..80: mol_type = other DNA
aggtgggacaggaatcgtggactgatacagatggcactgaagaaaaatacggaggcagagtacttaaaccggacactaag

SEQ ID NO: 131934 - DNA, 80 bp, synthetic construct
  source 1..80: mol_type = other DNA
catggatctgaacctcccttggagcagttctgcttggcactaattggagaaatagatggaccataagcttgatcattgtg

SEQ ID NO: 131935 - DNA, 80 bp, synthetic construct
  source 1..80: mol_type = other DNA
ggccccatctatatattgcagcatagcctcctgcgcgtgccgtattacgtgcgtgcgcatgcgctcgtgcgcttgtgtat

SEQ ID NO: 131936 - DNA, 80 bp, synthetic construct
  source 1..80: mol_type = other DNA
gcggtcggcagcatcgggctgggtagggtcctcattgacatcttggctggatatggtgcaggagtggctggagcgctcgt

SEQ ID NO: 131937 - DNA, 80 bp, synthetic construct
  source 1..80: mol_type = other DNA
tgatttgaccatagagctgtataaagtggtgagatatgatgagttaaaggctcgttgtcgcccctgtgagtgtggagcca

SEQ ID NO: 131938 - DNA, 80 bp, synthetic construct
  source 1..80: mol_type = other DNA
acaggtgtaagaaaattacctgatttgagttccgtggactgtgatttgcactgctatgaagacgggtttcctccgagtga

SEQ ID NO: 131939 - DNA, 80 bp, synthetic construct
  source 1..80: mol_type = other DNA
aacaaatgctatggcgcattacattcatgcttcaatatttctggccatacaaagaaagttttatactgttgatattatgg

SEQ ID NO: 131940 - DNA, 80 bp, synthetic construct
  source 1..80: mol_type = other DNA
agtcccttaatgatcctccagaaaatctacttataattattcctatagtagcgtctgtcatgatcctcaccgccatggtt

SEQ ID NO: 131941 - DNA, 80 bp, synthetic construct
  source 1..80: mol_type = other DNA
ccacacacgccccatgccaagtatcggactggagaaggaggaagaggaggagtgggccggggacggcgaacatcttgagg

SEQ ID NO: 131942 - DNA, 80 bp, synthetic construct
  source 1..80: mol_type = other DNA
cccgcagacacaggtcacggcactgtggtgttggaactgcagtacactggcacggatggaccttgcaaagttcccatctc

SEQ ID NO: 131943 - DNA, 80 bp, synthetic construct
  source 1..80: mol_type = other DNA
aaaatgaggtgaagttgactattatgacaggagacatcaaaggaatcatgcaggcaggaaaacgatctttgcggcctcag

SEQ ID NO: 131944 - DNA, 80 bp, synthetic construct
  source 1..80: mol_type = other DNA
gaggagggtggagctactactgcgcaaccctgaagcatgttcaagaagtgaaaggattcacaaagggcggaccaggccat

SEQ ID NO: 131945 - DNA, 80 bp, synthetic construct
  source 1..80: mol_type = other DNA
ccaggccaccgtgtgcgctagggccaaggccccccctccatcttgggataccatgtggaaatgcttgattcggctcaagc

SEQ ID NO: 131946 - DNA, 80 bp, synthetic construct
  source 1..80: mol_type = other DNA
aggcgccagaagttgtagatgtgttccggaacgccggccaccagcgcgaccagcacgtcgttctcgttgaaggcgacgca

SEQ ID NO: 131947 - DNA, 80 bp, synthetic construct
  source 1..80: mol_type = other DNA
cggtttggaccgtccggggagaccagagagggtcactgggaggatgaggctgtgagagcggcgcgggctcgttacgaggc

SEQ ID NO: 131948 - DNA, 80 bp, synthetic construct
  source 1..80: mol_type = other DNA
cttagggcgtcggcgacgcgcttgacggcttcctccgagagcagaagtccgtcggttacgttacagtggcccagttcgaa

SEQ ID NO: 131949 - DNA, 80 bp, synthetic construct
  source 1..80: mol_type = other DNA
ccccagctgccagggatccccttcctgtcgtgccaacgcgggtacaagggagtgtggcgcggagatggcgtcatgcacac

SEQ ID NO: 131950 - DNA, 80 bp, synthetic construct
  source 1..80: mol_type = other DNA
gtgggaaacagctcgacatactccagttaactcatggctgggcaacatcataatgtacgccccaactatctgggtacgca

SEQ ID NO: 131951 - DNA, 80 bp, synthetic construct
  source 1..80: mol_type = other DNA
atcacaggtgcaagccaggcttctcacgactgaggaagcctgcgacctgaccccgccccactcagcccgatcaaagtttg

SEQ ID NO: 131952 - DNA, 80 bp, synthetic construct
  source 1..80: mol_type = other DNA
catgcggcttcgccgatctcatggggtacattccgctcgtcggcgcccccctaggaggcgctgccagggccttggcacac

SEQ ID NO: 131953 - DNA, 80 bp, synthetic construct
  source 1..80: mol_type = other DNA
gggacttcggttctataggaggagtgtttacatctgtgggaaaattggtacatcaggtttttggaaccgcatatggggtt

SEQ ID NO: 131954 - DNA, 80 bp, synthetic construct
  source 1..80: mol_type = other DNA
ctggttcgcaatatagtgggcgggaagtacgctcagatgttgcttatccgcttgggatcgtggaccgggacgtaccttta

SEQ ID NO: 131955 - DNA, 80 bp, synthetic construct
  source 1..80: mol_type = other DNA
cggacagggtcgggccaggcccatggtctccgtgaaaaacgccgcgacgtctcccgcggtcgcgaacgtctccaggctgc

SEQ ID NO: 131956 - DNA, 80 bp, synthetic construct
  source 1..80: mol_type = other DNA
ccacaaggtcagaatgtttgtaggcggcatcgagcatcggttcaacgctgcttgcaactggactagaggggaacgctgtg

SEQ ID NO: 131957 - DNA, 80 bp, synthetic construct
  source 1..80: mol_type = other DNA
atgccgatgttgttccggtgcgccggctgggcgacagcaaggggagcctactctcccccaggcccatctcctacttgaag

SEQ ID NO: 131958 - DNA, 80 bp, synthetic construct
  source 1..80: mol_type = other DNA
gactacggagaagtcacaatggattgcgagcctcgtagtggatttaacactgaagcattttatgtgctgaccgttgggac

SEQ ID NO: 131959 - DNA, 80 bp, synthetic construct
  source 1..80: mol_type = other DNA
taccatggtgcaggctcaaggacgcttgcgggcgtcaaacatcccgcgctccaaatgtacacaaatgtggaccaagatct

SEQ ID NO: 131960 - DNA, 80 bp, synthetic construct
  source 1..80: mol_type = other DNA
caggggactggaaactcttgaagcagggtaaaaccagcagcacatggtaatccacggacagaacttacattatgataatc

SEQ ID NO: 131961 - DNA, 80 bp, synthetic construct
  source 1..80: mol_type = other DNA
tggagctggccccgacccatcatcgcgtcgtcggcccggctcgcgccgtgctgacaaacgccttgctgttgggcgtcttc

SEQ ID NO: 131962 - DNA, 80 bp, synthetic construct
  source 1..80: mol_type = other DNA
cccgaacgcgcagctgctggaagagcaccgcagttatgtggccagccggcgacgccacgtcatccacgacgccccagagt

SEQ ID NO: 131963 - DNA, 80 bp, synthetic construct
  source 1..80: mol_type = other DNA
aagaatacatccatgtcattttcatgcattgcgataggaatcatcacactctatctgggagctgtggtacaagctgacat

SEQ ID NO: 131964 - DNA, 80 bp, synthetic construct
  source 1..80: mol_type = other DNA
ataacggcggaatcggcgcgtcggagattggctcgagggtcacgaccctcgctagctagttcctcggcgagtcagctttc

SEQ ID NO: 131965 - DNA, 80 bp, synthetic construct
  source 1..80: mol_type = other DNA
cgtgacggaatcatctgggtggctgtcattctacacccacgccttgtgtttgaggtcacgaaatggttgttagcaatcct

SEQ ID NO: 131966 - DNA, 80 bp, synthetic construct
  source 1..80: mol_type = other DNA
cggtaaggctgcccctgtaaccgcctacaccatattgcagctgtggcccctcctcttgttggtgttagccctgccacgca

SEQ ID NO: 131967 - DNA, 80 bp, synthetic construct
  source 1..80: mol_type = other DNA
gccactcaaagcagagtatgacgacagggagatttctgtggccgcggagtgccataggccgccgaggcttaagtatcctc

SEQ ID NO: 131968 - DNA, 80 bp, synthetic construct
  source 1..80: mol_type = other DNA
gagcggggggaggagcgggaggaggagcgggaggaggagcggggggaggagcgggaggaggagcggggagaggagcgtgg

SEQ ID NO: 131969 - DNA, 80 bp, synthetic construct
  source 1..80: mol_type = other DNA
caaatgccggtcccggggcccccgggccgccgaacggcgtcgcgttgtcgtcctcgcagccaaaatccccaaagttaaac

SEQ ID NO: 131970 - DNA, 80 bp, synthetic construct
  source 1..80: mol_type = other DNA
gtcacatattctatcactccattggacttaccgcaaatcatccagcggttacatggtatggccgccttttcactccatgg

SEQ ID NO: 131971 - DNA, 80 bp, synthetic construct
  source 1..80: mol_type = other DNA
ctccttttcttacattacccaagaataaaaacacacacaaaacacaaattgcgtacttattgtttatttttttttttttt

SEQ ID NO: 131972 - DNA, 80 bp, synthetic construct
  source 1..80: mol_type = other DNA
gcggagcgggcgggcgagttcgcctatgggaagcggtcgcgcgaagaggagctcatctcgctgccgctggacgaaagcaa

SEQ ID NO: 131973 - DNA, 80 bp, synthetic construct
  source 1..80: mol_type = other DNA
ttgctgtcttgtctgaccaccccagcttccgcttatgaagtgcgcaacgcgtccggggcgtaccatgtcacgaacgactg

SEQ ID NO: 131974 - DNA, 80 bp, synthetic construct
  source 1..80: mol_type = other DNA
atggcgccagcggcgccggtcagttggcaccggaggtcaacgcctctgaccctcttgcaatggatcctgcagcaggctcc

SEQ ID NO: 131975 - DNA, 80 bp, synthetic construct
  source 1..80: mol_type = other DNA
gaagctgaaaggcacaacctactccatgtgtgacaaaacaaagttcaagtggaaaagagttcctgtggacagtggtcatg

SEQ ID NO: 131976 - DNA, 80 bp, synthetic construct
  source 1..80: mol_type = other DNA
tcaagttgtgttttataccgaagatgtaaaccttgaaatgccagacacgcatcttgtgtttaagcctactgttaccgacg

SEQ ID NO: 131977 - DNA, 80 bp, synthetic construct
  source 1..80: mol_type = other DNA
tgtggaactttgtgagcgggatccagtacctagcaggcctttccactctgcctggcaaccctgctgtagcgtctcttatg

SEQ ID NO: 131978 - DNA, 80 bp, synthetic construct
  source 1..80: mol_type = other DNA
tgtggaaggacctcctggaagacccgcaaacaccaatccaaactaccatcatggccaaaaatgaggtgttctgtgtcgac

SEQ ID NO: 131979 - DNA, 80 bp, synthetic construct
  source 1..80: mol_type = other DNA
aacacagcatgggacaacagtggtgaaagtcaaatacgagggcgctggagctccgtgtaaagtccccatagagataagag

SEQ ID NO: 131980 - DNA, 80 bp, synthetic construct
  source 1..80: mol_type = other DNA
agaaccagacactcgaagcggagtcggcggtcgatcgcagtgcagacgcacggggagagtatgctggctaacaagaagga

SEQ ID NO: 131981 - DNA, 80 bp, synthetic construct
  source 1..80: mol_type = other DNA
cgcccccgcgccggggcgctcttcgggaggcgagcgggacgtagtccgctgcagagggagacagagacaggaacccctcg

SEQ ID NO: 131982 - DNA, 80 bp, synthetic construct
  source 1..80: mol_type = other DNA
ttatgaccacgacagccaattggttgtgggccctcctcgggaagaagaaaagtcccagactgtgcacaagggaagagttc

SEQ ID NO: 131983 - DNA, 80 bp, synthetic construct
  source 1..80: mol_type = other DNA
ggagcaggaaagacgcgcaagatacttccccaaatcatcaaggaggccatcaacaaaagattgaggacggctgtactggc

SEQ ID NO: 131984 - DNA, 80 bp, synthetic construct
  source 1..80: mol_type = other DNA
tagctagccccaaggggccggtcacccagatgtacaccagtgcagaggaggacctcgtgggatggcctagcccccccggt

SEQ ID NO: 131985 - DNA, 80 bp, synthetic construct
  source 1..80: mol_type = other DNA
acaccatagtgacggccgccactgtttgttctgacctgtacataggggacttttgtggtgcggtgatgttagcagcacaa

SEQ ID NO: 131986 - DNA, 80 bp, synthetic construct
  source 1..80: mol_type = other DNA
tggaacatcaaatgtgggaatccatcaaagatgaactgaacacactccttaaagaaacaggagtcgacttgagtgtagtt

SEQ ID NO: 131987 - DNA, 80 bp, synthetic construct
  source 1..80: mol_type = other DNA
gcctagctggtgctgctattggcagtatagggctaggcaaggtcatcgttgacatcctcgccggatatggagccggcatc

SEQ ID NO: 131988 - DNA, 80 bp, synthetic construct
  source 1..80: mol_type = other DNA
acttcaaaaactggctatctgccaagttgttcccgaaaatgccgggcatcccctttgtctcctgccaaaaggggtatagg

SEQ ID NO: 131989 - DNA, 80 bp, synthetic construct
  source 1..80: mol_type = other DNA
aacccgcccccccccccgcgccaccctcactgcccgtcgcgcgtgtttgatgttaataaataacacataaatttggctgg

SEQ ID NO: 131990 - DNA, 80 bp, synthetic construct
  source 1..80: mol_type = other DNA
acttcaagacgtggctaaaagccaagttgctgcccctcatgccaggcatccccttcctctcatgccagaggggctataag

SEQ ID NO: 131991 - DNA, 80 bp, synthetic construct
  source 1..80: mol_type = other DNA
taataggggagaagaaagctcgcggcacccaacaggtggcgaacatcttcagccccggcccggctcagaaaatccagctc

SEQ ID NO: 131992 - DNA, 80 bp, synthetic construct
  source 1..80: mol_type = other DNA
ccaccttgggtgtcggagtgctgagcttgtttgcccttttcactttgtccccctggtacaagcactggatagcccgcctt

SEQ ID NO: 131993 - DNA, 80 bp, synthetic construct
  source 1..80: mol_type = other DNA
actcataatcaactacggcagcataaaaacaagggatcccggtatattcagaagaggcggcaattaacgtagccaggagc

SEQ ID NO: 131994 - DNA, 80 bp, synthetic construct
  source 1..80: mol_type = other DNA
aggctgtccccccgccccctcctcccccctttccatggggccacgagtgctgcgcccgtcgcgatgccagggtcgtcgcc

SEQ ID NO: 131995 - DNA, 80 bp, synthetic construct
  source 1..80: mol_type = other DNA
agtcaagaagattttgacatagacctagcattctttgatactccgggaggaactttaacaggtggtggaacggaatacaa

SEQ ID NO: 131996 - DNA, 80 bp, synthetic construct
  source 1..80: mol_type = other DNA
gtctcaattgccctgcgaccctgagccagacgtgatggtgctcacctccatgctaactgacccagaccacatcaccgcgg

SEQ ID NO: 131997 - DNA, 80 bp, synthetic construct
  source 1..80: mol_type = other DNA
agacgacgacgttctttcgttaatattacgggacgccgcaaacgcgtaaagacagattcaagactaacatttatcccaac

SEQ ID NO: 131998 - DNA, 80 bp, synthetic construct
  source 1..80: mol_type = other DNA
gcaacccaatcgaaggtctcccgccccggaatcccccattgccattttacccaagtagccttattcatagatgtaaacgt

SEQ ID NO: 131999 - DNA, 80 bp, synthetic construct
  source 1..80: mol_type = other DNA
tccgtcggcgcctgggatcggataaatccgatctcgatctcgaccgcctggcggaacagcccgtacacgcggtcgtgcgg

SEQ ID NO: 132000 - DNA, 80 bp, synthetic construct
  source 1..80: mol_type = other DNA
ggtcagccctctgcgccaacatgtggtatggcacctttcccatcaatgaatacaccaccgggccgagcacgcccgtccct

SEQ ID NO: 132001 - DNA, 80 bp, synthetic construct
  source 1..80: mol_type = other DNA
gtgggaacctcctgtttctgggccccgctgatgacgtcaagggcacaggatggcgtctccttgctccgatcacggcgtat

SEQ ID NO: 132002 - DNA, 80 bp, synthetic construct
  source 1..80: mol_type = other DNA
aattgggccaaggtagccttggtccttttcctctttgctggggtggacgcctccacgagcatcaccggaggcaccgtggc

SEQ ID NO: 132003 - DNA, 80 bp, synthetic construct
  source 1..80: mol_type = other DNA
agatggaaaaaagacagggcggtcatcgactcccttccgtagctcgggaggtaaagtcgcaagggtgcggcggcgtggaa

SEQ ID NO: 132004 - DNA, 80 bp, synthetic construct
  source 1..80: mol_type = other DNA
gcttcccaggggtacaaagtcctggtcctcaatccatcagtggcagccacattggcttttggtgcatacatgagcaaagc

SEQ ID NO: 132005 - DNA, 80 bp, synthetic construct
  source 1..80: mol_type = other DNA
aatcaccctgacgcacccagtcaccaagtacatcatgacatgcatgtcggctgacctggaagtcgtcacgagtacctggg

SEQ ID NO: 132006 - DNA, 80 bp, synthetic construct
  source 1..80: mol_type = other DNA
tcaacgaagattgttccactccatgcgctggatcttggttgtgggacgtctgggactgggtttgcaccgtactgagtgac

SEQ ID NO: 132007 - DNA, 80 bp, synthetic construct
  source 1..80: mol_type = other DNA
gcttgtatttaatgcgcgagggggctactgcgtcgtcggctctggacatgacggcacgtaacatggaaccgtcgctatac

SEQ ID NO: 132008 - DNA, 80 bp, synthetic construct
  source 1..80: mol_type = other DNA
gatccagaaaaaggtgttcgttcttggactcttctaacaaccccagacgtgacaggcggttccgagcaggtctattggtc

SEQ ID NO: 132009 - DNA, 80 bp, synthetic construct
  source 1..80: mol_type = other DNA
gctgtcagctcggcctggcctaagcttgagcagttttggcagaaacacctgtggaactttgttagcgggatacaatatct

SEQ ID NO: 132010 - DNA, 80 bp, synthetic construct
  source 1..80: mol_type = other DNA
tcctatcacctggagctctcgtggtgggcgtcgtgtgcgcagcgatactgcgccgcaacgttggtcccactgaggtggct

SEQ ID NO: 132011 - DNA, 80 bp, synthetic construct
  source 1..80: mol_type = other DNA
taccaatgaattaataaaatcacttaccgaaaatctgaaaatatatcgtggtctccgtgtactcttataagttttccctc

SEQ ID NO: 132012 - DNA, 80 bp, synthetic construct
  source 1..80: mol_type = other DNA
cgctctaagaagacccctatggggttttcctatgacaccagatgttttgactctacagtcacagagcgcgacatacgagc

SEQ ID NO: 132013 - DNA, 80 bp, synthetic construct
  source 1..80: mol_type = other DNA
ttgaggaggagatcttccagtgctgtaagctggatcccacagcccgcaaagctatatcttcactcactgagcggctgtac

SEQ ID NO: 132014 - DNA, 80 bp, synthetic construct
  source 1..80: mol_type = other DNA
gcggtcgaaaaagacacctatggggttctcatatgacactaggtgttttgattcaacagtgactgagcgcgacattcgga

SEQ ID NO: 132015 - DNA, 80 bp, synthetic construct
  source 1..80: mol_type = other DNA
atattcagatccacaggcattgaaagatttcaaggaattcgccgcagggcggaagtctaccacactcaacctaattgcgg

SEQ ID NO: 132016 - DNA, 80 bp, synthetic construct
  source 1..80: mol_type = other DNA
ataaacttgcaggctaatctgtggcgaagtttcttgtactcaaatgtgggcttgtacttacctgacagcttaaaatacac

SEQ ID NO: 132017 - DNA, 80 bp, synthetic construct
  source 1..80: mol_type = other DNA
gcgcggatcgcctgttgggccttatccacatgaagccactgttttccgccccaccccccgacgccagctttccgctgagc

SEQ ID NO: 132018 - DNA, 80 bp, synthetic construct
  source 1..80: mol_type = other DNA
cggatggcggatgctctggaggcgcttatgacattattatatgtgatgagtgccattccacagatcctaccacggtcctt

SEQ ID NO: 132019 - DNA, 80 bp, synthetic construct
  source 1..80: mol_type = other DNA
catgccccaggcctcgctctgacagcgacgcaggtctttgtagtagtcttgcatcagtctctccaccggaacctctgctt

SEQ ID NO: 132020 - DNA, 80 bp, synthetic construct
  source 1..80: mol_type = other DNA
gatggccccccgcgcctccagggccagccgagtcgcctttacataccccgcggcgctatcggccagcgccgcgaggaagg

SEQ ID NO: 132021 - DNA, 80 bp, synthetic construct
  source 1..80: mol_type = other DNA
gcggggtgatgctcgcggcccaggtgttcatcgtctcgccgcagtaccactggtttgtgcaagaatgcaattgctccatc

SEQ ID NO: 132022 - DNA, 80 bp, synthetic construct
  source 1..80: mol_type = other DNA
cctcattgctcaggagcaactccataaggctctggattgcgaaatctacggagcctgctactccattgagccattagacc

SEQ ID NO: 132023 - DNA, 80 bp, synthetic construct
  source 1..80: mol_type = other DNA
gatggccctgtacgacgtggtcagcaagctccctctggccgtgatgggaagctcctacgggttccagtactcaccaggac

SEQ ID NO: 132024 - DNA, 80 bp, synthetic construct
  source 1..80: mol_type = other DNA
tactgccctgaactgtaatgattccttaagcacggggtttatagctgggttgatttactatcataagttcaactctactg

SEQ ID NO: 132025 - DNA, 80 bp, synthetic construct
  source 1..80: mol_type = other DNA
ccgaggcggcgcttgagaacctgattgtcctcaacgccgcctcggccgccagcatgcagggcatgggctggtgtttatta

SEQ ID NO: 132026 - DNA, 80 bp, synthetic construct
  source 1..80: mol_type = other DNA
cggagagtttcgcctcagaggggaacaaaggaagacctttgtagaattaatgaggagaggagaccttccggtgtggctga

SEQ ID NO: 132027 - DNA, 80 bp, synthetic construct
  source 1..80: mol_type = other DNA
ctggttgaagttcttggaagaatgccggagcatttcatgggaaagacctgggaagccttggacacaatgtatgtggtagc

SEQ ID NO: 132028 - DNA, 80 bp, synthetic construct
  source 1..80: mol_type = other DNA
agagccgtccacgccgacatgggttattggatagaaagcgcactcaatgacacatggaagattgagaaagcctcctttat

SEQ ID NO: 132029 - DNA, 80 bp, synthetic construct
  source 1..80: mol_type = other DNA
acacctcgatgcatggtccactatccataccggctttggcattatccatgcacattcaattatacactgttcaaggtgag

SEQ ID NO: 132030 - DNA, 80 bp, synthetic construct
  source 1..80: mol_type = other DNA
acatttgttcgcgttgagattcatacttctgggcttgagcgcacggtttcattggtttattccatttggagtactggggt

SEQ ID NO: 132031 - DNA, 80 bp, synthetic construct
  source 1..80: mol_type = other DNA
ttacaagcgcgggcggacctctgcccccgccgccgtgcgcaccaccgtcgacgatgtcattgactcggtagtcgctgacg

SEQ ID NO: 132032 - DNA, 80 bp, synthetic construct
  source 1..80: mol_type = other DNA
atggtcagccgaaccgggaaaaccttttcacccacccaccgctgtattttgctacataactgaacaataaaatcattgca

SEQ ID NO: 132033 - DNA, 80 bp, synthetic construct
  source 1..80: mol_type = other DNA
cacgcagtggatgaaccgcctcatagcgttcgcctcaagggggaaccacgtgtcccctacacattacatccctgagacgg

SEQ ID NO: 132034 - DNA, 80 bp, synthetic construct
  source 1..80: mol_type = other DNA
ctggcctgatacatctccaccagaacatcgtggacgtgcagtacctctatgggttgagctcggcagtcacatcctgggtc

SEQ ID NO: 132035 - DNA, 80 bp, synthetic construct
  source 1..80: mol_type = other DNA
cgccagcgtgcacctctcgaagtagtgcttgtaccggaatttgctgtagatgcgcgacccccgcgcctgcgccgcgtcgg

SEQ ID NO: 132036 - DNA, 80 bp, synthetic construct
  source 1..80: mol_type = other DNA
tcgacccaaacatccggtccggtgttagaaccatcaccacgggtgcgccaattacatactccacatatgggaaattccta

SEQ ID NO: 132037 - DNA, 80 bp, synthetic construct
  source 1..80: mol_type = other DNA
cagttttggtaacacaatcacttgttacatcaaggccacagcggccgcgagagctgcaggcctccggaacccggactttc

SEQ ID NO: 132038 - DNA, 80 bp, synthetic construct
  source 1..80: mol_type = other DNA
acttgtacaaactgcacggtggtcacgtctcctgtagagtgaaactgtcagccctcactctcaaaggaacatcctacaag

SEQ ID NO: 132039 - DNA, 80 bp, synthetic construct
  source 1..80: mol_type = other DNA
aaatattcatggaaaagctggggaaaagctaaaatcataggagcagacatacaaaataccaccttcatcatcgacggccc

SEQ ID NO: 132040 - DNA, 80 bp, synthetic construct
  source 1..80: mol_type = other DNA
aaaaagagtaatggtaagaatgcaattgtatcaaatgtgtatctagaaggaagagcataccagccagttgcgattaccat

SEQ ID NO: 132041 - DNA, 80 bp, synthetic construct
  source 1..80: mol_type = other DNA
tttggaggcgcgaggtggccgtgacggtgtcatatggatcatgaccatgctccggccgagtctggtgtttgacataacca

SEQ ID NO: 132042 - DNA, 80 bp, synthetic construct
  source 1..80: mol_type = other DNA
tgtgccaataccggccccaaactacaaaaaagcactgtggagggtctcggctgaggaatacattgagatcacccagttcc

SEQ ID NO: 132043 - DNA, 80 bp, synthetic construct
  source 1..80: mol_type = other DNA
agagacaactaaattcgctagataggaaggagtttgaagagtataaaagaagtggaatactagaagtggacaggactgaa

SEQ ID NO: 132044 - DNA, 80 bp, synthetic construct
  source 1..80: mol_type = other DNA
caactgttacccaaactttcctggcaacgtgtatcaatggggtgtgctggaccgtctaccacggagccggaacgaagacc

SEQ ID NO: 132045 - DNA, 80 bp, synthetic construct
  source 1..80: mol_type = other DNA
aaaaggaggacctggacatgaggaacctatcccaatggcgacctatggatggaacctagtaaagctacactctggaaaag

SEQ ID NO: 132046 - DNA, 80 bp, synthetic construct
  source 1..80: mol_type = other DNA
ccacaaacaccaattcctacaaccatcatggcaaaaaacgaggttttttgcgtggatgcttcgaagggggggcgtaagcc

SEQ ID NO: 132047 - DNA, 80 bp, synthetic construct
  source 1..80: mol_type = other DNA
cagagcaggatgccccggttactccgagaccggattgcgggcattccgaatcgtgtacggacttaccagggggcagtatt

SEQ ID NO: 132048 - DNA, 80 bp, synthetic construct
  source 1..80: mol_type = other DNA
ggtccccgtcagcatgagcaagcgcaagttcaaagaagagctgctggaggcccttgtgcctgaaatctatggccctgccg

SEQ ID NO: 132049 - DNA, 80 bp, synthetic construct
  source 1..80: mol_type = other DNA
tccgccgccgcttcagccgctgcagccaccgcccgcgggattgtgactgactttgctttcctgagcccgcttgcaagcag

SEQ ID NO: 132050 - DNA, 80 bp, synthetic construct
  source 1..80: mol_type = other DNA
actggccgcaggaactgaccacgtggttcaggagcatgggcgtaaagacgggctccgagcgcgccccggagccgtccatg

SEQ ID NO: 132051 - DNA, 80 bp, synthetic construct
  source 1..80: mol_type = other DNA
ggttataagatatgatgatactcgtcaccgttgtcgacagtgtgagtgtggcagcagtcatctggaactccgccctgttt

SEQ ID NO: 132052 - DNA, 80 bp, synthetic construct
  source 1..80: mol_type = other DNA
ttggttgtgcagccccaaaatggaagatgtactatagatggtctcttacagggcaccacacagcttgtgtcttgtaatgt

SEQ ID NO: 132053 - DNA, 80 bp, synthetic construct
  source 1..80: mol_type = other DNA
aggtgggcgcggacgaggcgtcggcgggcctcacaatgggcggcgatgccctacgagtgccctttttagatttcgcgacc

SEQ ID NO: 132054 - DNA, 80 bp, synthetic construct
  source 1..80: mol_type = other DNA
ctatacaaaacctagaaatcaaactaagagaatccagccatatactactaaaggaactacaaaatcaaccttaggtaatc

SEQ ID NO: 132055 - DNA, 80 bp, synthetic construct
  source 1..80: mol_type = other DNA
acctgtcactgttaatgcaaacaacgaactttctctagccattgaacgcccgctagctctatccagtaacagagcagtga

SEQ ID NO: 132056 - DNA, 80 bp, synthetic construct
  source 1..80: mol_type = other DNA
ggtggtggtgctgcctcgccttcctatgctgtgcctggtacatcaagggccggcttgtccccgctgccacctacgggtta

SEQ ID NO: 132057 - DNA, 80 bp, synthetic construct
  source 1..80: mol_type = other DNA
catttaacaattctacagtttatagctccgagcaacccgcgtctaaggtttgaattaaaccccgcctttgatttttttgt

SEQ ID NO: 132058 - DNA, 80 bp, synthetic construct
  source 1..80: mol_type = other DNA
acacctggggagcaaatgagacagacgtgttcatgctgtacagcccccgcccccctaaagggtggtggtttgggtgtacg

SEQ ID NO: 132059 - DNA, 80 bp, synthetic construct
  source 1..80: mol_type = other DNA
caaattatgctctttaacaaagcgaatagtatccacacaggtcgcatgggccaaaccaagccatccaatacaggcagctg

SEQ ID NO: 132060 - DNA, 80 bp, synthetic construct
  source 1..80: mol_type = other DNA
gtcacacggtaccttgtgaagtgggaatgggtgatcctcctcttcctgttgttggcagacgccaggatctgtgcatgcct

SEQ ID NO: 132061 - DNA, 80 bp, synthetic construct
  source 1..80: mol_type = other DNA
aattggacatttacatgcagaccagcatggactctgaagcccgaaccgcagtgaaggccctcacggagaggctttactgc

SEQ ID NO: 132062 - DNA, 80 bp, synthetic construct
  source 1..80: mol_type = other DNA
ccatccctgaaggcaacgtgcacacaacatcctgaccatccggacgctgagctcttggaggcaaacctcctgtggaggca

SEQ ID NO: 132063 - DNA, 80 bp, synthetic construct
  source 1..80: mol_type = other DNA
gggccggcgtggcaggagcccttgtggctttcaagatcatgagcggcgaggccccctccatggaggacgtcgtcaacctg

SEQ ID NO: 132064 - DNA, 80 bp, synthetic construct
  source 1..80: mol_type = other DNA
catgtatatggccctgatcgctgctttctcaatcagaccagggctgctcatcggctttggattgaggacgctgtggagcc

SEQ ID NO: 132065 - DNA, 80 bp, synthetic construct
  source 1..80: mol_type = other DNA
ccttcggtgttatgaggaaggttttcctcccagcgattcagaggacgaacggggtgagcagagcatggctataatctcag

SEQ ID NO: 132066 - DNA, 80 bp, synthetic construct
  source 1..80: mol_type = other DNA
gtccaaccgttagatctacctgaaatcattcaaagactccacggcctcagcgcgttctcgctccatagttactctccagg

SEQ ID NO: 132067 - DNA, 80 bp, synthetic construct
  source 1..80: mol_type = other DNA
tgaagaagacataaaattggactttgactactgcccaggaacaaccgtcacagtgagtgaacattgtggaaaacgaggtc

SEQ ID NO: 132068 - DNA, 80 bp, synthetic construct
  source 1..80: mol_type = other DNA
gaagcgctcctccagacgtggatccctcctctcaaccctcgtgggggtcgggacgggttcatctggtgctcgcgctcgtg

SEQ ID NO: 132069 - DNA, 80 bp, synthetic construct
  source 1..80: mol_type = other DNA
atatccagaatatgacgacagggaaccatcagtgccagccgagtgccatcggccgaataggccgaaatacccaccggcac

SEQ ID NO: 132070 - DNA, 80 bp, synthetic construct
  source 1..80: mol_type = other DNA
ctctggcttcaataagcgctcaggctgggtctttgttcaacctaccccgcggactccccttcacggagctggactttaca

SEQ ID NO: 132071 - DNA, 80 bp, synthetic construct
  source 1..80: mol_type = other DNA
gactcccatcggcaatttctatgacaccagatactcttcgaccgaacgccggtgtctgttgaccagtcagtagaaaagaa

SEQ ID NO: 132072 - DNA, 80 bp, synthetic construct
  source 1..80: mol_type = other DNA
cgggggcgccggggttgtgcgacagtctcttgagctgggtcacctcgggggggggactggacgtgggcccagcctcgggg

SEQ ID NO: 132073 - DNA, 80 bp, synthetic construct
  source 1..80: mol_type = other DNA
ttactttgtaagggctcatgcgctagttaagatctgcagcctgttgcgaggggtcatgtatggcaagcactgccaaatgg

SEQ ID NO: 132074 - DNA, 80 bp, synthetic construct
  source 1..80: mol_type = other DNA
actgagcccctgggagcgcgtgatggtcatcgcgagtttggagctgatgccgtagtcggcgttgatggccatggccagct

SEQ ID NO: 132075 - DNA, 80 bp, synthetic construct
  source 1..80: mol_type = other DNA
cgcccaccgcgggccaggcccccaggcacgcggcatgggtggccgcggcgccccgcaccaggtcacgcgccgactcggcg

SEQ ID NO: 132076 - DNA, 80 bp, synthetic construct
  source 1..80: mol_type = other DNA
tccgcgctaagctcattgcccaaggagggaaagccagaatatgtggcgtgtacctcttcaattgggcagtgaaaaccaag

SEQ ID NO: 132077 - DNA, 80 bp, synthetic construct
  source 1..80: mol_type = other DNA
gacgctgctagcgtagaccccgtgtcgcctgatgatgaggacaacgcttcggataccgaatcatacggttccatgccacc

SEQ ID NO: 132078 - DNA, 80 bp, synthetic construct
  source 1..80: mol_type = other DNA
ggcatatcttaacaccccagggttgcccgtgtgccaggaccacttggagttttgggagagcgtcttcaccggcctcaccc

SEQ ID NO: 132079 - DNA, 80 bp, synthetic construct
  source 1..80: mol_type = other DNA
tctgcagcctagctggcctggtggctgccaacgagatgggattcttggaaaagaccaaggcagacttatctgctgtgcta

SEQ ID NO: 132080 - DNA, 80 bp, synthetic construct
  source 1..80: mol_type = other DNA
ccacgacgccctttcgaccctcacgaccagacccgtctgcgggtcccagcccaggcgcagcgggacgaagagggccaccg

SEQ ID NO: 132081 - DNA, 80 bp, synthetic construct
  source 1..80: mol_type = other DNA
tgcttcttgacaacatttacctccaggatggcctcatagcctcgctctatcggcctgaggccgacaaggtagccgccatt

SEQ ID NO: 132082 - DNA, 80 bp, synthetic construct
  source 1..80: mol_type = other DNA
tggttaaacctctggtctcatacgggtcggtgatgtcgggcgtcgggggagagggagttccctctgcgcttgcgattcta

SEQ ID NO: 132083 - DNA, 80 bp, synthetic construct
  source 1..80: mol_type = other DNA
catgcccgctttgtcaacgggccttatacacctccaccagaatatcgtggacgtacaatacctgtatggtgtggggtccg

SEQ ID NO: 132084 - DNA, 80 bp, synthetic construct
  source 1..80: mol_type = other DNA
tggcgtccgggctctggaagacgggataaattatgcaacagggaatcttcctggttgctccttttctatcttcctcctgg

SEQ ID NO: 132085 - DNA, 80 bp, synthetic construct
  source 1..80: mol_type = other DNA
cttcacaaacatagccgtccaactggtaaggttaatggaggcagaaggagttgttggcccgcaggacgtagaacagctcc

SEQ ID NO: 132086 - DNA, 80 bp, synthetic construct
  source 1..80: mol_type = other DNA
accggtccccgggtcctgaacctgaaagagagttccacagaatcaatgtctgcatcgttaacggcggcctgcctgaggat

SEQ ID NO: 132087 - DNA, 80 bp, synthetic construct
  source 1..80: mol_type = other DNA
gctgccttgtctatcattcagagggggcggtggcaggattggaagaaccatttttattccaagcggtctcgaaggacgat

SEQ ID NO: 132088 - DNA, 80 bp, synthetic construct
  source 1..80: mol_type = other DNA
gaacatgtcttttagagacctgggaagagtgatggttatggtgggcgctaccatgacggatgacataggtatgggagtga

SEQ ID NO: 132089 - DNA, 80 bp, synthetic construct
  source 1..80: mol_type = other DNA
tggacttgcgggcgcagccataggaagcattggcttgggcaaagtcattgttgacatcttggcaggctatggagcgggcg

SEQ ID NO: 132090 - DNA, 80 bp, synthetic construct
  source 1..80: mol_type = other DNA
ttttaggattcacagtgcaggctgatatgggatgtgtggtgtcatggaacagcaaagagttaaagtgtggcagcggagtg

SEQ ID NO: 132091 - DNA, 80 bp, synthetic construct
  source 1..80: mol_type = other DNA
cctggtgaagggcacagcctcgattaagcataatgtggtaaagggctgcacggatgagcgcatgtacaacatgctgacct

SEQ ID NO: 132092 - DNA, 80 bp, synthetic construct
  source 1..80: mol_type = other DNA
tcgggcagggcagggtgacccctgcccggacaagctcggcggccgccgccgggtcgttgcgcaccgcggatatctcctcc

SEQ ID NO: 132093 - DNA, 80 bp, synthetic construct
  source 1..80: mol_type = other DNA
tggtccccggccgtcccttcggcgtgcaacaggcccccgaacctgccctcgtggcccgcgaggctttcccgcgcgccggt

SEQ ID NO: 132094 - DNA, 80 bp, synthetic construct
  source 1..80: mol_type = other DNA
gatccttcccgcccggtgcagtatgaaggcggcggagccgacaccacggccaccgatattatttgcccgatgtacgcgcg

SEQ ID NO: 132095 - DNA, 80 bp, synthetic construct
  source 1..80: mol_type = other DNA
tactacgccggcacgttggcccgggcgagggggcagtgcagtggatgaaccgattgatagccttcgcctcccggtggaac

SEQ ID NO: 132096 - DNA, 80 bp, synthetic construct
  source 1..80: mol_type = other DNA
ggggaagtcaagtcctgcacgtggccggaaacacacactctatggggtgatggagttgttgaaagtgatttgatcatacc

SEQ ID NO: 132097 - DNA, 80 bp, synthetic construct
  source 1..80: mol_type = other DNA
gttgcacagctacgtaattggctctcagctcccctgtgagccggaaccagatgtgactgtggtaacatccatgctgcggg

SEQ ID NO: 132098 - DNA, 80 bp, synthetic construct
  source 1..80: mol_type = other DNA
gcgggtatttcgggggctctcgttgctttcaagatcatgtctggcgagaagccctccgtggaggacgtcgtcaacctgct

SEQ ID NO: 132099 - DNA, 80 bp, synthetic construct
  source 1..80: mol_type = other DNA
tgggccaaggtcgctatcatcatggttatgttttcaggggtcgatgccactacatataccaccggtggcgcagtagctca

SEQ ID NO: 132100 - DNA, 80 bp, synthetic construct
  source 1..80: mol_type = other DNA
gcacatcaatagcacggccttgaattgcaatgaaagccttaacaccggctggttagcagggctcttctatcaacacaaat

SEQ ID NO: 132101 - DNA, 80 bp, synthetic construct
  source 1..80: mol_type = other DNA
acacactttcagttcaaatgataatattgccttaaatagtattgctactccgtatgatcctttaacgttgtggacaactc

SEQ ID NO: 132102 - DNA, 80 bp, synthetic construct
  source 1..80: mol_type = other DNA
cgcctcgccggcattggactacgcaggactgcaattgttccatctactcaggccatataaccggccaccgtatggcgtgg

SEQ ID NO: 132103 - DNA, 80 bp, synthetic construct
  source 1..80: mol_type = other DNA
ccccctggatcagtcaccgtcccccatccaaacatttcagaggtcgcactgcccaccactggggaaatccccttctacgg

SEQ ID NO: 132104 - DNA, 80 bp, synthetic construct
  source 1..80: mol_type = other DNA
gagccgggggatcccgatctcagcgacgggtcttggtccaccgtgagtgaagaggctagtgaggatgtcgtctgctgctc

SEQ ID NO: 132105 - DNA, 80 bp, synthetic construct
  source 1..80: mol_type = other DNA
cgctaaggactgccactatgtggtaggggccacagctgacaacctgaagtgcccctgtcaagtgccagcccctgagtttt

SEQ ID NO: 132106 - DNA, 80 bp, synthetic construct
  source 1..80: mol_type = other DNA
cgcgaggctggggatgggcccttgtctttgtatgctgtgcctggtacatcaaaggccgcgtggtccctgccaccacttat

SEQ ID NO: 132107 - DNA, 80 bp, synthetic construct
  source 1..80: mol_type = other DNA
gctggtgaagcaactcgcggggggcaagtacgtccaggtagcactgatcacccttggcaagtggacaggcacatacatct

SEQ ID NO: 132108 - DNA, 80 bp, synthetic construct
  source 1..80: mol_type = other DNA
aaagctcacggtatagacccaaacatcaggacgggtgttaggactataaccactggaggcgctatcacatattctacata

SEQ ID NO: 132109 - DNA, 80 bp, synthetic construct
  source 1..80: mol_type = other DNA
tcgagggggagccgggcgaccctgatttgactgaggactcgtggtctaccgtcagcagcagtgaggacgtcgtgtgttgc

SEQ ID NO: 132110 - DNA, 80 bp, synthetic construct
  source 1..80: mol_type = other DNA
ctgggcccacgcgggcctacgagaccttgcggtggcagttgagcccgtcgtcttctctgacatggagaccaagatcatca

SEQ ID NO: 132111 - DNA, 80 bp, synthetic construct
  source 1..80: mol_type = other DNA
ggctccaatgtgtccgcggcgctagctgcgctagcggaaaaatcattcccgaccccaaaatcgcaggaagagaatagctc

SEQ ID NO: 132112 - DNA, 80 bp, synthetic construct
  source 1..80: mol_type = other DNA
agcctcgctcattactcctgtgcctactcctacttgccgtaggggtaggcatcttcttattgccagcccgataggctggt

SEQ ID NO: 132113 - DNA, 80 bp, synthetic construct
  source 1..80: mol_type = other DNA
cgccattgatattggtaggcaagagctaaggtgtggaagcggcgttttcatccacaacgacgttgaagcctggatggacc

SEQ ID NO: 132114 - DNA, 80 bp, synthetic construct
  source 1..80: mol_type = other DNA
gcgagccaactgtcggcgccgtcattgcgagctacctgtaccacccatgcacaaaactatgacattgacatggtagatgc

SEQ ID NO: 132115 - DNA, 80 bp, synthetic construct
  source 1..80: mol_type = other DNA
ctagtgggtcctcctgggtctaaagttgattggcttaaagtgtcaaatggtgggacatttagtgaactttgtaaaggaga

SEQ ID NO: 132116 - DNA, 80 bp, synthetic construct
  source 1..80: mol_type = other DNA
acacagtggtcatggaggtgtcttacacgggaagtgacaagccctgccggattccggtacgagcagtggcacatggtgtc

SEQ ID NO: 132117 - DNA, 80 bp, synthetic construct
  source 1..80: mol_type = other DNA
caacgcggggatgagagccgatcggaaagaaattgatctcctgccaccagccggaggactgggcgttgatatgatgaaag

SEQ ID NO: 132118 - DNA, 80 bp, synthetic construct
  source 1..80: mol_type = other DNA
gcgatggtatatgccacactacttgtgggtgcggtgccaacatcgctggccacgtgaaaaatgggaccatgaaaatcgtc

SEQ ID NO: 132119 - DNA, 80 bp, synthetic construct
  source 1..80: mol_type = other DNA
gggccatggcgtggcgtcccacccccagctccaggccccgggcgtcccggaacgccgccggacatagcgccaggtgcaag

SEQ ID NO: 132120 - DNA, 80 bp, synthetic construct
  source 1..80: mol_type = other DNA
agtgtttgaattttttcgcggtcggcacgctccttggcggcgatattaagatgaacgtactcttttgccacgcagcgcca

SEQ ID NO: 132121 - DNA, 80 bp, synthetic construct
  source 1..80: mol_type = other DNA
acgttgtggggtgagggggtccaagaaagcgacctcatcattcccgtcaccctggcaggacccagaagtaaccacaatag

SEQ ID NO: 132122 - DNA, 80 bp, synthetic construct
  source 1..80: mol_type = other DNA
aaatgcgagaacgggacccgcgcgcctgcctttatacgcggaccccagcaccacgagccgttctgtgacgcgaatctaca

SEQ ID NO: 132123 - DNA, 80 bp, synthetic construct
  source 1..80: mol_type = other DNA
atcacaagctggacagacgttccgtacgtgggaaagcgtgaggacatctggtgtggcagtctcatcggaacgcgatccag

SEQ ID NO: 132124 - DNA, 80 bp, synthetic construct
  source 1..80: mol_type = other DNA
aggtttgagtagtgggcgtggctaaggtgactataaaggcgggtgtcttacgagggtctttttgcttttctgcagacatc

SEQ ID NO: 132125 - DNA, 80 bp, synthetic construct
  source 1..80: mol_type = other DNA
gttgtggcgaccgacgccttaatgactggctacaccggcgatttcgactccgtgatagactgcaacacctgtgtcgtcca

SEQ ID NO: 132126 - DNA, 80 bp, synthetic construct
  source 1..80: mol_type = other DNA
agtcctatgagactgagtatccaaaatgcaagaatgatgactgggatttcgtcatcacaactgacatttcagaaatggga

SEQ ID NO: 132127 - DNA, 80 bp, synthetic construct
  source 1..80: mol_type = other DNA
cttcgtggtcctgatgcttttgaccttgtcgccgcgctacaaggagggcctcgcaaagatcatatggtggcaccaatact

SEQ ID NO: 132128 - DNA, 80 bp, synthetic construct
  source 1..80: mol_type = other DNA
agagtcatcctggctgggcccatgcctgtcacgcatgccagtgctgctcagaggagaggacgtgtaggcaggaaccccaa

SEQ ID NO: 132129 - DNA, 80 bp, synthetic construct
  source 1..80: mol_type = other DNA
gaccttgttcttgaaggagacagctgtgtaacaatcatggctaaagacaaacctacactggacgtgcggatgatgagcat

SEQ ID NO: 132130 - DNA, 80 bp, synthetic construct
  source 1..80: mol_type = other DNA
cttcttttctgacctttaatttccttcttaggtggctccatcttagccctagtcacggctagctgtgaaaggtccgtgag

SEQ ID NO: 132131 - DNA, 80 bp, synthetic construct
  source 1..80: mol_type = other DNA
tatagtgtcgaagtattggatccaactactcccagaactaaaaccactaaattaacaaccagcaccacacttgctatgac

SEQ ID NO: 132132 - DNA, 80 bp, synthetic construct
  source 1..80: mol_type = other DNA
tcattgccctggaacaagcgtgaagattgacagtcagtgtgacaagagaggagcctcagttagaagcaccacagaaagcg

SEQ ID NO: 132133 - DNA, 80 bp, synthetic construct
  source 1..80: mol_type = other DNA
atatcagacaacagcagtgaagagtgaacacacaggaagggagatagttgacctcatgtgccacgctacttttaccatgc

SEQ ID NO: 132134 - DNA, 80 bp, synthetic construct
  source 1..80: mol_type = other DNA
tgatgtccgccacgctctgctccgctctctacgtgggggacttctgcggcggggtgatgctcgcagcccagatgttcatt

SEQ ID NO: 132135 - DNA, 80 bp, synthetic construct
  source 1..80: mol_type = other DNA
gaaacccaagtaatcggtacctttgagattcaagggccagagcaacaagaaggtgcttccagcctcaaactcacgccggc

SEQ ID NO: 132136 - DNA, 80 bp, synthetic construct
  source 1..80: mol_type = other DNA
gccagctcttcgtgttcagaccgcgagtgcatcagattgctcaagactgcaattgttccatctacactggccgtatcact

SEQ ID NO: 132137 - DNA, 80 bp, synthetic construct
  source 1..80: mol_type = other DNA
ccatgagcgtataattgtccgtctgcagggcgacggacatcagccccccgcgcggcgagccggtcagcatctcgcagccc

SEQ ID NO: 132138 - DNA, 80 bp, synthetic construct
  source 1..80: mol_type = other DNA
cctaaccggttgctcccagcgagttgccgcatgcaaggacttgaaacatttccatcaagggtgtggccctatcacatatg

SEQ ID NO: 132139 - DNA, 80 bp, synthetic construct
  source 1..80: mol_type = other DNA
ccaccagcatgggcaataccataacctgttacctaaaggcattggccgcctgtagggccgccggcctgaaggattttgac

SEQ ID NO: 132140 - DNA, 80 bp, synthetic construct
  source 1..80: mol_type = other DNA
aagcgtatcacaatgggtggaaacaagtttgtccatggaatgacggacgctatgtgtgcgttggaaacagcagtaccata

SEQ ID NO: 132141 - DNA, 80 bp, synthetic construct
  source 1..80: mol_type = other DNA
ggtgagaacgtgtcggatgtgttcctcctcaactctaccagaccgcccgggggcgcctggttcggttgcgtctggatgaa

SEQ ID NO: 132142 - DNA, 80 bp, synthetic construct
  source 1..80: mol_type = other DNA
tccagaacaacatacagcgcttccacagcggcagccataacagtcagccttaccagtaaaaaacctattaaaaaacacca

SEQ ID NO: 132143 - DNA, 80 bp, synthetic construct
  source 1..80: mol_type = other DNA
tgtccatcgcagcattgatagtcaatccatcagtcaggactgtgagggaggcaggaattctaatttcctcggctgctgtc

SEQ ID NO: 132144 - DNA, 80 bp, synthetic construct
  source 1..80: mol_type = other DNA
gatctcagctcccatgtgagcctgaaccggaccccgaggtattggcctccatgcttacaggcccgtcccacataacggct

SEQ ID NO: 132145 - DNA, 80 bp, synthetic construct
  source 1..80: mol_type = other DNA
cctcagggagcgcgctccctgacgccgtgcacatgcggcgcctcggatctgtacttggtcacgaggcacgcggacgtcat

SEQ ID NO: 132146 - DNA, 80 bp, synthetic construct
  source 1..80: mol_type = other DNA
aacagtgtcaggaaagttgatacatgaatggtgttgccgctcgtgcacacttcctcccctgcgatacatgggagaagacg

SEQ ID NO: 132147 - DNA, 80 bp, synthetic construct
  source 1..80: mol_type = other DNA
tgctttgatagcaccgtgaccgaacaggatattcgtgtggaagaagaaatttatcagtgctgcaacctggaaccggaagc

SEQ ID NO: 132148 - DNA, 80 bp, synthetic construct
  source 1..80: mol_type = other DNA
gaggagaaactacccatcagcccactcagcaactccttgttgagacaccataatctggtttattcaacgtcgtcaagaag

SEQ ID NO: 132149 - DNA, 80 bp, synthetic construct
  source 1..80: mol_type = other DNA
agtccgccgccgccacccacatggcggcgccggccgcgcaggcgattcccagagaacgggcgcggaggtgatccgtgcgg

SEQ ID NO: 132150 - DNA, 80 bp, synthetic construct
  source 1..80: mol_type = other DNA
ataccaacgtcgggagacgtcgtagtatgtgccaccgacgcactcatgactggattcacgggagactttgactctgtgat

SEQ ID NO: 132151 - DNA, 80 bp, synthetic construct
  source 1..80: mol_type = other DNA
cgcgcacgcgcgtcgtctggggggcgctctcgagctcgtccagcgtctgccggttcaggtcgagctgctcctcctgcatc

SEQ ID NO: 132152 - DNA, 80 bp, synthetic construct
  source 1..80: mol_type = other DNA
gaacatggatgtggaaatttggacaaaggaaggagaaaagaaaaaattgagacctaggtggcttgatgcccgcacttatt

SEQ ID NO: 132153 - DNA, 80 bp, synthetic construct
  source 1..80: mol_type = other DNA
ttgctggggcaaaagcctgggacaacggagagtctcggaatggctgatctattgcttgacctaaaaccggctacggcctg

SEQ ID NO: 132154 - DNA, 80 bp, synthetic construct
  source 1..80: mol_type = other DNA
gactttgtgcctgtggagaatatggagaccacgatgagatcaccggtcttcactgacaactcatctccacctgttgtgcc

SEQ ID NO: 132155 - DNA, 80 bp, synthetic construct
  source 1..80: mol_type = other DNA
actcctgccgcggttaccgggagtccccttcttttcatgccaacgtgggtacaagggagtctggcgtggagatggcgtca

SEQ ID NO: 132156 - DNA, 80 bp, synthetic construct
  source 1..80: mol_type = other DNA
ggcggcttctcgtgcccgccgcccctcctgctcctccctttcccccccccccatccccggcccccctgcgcggtggagct

SEQ ID NO: 132157 - DNA, 80 bp, synthetic construct
  source 1..80: mol_type = other DNA
cttccaaatgtacggggcaacctactcagtcactccactagaccttcctgcaatcattcaaagactccatggcttaagcg

SEQ ID NO: 132158 - DNA, 80 bp, synthetic construct
  source 1..80: mol_type = other DNA
cgctcaaagaaagtccctatggggttttcctatgacacgaggtgtttcgactccactgtcacagagcgcgacatccgcac

SEQ ID NO: 132159 - DNA, 80 bp, synthetic construct
  source 1..80: mol_type = other DNA
gtgatgccactactcccctggcccgcgcggcttgggaaacagcccgtcacactccagttaactcctggctgggcaacatt

SEQ ID NO: 132160 - DNA, 80 bp, synthetic construct
  source 1..80: mol_type = other DNA
ggcttttgtcgtcagcggtctcgcggtggctgcggttggcagcgttgggctgggaaaggtcctggtcgacatcctcgccg

SEQ ID NO: 132161 - DNA, 80 bp, synthetic construct
  source 1..80: mol_type = other DNA
taacggtcagcgaagcggtggacgcgcactggagggtgtcgcgaatggccgccaggcgcgcccacgccagccgcgcgtcg

SEQ ID NO: 132162 - DNA, 80 bp, synthetic construct
  source 1..80: mol_type = other DNA
cagccccttgttgctgtctaccacgcagtggcaaatcttgccttgctctttcaccaccctaccggccttgtccacaggac

SEQ ID NO: 132163 - DNA, 80 bp, synthetic construct
  source 1..80: mol_type = other DNA
ctcgctggggctgctgtgggaagcattggactgggacgggtgatcgtggatgttctagcaggatatggcgctggcgtgtc

SEQ ID NO: 132164 - DNA, 80 bp, synthetic construct
  source 1..80: mol_type = other DNA
cggtgtgcaccttgggggctgatgtcagctgccacatgactagcaggtcgctgtcgcccggactcatccatccgtccgcc

SEQ ID NO: 132165 - DNA, 80 bp, synthetic construct
  source 1..80: mol_type = other DNA
tgcatgttggggggatgggggattaaacgatccttatatattaaaggcgctacgtgcccagggacggtttttatattttg

SEQ ID NO: 132166 - DNA, 80 bp, synthetic construct
  source 1..80: mol_type = other DNA
gggtaggaacttgaagccattcttctcttcggcctccacatgatacttttccattagctttatcattaaatccatgcctt

SEQ ID NO: 132167 - DNA, 80 bp, synthetic construct
  source 1..80: mol_type = other DNA
ccctcccggcggatccacccaggcccgcctacgacttggagttcgtgacatcttgttcctccaacgtctctgtcgctagg

SEQ ID NO: 132168 - DNA, 80 bp, synthetic construct
  source 1..80: mol_type = other DNA
gtttccgtggcccatgatggagacggcagaaaatactactacctcacccgagacccagtcacacctcttgccagagcagc

SEQ ID NO: 132169 - DNA, 80 bp, synthetic construct
  source 1..80: mol_type = other DNA
ttcccttggagtacgtgaaaggaggcagacatctgatcttttgtcactcaaagaagaagtgcgatgagttggccggccag

SEQ ID NO: 132170 - DNA, 80 bp, synthetic construct
  source 1..80: mol_type = other DNA
actatgaccaggaaaacccatacaggacctgggcgtatcatggaagctatgaagccccttcgacaggttcagcatcctcc

SEQ ID NO: 132171 - DNA, 80 bp, synthetic construct
  source 1..80: mol_type = other DNA
tcagctactgtggcaatcgtggtgggtgtgattgcgggctttgtaactctgatcattgtcttcatatgctacatctgctg

SEQ ID NO: 132172 - DNA, 80 bp, synthetic construct
  source 1..80: mol_type = other DNA
caatggtgcggatcactcattggtctcacttccagagcaacctgggcccagaacatactcacagcaatccaacaggtgag

SEQ ID NO: 132173 - DNA, 80 bp, synthetic construct
  source 1..80: mol_type = other DNA
cccgtggagaacatggagacaaccatgaggtctcccgtcttcactgacaactcaactccaccggcagtaccccaaacata

SEQ ID NO: 132174 - DNA, 80 bp, synthetic construct
  source 1..80: mol_type = other DNA
attctgagcaccgtcacccagactttcctcggcacgtgcgtctccggagtcatgtggacagtctatcatggagctgggtc

SEQ ID NO: 132175 - DNA, 80 bp, synthetic construct
  source 1..80: mol_type = other DNA
gccaggtggacagaggtggcgtggctgggctgcccgacggggagaagcgcggacagcggcgtggcctgtgtggtggaggt

SEQ ID NO: 132176 - DNA, 80 bp, synthetic construct
  source 1..80: mol_type = other DNA
tccctgatgcttgggttaaaaagggattacaaaaccccgttctgatcgccattttatgttaacgattgataatcttgtaa

SEQ ID NO: 132177 - DNA, 80 bp, synthetic construct
  source 1..80: mol_type = other DNA
acggaacgaatggagctccgctgtggcgagggcctagtcgtgtggagagaggtctcagaatggtatgacaactatgccta

SEQ ID NO: 132178 - DNA, 80 bp, synthetic construct
  source 1..80: mol_type = other DNA
cacccgaaacgccgatgtcatcccggcccggaggcgtggggaccggagaggggcactgctctccccgagacccttgtcca

SEQ ID NO: 132179 - DNA, 80 bp, synthetic construct
  source 1..80: mol_type = other DNA
attactactgaaaatcaaaactttgaattgcaaaaaggtgacaatcaagatgatgacaaaattccatcaactactgtggc

SEQ ID NO: 132180 - DNA, 80 bp, synthetic construct
  source 1..80: mol_type = other DNA
tgctagattctctgaatcttggccaccagtcccttttccaggaaagggtactccacagccttgatttttcatctcccggg

SEQ ID NO: 132181 - DNA, 80 bp, synthetic construct
  source 1..80: mol_type = other DNA
ccccccttttttcccctcagcccgccccggacgtctgggtgtttccctgcgaccgagacctgccggacagcagcgactcg

SEQ ID NO: 132182 - DNA, 80 bp, synthetic construct
  source 1..80: mol_type = other DNA
catacatgggttataatagacagagtactcataaggaagactataaagtcatagttataccgcctcctcctgctactgta

SEQ ID NO: 132183 - DNA, 80 bp, synthetic construct
  source 1..80: mol_type = other DNA
gcacattaacaggactgccctgaattgcaatgacagcctgcacaccggctgggtagcagcgctgttctactcccacaagt

SEQ ID NO: 132184 - DNA, 80 bp, synthetic construct
  source 1..80: mol_type = other DNA
ctaccaccatccttggcatcggaacagtccttgaccaggctgagaccgcaggtgttaggctggtggttctagccacagcc

SEQ ID NO: 132185 - DNA, 80 bp, synthetic construct
  source 1..80: mol_type = other DNA
tttgaaggcaacctgcaccagccataagggaacttatgacatagacatggtggatgcttctctcttcatgggaggcgacg

SEQ ID NO: 132186 - DNA, 80 bp, synthetic construct
  source 1..80: mol_type = other DNA
gtccaaaatgagataataacaacccatccaataaccaagtacatcatgacctgtatgtctgcagatctggaggttatcac

SEQ ID NO: 132187 - DNA, 80 bp, synthetic construct
  source 1..80: mol_type = other DNA
ttacgtgcggcctcgccgacctcttggggtatatccccgtcctaggtgcccccctcggtggtgtcgcggctgctcttgct

SEQ ID NO: 132188 - DNA, 80 bp, synthetic construct
  source 1..80: mol_type = other DNA
ctctcgatgggactcaacacaacagagagctgttttagctgcagctctggagatcatggtaaaactttccccagaaccac

SEQ ID NO: 132189 - DNA, 80 bp, synthetic construct
  source 1..80: mol_type = other DNA
ttaacagctcagggtgtactgaacggctcgcaagctgcaagagccttgacagctatgaccaaggctggggtccgctcggg

SEQ ID NO: 132190 - DNA, 80 bp, synthetic construct
  source 1..80: mol_type = other DNA
tgcagggtcgctcggtgttcgaggccacacgcgtcaccttaatatgcgaagtggacctgggaccgcgccgccccgactgc

SEQ ID NO: 132191 - DNA, 80 bp, synthetic construct
  source 1..80: mol_type = other DNA
ccagtgtttgagcacaacatactgacccgctgttccttgcatttgggtaacaggaggggggtgttcctaccttaccaatg

SEQ ID NO: 132192 - DNA, 80 bp, synthetic construct
  source 1..80: mol_type = other DNA
tgctatttgccggcgtcgatgcgactaccaccgtcaccgggaggagtgttgctaggggagcatctatgatctccaacttg

SEQ ID NO: 132193 - DNA, 80 bp, synthetic construct
  source 1..80: mol_type = other DNA
aggtcccacccgacgccatgaatcgtcggatcatgaacgtccacgaggcagttaactgtctggagaccctatggtacaca

SEQ ID NO: 132194 - DNA, 80 bp, synthetic construct
  source 1..80: mol_type = other DNA
atccacggtcccgtacgtaccgccgctccgcttgccggtctgccacaggttggctaggcgcgtcaggtggcccaggacgt

SEQ ID NO: 132195 - DNA, 80 bp, synthetic construct
  source 1..80: mol_type = other DNA
acaccggggagagcaacgccgccgtctatgcgtccagtacacagctcgcgcgggcgttatatggagtggatctggtttcg

SEQ ID NO: 132196 - DNA, 80 bp, synthetic construct
  source 1..80: mol_type = other DNA
tcacatcttgctcttccaacgtctccgtagcccacgacgccaccggacagagatattactacctcacgcgtgacccagtc

SEQ ID NO: 132197 - DNA, 80 bp, synthetic construct
  source 1..80: mol_type = other DNA
atgatgatgaactggtcgcccaccaccaccatgctcctggcgtacttagtgcgcatcccggaggttgtcttggacattgt

SEQ ID NO: 132198 - DNA, 80 bp, synthetic construct
  source 1..80: mol_type = other DNA
cacctgccttgcccatctgggcgagaccagactacaatccaccgcttgttcagccttggcagtctccggattatactcca

SEQ ID NO: 132199 - DNA, 80 bp, synthetic construct
  source 1..80: mol_type = other DNA
gccttcacggaggccatgaccaggtactctgcccctcctggtgatccccccagaccggaatatgacctggagctaataac

SEQ ID NO: 132200 - DNA, 80 bp, synthetic construct
  source 1..80: mol_type = other DNA
tcaactcttcaggctgtcctgagaggttggccagctgccgacgccttaccgattttgcccagggctggggtcctatcagt

SEQ ID NO: 132201 - DNA, 80 bp, synthetic construct
  source 1..80: mol_type = other DNA
ccaaggaggccaggaaggcgcgatgctcgaatatcgtgttgatctgctgcacgaaggccaggattagggcctcgcggctg

SEQ ID NO: 132202 - DNA, 80 bp, synthetic construct
  source 1..80: mol_type = other DNA
ggtgcgtggtgacgggttggaccgcgggaggcgcgggagagggacctgcgggagaggatgaggtcggctcggcctggttg

SEQ ID NO: 132203 - DNA, 80 bp, synthetic construct
  source 1..80: mol_type = other DNA
gggagagttctgggggccattccgatagatcttccacgtggcacttcaggtagcccgatcattaacgcacagggagatgt

SEQ ID NO: 132204 - DNA, 80 bp, synthetic construct
  source 1..80: mol_type = other DNA
tggggcaccctacagtacgaggataatgtcaccaatccagaggatatgaggccgtactgctggcactaccccccaaagcc

SEQ ID NO: 132205 - DNA, 80 bp, synthetic construct
  source 1..80: mol_type = other DNA
tgggatggagaagaggaggttcagttgatagcagctgcccccggaaaaaacgtagtgaatgtccaaacaaagccaagcct

SEQ ID NO: 132206 - DNA, 80 bp, synthetic construct
  source 1..80: mol_type = other DNA
gtcatctgcgcggccattctgcgccgccacgtgggaccgggggagggcgcggtccaatggatgaacaggcttattgcctt

SEQ ID NO: 132207 - DNA, 80 bp, synthetic construct
  source 1..80: mol_type = other DNA
tgcgccgtgttgtgtctctacctgctgtaccgaaacacgcacggggccgccgacgatagcgaccgcgctccggtcacgtt

SEQ ID NO: 132208 - DNA, 80 bp, synthetic construct
  source 1..80: mol_type = other DNA
ctgcctgcctcccagactccgacgccgggtcatggtcctccatgcccccccttgaggaggaaccgggggaccctgatctc

SEQ ID NO: 132209 - DNA, 80 bp, synthetic construct
  source 1..80: mol_type = other DNA
atgcggattcgccgacctcatggggtacattccgctcgttggcgcccccgtaggaggcgtcgcaagagccctcgcacatg

SEQ ID NO: 132210 - DNA, 80 bp, synthetic construct
  source 1..80: mol_type = other DNA
gatcttgtggttaatgctactgatcgctcaggctgaggccgctcttgagaacttagtcatgttgaacgccgcctccgctg

SEQ ID NO: 132211 - DNA, 80 bp, synthetic construct
  source 1..80: mol_type = other DNA
gctccaacgcaagtattgtgtatgaggcagcggacatgattatgcatacccccgggtgcgtgccctgcgttcgggagaac

SEQ ID NO: 132212 - DNA, 80 bp, synthetic construct
  source 1..80: mol_type = other DNA
gctccgtcaagctgttgttgcgagagctctcggatgcgcttaaggattggctgcaccccgtgcatagacgtaaaatttaa

SEQ ID NO: 132213 - DNA, 80 bp, synthetic construct
  source 1..80: mol_type = other DNA
tgcggcttcgccgacctcatggggtacatcccagtcgtcggtgccccccttggtggcgttgcggcggccttggcgcacgg

SEQ ID NO: 132214 - DNA, 80 bp, synthetic construct
  source 1..80: mol_type = other DNA
tggcggtcacgcagacagtggacttcagtctggaccccacttttactgtgactacacaaaccgtcccccaggacgcggtc

SEQ ID NO: 132215 - DNA, 80 bp, synthetic construct
  source 1..80: mol_type = other DNA
aagtcatcatgaaagatgggaggaccttggtggtgccctgcagaggacaggacgagctgattggaagagcacgaatatcc

SEQ ID NO: 132216 - DNA, 80 bp, synthetic construct
  source 1..80: mol_type = other DNA
accgttctgtccgtcacttcccagatccgcgctttctctgtccttcctgtgcgacggttacgccgctccatgagcttatc

SEQ ID NO: 132217 - DNA, 80 bp, synthetic construct
  source 1..80: mol_type = other DNA
cacggtggccatcagagggcccaggtcgaggtcgggctgggcatcgggttcggtaaactgcgcaaagcgcggagccacgt

SEQ ID NO: 132218 - DNA, 80 bp, synthetic construct
  source 1..80: mol_type = other DNA
cccgcctcttctggctgcccccagactccgacgctgatctattcttccatgcccccctggaggtggagcctggggatccg

SEQ ID NO: 132219 - DNA, 80 bp, synthetic construct
  source 1..80: mol_type = other DNA
ccatcgcactcagcccggtccaaatatgggtatggtgcacaggacgttagaagccgtgctagcaaggccgttgaccacat

SEQ ID NO: 132220 - DNA, 80 bp, synthetic construct
  source 1..80: mol_type = other DNA
gacgagcgccggcgcggagaacttctcgccggcgcttacaaagtagtcgtaatcgcggggcagcagcacccgtgccgtga

SEQ ID NO: 132221 - DNA, 80 bp, synthetic construct
  source 1..80: mol_type = other DNA
ctcagcgcagcggtgcagccacaacgcgcagcccgtgggctcgtgatgcttgtaggtcacctctgcaaacgactgcaggt

SEQ ID NO: 132222 - DNA, 80 bp, synthetic construct
  source 1..80: mol_type = other DNA
actactgacagccttttttaattcagggcttacgtttgcatttaccgaatatcgccatggtttcaaaactacattggggg

SEQ ID NO: 132223 - DNA, 80 bp, synthetic construct
  source 1..80: mol_type = other DNA
actatcgccggtggctctggtggtgggcgtcgtgtgtgcagccattctgcggcgccaagtgggttccggtgaggtggctg

SEQ ID NO: 132224 - DNA, 80 bp, synthetic construct
  source 1..80: mol_type = other DNA
gtacaaagaaggaaccttccacacaatgtggcacgtgacaagaggatcagtgctcatgtgcaaagggaaaagactagaac

SEQ ID NO: 132225 - DNA, 80 bp, synthetic construct
  source 1..80: mol_type = other DNA
taccgtatagggtctgtgaccaacgaggtcacgttaacgcaccctattaccaaatacatcgcgacctgcatgcaagctga

SEQ ID NO: 132226 - DNA, 80 bp, synthetic construct
  source 1..80: mol_type = other DNA
ccctcaagtgggagtatgttgtgcttgctttcctgctgctcgcagacgctagagtttgcgcgtgcctctggatgatgcta

SEQ ID NO: 132227 - DNA, 80 bp, synthetic construct
  source 1..80: mol_type = other DNA
ggcccagaggggaccgatggccagaggggcgcggacgccgcgcagcaacccgcgcaggtggcgctcgaacgtctcggtta

SEQ ID NO: 132228 - DNA, 80 bp, synthetic construct
  source 1..80: mol_type = other DNA
ccataatgcgggctctgataatgtgtgttttttactgctaaagggaactgccagtgtaaagcataacatgatttgtggcg

SEQ ID NO: 132229 - DNA, 80 bp, synthetic construct
  source 1..80: mol_type = other DNA
gcctatttatgccgacaaaacatatcaaccagagcctcaagtgggccaaacacagtggaacagtgaagttggtgccactg

SEQ ID NO: 132230 - DNA, 80 bp, synthetic construct
  source 1..80: mol_type = other DNA
aagttagaggaggcattggagaatgctgctaaagctaatggtcctgcaagaggagacagtagcgtctcaagagaggttga

SEQ ID NO: 132231 - DNA, 80 bp, synthetic construct
  source 1..80: mol_type = other DNA
tgcagtggtggttcgggtggcgggaggagcgcggtgagggtcagcggcgtagcagagacgggcgaccaacctcgcatagg

SEQ ID NO: 132232 - DNA, 80 bp, synthetic construct
  source 1..80: mol_type = other DNA
gtggaagggctgctcccgcgttctcatatgcttggctccagctgtggccgctattgctactattgctagccttacctcga

SEQ ID NO: 132233 - DNA, 80 bp, synthetic construct
  source 1..80: mol_type = other DNA
gtggcggggcgatggtattatgaacaccacttgctcgtgcggtgcccaaatcacaggacatgtaaaaaacggatccatga

SEQ ID NO: 132234 - DNA, 80 bp, synthetic construct
  source 1..80: mol_type = other DNA
tttgtgcgtgcacatgtactggttcgcctctgcatgctcgtacgctctgtggcggggggaaaatacttccagatggtcat

SEQ ID NO: 132235 - DNA, 80 bp, synthetic construct
  source 1..80: mol_type = other DNA
atgaccggctttactggagactttgactcggtgatagactgcaacacctgcgtcacccaaacagtcgacttcagtctaga

SEQ ID NO: 132236 - DNA, 80 bp, synthetic construct
  source 1..80: mol_type = other DNA
tcataggagctggctttcatccatggaggtttgggccattttggaagaccttaggaagactaggcaactgttagagaacg

SEQ ID NO: 132237 - DNA, 80 bp, synthetic construct
  source 1..80: mol_type = other DNA
cttgttaatgccgttcaggacaacacttcctaaatatacctagtatttacgtatgtaccagtaaaaagatgatacacatt

SEQ ID NO: 132238 - DNA, 80 bp, synthetic construct
  source 1..80: mol_type = other DNA
aagctcctatcgttgcagaagaatctcctttctcccaccgtgttgaacttgggcaattttaaaataacatttactgaggg

SEQ ID NO: 132239 - DNA, 80 bp, synthetic construct
  source 1..80: mol_type = other DNA
gactccgtcgtgtgctgctccatgtcgtactcctggaccggggctctaataactccttgcagccccgaggaggaaaagtt

SEQ ID NO: 132240 - DNA, 80 bp, synthetic construct
  source 1..80: mol_type = other DNA
ctgggcaagggcatccatcaaatttttggagcagctttcaaatcattgtttggaggaatgtcctggttctcacaaattct

SEQ ID NO: 132241 - DNA, 80 bp, synthetic construct
  source 1..80: mol_type = other DNA
taaccttgccaggctggagaagttctggagccaacatatgtggaactttgttagcggcatccagtatctggccgggctat

SEQ ID NO: 132242 - DNA, 80 bp, synthetic construct
  source 1..80: mol_type = other DNA
catttgccacttgcgtgcggccagggctcgctcgcaggggttcaggcgcggaccccagggcatgggatgcgtaagcgcgg

SEQ ID NO: 132243 - DNA, 80 bp, synthetic construct
  source 1..80: mol_type = other DNA
gggctacacctggcagagcaattcaagcaaaaagctctcgggttgctgcagacagcttccaaacaggcagaggcggccgc

SEQ ID NO: 132244 - DNA, 80 bp, synthetic construct
  source 1..80: mol_type = other DNA
tggagttggagttgagggtgacgaggctaaagtcggcgaggacggcccgccggagcgagacggcgtccgaccgcagcatg

SEQ ID NO: 132245 - DNA, 80 bp, synthetic construct
  source 1..80: mol_type = other DNA
ccaggcatgccgacgtcattccagtgaggcggcgtggggatagtagaggcgccctcctgtctcccagacccctctcgtac

SEQ ID NO: 132246 - DNA, 80 bp, synthetic construct
  source 1..80: mol_type = other DNA
aaaagcacacggcattgatccgaacatacggacgggcgtcaggaccatcactacgggtgcgccaatcacgtactcgacgt

SEQ ID NO: 132247 - DNA, 80 bp, synthetic construct
  source 1..80: mol_type = other DNA
ttggaggccattgttgacgtcatgtgtcacgccacttatgtcaatcgccgactcttgccacaggggagacagaattggga

SEQ ID NO: 132248 - DNA, 80 bp, synthetic construct
  source 1..80: mol_type = other DNA
aggtcatcgataccctaacctgcggcttcgccgacctcatgggatacatcccgctcgtaggcgcccccgtgggtagcgtc

SEQ ID NO: 132249 - DNA, 80 bp, synthetic construct
  source 1..80: mol_type = other DNA
tgcctcctcctgatcttcttcctcgagctccctctattgtgagctactttcaactcaccggtggagatgactgactctca

SEQ ID NO: 132250 - DNA, 80 bp, synthetic construct
  source 1..80: mol_type = other DNA
gcgtgcgggctatcgaggacgggttaaactatgcaacagggaaccttcctggttgctccttttctatcttccttctagca

SEQ ID NO: 132251 - DNA, 80 bp, synthetic construct
  source 1..80: mol_type = other DNA
gcggcatagagcatcggctgactgcagcatgtaactggaccaggggggagccctgcgggctggaacatagagatcgctcg

SEQ ID NO: 132252 - DNA, 80 bp, synthetic construct
  source 1..80: mol_type = other DNA
cgtcaactgttagtgcgcgcctactctctgtagaggaggcatgcgcgctgactccgccccactcagcccgatcaaagttc

SEQ ID NO: 132253 - DNA, 80 bp, synthetic construct
  source 1..80: mol_type = other DNA
gcgttgtctgctgctcgatgtcctacagttggacgggagcgatcgtcacgccatgtgcaccagaggaggagaagttgccc

SEQ ID NO: 132254 - DNA, 80 bp, synthetic construct
  source 1..80: mol_type = other DNA
attactcccccggtggatgtgggtatgacacctcctatttgtgttgatccaccggctacagggttggaagctgtcatgat

SEQ ID NO: 132255 - DNA, 80 bp, synthetic construct
  source 1..80: mol_type = other DNA
acacatctggatgcgttgagcgcatgagtagctgcaaacccctggaccagtttgatcagggctggggaccgctttcatac

SEQ ID NO: 132256 - DNA, 80 bp, synthetic construct
  source 1..80: mol_type = other DNA
gggttcttagcgtcactcttttacacccacaaattcaactcctcgggctgcccagagcggatggctgcgtgtaagcccct

SEQ ID NO: 132257 - DNA, 80 bp, synthetic construct
  source 1..80: mol_type = other DNA
ggctatggggcagcagatgttcggagctgctccagcaaggccataaaccacatcaactccgtgtgggaggacttgctgga

SEQ ID NO: 132258 - DNA, 80 bp, synthetic construct
  source 1..80: mol_type = other DNA
agcacgccttatcgtgtaccctgacctgggggtgagggtctgcgagaagaaggcgttatatgacatcacatgtaagctgc

SEQ ID NO: 132259 - DNA, 80 bp, synthetic construct
  source 1..80: mol_type = other DNA
attcaacttaacaggaaatcatatgagactgagtaccccaaatgcaagaatgatgattgggacttcgtcataacaacgga

SEQ ID NO: 132260 - DNA, 80 bp, synthetic construct
  source 1..80: mol_type = other DNA
acagctttggcgacaatgagtcggacgtgttcttgctggagagcctgcgaccaccagcaggcgggtggtatgggtgcacg

SEQ ID NO: 132261 - DNA, 80 bp, synthetic construct
  source 1..80: mol_type = other DNA
ttcttatctcagactaaacaggctggagagaacttcccctatttggtagcataccaggccacggtgtgcgccagggcgca

SEQ ID NO: 132262 - DNA, 80 bp, synthetic construct
  source 1..80: mol_type = other DNA
gacaggaaatcagtccaagtgttgggtgcaggcgacgcctaccctggctataccgaatgcttccacacccatcactgggt

SEQ ID NO: 132263 - DNA, 80 bp, synthetic construct
  source 1..80: mol_type = other DNA
atcgtaggtataaacggccgaaaacggagggaattttttagggtaaccatctagatgacacgaataggtgataggtccgt

SEQ ID NO: 132264 - DNA, 80 bp, synthetic construct
  source 1..80: mol_type = other DNA
ccgcaggagtccaccgctccgctgaaactcacgccggggctgtggacttccgcgtacctgcgcaaatttgtacccgctga

SEQ ID NO: 132265 - DNA, 80 bp, synthetic construct
  source 1..80: mol_type = other DNA
taatgacgtatgttcccatagtaacgccaatagggactttccattgacgtcaatgggtggagtatttacggtaaactgcc

SEQ ID NO: 132266 - DNA, 80 bp, synthetic construct
  source 1..80: mol_type = other DNA
aagtaatctccacggccactcaaaccttcctggcatctaccatcaatggggtgctttggactgtctaccatggcgctggg

SEQ ID NO: 132267 - DNA, 80 bp, synthetic construct
  source 1..80: mol_type = other DNA
gggaccggctgacagcctaaccagcaaaggctggcggcttctggcgccgataacagcatatgcccagcaaacaagaggcc

SEQ ID NO: 132268 - DNA, 80 bp, synthetic construct
  source 1..80: mol_type = other DNA
gccataacaatgggcagcataaacaatgacagacttactctttggacaacaccagacccatccccaaattgcagaattgc

SEQ ID NO: 132269 - DNA, 80 bp, synthetic construct
  source 1..80: mol_type = other DNA
gacatcaccaaactattactggccatattgggctccatgtggctcttgcaggccagtctgaccagggtgccgtacttcgt

SEQ ID NO: 132270 - DNA, 80 bp, synthetic construct
  source 1..80: mol_type = other DNA
aaataataaagctgtattgagtagttgtatagttgtagtgtttatagcaatttgaattatgattaattacttaggcttaa

SEQ ID NO: 132271 - DNA, 80 bp, synthetic construct
  source 1..80: mol_type = other DNA
agagacagaagtcaactgtctcctttgttgcactccaccacggaatgggccattttaccttgctcttactcggacctgcc

SEQ ID NO: 132272 - DNA, 80 bp, synthetic construct
  source 1..80: mol_type = other DNA
tccaatggatgaacaggcttattgcctttgcttccagaggaaaccacgtcgcccctactcactacgtgacggagtcggat

SEQ ID NO: 132273 - DNA, 80 bp, synthetic construct
  source 1..80: mol_type = other DNA
gcggcggcggccaggtccagcgccacgcttccgatcgcgcgccgcgcgtcggccctgagggcgtccaggcgatcgcggat

SEQ ID NO: 132274 - DNA, 80 bp, synthetic construct
  source 1..80: mol_type = other DNA
ggacttcgccgccgggaagctcgacgtcggccacgcccgcgaagaagtcgaacgcggggtgcagctccagagccaggttg

SEQ ID NO: 132275 - DNA, 80 bp, synthetic construct
  source 1..80: mol_type = other DNA
aaccagaccttcctggcaacgtgcgtcaacggcgtcctctggtccgtctaccacggagctgggacgcggttcctcgcagc

SEQ ID NO: 132276 - DNA, 80 bp, synthetic construct
  source 1..80: mol_type = other DNA
cgcaaggaagaacccgatgggtttctcctatgacaccagatgttttgactcaacagtcactgagcgcgacatacgcactg

SEQ ID NO: 132277 - DNA, 80 bp, synthetic construct
  source 1..80: mol_type = other DNA
gtggatgcccacttcttgtcccaaacgaagcaggggggggaaaactttgcgtatctagtagcataccaggcaacagtctg

SEQ ID NO: 132278 - DNA, 80 bp, synthetic construct
  source 1..80: mol_type = other DNA
gcgtcaggttcggggcctgggtgctggggtccaggtgccggccgccgtgaaagacgtacacggacgagctgtagtgcgag

SEQ ID NO: 132279 - DNA, 80 bp, synthetic construct
  source 1..80: mol_type = other DNA
cagatgtgaggaagtcggggccgttcgccgcgaacggcgatcagagggtcagtttcttgcggaccacggcccggcgatgt

SEQ ID NO: 132280 - DNA, 80 bp, synthetic construct
  source 1..80: mol_type = other DNA
cttccggttgtcctgagcgcttgagcagctgtcggccactccacgcattcgagcagggttggggtcctctcacatacgct

SEQ ID NO: 132281 - DNA, 80 bp, synthetic construct
  source 1..80: mol_type = other DNA
ccagggccgtcactgcgtcgaccaggacgcggtgcgcccgcacggccgcatccaccgtcgacgcggggtctgccgtcgcg

SEQ ID NO: 132282 - DNA, 80 bp, synthetic construct
  source 1..80: mol_type = other DNA
agggcccatgcattagttaaggtctgtggcttggtccgcggggtgacctgtggtaagtattgccagatggctctacttaa

SEQ ID NO: 132283 - DNA, 80 bp, synthetic construct
  source 1..80: mol_type = other DNA
gcaaggccataactgccctcacggagagactctatgtgggcggtcccatgcacaacagcaagggagacctttgcggttat

SEQ ID NO: 132284 - DNA, 80 bp, synthetic construct
  source 1..80: mol_type = other DNA
tggcccagggcccgcagacacgcgatctggatgcgcgcgacgaaggccacctcggccgcgatgtcaaagggctgcagcac

SEQ ID NO: 132285 - DNA, 80 bp, synthetic construct
  source 1..80: mol_type = other DNA
gcgccggcggagggacaccaggggagccttgctctctccacggcccatatcctatctgaagggttcttcgtgtggcccgt

SEQ ID NO: 132286 - DNA, 80 bp, synthetic construct
  source 1..80: mol_type = other DNA
gccctcgtcgttggtgtggtctgcgcagcagtactacgccgacacgccggtccctctgagggggctaaccagtggatgaa

SEQ ID NO: 132287 - DNA, 80 bp, synthetic construct
  source 1..80: mol_type = other DNA
ggagaagaaagttattacttggggggctgacactgctgcttgtggtgacatcatctccggcctgcccgtgtccgctagac

SEQ ID NO: 132288 - DNA, 80 bp, synthetic construct
  source 1..80: mol_type = other DNA
ttccctctctaacagagggaggtaaacatattgaagcggttgggtatttgattttaggggtggtcctgggtgtgtgcata

SEQ ID NO: 132289 - DNA, 80 bp, synthetic construct
  source 1..80: mol_type = other DNA
agcacatcctcctgttttcgctcggatcctgcgacctccccgagtcccacctcagcgatctcgcctccaggggcctgccg

SEQ ID NO: 132290 - DNA, 80 bp, synthetic construct
  source 1..80: mol_type = other DNA
ggtgaggatgatggaaggggaaggagtgattggcccagatgatgtggagaaactcacaaagggaaaaggacctaaagtca

SEQ ID NO: 132291 - DNA, 80 bp, synthetic construct
  source 1..80: mol_type = other DNA
cctctactggttaacaccgaacctgaagacattgattgctggtgcaatctcacgtccacctgggtcatgtacgggacatg

SEQ ID NO: 132292 - DNA, 80 bp, synthetic construct
  source 1..80: mol_type = other DNA
aagcaggacctccagctcattaactcgaatggaagctggcacatcaacagaacggcattgaattgcaacgacagcctcca

SEQ ID NO: 132293 - DNA, 80 bp, synthetic construct
  source 1..80: mol_type = other DNA
cagcgccctcattgaaggctacatgcactatgcatggagcccatcctgatgctgagctcattgaagctaacttgctatgg

SEQ ID NO: 132294 - DNA, 80 bp, synthetic construct
  source 1..80: mol_type = other DNA
cacttcccagaaaatcaccagcatactcagttccttaaccgtgaccagtctcctacgcaaattgcgtgcgtggatcaacg

SEQ ID NO: 132295 - DNA, 80 bp, synthetic construct
  source 1..80: mol_type = other DNA
tgaagcccgcatcatgcttgacaatataaacatgcccaatggactgatagcccagctctaccaaccagagcgtgaaaagg

SEQ ID NO: 132296 - DNA, 80 bp, synthetic construct
  source 1..80: mol_type = other DNA
gggcacgacggcggccgaagccacgtgaaaccggcggtcgttgttgtcgctggcctgtagagccttggcgctgtatacgg

SEQ ID NO: 132297 - DNA, 80 bp, synthetic construct
  source 1..80: mol_type = other DNA
ccccaccctgtacgtaccgcgaggacccatccacccactgcagccttatcgcaggtacggtgacccgggtggacgggccg

SEQ ID NO: 132298 - DNA, 80 bp, synthetic construct
  source 1..80: mol_type = other DNA
caggaggcccccttatgtgcccttcgggacacgtggtggggctgttccgtgctgccgtgtgtacgcggtgggtcgcgaag

SEQ ID NO: 132299 - DNA, 80 bp, synthetic construct
  source 1..80: mol_type = other DNA
cttggttggacgtggcgctcgcgaccgccgggggggcggtggccctgccggccagacggcgcggtggatcgctggtctac

SEQ ID NO: 132300 - DNA, 80 bp, synthetic construct
  source 1..80: mol_type = other DNA
atcaacatgccaaacggactgatcgctcaattctaccaaccagagcgtgaaaaggtatacaccatggatggagaataccg

SEQ ID NO: 132301 - DNA, 80 bp, synthetic construct
  source 1..80: mol_type = other DNA
gttggtggcttttgaatgctatatatcaaagccctcagtacataaacggtcgaaaaccggtcatagtatgcgtcggttcg

SEQ ID NO: 132302 - DNA, 80 bp, synthetic construct
  source 1..80: mol_type = other DNA
actaaaccaaccacagttaggacaactagagagacaaccacacagcctactactgtgcccactacacaaccaaccaccac

SEQ ID NO: 132303 - DNA, 80 bp, synthetic construct
  source 1..80: mol_type = other DNA
gccagcccccgattgggggcgacactccaccatagatcactcccctgtgaggaactactgtcttcacgcagaaagcgtct

SEQ ID NO: 132304 - DNA, 80 bp, synthetic construct
  source 1..80: mol_type = other DNA
acccttcgcagcaccaaaggagagttccggaggagattcagattcaggagtcccttctaccaacatggtcacctcgggac

SEQ ID NO: 132305 - DNA, 80 bp, synthetic construct
  source 1..80: mol_type = other DNA
ggacagatccgaagccaaagagggactgaaaagaggagaaacaaccaagcatgcagtgtcgagaggaaccgctaaattga

SEQ ID NO: 132306 - DNA, 80 bp, synthetic construct
  source 1..80: mol_type = other DNA
gagaggcagagcaactgcgcctgaaacacctggaccactgtcgccgccacaagtgctttgcccgcgacttcggtgagttt

SEQ ID NO: 132307 - DNA, 80 bp, synthetic construct
  source 1..80: mol_type = other DNA
aaaactgaactttttgccgcaccttcaacgccatctgtgatttctacaacaaaaagttcttctggcaaaggtacacaaac

SEQ ID NO: 132308 - DNA, 80 bp, synthetic construct
  source 1..80: mol_type = other DNA
tggcagctacgaaacaaaacagactggatcagcatcttccatggtgaatggagtagttagactgctgacaaaaccttggg

SEQ ID NO: 132309 - DNA, 80 bp, synthetic construct
  source 1..80: mol_type = other DNA
gcgccctcccacccgctactcacgccccagtccctccgcctagaaggcgtcgaactgtggctctaagtgagagcaaggtg

SEQ ID NO: 132310 - DNA, 80 bp, synthetic construct
  source 1..80: mol_type = other DNA
acacagggctgacaccattctttgtgatattggtgagagcaacccagatcccttggtggaaggagagaggagtcgccgtg

SEQ ID NO: 132311 - DNA, 80 bp, synthetic construct
  source 1..80: mol_type = other DNA
caaggaacttaccattgtcaccacattttccatttggtgaacgtcaccagcagcagcaacagctccgaaactaacctttc

SEQ ID NO: 132312 - DNA, 80 bp, synthetic construct
  source 1..80: mol_type = other DNA
atgccactcacccccacgcttgcggtcaaagacgctaatgtccctactgcggcaatccgacgccatgtcgacttgctggt

SEQ ID NO: 132313 - DNA, 80 bp, synthetic construct
  source 1..80: mol_type = other DNA
tactctggctccataccataccttgacggaaccttctatcttaatcacacctttaagaaggtggccattacctttgactc

SEQ ID NO: 132314 - DNA, 80 bp, synthetic construct
  source 1..80: mol_type = other DNA
gacagggtgcaactactagactctcattatgaatcagtcttgaaggacgtcaagcaggcagccaccaaggtcagtgctaa

SEQ ID NO: 132315 - DNA, 80 bp, synthetic construct
  source 1..80: mol_type = other DNA
agatggccctctatgacattgcacagaagcttcccaaggcaataatgggggcatcctatgggttccaatactctcccgca

SEQ ID NO: 132316 - DNA, 80 bp, synthetic construct
  source 1..80: mol_type = other DNA
caatgtcctactcatggacgggggctttagtgacaccatgtgcagctgaagaatccaagctgccgatcagtcccctgagc

SEQ ID NO: 132317 - DNA, 80 bp, synthetic construct
  source 1..80: mol_type = other DNA
cagaccctactcctcaacgtgttggggggctgggtcgcgtcgcagctggccaaccccacggcctccactgcgttcgtggt

SEQ ID NO: 132318 - DNA, 80 bp, synthetic construct
  source 1..80: mol_type = other DNA
gaaacagtaaattcatgcttttatgttgtaaaagttgttgagcttccaaccactaaagcgcccacacagtctactacaca

SEQ ID NO: 132319 - DNA, 80 bp, synthetic construct
  source 1..80: mol_type = other DNA
agagagcagatctctgatgaataaccaacggaaaaaggcaagacaattgcctttcaatatgctgaaacgcgagagaaacc

SEQ ID NO: 132320 - DNA, 80 bp, synthetic construct
  source 1..80: mol_type = other DNA
cgcagcgcgtgtcactcagatcctctccagccttaccatcactcagctgttgaagaggctccaccagtggatcaacgagg

SEQ ID NO: 132321 - DNA, 80 bp, synthetic construct
  source 1..80: mol_type = other DNA
aatagaaggctactcattaaaattcacctggcgcgttcgaaataatgaacgttttgacatcccctgttgctcattttctt

SEQ ID NO: 132322 - DNA, 80 bp, synthetic construct
  source 1..80: mol_type = other DNA
acgtttccaggtggcccaggagccgctccccctcgcgccacgcgtactccaggagcaactccagggtgaccgacagcggg

SEQ ID NO: 132323 - DNA, 80 bp, synthetic construct
  source 1..80: mol_type = other DNA
tcgtgtgtggcgacgacttagtcgttatctgtgaaagtcagggagtccaggaggatgcagcgggcctgagagccttcacg

SEQ ID NO: 132324 - DNA, 80 bp, synthetic construct
  source 1..80: mol_type = other DNA
aagcggcttggaatagtaatcccccaaggaataacgccgaattagaccgtttgttaaccggagccgttattcgtattacg

SEQ ID NO: 132325 - DNA, 80 bp, synthetic construct
  source 1..80: mol_type = other DNA
acccagggagagcttgcccgtagcctgattcgggagtttacccaacgccccctgctagttgagcgggacaggggaccctg

SEQ ID NO: 132326 - DNA, 80 bp, synthetic construct
  source 1..80: mol_type = other DNA
accactcgcatcaaaaacgccaataacaaagaaaaaatgccttaacctctttctgtttacagacatggcttctcttacat

SEQ ID NO: 132327 - DNA, 80 bp, synthetic construct
  source 1..80: mol_type = other DNA
cctgcaaggccgcgggcattgttgcaccaacaatgctggtgtgtggcgacgacctggtcgtcatctcagagagccaggtg

SEQ ID NO: 132328 - DNA, 80 bp, synthetic construct
  source 1..80: mol_type = other DNA
aggggggcgcgacgctgtcatcctactcatgtgtgttgtgcacccggtcttggtatttgacatcaccaagctgctgctgg

SEQ ID NO: 132329 - DNA, 80 bp, synthetic construct
  source 1..80: mol_type = other DNA
agcccgcgaaaaaaatcacttccgcatatgactcggcataatacggtgttctcacgacacgtcacatccggcgcgcccgg

SEQ ID NO: 132330 - DNA, 80 bp, synthetic construct
  source 1..80: mol_type = other DNA
atgttgtcacaacagacatttctgaaatgggggcaaatttccgggccgacagggtgatagacccaaggcggtgcttgaaa

SEQ ID NO: 132331 - DNA, 80 bp, synthetic construct
  source 1..80: mol_type = other DNA
tccgctccgggtcgggtggcccagcggcggcccaacagtagatgggacgagaccgggcgattcccaaacccgaccaccgc

SEQ ID NO: 132332 - DNA, 80 bp, synthetic construct
  source 1..80: mol_type = other DNA
gtttgttcccagcataagagcagggaatgatatcgcaacatgtttgaggaagaatgggaaaaaggtgatccagctaagtc

SEQ ID NO: 132333 - DNA, 80 bp, synthetic construct
  source 1..80: mol_type = other DNA
acccttacttgcggactcgccgacctcgtggggtatctccccgtcctaggaggccccttaggtggcatcgcggctgccct

SEQ ID NO: 132334 - DNA, 80 bp, synthetic construct
  source 1..80: mol_type = other DNA
tgtttgtcgcctggctggccgctcggtggctccggggggcttccggcctggaggccgtcctgtgtgggattgcgtggtat

SEQ ID NO: 132335 - DNA, 80 bp, synthetic construct
  source 1..80: mol_type = other DNA
gttctgttgaagatatgcgctgtggcaaggcagatcgcaggtggcaagtacatccaaatgctcctactaaccattggcag

SEQ ID NO: 132336 - DNA, 80 bp, synthetic construct
  source 1..80: mol_type = other DNA
tcccgaacacgccggcgaatatcaggccgtatccgtccggcgggccgtcagtaaggacgactgggtcctcctacagctag

SEQ ID NO: 132337 - DNA, 80 bp, synthetic construct
  source 1..80: mol_type = other DNA
acaaacactgaccatactcatcagaacaggattgctggtgatatcaggactttttcccgtatcaataccaatcacggcag

SEQ ID NO: 132338 - DNA, 80 bp, synthetic construct
  source 1..80: mol_type = other DNA
ttgcaaacaaaaatataacttctggtgaacttagagctgacagtttttacataagaccagacggctatgaaaatcaaaaa

SEQ ID NO: 132339 - DNA, 80 bp, synthetic construct
  source 1..80: mol_type = other DNA
ggcggcgtggtcgggctcccggaggaagaggtggttcgggtcctgcgtaaagctgaggaaggggtatgtcggcttgtcgc

SEQ ID NO: 132340 - DNA, 80 bp, synthetic construct
  source 1..80: mol_type = other DNA
cgaattctcaaaatgtgaaaattcagccgtacaccaggcctactactcctgatcagaaacacagatttgaattgcaaatt

SEQ ID NO: 132341 - DNA, 80 bp, synthetic construct
  source 1..80: mol_type = other DNA
agccactgtgtgcgcccgtgcacaggctcctcccccaagttgggacgagacgtggaagtgtctcgtgcggcttaaaccaa

SEQ ID NO: 132342 - DNA, 80 bp, synthetic construct
  source 1..80: mol_type = other DNA
gcgatttggttcatgtggctcggagctcgctttctggagttcgaggctctgggttttctcaatgaagaccactggcttgg

SEQ ID NO: 132343 - DNA, 80 bp, synthetic construct
  source 1..80: mol_type = other DNA
cttgatgactgccacccctccgggaaccagtgatgaatttccacattcaaatggggaaatagaggatgtccaaacggaca

SEQ ID NO: 132344 - DNA, 80 bp, synthetic construct
  source 1..80: mol_type = other DNA
tttaacagctccgggtgccctgaaaggctcgccagctgcaagaagctcgacgacatggggaaaggctggggcccgcttgt

SEQ ID NO: 132345 - DNA, 80 bp, synthetic construct
  source 1..80: mol_type = other DNA
ccaccccatgcgcggattcctggctggcaaccatctggaactgggtatgtgaggtgttgtcagacttcaaaacatgggtg

SEQ ID NO: 132346 - DNA, 80 bp, synthetic construct
  source 1..80: mol_type = other DNA
taaaatcactccgtcgctccccggcgttcccttcctgtcctgccagaggagatacaaaggggagtggcgaggtgacggga

SEQ ID NO: 132347 - DNA, 80 bp, synthetic construct
  source 1..80: mol_type = other DNA
acaggcgcagcacctggcggtccttcccccaaaaaaacagctggcggtgcgggaaggcgcggggatccgcgtggccggtg

SEQ ID NO: 132348 - DNA, 80 bp, synthetic construct
  source 1..80: mol_type = other DNA
tatcattaaataatattttgccagctcttggaataaaatttctagaaattttaaagggtccagggacgtccaagcggtta

SEQ ID NO: 132349 - DNA, 80 bp, synthetic construct
  source 1..80: mol_type = other DNA
gcgtttatgcctaatttaactgcatatcctaaaccaactacaacgaaaagttatgctaggagctacatttatggaaacgt

SEQ ID NO: 132350 - DNA, 80 bp, synthetic construct
  source 1..80: mol_type = other DNA
gcgggcattacgccgaggggcccggcgtgctgtgagaccgcgtcgaccccgcgagcgagggcgtcgagggcctcgcgcat

SEQ ID NO: 132351 - DNA, 80 bp, synthetic construct
  source 1..80: mol_type = other DNA
ggcagctgccgcttctgctgccgcttctactgctcgcggcatggcggctgattttggactgtataaccaattggccactg

SEQ ID NO: 132352 - DNA, 80 bp, synthetic construct
  source 1..80: mol_type = other DNA
actttaacctgctctttgttgacgaggccaactttattcgcccggatgcggtccagacgattatgggctttctcaaccag

SEQ ID NO: 132353 - DNA, 80 bp, synthetic construct
  source 1..80: mol_type = other DNA
ggcccacgaggtccggccacacagatgtactccagtgccgaaggagacctggtgggatggcccagccctcctgggaccaa

SEQ ID NO: 132354 - DNA, 80 bp, synthetic construct
  source 1..80: mol_type = other DNA
tgacatcaccaaattcttgctcgccatgcttggtcccttgatggtgctccaaaccagcctgaccagagtgccgtacttcg

SEQ ID NO: 132355 - DNA, 80 bp, synthetic construct
  source 1..80: mol_type = other DNA
cgcttgtgccgtgcacctgcggcgcatcggatttgtacctcgttacacggcatgcagacgttgtgcctgtacgtaggagg

SEQ ID NO: 132356 - DNA, 80 bp, synthetic construct
  source 1..80: mol_type = other DNA
atgttgcctcacatgaagcagctattctggacatagatctacatccagcttcagcctggacattgtatgcagtggccaca

SEQ ID NO: 132357 - DNA, 80 bp, synthetic construct
  source 1..80: mol_type = other DNA
tggggtggcaaaagcggttgatttcgtgcccgtggaggccctagaaaccaccatgaggtctccagttttcactgacaact

SEQ ID NO: 132358 - DNA, 80 bp, synthetic construct
  source 1..80: mol_type = other DNA
ctcccggccataattgagaggctacacgggcttgacgccttctcactgcacacatactctcccaacgaactgacgcgggt

SEQ ID NO: 132359 - DNA, 80 bp, synthetic construct
  source 1..80: mol_type = other DNA
gccaccagctgtacctcaaacttaccgggtgggctacttgcacgcgccgacaggcagcgggaagagcaccaaggtccctg

SEQ ID NO: 132360 - DNA, 80 bp, synthetic construct
  source 1..80: mol_type = other DNA
ccacggtacgactgagggcatacctgtccaccccaggactacccgtctgtcaagaccatctagacttctgggagagcgtg

SEQ ID NO: 132361 - DNA, 80 bp, synthetic construct
  source 1..80: mol_type = other DNA
tcaaaacggttgcctgaacttggcgaattacagtttccgtagaccgtacagcgctatatatgccttgtccatcggtatat

SEQ ID NO: 132362 - DNA, 80 bp, synthetic construct
  source 1..80: mol_type = other DNA
cataaaatgggataggtttttatatccaacatgcatgtattggttatttattttattgggttccgggattctttcgtcat

SEQ ID NO: 132363 - DNA, 80 bp, synthetic construct
  source 1..80: mol_type = other DNA
atacaagagggccgttaaccacatccagtccgtgtgggaggaccttttggaagaccaacaatcacccatccccaccacca

SEQ ID NO: 132364 - DNA, 80 bp, synthetic construct
  source 1..80: mol_type = other DNA
tccatgcccccactcgaaggcgagccgggagacccggaccttagctcgggttcctggtcgactgtcagcgaagaggagag

SEQ ID NO: 132365 - DNA, 80 bp, synthetic construct
  source 1..80: mol_type = other DNA
gcggttaccgcagatgccgagcaagtggtgttctaaccactagctgtggcaacaccctcacatgctatctcaaggccaaa

SEQ ID NO: 132366 - DNA, 80 bp, synthetic construct
  source 1..80: mol_type = other DNA
tgaccggggaggccatcacgtactccacatatggcaaatttctcgccgatggtggctgcgctagcggcgcctatgacatc

SEQ ID NO: 132367 - DNA, 80 bp, synthetic construct
  source 1..80: mol_type = other DNA
acaggtgcgaggccgggtcgcgggcggccgcgcccagggccgacaccgcgtccgccagggcgccatgcgcccgcacggcc

SEQ ID NO: 132368 - DNA, 80 bp, synthetic construct
  source 1..80: mol_type = other DNA
cacgcaggcgctcaccagttttttcagcccaggcgccaagcaggatatccagctgatcaacaccaacggcagttggcaca

SEQ ID NO: 132369 - DNA, 80 bp, synthetic construct
  source 1..80: mol_type = other DNA
tacaaagtgctcgtgcttaatccatcagtggcctcaaccttgtcttttggctcctatctaagcaaggcctatggcattga

SEQ ID NO: 132370 - DNA, 80 bp, synthetic construct
  source 1..80: mol_type = other DNA
aaggatggggacatcggagcagtcgctctagactaccccgcaggaacctcaggatctccaatcctagacaaatgcggaag

SEQ ID NO: 132371 - DNA, 80 bp, synthetic construct
  source 1..80: mol_type = other DNA
atcgtggacgtacaattcatgtatggcctatcacctgccctcacaaaatacatcgtccgatgggagtgggtaatactctt

SEQ ID NO: 132372 - DNA, 80 bp, synthetic construct
  source 1..80: mol_type = other DNA
tttttggacttcagacaggaatcaacacacgagtgtgacacaggagtaatgggggctgctgtcaagaatggcatggcagt

SEQ ID NO: 132373 - DNA, 80 bp, synthetic construct
  source 1..80: mol_type = other DNA
gtcgttgggctcttccgagcagctgtgtgctctcggggcgtggccaaatccatcgatttcatccccgttgagacactcga

SEQ ID NO: 132374 - DNA, 80 bp, synthetic construct
  source 1..80: mol_type = other DNA
tccgttctcaaacagagtgtggaattccttccagatagaagagtttgggacaggagtgttcaccacccgagtgtacatgg

SEQ ID NO: 132375 - DNA, 80 bp, synthetic construct
  source 1..80: mol_type = other DNA
atctcggcacgacgacggacgcccgacaaggtatgtctcccgagcgtcaaaatccgggggggggggtgcggcgacggtca

SEQ ID NO: 132376 - DNA, 80 bp, synthetic construct
  source 1..80: mol_type = other DNA
cgatcctcccaaaccagaatatgacctggagctaataacatcatgctcttcgaacgtatctgtggccttggaccagtacg

SEQ ID NO: 132377 - DNA, 80 bp, synthetic construct
  source 1..80: mol_type = other DNA
tgcctaaagccggtcatacttgatggcgagagagtcattctggctggacccatgcctgtcacacatgccagcgctgccca

SEQ ID NO: 132378 - DNA, 80 bp, synthetic construct
  source 1..80: mol_type = other DNA
gtcctggagggagcacgacactagtactaatgccatggctagaccctttctgcactgcctgatatgggtgcttgcgagac

SEQ ID NO: 132379 - DNA, 80 bp, synthetic construct
  source 1..80: mol_type = other DNA
cacaggcttgaggcagcttgcaacttcacccgtggggaccgctgtagtcttgaggacagggacaggagtcagctaagtcc

SEQ ID NO: 132380 - DNA, 80 bp, synthetic construct
  source 1..80: mol_type = other DNA
atcccagtttccgcgtacgaagtgcgcaacgtgtccggggtgtaccatgtcacgaacgactgctccaactcaagtattgt

SEQ ID NO: 132381 - DNA, 80 bp, synthetic construct
  source 1..80: mol_type = other DNA
aataatcaattttacaagtgtaattttccagcgccacctgccattgccgcacggccaatgcccgctcataggggttaagg

SEQ ID NO: 132382 - DNA, 80 bp, synthetic construct
  source 1..80: mol_type = other DNA
gtgctccgcactctacgttggagatctgtgcgggggcatattcctggtaggtcagctgttcacctttcggccccgctccc

SEQ ID NO: 132383 - DNA, 80 bp, synthetic construct
  source 1..80: mol_type = other DNA
acgctccttcaatctgggtgcgcatggtcctcatgacgcatttcttcggaatactccaagcccaggaggagctcgggaaa

SEQ ID NO: 132384 - DNA, 80 bp, synthetic construct
  source 1..80: mol_type = other DNA
acggctattctccaggtgaactcaaccggatgggagcttgcctcaggaagcttggggccccccccttgagagcttggagg

SEQ ID NO: 132385 - DNA, 80 bp, synthetic construct
  source 1..80: mol_type = other DNA
aaatagacggtcatttcctatcccagaccaaacaagcgggcgataacttcccataccttgtcgcttatcaagcgacggtg

SEQ ID NO: 132386 - DNA, 80 bp, synthetic construct
  source 1..80: mol_type = other DNA
aactaagctggttcaagaaaggaagcagcatagggaaaatgtttgaggcaactgccagaggagcacgaaggatggccata

SEQ ID NO: 132387 - DNA, 80 bp, synthetic construct
  source 1..80: mol_type = other DNA
ttgtcacctggcgcgctcgttgtcggtgtcgtttgcgctgcaatactgcgccggcacgtgggtccgggcgaggtggccgt

SEQ ID NO: 132388 - DNA, 80 bp, synthetic construct
  source 1..80: mol_type = other DNA
atggtataaatcaccggtgcgccccccaaaccatgtccggcagggagatggggtggcgaatgcggaggtcacccaacaac

SEQ ID NO: 132389 - DNA, 80 bp, synthetic construct
  source 1..80: mol_type = other DNA
ttaaagaagccatcaataagaggcttcgcacggcaatactggctcctacacgcgtggtggcctccgaaatggctgaagcc

SEQ ID NO: 132390 - DNA, 80 bp, synthetic construct
  source 1..80: mol_type = other DNA
atgtaaacctcgcatttgataatactggccaaattatcacttacctatcatcccttaaaagtaacctgaactttaaagac

SEQ ID NO: 132391 - DNA, 80 bp, synthetic construct
  source 1..80: mol_type = other DNA
aggggccctcgtagcttttaagatcatgagcggagaagctccagccgtcgaggatatggtcaacctcttgcctgctctcc

SEQ ID NO: 132392 - DNA, 80 bp, synthetic construct
  source 1..80: mol_type = other DNA
ggggtgcgactgcacaggtacgctccggtgtgcaaacctctcctacgggatgaggtctcattccaagtggggcttcacca

SEQ ID NO: 132393 - DNA, 80 bp, synthetic construct
  source 1..80: mol_type = other DNA
aggcagcgccaccgacgacagtatcgccttgtgtgtgtgctggtaatttatacaccgatccgtaaacgcgcgccgaatct

SEQ ID NO: 132394 - DNA, 80 bp, synthetic construct
  source 1..80: mol_type = other DNA
ctggttgactcctcgatgcatagtcgactatccatatcggctttggcattacccatgtacagtcaatttcacattgttca

SEQ ID NO: 132395 - DNA, 80 bp, synthetic construct
  source 1..80: mol_type = other DNA
gcccccccattctgccaaatcaaagtttggctacggggcaaaggatgttcgcagccactcccgcaaggccatccacatca

SEQ ID NO: 132396 - DNA, 80 bp, synthetic construct
  source 1..80: mol_type = other DNA
ttgggccgcctcatgcagtgaaaatggatatcttcaatctgggggatcaaactgctgttttgctcaaatcactggctgga

SEQ ID NO: 132397 - DNA, 80 bp, synthetic construct
  source 1..80: mol_type = other DNA
aagaaggtcattacgtggggtgcggacaccgccgcctgcggcgatatcctcgagggcctccccgtctccgctagaaggtg

SEQ ID NO: 132398 - DNA, 80 bp, synthetic construct
  source 1..80: mol_type = other DNA
tgtggtacaagctgacatggggtgtgtcataaactggaagggcaaagaactcaaatgtggaagcggaattttcgtcacca

SEQ ID NO: 132399 - DNA, 80 bp, synthetic construct
  source 1..80: mol_type = other DNA
ccttccttgtgttcttctgtgctgcctggtacatcaagggcaggctagttcctggggcggcgtatgccttctacggctta

SEQ ID NO: 132400 - DNA, 80 bp, synthetic construct
  source 1..80: mol_type = other DNA
tctaccagtgctgtgacctggatgctgatgcccgcaaggctataaccgccctcacagaaagactctacgtgggtggcccc

SEQ ID NO: 132401 - DNA, 80 bp, synthetic construct
  source 1..80: mol_type = other DNA
ataaaaatgtggataaaccaaaaggaaaacggggaggtggaaaaggagccacccttggagaaatctggaaatcaaaacta

SEQ ID NO: 132402 - DNA, 80 bp, synthetic construct
  source 1..80: mol_type = other DNA
gtgaatggaacgtgcatcattctcgccacagacatggggagttggtgtgatgattcaatcatgtacgagtgcgtcactat

SEQ ID NO: 132403 - DNA, 80 bp, synthetic construct
  source 1..80: mol_type = other DNA
gcccgtgcgcaggagaggagacactagaggagctctcttgagccctagaccaatatccactcttaaggggtcttctggtg

SEQ ID NO: 132404 - DNA, 80 bp, synthetic construct
  source 1..80: mol_type = other DNA
cttaaggacctagcagtagcccttgagccagtaatattcacgcccatggagaagaaggtgatagtttggggcgcggatac

SEQ ID NO: 132405 - DNA, 80 bp, synthetic construct
  source 1..80: mol_type = other DNA
aggacatctaccagtgttgccagttgaatccgacagcacgcaaggccataacatcactcaccgagcggctgtactgcgga

SEQ ID NO: 132406 - DNA, 80 bp, synthetic construct
  source 1..80: mol_type = other DNA
tcacaaatgactgcccaaactcaagcatagtgtacgaagctgaccatcacatcctgcaccttccggggtgcgtgccctgt

SEQ ID NO: 132407 - DNA, 80 bp, synthetic construct
  source 1..80: mol_type = other DNA
tttaatcgcgatgtttttaatccaatgtttgatatcggccgttatattttacatacaagtgaccaacgctttgatcttca

SEQ ID NO: 132408 - DNA, 80 bp, synthetic construct
  source 1..80: mol_type = other DNA
gctgcttccaggttggacctgtccaactggtttgttgccggctacagcgggggggacatttatcacagcgtgtcccatgc

SEQ ID NO: 132409 - DNA, 80 bp, synthetic construct
  source 1..80: mol_type = other DNA
gcctatccacttacgtggtgggatcgcaactaccctgtgaacctgagccagacgaactggtagtgacatcacttttacga

SEQ ID NO: 132410 - DNA, 80 bp, synthetic construct
  source 1..80: mol_type = other DNA
agatggagaaatatcaattggcagcaactgtgatggctttgctgtgcgtgcctaacattatgataattcagaatgcctgg

SEQ ID NO: 132411 - DNA, 80 bp, synthetic construct
  source 1..80: mol_type = other DNA
atcacagaccctcctcctgaacgtattgggagtgtgggtcgcatcgcagctgtccacccccgtcccggccactgccttcg

SEQ ID NO: 132412 - DNA, 80 bp, synthetic construct
  source 1..80: mol_type = other DNA
gaacctaccactgccagagcggaccttgctaccacactttcactttggtgaacgttaccggcagcagcacagccgctcca

SEQ ID NO: 132413 - DNA, 80 bp, synthetic construct
  source 1..80: mol_type = other DNA
cagttcaaacaaaaggcgctcgggctgttgcagacagcatccaagcaggcagaagtcatcgtccctgctgtcccgaccta

SEQ ID NO: 132414 - DNA, 80 bp, synthetic construct
  source 1..80: mol_type = other DNA
actatagaaccgcagtctggcgcgtggctgcgacagagtacgctgagataacacaatataactccaatgcttatgtgaca

SEQ ID NO: 132415 - DNA, 80 bp, synthetic construct
  source 1..80: mol_type = other DNA
gcccgagaagctgaagcagggggcacggcccgcacgcgtacgggtccagcgtcagggacatggcgtggttggcctcgccc

SEQ ID NO: 132416 - DNA, 80 bp, synthetic construct
  source 1..80: mol_type = other DNA
gcgaccgcaactcccccaggttcagtaactgtccctcatcccaacataactgaggttgggctgtccactactggagaggt

SEQ ID NO: 132417 - DNA, 80 bp, synthetic construct
  source 1..80: mol_type = other DNA
accgtgcacatgcggtgcctcggacatgtttctggtcacccggaatgcagacgtcatccctgtgcggcggagtggagaca

SEQ ID NO: 132418 - DNA, 80 bp, synthetic construct
  source 1..80: mol_type = other DNA
cttcgagaccgcgggtacgtacctgcggctagtgaagataaacgactggacggagatcacacaatttatcctggagcacc

SEQ ID NO: 132419 - DNA, 80 bp, synthetic construct
  source 1..80: mol_type = other DNA
ccggtggcgcgggccgcggagggacttttgcgcccgcgccctgctggagcccgacgacgacgcccccccgctggtgctgc

SEQ ID NO: 132420 - DNA, 80 bp, synthetic construct
  source 1..80: mol_type = other DNA
ttgcgacctcgctggttggacgccagaacatactctgatccattggccctgcgcgagtttaaagagttcgcagcaggaag

SEQ ID NO: 132421 - DNA, 80 bp, synthetic construct
  source 1..80: mol_type = other DNA
tcaacgtaacggccagcccctggcgagacagatccacggagtccggaaccgcggtcgtctggcccagggggccgaggctg

SEQ ID NO: 132422 - DNA, 80 bp, synthetic construct
  source 1..80: mol_type = other DNA
ccacacccccccctaaaaatggaaatggctctttaatggatttttaaatgttgtcaagacagtagatgtgttgcgaatgt

SEQ ID NO: 132423 - DNA, 80 bp, synthetic construct
  source 1..80: mol_type = other DNA
aaaggttatcacctggggtgcggacactgtagcctgcggggacatcctatgcgggctgcccgtttcagcacgattgggcc

SEQ ID NO: 132424 - DNA, 80 bp, synthetic construct
  source 1..80: mol_type = other DNA
gagatggttaatgaagaaagggaaaaccatttgcgaggggagtgccacacgtgcatttacaacatgatgggaaaaagaga

SEQ ID NO: 132425 - DNA, 80 bp, synthetic construct
  source 1..80: mol_type = other DNA
cggtcagatcgttggtggagtctatcttttgccgcgcaggggccccaggttgggtgtgcgcgcgcctaggaagacttccg

SEQ ID NO: 132426 - DNA, 80 bp, synthetic construct
  source 1..80: mol_type = other DNA
ccaacctacacctgggaggagaacaccgcggatgtgttcttgctaaacagcacgcggccgccgcggggagcttggtttgg

SEQ ID NO: 132427 - DNA, 80 bp, synthetic construct
  source 1..80: mol_type = other DNA
cccgacaggagtgaggcgtcgaacggccgcccgaggatagctcgcgcgaggaaggggtcctcgtcggtggcgctggcggc

SEQ ID NO: 132428 - DNA, 80 bp, synthetic construct
  source 1..80: mol_type = other DNA
tggtcatggcaagcttggagctgatgccgtagtcggcgtttatggccatggccagctccgtagagtcaatggactcgaca

SEQ ID NO: 132429 - DNA, 80 bp, synthetic construct
  source 1..80: mol_type = other DNA
agccactgtgtgcgcaagagccaaagccccccctccatcatgggaccaaatgtggaagtgtcttatcagattgaagccaa

SEQ ID NO: 132430 - DNA, 80 bp, synthetic construct
  source 1..80: mol_type = other DNA
actccgctcagattggagcttcccaggctgccaagttcaccatcacgcccaatgctccttccatcaccctgaagcttggg

SEQ ID NO: 132431 - DNA, 80 bp, synthetic construct
  source 1..80: mol_type = other DNA
ttacgcgcagcagactaggggtctactagggaccatagttactagcctcacgggacgtgacaagaacacagttgagggtg

SEQ ID NO: 132432 - DNA, 80 bp, synthetic construct
  source 1..80: mol_type = other DNA
tctttggccgactagacaaggactccatccttagacaaatgtactggaccaagggcccgaaccaccaagacccatctgaa

SEQ ID NO: 132433 - DNA, 80 bp, synthetic construct
  source 1..80: mol_type = other DNA
agacggccgacgtccccaccgaggcccttgggggcccccctcctcctccccgcttcaccctgtgtggcggctgttgttcc

SEQ ID NO: 132434 - DNA, 80 bp, synthetic construct
  source 1..80: mol_type = other DNA
accaagaggttccctcccgccatgcccgtatgggcatctccggcttataaccctcctctactggagccatggaagaggga

SEQ ID NO: 132435 - DNA, 80 bp, synthetic construct
  source 1..80: mol_type = other DNA
tgttggtagctcctttcaccgacagcggtagcatcgaccgtaattcctatttgggttacctactaaacctgtatcgcgaa

SEQ ID NO: 132436 - DNA, 80 bp, synthetic construct
  source 1..80: mol_type = other DNA
ttactacctaaccagagaccctaccactccactaactagagcagcttgggagaccgcccggcactcacctgtgaactcct

SEQ ID NO: 132437 - DNA, 80 bp, synthetic construct
  source 1..80: mol_type = other DNA
ttgtacggctggatgagtcagttgtggcgcaggcactagcccaactggctgagaagagcttccctgccgcacctggcggg

SEQ ID NO: 132438 - DNA, 80 bp, synthetic construct
  source 1..80: mol_type = other DNA
ggccggccacggcctgacgggcggcatgcgtcgtgcgcaccaccggcgacggcgcgcgtcgcaccgtcgcatgcgcggcg

SEQ ID NO: 132439 - DNA, 80 bp, synthetic construct
  source 1..80: mol_type = other DNA
gctcccgactccgactctgcctcatggtccacgtactccggggcgagcgattccgttgtctgttgctccatgtcttactc

SEQ ID NO: 132440 - DNA, 80 bp, synthetic construct
  source 1..80: mol_type = other DNA
tctagaaccaatagagggaaaagtggtgcaatacgagaacctcaaatacactgtcatcatcacagtgcacacaggagacc

SEQ ID NO: 132441 - DNA, 80 bp, synthetic construct
  source 1..80: mol_type = other DNA
gtgtgggtgagggcgaaggtgtcccgcaccatcactttcaggtactgatgtttgaagtccgtgtcgtcgcaggcaccctg

SEQ ID NO: 132442 - DNA, 80 bp, synthetic construct
  source 1..80: mol_type = other DNA
gcttgatcgattacccgtaccggctgtggcattacccatgcaccgtcaacttcaccatctttaaggtcagaacctttgtc

SEQ ID NO: 132443 - DNA, 80 bp, synthetic construct
  source 1..80: mol_type = other DNA
aacccgttcgtaataagaactttcctaacaacggggtggaaagtttggtagataaaatgaatcgctggaagacctacgct

SEQ ID NO: 132444 - DNA, 80 bp, synthetic construct
  source 1..80: mol_type = other DNA
tacggggcaaaggaggttagagctcacgctagcaaggccattaaccacatcaactccgtgtgggaggacttgctagaaga

SEQ ID NO: 132445 - DNA, 80 bp, synthetic construct
  source 1..80: mol_type = other DNA
agcctacttcccgtttttcccgatttggctacatgacatcaaccatatcagcaaaagtgatacgggtattatttttgccg

SEQ ID NO: 132446 - DNA, 80 bp, synthetic construct
  source 1..80: mol_type = other DNA
aaacctcttgtggaggcaggagatgggtggtaacatcacacgggtcgagtctgagaacaaagtggtcatcctcgactcat

SEQ ID NO: 132447 - DNA, 80 bp, synthetic construct
  source 1..80: mol_type = other DNA
gccagactctgactccggtgcggggcttgctactccaactagcactcctgatcagggcccaatcatcgcagacgatcagt

SEQ ID NO: 132448 - DNA, 80 bp, synthetic construct
  source 1..80: mol_type = other DNA
gatcgtgtcaactgctacccaaaccttcctggcaacgtgcatcaatggggtatgctggactgtctaccacggggccggaa

SEQ ID NO: 132449 - DNA, 80 bp, synthetic construct
  source 1..80: mol_type = other DNA
tctgccccacggactgtttccgcaagcatccagaagccacatatacgaagtgcggctctggcccctggctcacaccccgc

SEQ ID NO: 132450 - DNA, 80 bp, synthetic construct
  source 1..80: mol_type = other DNA
tttgcctggttgctccttttctatctttctcttggccctcttatcttgcatttcaattccagtctctgctgtacaagtca

SEQ ID NO: 132451 - DNA, 80 bp, synthetic construct
  source 1..80: mol_type = other DNA
ttgctacaacattttaaaacgcgttttgtttatggtgagactaaagactcaaactgtatcaaagattactttgtctcagc

SEQ ID NO: 132452 - DNA, 80 bp, synthetic construct
  source 1..80: mol_type = other DNA
ccaggcgcacctcccccggctcccgagctcgctggagcccctggtgagcggcctgtttgacggcattcccgccccgcgcc

SEQ ID NO: 132453 - DNA, 80 bp, synthetic construct
  source 1..80: mol_type = other DNA
ctctcttagctttcttcaggtttacagcacttgccccgaccaaggccttgatgaggcgctggaagagcgtgaacaagaca

SEQ ID NO: 132454 - DNA, 80 bp, synthetic construct
  source 1..80: mol_type = other DNA
cgatgggaggggcggtcgcctacgacacccacgggctcacgtccctcttccgacctgggccggctcagaaaatacagctt

SEQ ID NO: 132455 - DNA, 80 bp, synthetic construct
  source 1..80: mol_type = other DNA
cgctgatgtcatcccggctcggagacagggagaccgacgaggggcattgctctccccaaggcctctttcaagtttgaagg

SEQ ID NO: 132456 - DNA, 80 bp, synthetic construct
  source 1..80: mol_type = other DNA
gcagccttggagaacctgattgtgcttaacgcggcatcactggccggggtgcacggcaccatggcctttctcatcttttt

SEQ ID NO: 132457 - DNA, 80 bp, synthetic construct
  source 1..80: mol_type = other DNA
cactggtctcatacacttacatcaaaatatagtagacacccagtatctttacggtctgagctccagcatcgtctcgtggg

SEQ ID NO: 132458 - DNA, 80 bp, synthetic construct
  source 1..80: mol_type = other DNA
ggggcctaatcttcatctgttgcgcttggcacgtgcggggccgggctgtccccgtgaccacctacgcgttactccagctt

SEQ ID NO: 132459 - DNA, 80 bp, synthetic construct
  source 1..80: mol_type = other DNA
ttcccgtccggcccatcggaggaacgggaggagtcggggatgggaacctccgctccatctaccagtgagacaccaacttc

SEQ ID NO: 132460 - DNA, 80 bp, synthetic construct
  source 1..80: mol_type = other DNA
cctcgaccagcatcgaggtgcagaccgacccctggctcccagcttccaccgctaccgcctccacttctaccgccgccacg

SEQ ID NO: 132461 - DNA, 80 bp, synthetic construct
  source 1..80: mol_type = other DNA
atgcacctgtggagggcctggatcaggcagcggggacagagaatcttgaactactggcttctacagccagcagctccggg

SEQ ID NO: 132462 - DNA, 80 bp, synthetic construct
  source 1..80: mol_type = other DNA
ggagctctcgtggtcggtgtggtttgcgcagcaatactgcgccggcacgttggcccgggtgaggtggtggtgcaatggat

SEQ ID NO: 132463 - DNA, 80 bp, synthetic construct
  source 1..80: mol_type = other DNA
tcaccagccattatggctgctgggctcatggcttgcaacccaaacaagaaaagaggatggccagcgacagaattcctgtc

SEQ ID NO: 132464 - DNA, 80 bp, synthetic construct
  source 1..80: mol_type = other DNA
tcatcccagaccgagaggcgctctaccagcagtttgatgaaatggaggaatgttccaaacatcttccactagtcgagcac

SEQ ID NO: 132465 - DNA, 80 bp, synthetic construct
  source 1..80: mol_type = other DNA
attttggatggtatggtccagatgctgggaggccatcagcaggattccggcgtgcaacgccccgtcgaatatgcgcatgt

SEQ ID NO: 132466 - DNA, 80 bp, synthetic construct
  source 1..80: mol_type = other DNA
cgcaggagcacagggacgtaccaggcccgcgcccgcccacccgtcgtcaaaggcacgaccgtcagcggggtctggtgtgg

SEQ ID NO: 132467 - DNA, 80 bp, synthetic construct
  source 1..80: mol_type = other DNA
gggcccggccaaccagcgtccgccgagtcttcggggcccggcccattgggcgagagttaccgcccaatgggccgtgccgc

SEQ ID NO: 132468 - DNA, 80 bp, synthetic construct
  source 1..80: mol_type = other DNA
gcggaaccggtgagttcaccggaatcgccgggatgaccgggtcctttcttggaacaaacccgctcaatgcccggaaattt

SEQ ID NO: 132469 - DNA, 80 bp, synthetic construct
  source 1..80: mol_type = other DNA
atggtggatgaggagcgcgaggcacacctgcggtgggaatgtcacacttgcatctacaacatgatggggaagagagagaa

SEQ ID NO: 132470 - DNA, 80 bp, synthetic construct
  source 1..80: mol_type = other DNA
cattactaccgtaatctttacagccccttcgaagcgcccaacaaagaagcaacctgcggcgaccaagcggtccattagaa

SEQ ID NO: 132471 - DNA, 80 bp, synthetic construct
  source 1..80: mol_type = other DNA
gtgctctaccaacagttcgacgagatggaggagtgttccaaacaccttccgctagttgaacacggattacaactggctga

SEQ ID NO: 132472 - DNA, 80 bp, synthetic construct
  source 1..80: mol_type = other DNA
catgtacatcggggatctatgcggaggcatcttcctcgtggggcagatgttcgcctttagacccagagtgcatatgactg

SEQ ID NO: 132473 - DNA, 80 bp, synthetic construct
  source 1..80: mol_type = other DNA
catccgaacgcagccccgctggaactactatgacagcttcagcgccgtcagcgaggataacctggggttcctgatgcacg

SEQ ID NO: 132474 - DNA, 80 bp, synthetic construct
  source 1..80: mol_type = other DNA
gtggtgcccatggtgacacagatggcaatgacagacacaactccatttggccagcagagagtctttaaagagaaagtgga

SEQ ID NO: 132475 - DNA, 80 bp, synthetic construct
  source 1..80: mol_type = other DNA
gacgcatctggcaaaagggtatactacctcacccgtgaccccaccaccccccttgcgagggctgcgtgggagacagctag

SEQ ID NO: 132476 - DNA, 80 bp, synthetic construct
  source 1..80: mol_type = other DNA
cccctattgtgtggctccggccatgtagttggtctgttccgtgcggccgtctgcacccgaggcgttgccaaggcattgga

SEQ ID NO: 132477 - DNA, 80 bp, synthetic construct
  source 1..80: mol_type = other DNA
ggagatgagcccacttctgttttctacgacagagttggccatcctaccctgctccttcacgaccatgccagcactgtcaa

SEQ ID NO: 132478 - DNA, 80 bp, synthetic construct
  source 1..80: mol_type = other DNA
tgccgcggtgcaggcggccgctgcggccgcgtccaagacctctacggaggtgcaaacggacccgtggatgtttcgcgttt

SEQ ID NO: 132479 - DNA, 80 bp, synthetic construct
  source 1..80: mol_type = other DNA
aacagggaatgcagctcgccgagcaattcaaacagaaagcgctcggtttgctgcagacagccaccaagcaagcggaggct

SEQ ID NO: 132480 - DNA, 80 bp, synthetic construct
  source 1..80: mol_type = other DNA
agttcaagcagaaagctctcgggttgctccagacagcatccaagcaagcagagacgatcactcccgctgtccataccaat

SEQ ID NO: 132481 - DNA, 80 bp, synthetic construct
  source 1..80: mol_type = other DNA
gcttgtcggtgggcagcgtggtcatcaccggtagggtcgtcctatcagggcagcctgctgtcattcccgaccgggaggct

SEQ ID NO: 132482 - DNA, 80 bp, synthetic construct
  source 1..80: mol_type = other DNA
agaaagagattgataggcgtttggaaaattcgcgggtaccgccgcagaggggggatgaggtggaggtcgaggaagtagaa

SEQ ID NO: 132483 - DNA, 80 bp, synthetic construct
  source 1..80: mol_type = other DNA
gcgcgtaccttaacacccctggcctgcccgtctgtcaggaccacctggaattttgggagggggtgttcaccggcctcacc

SEQ ID NO: 132484 - DNA, 80 bp, synthetic construct
  source 1..80: mol_type = other DNA
cgattaaaagacgattggaaacaaggcttaaagaggttcagacgtatgcaaacgaggcccgaaccacacaggacacaata

SEQ ID NO: 132485 - DNA, 80 bp, synthetic construct
  source 1..80: mol_type = other DNA
tatatcgaacaagctcaggtgatagcccaccagttcaaggagaaaatccttggattgttgcagcgagccacccaacaaca

SEQ ID NO: 132486 - DNA, 80 bp, synthetic construct
  source 1..80: mol_type = other DNA
gggtgggcaacataatcatgtttgcccccaccatatgggtgagaatggtcttcatgactcacttcttctctctcctcctc

SEQ ID NO: 132487 - DNA, 80 bp, synthetic construct
  source 1..80: mol_type = other DNA
cttgtcgggagcgccaccctctgctcggccctctatgtgggggacttgtgcgggtctgtcttccttgtcagtcaactgtt

SEQ ID NO: 132488 - DNA, 80 bp, synthetic construct
  source 1..80: mol_type = other DNA
tggaggtaaaggcacagcttccagttcttcttcgctttcggaatccagaaagtatctgcccatttttggcggcggcggct

SEQ ID NO: 132489 - DNA, 80 bp, synthetic construct
  source 1..80: mol_type = other DNA
aagaggactactcttcgcgatttgctgagcttttgtcttttaaccctggaatttttgcatctttaaatttgggccaccac

SEQ ID NO: 132490 - DNA, 80 bp, synthetic construct
  source 1..80: mol_type = other DNA
gcggtaggtatgtctcttcaggggcagaggcggaggcgacgggctctcgcggcccggcgtgtggctggcagagccccttc

SEQ ID NO: 132491 - DNA, 80 bp, synthetic construct
  source 1..80: mol_type = other DNA
cacgatttcgcgcgccaggggcgatggaagcggaacgggaaaccgcaacgtgaggtccagcgaatccaggcgcacgtccg

SEQ ID NO: 132492 - DNA, 80 bp, synthetic construct
  source 1..80: mol_type = other DNA
gccggggcaggactggcagggggaagccaggcatctacagatttgtggcaccggaggagcgcccctccggcatgttcgac

SEQ ID NO: 132493 - DNA, 80 bp, synthetic construct
  source 1..80: mol_type = other DNA
cagtacacaaaaagaggtggtgtcttgtgggacactccgtcaccgagggagtacaaaaaaggggacaccaccacaggagt

SEQ ID NO: 132494 - DNA, 80 bp, synthetic construct
  source 1..80: mol_type = other DNA
aaaatgagattgtcaccacccacccaatcaccaagtacatcatgacctgtatgtcagcagacctagaagtcatcaccagc

SEQ ID NO: 132495 - DNA, 80 bp, synthetic construct
  source 1..80: mol_type = other DNA
ggaggacgaggaagagctgtgggacagccaggcagaggaggtgtcagaggacgaggaggagatggaaagctgggacagcc

SEQ ID NO: 132496 - DNA, 80 bp, synthetic construct
  source 1..80: mol_type = other DNA
gatgtcccagtgggtctgaccatacacgtcgatccagatgagcgccgtctcgcggagaaggctgggttgaccggaactaa

SEQ ID NO: 132497 - DNA, 80 bp, synthetic construct
  source 1..80: mol_type = other DNA
ttgttatcctgagtctgtctggtgggctgatttggaagatgagtttaaaaatggaaacatgaatcttttatacaagtatg

SEQ ID NO: 132498 - DNA, 80 bp, synthetic construct
  source 1..80: mol_type = other DNA
atctgcgccagcaggtttctgccctgaaggcttcctcccctcccaatgcggtttaaaacataaataaaaaccagactctg

SEQ ID NO: 132499 - DNA, 80 bp, synthetic construct
  source 1..80: mol_type = other DNA
acttaaaactttttgcaatcagcaaaatctaactttaattaatgtaaccagcacttatgatggcatctattatggtactg

SEQ ID NO: 132500 - DNA, 80 bp, synthetic construct
  source 1..80: mol_type = other DNA
gggtctaccgctaccagggtcgagacaaatgagaaggtgataatactggactcttttgagccatgtgtggctgaaccaga

SEQ ID NO: 132501 - DNA, 80 bp, synthetic construct
  source 1..80: mol_type = other DNA
taacagctcagggtgttccgaacggctcgcgtgctgcaagagccttgacagctacggccaaggctggggcccactcggtg

SEQ ID NO: 132502 - DNA, 80 bp, synthetic construct
  source 1..80: mol_type = other DNA
cccaaagcctacatgtgacagctcgccaagagctagtcgcgcgtttaccgtttttggctaacgtcctaaataatcaaacc

SEQ ID NO: 132503 - DNA, 80 bp, synthetic construct
  source 1..80: mol_type = other DNA
gtgaaggaatggagggacatcccgtacctccctaagtcccaggatgggttgtgctcttccctggtaggacgccgagaacg

SEQ ID NO: 132504 - DNA, 80 bp, synthetic construct
  source 1..80: mol_type = other DNA
gaggacgtggtcaacttgttacctgccatattatctccaggcgctctcgtcgtcggtgtgatatgcgctgccatactacg

SEQ ID NO: 132505 - DNA, 80 bp, synthetic construct
  source 1..80: mol_type = other DNA
cttcatgcctcaggaagcttggggtaccgcccttgcgagtctggagacatcgggccaggagtgttcgcgccaagttgctg

SEQ ID NO: 132506 - DNA, 80 bp, synthetic construct
  source 1..80: mol_type = other DNA
aacagctaatcctgaagataaaaaaagtgcagccaagaaaactattgtcactaatgtgtacctagggggcgatgcaggtc

SEQ ID NO: 132507 - DNA, 80 bp, synthetic construct
  source 1..80: mol_type = other DNA
ctataccgtctgggcagtgtcactaatgatgtcaccctcacacatcctgtgacgaaatacatcgccacttgtatgcaagc

SEQ ID NO: 132508 - DNA, 80 bp, synthetic construct
  source 1..80: mol_type = other DNA
cgtttgggtatttaatgccgccgtgttcgtcaagaggccactcttgagtgccagcgagaagagttttctctgccagctca

SEQ ID NO: 132509 - DNA, 80 bp, synthetic construct
  source 1..80: mol_type = other DNA
aaaccaaaagaaatattaaccgtcgcccacaagacgttaagtttccgggtggcggtcagatcgttggcggagtatacttg

SEQ ID NO: 132510 - DNA, 80 bp, synthetic construct
  source 1..80: mol_type = other DNA
gagctggctctaagacgctagcaggcccgaaggggccagtatgccagatgtacaccaatgttgaccaggacctggtaggg

SEQ ID NO: 132511 - DNA, 80 bp, synthetic construct
  source 1..80: mol_type = other DNA
tcctggttctatgaccgttccgcatcccaacattacggaaacggcattatcaagcacaggagagatccccttttatggaa

SEQ ID NO: 132512 - DNA, 80 bp, synthetic construct
  source 1..80: mol_type = other DNA
atctcagactagcgtccaatgccatatgttcagcagtaccagtccactgggtccctacaagtagaacgacgtggtctatt

SEQ ID NO: 132513 - DNA, 80 bp, synthetic construct
  source 1..80: mol_type = other DNA
gagctgtcgcccctactcctgtctactacgcagtggcaagttctcccttgttctttcacccctatgcctgctctctcgac

SEQ ID NO: 132514 - DNA, 80 bp, synthetic construct
  source 1..80: mol_type = other DNA
acggcctgccaacaccacgtcaacgtgggaaccgcctgtgtcgtcggacgatgaagcgagctcgcagtcgaagcccctcg

SEQ ID NO: 132515 - DNA, 80 bp, synthetic construct
  source 1..80: mol_type = other DNA
tgggccaaagtccttgccgtccttctcctgtttgcaggcgtagaggggacaactcacgtaatcggctcccaggcgtgcgc

SEQ ID NO: 132516 - DNA, 80 bp, synthetic construct
  source 1..80: mol_type = other DNA
cgtgacggggtcatttggatgattgtcatcctacacccacaccttgtgttcgaggtcacgaaatggttattggcacttct

SEQ ID NO: 132517 - DNA, 80 bp, synthetic construct
  source 1..80: mol_type = other DNA
tgggctctttatggagggagcactgttgttttcaccccaatgatcaaacacatagttacatctcagtacgtaacaacttc

SEQ ID NO: 132518 - DNA, 80 bp, synthetic construct
  source 1..80: mol_type = other DNA
agcagcacggataccatctccgctccgggtcggggtcccgctcgaccccacagtagatgggacgagaccgggcgattccc

SEQ ID NO: 132519 - DNA, 80 bp, synthetic construct
  source 1..80: mol_type = other DNA
tccattgcgtcctcaagttttcgcacccgtcgcccctctccaaggttccgttcggaacatgccagcatttcctcgtggcg

SEQ ID NO: 132520 - DNA, 80 bp, synthetic construct
  source 1..80: mol_type = other DNA
gtatacggtccccatggagcctaggacccagcgagcccgtcgccgccgcggcggcgccgcccgggggtctgcgagcagac

SEQ ID NO: 132521 - DNA, 80 bp, synthetic construct
  source 1..80: mol_type = other DNA
ctctgtggctgcaaccttaggctttggatcttatatgtctaaggcacatgggatcaatcccaacatcagaactggggtcc

SEQ ID NO: 132522 - DNA, 80 bp, synthetic construct
  source 1..80: mol_type = other DNA
cacaatggcacatgagaagaaggaacaggcaaaagtgttaattaccgattgtgaacgtgcacataaacaacaaacgactc

SEQ ID NO: 132523 - DNA, 80 bp, synthetic construct
  source 1..80: mol_type = other DNA
tcaccagcccgcttaccactcaacaaaccctcctatttaacatcttgggggggtgggtggcttcccaactagccacacca

SEQ ID NO: 132524 - DNA, 80 bp, synthetic construct
  source 1..80: mol_type = other DNA
tgacatgcatgtcggcagacttagaagtcatcaccagcacttgggtgttagtgggtggggttctcgccgccctcgcagct

SEQ ID NO: 132525 - DNA, 80 bp, synthetic construct
  source 1..80: mol_type = other DNA
aacacggtttcatacgtcgtaaatgtcgaccccgccggcgccgacggtaaaccaaccggataaattttatggagcgcctc

SEQ ID NO: 132526 - DNA, 80 bp, synthetic construct
  source 1..80: mol_type = other DNA
aaactaccccacccaagtgggagccacccaagcaggaaggttcagtatcactccggcagctccatcatatactatgaagc

SEQ ID NO: 132527 - DNA, 80 bp, synthetic construct
  source 1..80: mol_type = other DNA
gtgtcatacatgtttgttaggttagacgtttgtgtgtgaatgatagagagagaatagagatcttgtgttgtgttagtggt

SEQ ID NO: 132528 - DNA, 80 bp, synthetic construct
  source 1..80: mol_type = other DNA
cgcatggtgctaatgacgcacttttttggaatactccagtctcaggaaacactccaaaacgcactcgacttcgatatgta

SEQ ID NO: 132529 - DNA, 80 bp, synthetic construct
  source 1..80: mol_type = other DNA
tgcgcgcgctggggcctgggcgcgccgctgcggcccgtgtacgtggcgctggtgcgcgaggcggtgcgcgccggcccggc

SEQ ID NO: 132530 - DNA, 80 bp, synthetic construct
  source 1..80: mol_type = other DNA
aatcagcacagtaactgcagcacagcaccacaatattgttcaaaatcccacagtgcaaggcgctgtatccaaagctcatg

SEQ ID NO: 132531 - DNA, 80 bp, synthetic construct
  source 1..80: mol_type = other DNA
tcaatatgctgaaacgcgagagaaaccgcgtgtcaactgtgcagcagctgacaaagagattctctcgcgtttcagcatat

SEQ ID NO: 132532 - DNA, 80 bp, synthetic construct
  source 1..80: mol_type = other DNA
gcatgagcggctccagcgaacaagagcttgcggccatcgtgcgcgacctgggctgcgggccctactttttgggcacccac

SEQ ID NO: 132533 - DNA, 80 bp, synthetic construct
  source 1..80: mol_type = other DNA
aggctaaggccctgggagcgcgtgatggtcatggcaagcttggagctgatgccgtagtcggcgtttatggccatggccag

SEQ ID NO: 132534 - DNA, 80 bp, synthetic construct
  source 1..80: mol_type = other DNA
ccaacctagggacttggttcaggtgggtggtgttttaattccattagggaaaatgatgccctgtaaatcgacgagcagtt

SEQ ID NO: 132535 - DNA, 80 bp, synthetic construct
  source 1..80: mol_type = other DNA
atgtacactgtaaagccctctggatggactgtgcgcacgtttgataaaccaaggaaaagattcatagcctttttcatcgc

SEQ ID NO: 132536 - DNA, 80 bp, synthetic construct
  source 1..80: mol_type = other DNA
aacaggaaggctcacggacaaggcgctcagtgctgatcccatcccatgctcagggagagctgacggggagtggacacaaa

SEQ ID NO: 132537 - DNA, 80 bp, synthetic construct
  source 1..80: mol_type = other DNA
actcccatgtgagcccgaaccggatgtaacagtgctcacttccatgctcaccgaccccgcccacattacagcagagacgg

SEQ ID NO: 132538 - DNA, 80 bp, synthetic construct
  source 1..80: mol_type = other DNA
ggaattgtcaagcgcctcctgagactggccgccacggaacagcagggcaccacacccccggcgatcgcggcgcttatccg

SEQ ID NO: 132539 - DNA, 80 bp, synthetic construct
  source 1..80: mol_type = other DNA
caggatggattgcactggacaccggcagagaggacactggacgctggtggaggtccatgcccgaatacaaacaaagcaga

SEQ ID NO: 132540 - DNA, 80 bp, synthetic construct
  source 1..80: mol_type = other DNA
cctggcttaaggctaagctcttgcccagccttcccggcgtccccttcctctcgtgtcagcgagggtataggtggacttgg

SEQ ID NO: 132541 - DNA, 80 bp, synthetic construct
  source 1..80: mol_type = other DNA
acgtacttggccgtggaccgacagacccccttggcgttgatcttgtcgatcacctcctcgaaggggacggtggcgcggtc

SEQ ID NO: 132542 - DNA, 80 bp, synthetic construct
  source 1..80: mol_type = other DNA
ggccatgacaacggtgttttcaattccacatgacctcatggaactcattgatggaatatcactaggattgatattactaa

SEQ ID NO: 132543 - DNA, 80 bp, synthetic construct
  source 1..80: mol_type = other DNA
gccgtggtcaacgagagtctggtcatctacggggccctggagacggacagcggtctgtacaccctgtccgtggtcggcct

SEQ ID NO: 132544 - DNA, 80 bp, synthetic construct
  source 1..80: mol_type = other DNA
gacgatccgtcaggtcaagaatcccatcgcccgtgatataccaggccaacgcctcgccctgctgcagggtttggcggaaa

SEQ ID NO: 132545 - DNA, 80 bp, synthetic construct
  source 1..80: mol_type = other DNA
aggtgagtcatcatctagtcctgaagtggaagaagcacggacgctcagagtcctctccatggtgggggattggcttgaaa

SEQ ID NO: 132546 - DNA, 80 bp, synthetic construct
  source 1..80: mol_type = other DNA
tgggcaaaacacatgtggaacttcatcagcgggatacaatacctggcgggcctttcaacactgcccggcaatcccgcaat

SEQ ID NO: 132547 - DNA, 80 bp, synthetic construct
  source 1..80: mol_type = other DNA
tatctagttgattttcatctggaggatcagcatctacagtaaaaatacctggacaaagatttttatcaaaatagtcaatc

SEQ ID NO: 132548 - DNA, 80 bp, synthetic construct
  source 1..80: mol_type = other DNA
atgttgtcgtcgtggcaaccgatgctctcatgaccggctttaccggcgacttcgactcggtgatagactgcaatacgtgt

SEQ ID NO: 132549 - DNA, 80 bp, synthetic construct
  source 1..80: mol_type = other DNA
cgtgaccggattgaaatgagtccactcctgttttcaacaactgagcttgccattttgccatgcgcatttacacctatgcc

SEQ ID NO: 132550 - DNA, 80 bp, synthetic construct
  source 1..80: mol_type = other DNA
ccgcttagcttttgacatcaccaagcatctcctggccgtgttaggtccactttatctgctccaaagctcacttctgcgtg

SEQ ID NO: 132551 - DNA, 80 bp, synthetic construct
  source 1..80: mol_type = other DNA
gtcgtgtgtgctaccgacgcccttatgactggctatacaggagactttgactcggtgattgactgtaatgtttctgtcac

SEQ ID NO: 132552 - DNA, 80 bp, synthetic construct
  source 1..80: mol_type = other DNA
cttttgtcacctggggccctagtagtgggcgtcgtgtgtgcggccatattgcgccgccacgcggggcccgccgaaggtgc

SEQ ID NO: 132553 - DNA, 80 bp, synthetic construct
  source 1..80: mol_type = other DNA
gaccctgatgtacttccacagacgtgacctcagactggcggcaaatgccatttgctcggcagtcccgtcacattgggttc

SEQ ID NO: 132554 - DNA, 80 bp, synthetic construct
  source 1..80: mol_type = other DNA
cggcgctgggaacaagacgctggctggctccaggaggccagttacgcagatgtactccagcgctgaggtggatttggtgg

SEQ ID NO: 132555 - DNA, 80 bp, synthetic construct
  source 1..80: mol_type = other DNA
ctgggaaacggcccggcacactccagtgaactcgtggttgggaaacatcatcatgtacgcgcccacgatatgggtgcgga

SEQ ID NO: 132556 - DNA, 80 bp, synthetic construct
  source 1..80: mol_type = other DNA
gggctaaggtcatcatagtcctactcatgttcgcaggagttgatgccaccacaaccgttggcagtgcagtcagccaaacc

SEQ ID NO: 132557 - DNA, 80 bp, synthetic construct
  source 1..80: mol_type = other DNA
ctgagacttcccacgtcagggaaagaccgaagtggagctctgcttcccctccagaggtggtagaaagacacaaaaccact

SEQ ID NO: 132558 - DNA, 80 bp, synthetic construct
  source 1..80: mol_type = other DNA
ctggggctatggccactcctgctgctcgtattggcgttgccccaacgggcgttcgcgtacgaccaagaacaagcggcctc

SEQ ID NO: 132559 - DNA, 80 bp, synthetic construct
  source 1..80: mol_type = other DNA
tctgctctgtccaggcaaacggggggtattgtctcgctgttcacgccgggatctcagcagaacctccaactcattaatac

SEQ ID NO: 132560 - DNA, 80 bp, synthetic construct
  source 1..80: mol_type = other DNA
caagggctgcggacgcgtggacgcgctttcccccagacccatggacaggtgggccgcagcctccttcgcggccggcggtg

SEQ ID NO: 132561 - DNA, 80 bp, synthetic construct
  source 1..80: mol_type = other DNA
gacatcacaaagttcctgctcgccatctttggccctatgtggttgctccaagccagcctgaccaaagtgccgtattttgt

SEQ ID NO: 132562 - DNA, 80 bp, synthetic construct
  source 1..80: mol_type = other DNA
cccaagcattcatcatttccccgcagcaccccacctttgttcaggactgcaattgttccatctacccaggccacgtcaca

SEQ ID NO: 132563 - DNA, 80 bp, synthetic construct
  source 1..80: mol_type = other DNA
agaggaccaatggtgcggctcattgattgggctaacaagcagggctacctgggcgaagaacatccagacagcaataaatc

SEQ ID NO: 132564 - DNA, 80 bp, synthetic construct
  source 1..80: mol_type = other DNA
tagtcagccacagtttggggaaagctgtgcagcctgtaacccccccaggagaagctgggaaaccaagctcatagtcaggc

SEQ ID NO: 132565 - DNA, 80 bp, synthetic construct
  source 1..80: mol_type = other DNA
ccaccaccatcctaaaccagctggccaaaacctgcccgccggctatgcactgcagggaaccgggactggaacaatgacag

SEQ ID NO: 132566 - DNA, 80 bp, synthetic construct
  source 1..80: mol_type = other DNA
tgtgacgagctggccagcaagctcagagggatgggggtcaacgctgtagcgttttatagaggcctcgacgtgtccgtgat

SEQ ID NO: 132567 - DNA, 80 bp, synthetic construct
  source 1..80: mol_type = other DNA
aacaccgcggggttgtcgggtgaggcgaagtgcatgacccccacgcgcgataacccgaacgcgctatccggacacgggta

SEQ ID NO: 132568 - DNA, 80 bp, synthetic construct
  source 1..80: mol_type = other DNA
tggtgtgagggcaatcgaggacgggatcaattatgcaacagggaatcttcccggttgctctttctctatcttcctcttgg

SEQ ID NO: 132569 - DNA, 80 bp, synthetic construct
  source 1..80: mol_type = other DNA
ccaccccctccggcgccgcgcgttcgcgaaaggcgcgaaaggggcccccggaggcttttttcgattcccggccgtgggtc

SEQ ID NO: 132570 - DNA, 80 bp, synthetic construct
  source 1..80: mol_type = other DNA
tggatgaattcctcggggttcaccaagacgtgcggggcgcccccttgtaacatcgggccaagaggcaacaacaccctcgt

SEQ ID NO: 132571 - DNA, 80 bp, synthetic construct
  source 1..80: mol_type = other DNA
acatgatgtgcatttttgattgtattttaagattagcaatgttaccggccaaatctcttctgggattcatgttatgtaaa

SEQ ID NO: 132572 - DNA, 80 bp, synthetic construct
  source 1..80: mol_type = other DNA
cagaggcctatgacaccggtctctcatggtacgagctcgccccttccgagactactgtcagactaagagcctaccttaac

SEQ ID NO: 132573 - DNA, 80 bp, synthetic construct
  source 1..80: mol_type = other DNA
cggcgacggcgcgaggcggactccggacgcgcggggcgacggccgcgcgtgggcgcgccgcgcgccccgacgactgtggc

SEQ ID NO: 132574 - DNA, 80 bp, synthetic construct
  source 1..80: mol_type = other DNA
cactgggccgagtacacccgtccccgcgcacaattactcgcgtgccctgtggcgcgtgacctccgacagttatgtcgagg

SEQ ID NO: 132575 - DNA, 80 bp, synthetic construct
  source 1..80: mol_type = other DNA
cgaaggccgtgaacgtaatgtcggcggtgaggtcggcgccctcgtggttttcgtcaaacgccaggtggtcggccgcgcgg

SEQ ID NO: 132576 - DNA, 80 bp, synthetic construct
  source 1..80: mol_type = other DNA
gccagtctctccccagtggcgactccggccatcacacaggagagggcaccaccgacagccccagggacataccaccggat

SEQ ID NO: 132577 - DNA, 80 bp, synthetic construct
  source 1..80: mol_type = other DNA
tgtgaccaacatcctgtctggacttaccatcaccagtctcctccgcaaactccatcagtggatcaccgaggacacctccc

SEQ ID NO: 132578 - DNA, 80 bp, synthetic construct
  source 1..80: mol_type = other DNA
atgggctttgcatatgacacccgctgtttcgactcaacagtcacagagagtgacatccgtgttgaggagtcaatctacca

SEQ ID NO: 132579 - DNA, 80 bp, synthetic construct
  source 1..80: mol_type = other DNA
gtgattcttgtcagggacgcgggggtgggagaggataaaaggcggcgcaaaaagcagtaaccaggtccgtccagattctg

SEQ ID NO: 132580 - DNA, 80 bp, synthetic construct
  source 1..80: mol_type = other DNA
tctttcttgtcggtcagctattcaccttctccccgaggcgccactggacaacgcaagactgcaactgttctatgtacccc

SEQ ID NO: 132581 - DNA, 80 bp, synthetic construct
  source 1..80: mol_type = other DNA
ggaagccaggcatctatagatttgtggcaccgggggagcgcccctccggcatgtttgactcgtccgtcctctggcgctag

SEQ ID NO: 132582 - DNA, 80 bp, synthetic construct
  source 1..80: mol_type = other DNA
cgcccgcacctgaagcgcgttcagcttcagttggtggagcttcccccgtccgatgtgggggtcgcaccgccggagcagct

SEQ ID NO: 132583 - DNA, 80 bp, synthetic construct
  source 1..80: mol_type = other DNA
cagtctcaatcgcggaactttcttgcgcatacgaacgcaacctgttttctccccgtgtgccgcccaaacgacaagccaat

SEQ ID NO: 132584 - DNA, 80 bp, synthetic construct
  source 1..80: mol_type = other DNA
cacctgggtgttgcttggtggggtcctcgcggccctagcggcctactgtttatcagtcggctgcgtcgtgattgtgggtc

SEQ ID NO: 132585 - DNA, 80 bp, synthetic construct
  source 1..80: mol_type = other DNA
actggccggcacaaggcgagtaacaacagcatcagcggcacaacgcagggtgcgggtcggaaggcatgaaggacgcacag

SEQ ID NO: 132586 - DNA, 80 bp, synthetic construct
  source 1..80: mol_type = other DNA
cacacataacagctgagtctgctgcccggcgcctcgcgcgcgggtctcccccatcccttgccagctcttctgcaagtcag

SEQ ID NO: 132587 - DNA, 80 bp, synthetic construct
  source 1..80: mol_type = other DNA
cctccacggtgtgtggccccgtgtactgcttcacccctagccctgtagtggtcggaaccacggatcgccgcggagtcccc

SEQ ID NO: 132588 - DNA, 80 bp, synthetic construct
  source 1..80: mol_type = other DNA
tacgagaggaggtgtcattcagagtaggactacacgattacccagtggggtcgcaattgccttgcgagcccgaaccggac

SEQ ID NO: 132589 - DNA, 80 bp, synthetic construct
  source 1..80: mol_type = other DNA
acatcgtgctcgcatttctgctgctcgcagacgccagggtctgcgcgtgcctgtggatgatgctgatggtggcgcaggtt

SEQ ID NO: 132590 - DNA, 80 bp, synthetic construct
  source 1..80: mol_type = other DNA
caaaccgttcatcagtgtaaaaaaggacttttttgcctggtaaaacaagccaccctccgctacgagaatttaccaggcaa

SEQ ID NO: 132591 - DNA, 80 bp, synthetic construct
  source 1..80: mol_type = other DNA
ccctaattcgagtattgtctatgaggcggacagtgtcatcatgcacagccctggatgcgtcccgtgtgtaagatctggaa

SEQ ID NO: 132592 - DNA, 80 bp, synthetic construct
  source 1..80: mol_type = other DNA
gcgggcgagctaacgcaggtgaccaccgagcacggcgactgcgtgcacgaggcgcccgccggtggccctgccggccagac

SEQ ID NO: 132593 - DNA, 80 bp, synthetic construct
  source 1..80: mol_type = other DNA
ctggcattacccgcctcaacagtgcaaagttgtgccggcaagtgaggtatgtggccctgtgtactgcttcacgcccagcc

SEQ ID NO: 132594 - DNA, 80 bp, synthetic construct
  source 1..80: mol_type = other DNA
acacagaaaccgggcctccaactgtgccctttcttacccctccatttgtttcacccaatggtttccaagaaagtccccct

SEQ ID NO: 132595 - DNA, 80 bp, synthetic construct
  source 1..80: mol_type = other DNA
ggtggcccggggcgctgaggaggcgtggcgcagatccacgtgctccgcggccgcgcggacgtccgcccagaacttggcgt

SEQ ID NO: 132596 - DNA, 80 bp, synthetic construct
  source 1..80: mol_type = other DNA
agtctcttgaaaccaccatgaggtctcccgtatacactgacaattccacccctccagccgtacctcagacctttcaggta

SEQ ID NO: 132597 - DNA, 80 bp, synthetic construct
  source 1..80: mol_type = other DNA
gcattcatcacgtttttgagagttctttccatcccaccaacagcagggattctgaaaagatggggacagttaaagaaaaa

SEQ ID NO: 132598 - DNA, 80 bp, synthetic construct
  source 1..80: mol_type = other DNA
tatgagaaaatccatgcaggctgaaggaaacagcaaaactgtgacaaattaccctcagtaggtcagaacaaatgtgacga

SEQ ID NO: 132599 - DNA, 80 bp, synthetic construct
  source 1..80: mol_type = other DNA
atcccagccagacgcaggggtgacactcgcgcagcactcctcagcccaaggcctcttagtactttgaagggatcgtcagg

SEQ ID NO: 132600 - DNA, 80 bp, synthetic construct
  source 1..80: mol_type = other DNA
caaagcgggccgggaggtcgtcgccgagcgggacgacccgccgcccccgaccgccccgtccccccaggtgtgccaggacg

SEQ ID NO: 132601 - DNA, 80 bp, synthetic construct
  source 1..80: mol_type = other DNA
gaaagaaattgcgacctcgctggttggatgccagaacatactctgatccactggctctgcgcgagtttaaagagtttgca

SEQ ID NO: 132602 - DNA, 80 bp, synthetic construct
  source 1..80: mol_type = other DNA
gtcggtggcactcgtcgcttttaagatcatgagcggggagaccccggcatttgaagaccttgtcaacctgcttccggccc

SEQ ID NO: 132603 - DNA, 80 bp, synthetic construct
  source 1..80: mol_type = other DNA
caccttcgcggtggggtctcagctgccttgcgagcccgagcttgatgtccaagcgacgtccttgctattaactgacccaa

SEQ ID NO: 132604 - DNA, 80 bp, synthetic construct
  source 1..80: mol_type = other DNA
ctagtagatgccaatttactttggcgtcaagagatgggcagtaatatcaccagagtggaatctgaaacaaaggtggtgat

SEQ ID NO: 132605 - DNA, 80 bp, synthetic construct
  source 1..80: mol_type = other DNA
catgtggtccttcgtcgcgttgctcctggtgttgccacagcaggcctacgccctcgacgccactgaacaaggacacattg

SEQ ID NO: 132606 - DNA, 80 bp, synthetic construct
  source 1..80: mol_type = other DNA
gcgtgggccaaggtcgtcgtcatcctcctgttaactgcgggagtagacgcccacacgcacatcgtgggtggtcaggtggc

SEQ ID NO: 132607 - DNA, 80 bp, synthetic construct
  source 1..80: mol_type = other DNA
cacccgacagctgcaggcggcgatcttccacgcgctcctcaacgccacaacgtaccgggacctggaggaggactggcgcc

SEQ ID NO: 132608 - DNA, 80 bp, synthetic construct
  source 1..80: mol_type = other DNA
cccagagcccaactatcggagggctctgtggagggtgtctgctgaggaatatgtcgaggtcgcccgtgtcaatgactgcc

SEQ ID NO: 132609 - DNA, 80 bp, synthetic construct
  source 1..80: mol_type = other DNA
aaaaaagcatgatgcaaaataaaaaactcaccaaggccatggcaccgagcgttggttttcttgtattccccttagtatgc

SEQ ID NO: 132610 - DNA, 80 bp, synthetic construct
  source 1..80: mol_type = other DNA
agtcgtctgtgccacagatgctcttatgactggctacacaggtgacttcgattccgtcattgactgcaacgtggcagtca

SEQ ID NO: 132611 - DNA, 80 bp, synthetic construct
  source 1..80: mol_type = other DNA
tcctgcgatggtgaacaggactccgaagctgaatcttactcctccatgcctcctcttgaggtggagccgggggaccccga

SEQ ID NO: 132612 - DNA, 80 bp, synthetic construct
  source 1..80: mol_type = other DNA
caacacggcctgggtggtcatgcttcccatgaggtaccgcgcggccgggtagcacagcagggaggcgatagggtgccggt

SEQ ID NO: 132613 - DNA, 80 bp, synthetic construct
  source 1..80: mol_type = other DNA
ggacggctccaatgtgtcggcggcgctagctgcgctagcggaaaaatcattcccgccatcaaaaccccaagaagagagca

SEQ ID NO: 132614 - DNA, 80 bp, synthetic construct
  source 1..80: mol_type = other DNA
gtctaccacggggccggaacgaggaccatcgcgacacccaagggccctgttatccagatgtataccaatgtagaccaaga

SEQ ID NO: 132615 - DNA, 80 bp, synthetic construct
  source 1..80: mol_type = other DNA
ctgggaaagtgatgcagaaattacaggctctagcgaaagagttgatgtgcggcttgatgatgatggaaacttccagctca

SEQ ID NO: 132616 - DNA, 80 bp, synthetic construct
  source 1..80: mol_type = other DNA
gggcccaaatgatccccggcgaaggtcccgcaacttgggtaaggtcatcgataccctaacctgcggctttgccgacctca

SEQ ID NO: 132617 - DNA, 80 bp, synthetic construct
  source 1..80: mol_type = other DNA
gcttcctcaggcggtgatgggggcttcttacggattccagtactctcccgctcagcgggtggagtttctcttgaaggcat

SEQ ID NO: 132618 - DNA, 80 bp, synthetic construct
  source 1..80: mol_type = other DNA
ggagttctctctctacgcgtctccgaacctttggacacctcccacggcatgcttgcgcttaaaatgggcagcggccttac

SEQ ID NO: 132619 - DNA, 80 bp, synthetic construct
  source 1..80: mol_type = other DNA
aaggctttcacagcttgcgttctcattagcatagtcacacttagtctctctcaaatgattaatgtaaatgttaccagagg

SEQ ID NO: 132620 - DNA, 80 bp, synthetic construct
  source 1..80: mol_type = other DNA
cggaagcctgggtggcgcgcgccagggagcgcgcccggcggtgtcggcgcgcgcgcgacccggacgaagaagcggcagaa

SEQ ID NO: 132621 - DNA, 80 bp, synthetic construct
  source 1..80: mol_type = other DNA
ggcaacctatggatggaacctagtaaagctatactccgggaaagatgtattctttacaccacctgagaaatgtgacaccc

SEQ ID NO: 132622 - DNA, 80 bp, synthetic construct
  source 1..80: mol_type = other DNA
ccgtaggcttctcaagtcctctccgtgttatagacaacaaactgacattcacttttacctcacctctccgttatgaaaac

SEQ ID NO: 132623 - DNA, 80 bp, synthetic construct
  source 1..80: mol_type = other DNA
cgctaatgtgcatggcgggcgtgaagcccttcgacgacgagctagtcctgccccactggtacatggcccactacctgctg

SEQ ID NO: 132624 - DNA, 80 bp, synthetic construct
  source 1..80: mol_type = other DNA
aaaggagatattcttaggaccggccgacaaccttggaagccaggggtggcgacttcttgctcccatcactgcttatgccc

SEQ ID NO: 132625 - DNA, 80 bp, synthetic construct
  source 1..80: mol_type = other DNA
aaattggatacagaaagaaacattggtcactttcaaaaatccccatgcgaagaaacaggatgttgttgttttaggatccc

SEQ ID NO: 132626 - DNA, 80 bp, synthetic construct
  source 1..80: mol_type = other DNA
gtggatcgcggctggggcaacggctgcggcctgtttggcaaaggcagcctggtgacctgcgcgaaatttcagtgcctgga

SEQ ID NO: 132627 - DNA, 80 bp, synthetic construct
  source 1..80: mol_type = other DNA
ttcctcttctggcggcgttagatccctggggataacggttttctccaaacgcctaatttgtcgcttgccattgccctttt

SEQ ID NO: 132628 - DNA, 80 bp, synthetic construct
  source 1..80: mol_type = other DNA
cttttgctaaagtagctttacgccctgactgtacttataaaatctctaagacagtaactattacgtcatgtacgtacatt

SEQ ID NO: 132629 - DNA, 80 bp, synthetic construct
  source 1..80: mol_type = other DNA
gctgctccatgtcttactcctggactggggcccttgttactccgactggtcccgaggaggagaagctccctattagtcct

SEQ ID NO: 132630 - DNA, 80 bp, synthetic construct
  source 1..80: mol_type = other DNA
atggaaagtttctagccgatggggggtgttcgggtggtgcttatgatgttatcatttgtgatgaatgtcacgcacaggac

SEQ ID NO: 132631 - DNA, 80 bp, synthetic construct
  source 1..80: mol_type = other DNA
agcctggaggatagaccgccagggtgcggtggcgaacaacccccggttcgagaccggctggatccgccactcccgacgcg

SEQ ID NO: 132632 - DNA, 80 bp, synthetic construct
  source 1..80: mol_type = other DNA
tattatcggcctctggcccttactcttacttgtcctcatgcttccctatcgggcatatgcttggacaggtacagacacat

SEQ ID NO: 132633 - DNA, 80 bp, synthetic construct
  source 1..80: mol_type = other DNA
ttggcaacagggctcagacatccagcgtgcctggaagtctgtcaagcctggcgctcgatttgcgaccagcgacagcttgg

SEQ ID NO: 132634 - DNA, 80 bp, synthetic construct
  source 1..80: mol_type = other DNA
acgcttaccccggcttacaaggctctcttaagccggagtttgtggtggctatgctacatgctggtgctagctgaagccct

SEQ ID NO: 132635 - DNA, 80 bp, synthetic construct
  source 1..80: mol_type = other DNA
cccaccgcggtgatgggagcagcttatggtttccaatactcgcccaaacagcgggtcgaccgccttctcgggatgtggcg

SEQ ID NO: 132636 - DNA, 80 bp, synthetic construct
  source 1..80: mol_type = other DNA
gggcgaaggcatcatgcacgcccgttgcccgtgtggagccgatataactggtcatgtcaaaaacggttcgatgagaatcg

SEQ ID NO: 132637 - DNA, 80 bp, synthetic construct
  source 1..80: mol_type = other DNA
agagtggactcaatgaaacatggaagctcgagcgggctgtgttgggagaagtgaagtcatgtacctggccggagacacac

SEQ ID NO: 132638 - DNA, 80 bp, synthetic construct
  source 1..80: mol_type = other DNA
gtttcttggaggcgtcaaacccacccacatctcttacatcatgctaatattctttgtcttgatggtggttgtggttccgg

SEQ ID NO: 132639 - DNA, 80 bp, synthetic construct
  source 1..80: mol_type = other DNA
catcagaacatcgtagatgtacaatacctctacggggtgtcctcggccgttgtgtcctgggctgtgagatgggagtatgt

SEQ ID NO: 132640 - DNA, 80 bp, synthetic construct
  source 1..80: mol_type = other DNA
tgcctacctcaacactccggggttgcccgtgtgccaggaccatcttgagttctgggaggtggtattcactgggctcaccc

SEQ ID NO: 132641 - DNA, 80 bp, synthetic construct
  source 1..80: mol_type = other DNA
acaggtaggtggaagcccggggtgtataggtatgtctcgcaaggggagaggccgtcgggcatgttcgattcagtcatcct

SEQ ID NO: 132642 - DNA, 80 bp, synthetic construct
  source 1..80: mol_type = other DNA
tgtgtggcgtccgatcccgttactatcaccgtccccccccctcaaccccggcgattgtgggttttttaaaaacgacacgc

SEQ ID NO: 132643 - DNA, 80 bp, synthetic construct
  source 1..80: mol_type = other DNA
tatcggataggccctgtgaccaatgacgtcaccttaacacatcctgtgaccaagtacatcgctacctgcatgcaggccga

SEQ ID NO: 132644 - DNA, 80 bp, synthetic construct
  source 1..80: mol_type = other DNA
tgagtgcttcgagccttcgatgctgaagaagaagcagctaactgtcttagacttacatcctggagcgcggaaaaccagga

SEQ ID NO: 132645 - DNA, 80 bp, synthetic construct
  source 1..80: mol_type = other DNA
cccggtgtcatcattaccactgtagcgggcggccactggggtgtgttatttggcctcgcttactttggtatggcgtgaaa

SEQ ID NO: 132646 - DNA, 80 bp, synthetic construct
  source 1..80: mol_type = other DNA
tgtgtgtccgtgtcttgcaacgcctcgtcccacttcttcaccgcgagggccctttcgtagggattcagaggcggtcccca

SEQ ID NO: 132647 - DNA, 80 bp, synthetic construct
  source 1..80: mol_type = other DNA
ttccaaacatcttccgttagtcgagcacggactgcaattggcggagcaattcaagcagaaagccctcggcgtgctgagcg

SEQ ID NO: 132648 - DNA, 80 bp, synthetic construct
  source 1..80: mol_type = other DNA
gcagccgacggtcgatctctgtgcagcaccacggagactccacactggcaacaaagaacacgccatggttggacaccgtg

SEQ ID NO: 132649 - DNA, 80 bp, synthetic construct
  source 1..80: mol_type = other DNA
tggctgaagccctgagaggactgcccatccggtatcagacatctgcagtgcccagagaacacaatggaaatgagattgtt

SEQ ID NO: 132650 - DNA, 80 bp, synthetic construct
  source 1..80: mol_type = other DNA
ccttagcaaaaatgttattggggtgggaaacatcgtagttttgctccagggtaagctcgtcataggccattttgatgaag

SEQ ID NO: 132651 - DNA, 80 bp, synthetic construct
  source 1..80: mol_type = other DNA
aagtggcttaaaggggactcagtcaagacacatctgacacgtgtggaaggctgggtttggaaaaacaagttcctgacagc

SEQ ID NO: 132652 - DNA, 80 bp, synthetic construct
  source 1..80: mol_type = other DNA
cttgccaggcaacccggccattgcttctctcatgtccttctctgcctccctcaccagcccactgccgacttctacaaccc

SEQ ID NO: 132653 - DNA, 80 bp, synthetic construct
  source 1..80: mol_type = other DNA
tcttttgtcattcaaagaagaaatgcgacgagctagcgagccagctacgtgcacttggcctgaatgccgtcgctttctat

SEQ ID NO: 132654 - DNA, 80 bp, synthetic construct
  source 1..80: mol_type = other DNA
cacccctaggtgtttggtggactacccatacagattgtggcactacccctgcaccgtcaattacaccctccataaagttc

SEQ ID NO: 132655 - DNA, 80 bp, synthetic construct
  source 1..80: mol_type = other DNA
tcgcgtccggacctgctgcctgtagtttcacttcccaccgaaacgcgccggggttcatcgtcttcatcctccgatgacga

SEQ ID NO: 132656 - DNA, 80 bp, synthetic construct
  source 1..80: mol_type = other DNA
ccttccggccccgcatgcacctcactgtccaagattgcaattgttccatctactccggccacgtcaccggccataggatg

SEQ ID NO: 132657 - DNA, 80 bp, synthetic construct
  source 1..80: mol_type = other DNA
gggcagggacccctgtatattaatgcatctcataacttggacataaactataacagaggcctatacctttttaatgcatc

SEQ ID NO: 132658 - DNA, 80 bp, synthetic construct
  source 1..80: mol_type = other DNA
gcgagcgcacgatggcgatctcctcggagggcgtctgggcgagggcggcgaaaaggccccgatagcgctggcgctcgtgt

SEQ ID NO: 132659 - DNA, 80 bp, synthetic construct
  source 1..80: mol_type = other DNA
cgatttggtaaccgcgtacgagcaaacggtgaacgaggagcgcaactttcagaaaagttttaacaatcacgtgcgcaccc

SEQ ID NO: 132660 - DNA, 80 bp, synthetic construct
  source 1..80: mol_type = other DNA
tggtgtacaaaccaggaacttcagatgacagttcagaaatcaatctagttcagcagtccatgcccaacagaccaaactac

SEQ ID NO: 132661 - DNA, 80 bp, synthetic construct
  source 1..80: mol_type = other DNA
ttccacgggctgtgttgagcgagtctctgcatgcaggccgataacagatttccaccaagggtggtggccgatcacttatg

SEQ ID NO: 132662 - DNA, 80 bp, synthetic construct
  source 1..80: mol_type = other DNA
cgcggaggcacccccaccgtatacaccctatcttcaaccgcagttaatacggaaaaaataaatccgcggaacgctggttg

SEQ ID NO: 132663 - DNA, 80 bp, synthetic construct
  source 1..80: mol_type = other DNA
gggctggtgaggcggtggtgggagggggcggcgtatagcaggacaacgaccggcggcgatgttttgtgccgcgtgctgcc

SEQ ID NO: 132664 - DNA, 80 bp, synthetic construct
  source 1..80: mol_type = other DNA
acggacctgttgtgccccacggactgttttaggaagcatcctgataccacttacctcaaatgcggctctgggccctggct

SEQ ID NO: 132665 - DNA, 80 bp, synthetic construct
  source 1..80: mol_type = other DNA
ggagagtttgcagccgcccaagggtggttggtacgggtgcacctggatgaattccaccgggtttgtgaaaacatgtggtg

SEQ ID NO: 132666 - DNA, 80 bp, synthetic construct
  source 1..80: mol_type = other DNA
tgcggctattcgcacattggttttaaatctaatgttttccataaacgagggatgtctgcttttattggcgctgattccaa

SEQ ID NO: 132667 - DNA, 80 bp, synthetic construct
  source 1..80: mol_type = other DNA
tcagggattgacaccaatgcatactacgtgatgactgtcggaacaaagacgttcttggtccatcgtgagtggtttatgga

SEQ ID NO: 132668 - DNA, 80 bp, synthetic construct
  source 1..80: mol_type = other DNA
aattgtacgtgctacagacgatttggtgcgacagataaaaattttaagtgatccaatgatccaatccggtttacaacctt

SEQ ID NO: 132669 - DNA, 80 bp, synthetic construct
  source 1..80: mol_type = other DNA
cactccggacgggccagacccttctccttaacatcatgggtgcgtgggttgcctcccaactggcgaccccgacagcagct

SEQ ID NO: 132670 - DNA, 80 bp, synthetic construct
  source 1..80: mol_type = other DNA
cacgcgtagcgcaggggggtgtacgtgcccacctcgggtgccgtcgacccgccgtcaaacgcggccagggccacgcacgc

SEQ ID NO: 132671 - DNA, 80 bp, synthetic construct
  source 1..80: mol_type = other DNA
gggaaaatatgaaaatataagtgattcagttaatccaaaaacatttccaataaaattactttttaatgataaaggtattc

SEQ ID NO: 132672 - DNA, 80 bp, synthetic construct
  source 1..80: mol_type = other DNA
agtgcgatttggtttatgtggctaggggcccgcttcctggagtttgaagctctcggattcctcaatgaagaccactggct

SEQ ID NO: 132673 - DNA, 80 bp, synthetic construct
  source 1..80: mol_type = other DNA
aaattccaaccagagtccccagcgaggctagcgtctgcaatattgaatgcccacaaagatggggtctgtggaatcagatc

SEQ ID NO: 132674 - DNA, 80 bp, synthetic construct
  source 1..80: mol_type = other DNA
gtggttgctggccatcctcggacctgcctacctcctcaaggacatcctgacacaggtgccatacttcgtcagagcccacg

SEQ ID NO: 132675 - DNA, 80 bp, synthetic construct
  source 1..80: mol_type = other DNA
taggctcgaagcggcgtgcaattttacccgtggggaccgttgcaacctggaagaccgggataggagtcagctcagcccct

SEQ ID NO: 132676 - DNA, 80 bp, synthetic construct
  source 1..80: mol_type = other DNA
tgcgatagcctcgatgatgtccttcagtgccgcccttaccagcccactctctaccagtaccaccatcctcctcaacatca

SEQ ID NO: 132677 - DNA, 80 bp, synthetic construct
  source 1..80: mol_type = other DNA
caggacctcgagcgcctgtcgcgcctctgggagcacgagctggtgcgctgcttcaagattctgcgccaccgcaacaacca

SEQ ID NO: 132678 - DNA, 80 bp, synthetic construct
  source 1..80: mol_type = other DNA
aaggccagcaaatagcagaacaattcaagaacaaaattctcggcttgatacaggctaccagcaaacaggcagaagaactc

SEQ ID NO: 132679 - DNA, 80 bp, synthetic construct
  source 1..80: mol_type = other DNA
aacgtgttttttatggaacgttccctacctgtcgtgtcatctctcgggggatggtggtgggcctgtgtgtgtgtcttgtg

SEQ ID NO: 132680 - DNA, 80 bp, synthetic construct
  source 1..80: mol_type = other DNA
gggtgttgatgaagtacgtcgagtgatcgcagtaccgcagaatctggtttgccatgtagtacatcgccagctcgctcacg

SEQ ID NO: 132681 - DNA, 80 bp, synthetic construct
  source 1..80: mol_type = other DNA
actcctggctaggtaacatcatcatgtatgcacccaccttatgggcaaggatgattctgatgacccactttttctccatc

SEQ ID NO: 132682 - DNA, 80 bp, synthetic construct
  source 1..80: mol_type = other DNA
ggacaggtccgagctcagcccgctgctgctgtccaccacacagtggcagattcttccatgctccttcacaactttgccag

SEQ ID NO: 132683 - DNA, 80 bp, synthetic construct
  source 1..80: mol_type = other DNA
acttcgtccctatcgaggccctggatgttgccatgaggacaccgagttttacagacaatggcacaccaccagccgtacca

SEQ ID NO: 132684 - DNA, 80 bp, synthetic construct
  source 1..80: mol_type = other DNA
gaagagaagtatgtggactacatgagttcattgaggagatatgaagaagtcacattagtggaggactcagtgttgtaaat

SEQ ID NO: 132685 - DNA, 80 bp, synthetic construct
  source 1..80: mol_type = other DNA
ggacgtcatcacaagacgggaccaacgaggatcaggccaagtggtcacatacgccctcaataccctcaccaacataaagg

SEQ ID NO: 132686 - DNA, 80 bp, synthetic construct
  source 1..80: mol_type = other DNA
tcaagtgggagtatgtcatcctcttgtttcttctgcttgcagacgcgcgcatctgctcctgcttgtggatgatgctactc

SEQ ID NO: 132687 - DNA, 80 bp, synthetic construct
  source 1..80: mol_type = other DNA
atcccaacagcatttgcagctcatcaacaccaatggtagctggcacattaacaggactgctttgaactgcaatgacagcc

SEQ ID NO: 132688 - DNA, 80 bp, synthetic construct
  source 1..80: mol_type = other DNA
ttcgccgacctcatggggtacatcccgctcgtcggcgctcccgtagggggcgtcgcaagagccctcgcgcatggcgtgag

SEQ ID NO: 132689 - DNA, 80 bp, synthetic construct
  source 1..80: mol_type = other DNA
gtgtacgtggatgaatgctaccggatttaccaagacttgcggtgcaccaccctgccgcattaggccggatttcaacgcca

SEQ ID NO: 132690 - DNA, 80 bp, synthetic construct
  source 1..80: mol_type = other DNA
agacagtcgatttcagcttggaccccaccttcaccattgagacgacgaccgtgccccaggacgcagtgtcgcgctcacaa

SEQ ID NO: 132691 - DNA, 80 bp, synthetic construct
  source 1..80: mol_type = other DNA
gtggctcaaagcaaaattactgcctcgcatgcctggcgtccccttcctttcttgtcagaaggggtacaaggtggaatggc

SEQ ID NO: 132692 - DNA, 80 bp, synthetic construct
  source 1..80: mol_type = other DNA
aacgctgccgggtaacccagcaatagcctccctcatgtcattctcagcctcgcttacgagcccgctctccacctccacga

SEQ ID NO: 132693 - DNA, 80 bp, synthetic construct
  source 1..80: mol_type = other DNA
ggaaagcaaagaggggctgggggagcggcaccaccggggcctgaacaaacaaaccacagacacggttacagtttattcgg

SEQ ID NO: 132694 - DNA, 80 bp, synthetic construct
  source 1..80: mol_type = other DNA
tttcaagatcatgtctggcgagaagccctctgtggaggacgtcgtcaacctgttgccagccattctttcccccggcgctc

SEQ ID NO: 132695 - DNA, 80 bp, synthetic construct
  source 1..80: mol_type = other DNA
acatccgtcgtggactccaatatgacgccctctcttgagggggctgatggggtctcagatgatggttcgtacgactcaat

SEQ ID NO: 132696 - DNA, 80 bp, synthetic construct
  source 1..80: mol_type = other DNA
cgcaactcggaagacttcagaacggtcgcaaccccgtggacggcgtcagcctatccccaaggcgcgccagcccacgggcc

SEQ ID NO: 132697 - DNA, 80 bp, synthetic construct
  source 1..80: mol_type = other DNA
caagttcagcgtgtccggcgagggcgagggcgatgccacctacggcaagctgaccctgaagttcatctgcaccaccggca

SEQ ID NO: 132698 - DNA, 80 bp, synthetic construct
  source 1..80: mol_type = other DNA
gactggtcggtataagatgccgacatccggggtcttgatttacgagggggcaattaataaagactgttgatggttaaatc

SEQ ID NO: 132699 - DNA, 80 bp, synthetic construct
  source 1..80: mol_type = other DNA
ccgcgcgagcggagtgctcaccaccagcatgggcaacacactcacgtgctacgtaaaggccagggcggcgtgcaacgccg

SEQ ID NO: 132700 - DNA, 80 bp, synthetic construct
  source 1..80: mol_type = other DNA
gtcattgggagtattttttttactcatgcagaggaaggggatcgggaaaatcggactaggagggacagttctgggagctg

SEQ ID NO: 132701 - DNA, 80 bp, synthetic construct
  source 1..80: mol_type = other DNA
agtacctggccggtctctccacactgccaggcaaccctgccgtggcttcccttatggccttcaccgcctctgtaaccagc

SEQ ID NO: 132702 - DNA, 80 bp, synthetic construct
  source 1..80: mol_type = other DNA
atggtttccaacaagcagaacaacatggtcaatccacgctcatcatcagtggatgactactgaagatatgctcaaagtgt

SEQ ID NO: 132703 - DNA, 80 bp, synthetic construct
  source 1..80: mol_type = other DNA
cgcgctccggtcacgttcggggatctgctgggccggctgccccgctacctggcgtgcctgaccgcggtgatcgggaccga

SEQ ID NO: 132704 - DNA, 80 bp, synthetic construct
  source 1..80: mol_type = other DNA
gaccatgaaaataggaatagggattctgctgacatggttgggattaaattcaaggagcacgtcactttcgatgacgtgcg

SEQ ID NO: 132705 - DNA, 80 bp, synthetic construct
  source 1..80: mol_type = other DNA
cctaattggggccccaatgacccccggcgtcgatctcgcaacctgggtaaggtcatcgatacccttacttgcggattcgc

SEQ ID NO: 132706 - DNA, 80 bp, synthetic construct
  source 1..80: mol_type = other DNA
acctttgcggaactcgacggtgccgcgcaagcggcgtattcactaccagctttgggaacacactgacgtgctatcttaag

SEQ ID NO: 132707 - DNA, 80 bp, synthetic construct
  source 1..80: mol_type = other DNA
gtacatcgccacatgcatgcaagctgaccttgaggtcatgaccagcacgtgggtcctagctggaggagtcctggcagccg

SEQ ID NO: 132708 - DNA, 80 bp, synthetic construct
  source 1..80: mol_type = other DNA
cccatggtatccggatgcgccttgccgccccccaaagtaccaccagttcctcctccaaggaggaagaggcttatccgcct

SEQ ID NO: 132709 - DNA, 80 bp, synthetic construct
  source 1..80: mol_type = other DNA
gtaaaaaaacctattaaaaaacaccactcgacacggcaccagctcaatcagtcacagtgtaaaaagggccaagtacagag

SEQ ID NO: 132710 - DNA, 80 bp, synthetic construct
  source 1..80: mol_type = other DNA
tatgtggaacttcatcagtgggatacaatatctggcgggactatcgacgttgcctggtaatcctgccattgcatcgctga

SEQ ID NO: 132711 - DNA, 80 bp, synthetic construct
  source 1..80: mol_type = other DNA
gctctggaaaaccctgggaaggaacaaaagacccaggttatgcacaagggaagagtttacaaaaaaggttagaactaacg

SEQ ID NO: 132712 - DNA, 80 bp, synthetic construct
  source 1..80: mol_type = other DNA
gcgctcactaatataaaggaagtctggaaagacctgctcaaggacaagactaccccaataccgacctcaataatggccaa

SEQ ID NO: 132713 - DNA, 80 bp, synthetic construct
  source 1..80: mol_type = other DNA
attgcctcaagtgcactgttatggatggccagtgtggaaccccattggatagcggcctctatcatactggagttctttct

SEQ ID NO: 132714 - DNA, 80 bp, synthetic construct
  source 1..80: mol_type = other DNA
gtttctaccgctttggcagagctggccgcaaagacctttggccagtcagagccgagctcagaccgtgatacagaccttac

SEQ ID NO: 132715 - DNA, 80 bp, synthetic construct
  source 1..80: mol_type = other DNA
agaggtggagccccgcggcccaggtaaaagttttggggaaggttgcccatgtcggtgacggggttgcggacggttgccgt

SEQ ID NO: 132716 - DNA, 80 bp, synthetic construct
  source 1..80: mol_type = other DNA
cacctcaaacctacagatgtctcggtacagttccaaacacgtagtgagggcgagttccaaccaagacagacagcctgatc

SEQ ID NO: 132717 - DNA, 80 bp, synthetic construct
  source 1..80: mol_type = other DNA
acgctcggagaaaacaactcggccgcgtaaggaaaagacttccgccattgctactcgtcaggatacaccagtcgcgcagg

SEQ ID NO: 132718 - DNA, 80 bp, synthetic construct
  source 1..80: mol_type = other DNA
gattcttccctcggtcattggattctggataacccttcagtacacaaagagaggaggtgtcctttgggacacaccatcac

SEQ ID NO: 132719 - DNA, 80 bp, synthetic construct
  source 1..80: mol_type = other DNA
ttcgttgtcagtggtctagtaggggcggctgtcggaagtataggcctgggtaagatactggtggacgttttggccgggta

SEQ ID NO: 132720 - DNA, 80 bp, synthetic construct
  source 1..80: mol_type = other DNA
ttcgcggaaatgaacactggaggagatgttgctcatctggcgctgatagcggcattcaaagtcagacctgcgttgctggt

SEQ ID NO: 132721 - DNA, 80 bp, synthetic construct
  source 1..80: mol_type = other DNA
tctgcaccacatttcggccccaccggttcttcacaatcttggccttgctagactgctccttcagcgcgcgctgcccgttt

SEQ ID NO: 132722 - DNA, 80 bp, synthetic construct
  source 1..80: mol_type = other DNA
accatactagccctatttcttgcccattacataggcacctccttgacccagaaggtggttatttttatactactaatgct

SEQ ID NO: 132723 - DNA, 80 bp, synthetic construct
  source 1..80: mol_type = other DNA
atattgtgggaaaacagtatcaaattaacggttgttgtgggcgacataattggggtcttagagcaagggaaaagaacact

SEQ ID NO: 132724 - DNA, 80 bp, synthetic construct
  source 1..80: mol_type = other DNA
gtaccttgggagaagtctggaaagaaaggctcaaccgcctaagcaaggaggagttttcaaggtatcgaaaagaggccata

SEQ ID NO: 132725 - DNA, 80 bp, synthetic construct
  source 1..80: mol_type = other DNA
ctcatggggtacatcccgctcgtcggcgctcccgtaggtggcgtcgcaagagccctcgcgcatggtgtgagggcccttga

SEQ ID NO: 132726 - DNA, 80 bp, synthetic construct
  source 1..80: mol_type = other DNA
ctggcagaaggtcgaggctttctgggcaaagcacatgtggaacttcatcagcgggatacagtacctggccggtttgtcca

SEQ ID NO: 132727 - DNA, 80 bp, synthetic construct
  source 1..80: mol_type = other DNA
tataagagttaataacacttttcagggtacatattatggttttagaaaagatggaactggaatgaaccaatatacagtta

SEQ ID NO: 132728 - DNA, 80 bp, synthetic construct
  source 1..80: mol_type = other DNA
gggggaagctgtgttacagtgatggcaccagagaaaccaacactggacttcaaggtgatgaagatggaggctaccgagtt

SEQ ID NO: 132729 - DNA, 80 bp, synthetic construct
  source 1..80: mol_type = other DNA
aacagcaacgccgccaggctctgtcactgtcccccatcctaacataacagagacagccctcccgactacgggagaaatac

SEQ ID NO: 132730 - DNA, 80 bp, synthetic construct
  source 1..80: mol_type = other DNA
cgacactacacggtcccacaccactgttatacaggctgggtcccgttcaacatgacacttgcttgacacaccccgtcacg

SEQ ID NO: 132731 - DNA, 80 bp, synthetic construct
  source 1..80: mol_type = other DNA
gccacctggcaggccgaaacggccatgcacaccagcaaaacggactccgcttgcgtggccgtgcggagttacctggtccg

SEQ ID NO: 132732 - DNA, 80 bp, synthetic construct
  source 1..80: mol_type = other DNA
tacaaattcgctctctggagggtgagcgcggatgagtatgttgaggtgcgacgtgtgggagagcaccattacatcactgg

SEQ ID NO: 132733 - DNA, 80 bp, synthetic construct
  source 1..80: mol_type = other DNA
gggtgcgtacgacatcataatctgtgatgagtgccactcgacggactccacgtcgattctgggtataggcactgttctcg

SEQ ID NO: 132734 - DNA, 80 bp, synthetic construct
  source 1..80: mol_type = other DNA
ggagatacaggtgttgtctacggccacccagactttcctggcaaccgccatcaatggcgtgctctggacagtctaccacg

SEQ ID NO: 132735 - DNA, 80 bp, synthetic construct
  source 1..80: mol_type = other DNA
cgactaggaagacttcagaacggtcacagcccaggggtagacgacagcctataccaacggcgcgtcgccccacgggccgt

SEQ ID NO: 132736 - DNA, 80 bp, synthetic construct
  source 1..80: mol_type = other DNA
aagcctttggatgaccggtttgccacgtcgctccactttctcaatgctatgtcgaaagtgcgaaaagacatacaagagtg

SEQ ID NO: 132737 - DNA, 80 bp, synthetic construct
  source 1..80: mol_type = other DNA
tgggtgggtttgaacaccggttttccgccgcttgcgactggaccaggggacagcgctgcgacatcgaggatcgcgaccgc

SEQ ID NO: 132738 - DNA, 80 bp, synthetic construct
  source 1..80: mol_type = other DNA
caggtccgacccgcgcgcctccgcgtgaaggcgcgtcccgcacacccacccgttgatggccagccgcacgacggcatccg

SEQ ID NO: 132739 - DNA, 80 bp, synthetic construct
  source 1..80: mol_type = other DNA
gggcgaaggacgtccggaacctatccagcaaggccactgaccatatccgctccgtatggaaggacttgctggaagacact

SEQ ID NO: 132740 - DNA, 80 bp, synthetic construct
  source 1..80: mol_type = other DNA
tgcctcaaaggttcttctggtggtcctgtcatgtgcccttcggggcacgtggtgaggatcttcagggcggcagtgtgcac

SEQ ID NO: 132741 - DNA, 80 bp, synthetic construct
  source 1..80: mol_type = other DNA
gtacatcatggcatgcatgtcagctgaccttgaggtgatcaccagcacctgggttttggccggtggaatactagccgcaa

SEQ ID NO: 132742 - DNA, 80 bp, synthetic construct
  source 1..80: mol_type = other DNA
tttacccggttgctctttttctatcttcctcttagctcttttgtcttgcctcacaacaccagtctctgccgtacaagtca

SEQ ID NO: 132743 - DNA, 80 bp, synthetic construct
  source 1..80: mol_type = other DNA
gggaagcgggcccctactctccctccagcctcccctccaggtgcgcctttcagtttcatggccatgacgggtccgacgag

SEQ ID NO: 132744 - DNA, 80 bp, synthetic construct
  source 1..80: mol_type = other DNA
gacaaaacaccattggcggcttggaacgacattccatacctaggaaagagagaggacatctggtgtggaagccttatcgg

SEQ ID NO: 132745 - DNA, 80 bp, synthetic construct
  source 1..80: mol_type = other DNA
gcagaaaccaagatgaactgattggtagagcccgaatttcccagggagccgggtggtctttgaaggagacggcctgtttg

SEQ ID NO: 132746 - DNA, 80 bp, synthetic construct
  source 1..80: mol_type = other DNA
gggcccgaccccgcatattactcctgtgcctactcctactgtccgtaggggtaggcattttcctgctgcctgctcggtga

SEQ ID NO: 132747 - DNA, 80 bp, synthetic construct
  source 1..80: mol_type = other DNA
tttttcctttggaggtgctcccgcagtgaggacactgaaggcatttaagggcgtacagttttggagccaaaaaaacagat

SEQ ID NO: 132748 - DNA, 80 bp, synthetic construct
  source 1..80: mol_type = other DNA
tgcccaggtcttcatcgcctcgccggaacaccataagtttgtccagggttgtaactgctccatatacccgggtcatctta

SEQ ID NO: 132749 - DNA, 80 bp, synthetic construct
  source 1..80: mol_type = other DNA
aaggtgagcagcggactttggcaagagcaatcattgagctgacatacaggcacaaagtggtcaaggtcatgcgcccggca

SEQ ID NO: 132750 - DNA, 80 bp, synthetic construct
  source 1..80: mol_type = other DNA
ggcgaggtgcaggtcatctcgaccgctacccagtccttccttgggaccacgatcaacggtgtgctctggactgtctatca

SEQ ID NO: 132751 - DNA, 80 bp, synthetic construct
  source 1..80: mol_type = other DNA
actggtacaccaatacctacaactatcatggcaaaaaatgaggtcttctgcgtggacacgtcgaagggaggccgcaaacc

SEQ ID NO: 132752 - DNA, 80 bp, synthetic construct
  source 1..80: mol_type = other DNA
gcagcttacgccacccagggatacaaggtgctagttctgaatccgtctgtagcggcaacgctgagcttcggggcatacat

SEQ ID NO: 132753 - DNA, 80 bp, synthetic construct
  source 1..80: mol_type = other DNA
tacaccaaaacatcgtggatgtgcagtacttgtacggcctaacaccagctattgtgaggtacgtcgtcaagtgggagtgg

SEQ ID NO: 132754 - DNA, 80 bp, synthetic construct
  source 1..80: mol_type = other DNA
gctgtgcatgctgacatgggttattggatagagagctcaaaaaaccagacctggcagatagagaaagcatcccttattga

SEQ ID NO: 132755 - DNA, 80 bp, synthetic construct
  source 1..80: mol_type = other DNA
cccagaggtcacgctgtcgggattttccgggcagctgtgtgctctcggggcgtggctaagtccatagacttcatccctgt

SEQ ID NO: 132756 - DNA, 80 bp, synthetic construct
  source 1..80: mol_type = other DNA
cctacgtggtatcaggaaaggcaaccgacatgtggctggaccgggctgccgatatcagctgggaaatggaagctgcaatc

SEQ ID NO: 132757 - DNA, 80 bp, synthetic construct
  source 1..80: mol_type = other DNA
gcctgcaaggctgcggggatagttgcgcccacaatgctggtatgcggcgatgacctagtagtcatctcagaaagccaggg

SEQ ID NO: 132758 - DNA, 80 bp, synthetic construct
  source 1..80: mol_type = other DNA
tcttggggatagggactgttctcgaccaggcggagactagcggagtgagactcacagtcctcgcaaccgctacccccccc

SEQ ID NO: 132759 - DNA, 80 bp, synthetic construct
  source 1..80: mol_type = other DNA
gccatctctagcatgaccagacccaggcgcggaaacgtgtactgggtgcgcgactccgtcacgggcgtgcgcgtgcccgt

SEQ ID NO: 132760 - DNA, 80 bp, synthetic construct
  source 1..80: mol_type = other DNA
tccagctcagcgggtcgaatatcttctggccgcttggcggtcgaagaaggttcccatggggttctcgtatgacacccgct

SEQ ID NO: 132761 - DNA, 80 bp, synthetic construct
  source 1..80: mol_type = other DNA
cattaagggcggtaggcatctcatcttctgccactctaagaaaaagtgtgatgaacttgccaagcaattgactagccaag

SEQ ID NO: 132762 - DNA, 80 bp, synthetic construct
  source 1..80: mol_type = other DNA
gcaagtattacacgcggtcctcggatgggcggctctgcccggccgtccccgtgtttgtacacgagtttgtttcgtccgaa

SEQ ID NO: 132763 - DNA, 80 bp, synthetic construct
  source 1..80: mol_type = other DNA
agggcatacgctgataacggagaaacggcggcttcgctgggactgttgacaatcgctgttattaccatattcactcttac

SEQ ID NO: 132764 - DNA, 80 bp, synthetic construct
  source 1..80: mol_type = other DNA
gtgtctggtgtattttgcggcccatttttgcaccaggggggtcctgagcgggacgtatctgcgtcaggtgcacggcctga

SEQ ID NO: 132765 - DNA, 80 bp, synthetic construct
  source 1..80: mol_type = other DNA
gaaccgcttcacgcggagggggatgagagggagatatccgtcgcggcggagatcctgcgaaaatccaggaagttcccctc

SEQ ID NO: 132766 - DNA, 80 bp, synthetic construct
  source 1..80: mol_type = other DNA
cgacaccacgccccccactactcccatgacgaccttgccgaccgcgcgccccaagtcccccatcccctcgaagaacgcgc

SEQ ID NO: 132767 - DNA, 80 bp, synthetic construct
  source 1..80: mol_type = other DNA
tgtcccctcgcgggtctcgccctacttggggcccaaatgacccccggcgtaggtcccgcaacttgggtaaggtcatcgat

SEQ ID NO: 132768 - DNA, 80 bp, synthetic construct
  source 1..80: mol_type = other DNA
atcagtccactaagcaactctctcatccgccaccacaacatggtgtactccaccacgtcacgcagtgcggcactccggca

SEQ ID NO: 132769 - DNA, 80 bp, synthetic construct
  source 1..80: mol_type = other DNA
cttaacagctttgaatgacatgggaaaggtaagaaaagacataccgcaatgggaaccttcaaaaggatggaatgattggc

SEQ ID NO: 132770 - DNA, 80 bp, synthetic construct
  source 1..80: mol_type = other DNA
ccagttcaaggagaaaatcctcggattgctgcagcgagccacccaacagcaagctgtcattgagcccatagtagctacca

SEQ ID NO: 132771 - DNA, 80 bp, synthetic construct
  source 1..80: mol_type = other DNA
aaacacttcaggtttttggaggtatctgtttggctctaccttaagcaaggtggtaaatagggtgaaagaagactatagag

SEQ ID NO: 132772 - DNA, 80 bp, synthetic construct
  source 1..80: mol_type = other DNA
tgcttcagcagaaagcccagcggtccgaggaggatgtccacgcgcttgtcgggcttctggtaggcgctctggaggctggc

SEQ ID NO: 132773 - DNA, 80 bp, synthetic construct
  source 1..80: mol_type = other DNA
atggagcaggctccaaaacactggcaggcctcaaggggccggtatgccagatgtacacaaatgtggatcaggacttggtg

SEQ ID NO: 132774 - DNA, 80 bp, synthetic construct
  source 1..80: mol_type = other DNA
gttgtccagccgctagtgagggccctgacgactccggcgaagacgctggcgctgcttccgacgtggagtcctatagctcc

SEQ ID NO: 132775 - DNA, 80 bp, synthetic construct
  source 1..80: mol_type = other DNA
tctcctcctggtcctagctctaccgcagcaagcttatgctctggacgccgtcgaccagggggaactggggttggttgtgt

SEQ ID NO: 132776 - DNA, 80 bp, synthetic construct
  source 1..80: mol_type = other DNA
gctgaccaaccggcggcagaagatctcctcgctgtttaaactgtgcaacgaggggaagctcattctgcgccgggtgcagc

SEQ ID NO: 132777 - DNA, 80 bp, synthetic construct
  source 1..80: mol_type = other DNA
gtagtccagaagaagaaaagttgccaattaaccccctgagtaactcactgttacggtaccacaacaaagtgtactgcaca

SEQ ID NO: 132778 - DNA, 80 bp, synthetic construct
  source 1..80: mol_type = other DNA
cacgacggtcagcacgtacatggccgtgaccgtcggggccgattcgaggacgtccgtcggaagcggtggccgcacgcagg

SEQ ID NO: 132779 - DNA, 80 bp, synthetic construct
  source 1..80: mol_type = other DNA
atcgcctggggccttggtcgtgggggtggtgtgcgcggcgattctgcggagtcacgtggggccttttgaggggcccgtgc

SEQ ID NO: 132780 - DNA, 80 bp, synthetic construct
  source 1..80: mol_type = other DNA
cggcacaatcccttctacaccacctggcgatgatgaaacagcatctgatgctgggtcctacagctccatgccccctctag

SEQ ID NO: 132781 - DNA, 80 bp, synthetic construct
  source 1..80: mol_type = other DNA
tcgggggcgtcggcgaacaggttcttcagcaccaccacgaagctgggatgcaagccggacagagccgtcgccgtgtccgg

SEQ ID NO: 132782 - DNA, 80 bp, synthetic construct
  source 1..80: mol_type = other DNA
ccagggcgtacaggtcaaccgctagcccgacgtcgtgcttcaggcggtggttggtaaattcggcccgttcgttgttaagg

SEQ ID NO: 132783 - DNA, 80 bp, synthetic construct
  source 1..80: mol_type = other DNA
cgctgggttttggtgcttacatgtccaaggcccatgggattgatcctaacatcagaactggggtgaggacaatcactact

SEQ ID NO: 132784 - DNA, 80 bp, synthetic construct
  source 1..80: mol_type = other DNA
gagacgaaggtcatcacgtggtgggctgacacggccgcatgtggggacatacttgccggccttcctgtatcagctaggcg

SEQ ID NO: 132785 - DNA, 80 bp, synthetic construct
  source 1..80: mol_type = other DNA
ctctacttatggcaagttcttcgccgacggggggtgctcgggcggcgcgtatgacgtaatcatatgcgacgagtgccatt

SEQ ID NO: 132786 - DNA, 80 bp, synthetic construct
  source 1..80: mol_type = other DNA
aagccctctatggaagatgtcatcaatctactgcctgggatcctgtctccgggagccctggtggtgtgggtcatctgcgc

SEQ ID NO: 132787 - DNA, 80 bp, synthetic construct
  source 1..80: mol_type = other DNA
cagagcaattcaagcagaaagtgctcggactactccaggccagtgccaagcaggcagaagagatcaagcctgccgtaact

SEQ ID NO: 132788 - DNA, 80 bp, synthetic construct
  source 1..80: mol_type = other DNA
tctaggatttaaccagcaattacaatccattttagttttaccggggggatttgcggcatgtttttgtattaccgataccc

SEQ ID NO: 132789 - DNA, 80 bp, synthetic construct
  source 1..80: mol_type = other DNA
acacagggacgcccgcgcccgcgagcggcgagagagccccgcccaattccacgcgatcggccagcgaatcgagacacagg

SEQ ID NO: 132790 - DNA, 80 bp, synthetic construct
  source 1..80: mol_type = other DNA
aaacatctggtggctgtccatcatggtttgatagtatttctcactgtggctttggcggtggtgggacgaaacatttacaa

SEQ ID NO: 132791 - DNA, 80 bp, synthetic construct
  source 1..80: mol_type = other DNA
tctcgtggagacgtggaaaagaccggactacaaaccacccacagtgttcggctgtgctcttccaccatctagccagaccc

SEQ ID NO: 132792 - DNA, 80 bp, synthetic construct
  source 1..80: mol_type = other DNA
caggccactgtgtgcgcgagggcaaaggctcctcctcctagttgggacgttatgtggcaatgcctcatccgactcaagcc

SEQ ID NO: 132793 - DNA, 80 bp, synthetic construct
  source 1..80: mol_type = other DNA
ccagatgttgcgcaggtggcgaaagcgttccatggtgggcacgctctgccccgtgaggcgggcgcagtcctgtacgctct

SEQ ID NO: 132794 - DNA, 80 bp, synthetic construct
  source 1..80: mol_type = other DNA
aaaaacgagggaaaaggaggtcaacaacagattggactggatggttgctggtagccatgctgcttagcatcgcactagcc

SEQ ID NO: 132795 - DNA, 80 bp, synthetic construct
  source 1..80: mol_type = other DNA
aacgcctcgaggtgttgggtggcggtgacccccacggtggccaccagggacggcaaactccccacaacgcagcttcgacg

SEQ ID NO: 132796 - DNA, 80 bp, synthetic construct
  source 1..80: mol_type = other DNA
cccgcggggccggaggaacgcacccgggcccacaaactactgtgggccgcggaacccctggatgcctgcggtcccctgcg

SEQ ID NO: 132797 - DNA, 80 bp, synthetic construct
  source 1..80: mol_type = other DNA
ccccaaacgccaagaaaacggcacatgcgagcccaacccgcgcctcaacttctaccccgtatttgccgtgccagaggtgc

SEQ ID NO: 132798 - DNA, 80 bp, synthetic construct
  source 1..80: mol_type = other DNA
atagctgcctacgccactcttgacctttggccctttgttgcgctgcttttggcgctgccccaacaggcttacgccctaga

SEQ ID NO: 132799 - DNA, 80 bp, synthetic construct
  source 1..80: mol_type = other DNA
aagagctcccgtaggataaggtatcgccccagaaaggccctcttcaggagcccaaactgggcgtggacggccgcggtggt

SEQ ID NO: 132800 - DNA, 80 bp, synthetic construct
  source 1..80: mol_type = other DNA
gcagctcccatgcgagcccgaaccggacgtggcggtgctcacctccatgcttaccgacccctcccacattacagcagaga

SEQ ID NO: 132801 - DNA, 80 bp, synthetic construct
  source 1..80: mol_type = other DNA
ttaaaggaattagctgagaaatcattcggccaggctctccccactacagattctggactctcatctgaggacggcaatca

SEQ ID NO: 132802 - DNA, 80 bp, synthetic construct
  source 1..80: mol_type = other DNA
gttcctcatgctaagagacaggatgtgacagtgctgggatctcaggaaggagccatgcattctgccctcgctggagccac

SEQ ID NO: 132803 - DNA, 80 bp, synthetic construct
  source 1..80: mol_type = other DNA
cgggcataggataccataattttattggtgggtcgtttgttcggggacaagcgcgctcgtctgacgtttgggctactcgt

SEQ ID NO: 132804 - DNA, 80 bp, synthetic construct
  source 1..80: mol_type = other DNA
tccgacggcgcctccaacacagccgccgctcccgccccccactagcgcccctgcagccgttgctctctccggagccggcg

SEQ ID NO: 132805 - DNA, 80 bp, synthetic construct
  source 1..80: mol_type = other DNA
ggctggtacgcgatcagaaagcccccattggccaggtagtactgcggctggcccaccttgatgtgcgtcgcgttgtacct

SEQ ID NO: 132806 - DNA, 80 bp, synthetic construct
  source 1..80: mol_type = other DNA
tcccctccgaccccctgacgcccctccgaccccctgacgcccctccgaccccctgacgccactccgaccgcctgacgccc

SEQ ID NO: 132807 - DNA, 80 bp, synthetic construct
  source 1..80: mol_type = other DNA
taatggaatacctaactaccgagatatgatattacgaacctcgggggatctattacaaatacccgcattggctgggtatg

SEQ ID NO: 132808 - DNA, 80 bp, synthetic construct
  source 1..80: mol_type = other DNA
tcaatagagtggcagcatgcctcaggaagcttggggcgccacccctgagagcctggaggcatcgggccagggcagtcaga

SEQ ID NO: 132809 - DNA, 80 bp, synthetic construct
  source 1..80: mol_type = other DNA
cagcgatgtccacacggtgaccaggttgcaaaggtccactggcgtttaaaagtcgtattaaagcaacgggggtgtaagcc

SEQ ID NO: 132810 - DNA, 80 bp, synthetic construct
  source 1..80: mol_type = other DNA
tgccccccacttgggaacagtgagaattgagggagatgataatgagtcagccagatacaatggtaaggatgttcttctca

SEQ ID NO: 132811 - DNA, 80 bp, synthetic construct
  source 1..80: mol_type = other DNA
ttttaccaacagcgatagtttaaatagggattcgtatctaggtcacttaattactttgtatcgcgaagccattggtcaag

SEQ ID NO: 132812 - DNA, 80 bp, synthetic construct
  source 1..80: mol_type = other DNA
aacaatcaaccagatatgatcatgtatgctgaaaatgtaaacctggaaacaccagacactcatgtggtgtacaaacctgg

SEQ ID NO: 132813 - DNA, 80 bp, synthetic construct
  source 1..80: mol_type = other DNA
ttgcggctttcgttatatctgggaaatcaacggatatgtggatagagagatcagccgatataacttgggaaagtgacgca

SEQ ID NO: 132814 - DNA, 80 bp, synthetic construct
  source 1..80: mol_type = other DNA
gtgccatcacggccaaggcgcgggatgctccgcaacgacagccaccgggccgtgtccccggaggacggccagggacgggt

SEQ ID NO: 132815 - DNA, 80 bp, synthetic construct
  source 1..80: mol_type = other DNA
tagccgtccttgggccactgtatttaatacaagccgcactcaccagcaccccctactttgtccgcgcccacgtgttgatt

SEQ ID NO: 132816 - DNA, 80 bp, synthetic construct
  source 1..80: mol_type = other DNA
gggcaagtctgtggccccgtgtactacttcacgcccagccctgtggttgtcggcacaaccgacgagcgcggtgcacctac

SEQ ID NO: 132817 - DNA, 80 bp, synthetic construct
  source 1..80: mol_type = other DNA
aacgtttccgtgtcgtaatgatgtgacatgttatttaacttgaaggttggggggtctagcttaacccccaaaggcagccc

SEQ ID NO: 132818 - DNA, 80 bp, synthetic construct
  source 1..80: mol_type = other DNA
gggaccgcagcctggtcgaggcggccgaggcgattagccagcagacgctgctccgcctggcctgcgaggtgcgccaggtc

SEQ ID NO: 132819 - DNA, 80 bp, synthetic construct
  source 1..80: mol_type = other DNA
tgggtcccgctgatggatatacctctaagggttggagacttcttgcccccatcaccgcgtacacccaacaaacccgaggg

SEQ ID NO: 132820 - DNA, 80 bp, synthetic construct
  source 1..80: mol_type = other DNA
catgtggacctgatggtgggtgccgccaccgtgtgctccgccctctacatcggggacctgtgtggtggtgcattcttggt

SEQ ID NO: 132821 - DNA, 80 bp, synthetic construct
  source 1..80: mol_type = other DNA
gctggagtgtgagtttgggacgtttgactggacgtccgaggagggctcccagccctggctgtccgcggtggtcgccgata

SEQ ID NO: 132822 - DNA, 80 bp, synthetic construct
  source 1..80: mol_type = other DNA
ctacgattacaatgtgggcataacatctgtatattttcatcaactttatcgttttcggagctagttgctcagttttgtgc

SEQ ID NO: 132823 - DNA, 80 bp, synthetic construct
  source 1..80: mol_type = other DNA
tgctcctcctgttcgcaggggttgatgccagtactagtgtgggccactccgtcgcccaaagcacccacggtctcactacc

SEQ ID NO: 132824 - DNA, 80 bp, synthetic construct
  source 1..80: mol_type = other DNA
ttggtgggacactaacccccccgcgctcagtaacggcacggccgcggccccgacgggacgcaacgccgtgaggctcgcga

SEQ ID NO: 132825 - DNA, 80 bp, synthetic construct
  source 1..80: mol_type = other DNA
atcttctctcttttgaggcggcttgtcgcttaacaccgccccattcagcgcgttccaagtacggctatggggccaaggaa

SEQ ID NO: 132826 - DNA, 80 bp, synthetic construct
  source 1..80: mol_type = other DNA
cagtcttgaccaacgtgaagatcaatgacaagtgccccagcactggtgaagcccacttggaagaagaaaatgaaggagac

SEQ ID NO: 132827 - DNA, 80 bp, synthetic construct
  source 1..80: mol_type = other DNA
gccggcccgaagggcccggtgatacagatgtacaccaatgtggacaaagacttggtggagtggccctgtccacccggcgc

SEQ ID NO: 132828 - DNA, 80 bp, synthetic construct
  source 1..80: mol_type = other DNA
aagctataatgtgttggaagataaaatcaacacagcctatcgcagttggtacctttcgtacaattatggcgatcccgaaa

SEQ ID NO: 132829 - DNA, 80 bp, synthetic construct
  source 1..80: mol_type = other DNA
ctgcaccaggaaggaaaatgtgaatcatgtgtctacaacatgatgggaaaacgtgagaaaaagttaggagaatttggcag

SEQ ID NO: 132830 - DNA, 80 bp, synthetic construct
  source 1..80: mol_type = other DNA
tcagtggatgaaccggctcatagcgtttgcgtctcgaggcaatcacgtctcgcccacgcattacgtgcctgagaccgacg

SEQ ID NO: 132831 - DNA, 80 bp, synthetic construct
  source 1..80: mol_type = other DNA
atcaaagatggcgtctatcgcatatacgcccctggactcgtatggggtcaccgtcagattggagtggggtatggaacaaa

SEQ ID NO: 132832 - DNA, 80 bp, synthetic construct
  source 1..80: mol_type = other DNA
aactcatgagcaaaccctgggacgccatcgccaatgtcaccacaatggccatgaccgacaccaccccctttggccagcag

SEQ ID NO: 132833 - DNA, 80 bp, synthetic construct
  source 1..80: mol_type = other DNA
acactatacgcgtggttaaactgcctccttcccattttaccttgtatacctccctttccccctttgtagctgaaaacaac

SEQ ID NO: 132834 - DNA, 80 bp, synthetic construct
  source 1..80: mol_type = other DNA
catatgtaatacccgtttaaaagcctctcttcttaatgtatcgacagactgggttttgggtggtcatttgaccctgccaa

SEQ ID NO: 132835 - DNA, 80 bp, synthetic construct
  source 1..80: mol_type = other DNA
gaatcggttgggaccgcttcgtgggcggagttatccgccggttggccgcgcgccgccccggcctggtgtttatgctctgg

SEQ ID NO: 132836 - DNA, 80 bp, synthetic construct
  source 1..80: mol_type = other DNA
gagaggaaatcccccaagatggtcagtgttgtcgcgggagttccagaaccacactcccgcctggctccaggcgactgcgt

SEQ ID NO: 132837 - DNA, 80 bp, synthetic construct
  source 1..80: mol_type = other DNA
ggtacattcagtgaacatgactagccaggtgcttctgggaaggatggagaagaggacctggaagggaccccagtacgagg

SEQ ID NO: 132838 - DNA, 80 bp, synthetic construct
  source 1..80: mol_type = other DNA
tagtgtgaaaagcgggaatgagatcgccatctgcttgcaaaaagcaggaaaacgggtgattcaactaaacaggaagagct

SEQ ID NO: 132839 - DNA, 80 bp, synthetic construct
  source 1..80: mol_type = other DNA
atgaccaggtattctgctcctccgggagacgagccacagcccgcctacgacttggagctgataacatcatgctcctcgaa

SEQ ID NO: 132840 - DNA, 80 bp, synthetic construct
  source 1..80: mol_type = other DNA
agaccgattaaaacggatggcaataagtggggacgactgtgtggtcaaacccctggatgaaagattttccaaagcccttc

SEQ ID NO: 132841 - DNA, 80 bp, synthetic construct
  source 1..80: mol_type = other DNA
atttacgcagataaaacttatcaacctgaaccacaaataggagaatcacagtggaacgaagccgaatcgtccgtagcagg

SEQ ID NO: 132842 - DNA, 80 bp, synthetic construct
  source 1..80: mol_type = other DNA
gcttatggtggttgtgctatctgctagttctggcggaggcccagctccaggagtgggccccccccttgagaacgcggtgc

SEQ ID NO: 132843 - DNA, 80 bp, synthetic construct
  source 1..80: mol_type = other DNA
gcctgaataacaagtttagaaaccccacggtggcgcctacgcacgacgtgaccacagaccggtctcagcgtttgacgctg

SEQ ID NO: 132844 - DNA, 80 bp, synthetic construct
  source 1..80: mol_type = other DNA
tgttattctttattttctattctcctatgattagtcgtccccatatagctctgaatgaaatctaagatcttttttttttc

SEQ ID NO: 132845 - DNA, 80 bp, synthetic construct
  source 1..80: mol_type = other DNA
accttttgtcttcctggaaggcaaagaagacccccatggggttctcatatgacacccgctgctttgactccactgtaacc

SEQ ID NO: 132846 - DNA, 80 bp, synthetic construct
  source 1..80: mol_type = other DNA
cttaacagtgcaggcagcagctcctttagccagagggtcatctttggcgatcttctcaatgcttcttttgccatccttct

SEQ ID NO: 132847 - DNA, 80 bp, synthetic construct
  source 1..80: mol_type = other DNA
cagtgccccccccgcgcaggcggcgggccatagttctgactcagagcaatgtggtggaggtcctcaaagacctggctgac

SEQ ID NO: 132848 - DNA, 80 bp, synthetic construct
  source 1..80: mol_type = other DNA
aactgcggctatcggcgatgccgcgcaagcggcgtgctgactactagctgcggtaacaccataacctgctatcttaaggc

SEQ ID NO: 132849 - DNA, 80 bp, synthetic construct
  source 1..80: mol_type = other DNA
caatctttctgatccattttggaatagtttcccgtgtaaatttataaagcacaactggtacaggttaattcgcctcccgc

SEQ ID NO: 132850 - DNA, 80 bp, synthetic construct
  source 1..80: mol_type = other DNA
ggggcgcaccgcatggttcgttccttcgattgcaaaaggtggcatcatagcacgcaccctgagacaaaaaggaaaaagtg

SEQ ID NO: 132851 - DNA, 80 bp, synthetic construct
  source 1..80: mol_type = other DNA
gtggggacggcggccgctacgcgtgctactttcgcgacctccagaccggcgacgcgagccccagccccctctccgccttc

SEQ ID NO: 132852 - DNA, 80 bp, synthetic construct
  source 1..80: mol_type = other DNA
ggtgccagactgcggtataatggttccatccggcccaggggcgtagttaccctcacagatttgcatttcccacgctttga

SEQ ID NO: 132853 - DNA, 80 bp, synthetic construct
  source 1..80: mol_type = other DNA
tcaccatgggcaaatattatacgcaaggcgacaaggtgctgatgccgctggcgattcaggttcatcatgccgtttgtgat

SEQ ID NO: 132854 - DNA, 80 bp, synthetic construct
  source 1..80: mol_type = other DNA
gccgcttatgtagcacagggatactccgtcctagtgttaaatccatcagtagcggctaccctgggtttcggcatgtacat

SEQ ID NO: 132855 - DNA, 80 bp, synthetic construct
  source 1..80: mol_type = other DNA
ctccctggccacaaaacgcctggggggcgaggcgcaccccgatcgcacgctgttcgcgcacgtcgcgctgtgcgcgatcg

SEQ ID NO: 132856 - DNA, 80 bp, synthetic construct
  source 1..80: mol_type = other DNA
gattgtgttgctactctttgccggcgttgacggaagtaccaccacggtgggggggacggaagctcgcgccgctagcggct

SEQ ID NO: 132857 - DNA, 80 bp, synthetic construct
  source 1..80: mol_type = other DNA
gctggcctcaatcagcgcacaagcagggactttgttcacgttgccaaagggaataccattttccaatattgacatgacag

SEQ ID NO: 132858 - DNA, 80 bp, synthetic construct
  source 1..80: mol_type = other DNA
tcgattggcgttagtgttattctggttttgaccatctttacaattacgccgacctataaaatcttgttggcgaggctctt

SEQ ID NO: 132859 - DNA, 80 bp, synthetic construct
  source 1..80: mol_type = other DNA
cccaagggtacaatgtcttagtgctaaatccatcagttgcagccactttaggatttggaacttatatgtccaaggctcat

SEQ ID NO: 132860 - DNA, 80 bp, synthetic construct
  source 1..80: mol_type = other DNA
gtgaaggtgatacttaatttcaagcggagtgccatcggtagaatctattgcgtgcagtgtgccgtaagcccgaggtgcaa

SEQ ID NO: 132861 - DNA, 80 bp, synthetic construct
  source 1..80: mol_type = other DNA
aagatttttctgctgtgcgtaacttgctggaacagagctctaacagtacctcttggttttggaggtttctgtggggctcc

SEQ ID NO: 132862 - DNA, 80 bp, synthetic construct
  source 1..80: mol_type = other DNA
ctctgggacgagacctgcggccccatcagtgggtgtctgagctcccgccactggttcaagtgccatagtctcgttttgaa

SEQ ID NO: 132863 - DNA, 80 bp, synthetic construct
  source 1..80: mol_type = other DNA
ggccatagaatggcatgggacatgatgatgaattggtctccggccctgaccttcgccgtctcctcggcgttgcgggtgcc

SEQ ID NO: 132864 - DNA, 80 bp, synthetic construct
  source 1..80: mol_type = other DNA
ttcatggagtggcaaaaaatccagttgttgatggcaatccaactgctgacattgaggaagccccagaaatgccagcttta

SEQ ID NO: 132865 - DNA, 80 bp, synthetic construct
  source 1..80: mol_type = other DNA
agcctggaggaaagatctacgccgatgataccgcaggctgggacacacgcatcaccaaagctgacctcgagaacgaagcg

SEQ ID NO: 132866 - DNA, 80 bp, synthetic construct
  source 1..80: mol_type = other DNA
cgcagcttgcccttggaggaggcgccgcacgaggggcagtgcagacttttgagggcgtagagcttgggcgcgagaaatac

SEQ ID NO: 132867 - DNA, 80 bp, synthetic construct
  source 1..80: mol_type = other DNA
tagttactctccaagtgagctcaatagagtggcatcatgcctcaggaagcttggggcacctcctttgagagcttggagac

SEQ ID NO: 132868 - DNA, 80 bp, synthetic construct
  source 1..80: mol_type = other DNA
gtatgggcgaggccagactacaatcctcccctcgttgagacctggaaagcgccggactacaagccgccaaccgtggctgg

SEQ ID NO: 132869 - DNA, 80 bp, synthetic construct
  source 1..80: mol_type = other DNA
gaagcctatggtggtttctgcctcttgggcacaggctatggctgagaacttccggaactagacgaggtggctctgaggga

SEQ ID NO: 132870 - DNA, 80 bp, synthetic construct
  source 1..80: mol_type = other DNA
taaggcacatgggattaatcccaacatcaggactggggtccggaccgtgacaaccggggagtccatcacatactctacct

SEQ ID NO: 132871 - DNA, 80 bp, synthetic construct
  source 1..80: mol_type = other DNA
tctttaggaggaggtaggagaggtacgggagctcaaggggaaacactgggagagaaatggaaaagacagttaaaccaact

SEQ ID NO: 132872 - DNA, 80 bp, synthetic construct
  source 1..80: mol_type = other DNA
ggggttcggaattatcacgggaacgttgcgtataacgaatccggtcagagcatccgtcttgcgatacgatgattttcaca

SEQ ID NO: 132873 - DNA, 80 bp, synthetic construct
  source 1..80: mol_type = other DNA
gtcaggctgcgggcatacttcaatacacccggattgcccgtgtgccaagaccacctggaattctgggaggccgtgttcac

SEQ ID NO: 132874 - DNA, 80 bp, synthetic construct
  source 1..80: mol_type = other DNA
tcagggtagaagagtccatctatcaggcctgtgacctcaaggacgaggctaggagggtgatagcttcactcacggagcgg

SEQ ID NO: 132875 - DNA, 80 bp, synthetic construct
  source 1..80: mol_type = other DNA
caacaccttgacctgcttcctaaaggcaagtgcagcgtgcagagcagcgaatctcaagaatcctgacatgttggtctgcg

SEQ ID NO: 132876 - DNA, 80 bp, synthetic construct
  source 1..80: mol_type = other DNA
tagccggggcgccgggggcgaggtcttccagcatgagtcggtggtagccgtagatgtacctggacatccaggtgataccg

SEQ ID NO: 132877 - DNA, 80 bp, synthetic construct
  source 1..80: mol_type = other DNA
tcagactgagagcttacttgtccacgccggggctacctgtctgccaagaccatttggacttctgggagagcgtctttact

SEQ ID NO: 132878 - DNA, 80 bp, synthetic construct
  source 1..80: mol_type = other DNA
agctctatgcctccgcttgagggggagcctggcgaccctgatctcagttcgggctcttggtcaacggttgatgaagagga

SEQ ID NO: 132879 - DNA, 80 bp, synthetic construct
  source 1..80: mol_type = other DNA
atccaccacgactcccctgatgctgacctaattgaagccaacctcttgtggaggcaggagatggggggtaacatcaccag

SEQ ID NO: 132880 - DNA, 80 bp, synthetic construct
  source 1..80: mol_type = other DNA
ggacaactagggaaacaaccacacagcctactacaaagccaactaccagtccaacaacacagcctactacagttagtaca

SEQ ID NO: 132881 - DNA, 80 bp, synthetic construct
  source 1..80: mol_type = other DNA
gcaaatgcattatcatgaaactcttctatcatcaaactgcctgactgaaccattcccaggtaattttcattcttccactg

SEQ ID NO: 132882 - DNA, 80 bp, synthetic construct
  source 1..80: mol_type = other DNA
ccgaactcttccatagtctacgaggcagacaacctgattttacacgcacctggctgcgtgccttgtgtccggaagggtaa

SEQ ID NO: 132883 - DNA, 80 bp, synthetic construct
  source 1..80: mol_type = other DNA
actggactacaccatgtgctacatcttggctgagggacatctgggattgggtttgcaccgtgctctctgatttcaagacc

SEQ ID NO: 132884 - DNA, 80 bp, synthetic construct
  source 1..80: mol_type = other DNA
cactggaaccacgtcctcctcggaagacccggagcccacccgctgatactttcggcgcttggtgggcagaggaggtagcg

SEQ ID NO: 132885 - DNA, 80 bp, synthetic construct
  source 1..80: mol_type = other DNA
atcatgtacgcgcctaccatctgggtgcgcatggtaatgatgacacactttttctccatactccagtcccaggagatact

SEQ ID NO: 132886 - DNA, 80 bp, synthetic construct
  source 1..80: mol_type = other DNA
ggtgggagggggacttactgttgaacaagatagtggaaatctaaaggtcaaccctaaggctcccttgcaagttgcaactg

SEQ ID NO: 132887 - DNA, 80 bp, synthetic construct
  source 1..80: mol_type = other DNA
ccgtcgactacctagcgggaggggctgctctttgctccgcattgtatgtcggagacgtgtgcggtgcattgttcttggta

SEQ ID NO: 132888 - DNA, 80 bp, synthetic construct
  source 1..80: mol_type = other DNA
tggtgtgaggatacatcgatatgccccagagtgtaaacctctactcagggatgaggtaacattcacggtgggcctgtcca

SEQ ID NO: 132889 - DNA, 80 bp, synthetic construct
  source 1..80: mol_type = other DNA
atggatggaagacaaaaccccagtggagaaatggagtgacgtcccatattcaggaaaacgagaggacatctggtgtggca

SEQ ID NO: 132890 - DNA, 80 bp, synthetic construct
  source 1..80: mol_type = other DNA
ccggcgtgcccccagaaccaatcgcaacccggtgggaccccgccccggggcgtggtggacggacggccccggcgcccacc

SEQ ID NO: 132891 - DNA, 80 bp, synthetic construct
  source 1..80: mol_type = other DNA
gaggtggaggttcataatataacggccaacgcaaagtggccggagcaccaggagcaaggtcttccagcataaggcggtgg

SEQ ID NO: 132892 - DNA, 80 bp, synthetic construct
  source 1..80: mol_type = other DNA
gcccctcttgctactggttctggccctaccccagcgcgcctacgcttacgaccgcgagcaggcagcgtctattggggcag

SEQ ID NO: 132893 - DNA, 80 bp, synthetic construct
  source 1..80: mol_type = other DNA
gcctacactccaagcatgctgaaaaagagacagatgactgtgctggacctgcacccaggttcgggaaaaaccaggaagat

SEQ ID NO: 132894 - DNA, 80 bp, synthetic construct
  source 1..80: mol_type = other DNA
aaaagcatttgaagccactgtgagaggtgccaagagaatggcagtcttgggagacacggcctgggactttggatcagttg

SEQ ID NO: 132895 - DNA, 80 bp, synthetic construct
  source 1..80: mol_type = other DNA
gcgacccccaagcgccaccagaccgtggtcccgggcgtcgggacgctccacgactgctgcgagcactcgccgctcttctc

SEQ ID NO: 132896 - DNA, 80 bp, synthetic construct
  source 1..80: mol_type = other DNA
tataaacaggaccgccctcaactgcaatgatagtctccagaccggctttatcgcgggtctgttttactatcgcaatttca

SEQ ID NO: 132897 - DNA, 80 bp, synthetic construct
  source 1..80: mol_type = other DNA
gggcaaaggtgatagccgtcctcctcctgttcgcgggagttgatgcggggacccacgtcaccggtgccgtacaaggacaa

SEQ ID NO: 132898 - DNA, 80 bp, synthetic construct
  source 1..80: mol_type = other DNA
ctcgcgcggtcaccaacatactcaactctctcactataacgagcctcctccgtagacttcacacgtggattacggaggac

SEQ ID NO: 132899 - DNA, 80 bp, synthetic construct
  source 1..80: mol_type = other DNA
tgaaagcccaagcagcctgcaaggctgcagggattgttgccccctccatgctggtttgcggtgacgatctggtcatcatc

SEQ ID NO: 132900 - DNA, 80 bp, synthetic construct
  source 1..80: mol_type = other DNA
aacccctacccaccatcttcattttttgtagatgaagcgcagcagagtccagtatgctgaagaaactgaagaaaatgatg

SEQ ID NO: 132901 - DNA, 80 bp, synthetic construct
  source 1..80: mol_type = other DNA
gacggctcttttggcacaattggattctttgacccgggaacttaatgtcgtttctcagcagctgttggatctgcgccagc

SEQ ID NO: 132902 - DNA, 80 bp, synthetic construct
  source 1..80: mol_type = other DNA
caaaacctgaattctgcatcaaagtcctcaatccctacatgccaacagtcatagaggagctggagaaactgcagagaaga

SEQ ID NO: 132903 - DNA, 80 bp, synthetic construct
  source 1..80: mol_type = other DNA
agaaagtatacagccgccaactctatcctaccggagtatgccttacatccgtcaattacgccgacgcctggctatcgcgg

SEQ ID NO: 132904 - DNA, 80 bp, synthetic construct
  source 1..80: mol_type = other DNA
aggggtgacggcatttgtcacactacatgtccatgtggtgctgacatagtcggccacgttaagaatggatccatgaggat

SEQ ID NO: 132905 - DNA, 80 bp, synthetic construct
  source 1..80: mol_type = other DNA
ggatctgtcgcgagggtgctctcgagggggccgttgatgtcctctccgggcaacggatcgtagatgatcagaagcctcac

SEQ ID NO: 132906 - DNA, 80 bp, synthetic construct
  source 1..80: mol_type = other DNA
gagggtagagagttggatactcagaaacccaggattcgcgctcttggcagggtttatggcctacatgattgggcaaacag

SEQ ID NO: 132907 - DNA, 80 bp, synthetic construct
  source 1..80: mol_type = other DNA
ccctgctgctcctggtcttgatgctgcccgagagggcatatgccttcgatcgggaagtagcggggtctgccggcgttggc

SEQ ID NO: 132908 - DNA, 80 bp, synthetic construct
  source 1..80: mol_type = other DNA
ggttgaagatccaaaattttgggagatggtggatgaggagcgcgaggcacatctgcggggggaatgtcacacttgcattt

SEQ ID NO: 132909 - DNA, 80 bp, synthetic construct
  source 1..80: mol_type = other DNA
tgggtccagcacaggtcataccactcgggggatcaccagcctcttttctccaggccctagtcagcacatcaacctcatca

SEQ ID NO: 132910 - DNA, 80 bp, synthetic construct
  source 1..80: mol_type = other DNA
gtgtacacagttaagaaggattataaagaggaatttgaaaatctttttgctgactgctctggtctgctagattctctgaa

SEQ ID NO: 132911 - DNA, 80 bp, synthetic construct
  source 1..80: mol_type = other DNA
acgccgcgtccgggggacctccgggtgttcgtcgtcttcggatgacgagcccccgtagagggcataatccgactcgtcgt

SEQ ID NO: 132912 - DNA, 80 bp, synthetic construct
  source 1..80: mol_type = other DNA
aagcgacgaggcgcgccaagtggcgtcggtggttctggtcgtggagcccgcccctgtgccgaccccgacccccgacgact

SEQ ID NO: 132913 - DNA, 80 bp, synthetic construct
  source 1..80: mol_type = other DNA
tctcttaccatcaccagcctactccgcagattacatcaatgggttagtgaagacacggccaccccttgcgctacctcatg

SEQ ID NO: 132914 - DNA, 80 bp, synthetic construct
  source 1..80: mol_type = other DNA
tcatatcccaggcagaggcggcattggagaacttggtggtcctcaacgcggcatcgctggccggagtgcacggcatcgtc

SEQ ID NO: 132915 - DNA, 80 bp, synthetic construct
  source 1..80: mol_type = other DNA
tgtgcctgcgtgtacctacatggcactgggaatgtggccgctactcctgacaatcttggccctgcctccccgagcatacg

SEQ ID NO: 132916 - DNA, 80 bp, synthetic construct
  source 1..80: mol_type = other DNA
gtatggtccactacccctacaggctatggcactacccgtgcaccgtcaactttaccatccacaaggtgcgcattttcctt

SEQ ID NO: 132917 - DNA, 80 bp, synthetic construct
  source 1..80: mol_type = other DNA
tcagtcgtcctctgcgaggcatacgacactggctgtgcttggtacgaattgtcgccctctgagaccaccgtcagactgcg

SEQ ID NO: 132918 - DNA, 80 bp, synthetic construct
  source 1..80: mol_type = other DNA
gcgtcatgcacgccatcgctcccaggttgcttcttctttttgttctttctggtcttccggggacacgcggcgggtcgggt

SEQ ID NO: 132919 - DNA, 80 bp, synthetic construct
  source 1..80: mol_type = other DNA
gatgagatcccagacagggcatggagcagtgggtacgaatggatcacggactatgcgggaaaaactgtgtggttcgtggc

SEQ ID NO: 132920 - DNA, 80 bp, synthetic construct
  source 1..80: mol_type = other DNA
ctgctttgactcaactgtcactgagagggacatcaggactgaggagtccatataccaggcatgctccctgcccgagaaag

SEQ ID NO: 132921 - DNA, 80 bp, synthetic construct
  source 1..80: mol_type = other DNA
agcaaaagccctacagtttataccagtagagagcctaagtgcacagactagatccccttctttctctgacaattcaactc

SEQ ID NO: 132922 - DNA, 80 bp, synthetic construct
  source 1..80: mol_type = other DNA
gccggccgtacctcaatcataccaggtcggttacctgcacgccccaactgggagcggaaagagcaccaaagttccagctg

SEQ ID NO: 132923 - DNA, 80 bp, synthetic construct
  source 1..80: mol_type = other DNA
acatagagtccttcccgagctgattcgtgaatgcattgacaaaagattgaggactgttgtgttggccccaacgcgggttg

SEQ ID NO: 132924 - DNA, 80 bp, synthetic construct
  source 1..80: mol_type = other DNA
ccaacagcccaatgggggtgtgctggataacaacgcctccgcgcggcaggcggtcctgccgctcccggccccgtaccata

SEQ ID NO: 132925 - DNA, 80 bp, synthetic construct
  source 1..80: mol_type = other DNA
gaggacggggtaaactatgcaacagggaatttacccggttgctctttctctatctttatccttgcacttctttcatgcct

SEQ ID NO: 132926 - DNA, 80 bp, synthetic construct
  source 1..80: mol_type = other DNA
acggagcgaaggatgtccggagccacaccagcaaggccgttaaccatatcaactccgtatggaaggacttgctggaggac

SEQ ID NO: 132927 - DNA, 80 bp, synthetic construct
  source 1..80: mol_type = other DNA
ctctaactccagcatcgtttggcagctcgaaggcgcagtgctccatactcctggatgtgtcccctgtgagaagaccggaa

SEQ ID NO: 132928 - DNA, 80 bp, synthetic construct
  source 1..80: mol_type = other DNA
ctcgctaccgccacacctcctggatcggtcaccgtgccacaccccaacatcgaggaggtggccttgtccaatactggaga

SEQ ID NO: 132929 - DNA, 80 bp, synthetic construct
  source 1..80: mol_type = other DNA
cccccgcggctctcgcccgaactggggcccaaacgacccccggcgtaggtcccgcaacttgggtaaggtcatcgataccc

SEQ ID NO: 132930 - DNA, 80 bp, synthetic construct
  source 1..80: mol_type = other DNA
ttctcttctgcacctgcacgctcctgctgtgggaggatgacggagggagtgacgatgccccgcgaggcgcaggtccaaac

SEQ ID NO: 132931 - DNA, 80 bp, synthetic construct
  source 1..80: mol_type = other DNA
ggagatgcgggatcgaaagttccatgcagggcgcgagttgcggcatggcctgaaccgcgagcggttgctgcgcgcctcaa

SEQ ID NO: 132932 - DNA, 80 bp, synthetic construct
  source 1..80: mol_type = other DNA
tggccgtttccatgactggagtcatgcgtggcaactactacgcttttgtgggagtcatgtacaatctctggaaaatgaaa

SEQ ID NO: 132933 - DNA, 80 bp, synthetic construct
  source 1..80: mol_type = other DNA
aagactccgcactgtgatcttagctccaaccagggttgtcgctgctgaaatggaggaagcccttagagggcttccagtgc

SEQ ID NO: 132934 - DNA, 80 bp, synthetic construct
  source 1..80: mol_type = other DNA
cgttgtcgcgactgacgctctgatgactgggtttacgggcgacttcgactccgtgatagactgcaacacatgcgtcaccc

SEQ ID NO: 132935 - DNA, 80 bp, synthetic construct
  source 1..80: mol_type = other DNA
caagtgggctacctgcacgcccccacgggcagcgggaagagcaccaaggttcctgccgcatatgctgcacagggatataa

SEQ ID NO: 132936 - DNA, 80 bp, synthetic construct
  source 1..80: mol_type = other DNA
ccccaactagtgcaaagttatggatggaacattgtcaccatgaagagtggagtggatgtgttctacagaccttccgagtg

SEQ ID NO: 132937 - DNA, 80 bp, synthetic construct
  source 1..80: mol_type = other DNA
cgccttgggcaaaacgtgcttcattccacgctcaagggcgaggcgcgccgcgactacgtccgcgactgcgtttacttatt

SEQ ID NO: 132938 - DNA, 80 bp, synthetic construct
  source 1..80: mol_type = other DNA
tctcagcgacgggtcttggtctactgtgagcagtgacggcggtacggaggacgttgtgtgctgctcaatgtcctactcgt

SEQ ID NO: 132939 - DNA, 80 bp, synthetic construct
  source 1..80: mol_type = other DNA
tctcgaggggaaccacagcggcgaccagagaccctattgctggcactacgctccacgtccgtgtggcatcgtgcctgcaa

SEQ ID NO: 132940 - DNA, 80 bp, synthetic construct
  source 1..80: mol_type = other DNA
caggcactgggctcagcccggatatccttggcccctttatgggaacgagggctgtgggtgtgcaggttggctcctgtccc

SEQ ID NO: 132941 - DNA, 80 bp, synthetic construct
  source 1..80: mol_type = other DNA
tcatccccgagaaccagcgcaccgtcgccgtatacagcttgaagatcgccgggtggcacgggcccaaggccccatacacg

SEQ ID NO: 132942 - DNA, 80 bp, synthetic construct
  source 1..80: mol_type = other DNA
taactctcgacatcctaacggagatcgccagtttgccaacctacctttcctctagggccaaactcgcccttgacaacata

SEQ ID NO: 132943 - DNA, 80 bp, synthetic construct
  source 1..80: mol_type = other DNA
tggagtgaacgtgaagagcccagagtgtggagcgagtggacaaacattgacatccaaccagccaagtcttggggaactta

SEQ ID NO: 132944 - DNA, 80 bp, synthetic construct
  source 1..80: mol_type = other DNA
atgacacagcaggctgggacacgagaatcactgaagatgaccttttaaatgaagaactgatcacagaacagatggcccct

SEQ ID NO: 132945 - DNA, 80 bp, synthetic construct
  source 1..80: mol_type = other DNA
cggcattgcgggtacggccgtggcgagcgttggcttgggaaaggtgctcgtggacgtcctagcgggctacggagccggca

SEQ ID NO: 132946 - DNA, 80 bp, synthetic construct
  source 1..80: mol_type = other DNA
gttaactgcacacaggcgggtaagagcaggttgaaggtgcaggtgatacttgatttcaaggggagtgccggtggcagaat

SEQ ID NO: 132947 - DNA, 80 bp, synthetic construct
  source 1..80: mol_type = other DNA
tccaccagtggatcaatgaggactggtccactccctgttcaacatcgtggttgagggacgtttgggattgggtctgcacg

SEQ ID NO: 132948 - DNA, 80 bp, synthetic construct
  source 1..80: mol_type = other DNA
cggtggttgttcgggtggtgcgtatgacataatcatatgtgatgagtgccattcaactgatgcgacttcaattctgggca

SEQ ID NO: 132949 - DNA, 80 bp, synthetic construct
  source 1..80: mol_type = other DNA
gatttcgtgcccgtggagaacatggaaaccaccatgcgttcccccatcttcactgacaattcatcaccaccggccgtgcc

SEQ ID NO: 132950 - DNA, 80 bp, synthetic construct
  source 1..80: mol_type = other DNA
gcggtagcggcacgtcggcgtggagctcgggtagcggttggtgctgcgcccgcagttgactggcgtacgcgacgacgcgg

SEQ ID NO: 132951 - DNA, 80 bp, synthetic construct
  source 1..80: mol_type = other DNA
tattggtaatggtgcaataattgaggtggatacaagtgacagggttgctttcagatgtcgcatgcagggcatgggtcctg

SEQ ID NO: 132952 - DNA, 80 bp, synthetic construct
  source 1..80: mol_type = other DNA
tagcggtagtttaagtcaagattcataccttggtcacctaattactttgtaccgcgaagccattggtcaagcgcaggtag

SEQ ID NO: 132953 - DNA, 80 bp, synthetic construct
  source 1..80: mol_type = other DNA
cagcagcaacttccagccactaccgccgcggccgccgtgagcggggccgggcagagtcagtatgacctggctttggaaga

SEQ ID NO: 132954 - DNA, 80 bp, synthetic construct
  source 1..80: mol_type = other DNA
cgtctggacccatactggggcagtgtcaaggaggatcgactttgttacggaggaccctggaaattgcagcacaagtggaa

SEQ ID NO: 132955 - DNA, 80 bp, synthetic construct
  source 1..80: mol_type = other DNA
catcaacagaacggccctgaactgcaacgattctctccataccggattcatcacggcactgttttataggaaccacttca

SEQ ID NO: 132956 - DNA, 80 bp, synthetic construct
  source 1..80: mol_type = other DNA
gctattaccaccacacctcgtaataaccttaatccccgtagttggcccgctgccctggtgtaccaggaaagtcccgctcc

SEQ ID NO: 132957 - DNA, 80 bp, synthetic construct
  source 1..80: mol_type = other DNA
gcacctgcggatccggacccgggaggcctcctttgaggagtggctgcgatccaaggaagtggccctggattttggcctga

SEQ ID NO: 132958 - DNA, 80 bp, synthetic construct
  source 1..80: mol_type = other DNA
tgtttgccaaagtggccctgcttaaccctcccgctaatgcttcttaaataaataaaagacacaactgtttgaaaagtcaa

SEQ ID NO: 132959 - DNA, 80 bp, synthetic construct
  source 1..80: mol_type = other DNA
ggcttttacccggagcaacgttattgttattgatgaagcaggattgctagggcgtcatattctcacggccgttgtttact

SEQ ID NO: 132960 - DNA, 80 bp, synthetic construct
  source 1..80: mol_type = other DNA
attagtgtcactataaaaacataacaccagaatctcttcatatttaattttacgtcatttctcccgtttccaccccctct

SEQ ID NO: 132961 - DNA, 80 bp, synthetic construct
  source 1..80: mol_type = other DNA
tgatgtaattaaagtaggcggtcttgagacggcggatggtcgacagaagcaccatgtccttgggtccggcctgctgaatg

SEQ ID NO: 132962 - DNA, 80 bp, synthetic construct
  source 1..80: mol_type = other DNA
tagttgaaattctccccgatcgatcggtggttgcagttaaacggatcggcgatgacccggctaaaatccggcataaacat

SEQ ID NO: 132963 - DNA, 80 bp, synthetic construct
  source 1..80: mol_type = other DNA
aaaaggcttcaagagggagatttcaaacatgctgagcattatcaacaaaaggaaaaagacatcgctctgcctcatgatga

SEQ ID NO: 132964 - DNA, 80 bp, synthetic construct
  source 1..80: mol_type = other DNA
ccctcctcccaggaggaagaggatggtccagctcgatagctcaactgtctcacaagtgctggcggaactcgcccaaaaat

SEQ ID NO: 132965 - DNA, 80 bp, synthetic construct
  source 1..80: mol_type = other DNA
gtctgtcattgtggatcatccaacgtttcgtcgcatattagacacactgcgtgcgcgtatagaacagacaacaacacaat

SEQ ID NO: 132966 - DNA, 80 bp, synthetic construct
  source 1..80: mol_type = other DNA
cagtacctgtcggcggtttagtgggtggtgggcgaggggggaggtggcattagggagaaagaacaagagcctccgttggt

SEQ ID NO: 132967 - DNA, 80 bp, synthetic construct
  source 1..80: mol_type = other DNA
ccgggggggaccttgatggtggttgccgtcttgggctttgtctccatgtccttctgtcaatcggtccgcgaacggaggta

SEQ ID NO: 132968 - DNA, 80 bp, synthetic construct
  source 1..80: mol_type = other DNA
agcttggggttctggagccatgctatagggtctctgtctggacagtagatcaggttaatcagcgcgcggtactgtctagc

SEQ ID NO: 132969 - DNA, 80 bp, synthetic construct
  source 1..80: mol_type = other DNA
ggggctgcacaattatgtcatagggtctcagctcccatgtgaacctgaaccggacgttacggtcctagcctcaatgctga

SEQ ID NO: 132970 - DNA, 80 bp, synthetic construct
  source 1..80: mol_type = other DNA
tttatcgcgtctctgttctacacccacagcttcaactcgtcaggatgtcccgaacgcatgtccgcctgccgcagtatcga

SEQ ID NO: 132971 - DNA, 80 bp, synthetic construct
  source 1..80: mol_type = other DNA
tttgtagatgcatccggtgttgcgacagatgcgtccgacggcgcctccaacacagccgccgctcccgccccccactagcg

SEQ ID NO: 132972 - DNA, 80 bp, synthetic construct
  source 1..80: mol_type = other DNA
gggccgcccaaggcctacgggacctcgcggtcgccgtggagcctgtggtttttagcccaatggagaggagagtcatccag

SEQ ID NO: 132973 - DNA, 80 bp, synthetic construct
  source 1..80: mol_type = other DNA
ctggcctggaaccccaagagccatacctgttacctctttgacccgtttggcttttcggacgagcggctcaaacaaattta

SEQ ID NO: 132974 - DNA, 80 bp, synthetic construct
  source 1..80: mol_type = other DNA
gcccccaccctgcgccgtaaccaggaacacctgtatcgctttctggggaaacactctgcctattttcgccgccaccggca

SEQ ID NO: 132975 - DNA, 80 bp, synthetic construct
  source 1..80: mol_type = other DNA
gtttggccgcggacagaaacgccggctcgtccgcgctgcccgccggctcgctcgagggtgagtgcggccggcggaggttg

SEQ ID NO: 132976 - DNA, 80 bp, synthetic construct
  source 1..80: mol_type = other DNA
aaattaaacttattatacgacgatctggaactcatcccaatgaatttcccattaaccctacatcaaatcttcgtcgacaa

SEQ ID NO: 132977 - DNA, 80 bp, synthetic construct
  source 1..80: mol_type = other DNA
ctgctctatgtcatactcctggacgggggcgctcatcacaccatgcgctgccgaggaggaaaagttgcctattagtccat

SEQ ID NO: 132978 - DNA, 80 bp, synthetic construct
  source 1..80: mol_type = other DNA
tcgtctaccccgacctcggtgtcagggtttgcgagaagatggccctctacgacatcacacaaaagcttcctcaggcggtg

SEQ ID NO: 132979 - DNA, 80 bp, synthetic construct
  source 1..80: mol_type = other DNA
cttcctggtccttttcctcttcgccggagttgaagctcaaacccacgtgactggaggagcgacggcccaacagacctacg

SEQ ID NO: 132980 - DNA, 80 bp, synthetic construct
  source 1..80: mol_type = other DNA
ccctgctgtgcctcagacctaccaggtgggatatttacatgcccctaccggtagtgggaagagcactaaggtgcccgcct

SEQ ID NO: 132981 - DNA, 80 bp, synthetic construct
  source 1..80: mol_type = other DNA
tagacggtgctgcctgcagctcttccccaggaggactgggttaacaaagctgcggggtgatccacgtaagccctcaaaac

SEQ ID NO: 132982 - DNA, 80 bp, synthetic construct
  source 1..80: mol_type = other DNA
gtgcgccgtagtcctgggtgcggcgtgtctgcttgagctcctgcgtcgtacgtgccgcgggtggtggcgttaccatccct

SEQ ID NO: 132983 - DNA, 80 bp, synthetic construct
  source 1..80: mol_type = other DNA
acctgcgggggcgccccaccgcacgcacctgtacgtacgccgcctttgcagagctcggcatgatgccagaggatagtccc

SEQ ID NO: 132984 - DNA, 80 bp, synthetic construct
  source 1..80: mol_type = other DNA
ccacccacgcccgctccaccgaaggcagctccggtcgtgcaggcccccccggtggcgaccgccgtgcgccgcgtccccgc

SEQ ID NO: 132985 - DNA, 80 bp, synthetic construct
  source 1..80: mol_type = other DNA
atggcaaattcctcgcagatggaggctgcgctggcggagcctatgacatcataatgtgtgacgaatgccattccgtggat

SEQ ID NO: 132986 - DNA, 80 bp, synthetic construct
  source 1..80: mol_type = other DNA
ctggctaggcaacatcattatgtatgcccccacattgtgggcgaggatgattctgatgactcacttcttttccatcctcc

SEQ ID NO: 132987 - DNA, 80 bp, synthetic construct
  source 1..80: mol_type = other DNA
gcgcagcaaacacgtgggctggtgggcaccatcgtaaccagcctaacgggtcgggataagaatggagttgaggtggaaat

SEQ ID NO: 132988 - DNA, 80 bp, synthetic construct
  source 1..80: mol_type = other DNA
gaaatgggagcaaattttggggcaagcagagtgattgattgtcgcaagagtgtcaagccaacgatcttggacgaaggaga

SEQ ID NO: 132989 - DNA, 80 bp, synthetic construct
  source 1..80: mol_type = other DNA
gggcacaggatggcatgggacatgatgatgaactggtcccccaccgtgactttcatcacctcttcgctgctgagggtgcc

SEQ ID NO: 132990 - DNA, 80 bp, synthetic construct
  source 1..80: mol_type = other DNA
ggctcacctccatctgaggcaagctcctcagcgagccagctatcggcgccatcgctgcgagcgacctgcaccacccacgg

SEQ ID NO: 132991 - DNA, 80 bp, synthetic construct
  source 1..80: mol_type = other DNA
ggtgacacgaggggcgctctgctctccccgaggcctttatccaccttaaaaggttcgtctggcggtccggtcctctgtcc

SEQ ID NO: 132992 - DNA, 80 bp, synthetic construct
  source 1..80: mol_type = other DNA
gtgcccaacagattgcttccgtaaacatccggatgccacatacagcaggtgcggctctggtccctggcttacccctcgat

SEQ ID NO: 132993 - DNA, 80 bp, synthetic construct
  source 1..80: mol_type = other DNA
accgattgctttcgtaaacatccggaagcgacctatagccgttgcggcgcgggcccgtggctgaccccgcgttgcatggt

SEQ ID NO: 132994 - DNA, 80 bp, synthetic construct
  source 1..80: mol_type = other DNA
ttactaccaatgctaaacatgagcttactttaaaacttggcagcaacataactttacaaaatgggttactttcggccacc

SEQ ID NO: 132995 - DNA, 80 bp, synthetic construct
  source 1..80: mol_type = other DNA
tttcggtggtcggacacatcgtagttgtggtcctggctgagatcttcataggccattttaatgaatttggtgcggagggt

SEQ ID NO: 132996 - DNA, 80 bp, synthetic construct
  source 1..80: mol_type = other DNA
tttcactccacagttactctccaggtgaaatcaatagggtggccgcatgcctcagaaaacttggggtcccgcccttgcga

SEQ ID NO: 132997 - DNA, 80 bp, synthetic construct
  source 1..80: mol_type = other DNA
agacacatcccgccagatcatgaccatacttagctcattgactgtgacccatctcctgcgcagggtgcatgaatggatca

SEQ ID NO: 132998 - DNA, 80 bp, synthetic construct
  source 1..80: mol_type = other DNA
ccagcctaatgaatcgcaagcgcccagagcgtattacctggcacgagctacagcaggagtgcagggatgagataggcctg

SEQ ID NO: 132999 - DNA, 80 bp, synthetic construct
  source 1..80: mol_type = other DNA
cacgggacgatgaggatcgtcggtcctaagacctgcaggaacatgtggagtgggaccttccccatcaacgcctacaccac

SEQ ID NO: 133000 - DNA, 80 bp, synthetic construct
  source 1..80: mol_type = other DNA
gggaccgcgggccaggccgttggacatgtggttcttggggccacgggagcgctgctttccaccgtacacggatttaccac

SEQ ID NO: 133001 - DNA, 80 bp, synthetic construct
  source 1..80: mol_type = other DNA
tgaagtacatccattcccgaaggttctggagaagttcctctgcatctgatgaaacaaaaagcccgtccatgcggattccc

SEQ ID NO: 133002 - DNA, 80 bp, synthetic construct
  source 1..80: mol_type = other DNA
ggttagaggagaccccgcgttctgaagtgcacggcccagcctggctgaagctgtaggtcaggggaaggactagaggttag

SEQ ID NO: 133003 - DNA, 80 bp, synthetic construct
  source 1..80: mol_type = other DNA
agactgtaacgtagctgtggaacagtacgttgatttcagtctagaccccactttctccatcgaaacgcgcactgctcctc

SEQ ID NO: 133004 - DNA, 80 bp, synthetic construct
  source 1..80: mol_type = other DNA
actgccctaaactgcaatgatagccttcaaaccggcttcatagcagccctcttctacacccaccggctcaactccaccgg

SEQ ID NO: 133005 - DNA, 80 bp, synthetic construct
  source 1..80: mol_type = other DNA
caacccggaagcaagtcgcggggccgatgacgtataaaaaagcggactttaaacccggaaacggccgattttcccacggc

SEQ ID NO: 133006 - DNA, 80 bp, synthetic construct
  source 1..80: mol_type = other DNA
ggtccccacaagtagaacgacatggtctattcacgctcaccatcagtggatgaccacagaagatatgcttactgtctgga

SEQ ID NO: 133007 - DNA, 80 bp, synthetic construct
  source 1..80: mol_type = other DNA
ttcgggtcccccgttgggggggcgccaggggcgcgcggcgccggagtggcagggccaccgttcgccgccttggttgcgtc

SEQ ID NO: 133008 - DNA, 80 bp, synthetic construct
  source 1..80: mol_type = other DNA
cgcgctggtcctgtctctgcagtcgtgcggccggctgtacgtgggccagcgccactattccgccttcgagtgcgccgtgc

SEQ ID NO: 133009 - DNA, 80 bp, synthetic construct
  source 1..80: mol_type = other DNA
gcctgatcccgaagagggtactagcagtgggcaaagggggggcattaatgagcaaaggtggacaaagagaaagatggaaa

SEQ ID NO: 133010 - DNA, 80 bp, synthetic construct
  source 1..80: mol_type = other DNA
cacccagaaaaccgcacgcgaacctacgcccagaaacgaaagccaaaaaacccacaacttcctcaaatcttcacttccgt

SEQ ID NO: 133011 - DNA, 80 bp, synthetic construct
  source 1..80: mol_type = other DNA
gttataccccctaaaccagccactcggaaacctctctctccaccacactatgtaaacgcaactatggggcaaaacttaac

SEQ ID NO: 133012 - DNA, 80 bp, synthetic construct
  source 1..80: mol_type = other DNA
tggggagctgctgggcgtcggaggaggtgcgcgcgcctctggtctattggtggctttcggagaccccaaaacgacagacg

SEQ ID NO: 133013 - DNA, 80 bp, synthetic construct
  source 1..80: mol_type = other DNA
atcatatgcgatgaatgccatgccgtggatgctaccagcattctcggcatcgggacagtccttgaccaagcagagacagc

SEQ ID NO: 133014 - DNA, 80 bp, synthetic construct
  source 1..80: mol_type = other DNA
catcaaggcccaagcagcctgtcgagccgcagggctccgggactgcaccatgcttgtgtgtggcgacgacttagtcgtta

SEQ ID NO: 133015 - DNA, 80 bp, synthetic construct
  source 1..80: mol_type = other DNA
atggggcgaaggatgttcgtagccatgcccgcaaggccattaaccacatcaactccgtgtgggaggacttgctggaagac

SEQ ID NO: 133016 - DNA, 80 bp, synthetic construct
  source 1..80: mol_type = other DNA
cccgaggcaataatgggacccgcttacggcttccaatattcgccaaagcaacgggtagactacctgcttaagacctggcg

SEQ ID NO: 133017 - DNA, 80 bp, synthetic construct
  source 1..80: mol_type = other DNA
atttaacaaacgggggggtgtcgcctgcggcgacctcggcgcctctggactggaccacgtttcggcgtgtgtttctgatc

SEQ ID NO: 133018 - DNA, 80 bp, synthetic construct
  source 1..80: mol_type = other DNA
caggtccaaagatgtgcagcaacatttggaacggcaggtttcccatcaatgctaccacgactggccccagcgtgcccata

SEQ ID NO: 133019 - DNA, 80 bp, synthetic construct
  source 1..80: mol_type = other DNA
gaccagagggacgtggcgcgccaggtcgcgcagggccggagggaagttgggcgcgttggccacgtggtcggcgcccgcaa

SEQ ID NO: 133020 - DNA, 80 bp, synthetic construct
  source 1..80: mol_type = other DNA
ccgcgatagcatcactgatggcattcacagcctccatcactagcccgctcaccacccaaactaccctcctgcttaacatc

SEQ ID NO: 133021 - DNA, 80 bp, synthetic construct
  source 1..80: mol_type = other DNA
ggtgggcaggatggctcctgtctccacgcggctcccgtccaagttggggcccaaatgacccccggcgaaggtcccgtaat

SEQ ID NO: 133022 - DNA, 80 bp, synthetic construct
  source 1..80: mol_type = other DNA
aagtacatcatggcttgcatgtcggcagatttagaggtcatcaccagcacatgggtgctagccggcgggatccttgccgc

SEQ ID NO: 133023 - DNA, 80 bp, synthetic construct
  source 1..80: mol_type = other DNA
acgtagaggcgacactcgtgccggcttgcttagccccagaccgctgagcacgctcaagggatcgtcgggaggacctctta

SEQ ID NO: 133024 - DNA, 80 bp, synthetic construct
  source 1..80: mol_type = other DNA
cattaaaggccggccctccatcgatttcatcaatcatcaggttacattcctgcaccatccccaggtaattctcatttttc

SEQ ID NO: 133025 - DNA, 80 bp, synthetic construct
  source 1..80: mol_type = other DNA
cgtctttctctccaacgcgcgcggatgacggcccgccctgtaccgacgggccctacgtgacgtttgataccctgtttatg

SEQ ID NO: 133026 - DNA, 80 bp, synthetic construct
  source 1..80: mol_type = other DNA
gatgacgatctatcctggatcactaacgtcatagttgtgttccaggatgagatcgtcataggccatttttacaaagcgcg

SEQ ID NO: 133027 - DNA, 80 bp, synthetic construct
  source 1..80: mol_type = other DNA
gctgctgctccgcggggcgccaggaggcgccggtcgggtcgcggcgtgctgggaggttccgcgggtcgcccccgcaccgc

SEQ ID NO: 133028 - DNA, 80 bp, synthetic construct
  source 1..80: mol_type = other DNA
acgggcgaccaacctcgcataggacgggtggtgcgtcttaggtggttgggaggcgacagggaccccagagcatgcgcgag

SEQ ID NO: 133029 - DNA, 80 bp, synthetic construct
  source 1..80: mol_type = other DNA
ctgggccatcttggcccacagacacggggcgacgcagggacaggactccgttacgacggaggagagccacagtgcgttgg

SEQ ID NO: 133030 - DNA, 80 bp, synthetic construct
  source 1..80: mol_type = other DNA
tactaaagcgaagcgctttggcctccacgcctgaccactgcattacccttgtgaaatctacccagaccgttcagggacct

SEQ ID NO: 133031 - DNA, 80 bp, synthetic construct
  source 1..80: mol_type = other DNA
attacccatacaggctgtggcattacccttgtactgtgaactacaccatccacaaggttcgcctcttcatcaatggtttg

SEQ ID NO: 133032 - DNA, 80 bp, synthetic construct
  source 1..80: mol_type = other DNA
gaacaggaaacattgtgtcagcagtaaacatgacatctagaatgctgctaaatcgattcacaatggctcacaggaagcca

SEQ ID NO: 133033 - DNA, 80 bp, synthetic construct
  source 1..80: mol_type = other DNA
gatgaccagaggaaagtcttcagagaactagtgaggaattgtgacctgcccgtttggctttcgtggcaagtggccaaggc

SEQ ID NO: 133034 - DNA, 80 bp, synthetic construct
  source 1..80: mol_type = other DNA
ctccgtgcccttgggctcaacgccgttgagttctataggggtatcgacgtggcagtcatccccacgtctggggatgtggt

SEQ ID NO: 133035 - DNA, 80 bp, synthetic construct
  source 1..80: mol_type = other DNA
gtcaccaacgattgcccaaactccagtatagtgtatgagaccgaacaccacatcatgcacctcccaggctgtgtgccctg

SEQ ID NO: 133036 - DNA, 80 bp, synthetic construct
  source 1..80: mol_type = other DNA
atcctcgaagacaacaacgaagtggaaatcataacaagaataggagaaagaaaagttttgaagccacgatggttagatgc

SEQ ID NO: 133037 - DNA, 80 bp, synthetic construct
  source 1..80: mol_type = other DNA
ggattccagtactctcccgcacagcgtgttgatttcctgctgcgagcttggaaagaaaagaaagaccctatgggtttttc

SEQ ID NO: 133038 - DNA, 80 bp, synthetic construct
  source 1..80: mol_type = other DNA
gttgtgcttactcaataacatttgaatttgcctggaacaaagactacgttggtcaatttgataccacctcctttaccttc

SEQ ID NO: 133039 - DNA, 80 bp, synthetic construct
  source 1..80: mol_type = other DNA
cccgggcggcctgggaaaccgcccggcacactccagtaaactcatggttgggtaacatcatcatgtacgcgcctaccata

SEQ ID NO: 133040 - DNA, 80 bp, synthetic construct
  source 1..80: mol_type = other DNA
gaaaaagaagagaacatggttaaatcacaggtgacggccggacagggcacatcggaaactttttctatgggtctgttgtg

SEQ ID NO: 133041 - DNA, 80 bp, synthetic construct
  source 1..80: mol_type = other DNA
ctttgtaagcgcgctggagcaaaacccaaatagcaagccgctcatggcgcagctgttccttatagtgcagcacagcaggg

SEQ ID NO: 133042 - DNA, 80 bp, synthetic construct
  source 1..80: mol_type = other DNA
tgatgcacgcatctgcatgtgtctgtggatcatgctgcttgtgagccaagttgaggccgcgctagagaacctggtgcgtc

SEQ ID NO: 133043 - DNA, 80 bp, synthetic construct
  source 1..80: mol_type = other DNA
tttatggcaatggagtcgtgatgcccaacggatcctatgtcagtgcaattgtgcaaggtgagagaatggaagagcctgcc

SEQ ID NO: 133044 - DNA, 80 bp, synthetic construct
  source 1..80: mol_type = other DNA
tgacagcggtagggctgatgttcgctatagtgggaggcctcgctgagttggacatggattccatggccatcccgatgacc

SEQ ID NO: 133045 - DNA, 80 bp, synthetic construct
  source 1..80: mol_type = other DNA
agccgaccgggccaacccagcgccatacgtactatagcgaatgcgatgaatttcgattcatcgccccgcgggtgctggac

SEQ ID NO: 133046 - DNA, 80 bp, synthetic construct
  source 1..80: mol_type = other DNA
ccagaaaacccgggacgaggttgtcgggcttgtgattttcatcggggctctagtggaaatcctgaagctatgtgtgcttt

SEQ ID NO: 133047 - DNA, 80 bp, synthetic construct
  source 1..80: mol_type = other DNA
aacatggtgggaaccttgtcagatgcccgctgtccaggaactccacccatgagatgtattgggtgtcaggagcgtcggga

SEQ ID NO: 133048 - DNA, 80 bp, synthetic construct
  source 1..80: mol_type = other DNA
ggagtgaacaggaggaaccccggccatggagtgaatggacgaatgtggacattcagccagcgaggtcctgggggacctat

SEQ ID NO: 133049 - DNA, 80 bp, synthetic construct
  source 1..80: mol_type = other DNA
gctggacgtttgcaccccagaaccatgatcctggcgcgtcgccgaatacgacgcccatagagtcgattgcggggaccgca

SEQ ID NO: 133050 - DNA, 80 bp, synthetic construct
  source 1..80: mol_type = other DNA
ttgcctgtctcggcgcgcctggggcgggaggtactgttgggcccggccgatgattacaaaacgatgggatggcggttgtt

SEQ ID NO: 133051 - DNA, 80 bp, synthetic construct
  source 1..80: mol_type = other DNA
caccgaaggaggaaagtgggggggtggtggtgctggtggtggaaagacatgatagagggaacaaagaaatagaagaaaac

SEQ ID NO: 133052 - DNA, 80 bp, synthetic construct
  source 1..80: mol_type = other DNA
cttcattgccagagccgaggctatcatccatgtctatgtgccatccttagacgtgcgcgggcctcgcgattccatcatta

SEQ ID NO: 133053 - DNA, 80 bp, synthetic construct
  source 1..80: mol_type = other DNA
cccgtggatctgctacacatggtgtacgcgggccgcggggcgaccggctcgtcgggtgtggtgttcgggacctggtaccg

SEQ ID NO: 133054 - DNA, 80 bp, synthetic construct
  source 1..80: mol_type = other DNA
tttggcgtcgtgagtcccgcccacaagatggtggccccggccacctacctcttgaactacgcaggccgcatcgtatcgag

SEQ ID NO: 133055 - DNA, 80 bp, synthetic construct
  source 1..80: mol_type = other DNA
acaaggcgccggatggagcctgagagaaactgcttgcctaggcaagtcatatgcacaaatgtggcagctgatgtacttcc

SEQ ID NO: 133056 - DNA, 80 bp, synthetic construct
  source 1..80: mol_type = other DNA
gcgagagtctggtgttctccccgcctctttttcctcacgtggagaatggcaccacccaacagtcttacgattgcctagac

SEQ ID NO: 133057 - DNA, 80 bp, synthetic construct
  source 1..80: mol_type = other DNA
acatcttcaccggtggtcattggggcatcattgctgccgtgctatactactccatggccgccaattgggctaaagtcttg

SEQ ID NO: 133058 - DNA, 80 bp, synthetic construct
  source 1..80: mol_type = other DNA
catgtggatgagttccttccggaatgatactggcacgtacattcaggagctcattcttactgaccttcgaaactgtacat

SEQ ID NO: 133059 - DNA, 80 bp, synthetic construct
  source 1..80: mol_type = other DNA
gatatggatgctcagaatggcttgcctcgcgattagtgcgtacaccccttgggcaatcctgccctcagtagttggatttt

SEQ ID NO: 133060 - DNA, 80 bp, synthetic construct
  source 1..80: mol_type = other DNA
ctcctgctagcagccggatgctggggacaagtcaccctcaccgttacggtaacagcggcaacactccttttttgccacta

SEQ ID NO: 133061 - DNA, 80 bp, synthetic construct
  source 1..80: mol_type = other DNA
acaacccatggaatacaaatactcgtggaaaagctggggaaaggctaaaatcataggggcagatgtgcagaataccacct

SEQ ID NO: 133062 - DNA, 80 bp, synthetic construct
  source 1..80: mol_type = other DNA
gcagttcagtcgctatcgatggggcggacccaccgcggcgttcctgtctctcgtggaccagaagcgatccctgctgagcg

SEQ ID NO: 133063 - DNA, 80 bp, synthetic construct
  source 1..80: mol_type = other DNA
gacagctcttctccttcaatccccgccgccactgggtagtccaagactgcaattgttccatctatgttggtcatattacc

SEQ ID NO: 133064 - DNA, 80 bp, synthetic construct
  source 1..80: mol_type = other DNA
tttttatactactaatgctggtcactccatccatgacaatgagatgcgtgggagtaggaaacagagattttgtggaaggt

SEQ ID NO: 133065 - DNA, 80 bp, synthetic construct
  source 1..80: mol_type = other DNA
ttcttccggggacaccgccagcaaacgcgagcaacgggccacggggatgaagcagctgcgccactccctgaagctcctgc

SEQ ID NO: 133066 - DNA, 80 bp, synthetic construct
  source 1..80: mol_type = other DNA
gtctgtacggcgacatgtggacctgatggtgggggcagccactctatgctctgctctctacatcggagacctttgcggag

SEQ ID NO: 133067 - DNA, 80 bp, synthetic construct
  source 1..80: mol_type = other DNA
cattaccgcgggtgttgcggtaaacgggatttgcacactgaaaaaccagcaagcaaggatagtgaatgctggctaacgcc

SEQ ID NO: 133068 - DNA, 80 bp, synthetic construct
  source 1..80: mol_type = other DNA
gggtgtgttggataacaacgcctccgcgcggcaggcggtcctggcgctcccggccccgtaccatgatcgcgcgggtgccg

SEQ ID NO: 133069 - DNA, 80 bp, synthetic construct
  source 1..80: mol_type = other DNA
tgctcggtgtgcgacccctcccggtagccgtaaaacggggacatgtacacaaagtcgcccgtcgccaacacaaactcatc

SEQ ID NO: 133070 - DNA, 80 bp, synthetic construct
  source 1..80: mol_type = other DNA
ttcagccccccgcgcctagccacgcatcttcgggccgtgacgacccacgaccccaaccccgcggccagcacggagcagcc

SEQ ID NO: 133071 - DNA, 80 bp, synthetic construct
  source 1..80: mol_type = other DNA
ccacgcatgtgtagcagagaggaattcatagcaaaagtaagatcaaatgcagccctgggagcttggtcggatgaacagaa

SEQ ID NO: 133072 - DNA, 80 bp, synthetic construct
  source 1..80: mol_type = other DNA
tgactacagcagcagcagtcaccttatgggagaatggtgctagttcagtgtggaatgcaacgacagctattgggctttgt

SEQ ID NO: 133073 - DNA, 80 bp, synthetic construct
  source 1..80: mol_type = other DNA
caactctacatgggcccacacccctcctttacaggctgggagccgtgcaaaacgagatctgcacgactcacccggttacg

SEQ ID NO: 133074 - DNA, 80 bp, synthetic construct
  source 1..80: mol_type = other DNA
aaaataaaacttccaacttattactggtactatgactgttttatgcagactaaatggaagacatcaatttttcctcgctg

SEQ ID NO: 133075 - DNA, 80 bp, synthetic construct
  source 1..80: mol_type = other DNA
atgatgatgaactggtcccctgcaatcgggctgtttgtgtcacacttgatgcggttgccccaaaccttctttgacctggt

SEQ ID NO: 133076 - DNA, 80 bp, synthetic construct
  source 1..80: mol_type = other DNA
ctgacgcccccacattcggccaaatccaagtttggctatggggcaaaggacgtccggaacctatccagcagggccatcaa

SEQ ID NO: 133077 - DNA, 80 bp, synthetic construct
  source 1..80: mol_type = other DNA
cccttctatcatgcatcactgtgccagtctcatcggcgcagttcaagaacatcagcactggctacatggttaccaatgac

SEQ ID NO: 133078 - DNA, 80 bp, synthetic construct
  source 1..80: mol_type = other DNA
gctgggccgttacgcatataactggactacgacccccccttctattgaggacctgcaaaaaagagatattgtatactact

SEQ ID NO: 133079 - DNA, 80 bp, synthetic construct
  source 1..80: mol_type = other DNA
gggtcagccgatgccctgactgacaaagggtggaggctcttagcccctatcacggcttatgcccaacagacgcgtggcct

SEQ ID NO: 133080 - DNA, 80 bp, synthetic construct
  source 1..80: mol_type = other DNA
caacagggaaatgatcaaacagaagaatcaaaaattccatctactactgtggcaatcgtggtgggagtgattgcgggatt

SEQ ID NO: 133081 - DNA, 80 bp, synthetic construct
  source 1..80: mol_type = other DNA
ccggaagacgtttgacacagagtatcctaagaccaagctcatggattgggactttgtggttacaactgacatatccgaaa

SEQ ID NO: 133082 - DNA, 80 bp, synthetic construct
  source 1..80: mol_type = other DNA
ccccgcgtgcagctgcagaaggacgtgcgcccggcgtacgtgcctgcgcagaacctgttcagggaccgcagcggtgagga

SEQ ID NO: 133083 - DNA, 80 bp, synthetic construct
  source 1..80: mol_type = other DNA
tcccgcgcggcgcttcccgcggacacgacttgacggagcggcgagaggtcatggtctatcggagacaccggggacgcccg

SEQ ID NO: 133084 - DNA, 80 bp, synthetic construct
  source 1..80: mol_type = other DNA
cgtgggccaaggtcattgccatcctccttcttgttgcgggagtggatgcgaccacctattccaccggcgcgacagtgggc

SEQ ID NO: 133085 - DNA, 80 bp, synthetic construct
  source 1..80: mol_type = other DNA
cggaggcgttcaccggctccggcgtccttcgcgtttaagcttggtcaggagggcgctcagggcggcgacgttggtcgtgc

SEQ ID NO: 133086 - DNA, 80 bp, synthetic construct
  source 1..80: mol_type = other DNA
ggaaaggtagacaacttcacaatgggtgtcttgtgtttggcaatcctctttgaagaggtgatgagaggaaaatttgggaa

SEQ ID NO: 133087 - DNA, 80 bp, synthetic construct
  source 1..80: mol_type = other DNA
catcgaggaagcttgtagcctgacgcccccccactctgccaaatctaagtttggctatggggcaaaggatgtccggagcc

SEQ ID NO: 133088 - DNA, 80 bp, synthetic construct
  source 1..80: mol_type = other DNA
tcagccatcacaataccagagagggctacaggacccaaatgaaagggccatggcacagtgaagagcttgaaattcggttt

SEQ ID NO: 133089 - DNA, 80 bp, synthetic construct
  source 1..80: mol_type = other DNA
atcttgctcctcaaatgtttccgtggcatgcgacggagcgggtaagaggtactattaccttacccgagacccagaaactc

SEQ ID NO: 133090 - DNA, 80 bp, synthetic construct
  source 1..80: mol_type = other DNA
aagtctactcataccccaagacgcaccggttgagcagaacttgggctacgagactccccccgaggaatttgaaggctttc

SEQ ID NO: 133091 - DNA, 80 bp, synthetic construct
  source 1..80: mol_type = other DNA
tggtgtggaaccaaacatcaggacaggggtgaggaccattacaacggggggtcccatcacctactccacctatggtaagt

SEQ ID NO: 133092 - DNA, 80 bp, synthetic construct
  source 1..80: mol_type = other DNA
accgctaccgcgacgacaagctccccaagacgcagttcgcggccggcgggggccgctacgaacacggagcgctggcgtcg

SEQ ID NO: 133093 - DNA, 80 bp, synthetic construct
  source 1..80: mol_type = other DNA
caaaacttaccagccagaacctcaagtgggagaagaaaactggcaggataatgatgaatattatggcggcagggctctta

SEQ ID NO: 133094 - DNA, 80 bp, synthetic construct
  source 1..80: mol_type = other DNA
cctgtgagcccctcagaggacactgagtcaaaaatccccacgcgcttggaggcgcaggatgggaaaagaaggtggcgacc

SEQ ID NO: 133095 - DNA, 80 bp, synthetic construct
  source 1..80: mol_type = other DNA
tggctggccacttccgtctcactgaggagaaaagaaagcactttcgacacctgctgacccattgtgacttcacaccgtgg

SEQ ID NO: 133096 - DNA, 80 bp, synthetic construct
  source 1..80: mol_type = other DNA
gggcaccgcatggcgtgggacatgatgatgaactggtccccgactattacgctggctgtctcctatctactcagaatccc

SEQ ID NO: 133097 - DNA, 80 bp, synthetic construct
  source 1..80: mol_type = other DNA
gttatatcaacagttcgacgagatggaggagtgttctaggcacatcccctatctcgctgaaggtcatctcatcgctgagc

SEQ ID NO: 133098 - DNA, 80 bp, synthetic construct
  source 1..80: mol_type = other DNA
gttctcactccactgctaaagcatctgatcacgtcagattacatcaacacttcattgacctcaatcaatgttcaagcaag

SEQ ID NO: 133099 - DNA, 80 bp, synthetic construct
  source 1..80: mol_type = other DNA
ctgcggagatgatctggtcgtgatctcagagagcgcaggcgtacccgaggacgaggccgccctgcgagccttcacggagg

SEQ ID NO: 133100 - DNA, 80 bp, synthetic construct
  source 1..80: mol_type = other DNA
gtaacaccatcacatgctatgtgaaagccctagcggcctgcaaggctgcggggatagttgcgcccacaatgctggtatgc

SEQ ID NO: 133101 - DNA, 80 bp, synthetic construct
  source 1..80: mol_type = other DNA
atgacgaggtactcggctccccccggagacgctccgcagccagcgtatgatctcgagctgataacatcctgctcatccaa

SEQ ID NO: 133102 - DNA, 80 bp, synthetic construct
  source 1..80: mol_type = other DNA
ccgtggagccgggccgcgaggaccgcggggaacctcatcatcatcgtccaggcgaccgcgcaccgactggctacgggccg

SEQ ID NO: 133103 - DNA, 80 bp, synthetic construct
  source 1..80: mol_type = other DNA
ccatcgatttcatcaatcatcaggttacactcgttcaccatccccaggtaattctcatttttccagccttgaattatctc

SEQ ID NO: 133104 - DNA, 80 bp, synthetic construct
  source 1..80: mol_type = other DNA
cccttgcagctttgaccatcttcacgcttactccaacatacaagaccttgttggcgcatttcttgtggtggactcagtac

SEQ ID NO: 133105 - DNA, 80 bp, synthetic construct
  source 1..80: mol_type = other DNA
aagcaaaacctccagttgatcaacaccaacggtagttggcatatcaaccgcacagcgctcaactgcaatgattcccttca

SEQ ID NO: 133106 - DNA, 80 bp, synthetic construct
  source 1..80: mol_type = other DNA
ctaggctactggattgagagtgagaagaatgacacatggaggctgaagagggcccatctgatcgagatgaaaacatgtga

SEQ ID NO: 133107 - DNA, 80 bp, synthetic construct
  source 1..80: mol_type = other DNA
attgaaagagaaagaggagaatctggtcaactccttggtcacagccggacatgggcagattgataacttttcactaggag

SEQ ID NO: 133108 - DNA, 80 bp, synthetic construct
  source 1..80: mol_type = other DNA
tgacttgccggtttcgcattcccgttccgtcctaccgaggaagatctcgccgtaggagaggcatggcgggcagtggccgc

SEQ ID NO: 133109 - DNA, 80 bp, synthetic construct
  source 1..80: mol_type = other DNA
ccttcactataaccacacagactgtcccacaagacgctgtctcacgcagtcagcgccgcgggcgcacaggtagaggaaga

SEQ ID NO: 133110 - DNA, 80 bp, synthetic construct
  source 1..80: mol_type = other DNA
tgtactaactttgtactgcatttgttcagttcctgaattacatgaagatttttgttgtcatttgtgtactgaatttaata

SEQ ID NO: 133111 - DNA, 80 bp, synthetic construct
  source 1..80: mol_type = other DNA
gaacagaaggacattcttcactactacgtggagcaggaatgcatcgaggtcgtccactcgcgcgtctacaacatcatcca

SEQ ID NO: 133112 - DNA, 80 bp, synthetic construct
  source 1..80: mol_type = other DNA
cggctggggcagaacgttcttcactgcaccttgcaaggggaggcccgccgagactacgtccgcgactgcatctatctttt

SEQ ID NO: 133113 - DNA, 80 bp, synthetic construct
  source 1..80: mol_type = other DNA
gggatgcccccccgctgaggagggctcatcgcagccacctagtgatggggcccccgactccgatgcagaatcctgtagtt

SEQ ID NO: 133114 - DNA, 80 bp, synthetic construct
  source 1..80: mol_type = other DNA
ggctgttgctttattttcaccgtagagacctgagattgatggctaacgccatctgttccgctgtgcctgtcaactgggtt

SEQ ID NO: 133115 - DNA, 80 bp, synthetic construct
  source 1..80: mol_type = other DNA
aggtacgctccggcgtgcaaacccctcctacgggatgaggtcacattccaggtcgggctcaaccaatacccagtcgggtc

SEQ ID NO: 133116 - DNA, 80 bp, synthetic construct
  source 1..80: mol_type = other DNA
cagccggagaacttggagtaccggataatgctatcagtgcatggatcccagcacagtgggatgattgtgaatgacacagg

SEQ ID NO: 133117 - DNA, 80 bp, synthetic construct
  source 1..80: mol_type = other DNA
actacgtcgtgggttcacggctcccgtgtgaccctgagccagatgtggttgttctctcatcgatgctgactgaccccgca

SEQ ID NO: 133118 - DNA, 80 bp, synthetic construct
  source 1..80: mol_type = other DNA
ctccggacacgtcgcgggtctctttagggccgcggtgtgcacgcgtggggttgcaaaggccgtcgatttcgtgcctgtgg

SEQ ID NO: 133119 - DNA, 80 bp, synthetic construct
  source 1..80: mol_type = other DNA
agcagttcaagcagaaggtccttggcctcattcagagcaccaccaagcaagccgaagaactcaagcccgccgtccactct

SEQ ID NO: 133120 - DNA, 80 bp, synthetic construct
  source 1..80: mol_type = other DNA
cgacaacgattcttggtatagggacagtcctggaccaggctcagacagcgggcgttcggttgactgtactcgccaccgcc

SEQ ID NO: 133121 - DNA, 80 bp, synthetic construct
  source 1..80: mol_type = other DNA
cagctgttggaagcattggtttgggaaagatactagtggatgtgctggctggctatggcgccggaatatcaggcgccctc

SEQ ID NO: 133122 - DNA, 80 bp, synthetic construct
  source 1..80: mol_type = other DNA
gacgagtttccgacgcacgcggaatcgcgcctcaccacgcactaccgctcgcgggcggccgggaacaatcgtccggcgtg

SEQ ID NO: 133123 - DNA, 80 bp, synthetic construct
  source 1..80: mol_type = other DNA
gcgtgggctaaggttattgtcatcctcttgctgaccgcgggtgttgacgccaaaacgtacaccaccggaggtcaagcggg

SEQ ID NO: 133124 - DNA, 80 bp, synthetic construct
  source 1..80: mol_type = other DNA
cagcaattgctccgacccgagcagtgctggatcgatggagaggtgtgaacaaacaaacagcgatgaaacaccttctgagt

SEQ ID NO: 133125 - DNA, 80 bp, synthetic construct
  source 1..80: mol_type = other DNA
aagggtacaaggttcttgtgctgaacccgtctgttgctgccaccctagggttcggcgcttatatgtcaaaggcccatggg

SEQ ID NO: 133126 - DNA, 80 bp, synthetic construct
  source 1..80: mol_type = other DNA
ggtagggccgctacatgtggcaaatacctctttaactgggcagtaaaaaccaagcttaaactcactccaaacccagcggc

SEQ ID NO: 133127 - DNA, 80 bp, synthetic construct
  source 1..80: mol_type = other DNA
cagtgctctgcgagtgctacgatgctggatgtgcttggtatgaactgacaccggcagagacaacaatcaggttgagggct

SEQ ID NO: 133128 - DNA, 80 bp, synthetic construct
  source 1..80: mol_type = other DNA
aggcagggctgccatatgtggcaagtacctcttcaactgggcagtaagaacaaagctcaaactcactccaatagcggccg

SEQ ID NO: 133129 - DNA, 80 bp, synthetic construct
  source 1..80: mol_type = other DNA
gcgatgtctgaattcaccgacctatcccctgacatcttccaggcaaattccctgttctccttttatggtgatgatgagat

SEQ ID NO: 133130 - DNA, 80 bp, synthetic construct
  source 1..80: mol_type = other DNA
tggcattacgctccgcgaccgtgcgaagtcgtgccagccgctagtgtttgtggtccagtgtactgctttaccccgagccc

SEQ ID NO: 133131 - DNA, 80 bp, synthetic construct
  source 1..80: mol_type = other DNA
ctttctgggattacaaatttacgggtgccttcacctgggctggatgcatcctcccaacaacctacccagatttcctggtt

SEQ ID NO: 133132 - DNA, 80 bp, synthetic construct
  source 1..80: mol_type = other DNA
aaacagcctacccataccccaggacgcaccggtggagcaggacttgggctacgtgacgccccccgaagagtggcatcaac

SEQ ID NO: 133133 - DNA, 80 bp, synthetic construct
  source 1..80: mol_type = other DNA
attctaactatgatgctggctaagcttgagactctaaccgctcagttagaagatctatcgcagaaggttgaagagcttgc

SEQ ID NO: 133134 - DNA, 80 bp, synthetic construct
  source 1..80: mol_type = other DNA
atacaggacaaaaaatggatgttggtatggaatggagataagacccatgaaacatgatgagacgacgctggtaaaatcca

SEQ ID NO: 133135 - DNA, 80 bp, synthetic construct
  source 1..80: mol_type = other DNA
cgccctaggttcccccaccccccaacccctcacagcatatccaacgtcaggtctccctttttgtcgggaggcccctcgcc

SEQ ID NO: 133136 - DNA, 80 bp, synthetic construct
  source 1..80: mol_type = other DNA
caagagacgtttgcaacgtcgccgtcgtcggcctactgccgccatgactgccgctcgggcggtactaaggcgggcacaaa

SEQ ID NO: 133137 - DNA, 80 bp, synthetic construct
  source 1..80: mol_type = other DNA
ctttactcggctcaattcgatattcttttggggacatactgcaatacattaaactttgtgcgttttctagaacttggact

SEQ ID NO: 133138 - DNA, 80 bp, synthetic construct
  source 1..80: mol_type = other DNA
accacccgagggttcactaaactattcgagccagggtcagcccaaaacctgcagcttattaacaccaatggtagctggca

SEQ ID NO: 133139 - DNA, 80 bp, synthetic construct
  source 1..80: mol_type = other DNA
cccaccttggcagcgccaacccgtgatgccccggtctcctctctccgacgtcacgtggacatgttggcgggtgccgccac

SEQ ID NO: 133140 - DNA, 80 bp, synthetic construct
  source 1..80: mol_type = other DNA
cgctcactacgtggtgggcgttaccgcagaaggcttaaagtgcccctgccaggtccctgctccagaatttttcactgaag

SEQ ID NO: 133141 - DNA, 80 bp, synthetic construct
  source 1..80: mol_type = other DNA
aagtgtgccagccccctcgcctaactacaccagggccttgtggagagtggccgcggaggagtatgttgagattctaaggg

SEQ ID NO: 133142 - DNA, 80 bp, synthetic construct
  source 1..80: mol_type = other DNA
cgcggaagctgacgatagggagatatccatacccgcagagtgtcacaggccccctcgggcaaaatttccacccgcactgc

SEQ ID NO: 133143 - DNA, 80 bp, synthetic construct
  source 1..80: mol_type = other DNA
cgtgttgtgttgccgcgcggccaaccggacgctgcgatcggtgcaggtcagaaacgccggctgcgcgtcgtcggagcgct

SEQ ID NO: 133144 - DNA, 80 bp, synthetic construct
  source 1..80: mol_type = other DNA
aaggatgttaaggctgtccgagagacacgccagcgtgcatctctcaaagtagtgtttgtaacggaatttgttgtagatgc

SEQ ID NO: 133145 - DNA, 80 bp, synthetic construct
  source 1..80: mol_type = other DNA
acgatccacggagcgctcaccccaggatcggaggggtgtgtctttgacagcagccacccagattacccccaacgggtaat

SEQ ID NO: 133146 - DNA, 80 bp, synthetic construct
  source 1..80: mol_type = other DNA
tcaagctagcggcttccaaggtcagcgcaaggctcctcaccttggaggaggcgtgccagttgactccaccccattctgca

SEQ ID NO: 133147 - DNA, 80 bp, synthetic construct
  source 1..80: mol_type = other DNA
gaaacagtacaggtccatgccttcccaccggagagggcccatgaggtgcatcagtgccagcctggggagttgatccttga

SEQ ID NO: 133148 - DNA, 80 bp, synthetic construct
  source 1..80: mol_type = other DNA
gttcacatcattgggaaaggctgtgcaccaggtttttggaagtgtgtatacaaccatgtttggaggagtctcatggatga

SEQ ID NO: 133149 - DNA, 80 bp, synthetic construct
  source 1..80: mol_type = other DNA
gatcatgaggattcccgtcgtcctaactgacctcctagccgggggtcattggggcgtgctcgcagggctagcatacttca

SEQ ID NO: 133150 - DNA, 80 bp, synthetic construct
  source 1..80: mol_type = other DNA
cgccggcctgagggccgcccccagcgcgaggtgaggagccgggcgccatgtctggggcgccatgtctggagcgccatgtc

SEQ ID NO: 133151 - DNA, 80 bp, synthetic construct
  source 1..80: mol_type = other DNA
cagggaaccttcccggttgctccttttctatctttctcctggcccttctctcttgcttgacgaccccagcatctgcttac

SEQ ID NO: 133152 - DNA, 80 bp, synthetic construct
  source 1..80: mol_type = other DNA
taccatcttcactctgtcccccgcgtataagtacttactggtcaacctagtatggtggctccaatactttatagccagag

SEQ ID NO: 133153 - DNA, 80 bp, synthetic construct
  source 1..80: mol_type = other DNA
ctatgctgagtctgattgacggaagaggaccgatacggtttgtgttggccttgttgacgtttttcaggttcacagctatc

SEQ ID NO: 133154 - DNA, 80 bp, synthetic construct
  source 1..80: mol_type = other DNA
cgaagacgtcttgatccaggaagacagggtcatctagtgtgatttaaggtagaaaagtagactatgtaaacaatgtaaat

SEQ ID NO: 133155 - DNA, 80 bp, synthetic construct
  source 1..80: mol_type = other DNA
ggttgggagtgaaatctctcaaacgccgtcgctgctattaaactaaaaaacaaagagtgttaacatcccatctgtgtata

SEQ ID NO: 133156 - DNA, 80 bp, synthetic construct
  source 1..80: mol_type = other DNA
tttatggcaacggtgtcgtcactagaagcggaacatatgtgagtgccatagcccagactgaaaaaagcattgaagacaat

SEQ ID NO: 133157 - DNA, 80 bp, synthetic construct
  source 1..80: mol_type = other DNA
atggatcagtatactccgtgaatcctttggaccttccagccataattgagaggttacacgggcttgacgccttttctatg

SEQ ID NO: 133158 - DNA, 80 bp, synthetic construct
  source 1..80: mol_type = other DNA
ccccgtccccccaggtgtgccaggacggccagggcatacgcggtgtgaaaaaaggcgtcgggtgcggtcccctcgacggc

SEQ ID NO: 133159 - DNA, 80 bp, synthetic construct
  source 1..80: mol_type = other DNA
ccaaagttctgggaaatggttgatgaagaaagagaagctcatcttaaaggagagtgtcacacatgcatctacaacatgat

SEQ ID NO: 133160 - DNA, 80 bp, synthetic construct
  source 1..80: mol_type = other DNA
gtgattggtcatctccctgttccacatcatggctgtgggagatctggaattgggtatgcacagtccttgcagactttaag

SEQ ID NO: 133161 - DNA, 80 bp, synthetic construct
  source 1..80: mol_type = other DNA
tgcagctcgcccgggacagtcgcgcggcatttgtgcctcgtcagaacatgttccgcgacaacagcggggaggaagctgag

SEQ ID NO: 133162 - DNA, 80 bp, synthetic construct
  source 1..80: mol_type = other DNA
cgctaatgagatgccgcgcgggcggagccggcggcggcgcgaccaacgggccgccgccacggacgcggacgcgctggcgt

SEQ ID NO: 133163 - DNA, 80 bp, synthetic construct
  source 1..80: mol_type = other DNA
atcggtctgcgggcccgtctactgctttacacctagcccggtggtcatcggcactaccgacaaaaggggcctccccacgt

SEQ ID NO: 133164 - DNA, 80 bp, synthetic construct
  source 1..80: mol_type = other DNA
catcatgatgctattggtggggtaaactttaccctaacccaacccagagctcacgtggacctgggagtcgggtatacagc

SEQ ID NO: 133165 - DNA, 80 bp, synthetic construct
  source 1..80: mol_type = other DNA
gaggtacttgaggctcttcacagattccagcttcaatggggcggggggctagtccgcgtccccttttcccgcaattccac

SEQ ID NO: 133166 - DNA, 80 bp, synthetic construct
  source 1..80: mol_type = other DNA
acttcaagaactggctatctgctaaattattccctaggttacctggcattcccttcatttcctgtcaaaagggttacaga

SEQ ID NO: 133167 - DNA, 80 bp, synthetic construct
  source 1..80: mol_type = other DNA
ccatcatacataattttaacataaatcaaatggcgacctctaacaaaggtgcttcccacatacattatttcttttggcat

SEQ ID NO: 133168 - DNA, 80 bp, synthetic construct
  source 1..80: mol_type = other DNA
ttacaaccagaaccaggaaaacaacgcagtggggaagacaaccgactggcttttctgctgattggactggggagtgtcat

SEQ ID NO: 133169 - DNA, 80 bp, synthetic construct
  source 1..80: mol_type = other DNA
cggctcgcgcccacattggggcccaaatgacccccggcgaaggtcacgcaatctgggtaaggtcatcgatacccttacgt

SEQ ID NO: 133170 - DNA, 80 bp, synthetic construct
  source 1..80: mol_type = other DNA
aaccttcctggttgctctttctctatcttccttttggcactgctctcgtgcctcaccacccctgcatctgcaatccacgt

SEQ ID NO: 133171 - DNA, 80 bp, synthetic construct
  source 1..80: mol_type = other DNA
ccgggtgtactccaagaaccccattagcatgcgccgccccccgccgacgcagatgggagtccccccggcgccccgccggc

SEQ ID NO: 133172 - DNA, 80 bp, synthetic construct
  source 1..80: mol_type = other DNA
acctttatgaccacctttctccaatgcgggattgggccgcagacggtcttaaagacctggctgtagctactgaacctgtg

SEQ ID NO: 133173 - DNA, 80 bp, synthetic construct
  source 1..80: mol_type = other DNA
gaagtggacggggtgagactccaccgttacgcccctccatgcaagcccctgttgagagatgatattactttcacggtggg

SEQ ID NO: 133174 - DNA, 80 bp, synthetic construct
  source 1..80: mol_type = other DNA
ctgctgcaggccagccttctgcgggtgccatactacgtgcgtgcccatgcgcttctacgcttgtgcatcctcgtacggcg

SEQ ID NO: 133175 - DNA, 80 bp, synthetic construct
  source 1..80: mol_type = other DNA
gctgtctctagcgatattggcccggggaggctaagatccaccccaacgcccggccacccgtgtacgtgcccgacggccca

SEQ ID NO: 133176 - DNA, 80 bp, synthetic construct
  source 1..80: mol_type = other DNA
taacaagtagcctaaggacttcacctacaaccgttggttccttacgtcagctacaagattccaccaaaggtacacaccaa

SEQ ID NO: 133177 - DNA, 80 bp, synthetic construct
  source 1..80: mol_type = other DNA
cagtggattaccaaagagaataatggacaacaaaaagaaataacgcacacttttggcgtggctgctatgggaggagaatc

SEQ ID NO: 133178 - DNA, 80 bp, synthetic construct
  source 1..80: mol_type = other DNA
ccgccctgtgtcttgacgcccaggcggtgcggccggtcgggtcgacgcggcgggtggtggatatgtcatcggtggcccgc

SEQ ID NO: 133179 - DNA, 80 bp, synthetic construct
  source 1..80: mol_type = other DNA
caaaaactccaaaggtcacaaaaacaccgccaacgtaacacgtccgccgcgccactccccaaccttcgaccccaacgtca

SEQ ID NO: 133180 - DNA, 80 bp, synthetic construct
  source 1..80: mol_type = other DNA
gtgcttacctgaacacccccggactccctgtctgtcaagaccacctggaattttgggagggggtgttcacagggctcact

SEQ ID NO: 133181 - DNA, 80 bp, synthetic construct
  source 1..80: mol_type = other DNA
cacagctggatgggacacacgcataacagaggcggatctggatgatgaacaggaaatcttgaactacatgagcccacacc

SEQ ID NO: 133182 - DNA, 80 bp, synthetic construct
  source 1..80: mol_type = other DNA
cttgatttcgtgccagtggaaagcatggaaactagcatgagatctcccacgtttacggacaattcaacaccaccagccgt

SEQ ID NO: 133183 - DNA, 80 bp, synthetic construct
  source 1..80: mol_type = other DNA
acagaccttctgagtgttgtgacaccctcctttgtgacatcggagagtcctcgtcaagtgctgaggttgaagagcatagg

SEQ ID NO: 133184 - DNA, 80 bp, synthetic construct
  source 1..80: mol_type = other DNA
ggcgattggacgattgttaagccgcagcgtgtctccgcttgtgctgtagtagtcaaaaacgtaatggccgtcggagtcgg

SEQ ID NO: 133185 - DNA, 80 bp, synthetic construct
  source 1..80: mol_type = other DNA
ggacatgccttcctattacttggtgattgtggggatagtcatggtttgctcctgcaccttctttgccattatgatctacc

SEQ ID NO: 133186 - DNA, 80 bp, synthetic construct
  source 1..80: mol_type = other DNA
aggatcgctttgccacagagcaacttttatatgccgagcgtgcttctgaatcgtactttgtcggacaaatccaagtacac

SEQ ID NO: 133187 - DNA, 80 bp, synthetic construct
  source 1..80: mol_type = other DNA
caagctcgaacagttttggcagaagcacatgtggaacttcatcagcggcatacaataccttgctggcttatccacgttgc

SEQ ID NO: 133188 - DNA, 80 bp, synthetic construct
  source 1..80: mol_type = other DNA
cgttgatgccggtgaacgtgcaaaacaggctctagcgttcgaacgcactgatttcgaccaggttcgttcactcatggaaa

SEQ ID NO: 133189 - DNA, 80 bp, synthetic construct
  source 1..80: mol_type = other DNA
cgcagtatcgaggccttccgggtgggatggggcgccttgcaatatgaggataatgtcaccaatccagaggatatgagacc

SEQ ID NO: 133190 - DNA, 80 bp, synthetic construct
  source 1..80: mol_type = other DNA
agagacgagaggacccattcaggtgcctgagatcgacctgggaactggaacaaggtgcgtgacgttggctgaagacaagg

SEQ ID NO: 133191 - DNA, 80 bp, synthetic construct
  source 1..80: mol_type = other DNA
gctcccatgaactgaacgctcgaataggccctgcttgtgtcattggtgagctcttccaataggtgcgtgataaagcctgg

SEQ ID NO: 133192 - DNA, 80 bp, synthetic construct
  source 1..80: mol_type = other DNA
gacggtcgttctcaccgagtccaaggttgccgaagccctggcggacctggcgacaaagaccttcagccgggcggagtcgt

SEQ ID NO: 133193 - DNA, 80 bp, synthetic construct
  source 1..80: mol_type = other DNA
acatggttctgcagagctccctaggaaatgacctaagggttgacggagccagcattaagtttgatagcatttgcctttac

SEQ ID NO: 133194 - DNA, 80 bp, synthetic construct
  source 1..80: mol_type = other DNA
ttcgggtgattctggggttggcgaagagttgttgccggttgatctggatttgaaatgctatgaagacggtttgcctccta

SEQ ID NO: 133195 - DNA, 80 bp, synthetic construct
  source 1..80: mol_type = other DNA
cgccaccagcacgtcgttctcgttaaaggaaacgcggtgcctagtggagctctggggtccgagcggcggccccggagccg

SEQ ID NO: 133196 - DNA, 80 bp, synthetic construct
  source 1..80: mol_type = other DNA
ttttgggagagcgtcttcaccggactaactcacatagatgcccatttcttgtcacagaccaagcaacagggactcaactt

SEQ ID NO: 133197 - DNA, 80 bp, synthetic construct
  source 1..80: mol_type = other DNA
tcctcctcaacatcctaggggggtgggtggcgtctcagctggcgccaccctcagcctccacggctttcgtcgtgagtgtg

SEQ ID NO: 133198 - DNA, 80 bp, synthetic construct
  source 1..80: mol_type = other DNA
aaacctaaggacagcggcccgcgcgacggggtccgagaggctaaggtaggccgcgatgttaatggtgaacgcaaagccgc

SEQ ID NO: 133199 - DNA, 80 bp, synthetic construct
  source 1..80: mol_type = other DNA
gcttggcacggggatcacctccatctgaggcgagctcctcagtgagccagctatcagcaccgtcgctgcgggccacctgc

SEQ ID NO: 133200 - DNA, 80 bp, synthetic construct
  source 1..80: mol_type = other DNA
atgggtacataacattaaatgttacaattgataatactacatggttaagatatcatttagataaatggcataatctttgc

SEQ ID NO: 133201 - DNA, 80 bp, synthetic construct
  source 1..80: mol_type = other DNA
gcagacacgcggattggtgggaacgattgtcaccagtctcaccggccgcgataaaaacgaagttgaaggcgagatacagg

SEQ ID NO: 133202 - DNA, 80 bp, synthetic construct
  source 1..80: mol_type = other DNA
aaactgccaaacactccccggttaactcctggttagggaacatcatcatgtacgcaccgaccctgtgggctcggatcgtg

SEQ ID NO: 133203 - DNA, 80 bp, synthetic construct
  source 1..80: mol_type = other DNA
gattagtgaggattacgccacaccatgtgggtcaacgtggttgagggacatctgggactgggtgtgcacagttttatctg

SEQ ID NO: 133204 - DNA, 80 bp, synthetic construct
  source 1..80: mol_type = other DNA
aggcagcatgcaactggactaggggagagccttgtgggttggagcatagggatcgcacagaattgtcgcccttgctctta

SEQ ID NO: 133205 - DNA, 80 bp, synthetic construct
  source 1..80: mol_type = other DNA
cctcacaacgggcagcgttgttatctgcggccgaatcatcaccaatggtcgacctgcggtcgtgcctgaccgcgaggtaa

SEQ ID NO: 133206 - DNA, 80 bp, synthetic construct
  source 1..80: mol_type = other DNA
gtgtcgcaggtagaggcggccttgtccaacctgattaccatcaacgctgcttcagtcgccagcactcatggtttctacca

SEQ ID NO: 133207 - DNA, 80 bp, synthetic construct
  source 1..80: mol_type = other DNA
caaaaacagtgtagccagtgcatttggggaatttatcatgaagtttggaaggaaaggcatgaaaaaatttggagacgcct

SEQ ID NO: 133208 - DNA, 80 bp, synthetic construct
  source 1..80: mol_type = other DNA
ctggagatgggttggaaggcttggggcaagagcatcatctttgctccagaactagctaacaacacctttgtcatcgacgg

SEQ ID NO: 133209 - DNA, 80 bp, synthetic construct
  source 1..80: mol_type = other DNA
tcgaaggtcgactccagggacgccgtctgcgtcggcgagcccacacacaccaacacgggccgcaggcgggccgcgtactg

SEQ ID NO: 133210 - DNA, 80 bp, synthetic construct
  source 1..80: mol_type = other DNA
ccactggacaggacaatacaactgcccaatcagactcaggttgttgtaccaatgatgcagcgtcgtctcctcacagcggc

SEQ ID NO: 133211 - DNA, 80 bp, synthetic construct
  source 1..80: mol_type = other DNA
gagcgcctgttgtacctgatcaccaactacctgccctcggtctccctggccacaaaacgcctgggtggcgaggcgcaccc

SEQ ID NO: 133212 - DNA, 80 bp, synthetic construct
  source 1..80: mol_type = other DNA
tgcggggccgcgaacatgtgccaacatgtggtatggtactttccccatcaatgagtacaccaccggacccagcacacctt

SEQ ID NO: 133213 - DNA, 80 bp, synthetic construct
  source 1..80: mol_type = other DNA
gatcaacccagcctactacagtcagtacaacgattgaaagcactactcacactacacagttagacactacagtgaagaac

SEQ ID NO: 133214 - DNA, 80 bp, synthetic construct
  source 1..80: mol_type = other DNA
atcccaatccagttaatgcatcctgatctatcatgaagaggaggtgggggaagaactggaagaaccatttttattccaag

SEQ ID NO: 133215 - DNA, 80 bp, synthetic construct
  source 1..80: mol_type = other DNA
cactccttattgttaaaggaaaataccaaacaataagcgaatcaaccataccaaaagatcagagaaactttagcgttaag

SEQ ID NO: 133216 - DNA, 80 bp, synthetic construct
  source 1..80: mol_type = other DNA
gaggcgggcccgccctgtgagggcgtgccggctccaagcgtatatatgcgcggctcctgccatcgtctctccggagagcg

SEQ ID NO: 133217 - DNA, 80 bp, synthetic construct
  source 1..80: mol_type = other DNA
aggaaaacatcaagtatgaggtggccatttttgtccatggacctacgacagtggattcccacggcaattactccacgcaa

SEQ ID NO: 133218 - DNA, 80 bp, synthetic construct
  source 1..80: mol_type = other DNA
gctatggcgctggagtggctggagcgctcgtggccttcaagatcatgagcggagaggttccgactaccgaggatctggta

SEQ ID NO: 133219 - DNA, 80 bp, synthetic construct
  source 1..80: mol_type = other DNA
acgccagcactaccggaccctgcattccggtacctgcgcccaattacaaacgggccctatggcgtgtctctgccgaagac

SEQ ID NO: 133220 - DNA, 80 bp, synthetic construct
  source 1..80: mol_type = other DNA
cagctcccttgtgaatggggtagttagattactctcaaaaccatgggacactatcaccaatgtgaccacgatggccatga

SEQ ID NO: 133221 - DNA, 80 bp, synthetic construct
  source 1..80: mol_type = other DNA
cagaagaaagtgacttttgaccgtgtccaaatcttggatacgcactaccaagctgtactacaggagataaaactccgggc

SEQ ID NO: 133222 - DNA, 80 bp, synthetic construct
  source 1..80: mol_type = other DNA
aggacatcaggacggaagcggatatatacctatgttgtgaccttgaaccggaggccaaaaaggtgattggctccctcacg

SEQ ID NO: 133223 - DNA, 80 bp, synthetic construct
  source 1..80: mol_type = other DNA
atgcttctgacatgtttattttcactcactaagttttgcaagagcctctccccacccagggataagagttcttccaggct

SEQ ID NO: 133224 - DNA, 80 bp, synthetic construct
  source 1..80: mol_type = other DNA
ccgtgccagcctcagcggtcaatcacgccaataacagcggcgtgtattatatcaccaatgactgtcccaacagcagcatc

SEQ ID NO: 133225 - DNA, 80 bp, synthetic construct
  source 1..80: mol_type = other DNA
ctcagctagctgagaagtgctttccgaccatacctgaccaacccaatacgacctctgactcaggttgtggcacagctggc

SEQ ID NO: 133226 - DNA, 80 bp, synthetic construct
  source 1..80: mol_type = other DNA
gctgcccggcctccccttcatctcttgtcaaaaggggtacaagggtgtgtgggccggcactggcatcatgaccacgcgct

SEQ ID NO: 133227 - DNA, 80 bp, synthetic construct
  source 1..80: mol_type = other DNA
ctgtggatcgggacggttctcaaccaggcggagacagccggggttaggctcacagtcttagccacggccaccccccccgg

SEQ ID NO: 133228 - DNA, 80 bp, synthetic construct
  source 1..80: mol_type = other DNA
tgcccactgccacctaccaagacccctccgataccacctccacggaggaagaggacggtcgtcctaacagaatccaccgt

SEQ ID NO: 133229 - DNA, 80 bp, synthetic construct
  source 1..80: mol_type = other DNA
tattgcgcagcaacgctcaaagaaacagcagcaacggcaggaaatctgggaggaagaatcttgggagagtcaggcagagg

SEQ ID NO: 133230 - DNA, 80 bp, synthetic construct
  source 1..80: mol_type = other DNA
gaaagccatcggcgttctgcagatggctggcaagcaagcgcaggaagcagcgccagtggtccagtccaactttgctaagc

SEQ ID NO: 133231 - DNA, 80 bp, synthetic construct
  source 1..80: mol_type = other DNA
gccggtgagcttgtagccgatcccccggggcagaggagagtgggtgacgacgtagctggcgttgtgggtgatgggtacca

SEQ ID NO: 133232 - DNA, 80 bp, synthetic construct
  source 1..80: mol_type = other DNA
atgctaacatcaccggtccttctgatgatagaccgtattgctggcactacgcacctagaccttgtagtgttgtcccggca

SEQ ID NO: 133233 - DNA, 80 bp, synthetic construct
  source 1..80: mol_type = other DNA
tactcgcatgttcctgaaaatcagagaggttaacaccacagagtgcgacgccaaaatcatcggaacggcagtgaagaaca

SEQ ID NO: 133234 - DNA, 80 bp, synthetic construct
  source 1..80: mol_type = other DNA
cccgtggacatggacgcggagctggaggacgacgacgacggactgtttggggagtgacggagggaaaacttccgggagcg

SEQ ID NO: 133235 - DNA, 80 bp, synthetic construct
  source 1..80: mol_type = other DNA
agcctctacgtgtgggtttcggtacgtgagtgttagggaatgtccacgttggcgttcaaagggcgcgtttattgtgtttc

SEQ ID NO: 133236 - DNA, 80 bp, synthetic construct
  source 1..80: mol_type = other DNA
gttttaccaccataacactacagacacatacggtgatgcggcggcaatggcgtttggaaaaaccaacgaaccggcggcac

SEQ ID NO: 133237 - DNA, 80 bp, synthetic construct
  source 1..80: mol_type = other DNA
gccctaccctccgatttcgttccactttgctaccgcgaatgcccgccgcctctctggagtcattgctatctcctccgcct

SEQ ID NO: 133238 - DNA, 80 bp, synthetic construct
  source 1..80: mol_type = other DNA
tcaccaatgactgtccgaattctagcatagtgtacgaagctgataatcacatcatacacctcccagggtgcgtgccttgt

SEQ ID NO: 133239 - DNA, 80 bp, synthetic construct
  source 1..80: mol_type = other DNA
ttgaaggtaccctgccagataccacagcccgaattcttctcctgggtggacggggtccagatccaccggcacgcccctca

SEQ ID NO: 133240 - DNA, 80 bp, synthetic construct
  source 1..80: mol_type = other DNA
cgagttgagccctctgttgctgtccactacgcaatggcaggtcctcccctgctcattcacaacactgcccgccctgtcaa

SEQ ID NO: 133241 - DNA, 80 bp, synthetic construct
  source 1..80: mol_type = other DNA
tggttgagagacatctgggactgggtgtgtgaggtgttgagcgacttcaaatgctggcttaaggctaagctcttcccgca

SEQ ID NO: 133242 - DNA, 80 bp, synthetic construct
  source 1..80: mol_type = other DNA
cgtgtggggctcctccctgccggatacgccccgagtctcttgaaaaacacaaacaccactttgctgtgccccacagactg

SEQ ID NO: 133243 - DNA, 80 bp, synthetic construct
  source 1..80: mol_type = other DNA
gcgggtgctcagggggtgcttatgacataataatttgtgacgagtgccattccacggacgcaacatccatcttgggcatt

SEQ ID NO: 133244 - DNA, 80 bp, synthetic construct
  source 1..80: mol_type = other DNA
gtggtaagctttgtgcccgttaaaggtgcgctactaaatttacaaaaccctaccagcattggacttcacattctatttga

SEQ ID NO: 133245 - DNA, 80 bp, synthetic construct
  source 1..80: mol_type = other DNA
caacacgttcgcacttacgagtctttttgattcagggccccaacagaaactccagctgatcaataccaacggaagctggc

SEQ ID NO: 133246 - DNA, 80 bp, synthetic construct
  source 1..80: mol_type = other DNA
agtgctcgattcattcgaaccactcgtggctgagtcagaagacagggagatctctgtggaagcagagattctccgtccaa

SEQ ID NO: 133247 - DNA, 80 bp, synthetic construct
  source 1..80: mol_type = other DNA
cgccagctcgtccagtggcttgcgttctatcagcccttggttggcggcgtccgtcaggacggagagccaggccgccaggt

SEQ ID NO: 133248 - DNA, 80 bp, synthetic construct
  source 1..80: mol_type = other DNA
gtcaaccgctaacccgacgtcgtgcttcaggcggtggttggtaaattcggcccgttcgttgttaaggtatttcaccaaca

SEQ ID NO: 133249 - DNA, 80 bp, synthetic construct
  source 1..80: mol_type = other DNA
tgaccaggtattcagcgactcccggtgatatacctagcccaacatacgacttggagctaataacatcgtgctcctccaac

SEQ ID NO: 133250 - DNA, 80 bp, synthetic construct
  source 1..80: mol_type = other DNA
agtcttcagaccggctttctcgccggcttattttaccatcacagattcaattcatctggctgtccggaacgtttgagcag

SEQ ID NO: 133251 - DNA, 80 bp, synthetic construct
  source 1..80: mol_type = other DNA
acgtggatttgctagtcggcagtgccactctgtgctccgcgctctatgtcggtgacctttgcggggccgtcttccttgtg

SEQ ID NO: 133252 - DNA, 80 bp, synthetic construct
  source 1..80: mol_type = other DNA
ttgtgatgatccactcgcagagacacaaatgtccggggagccgttcttcctccgcgatggggatatcgaagacaagtgaa

SEQ ID NO: 133253 - DNA, 80 bp, synthetic construct
  source 1..80: mol_type = other DNA
ggcaacacaaacattccttggtacttgcatcaatggggtgatgtggacagtcttccacggggccggcgctaagacccttg

SEQ ID NO: 133254 - DNA, 80 bp, synthetic construct
  source 1..80: mol_type = other DNA
cccgctgtggcttccatgatggcattcagcgccgccctcaccagcccgctgccaaccggcactaccatcctcctcaacat

SEQ ID NO: 133255 - DNA, 80 bp, synthetic construct
  source 1..80: mol_type = other DNA
ctctaaggggtggaagctcctcgcccccatcactgcttacgcccaacagacgcgaggtctcttgggcgccatagtggtaa

SEQ ID NO: 133256 - DNA, 80 bp, synthetic construct
  source 1..80: mol_type = other DNA
tttgcggccgtctcgcacgcctcacccgactgtctcgggcccttccccacctacctcctctttgccctgctcacctgcac

SEQ ID NO: 133257 - DNA, 80 bp, synthetic construct
  source 1..80: mol_type = other DNA
ggacacagcctcgcatacagcgagaggcttcactcgggtcttcgacatgggcgcccagcagagactccagcttataagca

SEQ ID NO: 133258 - DNA, 80 bp, synthetic construct
  source 1..80: mol_type = other DNA
aagttactcacgaacctctctacactatatatacacaagccctaaactgacgtaatgggagtaaagtgtaaaaaatcccg

SEQ ID NO: 133259 - DNA, 80 bp, synthetic construct
  source 1..80: mol_type = other DNA
tgggatacattcccgtcgtcggcgccccggtaggaggcgttgccagagccctggcacatggtgtcagggttctggaagac

SEQ ID NO: 133260 - DNA, 80 bp, synthetic construct
  source 1..80: mol_type = other DNA
gggtggaggctcagacgatcgtctccggtggaactctcgcacggggtgcacacagcctagccggcctcttctcccgcgtg

SEQ ID NO: 133261 - DNA, 80 bp, synthetic construct
  source 1..80: mol_type = other DNA
cctagacaaggccggaaacctcacctcccaaaatgtaaccactgttactcagccacttaaaaaaacaaagtcaaacataa

SEQ ID NO: 133262 - DNA, 80 bp, synthetic construct
  source 1..80: mol_type = other DNA
cctatggctcctgcgacccgaaactgcttccgtcttcggccccgcgtctggccccggcgagcgtataccaacccgcccct

SEQ ID NO: 133263 - DNA, 80 bp, synthetic construct
  source 1..80: mol_type = other DNA
taacaaaaataccgcgatcccgtaggtcccttcgcagggccagctgaacataatcgtgcaggtctgcacggaccagcgcg

SEQ ID NO: 133264 - DNA, 80 bp, synthetic construct
  source 1..80: mol_type = other DNA
gggagcacagtggaaatgagatcgttgatgtcatgtgccatgccactctcacacacaggctgatgtctccacacagagtc

SEQ ID NO: 133265 - DNA, 80 bp, synthetic construct
  source 1..80: mol_type = other DNA
ggccggaaccgatggggaaagctactttgacatgggcgcagacctgcactggcagcccagccgccgggtcttggaagccg

SEQ ID NO: 133266 - DNA, 80 bp, synthetic construct
  source 1..80: mol_type = other DNA
cgcctacgcccagcaaaccaggggcattgtcgggaccattgtcaccagcttaaccggccgagataaaaacacggtcgagg

SEQ ID NO: 133267 - DNA, 80 bp, synthetic construct
  source 1..80: mol_type = other DNA
atgtgaacaggacagctctcaactgcaacgacagtctgcagacggggtttatcacagccctgttttacgccgacaaattc

SEQ ID NO: 133268 - DNA, 80 bp, synthetic construct
  source 1..80: mol_type = other DNA
cgtgctggctggcctggcgtattacagcttgaataacaactgggccaaggttgtaggcatactcctcttgtttgcaggtg

SEQ ID NO: 133269 - DNA, 80 bp, synthetic construct
  source 1..80: mol_type = other DNA
gtggagttcatccagcaacttcagcagcccgccttcgacatggtcgacacagtgaactcttacaacaccgctaccggact

SEQ ID NO: 133270 - DNA, 80 bp, synthetic construct
  source 1..80: mol_type = other DNA
cgtcgtaggagaggcatggcgggcagtggtcgccggcgggctttgcgcaggcgcatgaaaggcggaattttacccgctct

SEQ ID NO: 133271 - DNA, 80 bp, synthetic construct
  source 1..80: mol_type = other DNA
agcgacgggtcctggtctaccgtaagcagcgaggaagccagtgatgacgtcgtgtgctgctccatgtcatacacctggac

SEQ ID NO: 133272 - DNA, 80 bp, synthetic construct
  source 1..80: mol_type = other DNA
cagtcctcgaccaggcagagacggctggagccaggctcgtcgtcttggccacggccactccccccggcagtgtgacaacg

SEQ ID NO: 133273 - DNA, 80 bp, synthetic construct
  source 1..80: mol_type = other DNA
gatcttggctccggagctggttcatggagcacgtgttcagacgaaggtgggtccgtcgtttgctgctctatgtcgtactc

SEQ ID NO: 133274 - DNA, 80 bp, synthetic construct
  source 1..80: mol_type = other DNA
cacagcgtgggactttgggtcggtcggagggattttcaattctgtaggaaaggcggtacatcaggtctttggaggagcct

SEQ ID NO: 133275 - DNA, 80 bp, synthetic construct
  source 1..80: mol_type = other DNA
cctggtacacggcgaggttggatcgccgcccgagaagctgaagcagggggcacggcccgcacgcgtacgggtccagcgtc

SEQ ID NO: 133276 - DNA, 80 bp, synthetic construct
  source 1..80: mol_type = other DNA
atcactcgggtggaatcagaaaacaaagtggtcattttggactcatttgatccactcaaagcggaggaggacgaacagga

SEQ ID NO: 133277 - DNA, 80 bp, synthetic construct
  source 1..80: mol_type = other DNA
gcctgctttgcgccgggcggcccgagcggcccgtcaagcttccccaaatatatcgactggctgacgtgcctggggctggt

SEQ ID NO: 133278 - DNA, 80 bp, synthetic construct
  source 1..80: mol_type = other DNA
gcagggcgtggaggcagtcgcgcgtgcgcggtggcagccataccgcgtatagggtaatggcgctgacgctctcctccacc

SEQ ID NO: 133279 - DNA, 80 bp, synthetic construct
  source 1..80: mol_type = other DNA
agactgctttaggaagcacccaggtactacctatcttaagtgtggagcagggccttggttaacccccaggtgcctggtag

SEQ ID NO: 133280 - DNA, 80 bp, synthetic construct
  source 1..80: mol_type = other DNA
cctatctcaacactcctggactccccgtttgccaggaccacctagaattctgggagggggtttttaccggactgacacac

SEQ ID NO: 133281 - DNA, 80 bp, synthetic construct
  source 1..80: mol_type = other DNA
cgtgatgcataccacctgctcatgcggcgcccaaatcgccggccacgtaaagaatgggtccatgaggattcttgggccca

SEQ ID NO: 133282 - DNA, 80 bp, synthetic construct
  source 1..80: mol_type = other DNA
ctccgttgagagcctggcggcatcgagccagagcggtcggggctaagctcattgcccaaggcgggaaagccgctatatgc

SEQ ID NO: 133283 - DNA, 80 bp, synthetic construct
  source 1..80: mol_type = other DNA
acctaccaggtagcccacttgcatgcgccaacggggagcggcaagagcacgaaggtccctgccgcatatgcggctcaagg

SEQ ID NO: 133284 - DNA, 80 bp, synthetic construct
  source 1..80: mol_type = other DNA
gtgtcgcaggtcgaagcggcgctcgccaatctgattaccatcaacgcggcatcagccgcaagcacgcacggctttttctt

SEQ ID NO: 133285 - DNA, 80 bp, synthetic construct
  source 1..80: mol_type = other DNA
ccgctgctgtgccccctgggtcacgccgtcggcatattccgtgctgcggtgtgtacccggggagtcgcaaaagcggtgga

SEQ ID NO: 133286 - DNA, 80 bp, synthetic construct
  source 1..80: mol_type = other DNA
ccaggaggactgggttaacaaaggcaaaccaacgccccacgcggccctagccccggtaatggtgttaaccagggcgaaag

SEQ ID NO: 133287 - DNA, 80 bp, synthetic construct
  source 1..80: mol_type = other DNA
atagtcgccattttggatggtatggtccaggtgctggggggccatcagcaggattccggcgtgcaacgccccgtcgaata

SEQ ID NO: 133288 - DNA, 80 bp, synthetic construct
  source 1..80: mol_type = other DNA
catccgcgtttgggtattggctgactctgaagtacacaaaacgagggggtgttttttgggatacgccttccccaaaagtg

SEQ ID NO: 133289 - DNA, 80 bp, synthetic construct
  source 1..80: mol_type = other DNA
ccctactgtcatgcatcacagtgccagtgtctgcagtggaagttaggaacatcagtactagctactacgcgactaatgat

SEQ ID NO: 133290 - DNA, 80 bp, synthetic construct
  source 1..80: mol_type = other DNA
agaactgacaggctatggcactgtcacgatggagtgctctccgagaacgggccttgacttcaatgagatggtgctgctgc

SEQ ID NO: 133291 - DNA, 80 bp, synthetic construct
  source 1..80: mol_type = other DNA
cgtatggtgatgatgacgcatttcttctcaattctccagtcccaagatgaactccacaaagcgcttgacttcgatattta

SEQ ID NO: 133292 - DNA, 80 bp, synthetic construct
  source 1..80: mol_type = other DNA
ggtggcagctgtcattggttggatgcttggaagcaacaccatgcagcgagttgtgtttgtcgtgttattgctcttggtgg

SEQ ID NO: 133293 - DNA, 80 bp, synthetic construct
  source 1..80: mol_type = other DNA
ggacagtttaaaaaactgtgtgaaactaaagatggaaaacattcttgccatgggcagaacataacaattttaaacattag

SEQ ID NO: 133294 - DNA, 80 bp, synthetic construct
  source 1..80: mol_type = other DNA
ttttggtattctcacccttactgctgtcgtggtcgccattgttgccgtttttcccgaggaacctcccaactcaactacat

SEQ ID NO: 133295 - DNA, 80 bp, synthetic construct
  source 1..80: mol_type = other DNA
agcagcccgagagcaacatcctggacatagatctacgtcctgcatcagcatggaccctgtacgccgtggccacaacattt

SEQ ID NO: 133296 - DNA, 80 bp, synthetic construct
  source 1..80: mol_type = other DNA
tctcaggctcgcggtggtgcagcaacatgtggcatggtaccttccccatcaacgccacgacgaccggccccagcgtaccc

SEQ ID NO: 133297 - DNA, 80 bp, synthetic construct
  source 1..80: mol_type = other DNA
gatgtacggagctacttattcagtcactccattggacttgccagccatcatccagagactccatggcttgagcgcgttct

SEQ ID NO: 133298 - DNA, 80 bp, synthetic construct
  source 1..80: mol_type = other DNA
cggttcatccctgtggaccgcgaggataccgcgtactcgtacaaagcgcggttcaccctggctgtgggtgacaaccgtgt

SEQ ID NO: 133299 - DNA, 80 bp, synthetic construct
  source 1..80: mol_type = other DNA
tgcgcgtgctcggcgtcaatgccgtagccttctacaggggtgttgatgtgtcagtgatccccaccgctggggacgtggtc

SEQ ID NO: 133300 - DNA, 80 bp, synthetic construct
  source 1..80: mol_type = other DNA
caagcatccagaggccacgtactctcggtgcggttctggcccctggatcacacccaggtgcatggtcgactacccgtata

SEQ ID NO: 133301 - DNA, 80 bp, synthetic construct
  source 1..80: mol_type = other DNA
atcaaaccttcctcaagtgtcctaccgactgttttaggaaacatcctgatgccacgtacgcccgctgcgggtcaggaccc

SEQ ID NO: 133302 - DNA, 80 bp, synthetic construct
  source 1..80: mol_type = other DNA
aaacaagagggaacacgatcacgacgttcagttctaatcccttcccatgcccagaaggacctgacggggagaggccagag

SEQ ID NO: 133303 - DNA, 80 bp, synthetic construct
  source 1..80: mol_type = other DNA
gccttgacttttcagatttgtattacttgactatgaataacaagcactggttggttcacaaggagtggttccacgacatt

SEQ ID NO: 133304 - DNA, 80 bp, synthetic construct
  source 1..80: mol_type = other DNA
gtgtcaccgacagtggccgtcagacatcctggcgcgaccaccgcatcgatccgcaaccatgtggatatgctggtgggcgc

SEQ ID NO: 133305 - DNA, 80 bp, synthetic construct
  source 1..80: mol_type = other DNA
tggtggttccatgccgaggacaggacgaactggtaggcagagctcgcatttctccaggggccggatggaacgtccgtgac

SEQ ID NO: 133306 - DNA, 80 bp, synthetic construct
  source 1..80: mol_type = other DNA
catgccccaggcttcgctctgacatcgtcgtagatccttgtagaagtcttgcatgagtctttccacgggaatttctatat

SEQ ID NO: 133307 - DNA, 80 bp, synthetic construct
  source 1..80: mol_type = other DNA
gcacagcccgcggccccgcgggcggccaacccggcaagcgcgcgcgagtgggccaaaaagcctagcaggtcggagaggca

SEQ ID NO: 133308 - DNA, 80 bp, synthetic construct
  source 1..80: mol_type = other DNA
ggctacggcgccggagtggccggcgctgtggtcactttcaaaatcatgagtggcgaggtaccaacaacagaggacttggt

SEQ ID NO: 133309 - DNA, 80 bp, synthetic construct
  source 1..80: mol_type = other DNA
tacacggctgccgcgttgtccaggagaggtggagccccgcggcccaggtaaaagttttggggaaggttgcccatgtcggt

SEQ ID NO: 133310 - DNA, 80 bp, synthetic construct
  source 1..80: mol_type = other DNA
cgaggctctcggcctaattggggccccaatgacccccggcggaaatcgcgcaacttgggtaaggtcatcgataccctgac

SEQ ID NO: 133311 - DNA, 80 bp, synthetic construct
  source 1..80: mol_type = other DNA
atggatgtcattggggaaagaataaaaaggatcaaggaggagcataattcaacatggcactatgatgacgaaaaccccta

SEQ ID NO: 133312 - DNA, 80 bp, synthetic construct
  source 1..80: mol_type = other DNA
gacaacgccttgaaaatcaactggtataagaagggaagctctattgggaagatgttcgaggccactgccagaggtgcaag

SEQ ID NO: 133313 - DNA, 80 bp, synthetic construct
  source 1..80: mol_type = other DNA
tgatgcatcccggaatgttaccaacatcctatccagtctcaccatcaccagcctgctccgtaggctccatcaatggatta

SEQ ID NO: 133314 - DNA, 80 bp, synthetic construct
  source 1..80: mol_type = other DNA
ggcgtgggatatgatgatgaattggtcgccaacagtaaccctgattctctccacccttctgagggtaccacaggtgctga

SEQ ID NO: 133315 - DNA, 80 bp, synthetic construct
  source 1..80: mol_type = other DNA
ctatggacaagccctactgctggcattactcgcccaggccatgcgaggttgtgccggcttccactgtttgtggtcctgtc

SEQ ID NO: 133316 - DNA, 80 bp, synthetic construct
  source 1..80: mol_type = other DNA
ccagcagaaactgcagctcatcaacaccaatggtagctggcacatcaaccgcacggcgttgaactgcaacgacagcttgc

SEQ ID NO: 133317 - DNA, 80 bp, synthetic construct
  source 1..80: mol_type = other DNA
tgggcgtgcccccgcgagatcactagccgagtagtgttgggtcgcgaaaggccttgtggtactgcctgatagggtgcttg

SEQ ID NO: 133318 - DNA, 80 bp, synthetic construct
  source 1..80: mol_type = other DNA
cgcgacccagtgctgggtgcctgcctcacccacgttggccattccgaacgcgtcggctccgattcgtgggttccgcggtc

SEQ ID NO: 133319 - DNA, 80 bp, synthetic construct
  source 1..80: mol_type = other DNA
tgacctggagcccgaagcccgcaaggttattgccgccctcacagagagactctacgtgggcggccccatgtataacagca

SEQ ID NO: 133320 - DNA, 80 bp, synthetic construct
  source 1..80: mol_type = other DNA
cccactcgcaccgccacttcctgtctcctccccgtcttcccccccccccacctccgcctgcccccgaggcgcctcggccg

SEQ ID NO: 133321 - DNA, 80 bp, synthetic construct
  source 1..80: mol_type = other DNA
cctctttacgggactaaccaatatagacgctcacttcctatcccagaccaagcaggcgggtgacaactatccatacctgg

SEQ ID NO: 133322 - DNA, 80 bp, synthetic construct
  source 1..80: mol_type = other DNA
tacatgtccaaagcccacgggatcaatcccaacatcagaaccggagtacggaccgtgaccaccggggactctatcaccta

SEQ ID NO: 133323 - DNA, 80 bp, synthetic construct
  source 1..80: mol_type = other DNA
atgcatctcagtgctggataccggtctcaccgaatgtggccgtgcagcggcccggcgccctcacgcagggcttgcggacg

SEQ ID NO: 133324 - DNA, 80 bp, synthetic construct
  source 1..80: mol_type = other DNA
ggggccctcgcgaagggaatcgccggtggtgccgtgcgtccccgaggactgacatctcgcgtccaccaccccgcatttaa

SEQ ID NO: 133325 - DNA, 80 bp, synthetic construct
  source 1..80: mol_type = other DNA
tggactccccgcccccggagacccccaaaccttcccacaccacaccacccagcgaggccgagcgcctgtgtcatctgcag

SEQ ID NO: 133326 - DNA, 80 bp, synthetic construct
  source 1..80: mol_type = other DNA
cccactcttgttctcgacgacagagctcgcgatccttccctgctcgttcactactatgccagccttgtcaactggactgg

SEQ ID NO: 133327 - DNA, 80 bp, synthetic construct
  source 1..80: mol_type = other DNA
tttggaaatgccccagtgaaagcagaaggtggtgatatcactaaagacaaaggtcttccaattggttcagaaattacaga

SEQ ID NO: 133328 - DNA, 80 bp, synthetic construct
  source 1..80: mol_type = other DNA
ggcctcaacgcggtggcttactacagagggcttgacgtctcagtaataccaacacaaggagacgtggtggtcgtcgctac

SEQ ID NO: 133329 - DNA, 80 bp, synthetic construct
  source 1..80: mol_type = other DNA
acggccatgaaacatctgaccagttttaagaaagaattaggaacactgattgatgtggtgaacaaaaggggcaaaaaaca

SEQ ID NO: 133330 - DNA, 80 bp, synthetic construct
  source 1..80: mol_type = other DNA
gccgtggtcgtacatgagggctatgacgtccccctccttgtcccccgcgtacacgccgccggccgcgcgtccccgcgggt

SEQ ID NO: 133331 - DNA, 80 bp, synthetic construct
  source 1..80: mol_type = other DNA
tcacgtgcaagctgcccattgcggtaatgggacctgcttacgggttccagtactcgccaaagcagcgcgtggattacctt

SEQ ID NO: 133332 - DNA, 80 bp, synthetic construct
  source 1..80: mol_type = other DNA
gattactccaagtgggactccacacaacagagagctgtgctagccgcagccctagaaatcatggtgaaattctcttcaga

SEQ ID NO: 133333 - DNA, 80 bp, synthetic construct
  source 1..80: mol_type = other DNA
gtcgtgggcgcttaagtgggagtacgtagtgctcgcatttttgctgctcgcggatgccagggtttgtgcgtgcctctgga

SEQ ID NO: 133334 - DNA, 80 bp, synthetic construct
  source 1..80: mol_type = other DNA
cgcgtatcggcgtcccggcgcggcgagcgtctgacggtctgtctctggcggtcccgcgtcgggtcgtggatccgtgtcgg

SEQ ID NO: 133335 - DNA, 80 bp, synthetic construct
  source 1..80: mol_type = other DNA
cagcctcatcactgtggtcatcgcctttatccagtgcattgactgggtctgtgtgcgctttgcatatctcagacaccatc

SEQ ID NO: 133336 - DNA, 80 bp, synthetic construct
  source 1..80: mol_type = other DNA
tacatgccctaccgattgcttccgtaagcatcctgaggctacgtatgcgaagtgtggttcagggccgtggctgactccaa

SEQ ID NO: 133337 - DNA, 80 bp, synthetic construct
  source 1..80: mol_type = other DNA
cgcaggtagatgagcaaacgtatcaagaaataaccagcgtgagtcgcgctctgggacaggaggatacaggcagtttggaa

SEQ ID NO: 133338 - DNA, 80 bp, synthetic construct
  source 1..80: mol_type = other DNA
agaagaggtaggcctcgggcgtgagggtgagatccccttctatgggagggcgattcccctatcctgcatcaagggaagga

SEQ ID NO: 133339 - DNA, 80 bp, synthetic construct
  source 1..80: mol_type = other DNA
tagcaggggctccctgttgtcccccaggcccctctcttacttgaaagggtcctcgggcgtgcctttgttgtgcccttccg

SEQ ID NO: 133340 - DNA, 80 bp, synthetic construct
  source 1..80: mol_type = other DNA
ggaggaaagaccggaattgtagtcatgattggcctgatcgccagcgtaggagcagttaccctctctaactttcaagggaa

SEQ ID NO: 133341 - DNA, 80 bp, synthetic construct
  source 1..80: mol_type = other DNA
tactgcctgtcagtgggctgcgtggtggtgtgcggtaggatctccactactggaaagccagtgctcattcctgatcggga

SEQ ID NO: 133342 - DNA, 80 bp, synthetic construct
  source 1..80: mol_type = other DNA
caagcgggccaccgtcagcgagttcgtgcaagtcaaacacattgaccgcgtgggccccgctggcgtttcgccggcgcctc

SEQ ID NO: 133343 - DNA, 80 bp, synthetic construct
  source 1..80: mol_type = other DNA
actgaatcctttgcaataatgtgccgactcacagcatcaccggccttgttttctgttgttgctaaagatctactagcgcc

SEQ ID NO: 133344 - DNA, 80 bp, synthetic construct
  source 1..80: mol_type = other DNA
gccgggcggctccccgtgcgggcccgcgtctcccgccgctaaggcgacgagcaagacaaacaacaggcccgcccgacaga

SEQ ID NO: 133345 - DNA, 80 bp, synthetic construct
  source 1..80: mol_type = other DNA
cagacaattttgcaaactattctgggacgctcttattgttcaaggaaacaacagcctttgtaacaactgtactgctacta

SEQ ID NO: 133346 - DNA, 80 bp, synthetic construct
  source 1..80: mol_type = other DNA
aacggagccattactagtgaggaaagacagattcctgatggagagtggcgtgacgggtttgactggatcactgagtatga

SEQ ID NO: 133347 - DNA, 80 bp, synthetic construct
  source 1..80: mol_type = other DNA
gtggcgcagagtattttagcacatgggggtaaacccacaaagtattatgctcaggttcttgccgccagtaaacggtatac

SEQ ID NO: 133348 - DNA, 80 bp, synthetic construct
  source 1..80: mol_type = other DNA
cctttatgacatcacccaaaagctcccacaagcagttatggaggaagcttatgggttccaatactctccggcccagcggg

SEQ ID NO: 133349 - DNA, 80 bp, synthetic construct
  source 1..80: mol_type = other DNA
gcggcggtggccgtggacaccgccgaacccgtctccacgatcaggcgctccaggcagcgatgtttggcggcgatgtcggc

SEQ ID NO: 133350 - DNA, 80 bp, synthetic construct
  source 1..80: mol_type = other DNA
cgtatctgcatgttggtgcgctctgcaatgggagggaagtacgtccaaatggccgtgctgacggttggccggtggtttaa

SEQ ID NO: 133351 - DNA, 80 bp, synthetic construct
  source 1..80: mol_type = other DNA
tatttaatacaggccgccatcactgccaccccctactttgtgcgtgcacatgcactgatccgtctttgcatgatcgtgcg

SEQ ID NO: 133352 - DNA, 80 bp, synthetic construct
  source 1..80: mol_type = other DNA
cactggacccacccctcttctgtacaggctgggagccgtgcagaacgagataatcacaacacatccaattaccaaataca

SEQ ID NO: 133353 - DNA, 80 bp, synthetic construct
  source 1..80: mol_type = other DNA
acacgggtgcgctctacctcctagtaaccagcccccggttcctcctcccaggaggaggaagaagacggtcgtgctctccg

SEQ ID NO: 133354 - DNA, 80 bp, synthetic construct
  source 1..80: mol_type = other DNA
ggctgaaggtaatagggatcttgctcctagtcgctggcacggatgcgaacacccgctccgtgggaggtacggtcgctcag

SEQ ID NO: 133355 - DNA, 80 bp, synthetic construct
  source 1..80: mol_type = other DNA
ctctggatgatgctgatgatctcccaggcagaggcagcgatggagaatttgatcatattaaacaccgtctctgccgcagg

SEQ ID NO: 133356 - DNA, 80 bp, synthetic construct
  source 1..80: mol_type = other DNA
taacatgatggggaaaagagaaaagaaacccggtgagtttgggaaggccaagggaagcagggccatctggttcatgtggc

SEQ ID NO: 133357 - DNA, 80 bp, synthetic construct
  source 1..80: mol_type = other DNA
atggtggggacagccgctctctgctcggccatgtacgtaggcgatctgtgtggaggtgccttcttggtaggtcagctctt

SEQ ID NO: 133358 - DNA, 80 bp, synthetic construct
  source 1..80: mol_type = other DNA
ccccctaggcgcaagcttaaagtgaccgcaaacaagtcgcgaccagcaacgagcccaatgccaaagggcttcgtgctgtc

SEQ ID NO: 133359 - DNA, 80 bp, synthetic construct
  source 1..80: mol_type = other DNA
caccagtggatcactgaggattacgcccagccgtgcgcgatgacatggctccgagacatctgggactgggtgtgcaccgt

SEQ ID NO: 133360 - DNA, 80 bp, synthetic construct
  source 1..80: mol_type = other DNA
caaggtctaccttctaaagaacaagacataacaatggctttctttgatagtccacaagctgacacctcaggtgttgataa

SEQ ID NO: 133361 - DNA, 80 bp, synthetic construct
  source 1..80: mol_type = other DNA
tgattgtgggaatcgttatggtctgctcctgcactttctttgccattataatctacccatgttttaatcttggctggaac

SEQ ID NO: 133362 - DNA, 80 bp, synthetic construct
  source 1..80: mol_type = other DNA
aaatagtctccacggccacccagacttttctggctacgactctaaatggggtcctctggacagtctaccacggggccggc

SEQ ID NO: 133363 - DNA, 80 bp, synthetic construct
  source 1..80: mol_type = other DNA
tgtgccaagtgtgaaaatgggaaacgaaatagcgttatgtctgcagcgcgcagggaaaagggtcattcaactgaatagga

SEQ ID NO: 133364 - DNA, 80 bp, synthetic construct
  source 1..80: mol_type = other DNA
caggtgctatccacagccacacaatctttccttggtactgcggtgaacggagtcctatggactgtgtaccacggagccgg

SEQ ID NO: 133365 - DNA, 80 bp, synthetic construct
  source 1..80: mol_type = other DNA
ctacgcccctgctgtacaggcttgggtccgtacaaaatgagatcacgaccacgcatccaatcactaaatacatcatgacc

SEQ ID NO: 133366 - DNA, 80 bp, synthetic construct
  source 1..80: mol_type = other DNA
tggctttccacccagtgacgacgaggatgaagagggtgaggagtttgtgttagattatgtggagcagcccgggcacggtt

SEQ ID NO: 133367 - DNA, 80 bp, synthetic construct
  source 1..80: mol_type = other DNA
atgcttttgtgggagtcatgtacaatctatggaagatgaaaactggacgccgggggagcgcgaatggaaaaactttgggt

SEQ ID NO: 133368 - DNA, 80 bp, synthetic construct
  source 1..80: mol_type = other DNA
ccccccttgggggaaaagggtagtgcccctggatgattccagggtagcggcaatgttatctgaattggcccaaacgcctt

SEQ ID NO: 133369 - DNA, 80 bp, synthetic construct
  source 1..80: mol_type = other DNA
gcgtcaacgccgtggcatactacagaggactagacgtcgccgtcatacccgcgacaggagatgtggtcgtgtgcagcacg

SEQ ID NO: 133370 - DNA, 80 bp, synthetic construct
  source 1..80: mol_type = other DNA
caacaacacatcgtgctggacaccgatttcaccgacggtggccgtcaagcaccctggtgtgaccaccgcgtcgatccgaa

SEQ ID NO: 133371 - DNA, 80 bp, synthetic construct
  source 1..80: mol_type = other DNA
gctgatcgcccaaggggggagggcccgcatttgcggcatctacctcttcaactggtcggtcaaaaccaagctcaaactca

SEQ ID NO: 133372 - DNA, 80 bp, synthetic construct
  source 1..80: mol_type = other DNA
cactggaaggactagaggttagaggagacccccccaagacaaaaaacagcatattgacgctgggaaagaccagagatcct

SEQ ID NO: 133373 - DNA, 80 bp, synthetic construct
  source 1..80: mol_type = other DNA
atgctgctggcgccgcgacaacccgttctgccgcccggcagaagaaggccttcgaccgcctccaggtggtggacaatcac

SEQ ID NO: 133374 - DNA, 80 bp, synthetic construct
  source 1..80: mol_type = other DNA
ggtctggcgggcgcggcggttgggagcattggccttgggagagtcttagtggacatcattgctggatacggtgcgggtgt

SEQ ID NO: 133375 - DNA, 80 bp, synthetic construct
  source 1..80: mol_type = other DNA
ctgccccacggactgcttccggaagcaccccgaggctacttacacaaaatgtggctcggggccctggttgacacctaggt

SEQ ID NO: 133376 - DNA, 80 bp, synthetic construct
  source 1..80: mol_type = other DNA
agcagacccgcggcttgctcagcaccatagtgacaagcctcactggcagagacaccaatgagaactgtggcgaggtgcag

SEQ ID NO: 133377 - DNA, 80 bp, synthetic construct
  source 1..80: mol_type = other DNA
ttgtgttgaagaaagaagtctcagaaacgcagcatgggacaatacttatcaaggtcgagtacaaaggggaagatgtacct

SEQ ID NO: 133378 - DNA, 80 bp, synthetic construct
  source 1..80: mol_type = other DNA
aaatggttgaggattggctgcaccgaggaccaaaggaattctgcattaaagttctctgcccttacatgcccaaggtaatt

SEQ ID NO: 133379 - DNA, 80 bp, synthetic construct
  source 1..80: mol_type = other DNA
ggcattttgcgcctaggccctgtgatgtcgtcccagcacaaaccgtttgtggcccggtgtactgctttacacccagtcct

SEQ ID NO: 133380 - DNA, 80 bp, synthetic construct
  source 1..80: mol_type = other DNA
tctatacctctttaactgggcagtgcgcaccaaaaccaaactcactccattgccgactgcgggccagctagatctttcta

SEQ ID NO: 133381 - DNA, 80 bp, synthetic construct
  source 1..80: mol_type = other DNA
agttcagagcaggaatggacgtgttcagcatgcaaccacaccgagctgacaccatcatgtgtgacattggagagagcaac

SEQ ID NO: 133382 - DNA, 80 bp, synthetic construct
  source 1..80: mol_type = other DNA
tctttcatgccttaccacccccgcctcggcggtccattacaagaatatctctggaatttaccatcttaccaatgactgcc

SEQ ID NO: 133383 - DNA, 80 bp, synthetic construct
  source 1..80: mol_type = other DNA
ccctgcgcaccacctcatcccgcagccgggcgcacagggcggtgtgcttggtgacgcgcgcgcccagctcctccacggcc

SEQ ID NO: 133384 - DNA, 80 bp, synthetic construct
  source 1..80: mol_type = other DNA
tccaccgtctccaccgtgacctccgcggccgtcggcggccagggccccccgcgcaccttcacctgccagctgacgtggca

SEQ ID NO: 133385 - DNA, 80 bp, synthetic construct
  source 1..80: mol_type = other DNA
ttaggtggcgtggaaccccgtgacactatatatacagggaccgggggcgccatgttaggtggtgcggaaccccctgacac

SEQ ID NO: 133386 - DNA, 80 bp, synthetic construct
  source 1..80: mol_type = other DNA
gcgggatagagcatcggctagaggcagcgtgcaactggactaggtgggaacgctgcgaactggaggatagggaccgcgcg

SEQ ID NO: 133387 - DNA, 80 bp, synthetic construct
  source 1..80: mol_type = other DNA
attgtgcacaagggaagagttcacaaaaaaggtcagaaccaacgcggctatgggagctgttttcacagaggagaaccaat

SEQ ID NO: 133388 - DNA, 80 bp, synthetic construct
  source 1..80: mol_type = other DNA
tagggggaggctaggtatatacagatttgtcaccccggtggagaggccatccggcatgtttgacacctcagtgctctgtg

SEQ ID NO: 133389 - DNA, 80 bp, synthetic construct
  source 1..80: mol_type = other DNA
tggatctgcgtggtgacgcctcaaaagagtgtgacacaggagtgatgggagcagccgtgaagaatggcaaagctatccac

SEQ ID NO: 133390 - DNA, 80 bp, synthetic construct
  source 1..80: mol_type = other DNA
ccggtgcctccgcctagacggaagagagtcgtccagcttgacgactctacagcagcggcggcactcgctgagttagcccg

SEQ ID NO: 133391 - DNA, 80 bp, synthetic construct
  source 1..80: mol_type = other DNA
ggctctaccacaccgggcatatgcttgggacgacagccaaactgcgtcacttggggccgttgttcttttggtgctgacca

SEQ ID NO: 133392 - DNA, 80 bp, synthetic construct
  source 1..80: mol_type = other DNA
tcgacggatccaatgtgtccgcagcgcttgcagcgctagcggagaagtctttcccgtcctcaccatcccaggaggcgagc

SEQ ID NO: 133393 - DNA, 80 bp, synthetic construct
  source 1..80: mol_type = other DNA
cccccgatcgcgatcgcgctcccgttgcgttcggggacctgctggcccgcctgccgcgctacctggcgcgtctggccgcg

SEQ ID NO: 133394 - DNA, 80 bp, synthetic construct
  source 1..80: mol_type = other DNA
caccagggagctaagaaaccgaatattccccactctttatgccatttttcagcagagtcgaggtcagcagcaagagctta

SEQ ID NO: 133395 - DNA, 80 bp, synthetic construct
  source 1..80: mol_type = other DNA
aacgtcgccctcgaagctgctctcggcgggagccgtctggccggccgttaggctggtggcgcagatagccgccccctccg

SEQ ID NO: 133396 - DNA, 80 bp, synthetic construct
  source 1..80: mol_type = other DNA
gggaaggatgggccaagctgccggaggtcttgcgtccctcttttcacccggatcggctcagaacatccagcttataaaca

SEQ ID NO: 133397 - DNA, 80 bp, synthetic construct
  source 1..80: mol_type = other DNA
gactttatccctgtggagaacctagagacaaccatgagatccccggtgttcacggacaactcctctccaccagcagtgcc

SEQ ID NO: 133398 - DNA, 80 bp, synthetic construct
  source 1..80: mol_type = other DNA
cggcggcgccaagcagagcgacgtagcggcacaaatgccgacagacgcgcatgatgcgcgtgctgtcggccgcgtagcgc

SEQ ID NO: 133399 - DNA, 80 bp, synthetic construct
  source 1..80: mol_type = other DNA
gggcctaatacacctacaccagaacatcgtggatgtgcagtacctatacggcctgtctacatccattgtcaactgggtta

SEQ ID NO: 133400 - DNA, 80 bp, synthetic construct
  source 1..80: mol_type = other DNA
gaggtggacggcgttaggctccaccgcttcgcacctccatgcaaacccttgctgagggacgaggtgacgttcacagtggg

SEQ ID NO: 133401 - DNA, 80 bp, synthetic construct
  source 1..80: mol_type = other DNA
aggggggtaagaaaccagctcgcctcatcgtttaccctgacctcggcgtccgggtctgcgagaaaatggccctctatgac

SEQ ID NO: 133402 - DNA, 80 bp, synthetic construct
  source 1..80: mol_type = other DNA
cgtgaagccataaaaacaagactccgtactgtgatcttagctccaaccagggttgtcgctgctgaaatggaggaggccct

SEQ ID NO: 133403 - DNA, 80 bp, synthetic construct
  source 1..80: mol_type = other DNA
cacttcctttcccagacaaagcaggcgggggagaaccttccgtacctggtggcctatcaggccacggtgtgcgccagagc

SEQ ID NO: 133404 - DNA, 80 bp, synthetic construct
  source 1..80: mol_type = other DNA
tgtggcccctgctactcctaattctaatgctgcccgagagggcctatgcatttgaccgggaggtggcgtgatccttcggc

SEQ ID NO: 133405 - DNA, 80 bp, synthetic construct
  source 1..80: mol_type = other DNA
aacaaggaatgcattggacaacttagcagtcctacatacggctgaagcaggcggaagggcgtacaatcatgctcttagtg

SEQ ID NO: 133406 - DNA, 80 bp, synthetic construct
  source 1..80: mol_type = other DNA
acatcaataggacagcgctgaactgcaatgactcgttgaacaccgggtttgtcgctgccctgttttactccaccaccagg

SEQ ID NO: 133407 - DNA, 80 bp, synthetic construct
  source 1..80: mol_type = other DNA
cgcaacgtgggtaaggtcatcgataccctaacgtgcggctttgccgacctcatggggtacatccccgtcgtaggcgcccc

SEQ ID NO: 133408 - DNA, 80 bp, synthetic construct
  source 1..80: mol_type = other DNA
tgggctgagaacatcaaagacacagtcaacatggtgcgtaggatcataggtgatgaagaaaagttcatggactacctatc

SEQ ID NO: 133409 - DNA, 80 bp, synthetic construct
  source 1..80: mol_type = other DNA
gcaaacccgtgactttagaactacctccacccgtgcccaccgttccgcccatggcactcttaacagcattgtgggtctgg

SEQ ID NO: 133410 - DNA, 80 bp, synthetic construct
  source 1..80: mol_type = other DNA
aggtccaccgaaagacacgacggacccggacccaaagaggcgggggatgctgtgtgagaggccgggtgtcggtcgtggtg

SEQ ID NO: 133411 - DNA, 80 bp, synthetic construct
  source 1..80: mol_type = other DNA
caaggaattcaaggattttgcagctggcaggaagtcaatcgcccttgatcttgtgacagaaataggaagagtgccttcac

SEQ ID NO: 133412 - DNA, 80 bp, synthetic construct
  source 1..80: mol_type = other DNA
ttataacaacaacattgacacgacaatacggggttcattgggacaagcttatttattcttttgaaaaacaccacctaact

SEQ ID NO: 133413 - DNA, 80 bp, synthetic construct
  source 1..80: mol_type = other DNA
tgcaaccagcagcaaagcctttatgccaagtactacagcttatccctttaacaccactactagggatagtgaaaactata

SEQ ID NO: 133414 - DNA, 80 bp, synthetic construct
  source 1..80: mol_type = other DNA
tcgcagacagacaaccagctagccgtgttcctgatttgtgtcatgacccttgtgagcgcagtggcagccaacgaaatggg

SEQ ID NO: 133415 - DNA, 80 bp, synthetic construct
  source 1..80: mol_type = other DNA
tgatagtttacccagatctgggggtgagggtgtgtgagaagatggcactttatgacgtagctcagaagttgcccaaagct

SEQ ID NO: 133416 - DNA, 80 bp, synthetic construct
  source 1..80: mol_type = other DNA
tccgcgccgcaccgtcccccgacgacctcttgcagacggtccgtgatgcaaggacggcgtggggcctgcagcagggtgac

SEQ ID NO: 133417 - DNA, 80 bp, synthetic construct
  source 1..80: mol_type = other DNA
cgctgtaccgcaaacctatcaggttggatatctccatgctccaacaggcagcgggaaaagcacgaaggtgccagcggcgt

SEQ ID NO: 133418 - DNA, 80 bp, synthetic construct
  source 1..80: mol_type = other DNA
tgttgtgagcggtctggctggggctgccgttggcagcgtggggctgggaaaggttctgatcgacatcctcgctggctacg

SEQ ID NO: 133419 - DNA, 80 bp, synthetic construct
  source 1..80: mol_type = other DNA
ctctaccgggacccagactttcttggccactgtcatcaacggagcgtgctggaccgtctaccatggcgcaggaaataaga

SEQ ID NO: 133420 - DNA, 80 bp, synthetic construct
  source 1..80: mol_type = other DNA
gtgtataccccgtccccatacgtgttcgccctggcccaggcgcacctcccccggctcccgagctcgctggaggccctggt

SEQ ID NO: 133421 - DNA, 80 bp, synthetic construct
  source 1..80: mol_type = other DNA
caacttcatctaccactcctatagaaaaaagccggtcaaaaaacaaatacgttagtaatctctaccttggtggacaagct

SEQ ID NO: 133422 - DNA, 80 bp, synthetic construct
  source 1..80: mol_type = other DNA
cagctcctcccgcgccacgtccgcaaaggcgtggtggtgcacgtgcgggtgcaggcgcgcccccacgaccaccgagagcc

SEQ ID NO: 133423 - DNA, 80 bp, synthetic construct
  source 1..80: mol_type = other DNA
ctctggccggagcgattcctgttgagttctcaagcaatactgtgaagttgacatcaggacatctgaagtgtagggtgaag

SEQ ID NO: 133424 - DNA, 80 bp, synthetic construct
  source 1..80: mol_type = other DNA
gtgcgtgggagtggtggtgccatgttgggcaggctctggtgttaaccacagagccgcggcccgggctgcctgaccaccga

SEQ ID NO: 133425 - DNA, 80 bp, synthetic construct
  source 1..80: mol_type = other DNA
ggccttgtcttccggtctcatacacctccaccaaaacatcgtggacgtgcaatacttgtatggcctatcaccagccatta

SEQ ID NO: 133426 - DNA, 80 bp, synthetic construct
  source 1..80: mol_type = other DNA
ctgctgtcctgcatcaccaccccggtctccgctgccgaagtgaagaacatcagtaccggctacatggtgactaacgactg

SEQ ID NO: 133427 - DNA, 80 bp, synthetic construct
  source 1..80: mol_type = other DNA
ccatgctggtgtgcggcgatgatctggtggtgattagcgaaagccagggcaccgaagaagatgaacgtagcctgcgtgcg

SEQ ID NO: 133428 - DNA, 80 bp, synthetic construct
  source 1..80: mol_type = other DNA
tcgctgacgcgtgtcccttacttcgtgagggcgcgtgcgttagtacaggcctgcagcttggtgcggggagtcatatatgg

SEQ ID NO: 133429 - DNA, 80 bp, synthetic construct
  source 1..80: mol_type = other DNA
tttggtggttggctttcatctgctgcgcatggcacatacgcgggcgggttgtccccctcgctacttatgcaatcctacag

SEQ ID NO: 133430 - DNA, 80 bp, synthetic construct
  source 1..80: mol_type = other DNA
tcgtcagtggtctagtaggggccgctgtgggtagcataggcctagggaagatactggtggatgtattggccgggtatggc

SEQ ID NO: 133431 - DNA, 80 bp, synthetic construct
  source 1..80: mol_type = other DNA
aggacacagattagaggtaggttgagtattagtgggcgtggctaaggtgagtataaaggtgggtgtcttacgagggtctt

SEQ ID NO: 133432 - DNA, 80 bp, synthetic construct
  source 1..80: mol_type = other DNA
tgaatttgtaatatccccctgcgatacccccggttttgtactttttcatttgggagagttcaccctatccccccctttcc

SEQ ID NO: 133433 - DNA, 80 bp, synthetic construct
  source 1..80: mol_type = other DNA
gctcctctaacgtgtcggttgccgtcgacggcactggaaagagggtctattaccttacccgtgaccccacaacccccctc

SEQ ID NO: 133434 - DNA, 80 bp, synthetic construct
  source 1..80: mol_type = other DNA
ccaccagggtcgagctgggtgataaggtgatggtgctggactctttcgagccacttgtggccgaagaggacaaggaggtg

SEQ ID NO: 133435 - DNA, 80 bp, synthetic construct
  source 1..80: mol_type = other DNA
tgggctaaggtgtttctcgttttgtgtctattctccggggtggacgctcggacgagggtatctggtggcaccgcagccag

SEQ ID NO: 133436 - DNA, 80 bp, synthetic construct
  source 1..80: mol_type = other DNA
ttgtacagttgttggacaacaggtttttggttcattaacactatcaacataagtcggggtatacaagtataatgaacgac

SEQ ID NO: 133437 - DNA, 80 bp, synthetic construct
  source 1..80: mol_type = other DNA
atcccagtgactctcgccggcccacgcagcaagcacaacagaagagaaggatacaaggttcaagttcaaggtccgtggga

SEQ ID NO: 133438 - DNA, 80 bp, synthetic construct
  source 1..80: mol_type = other DNA
aagcggtaaaaggagggtttgctgtggtcctttgggtccgccgggccggcgtcgtccacctcggtgagatggagggccga

SEQ ID NO: 133439 - DNA, 80 bp, synthetic construct
  source 1..80: mol_type = other DNA
cgtgaaggcccaacttctttcaacggaagaggcctgtgacttaacaccaccccattctgcccgatccaaatttgggtacg

SEQ ID NO: 133440 - DNA, 80 bp, synthetic construct
  source 1..80: mol_type = other DNA
gcttcaactgtctgggaacatcaaacagggactttgtcgagggagccagtggggcaacatggattgacttggtacttgaa

SEQ ID NO: 133441 - DNA, 80 bp, synthetic construct
  source 1..80: mol_type = other DNA
aagaccatcgggtcgaggtcggcctgggatacatggtcatttgtcaacttgttctcattggggccgcatcagaaaattca

SEQ ID NO: 133442 - DNA, 80 bp, synthetic construct
  source 1..80: mol_type = other DNA
cgggcaaacgtgcgcgccaggtcgcagatcgtcggtatggagccgggagtggtgacgtgggtctggaccatcccggaggt

SEQ ID NO: 133443 - DNA, 80 bp, synthetic construct
  source 1..80: mol_type = other DNA
ggccagcagccccaggaactccacggcgccggcgaaggccaggtcccgcgtggacagcagcagcacgccctgcgcgccca

SEQ ID NO: 133444 - DNA, 80 bp, synthetic construct
  source 1..80: mol_type = other DNA
aatctgcagcctagtgcgaggggtcacgcacggcaagtactgccagatggctctactgaagctaggggctctcactggta

SEQ ID NO: 133445 - DNA, 80 bp, synthetic construct
  source 1..80: mol_type = other DNA
ggaacgggggacagggcaaacagcgtgtcctcgaagcggggcagagaccccgcggcgttctcggggtcggggcgcggggt

SEQ ID NO: 133446 - DNA, 80 bp, synthetic construct
  source 1..80: mol_type = other DNA
cgtcgtatgttgttcaatgtcctattcatggacaggggctttagtaacaccctgtgcggctgaggagactaagctgccaa

SEQ ID NO: 133447 - DNA, 80 bp, synthetic construct
  source 1..80: mol_type = other DNA
gcgcaagacgctacctccatactgggtataggcacggtgctggatcaagcagagacagccggggtgaggctgacggtact

SEQ ID NO: 133448 - DNA, 80 bp, synthetic construct
  source 1..80: mol_type = other DNA
accccagacctatcaggtgggctatctccatgctcctaccggcagtgggaaaagcacaaaggtccctgcctcatatgcct

SEQ ID NO: 133449 - DNA, 80 bp, synthetic construct
  source 1..80: mol_type = other DNA
cgacgtcgtacaggctgtttgcatcggagcgcacgcgggaaaaaaaatcgaacaggcgtcgatgcgacgccacctcgatc

SEQ ID NO: 133450 - DNA, 80 bp, synthetic construct
  source 1..80: mol_type = other DNA
gacgccaaaatgcttaattgactacccctacagactgtggcactatccgtgcacagtcaactacaccaccttcaagataa

SEQ ID NO: 133451 - DNA, 80 bp, synthetic construct
  source 1..80: mol_type = other DNA
aatcacattctatcagaaaatgaggcaaagctgactatcatgacaggagacatcaaaggaatcatgcaggcaggaaagcg

SEQ ID NO: 133452 - DNA, 80 bp, synthetic construct
  source 1..80: mol_type = other DNA
tatcggagcggtcgtgctcgcggccatcaccctcttcactctgaccccgcactacaagtggatgcttgtcaacttcttgt

SEQ ID NO: 133453 - DNA, 80 bp, synthetic construct
  source 1..80: mol_type = other DNA
tggggtgggaataagacagatgtgttcctgctggagtccctgcggcctcccagtggtcggtggtttgggtgcgtgtggat

SEQ ID NO: 133454 - DNA, 80 bp, synthetic construct
  source 1..80: mol_type = other DNA
gaccaggtattcagctcctcctggagatgtaccacagccagcatatgacttagagcttataacatcttgctcatccaatg

SEQ ID NO: 133455 - DNA, 80 bp, synthetic construct
  source 1..80: mol_type = other DNA
tatggaaattccatattaaagcgtttatcggaacattaacctcgaacttgccgtcccgtgatcgtgtgatcgccaacctt

SEQ ID NO: 133456 - DNA, 80 bp, synthetic construct
  source 1..80: mol_type = other DNA
tagctgtggaacagtacgtagacttcagtctggaccctacgttctccatcgagacacgtactgcccctcaagacgcagtg

SEQ ID NO: 133457 - DNA, 80 bp, synthetic construct
  source 1..80: mol_type = other DNA
tccaaagcagagctctgcaaaaacaaatacagtcaagctctccacgggttctcgcctctgttgtagtctgccaacgtaaa

SEQ ID NO: 133458 - DNA, 80 bp, synthetic construct
  source 1..80: mol_type = other DNA
tgatctgtctgaacagcaagacttttgaaaaggactactccagagtgagagatgagaaacccgacttcgtggtcacaact

SEQ ID NO: 133459 - DNA, 80 bp, synthetic construct
  source 1..80: mol_type = other DNA
aacggtgtatgtgatatgctaattaaatacatgccacgtacttatggtgtctgattggtccttgtctgtgccggaggtgg

SEQ ID NO: 133460 - DNA, 80 bp, synthetic construct
  source 1..80: mol_type = other DNA
gacaactcttcgcgtttcgaccccgcatacatcagactgtgcaggactgtaactgctctatttacaccggccatgttacg

SEQ ID NO: 133461 - DNA, 80 bp, synthetic construct
  source 1..80: mol_type = other DNA
ctgggtggacggtgtgcagatccataggtttgcacccacaccaaagccgtttttccgggatgaggtctcgttctgcgttg

SEQ ID NO: 133462 - DNA, 80 bp, synthetic construct
  source 1..80: mol_type = other DNA
tcggccgcgtagcgcgtgttggtggggacgagctcgtcgtaactaaacagaatcacgcgggcacagctcgcccccgagcc

SEQ ID NO: 133463 - DNA, 80 bp, synthetic construct
  source 1..80: mol_type = other DNA
ggctgatttggaactggagagagctgctgacataagatgggaagaacaggcagagatatcaggaagcagtccaattttgt

SEQ ID NO: 133464 - DNA, 80 bp, synthetic construct
  source 1..80: mol_type = other DNA
aattcgcaggagaaaataacacataagcattagagtcgccctcttgttcaggcaacatagccccaggtcccgtaaaatac

SEQ ID NO: 133465 - DNA, 80 bp, synthetic construct
  source 1..80: mol_type = other DNA
ttatatctggaagctcagccgacctatcactagagaaagcagctgaggtctcctgggaagaagaagcagaacactctggt

SEQ ID NO: 133466 - DNA, 80 bp, synthetic construct
  source 1..80: mol_type = other DNA
ggtccacttttaaacgccgagctgcgggctccagccgcaggcagggcccatcccgccgcagacgccgacgcaaagctaat

SEQ ID NO: 133467 - DNA, 80 bp, synthetic construct
  source 1..80: mol_type = other DNA
accgggccggaacaacacgctagcccagccgcgggccccgatggccttcgggacatccagcgacgtcgagtttaactgta

SEQ ID NO: 133468 - DNA, 80 bp, synthetic construct
  source 1..80: mol_type = other DNA
ttcgcgattatcttctttatcttcaggcgcgcggtctggcagtaaaagctatccagcaacatttgggccagctaaacatg

SEQ ID NO: 133469 - DNA, 80 bp, synthetic construct
  source 1..80: mol_type = other DNA
cggtgccgccccccacgccgcggagggtgcggcggcccgcccccggaagaggcgcgggtcggactcgggccctgcggcct

SEQ ID NO: 133470 - DNA, 80 bp, synthetic construct
  source 1..80: mol_type = other DNA
gcctcgccggagcaccattggtttgtgcaagagtgcaattgttccatctaccctggtaccatcactggacaccgtatggc

SEQ ID NO: 133471 - DNA, 80 bp, synthetic construct
  source 1..80: mol_type = other DNA
aaaatggttaacaacctcccgataccaaaaacatcttttgttaattaatgttccatatacagccattttgaaccagcgtc

SEQ ID NO: 133472 - DNA, 80 bp, synthetic construct
  source 1..80: mol_type = other DNA
acgctctcgtaaatgcttccctgctggtgccgatctgggaccgcgccgcggagacattcgagtaccagatcgaactcggc

SEQ ID NO: 133473 - DNA, 80 bp, synthetic construct
  source 1..80: mol_type = other DNA
ggtccaatagcggtgggggggatcctcatgatgttagttagtgtggcagggagagttgatggactagagctcaggaaact

SEQ ID NO: 133474 - DNA, 80 bp, synthetic construct
  source 1..80: mol_type = other DNA
ataggtttgcacatgccctcaggttcttgaatgacatgggaaaggttaggaaagacacacaggaatggaaaccctcgact

SEQ ID NO: 133475 - DNA, 80 bp, synthetic construct
  source 1..80: mol_type = other DNA
gtcgcttttaagatcatgagcggcgagaagcccactgtagaggatgtcgtcaacttgctaccgtccatactgtctccagg

SEQ ID NO: 133476 - DNA, 80 bp, synthetic construct
  source 1..80: mol_type = other DNA
atgtatcattccctgcagaaatcttcccatcatggtgctcagtgtcttgtgactagtgaaagttaactggatgcctcggt

SEQ ID NO: 133477 - DNA, 80 bp, synthetic construct
  source 1..80: mol_type = other DNA
aagctccccccccgtcctgggacgtcatgtggaaatgcttgactcgtctcaagcccacgctcgtgggccccacacctctc

SEQ ID NO: 133478 - DNA, 80 bp, synthetic construct
  source 1..80: mol_type = other DNA
ttcgttgtgagcggccttgccggagctgccgtaggtagcatcggtttaggtaaggtcattgttgacatcttggcggggta

SEQ ID NO: 133479 - DNA, 80 bp, synthetic construct
  source 1..80: mol_type = other DNA
ggcgtttcatttgaccacacgagggggagagccacacatgatagttagtaagcaggaaagaggaaagtcactcttgttta

SEQ ID NO: 133480 - DNA, 80 bp, synthetic construct
  source 1..80: mol_type = other DNA
ttatccgcatgtgcatgttggcgcgcaagcttgtgggaggccattacgtgcaaatggccctcgtcaggttgggcgcgctg

SEQ ID NO: 133481 - DNA, 80 bp, synthetic construct
  source 1..80: mol_type = other DNA
cttcagtgtaggattgcattcatatgcaaatgggtcccagctttcatgcgaacccgagccggacgtcgcagtgttaacct

SEQ ID NO: 133482 - DNA, 80 bp, synthetic construct
  source 1..80: mol_type = other DNA
cttccgggcagctgtgtgctcacggggcgtggctaagtccatagactttatccccgttgagacgcttgacatcgccacgc

SEQ ID NO: 133483 - DNA, 80 bp, synthetic construct
  source 1..80: mol_type = other DNA
tcacggtcgccacgaacacgctactggcgacggccgccccgccctcggagataatgccccggagctgctcgcacagcgag

SEQ ID NO: 133484 - DNA, 80 bp, synthetic construct
  source 1..80: mol_type = other DNA
acgcgtggcatattggactagcggttagaggagacccctcccatcaccaactaaacgcagcaaaaagggggcccgaagcc

SEQ ID NO: 133485 - DNA, 80 bp, synthetic construct
  source 1..80: mol_type = other DNA
ccaacaaagaaataagtcaggcaaaaaataaaattataagcaatgtttaccttggaggtaaaattgatcaaccgtgtgtt

SEQ ID NO: 133486 - DNA, 80 bp, synthetic construct
  source 1..80: mol_type = other DNA
aaggtcaggagctctgtgggacgtcccctcacccgctgccactcagaaagccacactgtctgaaggggtgtataggatca

SEQ ID NO: 133487 - DNA, 80 bp, synthetic construct
  source 1..80: mol_type = other DNA
tctcgattcgttcgagccgttgagagctgaggagggcgatagtgagctttcagtggctgcagaatgtttcaagaaacccc

SEQ ID NO: 133488 - DNA, 80 bp, synthetic construct
  source 1..80: mol_type = other DNA
catcggtgcggcagtgctggtagccattactgtcttcacactcacaccgcactacaaaaagatgcttattcacttgttgt

SEQ ID NO: 133489 - DNA, 80 bp, synthetic construct
  source 1..80: mol_type = other DNA
cgactcgggtgctcctttaacgcccgctgagcgttctcgctcgctacatccatttccaccaactgctctttttgaatcat

SEQ ID NO: 133490 - DNA, 80 bp, synthetic construct
  source 1..80: mol_type = other DNA
acgcagtgtccagaagccagcgtaggggccgtacagggagaggtaggcacggcatataccggtatgtttcgtctgtggag

SEQ ID NO: 133491 - DNA, 80 bp, synthetic construct
  source 1..80: mol_type = other DNA
ggagggtgcagtacaatggatgaataggttaatagctttcgcatccagaggcaaccatgtagcaccaactcactatgtcc

SEQ ID NO: 133492 - DNA, 80 bp, synthetic construct
  source 1..80: mol_type = other DNA
gtatcccggggtgctgttctcgggacccagcccactcgaggcgcagatagccgcgttggtggaggccatagccgcggacc

SEQ ID NO: 133493 - DNA, 80 bp, synthetic construct
  source 1..80: mol_type = other DNA
aaaatatcgtggatatacaatatctttatggaataggatcagtggtcgtgtccttcgccatcagatgggagtacgtcgtc

SEQ ID NO: 133494 - DNA, 80 bp, synthetic construct
  source 1..80: mol_type = other DNA
gaagaggaaggaccggtaggggaaagcatggggtgtacaggtacgtctcccagggagaacggccgtcgggtatgttcgac

SEQ ID NO: 133495 - DNA, 80 bp, synthetic construct
  source 1..80: mol_type = other DNA
gatggtgagcattttagccagttctctcctgaagaatgacattcccatgacaggaccactagtggctggagggcttctca

SEQ ID NO: 133496 - DNA, 80 bp, synthetic construct
  source 1..80: mol_type = other DNA
cccacatagatgcccatttcctctcacaaacgaagcaggcgggggaaagctttgcgtatctcgtagcttatcaagccaca

SEQ ID NO: 133497 - DNA, 80 bp, synthetic construct
  source 1..80: mol_type = other DNA
atgtctaaggacaagcctaccatcgatgtgaagatgatgaatatggaggccgccaacctggcagaggtccgcagttattg

SEQ ID NO: 133498 - DNA, 80 bp, synthetic construct
  source 1..80: mol_type = other DNA
gcgaccgagcccgtgtttgatgagatcgacgcctgcctgcggggctggtttggctcgtcccgggtggaccacgtcaaggg

SEQ ID NO: 133499 - DNA, 80 bp, synthetic construct
  source 1..80: mol_type = other DNA
tggcacatcaacaggacggccctcaactgcaatgactcgctcaacactggatttttctcagccctcttctatgtcaaaag

SEQ ID NO: 133500 - DNA, 80 bp, synthetic construct
  source 1..80: mol_type = other DNA
actctgccaagtcgaagcacgggtacagtgcgaaggacgttcgctccttgtccagcaaggccatgaaccagatccgctcc

SEQ ID NO: 133501 - DNA, 80 bp, synthetic construct
  source 1..80: mol_type = other DNA
cagccctccacttcctcaacgcaatgtcaaaggtcagaaaagacatccaggaatggaagccttcgcatggctggcacgat

SEQ ID NO: 133502 - DNA, 80 bp, synthetic construct
  source 1..80: mol_type = other DNA
cggagtggaaggattgggcttgcaaaaactcggttacattctccgtgaggtaggcacccgaacgggagggaagatctacg

SEQ ID NO: 133503 - DNA, 80 bp, synthetic construct
  source 1..80: mol_type = other DNA
ctactctcacggggcctacgcccttgttgtacaggcttggagcggtgcagaatgacatcacaacaacacacccaatcacc

SEQ ID NO: 133504 - DNA, 80 bp, synthetic construct
  source 1..80: mol_type = other DNA
ctcatggggtacatccctgtcatcggcgcccctcttggtggcgtcgcggcggccctagcccacggcgttagggccctcga

SEQ ID NO: 133505 - DNA, 80 bp, synthetic construct
  source 1..80: mol_type = other DNA
tccggtgcgccggcggggcgacagcaggtggagcctgctctcccccaggcccatctcctacttgaaaggctcttcgggtg

SEQ ID NO: 133506 - DNA, 80 bp, synthetic construct
  source 1..80: mol_type = other DNA
ctgtgagccccgtccaaggacgttaaaagaagaagtcaggcccaaaagccacggtttgagcaaaccgtgctgcctgtagc

SEQ ID NO: 133507 - DNA, 80 bp, synthetic construct
  source 1..80: mol_type = other DNA
cgtcgtcggggaagtcgtccgggcccccgtcccgcgggcccaggtgcttaaaattgaacgcacgctcccccggagagcgg

SEQ ID NO: 133508 - DNA, 80 bp, synthetic construct
  source 1..80: mol_type = other DNA
ccctgcgcgcctcgggcccgctgcgccgcatggcggcctggatgcgccagatccccgaccccgaggacgtgcgcgtggtg

SEQ ID NO: 133509 - DNA, 80 bp, synthetic construct
  source 1..80: mol_type = other DNA
tcggggagacacgggtcagggtattcccattaccccacaccatgaccgtgaatggggtattctctccaagatttactact

SEQ ID NO: 133510 - DNA, 80 bp, synthetic construct
  source 1..80: mol_type = other DNA
agtatttcatagcccggtcggaggccgtaatacatcaatgggtcccaggtctacaggtacggggtggccgtgatgcagtg

SEQ ID NO: 133511 - DNA, 80 bp, synthetic construct
  source 1..80: mol_type = other DNA
ccaaaaatgaggttttttctgtcaacccccaaaagggcggccgaaaaccagcgcgtctcatcgtatacccggatctggga

SEQ ID NO: 133512 - DNA, 80 bp, synthetic construct
  source 1..80: mol_type = other DNA
gaaatatgtatgcagatgatacggccggatgggacacaagaataacagaggatgatcttcagaatgaggctaaaatcact

SEQ ID NO: 133513 - DNA, 80 bp, synthetic construct
  source 1..80: mol_type = other DNA
ggcaggagtcctgtggtaaaaagcagaactaacataaaacaaggctagaagtcaggtcggattaagccatagtacggaaa

SEQ ID NO: 133514 - DNA, 80 bp, synthetic construct
  source 1..80: mol_type = other DNA
tggcagggcatgtccacgttgtttccaacgccagtggcggtataacttgtgtaaacgacgccaacgggtcaggtttaaga

SEQ ID NO: 133515 - DNA, 80 bp, synthetic construct
  source 1..80: mol_type = other DNA
agaagctggggtcaacccggctatccctggcccctttatgggaacgagggttgcggatgggccggctggctcatgtcccc

SEQ ID NO: 133516 - DNA, 80 bp, synthetic construct
  source 1..80: mol_type = other DNA
ttgtgaaaacctgcggcgcgccgccgtgcgatatttatggcggcgcggatcgtcagaacgatagcgatctgatttgcccg

SEQ ID NO: 133517 - DNA, 80 bp, synthetic construct
  source 1..80: mol_type = other DNA
ttatggaaacatctaccttggcggaaagccacatcaaccagtaaccattaaaactacctttaaccaggaaactggatgtg

SEQ ID NO: 133518 - DNA, 80 bp, synthetic construct
  source 1..80: mol_type = other DNA
tgagttattacactctatatgggagagagtgtacaaggtgacatggggtgtgtcataaactggaaaggaaaagaactcaa

SEQ ID NO: 133519 - DNA, 80 bp, synthetic construct
  source 1..80: mol_type = other DNA
gggacgacgaagcgatccacgaactgcatgtgctcctcggtgatgggcaggccgtactccagcaccttcatgaggttacc

SEQ ID NO: 133520 - DNA, 80 bp, synthetic construct
  source 1..80: mol_type = other DNA
aggtactatccacagccacgcagtccttcttggggacttcagtcaatggcgtcatgtggactgtgtaccacggggccggc

SEQ ID NO: 133521 - DNA, 80 bp, synthetic construct
  source 1..80: mol_type = other DNA
cgcgtggttatcatcgggcaggacccgtaccaccatcccggccaggcgcacggcctggcgtttagcgtgcgtgcggatgt

SEQ ID NO: 133522 - DNA, 80 bp, synthetic construct
  source 1..80: mol_type = other DNA
ccggtgtcagcgaggttggggaatttggtgctactgggacccgcggacgatatgcagcgcggtggttggaagcttttggc

SEQ ID NO: 133523 - DNA, 80 bp, synthetic construct
  source 1..80: mol_type = other DNA
ttagacgcatatgcggtcaaacatcctcaagaaccgagacatgtacgagcggatcatccttacgcaaaagttgttgaaaa

SEQ ID NO: 133524 - DNA, 80 bp, synthetic construct
  source 1..80: mol_type = other DNA
gatccgctaagggccgaggaggaagataaagaaatctcggtggccgccgagtgccacagaccacctaggcccaagtaccc

SEQ ID NO: 133525 - DNA, 80 bp, synthetic construct
  source 1..80: mol_type = other DNA
ggcatcttctcagactgctgttatgggttcaagcgagcaggagctcacggccattgttcgagacctaggttgcgggccct

SEQ ID NO: 133526 - DNA, 80 bp, synthetic construct
  source 1..80: mol_type = other DNA
cattcctgatcgcgaagtgctctaccaacagttcgacgaaatggaggagtgttccaaacacctcccactagtcgagcacg

SEQ ID NO: 133527 - DNA, 80 bp, synthetic construct
  source 1..80: mol_type = other DNA
tctcctcctagtcctggctttaccgcggcaggcctacgccctggacgccgctgaacaaggagaactcgggctggtcatat

SEQ ID NO: 133528 - DNA, 80 bp, synthetic construct
  source 1..80: mol_type = other DNA
cgaccttgctgttgcagtggagcccatcatgttctcacccatggagaagaagctgatcacctggggggccgacactgccg

SEQ ID NO: 133529 - DNA, 80 bp, synthetic construct
  source 1..80: mol_type = other DNA
ggccgtgtttcagcacggtggccatcagagggcccaggtcgaggtcgggctgggcatcgggttcggtaaactgcgcaaag

SEQ ID NO: 133530 - DNA, 80 bp, synthetic construct
  source 1..80: mol_type = other DNA
atttagcgttttgattacgcgttgtgatatgaggggaaggattaagaatctcctaactataagttaacacgcccacattt

SEQ ID NO: 133531 - DNA, 80 bp, synthetic construct
  source 1..80: mol_type = other DNA
cctgctgcgcgactggctggccatgcgaaagcagatccgctcgcggatcccccagagcacccccgaggaggccgtcctcc

SEQ ID NO: 133532 - DNA, 80 bp, synthetic construct
  source 1..80: mol_type = other DNA
cgaccaccattttgggcatcggcacagtcctggaccaagcggagacggctggagcacggctcgtcgtgctcgccaccgct

SEQ ID NO: 133533 - DNA, 80 bp, synthetic construct
  source 1..80: mol_type = other DNA
tgcccgaattccagcatagtgtacgaggctgatcaccacatcctgcaccttccggggtgcgtgccctgtgtcaaagccgg

SEQ ID NO: 133534 - DNA, 80 bp, synthetic construct
  source 1..80: mol_type = other DNA
cgcgtggaacctcatcatcatcgtccaggcgaccgcgcaccgactggctacgggccgcatcgggcccggggcgctgccgg

SEQ ID NO: 133535 - DNA, 80 bp, synthetic construct
  source 1..80: mol_type = other DNA
aaaactcaatgctggcttcctgtttcaccaaccttggcagtcccgaacggttcagtgccgattcatgggtttcgtagaca

SEQ ID NO: 133536 - DNA, 80 bp, synthetic construct
  source 1..80: mol_type = other DNA
tgcctgcacgtggccgccaccgtgacgaccatcggccgcgagatgctcctcgcgacgcgcgcgtacgtgcacgcgcgctg

SEQ ID NO: 133537 - DNA, 80 bp, synthetic construct
  source 1..80: mol_type = other DNA
gttgtcctgccttactacgcctgcctcagcagtgcactatgccaacaaatctggtatctaccatctgaccaatgattgtc

SEQ ID NO: 133538 - DNA, 80 bp, synthetic construct
  source 1..80: mol_type = other DNA
atgatggaactccaaccacagggaagtttaaccaccccaagcgctcccgccatctgcactactgctgtcatggaaaagga

SEQ ID NO: 133539 - DNA, 80 bp, synthetic construct
  source 1..80: mol_type = other DNA
tcagtctggaccctacttttaccataactacacagactgtcccccaggactccgtgtcccgaagtcaacgccgaggcagg

SEQ ID NO: 133540 - DNA, 80 bp, synthetic construct
  source 1..80: mol_type = other DNA
acaaatcaaaccatactgttcaacatattggggggttgggtagccagcaacttggcaccccctcctgcctccaccgcttt

SEQ ID NO: 133541 - DNA, 80 bp, synthetic construct
  source 1..80: mol_type = other DNA
ggtgggagaggaaggggcaacccgtttgctcatttgcgccctcgcttgggtggtatgttgtaaaaaaaaaaataaaaaga

SEQ ID NO: 133542 - DNA, 80 bp, synthetic construct
  source 1..80: mol_type = other DNA
ccccgggtgcgtcccgtgcgagaaagtggggaatgcatctcagtgctggataccggtctcaccgaatgtggccgtgcagc

SEQ ID NO: 133543 - DNA, 80 bp, synthetic construct
  source 1..80: mol_type = other DNA
ggtgagtttgttgcgcgtgccgtactatgtgcgcgcgcacgccctgttgcgagtgtgcatccttgtgcggcgcgtcgcag

SEQ ID NO: 133544 - DNA, 80 bp, synthetic construct
  source 1..80: mol_type = other DNA
caggagtgttcgagtcgtgtctgcgagttgacggccagtcacatcgtcgcccccccgtacgtgcacggcaaatattttta

SEQ ID NO: 133545 - DNA, 80 bp, synthetic construct
  source 1..80: mol_type = other DNA
tatcgcctggagcactggtagtaggggtggtatgtgcggcaatcttgcgccgccacgtgggcccaggtgaaggtgccgtg

SEQ ID NO: 133546 - DNA, 80 bp, synthetic construct
  source 1..80: mol_type = other DNA
taggcatagggactgtcttggaccaagcggagacagcgggggttaggctcactatcctcgccaccgctacaccacctggc

SEQ ID NO: 133547 - DNA, 80 bp, synthetic construct
  source 1..80: mol_type = other DNA
accgccagcacatttacgagcatcttcagccccggggcacaacagaaaatccagcttataaacaccaatggcaggtggca

SEQ ID NO: 133548 - DNA, 80 bp, synthetic construct
  source 1..80: mol_type = other DNA
tcgaggggatgaccgtcggccagactgcagctagaggcgcgcacggaattgccagcttctttgcccctggggccaagcaa

SEQ ID NO: 133549 - DNA, 80 bp, synthetic construct
  source 1..80: mol_type = other DNA
tgtgaaaacaaaactaaaaatcactccattaccgggggcggacaagcttgacttgtcaagttggttcgttgctggtttcg

SEQ ID NO: 133550 - DNA, 80 bp, synthetic construct
  source 1..80: mol_type = other DNA
ccgtcagcagcaggagcgggccgccaaggagctcctagatgccatcaaccttcaccagtgcaagaagggtatcttctgcc

SEQ ID NO: 133551 - DNA, 80 bp, synthetic construct
  source 1..80: mol_type = other DNA
gggacagctcttcactttccggcctcgcgtgcatcagaccgtgcaggactgcaactgttccatctttcctggccccctca

SEQ ID NO: 133552 - DNA, 80 bp, synthetic construct
  source 1..80: mol_type = other DNA
cttgggaaacagcccggcacactccagtgaactcatggctgggcaatatcatcatgtacgcgcccacgatctgggtacgc

SEQ ID NO: 133553 - DNA, 80 bp, synthetic construct
  source 1..80: mol_type = other DNA
tagccctagtcacggctagctgtgaaaggtccgtgagccgcatgactgcagagagtgctgatactggcctctctgcaggt

SEQ ID NO: 133554 - DNA, 80 bp, synthetic construct
  source 1..80: mol_type = other DNA
gttcagaactcctcctaggacaacaagcagcacctaacagaccaaattacattgccttcagagacaattttattgggctt

SEQ ID NO: 133555 - DNA, 80 bp, synthetic construct
  source 1..80: mol_type = other DNA
cagaacttgaagcagacattgttatgtacaccgaaaatgttaatcttgaaactccagatactcatgtggtgtacaagcca

SEQ ID NO: 133556 - DNA, 80 bp, synthetic construct
  source 1..80: mol_type = other DNA
atcgcaggctttcatggtatcaccacaacgccacaacttcacccaagagtgcaactgttccatctaccaaggtcacatca

SEQ ID NO: 133557 - DNA, 80 bp, synthetic construct
  source 1..80: mol_type = other DNA
gggcgaaggtgatcgctgttctcctcctgttcgcaggggtagacgcgcaagccaataccattgcaagccacgcggcacgg

SEQ ID NO: 133558 - DNA, 80 bp, synthetic construct
  source 1..80: mol_type = other DNA
gtagggtagttcctgcctgcgcgtacgggctcctccagatatggtcgttgctgctgctaatcctgctgttgcctccccgt

SEQ ID NO: 133559 - DNA, 80 bp, synthetic construct
  source 1..80: mol_type = other DNA
gctggtgctcaacccttcggtggctgccacgctgggttttggggcctacatgtctaaggcgcatggcatcgacccgaaca

SEQ ID NO: 133560 - DNA, 80 bp, synthetic construct
  source 1..80: mol_type = other DNA
ttctacagaccatcagaagcgagcgacacactgctctgtgacattggagagtcatcgtcaagtgccgaggtagaagaaca

SEQ ID NO: 133561 - DNA, 80 bp, synthetic construct
  source 1..80: mol_type = other DNA
gaacaggccggggaagtccaaatcctgtccacagtctctcagtccttcctcggaacaaccatctcggtggttttgtggac

SEQ ID NO: 133562 - DNA, 80 bp, synthetic construct
  source 1..80: mol_type = other DNA
gatttacggaccaccccaggcggaccagaaaccccgcaaaatcaagcgggttaaaaaaaaggatgaggtggacaaggagg

SEQ ID NO: 133563 - DNA, 80 bp, synthetic construct
  source 1..80: mol_type = other DNA
gggcaaaagggtctactacctgacccgcgaccctgaaacccccctggcacgagcagcctgggagacagtccgacacactc

SEQ ID NO: 133564 - DNA, 80 bp, synthetic construct
  source 1..80: mol_type = other DNA
tacttcgcgctgttcgcggtcagccatacgtgtgctgccatatccttgtaacggttgcaacaaggcaagatcggccacca

SEQ ID NO: 133565 - DNA, 80 bp, synthetic construct
  source 1..80: mol_type = other DNA
ttgaggaagggaagtgtggcctgaactcagtcgactccctggaacatgagatgtggagaagcagggcagatgagatcaat

SEQ ID NO: 133566 - DNA, 80 bp, synthetic construct
  source 1..80: mol_type = other DNA
aagaggattgctgaacggccagggaccaatgaaattggtcatggcgttcatagccttccttagatttctggccattccac

SEQ ID NO: 133567 - DNA, 80 bp, synthetic construct
  source 1..80: mol_type = other DNA
gacttacagtcttgcaaatatgttcacctcgggaccgcaacagaacctgcagctcgttaacaccaatggtagctggcaca

SEQ ID NO: 133568 - DNA, 80 bp, synthetic construct
  source 1..80: mol_type = other DNA
ccgcatgtttgtggctggtctagagcataggttgaaagtggcgtgcaactggacccgcggcgagcgctgtgagttggacg

SEQ ID NO: 133569 - DNA, 80 bp, synthetic construct
  source 1..80: mol_type = other DNA
gagccataattgaattaacgtacaggcacaaagtggtcaaggtcatgagacccgcagcaggaggaaagacagtgatggac

SEQ ID NO: 133570 - DNA, 80 bp, synthetic construct
  source 1..80: mol_type = other DNA
acctccgcacggcagccccccgccaactccataaccgggcagccgttctgacggtggcgcagttggaagacgccgcccgt

SEQ ID NO: 133571 - DNA, 80 bp, synthetic construct
  source 1..80: mol_type = other DNA
tcccattagcggagacggctgcatgcggggacatcttacacggacttcctgtgtccgcccggctaggccggaaggacgat

SEQ ID NO: 133572 - DNA, 80 bp, synthetic construct
  source 1..80: mol_type = other DNA
aggcgaggccgtactggtagggggaagcatggggtgtataggtacgtctcgcaggtggaacgaccgtctggtatgttcga

SEQ ID NO: 133573 - DNA, 80 bp, synthetic construct
  source 1..80: mol_type = other DNA
aatgctaaacatagctgaaccacagggtcgttggttacttgatttaattaacattctccaaagcattgtagtgcaggaac

SEQ ID NO: 133574 - DNA, 80 bp, synthetic construct
  source 1..80: mol_type = other DNA
atgccgccacatatacctctggtggcgctgcagcttctaatgcccgaagtcttactgggctcttcagcatgggttccaac

SEQ ID NO: 133575 - DNA, 80 bp, synthetic construct
  source 1..80: mol_type = other DNA
gcgcggtcaggttgctggcaaacgcgtccatggtggtctggccggcgcggtcgccggacgcgagccagaatcgcaattcg

SEQ ID NO: 133576 - DNA, 80 bp, synthetic construct
  source 1..80: mol_type = other DNA
aaacatggcgttgaccgtgttggccaccagattggccgggtgcagggggtgcgcggggtccgtcacggtgtcgctggtgc

SEQ ID NO: 133577 - DNA, 80 bp, synthetic construct
  source 1..80: mol_type = other DNA
tcaatactttcaccaacatggaagcccaactgatcagacagatggagggagaaggagtcttcaaaagcatccagcacctg

SEQ ID NO: 133578 - DNA, 80 bp, synthetic construct
  source 1..80: mol_type = other DNA
cccacgaggtgcatcagtgccagcccggagaattgatccttgacacaggaaagaggcttggggcaataccaattgacttg

SEQ ID NO: 133579 - DNA, 80 bp, synthetic construct
  source 1..80: mol_type = other DNA
gctgtggacctcggcttacttacgcaaatttgtagccgaggactaccacgcccacaaaattcagttttacgaagaccaat

SEQ ID NO: 133580 - DNA, 80 bp, synthetic construct
  source 1..80: mol_type = other DNA
acgtgcgattcagcgcggatcgcctgttgggccttatccacatgaagccactgttttccgccccaccccccgacgccagc

SEQ ID NO: 133581 - DNA, 80 bp, synthetic construct
  source 1..80: mol_type = other DNA
gcggcttcgccgacctcatggggtacatccccgtcgttggcgctccccttggtggcgtcgcgtcagccctggcacacggt

SEQ ID NO: 133582 - DNA, 80 bp, synthetic construct
  source 1..80: mol_type = other DNA
actctggacatgagtgggttacggattttaaagggaagactgtttggtttgttccaagtataaaagcaggaaatgatata

SEQ ID NO: 133583 - DNA, 80 bp, synthetic construct
  source 1..80: mol_type = other DNA
ccgctcgtgactctcattgcttcctacgccatgagggtaccccagttgatcgtcgacatatttgtgggcggtcattggtg

SEQ ID NO: 133584 - DNA, 80 bp, synthetic construct
  source 1..80: mol_type = other DNA
aggtggctacgtgaccaaggagaagaacgccttggaagaatgctgatcagtggagatgattgtgtggtgagacccataga

SEQ ID NO: 133585 - DNA, 80 bp, synthetic construct
  source 1..80: mol_type = other DNA
tgcagaggcgtacatgccacagatgtcataaacgtagagtggttcgcgtagcaccccaatgtaagttggataacagcgtc

SEQ ID NO: 133586 - DNA, 80 bp, synthetic construct
  source 1..80: mol_type = other DNA
ggaacgccctcgtcgaggcgaccggcggcgaccgttgcgtggaccgcttcctgctcgtcggcggggagccattgtggtcc

SEQ ID NO: 133587 - DNA, 80 bp, synthetic construct
  source 1..80: mol_type = other DNA
tttgttgttttttgtagatgcatccggtgttgcgacagatgcgtccgacggcgcctccaacacagccgccgctcccgccc

SEQ ID NO: 133588 - DNA, 80 bp, synthetic construct
  source 1..80: mol_type = other DNA
tgctgaggcggatgacagggagatctccgtggctgcagaatgccacaagccacctaggccaaaattcccgcccgcgctcc

SEQ ID NO: 133589 - DNA, 80 bp, synthetic construct
  source 1..80: mol_type = other DNA
ccagttgaattcagcaacaacaatgtgaagctcacatcaggacacttgaagtgtcgggtcaaaatggaaaagcttcaact

SEQ ID NO: 133590 - DNA, 80 bp, synthetic construct
  source 1..80: mol_type = other DNA
agctaacatcacttgggcttaacgccgtagccttctataggggcgtcgatgtgtcagtgatcccgaccgcgggagacgtg

SEQ ID NO: 133591 - DNA, 80 bp, synthetic construct
  source 1..80: mol_type = other DNA
ctcaaaaatgatgtgccgttggccgggccactaatagctggaggcatgctaatagcgtgttatgtcatatccggaagctc

SEQ ID NO: 133592 - DNA, 80 bp, synthetic construct
  source 1..80: mol_type = other DNA
ctgatcagaatcacaaatttgaattgcaaattgaaaatggaaatgacgaatcaaaaataccctcaactactgtggcaatt

SEQ ID NO: 133593 - DNA, 80 bp, synthetic construct
  source 1..80: mol_type = other DNA
cggaaacaccccgaagccacttacaccaaatgtggctcgggcccttggttgacacctaggtgcttagtccactatccata

SEQ ID NO: 133594 - DNA, 80 bp, synthetic construct
  source 1..80: mol_type = other DNA
atgttcgactccgtcgtgctttgcgaggcgtatgacataggttgtgcgtggtacgaactggcaccatcggagaccacagt

SEQ ID NO: 133595 - DNA, 80 bp, synthetic construct
  source 1..80: mol_type = other DNA
ggcccccgcgctgctgcgccgcgggggccgaggaagtgtgccaggaagacgcgccacgcggagtgcggccccgagcccgg

SEQ ID NO: 133596 - DNA, 80 bp, synthetic construct
  source 1..80: mol_type = other DNA
aggctttatgttgggggccctcttaccaattcaaaaggggagaactgcggctatcgcaggtgccgcgcaagcggcgtact

SEQ ID NO: 133597 - DNA, 80 bp, synthetic construct
  source 1..80: mol_type = other DNA
acccgcctgcagacgtacctgacagacgtcgcggccctgttcgtggcggacgtacagcacgcggctctgccccggccccc

SEQ ID NO: 133598 - DNA, 80 bp, synthetic construct
  source 1..80: mol_type = other DNA
gccccctgtataacagcaaggggctccagtgcggctatcgccgctgccgcgctagcggcgtcttgcctaccagctttggc

SEQ ID NO: 133599 - DNA, 80 bp, synthetic construct
  source 1..80: mol_type = other DNA
cacaagttttggatacggacattaatacacttttcaatcaacacggggattcgctggctcaactaatatttgaggttatg

SEQ ID NO: 133600 - DNA, 80 bp, synthetic construct
  source 1..80: mol_type = other DNA
gcgaggtgctgagcgattttaagacctggctgaaggccaagctcatgccacaactgcctgggattccctttgtatcctgc

SEQ ID NO: 133601 - DNA, 80 bp, synthetic construct
  source 1..80: mol_type = other DNA
tagccagctgtcagcgccgtcgttgcgagctacctgtaccacccacgccaaatgtcccgacattgacatggtggatgcca

SEQ ID NO: 133602 - DNA, 80 bp, synthetic construct
  source 1..80: mol_type = other DNA
tcacctcaagagagacagcactaatggtgatagggatggccatgacaacggtgctttcaattccacatgaccttatggaa

SEQ ID NO: 133603 - DNA, 80 bp, synthetic construct
  source 1..80: mol_type = other DNA
gcggaaatgctttagtggttttaggccgtcggccatggtcattttttccaaagactgacgtagaagatagagccgatccc

SEQ ID NO: 133604 - DNA, 80 bp, synthetic construct
  source 1..80: mol_type = other DNA
gccagcgtctggctgaggacgccgcccgacaggccgaccgcctcacagagccgcccgtgcgtgtgctcgctggcgccctg

SEQ ID NO: 133605 - DNA, 80 bp, synthetic construct
  source 1..80: mol_type = other DNA
attgagatgagtccgctcctgttctctaccactcagcttgccgttctcccctgctcatttacgaccatgccagccctgtc

SEQ ID NO: 133606 - DNA, 80 bp, synthetic construct
  source 1..80: mol_type = other DNA
ttggaggcgtgacgcaatcatttggactacttgtgcgcttcatcggaccctggggtttgatactacaagataccttcgtg

SEQ ID NO: 133607 - DNA, 80 bp, synthetic construct
  source 1..80: mol_type = other DNA
ggacttacactctatgtgccctctcagaagtgacaggtttggcacctgatgtcctgcaggctcaatcatatttttcttgc

SEQ ID NO: 133608 - DNA, 80 bp, synthetic construct
  source 1..80: mol_type = other DNA
taacattgttttggtttttattcgctatcggacatggggggtggaaactgggtggcgcggcaggcgcctccggtggtccg

SEQ ID NO: 133609 - DNA, 80 bp, synthetic construct
  source 1..80: mol_type = other DNA
gcccagggatacaaagtgctcgtcctcaacccctccgttgccgcaacgctcggcttcggcgcgtacatgtccaaggccta

SEQ ID NO: 133610 - DNA, 80 bp, synthetic construct
  source 1..80: mol_type = other DNA
acctctgcacaccccaccgctctctggtctgcaataccgagctgctcaacgaaacccaagtaatcggtacctttgaaatc

SEQ ID NO: 133611 - DNA, 80 bp, synthetic construct
  source 1..80: mol_type = other DNA
ccctaaaggctacctgcactgtccatgctgatgacccggacgctgagttaatcactgccaacctcttatggcggcaggag

SEQ ID NO: 133612 - DNA, 80 bp, synthetic construct
  source 1..80: mol_type = other DNA
agaaaagaaacttaacaataatggacctgcacccaggatcagggaaaacaagaagataccttccagccatagtccgtgag

SEQ ID NO: 133613 - DNA, 80 bp, synthetic construct
  source 1..80: mol_type = other DNA
gactgtgatggatgagaccaccaactggctgtgggcttatttggctaggaacaaaaaagccagactgtgcaccagagagg

SEQ ID NO: 133614 - DNA, 80 bp, synthetic construct
  source 1..80: mol_type = other DNA
tgaagtcaaaagctgccactggccaaagtcacacactctctggagtaatggagtgctagaaagtgagatgataattccaa

SEQ ID NO: 133615 - DNA, 80 bp, synthetic construct
  source 1..80: mol_type = other DNA
gatgaaacaaaaaacccgtccatgcgaattcccctcatcacatcagccaggactctgtaggccatccccatccagttaat

SEQ ID NO: 133616 - DNA, 80 bp, synthetic construct
  source 1..80: mol_type = other DNA
ggctgcactcctttgtggtggggtcccaactaccctgtgagccagaacctgatgtgaccgtcctaacgtcaatgctgtca

SEQ ID NO: 133617 - DNA, 80 bp, synthetic construct
  source 1..80: mol_type = other DNA
aagagaattgagaaaataaaagatgagcacaagcagacatggcattatgacctggaccacccgtacaagacatgggccta

SEQ ID NO: 133618 - DNA, 80 bp, synthetic construct
  source 1..80: mol_type = other DNA
gaaagcgtctagccaatcgcagtcgcaaggtaagctcaaacacgtagcagccctgtggacgctgttagaattgcggttgc

SEQ ID NO: 133619 - DNA, 80 bp, synthetic construct
  source 1..80: mol_type = other DNA
tgactgccgctcgggcggtactaaggcgggcacaaaggataggacgtcgggccatgcgccgagcggctgcttctgccagt

SEQ ID NO: 133620 - DNA, 80 bp, synthetic construct
  source 1..80: mol_type = other DNA
gtacgccccgccatgcaagcctctgctgcgagacgaggtcagcttccaagttggcctcaactcctatgtggtggggtctc

SEQ ID NO: 133621 - DNA, 80 bp, synthetic construct
  source 1..80: mol_type = other DNA
cttctaaagtggaggctaggctgttgaccttggaggaagcctgcgcgttgactcccccccattcagccaaatctaggttt

SEQ ID NO: 133622 - DNA, 80 bp, synthetic construct
  source 1..80: mol_type = other DNA
ttggtgcagtgctgtttgttgggctcccattttacccgaagatcggctgctatccccgggacatggatcgcggtgcggtg

SEQ ID NO: 133623 - DNA, 80 bp, synthetic construct
  source 1..80: mol_type = other DNA
caaacctgacagacttgcaaacagcaaactttctccaaatcttaaatggaaggtcagattcttcttcccaatccctaccc

SEQ ID NO: 133624 - DNA, 80 bp, synthetic construct
  source 1..80: mol_type = other DNA
aggttcgcggggcgaaccaccaccggggttcccagaggctcggaggccaggatccggcattgccgaagcagaaaactcca

SEQ ID NO: 133625 - DNA, 80 bp, synthetic construct
  source 1..80: mol_type = other DNA
actggctgaaggtgatagccgtcctgttcctgttcgcgggagtcgacgcgaccaccaccgtcggttctgcgattgcccat

SEQ ID NO: 133626 - DNA, 80 bp, synthetic construct
  source 1..80: mol_type = other DNA
aattcagacaaaaggtgcttggactgttgcagaccacagcaaaacaagcggaggaacttaaaccggcagttcattctgcc

SEQ ID NO: 133627 - DNA, 80 bp, synthetic construct
  source 1..80: mol_type = other DNA
cagtgatcgtggaactgcagtacactggaagcaacggaccatgccgggttcccatttctgtgactgcaaacctcatggac

SEQ ID NO: 133628 - DNA, 80 bp, synthetic construct
  source 1..80: mol_type = other DNA
ggaataagagcgggggacgctactgtacagaacaagcggagacctccccagtgagatccagcaaaagtgaggttacaata

SEQ ID NO: 133629 - DNA, 80 bp, synthetic construct
  source 1..80: mol_type = other DNA
aagacatacaacaatgggaaccttcaagaggatggaacgattggacacaagtgcccttttgttcacaccatttccatgag

SEQ ID NO: 133630 - DNA, 80 bp, synthetic construct
  source 1..80: mol_type = other DNA
gtggtggacgcagtatttcatagcactcatggaggcccagcttcaccaatgggtcccgtcccttcgcgtgcgtggtggcc

SEQ ID NO: 133631 - DNA, 80 bp, synthetic construct
  source 1..80: mol_type = other DNA
cgtggatgaatggtacggtgtttgtgaaaacgtgcggagcccccccctgcaacatctatggggggggtgatgccccgcac

SEQ ID NO: 133632 - DNA, 80 bp, synthetic construct
  source 1..80: mol_type = other DNA
tcaaaagaaggttactttcgacaggcagcaggtgcttgaccaatattaccatgatgttctcaaggaggttaagtcccggg

SEQ ID NO: 133633 - DNA, 80 bp, synthetic construct
  source 1..80: mol_type = other DNA
tcccgggagagccatagtggtctgcggaaccggtgagtacaccggaattgccaggatgaccgggtcctttccattggatc

SEQ ID NO: 133634 - DNA, 80 bp, synthetic construct
  source 1..80: mol_type = other DNA
gcgggcctatgtacaactcaaaaggccagtcatgcggctaccgcaggtgtcgtgctagtggtgtgctcactaccagtttg

SEQ ID NO: 133635 - DNA, 80 bp, synthetic construct
  source 1..80: mol_type = other DNA
cggggaccgtcatcacgctcctgggcctgactccggaaggccaccgggtggccgttcacgtttacggcacgcggcagtac

SEQ ID NO: 133636 - DNA, 80 bp, synthetic construct
  source 1..80: mol_type = other DNA
gatgggaaaaaaagcggatggatgaatatttgtaaatggtcagacccatcatacacatgtcatagtaatggaagccttag

SEQ ID NO: 133637 - DNA, 80 bp, synthetic construct
  source 1..80: mol_type = other DNA
atggtgggcgctgctaccgtgtgctccgccctatacgtcggggacttgtgcggaggtgtgtttctggtgggtcagatgtt

SEQ ID NO: 133638 - DNA, 80 bp, synthetic construct
  source 1..80: mol_type = other DNA
ccacaggtgaaaccaacagagcacggcgcactccgcacgtcacacgtcacgtcatccaccacacctgcccaacaacacaa

SEQ ID NO: 133639 - DNA, 80 bp, synthetic construct
  source 1..80: mol_type = other DNA
gataaatgggacaaagaagaagacgttcaggtcctcgctatagaaccagggaagaatcccaaacatgtccaaacgaaacc

SEQ ID NO: 133640 - DNA, 80 bp, synthetic construct
  source 1..80: mol_type = other DNA
gctggacgtcaaagggccagatcacagtgttggatatgcatccaggctctggaaagacccacagagtcctcccggagctc

SEQ ID NO: 133641 - DNA, 80 bp, synthetic construct
  source 1..80: mol_type = other DNA
gaaagcctatgggattgaccccaatgtgcgcaccggtggtaggaccgtgacaactggtgctaagcttacctattccacct

SEQ ID NO: 133642 - DNA, 80 bp, synthetic construct
  source 1..80: mol_type = other DNA
gtctgttcagatcatgcggctctgaagtcgttcaaagaatttgccgctgggaagagaggagcggctttgggagtaatgga

SEQ ID NO: 133643 - DNA, 80 bp, synthetic construct
  source 1..80: mol_type = other DNA
tttcgtcaagacgtgtggtgcgcccccctgtaacattcggcctgacccaaacgagacagactcacgcaccttgcgttgtc

SEQ ID NO: 133644 - DNA, 80 bp, synthetic construct
  source 1..80: mol_type = other DNA
agggaagcttgcccaggaaccagtgtggttgttgacggaggctgtgatgggcgtgggaagtcgactagatcgaccactga

SEQ ID NO: 133645 - DNA, 80 bp, synthetic construct
  source 1..80: mol_type = other DNA
cccatgtactgtcaacttcacactgtttaaggtgaggatgtttgtgggtgggtttgaacatcgattcactgccgcttgca

SEQ ID NO: 133646 - DNA, 80 bp, synthetic construct
  source 1..80: mol_type = other DNA
agtagcattggtagagttttccagaaagcaatgaatggcagagagaggctgacagtgctgggggaacatgcgtgggactt

SEQ ID NO: 133647 - DNA, 80 bp, synthetic construct
  source 1..80: mol_type = other DNA
gagaccagcaccagcagcggcctcagctcgggcggcagcgacaccgacgacaggacggccttgtgcgtgcgctggtaatt

SEQ ID NO: 133648 - DNA, 80 bp, synthetic construct
  source 1..80: mol_type = other DNA
aatctgctacccgcgctgttgtcgccaggggctctcgtggtgagggtcgtgtgtgctgccatcttaagacgccacgttgg

SEQ ID NO: 133649 - DNA, 80 bp, synthetic construct
  source 1..80: mol_type = other DNA
gttccaagtacggatacggcgcgaaggaagttcgctctctcgacaagaaagcccttaagcacatagagggtgtgtggcaa

SEQ ID NO: 133650 - DNA, 80 bp, synthetic construct
  source 1..80: mol_type = other DNA
cctggtcaacctactgcccgccattctttcgcccggagcccttgtcgtcggtgtggtttgcgcagcaatactacgccggc

SEQ ID NO: 133651 - DNA, 80 bp, synthetic construct
  source 1..80: mol_type = other DNA
tggaaaaggaggagttgtgacatgtgcgaagttctcatgttcggggaagataacaggcaatctggtccaaattgagaacc

SEQ ID NO: 133652 - DNA, 80 bp, synthetic construct
  source 1..80: mol_type = other DNA
aacagacctggaccttcaagaggtgttcaaggatttatctttttctttttgttcaacattttgactggaaaaaagatcac

SEQ ID NO: 133653 - DNA, 80 bp, synthetic construct
  source 1..80: mol_type = other DNA
accttggagctggccagattttgacttgaaaccaggagctgcttggactgtctatgttggcattgtcacaatgctctccc

SEQ ID NO: 133654 - DNA, 80 bp, synthetic construct
  source 1..80: mol_type = other DNA
ttgggcactggcagccaatcagattcaaggcctgaggaacggcgtgatgatgactcggacgcggcttcatattcttccat

SEQ ID NO: 133655 - DNA, 80 bp, synthetic construct
  source 1..80: mol_type = other DNA
tgacatcactaaggtgctattggccttgcttggtcctctctacttatttcaggccagtttgctccgtgtgccgtattacg

SEQ ID NO: 133656 - DNA, 80 bp, synthetic construct
  source 1..80: mol_type = other DNA
atgtagcatgataaatatgtggccgggggtgcttggcatggacggtgtggttattatgaatgtaaggtttactggcccca

SEQ ID NO: 133657 - DNA, 80 bp, synthetic construct
  source 1..80: mol_type = other DNA
cgagatcgtcaccgaggcgcactggggtgtgatgtttgggctggcctacttctccatgcagggtgcgtgggccaaagtca

SEQ ID NO: 133658 - DNA, 80 bp, synthetic construct
  source 1..80: mol_type = other DNA
ctcaccgagcatacgccatggacaatgagcaagcggcatcccttggagctgttggtctattggctatcaccatcttcacc

SEQ ID NO: 133659 - DNA, 80 bp, synthetic construct
  source 1..80: mol_type = other DNA
atcaatggccatgcgatgcgtgggaataggcaacagagacttcgttgaaggactgtcaggagcaacgtgggtggacgtgg

SEQ ID NO: 133660 - DNA, 80 bp, synthetic construct
  source 1..80: mol_type = other DNA
aactgccggagactctggagacattgcttttactgacacttttggccacagtcacaggcggaatcttcctgttcttgatg

SEQ ID NO: 133661 - DNA, 80 bp, synthetic construct
  source 1..80: mol_type = other DNA
taagcttatcgcccagggaggtaaagccaaaatttgtggcatatacctctttaactgggcggtaaagaccaaactcaaac

SEQ ID NO: 133662 - DNA, 80 bp, synthetic construct
  source 1..80: mol_type = other DNA
tctactacaaccaccgccggggcgactggctcgtgcgagaccccatcagcgggcagcgcggagaatgtctggtgctgtgg

SEQ ID NO: 133663 - DNA, 80 bp, synthetic construct
  source 1..80: mol_type = other DNA
gagcagttctgggcaaaacacatgtggaactttgtcagtgggatccaatacttggccggtctttcaaccttgccgggcaa

SEQ ID NO: 133664 - DNA, 80 bp, synthetic construct
  source 1..80: mol_type = other DNA
caacgccgttgcctactacagagggcttgatgtctccgttataccaaccagcggggacgtcgtcgtcgtggcgaccgacg

SEQ ID NO: 133665 - DNA, 80 bp, synthetic construct
  source 1..80: mol_type = other DNA
gccagttttctctcgccgggctccaagcaggacatccagctgatcaacaccaacggcagttggcacatcaacaggactgc

SEQ ID NO: 133666 - DNA, 80 bp, synthetic construct
  source 1..80: mol_type = other DNA
gaggccgccacccccaccgtcttgtcaaactggcagaagctagaggcattctgggcaaaacatatgtggaacttcataag

SEQ ID NO: 133667 - DNA, 80 bp, synthetic construct
  source 1..80: mol_type = other DNA
aggtcaaatgttcacctatagccctcgccggcataatgttgtgcaggactgcaactgttccatttacagtggccacatca

SEQ ID NO: 133668 - DNA, 80 bp, synthetic construct
  source 1..80: mol_type = other DNA
cagcgcctgggtggcggccgaagcgtagtgccggatgtactcgtagtgcgggtcgctggcgagcccgtccacgatcaaac

SEQ ID NO: 133669 - DNA, 80 bp, synthetic construct
  source 1..80: mol_type = other DNA
catgagcacacttccaaaaccccaaagaaaaaccaaaagaaataccaaccgtcgccctatggacgttaagttccccggcg

SEQ ID NO: 133670 - DNA, 80 bp, synthetic construct
  source 1..80: mol_type = other DNA
aatatgtgttgactttaagtgcgtggtttatgactcaggggaggggactttgggtatataagcaggtgcagacctgtgtg

SEQ ID NO: 133671 - DNA, 80 bp, synthetic construct
  source 1..80: mol_type = other DNA
gacccccctcaggtgtggggctgcccgataccacctgcgggccccccgcctgtcccgcttccgcggaggaaaaggaagcc

SEQ ID NO: 133672 - DNA, 80 bp, synthetic construct
  source 1..80: mol_type = other DNA
atggacaatgtcaacccgttcaaccaccaccgtaacgccggcttgcgttaccgatccatgcttctgggtaacggacgtta

SEQ ID NO: 133673 - DNA, 80 bp, synthetic construct
  source 1..80: mol_type = other DNA
gtgaggacgaggagcggccagaggaggagagggaggacgaggacgaacgcgaggagggcgagcgcgagcgggagccggag

SEQ ID NO: 133674 - DNA, 80 bp, synthetic construct
  source 1..80: mol_type = other DNA
gcacctgatagacgccccggccgtcgacggtaccctccctggattcggcaagggcggaaacagccgcgggtctgcgggcc

SEQ ID NO: 133675 - DNA, 80 bp, synthetic construct
  source 1..80: mol_type = other DNA
acggagagtgaccatgacgttcttcgtatgttattacatgatttcgatcaatttacacatttgcctatatggataaaaac

SEQ ID NO: 133676 - DNA, 80 bp, synthetic construct
  source 1..80: mol_type = other DNA
gcataccatggagcgggccacaagactctggccggaggtgccggacccgtcctacagatgtacacctccgtggatgatga

SEQ ID NO: 133677 - DNA, 80 bp, synthetic construct
  source 1..80: mol_type = other DNA
ggatgtaaaaaagtacgaagacagcctgaagaatgagagcgccataagaggagacaattttactgcgttgatgaaagtcg

SEQ ID NO: 133678 - DNA, 80 bp, synthetic construct
  source 1..80: mol_type = other DNA
taagtacacctccagaggatggaagctcctcgcccccatcaccgcatacgctcagcagacccgtggtctgctgggtacga

SEQ ID NO: 133679 - DNA, 80 bp, synthetic construct
  source 1..80: mol_type = other DNA
ccctatcacctatgtcaacatctctgggccccaggatgataaaccctactgctggcattacgccccgcgacagtgcggcg

SEQ ID NO: 133680 - DNA, 80 bp, synthetic construct
  source 1..80: mol_type = other DNA
cgaggagacggcgtgatgaacaccaggtgcacctgcggcgcagagctggccggtcacatcaaaaacggttcgatgaggat

SEQ ID NO: 133681 - DNA, 80 bp, synthetic construct
  source 1..80: mol_type = other DNA
gttaacagcaacggtagctggcatgtgaaccgcacagccctgaattgcgatgattcccttaacaccggatttattgcggg

SEQ ID NO: 133682 - DNA, 80 bp, synthetic construct
  source 1..80: mol_type = other DNA
cgcgtggtgccgggccaagggctgcggacgcggggacgcgctttcccccagacccatggacaggtggtccgcggcctcct

SEQ ID NO: 133683 - DNA, 80 bp, synthetic construct
  source 1..80: mol_type = other DNA
cgggtggccgggtgcgggcaccaggtccccggcgtgcgcggcgaagcgctccatggccgggttgaacagccccagtggca

SEQ ID NO: 133684 - DNA, 80 bp, synthetic construct
  source 1..80: mol_type = other DNA
ggtacgcataccctgaaacctattttctctttacagttacagggtagagtttcatgcaagttttcattgtttgatacatc

SEQ ID NO: 133685 - DNA, 80 bp, synthetic construct
  source 1..80: mol_type = other DNA
agcattgaagacaatccagagatcgaagatgacattttccgaaagaaaagattgaccatcatggacctccatccaggagc

SEQ ID NO: 133686 - DNA, 80 bp, synthetic construct
  source 1..80: mol_type = other DNA
tacccatggcctctttacggtaatgagggttgcgggtgggcgggatggctcctgtcacctcgtggctctcgaccgtcttg

SEQ ID NO: 133687 - DNA, 80 bp, synthetic construct
  source 1..80: mol_type = other DNA
aaagtagtggaccttggctgcggcagaggaggctggtcatactattgtgggggactaaagaatgtaaaggaagtcaaagg

SEQ ID NO: 133688 - DNA, 80 bp, synthetic construct
  source 1..80: mol_type = other DNA
cgtggtggcgtgggcaaaaagggtgtccgagtgggcctgcgagcgctccagaagccactcgccgaggcgtgtatacagat

SEQ ID NO: 133689 - DNA, 80 bp, synthetic construct
  source 1..80: mol_type = other DNA
atcctccgggtctgggatctgccgcatccaggcgcacctccgtcgcagcgcctccactccgctgggtggaccaaaccgtc

SEQ ID NO: 133690 - DNA, 80 bp, synthetic construct
  source 1..80: mol_type = other DNA
aactgtcatcgcttggcctcaacgcggttgcattctataggggcattgatgtgtcggtcatccccaccgctggggacgtg

SEQ ID NO: 133691 - DNA, 80 bp, synthetic construct
  source 1..80: mol_type = other DNA
agaactgtctttatgacacactttttcagtctactcctcagtgaggagagactaagcgagccttgtcaattcgagttgta

SEQ ID NO: 133692 - DNA, 80 bp, synthetic construct
  source 1..80: mol_type = other DNA
ccacatgtaccgcgcaccacaactcccccggccaggacctcatcgaagctaatcttctatggggcgccaatgccgccagg

SEQ ID NO: 133693 - DNA, 80 bp, synthetic construct
  source 1..80: mol_type = other DNA
cgagtccgtgggggtgtcgatatcaataacgacaaactggcccgcgctcgcgccggccacactctcgtatgggtgcggtg

SEQ ID NO: 133694 - DNA, 80 bp, synthetic construct
  source 1..80: mol_type = other DNA
tcgaggacggggtaaattatgcaacggggaatcttcccggttgctctttctctatcttcctcttggcacttctttcgtgc

SEQ ID NO: 133695 - DNA, 80 bp, synthetic construct
  source 1..80: mol_type = other DNA
ggagctgagacccgaccacctggtgatggcctgtaccgggaccgagttcagctccagtggggaggacacagattagaggt

SEQ ID NO: 133696 - DNA, 80 bp, synthetic construct
  source 1..80: mol_type = other DNA
acaagcaaaccgactcccggcgccctggtgcggcaagtgtaccgcaatggtagtgcggaacctttgacactgccgcgcgc

SEQ ID NO: 133697 - DNA, 80 bp, synthetic construct
  source 1..80: mol_type = other DNA
ttgtccggaaagccggcaatcatacccgacagggaggtcctctaccgagagttcgatgagatggaagagtgctctcagca

SEQ ID NO: 133698 - DNA, 80 bp, synthetic construct
  source 1..80: mol_type = other DNA
tgtcacaggtggaggcggcattagccaacctgattaacatcaatgctgcttcagccgctggcactcacggcttcttcctt

SEQ ID NO: 133699 - DNA, 80 bp, synthetic construct
  source 1..80: mol_type = other DNA
taggagcaggctgatggccaagggcagccccttagtgtaggtgttaacaaagcggttaagctgtgagggatgcatgcggg

SEQ ID NO: 133700 - DNA, 80 bp, synthetic construct
  source 1..80: mol_type = other DNA
caagcagcgaatcatgattgcaaaaatacaggtctgtgaggaacctgaatttttgcaatcatgattcgctgcttgaggct

SEQ ID NO: 133701 - DNA, 80 bp, synthetic construct
  source 1..80: mol_type = other DNA
acgacgaagaagaggaacaactacctcagcagagaaatggcaaaaaaactcacgtatatgctcaggcaccgtttgctgga

SEQ ID NO: 133702 - DNA, 80 bp, synthetic construct
  source 1..80: mol_type = other DNA
gagcctacagaatcaagcaaaaagggattcttggatattctcagatcggagctggagtttacaaagaaggaacatttcat

SEQ ID NO: 133703 - DNA, 80 bp, synthetic construct
  source 1..80: mol_type = other DNA
agacatcgggcaagagcagtcagagctaggcttatcgcccagggggggaaggccgctatatgcggcaagtacctctttaa

SEQ ID NO: 133704 - DNA, 80 bp, synthetic construct
  source 1..80: mol_type = other DNA
ccagccctagcgacgggcctcatacacctccaccagaacatcgtggatgtgcagttcctctacggtattggatccggtat

SEQ ID NO: 133705 - DNA, 80 bp, synthetic construct
  source 1..80: mol_type = other DNA
atcagcatcctaagttccctcaccatcactagcctgcttcgcaggctccatcagtggattagtgaggattgctccatgcc

SEQ ID NO: 133706 - DNA, 80 bp, synthetic construct
  source 1..80: mol_type = other DNA
agacctcgaaaaccctcatctgttagagaagaaaatcacacaatggttggaaaacaaaggagtggagagattaaaaagaa

SEQ ID NO: 133707 - DNA, 80 bp, synthetic construct
  source 1..80: mol_type = other DNA
taaaaagacagaataaaacgcacgggtgttgggtcgtttgttcggatcgatccgtcgacctcgaggggtggcccggtacc

SEQ ID NO: 133708 - DNA, 80 bp, synthetic construct
  source 1..80: mol_type = other DNA
ctactttccgtaggggtaggcatctttctgctccccgctcggtaggcggtgagcctaaagctacactcaattagtttttg

SEQ ID NO: 133709 - DNA, 80 bp, synthetic construct
  source 1..80: mol_type = other DNA
cttcaacatcaaatgttccgcaaaggtcgcgatccaccgcccccgatcccgctgcaagtaaggccactcgatccaaaaac

SEQ ID NO: 133710 - DNA, 80 bp, synthetic construct
  source 1..80: mol_type = other DNA
gtggggatggagtaaattccaccaagtgtccgtgcggagcgacgatatctggccacgtgaaaaacggaaccatgaggatc

SEQ ID NO: 133711 - DNA, 80 bp, synthetic construct
  source 1..80: mol_type = other DNA
tacagacggaggtgaggcggtgcggtggtggggggtggcacgccgcccggtcgcacatcctacccgccaaagtcgtcgat

SEQ ID NO: 133712 - DNA, 80 bp, synthetic construct
  source 1..80: mol_type = other DNA
aatccccaaccccattgaagcaatgccgtcggtacggaaggaggcaactccgaaaacattatggtacgcgagagggtcga

SEQ ID NO: 133713 - DNA, 80 bp, synthetic construct
  source 1..80: mol_type = other DNA
gccctccaccaagtgttcggcagtgtctacaccaccatgtttggaggagtctcttggattgtcaggatactgattggact

SEQ ID NO: 133714 - DNA, 80 bp, synthetic construct
  source 1..80: mol_type = other DNA
aatctaaatggaatgtcagtttcctcctgttcctgtccatccgcacccactatcttcatgttgttgcagatgaagcgcgc

SEQ ID NO: 133715 - DNA, 80 bp, synthetic construct
  source 1..80: mol_type = other DNA
ccctgttttaggtacaataaaaacaaaacatttcaaacaaatcgccccacgtgttgtccttctttgctcatggccggcgg

SEQ ID NO: 133716 - DNA, 80 bp, synthetic construct
  source 1..80: mol_type = other DNA
tggcgtacccaccccagcgccggactacaagttcgcgttgtggagggtgtcagccgaggagtacgtggaggttcgtcggg

SEQ ID NO: 133717 - DNA, 80 bp, synthetic construct
  source 1..80: mol_type = other DNA
tgggcgtggtatgtgcggggtagggcggtccctgcctgcgcatatggcctactccggatatggccgatcctcctgttggt

SEQ ID NO: 133718 - DNA, 80 bp, synthetic construct
  source 1..80: mol_type = other DNA
ggaagcggtccacgcaacggtcgccgccggtcgcctcgacgaggacgttcctcctgcgggaaggcacgaacgcgggtgag

SEQ ID NO: 133719 - DNA, 80 bp, synthetic construct
  source 1..80: mol_type = other DNA
acagttgctcctcgagatctttctcgagggacactggggtgtcatcggtgctgtgttgtattatagcatggtagcaaact

SEQ ID NO: 133720 - DNA, 80 bp, synthetic construct
  source 1..80: mol_type = other DNA
ttcacggaaggaaacgctgtgagttttgagggtggggtgtttagcccatatctgacaacccgtcttccctcttgggcagg

SEQ ID NO: 133721 - DNA, 80 bp, synthetic construct
  source 1..80: mol_type = other DNA
tagccagttgtctgcgccttccctgaaggcgacatgcactacccgacatgactccccagacgctgacctcattgaggcca

SEQ ID NO: 133722 - DNA, 80 bp, synthetic construct
  source 1..80: mol_type = other DNA
ggcactggctgaactagcacaaacatcattcccaccgagcacggcgaccctgagcgaagactcggggagggagacctcta

SEQ ID NO: 133723 - DNA, 80 bp, synthetic construct
  source 1..80: mol_type = other DNA
aattgcacaagccatgggattttttggattgctacaccaaagaaacaagctacataggttggatttatggaataatgact

SEQ ID NO: 133724 - DNA, 80 bp, synthetic construct
  source 1..80: mol_type = other DNA
gattggacaaccccgtgcgctacttcctggttgagggatgtctgggattgggtttgcgtcgtcctgagcgacttcaagga

SEQ ID NO: 133725 - DNA, 80 bp, synthetic construct
  source 1..80: mol_type = other DNA
cgctgatgagcgggtcgctgcagggtcgctcgctgttcgaggccacgcgcgtcaccttaatatgcgaagtggacctcggg

SEQ ID NO: 133726 - DNA, 80 bp, synthetic construct
  source 1..80: mol_type = other DNA
aaaaaaatcagaggtgccgtacgaggacaatgaaaactgttcctccagcggcagttctccctcctcccccccgaaggcgg

SEQ ID NO: 133727 - DNA, 80 bp, synthetic construct
  source 1..80: mol_type = other DNA
gatggctatacctccaaggggtggagtcttctcgctcccatcactgcttatgcccagcaaacacgaggcctcctgggcgc

SEQ ID NO: 133728 - DNA, 80 bp, synthetic construct
  source 1..80: mol_type = other DNA
ccgaggaatatgcagcactaaactttattaatctacccccaacctgcataggagaattagcccagttttatatggcaaat

SEQ ID NO: 133729 - DNA, 80 bp, synthetic construct
  source 1..80: mol_type = other DNA
ctacgtgccagagacagatgcttcccgcaatgttacactcatacttagctccctcacaatcaccagtctccttcgacgac

SEQ ID NO: 133730 - DNA, 80 bp, synthetic construct
  source 1..80: mol_type = other DNA
cttgcatgtcagctgaccttgaggtagtgacgagcacgtgggttctggtgggcggcgtcctggcagctctggctgcttac

SEQ ID NO: 133731 - DNA, 80 bp, synthetic construct
  source 1..80: mol_type = other DNA
actaagcattggcagatggttcaacacctacctgtacgatcaccttgcaccaatgcaacactgggccgcggctggcctta

SEQ ID NO: 133732 - DNA, 80 bp, synthetic construct
  source 1..80: mol_type = other DNA
gaatattcagtacgggccctagccagaacatcatgctcatgaagaccaacggtagctggcacattaataggacagctctg

SEQ ID NO: 133733 - DNA, 80 bp, synthetic construct
  source 1..80: mol_type = other DNA
actgctggacaagttaatatgattgagcccatggatttttaataactttgttcaggccccccagggtgaatttaccatat

SEQ ID NO: 133734 - DNA, 80 bp, synthetic construct
  source 1..80: mol_type = other DNA
attaataaatcgccagccttacttaggtttaaatattcaaattacttttttagttgtctgtgggatctttattcttacgg

SEQ ID NO: 133735 - DNA, 80 bp, synthetic construct
  source 1..80: mol_type = other DNA
gcgcccggcagcccgcccgggattcccgaatatgcggaagacccctacgcgatctcatacggcggccagctcgaccggta

SEQ ID NO: 133736 - DNA, 80 bp, synthetic construct
  source 1..80: mol_type = other DNA
ccccaatgggacgcccggcccccagaggatctcccgactccgcgccccccacgaaaggcatgaccggggcgcggacggcg

SEQ ID NO: 133737 - DNA, 80 bp, synthetic construct
  source 1..80: mol_type = other DNA
ctgctgctatttgccggcgtcgacgcacaaacccgcgtcatcggggaagctgccggccgcaccgcgtctgggcttgctag

SEQ ID NO: 133738 - DNA, 80 bp, synthetic construct
  source 1..80: mol_type = other DNA
tcctcttcaacatattgggggggtgggtggctgcccagctcgccgcccccggtgccgctaccgcctttgttggcgctggc

SEQ ID NO: 133739 - DNA, 80 bp, synthetic construct
  source 1..80: mol_type = other DNA
tcatctggagggcctttgttgtgccccatgggccacgtggctggcatcttccgagctgccgtgtgcaccaggtgcgtggc

SEQ ID NO: 133740 - DNA, 80 bp, synthetic construct
  source 1..80: mol_type = other DNA
agagcaaaagttatgtcattaaataaaattttaccagctcttggaataaaatttctagagattttaaatggcgccggtac

SEQ ID NO: 133741 - DNA, 80 bp, synthetic construct
  source 1..80: mol_type = other DNA
tcggccgcatacacatcaatcagaggtcggtcgttgttccagacagggaagtcctctacgaggcgtttgacgagatggaa

SEQ ID NO: 133742 - DNA, 80 bp, synthetic construct
  source 1..80: mol_type = other DNA
cgccggcgacacccacccgacaacagcccctgggtgtagaccgctgtcgcccccgtctgtcgcctctcccttttttccgc

SEQ ID NO: 133743 - DNA, 80 bp, synthetic construct
  source 1..80: mol_type = other DNA
gtgccgcccagcaagctcatgggcttgccagttggttcgagcggggcgccagacagaaactccagctaatcaacaccaac

SEQ ID NO: 133744 - DNA, 80 bp, synthetic construct
  source 1..80: mol_type = other DNA
aaggtcccgcaatttgggtaaggtcatcgataccctcacgtgtggcttagccgacctcatggggtacatccctctacccc

SEQ ID NO: 133745 - DNA, 80 bp, synthetic construct
  source 1..80: mol_type = other DNA
ttggagcctcgcagcgaggtgttggagtggcgcagggaggggtcttccacacaatgtggcatgtcactagggtggcattc

SEQ ID NO: 133746 - DNA, 80 bp, synthetic construct
  source 1..80: mol_type = other DNA
ggccgcgagatcttcctgggtccggctgatgacgtcaaggggaagggctggcgacttctcgcccccatcaccgcgtatgc

SEQ ID NO: 133747 - DNA, 80 bp, synthetic construct
  source 1..80: mol_type = other DNA
ccccatccgtggcaggccatcttgcttgtttaaacattcgcagcgcactggcataaggagacgtttttgtccatgtcgca

SEQ ID NO: 133748 - DNA, 80 bp, synthetic construct
  source 1..80: mol_type = other DNA
ccctcgcaaagacaattttggaaaaagcctatcatgccaaagtggtcaaagtggctcgcccctccagctcgggaggctgc

SEQ ID NO: 133749 - DNA, 80 bp, synthetic construct
  source 1..80: mol_type = other DNA
agtcatggtatagagaaccacactacctcttatgagctcacaaacattactacccatcatcctaaatatgctatgcaact

SEQ ID NO: 133750 - DNA, 80 bp, synthetic construct
  source 1..80: mol_type = other DNA
atgcatactatatgtacttggacagaagcgatgctggggaggccatatcttttccaaccacaatggggatgaataagtgt

SEQ ID NO: 133751 - DNA, 80 bp, synthetic construct
  source 1..80: mol_type = other DNA
ctaaaagctacctgcaccacgcatcggaataccccggatgcggacctcatagaggccaatctcctatggagacagtgcat

SEQ ID NO: 133752 - DNA, 80 bp, synthetic construct
  source 1..80: mol_type = other DNA
cccccaggggcgcgctctttgacaccgtgcacctgcggcagctcggacctttacttggtcacgaggcatgctgatgtcat

SEQ ID NO: 133753 - DNA, 80 bp, synthetic construct
  source 1..80: mol_type = other DNA
gtgttcggatgtgccttgcctcctcccaaattgccacctgtgcccccacctaggaagaagaagctcatccgccttgatga

SEQ ID NO: 133754 - DNA, 80 bp, synthetic construct
  source 1..80: mol_type = other DNA
tacgcgtgcgcggtgggacacggaagcgctgtgctcccccgaggacggctgggtaaaggttcaccccacccccggtacga

SEQ ID NO: 133755 - DNA, 80 bp, synthetic construct
  source 1..80: mol_type = other DNA
gcgcgtaccttaacactcccgggctgcccgtgtgccaagaccatcttgaattctgggaggtggtgttcacagggctcaca

SEQ ID NO: 133756 - DNA, 80 bp, synthetic construct
  source 1..80: mol_type = other DNA
ggacagcaaagctatccgtaaagatgaggctggtcttatatacaatgctcttctggagcgcgtggcgcgctacaacagta

SEQ ID NO: 133757 - DNA, 80 bp, synthetic construct
  source 1..80: mol_type = other DNA
ggaaacaaccacgcagacaactactagagaaacaacgcagcctaccactactcaaactacacagctagacactacagtgc

SEQ ID NO: 133758 - DNA, 80 bp, synthetic construct
  source 1..80: mol_type = other DNA
caagctggccgccacggagcagcagggcacgacgcccccggcgatcgcggctctcatgcaggacgcgtcggtccaaaccc

SEQ ID NO: 133759 - DNA, 80 bp, synthetic construct
  source 1..80: mol_type = other DNA
gtcccaggacgcgcagcaatacctggcatggtacgttccccatcaatgccactaccaccggccccagcgtgcctattcca

SEQ ID NO: 133760 - DNA, 80 bp, synthetic construct
  source 1..80: mol_type = other DNA
ttaaaaagcatcatatcatgggtaacagacatattcttaggtgttatattccacacggtttcctgtcgagccaaacgctc

SEQ ID NO: 133761 - DNA, 80 bp, synthetic construct
  source 1..80: mol_type = other DNA
ctccgccggtgcgcccgcgcccccggccgtgtttcagcacggtggccatcagagggcccaggtcgaggtcgtgctgggca

SEQ ID NO: 133762 - DNA, 80 bp, synthetic construct
  source 1..80: mol_type = other DNA
gcaggatatatacctgtcttgccagctcgacccggaagcccaacaggccataaagtctctcactgagaggctttacgttg

SEQ ID NO: 133763 - DNA, 80 bp, synthetic construct
  source 1..80: mol_type = other DNA
agatcaccaaaatcttgttggctctcataggccctttgtatgtgctccaatttagcctcttgcgcgtaccgtattacgtg

SEQ ID NO: 133764 - DNA, 80 bp, synthetic construct
  source 1..80: mol_type = other DNA
aaccgagtgctgactccggggtggaccagggaccccccactgaaacttctgaacccgacccccccaacgcggatgatcag

SEQ ID NO: 133765 - DNA, 80 bp, synthetic construct
  source 1..80: mol_type = other DNA
atcactgtgccgcatcccaacattgaggaagtggcccttaccaatgatggagaagtccccttctatggcaaagccattcc

SEQ ID NO: 133766 - DNA, 80 bp, synthetic construct
  source 1..80: mol_type = other DNA
gcgcttgctgggcgaggacgagtacctgaacgactcgctgctgcagccgccgcgggccaagaacgccatggccaataacg

SEQ ID NO: 133767 - DNA, 80 bp, synthetic construct
  source 1..80: mol_type = other DNA
cgtctccgtagcccacgatgggactggacagagatattactacctcacccgtgacccaaccggacctttggcacgagcag

SEQ ID NO: 133768 - DNA, 80 bp, synthetic construct
  source 1..80: mol_type = other DNA
caacgccctggagcactttgggcgacgcgagaccctgacggaggttctgggccgctacgatgtgcggcccgacgccggtg

SEQ ID NO: 133769 - DNA, 80 bp, synthetic construct
  source 1..80: mol_type = other DNA
ttgggaaggcctttacgaccacgttgaaaggagcgcaacggctagctgccctggaggacacggcttgggactttggctca

SEQ ID NO: 133770 - DNA, 80 bp, synthetic construct
  source 1..80: mol_type = other DNA
acaacgaggcattcagggatgcgctgctaaacatagtagagcccgagggccgctggctgctcgatttgataaacattctg

SEQ ID NO: 133771 - DNA, 80 bp, synthetic construct
  source 1..80: mol_type = other DNA
atgcagatgtcctgccagcacgacgcagaggggactccacggctagcttgctcagtcctagacccctagcatgcttgaaa

SEQ ID NO: 133772 - DNA, 80 bp, synthetic construct
  source 1..80: mol_type = other DNA
aaattacacaaacaaggcttcctcactgtagccgcctcaggctcctatcctttagttgttcctgctgatggttattttag

SEQ ID NO: 133773 - DNA, 80 bp, synthetic construct
  source 1..80: mol_type = other DNA
gtcatagtgggcaggatcatcctctccggtaagccggcaattatgccggacagagaagtcctctacagggagtttgatga

SEQ ID NO: 133774 - DNA, 80 bp, synthetic construct
  source 1..80: mol_type = other DNA
ttttgatgggtgccaccttcgcggaaatgaacactggaggagatgtagctcatctggcgctgatagcggcattcaaagtc

SEQ ID NO: 133775 - DNA, 80 bp, synthetic construct
  source 1..80: mol_type = other DNA
atggttttatccccggatccagatgacgttatctcaaccgtttcaaccaaagaccatgttgaaatgtttaatttaacaac

SEQ ID NO: 133776 - DNA, 80 bp, synthetic construct
  source 1..80: mol_type = other DNA
aaacaaagtggtgaaagtcctgaggccagctccaggtgggaaagcttacatggatgtcataagccggcgggaccagagag

SEQ ID NO: 133777 - DNA, 80 bp, synthetic construct
  source 1..80: mol_type = other DNA
gcaccccccggagcgcgctcattgacaccatgtagctgtggctcgagtgacctctacctcatcacgaggaatgccgatgt

SEQ ID NO: 133778 - DNA, 80 bp, synthetic construct
  source 1..80: mol_type = other DNA
accactaaaactgtgtatccggtacatttaggaaatttatcatgtagtttggaagggaaggcatggaagaacttagaaac

SEQ ID NO: 133779 - DNA, 80 bp, synthetic construct
  source 1..80: mol_type = other DNA
caaaacaaagtggtcaaagttcaacgaccgactccaacgggcacggtaatggatattatatctaggaaagaccaaagggg

SEQ ID NO: 133780 - DNA, 80 bp, synthetic construct
  source 1..80: mol_type = other DNA
acaccacgggcccctgcactccccttcctgcaccgaactataagttcgcgctgtggagggtgtctgcggaggaatacgtg

SEQ ID NO: 133781 - DNA, 80 bp, synthetic construct
  source 1..80: mol_type = other DNA
gaacggctctactgcggaggccccatgtttaacagcaaggggctatcctgtggttatcgccgatgccgcgccagcggtgt

SEQ ID NO: 133782 - DNA, 80 bp, synthetic construct
  source 1..80: mol_type = other DNA
ccatcattgagctcacctatcgtcacaaagttgtgaaagtgatgcgcccggctgctgatggaagaaccgtcatggatgtc

SEQ ID NO: 133783 - DNA, 80 bp, synthetic construct
  source 1..80: mol_type = other DNA
atggccaaagtcccacacattgtggacagatggaatagaagagagtgatctgatcatacccaagtctttagctgggccac

SEQ ID NO: 133784 - DNA, 80 bp, synthetic construct
  source 1..80: mol_type = other DNA
tcatcctactactagcaagggctcagacccagatgttgagaaggccgatgccggctctgacgcggggtcctacagctcta

SEQ ID NO: 133785 - DNA, 80 bp, synthetic construct
  source 1..80: mol_type = other DNA
cttcttcatcatcgggagctattgttgatgtcatgtgccacgctacatatgtcaaccgccggctcctgccacaagggaga

SEQ ID NO: 133786 - DNA, 80 bp, synthetic construct
  source 1..80: mol_type = other DNA
tgggtggagttgagcacaggttcgacgccgcatgcaactggacccgaggagagcgctgtgagttggaggaccgtgacaga

SEQ ID NO: 133787 - DNA, 80 bp, synthetic construct
  source 1..80: mol_type = other DNA
acaacaaacacacagggaccggggtcgccgtgttggtggcgtggtccccactgactcatacgcaggccccccttactcac

SEQ ID NO: 133788 - DNA, 80 bp, synthetic construct
  source 1..80: mol_type = other DNA
atatgggctcggcctgactacaaccccccgctcatcgaaccatggaagtctcctgattatgagcctcctacggtggccgg

SEQ ID NO: 133789 - DNA, 80 bp, synthetic construct
  source 1..80: mol_type = other DNA
gaatatgacgaggacgatgagtacgagccagaggacggcgagtactaagcggtcgcgcagccggccagatgatgcaagac

SEQ ID NO: 133790 - DNA, 80 bp, synthetic construct
  source 1..80: mol_type = other DNA
ccttattcttaaacatcttggggggctggctcgcatcacaactggcgggccccgtgccgtccactgccttcgtagtgtcc

SEQ ID NO: 133791 - DNA, 80 bp, synthetic construct
  source 1..80: mol_type = other DNA
gatgtatatcggagacctctgcggcgccgtatttttggcaggacagttgactactttcagtcctcgcttccacaacataa

SEQ ID NO: 133792 - DNA, 80 bp, synthetic construct
  source 1..80: mol_type = other DNA
tgggcctgatcgccggcgcggtgggcggcagtctcctggcagccctggtcatttgcggaattgtgtactggatgcgccgc

SEQ ID NO: 133793 - DNA, 80 bp, synthetic construct
  source 1..80: mol_type = other DNA
cgcattggctggagggttcgccaaggcagatatagagatggctgggcccatggccgcggtcggtctgctaattgtcagtt

SEQ ID NO: 133794 - DNA, 80 bp, synthetic construct
  source 1..80: mol_type = other DNA
cactagatgggcaagttacaaaagatccagatattgactttgcttactttgacgtccctggcggaaaagctccaacaggc

SEQ ID NO: 133795 - DNA, 80 bp, synthetic construct
  source 1..80: mol_type = other DNA
aaagaggcatttgaggagggaagctgtggcatagtcccccagaacagacttgagatggccatgtggagaagctcggtcac

SEQ ID NO: 133796 - DNA, 80 bp, synthetic construct
  source 1..80: mol_type = other DNA
aagaactggagtaacacaatgcaaaatgtgcagcaaaaactccgacatgtttgtctttaaaaaatctaccacagaaatgt

SEQ ID NO: 133797 - DNA, 80 bp, synthetic construct
  source 1..80: mol_type = other DNA
cgtgtggttttgccgatctcatggggtacatacccgtcgtcggcgccccggttggcggcgttgccagagcactcgcgcat

SEQ ID NO: 133798 - DNA, 80 bp, synthetic construct
  source 1..80: mol_type = other DNA
atcttttttgtggcagcctggtacttaaagggcagggtagtccctatggccacatactctgctctcggcctatggtcctt

SEQ ID NO: 133799 - DNA, 80 bp, synthetic construct
  source 1..80: mol_type = other DNA
acagtgacggtcttcaggaaaacccccccggagttttaagcctgcgaatagctaaacccctgtattttgacatggagaga

SEQ ID NO: 133800 - DNA, 80 bp, synthetic construct
  source 1..80: mol_type = other DNA
agctcaccacgcttggcattaatgccgtcgcattttataggggtgtagacgtctccgtaataccaacagacggtgacgtg

SEQ ID NO: 133801 - DNA, 80 bp, synthetic construct
  source 1..80: mol_type = other DNA
catccgcggaggcgagtgttttgataaggccgttccgcgccttgatataacctttgatgttgaccacaaaacccggaatt

SEQ ID NO: 133802 - DNA, 80 bp, synthetic construct
  source 1..80: mol_type = other DNA
gtcgcccgccgggtcgtcggggatgtccaggccgctgggcacgaccgtctggaggtacttccagtactgcgctaggatgg

SEQ ID NO: 133803 - DNA, 80 bp, synthetic construct
  source 1..80: mol_type = other DNA
actgggcgaaggtcctggtagtgctgctgctatttgccggcgtcgacgcggaaacccacgtcaccggaggaaatgccggc

SEQ ID NO: 133804 - DNA, 80 bp, synthetic construct
  source 1..80: mol_type = other DNA
gatccctcccatataacagcggaggcggctaggaggaggttggcaaggggatcgcccccttctgaggccagctcctcggc

SEQ ID NO: 133805 - DNA, 80 bp, synthetic construct
  source 1..80: mol_type = other DNA
cgtcggctaaggtcacgcagctacttagctccctcacggtaacatctctcttgaaaaggctccacacatggatcggtgag

SEQ ID NO: 133806 - DNA, 80 bp, synthetic construct
  source 1..80: mol_type = other DNA
accgatgacatacaagaccaaccttccaaatttataccgattggcctaactggtagtgataacttccagcagtgggaact

SEQ ID NO: 133807 - DNA, 80 bp, synthetic construct
  source 1..80: mol_type = other DNA
cctaccaagtaggctacttacatgcccccactggcagtgggaagagcaccaaggtccctgtggcctacgcaactcagggc

SEQ ID NO: 133808 - DNA, 80 bp, synthetic construct
  source 1..80: mol_type = other DNA
ccgcgtccagcagggcgcctccgcggaaggccgtttggggcaggaggtcgtcggcctcgcccggtgtggtcagaacgttc

SEQ ID NO: 133809 - DNA, 80 bp, synthetic construct
  source 1..80: mol_type = other DNA
ctacccgcttataggcaagaccgcggttgacagtattacccagaaaaagtttctttgcgaccgcaccctttggcgcattc

SEQ ID NO: 133810 - DNA, 80 bp, synthetic construct
  source 1..80: mol_type = other DNA
gtctaactgtgggcagcgtagtcatctgcgggaggatcactacatctggtaggcctgcagttgtgcctgatcgggaggtg

SEQ ID NO: 133811 - DNA, 80 bp, synthetic construct
  source 1..80: mol_type = other DNA
cccgcagatccagtccccctggacacggaggacgactccgatgcggcggacgggacggcggcccgtcccgccgctccaga

SEQ ID NO: 133812 - DNA, 80 bp, synthetic construct
  source 1..80: mol_type = other DNA
gggaagcgacgtgcaggccgacagcaccgctctgctgcgctttatagaatcgcaacgtctcgccgtccccggggtggtga

SEQ ID NO: 133813 - DNA, 80 bp, synthetic construct
  source 1..80: mol_type = other DNA
cctgcggcttcgccgacctcatgggatacatcccggtcataggcgcccccgtgggtggcgtcgccagggccctagcacat

SEQ ID NO: 133814 - DNA, 80 bp, synthetic construct
  source 1..80: mol_type = other DNA
ccatgagtttgtttgaggttgatcagaccaaaattcagtatgtcatcagagcacaattgcatgtaggggccaagcaggaa

SEQ ID NO: 133815 - DNA, 80 bp, synthetic construct
  source 1..80: mol_type = other DNA
ggcgtggctcaaggccaagctcgtgccggctctgccgggaatccctttcctctcctgccagcgcggtttccgcggcgtct

SEQ ID NO: 133816 - DNA, 80 bp, synthetic construct
  source 1..80: mol_type = other DNA
atccaaactgagattccagacagagcctggaattctggttatgaatggataacagaatatgttggaaagacggtgtggtt

SEQ ID NO: 133817 - DNA, 80 bp, synthetic construct
  source 1..80: mol_type = other DNA
tatgggccgggcgtcccgatgagtactgttgtttccgccgcccgaacccccccgcccatcaaccgcctgttcgtccacct

SEQ ID NO: 133818 - DNA, 80 bp, synthetic construct
  source 1..80: mol_type = other DNA
accgactgtactgtggcggccccatgttcaactcgaaagggcaagcgtgtgggactcgcaggtgcagggccagtggtgtc

SEQ ID NO: 133819 - DNA, 80 bp, synthetic construct
  source 1..80: mol_type = other DNA
atggacgggggcgcttgtcaccccctgtgcagctgaggaaactaagctgcccatcaaccctctgagcaactcactgctac

SEQ ID NO: 133820 - DNA, 80 bp, synthetic construct
  source 1..80: mol_type = other DNA
gcctccataggtatgcaccgccgtgtaagcctctgttgcgcgacgaagtaacgttccaggtggggctcaacaactaccca

SEQ ID NO: 133821 - DNA, 80 bp, synthetic construct
  source 1..80: mol_type = other DNA
cgggacgcgagcacccacgttaaccccgacggcgtggcgcaccacgacgacataaaccgcgccgccgccgcgttcctcag

SEQ ID NO: 133822 - DNA, 80 bp, synthetic construct
  source 1..80: mol_type = other DNA
ctcccgggcggtgaccaccatcttgagctccctaaccataaccagtcttctccgtaggctccacgaatggatcaacggtg

SEQ ID NO: 133823 - DNA, 80 bp, synthetic construct
  source 1..80: mol_type = other DNA
gggtcgcgggcgtgggtgcccccaggagatagcggaatgtccggtgtcggaggcccggaggcgtcagaaagtgccggcga

SEQ ID NO: 133824 - DNA, 80 bp, synthetic construct
  source 1..80: mol_type = other DNA
cgtgtcacgaggatcagcaaagctccgatggatagtggagaaagggtttgtctcaccagttggaaaggtcgtagatcttg

SEQ ID NO: 133825 - DNA, 80 bp, synthetic construct
  source 1..80: mol_type = other DNA
tggacttgaacatcgatttgaagcagcttgcaattggacccgtggtgagcgctgtgagctagaggatagggaccgtattg

SEQ ID NO: 133826 - DNA, 80 bp, synthetic construct
  source 1..80: mol_type = other DNA
gacgtccgtccccaggtcgtcgactctgtcgcgcgtgccgcgagctccggcccgggaatccggccggggcaaggtccccg

SEQ ID NO: 133827 - DNA, 80 bp, synthetic construct
  source 1..80: mol_type = other DNA
tcccctcgccggcgccccagaaattggcaaccgttcccagcatcgctacaacctccgctcctcaggcgccgccggcactg

SEQ ID NO: 133828 - DNA, 80 bp, synthetic construct
  source 1..80: mol_type = other DNA
ctctacaatccttttgtagagggaacctaccactgccagagcggaccttgcttccacactttcactttggtgaacgttac

SEQ ID NO: 133829 - DNA, 80 bp, synthetic construct
  source 1..80: mol_type = other DNA
gggggtccaggaggatgaagctagcctgagagccttcacggaggctatgaccaggtattcagctccccccggtgaccccc

SEQ ID NO: 133830 - DNA, 80 bp, synthetic construct
  source 1..80: mol_type = other DNA
ttcgatgagatggaggaatgtgcctccaaggctgctctcatcgaggaggggcaccggatggccgaaatgctgaagtccaa

SEQ ID NO: 133831 - DNA, 80 bp, synthetic construct
  source 1..80: mol_type = other DNA
ccggcagcggtaagagcaccaaggtgcccgcggcatacgcttcccagggctacaaggttctggtattgaacccatctgtg

SEQ ID NO: 133832 - DNA, 80 bp, synthetic construct
  source 1..80: mol_type = other DNA
agacctccccccccggggcccgaggacacctgcgcggaagaggaggagaaaaaggagagcggcccgtggcccgcgcggcg

SEQ ID NO: 133833 - DNA, 80 bp, synthetic construct
  source 1..80: mol_type = other DNA
gagtctatataccaagcttgcagcctagatcccgttgccagacaagccatcaagaacctcaccgagaggctatactgtgg

SEQ ID NO: 133834 - DNA, 80 bp, synthetic construct
  source 1..80: mol_type = other DNA
cttagtcggctggcctgcaccgccaggcgctaggtcgtacatggcctgcacgtgtggcgccagtgacctctaccttgtca

SEQ ID NO: 133835 - DNA, 80 bp, synthetic construct
  source 1..80: mol_type = other DNA
cgagcgtggagacatcgggcaagggccgtgcgcgctaagcttatagctcaagggggtaaggccgctatatgcggcttata

SEQ ID NO: 133836 - DNA, 80 bp, synthetic construct
  source 1..80: mol_type = other DNA
gactttgtgcccgtggagagcatggagactactctaagatcaccagtcttcactgacaactcgaccccgcccgctgtacc

SEQ ID NO: 133837 - DNA, 80 bp, synthetic construct
  source 1..80: mol_type = other DNA
tccgcaggagcctatgacgttataatatgtgatgaatgccatgtgacagattccactagcatccttgggataggaacagt

SEQ ID NO: 133838 - DNA, 80 bp, synthetic construct
  source 1..80: mol_type = other DNA
gctcctcatagctgcatatgtgctgagtgggagctcagctgacctatctctagagaaggccgctgatatcaaatgggatg

SEQ ID NO: 133839 - DNA, 80 bp, synthetic construct
  source 1..80: mol_type = other DNA
acagcaatgccgcactgggagccatgtttgaggagcagaaccagtggagcagtgcaagggaggcagttgaagatccaaag

SEQ ID NO: 133840 - DNA, 80 bp, synthetic construct
  source 1..80: mol_type = other DNA
aaagatgacgtacagcatgtggcccccgtaagtggggtccgggtaaaacaacagccgcgggtcgcacgccccgcctccgc

SEQ ID NO: 133841 - DNA, 80 bp, synthetic construct
  source 1..80: mol_type = other DNA
ttcaccactagtatgggcaacaccatgacgtgctacattaaggctttagcctcctgtagagctgcaaagctccgggactg

SEQ ID NO: 133842 - DNA, 80 bp, synthetic construct
  source 1..80: mol_type = other DNA
ccacctacacctggggggaaaacgagaccgatgtcttcctgctgaatagcacaagacccccgcgaggagcttggttcggc

SEQ ID NO: 133843 - DNA, 80 bp, synthetic construct
  source 1..80: mol_type = other DNA
tggaacttggtcaaactccattcaggggttgacgtgttctacaaacccactgagcaggtggacaccctgctctgtgatat

SEQ ID NO: 133844 - DNA, 80 bp, synthetic construct
  source 1..80: mol_type = other DNA
aagcggaggaggaggaggacagtctggaggacagtctggaggaagacagtttggaggaggaaaacgaggaggcagaggag

SEQ ID NO: 133845 - DNA, 80 bp, synthetic construct
  source 1..80: mol_type = other DNA
gccccacggcacagcgagcttggaatagcatggaagttgaagactttggctttggactgacaagcacgcgaatattttta

SEQ ID NO: 133846 - DNA, 80 bp, synthetic construct
  source 1..80: mol_type = other DNA
tgtgagggtagtcggccagcataaaagcttcaatttgcctaaaagctatttgagccttcattccttcagaataaaacaag

SEQ ID NO: 133847 - DNA, 80 bp, synthetic construct
  source 1..80: mol_type = other DNA
ccaccgaaccccacagtgagcaaatctcaaaaagccagccgtagatgggacaacactgaaacaagcaccgcagcctcaaa

SEQ ID NO: 133848 - DNA, 80 bp, synthetic construct
  source 1..80: mol_type = other DNA
gagggtagtcatgggcctgttggatggaagaggaccagtgcgattcgtgctggccttgatgacattcttcaagttcaccg

SEQ ID NO: 133849 - DNA, 80 bp, synthetic construct
  source 1..80: mol_type = other DNA
ctcgcgaaggaggcaggaccctggtgctgccaacagcgcgctaccaccccagcatcgtttaaaagccggtctttgtggtt

SEQ ID NO: 133850 - DNA, 80 bp, synthetic construct
  source 1..80: mol_type = other DNA
ctcttgccccacatacgggaatgggcttggagactagagcggaaacctggatgtcatcggaaggcgcatggaagcatgtg

SEQ ID NO: 133851 - DNA, 80 bp, synthetic construct
  source 1..80: mol_type = other DNA
atccctttttcgacccaagatgaaaaaggagtaacccagaatgggagactaataacagctaaccccatagtcactgacaa

SEQ ID NO: 133852 - DNA, 80 bp, synthetic construct
  source 1..80: mol_type = other DNA
tgcagctgtggagggcatggctcacgaggagggtttgcatttactcgctggcgcggcctttgaccatgccgcgactgcca

SEQ ID NO: 133853 - DNA, 80 bp, synthetic construct
  source 1..80: mol_type = other DNA
accccagacgttgtgttaaatgtatccaatgtagatacgcctgaatccagtcccactttttcacggaacatgaatgtagg

SEQ ID NO: 133854 - DNA, 80 bp, synthetic construct
  source 1..80: mol_type = other DNA
tgattacatttcatacgcgaataaacgacacaaaaaatttatatttaacggcttttaatttgaagacacctatcctctta

SEQ ID NO: 133855 - DNA, 80 bp, synthetic construct
  source 1..80: mol_type = other DNA
gagcatccataccgcacttggacataccacggaagctatgaagtgaaggctactggctcagccagctctctcgtcaacgg

SEQ ID NO: 133856 - DNA, 80 bp, synthetic construct
  source 1..80: mol_type = other DNA
cttccttgtgaccctgaacccgacgtagacgtgttgacatccatgctaacagacccatcccatattacggcggaggctgc

SEQ ID NO: 133857 - DNA, 80 bp, synthetic construct
  source 1..80: mol_type = other DNA
atgccaccacttgaggaggaaccgggagatccggaccttagctcgggatcctggtccacagtcagcgaggagggcgacag

SEQ ID NO: 133858 - DNA, 80 bp, synthetic construct
  source 1..80: mol_type = other DNA
gagcagcagctcgtcgggatgggtggcgtggggatggccgaacagaacccagtggtcaacctccatctccgtaatggcgc

SEQ ID NO: 133859 - DNA, 80 bp, synthetic construct
  source 1..80: mol_type = other DNA
ggtgtgcgcgatgtttggtcagcagctggcgtccgacgtccagcagtacctggagcgcctcgagaaacagaggcaactta

SEQ ID NO: 133860 - DNA, 80 bp, synthetic construct
  source 1..80: mol_type = other DNA
ccccagacctatcaggtcgggtacttgcatgctccaactggcagtggaaagagcaccaaggtccctgtcgcgtatgccgc

SEQ ID NO: 133861 - DNA, 80 bp, synthetic construct
  source 1..80: mol_type = other DNA
agcggcgagtgcccatccacggaagatatggtcaatctgctgcccgcgctgctgtcgccggtggctctcgtggtgtgggt

SEQ ID NO: 133862 - DNA, 80 bp, synthetic construct
  source 1..80: mol_type = other DNA
tgaggaagacgatactgagctctcggtaccggcggagtgtttcaagaaaccacctaagtatccaccggcccttcccatct

SEQ ID NO: 133863 - DNA, 80 bp, synthetic construct
  source 1..80: mol_type = other DNA
cattgcttagagcgaaaggggtggctttacacatttgccgacccaattggggcacaccggtgggcttgtacaggcagtcg

SEQ ID NO: 133864 - DNA, 80 bp, synthetic construct
  source 1..80: mol_type = other DNA
atggttggtgggcagggctatgtttctatactgcaaacgtggatgccacttgaactctggaataacaagcctaggaagcg

SEQ ID NO: 133865 - DNA, 80 bp, synthetic construct
  source 1..80: mol_type = other DNA
gtaggtggtcccatgttcaactctcggggccagtcctgcggttatcgccggtgtcgggcgagtggggttctccccaccag

SEQ ID NO: 133866 - DNA, 80 bp, synthetic construct
  source 1..80: mol_type = other DNA
ctgtaggcaaactctaccgaagtctccccctgagtctttacaaagctgtcgtcacgcaacactgcctcgaaggcccggaa

SEQ ID NO: 133867 - DNA, 80 bp, synthetic construct
  source 1..80: mol_type = other DNA
actacccaccaaaacagtgtggcatagtccccgcgaggtctgtgtgcggcccagtgtactgtttcacccccagcccagta

SEQ ID NO: 133868 - DNA, 80 bp, synthetic construct
  source 1..80: mol_type = other DNA
gcggggacgaagtctctcgacccttgcacgtgcggttcctccgacctgtacctggtgactcgtgaggctgatgtgctccc

SEQ ID NO: 133869 - DNA, 80 bp, synthetic construct
  source 1..80: mol_type = other DNA
tttttatagaattatgatattgtttcaatcaaataccactaacactatcaatgtgcagactactttaaatcatgacatgg

SEQ ID NO: 133870 - DNA, 80 bp, synthetic construct
  source 1..80: mol_type = other DNA
tgtcgtaacaactccgccccattgacgcaaatgggcggtaggcgtgtacggtgggaggtctatataagcagagctctctg

SEQ ID NO: 133871 - DNA, 80 bp, synthetic construct
  source 1..80: mol_type = other DNA
tactccaaagccaggaggcccttgagaaagcactggacttcgacatgtacggagtcacatactctatcactccgctggac

SEQ ID NO: 133872 - DNA, 80 bp, synthetic construct
  source 1..80: mol_type = other DNA
agagcgtgttcccaatctcggaccgctagggcgcgctcgtagggattgagtgggaagccccacggcatgggatgggtaag

SEQ ID NO: 133873 - DNA, 80 bp, synthetic construct
  source 1..80: mol_type = other DNA
ctgcaatgacagcctgcagaccggcttcctcgcgtctctgttctatgtcaggtccttcaactcctcagggtgcccccagc

SEQ ID NO: 133874 - DNA, 80 bp, synthetic construct
  source 1..80: mol_type = other DNA
tcggtttcggacaacttgccgcggcgccagtctgccagccgcgtgccgaacatgaggccccgggtcggagggcctccggc

SEQ ID NO: 133875 - DNA, 80 bp, synthetic construct
  source 1..80: mol_type = other DNA
gtgctctaccagcagtttgacgagatggaggagtgttctagacacattccttaccttgtcgaaggccagcatcttgcaga

SEQ ID NO: 133876 - DNA, 80 bp, synthetic construct
  source 1..80: mol_type = other DNA
gagaatcagtcccccggagctcgggtctgggttttattgggacctgccctcggaatcgcggctcccagtccaagcccccc

SEQ ID NO: 133877 - DNA, 80 bp, synthetic construct
  source 1..80: mol_type = other DNA
ggaaggggcgcagggtgcagcgcgtgttgcggcccggcacggcggtggtgttcacgcccggcgagcggtcctcggtcagg

SEQ ID NO: 133878 - DNA, 80 bp, synthetic construct
  source 1..80: mol_type = other DNA
cacccgccgtcgtcgctctgtccgccgccgctcaaggcgcacggcccccatctctgtgcgtcgcgtaacccgccgtggac

SEQ ID NO: 133879 - DNA, 80 bp, synthetic construct
  source 1..80: mol_type = other DNA
ctgccgtcccctcagctactggtcccagggcttcgggccgatcaccttcggcaagcctgatcacgagccggaggccgagg

SEQ ID NO: 133880 - DNA, 80 bp, synthetic construct
  source 1..80: mol_type = other DNA
gaatgtttgttttattgcttgggggtttacaagtacaacccacgctactcccacccactgtttgatcgctcgtataacag

SEQ ID NO: 133881 - DNA, 80 bp, synthetic construct
  source 1..80: mol_type = other DNA
gtcaatggtcacgctggctcccgcggtggagacgacttcaatagcacggcccgtaattcgatcgaccgggatatcatact

SEQ ID NO: 133882 - DNA, 80 bp, synthetic construct
  source 1..80: mol_type = other DNA
cgccccgcggggggcatgggttgtgcgggaaggacgaaataatccggggatccccaagagtaccaactgagggggggggg

SEQ ID NO: 133883 - DNA, 80 bp, synthetic construct
  source 1..80: mol_type = other DNA
tggaacaccacgatagctgtttccatggctaacatctttagagggagctatctagcaggagctgggcttgctttttctat

SEQ ID NO: 133884 - DNA, 80 bp, synthetic construct
  source 1..80: mol_type = other DNA
gcatccacgacgtccgcgccgagacccagccgcgacgctccgccccaatacggaggggagtcttttggtgttttttcgta

SEQ ID NO: 133885 - DNA, 80 bp, synthetic construct
  source 1..80: mol_type = other DNA
tgtcaccgttgaacaaaactcccttagaaccaaagttgcaggagctattggttatgattcatcaaacaacatggaaatta

SEQ ID NO: 133886 - DNA, 80 bp, synthetic construct
  source 1..80: mol_type = other DNA
gtgtccttcctcccgcccctcctcgcccctcccgcccctcccgcccctccacccccctcccgccactcccgctcctgccg

SEQ ID NO: 133887 - DNA, 80 bp, synthetic construct
  source 1..80: mol_type = other DNA
aggtagctatctgttttacggcggataaactgcgcctaaatagtgtgtatgttgccatgtcgcgtacggtctcctctagg

SEQ ID NO: 133888 - DNA, 80 bp, synthetic construct
  source 1..80: mol_type = other DNA
agttcaggcagaagatccttgggctattacaacataccgccaagcaggcagaagagctgaagccagcggcacatgccgcg

SEQ ID NO: 133889 - DNA, 80 bp, synthetic construct
  source 1..80: mol_type = other DNA
ctccggatcaccaacacgattcacggcaccgaggacatgacgcccccggccccaaaccgaaaccccgacttccccctcgc

SEQ ID NO: 133890 - DNA, 80 bp, synthetic construct
  source 1..80: mol_type = other DNA
tgcacttggatgagtccacggtctcgcacgccttggcacagcttgccgacaaggtatttgtggagagtagtagtgaccca

SEQ ID NO: 133891 - DNA, 80 bp, synthetic construct
  source 1..80: mol_type = other DNA
gcagctccacaacttctggcgtcactggcgacagcgcaaccgaaccctccccaccggagtctcgcattgatgacaccggg

SEQ ID NO: 133892 - DNA, 80 bp, synthetic construct
  source 1..80: mol_type = other DNA
aggcaccatctttcaaaaaacccgttcggagccaacctccgaaaactatcccgcccctgccaccgcaaccatgttcactg

SEQ ID NO: 133893 - DNA, 80 bp, synthetic construct
  source 1..80: mol_type = other DNA
cctggtttctgggacctcccaccccagagtaaaaagaacggagcctccgctaccaccctcccacgtggtggtagaaagac

SEQ ID NO: 133894 - DNA, 80 bp, synthetic construct
  source 1..80: mol_type = other DNA
cctcaccctcacctggcagaccgccatgggcgtctggcagcagtgcttggaagagagaaacctcaaagagctagacaaac

SEQ ID NO: 133895 - DNA, 80 bp, synthetic construct
  source 1..80: mol_type = other DNA
gctacgcgcatacctcaacaccccaggtctccccgtctgccaagaccatcttgagttctgggaaggcgtcttcactggac

SEQ ID NO: 133896 - DNA, 80 bp, synthetic construct
  source 1..80: mol_type = other DNA
cgaccccaccgtcaccgtcttccacgtgtacgacatcctggagcacgtggaacacgcgtacagcatgcgcgccgcccagc

SEQ ID NO: 133897 - DNA, 80 bp, synthetic construct
  source 1..80: mol_type = other DNA
tacatgtggcttggggcacggttccttgagtttgaagctcttgggtttttaaatgaagatcactgggcctcccgggagaa

SEQ ID NO: 133898 - DNA, 80 bp, synthetic construct
  source 1..80: mol_type = other DNA
gtacttgctccagtacagtttccttaagacaccatactttgtccgggcacacattctgctgcgcgcgtgcatgcttttcc

SEQ ID NO: 133899 - DNA, 80 bp, synthetic construct
  source 1..80: mol_type = other DNA
ccagtctgggcccggcctgactacaacccaccagtccttgagacctggaagaagccagactatgaaccaccaacagtcgc

SEQ ID NO: 133900 - DNA, 80 bp, synthetic construct
  source 1..80: mol_type = other DNA
cctgtatatttttagaatggaagacatcaattttgcgtccctggctccgcggcacggcacgcggccgttcatgggcacct

SEQ ID NO: 133901 - DNA, 80 bp, synthetic construct
  source 1..80: mol_type = other DNA
tggaagatgaacttccaaactattgcttcccattggatggcactggcaccaattctacataccaaggggttaaagaaaca

SEQ ID NO: 133902 - DNA, 80 bp, synthetic construct
  source 1..80: mol_type = other DNA
cgcatagcagaaatgctcaggtccaaaatttcaggcctgcttcagcaagctacaaagcaggctcaagacatacaacctgc

SEQ ID NO: 133903 - DNA, 80 bp, synthetic construct
  source 1..80: mol_type = other DNA
atgaaaatgcagtcccatttatgcctaatttaaaagcttatccaaaccctactacttctactactaatccatctacagac

SEQ ID NO: 133904 - DNA, 80 bp, synthetic construct
  source 1..80: mol_type = other DNA
gtcatgggggcctcgtatggcttccagtactctccagcagaaagggtagagttcttgttgaaggcgtggtggtcgaaaag

SEQ ID NO: 133905 - DNA, 80 bp, synthetic construct
  source 1..80: mol_type = other DNA
ggtccacggccactggccgggagcaccacataaccgaccgcagtccctgagttgggaataaaccggtattatttacctat

SEQ ID NO: 133906 - DNA, 80 bp, synthetic construct
  source 1..80: mol_type = other DNA
tgagtaagtttaatcagggttggggccctttgacatatgcatccaacaggaataccaccaagggcaggccctactgttgg

SEQ ID NO: 133907 - DNA, 80 bp, synthetic construct
  source 1..80: mol_type = other DNA
cgtcgacggtgcctccgttcgcttcgacagtgttaacctttacgccacctttttccccatggcgcacaacaccgcctcca

SEQ ID NO: 133908 - DNA, 80 bp, synthetic construct
  source 1..80: mol_type = other DNA
ggtacacacgggtgcgtctggtggtcgtagggtggttcctgtatctggcgttcgtcgccctccaccaacgccgatgtatg

SEQ ID NO: 133909 - DNA, 80 bp, synthetic construct
  source 1..80: mol_type = other DNA
gtgtggattcaagaaaacccgtggatggaagacaaaactccagtggaatcatgggaagaagtcccatacttgggaaaaag

SEQ ID NO: 133910 - DNA, 80 bp, synthetic construct
  source 1..80: mol_type = other DNA
gcccctttgggggcttgaagaggctgccagccggacttctgctgggtcatgggcccatcaggatggtcttggcaattcta

SEQ ID NO: 133911 - DNA, 80 bp, synthetic construct
  source 1..80: mol_type = other DNA
ctctcgctgagctagcgcgtaaggcgtttccggacaatccgccaagcatccaggcagagtccggagtggggacttccatc

SEQ ID NO: 133912 - DNA, 80 bp, synthetic construct
  source 1..80: mol_type = other DNA
cgtggattactgggaacaattgttaccagcctcaccggccgggataggaatgtggttgaaggagagatacaagtgctctc

SEQ ID NO: 133913 - DNA, 80 bp, synthetic construct
  source 1..80: mol_type = other DNA
actttgtgccagtcgagtccctcgaaaccaccatgagatcaccagttttcactgacaattcaacaccccctgcagtgccg

SEQ ID NO: 133914 - DNA, 80 bp, synthetic construct
  source 1..80: mol_type = other DNA
gggtacattccgctcgtcggcgcccccctaggtggcgcttccagaaccctgtcacatggtgtccgggtcctggtaggcgg

SEQ ID NO: 133915 - DNA, 80 bp, synthetic construct
  source 1..80: mol_type = other DNA
ggcgcttggcatgcgcgggctcgtcttggccaccaataactctcagtttatcatggataacaaccacccgcacccccagg

SEQ ID NO: 133916 - DNA, 80 bp, synthetic construct
  source 1..80: mol_type = other DNA
tctagcataagttcatcgggagggtctgcatccatggtaaagattcccggaagtaaatccttatcaaaatagctgatggg

SEQ ID NO: 133917 - DNA, 80 bp, synthetic construct
  source 1..80: mol_type = other DNA
cgcccaggccgcgtgcggcggcggcgacgacgacgataacccccacccccacggggccgccgggtgccgcctctttggcc

SEQ ID NO: 133918 - DNA, 80 bp, synthetic construct
  source 1..80: mol_type = other DNA
cactctcattgccatggacttgggtgaaatgtgtgaggacactgtcacgtacaaatgccccctactggtcaataccgaac

SEQ ID NO: 133919 - DNA, 80 bp, synthetic construct
  source 1..80: mol_type = other DNA
cgccaacaagagtggcccctcggaggacagaccatactgctggcactatgctccaagaccgtgcgatgttgtgccagcta

SEQ ID NO: 133920 - DNA, 80 bp, synthetic construct
  source 1..80: mol_type = other DNA
aaaccttctttgatctggtcacaggggcccactggggcgtgatggcaggcctcgcctatttctccatgcaaggtaattgg

SEQ ID NO: 133921 - DNA, 80 bp, synthetic construct
  source 1..80: mol_type = other DNA
ggccttagcgcgttctctctccacagctactctccaggtgaaatcaacagggtggccgcatgcctcaggaaacttggggt

SEQ ID NO: 133922 - DNA, 80 bp, synthetic construct
  source 1..80: mol_type = other DNA
atctttttaaaatttttatttcctctggggtcaggatcatatcccaggggactggaaactcttggagcagggtaaagcca

SEQ ID NO: 133923 - DNA, 80 bp, synthetic construct
  source 1..80: mol_type = other DNA
atcagcgccttgcgactaatggttactgaagtgcctcaaagtgaagtgtatcagtctggacccgattacttttttcaaac

SEQ ID NO: 133924 - DNA, 80 bp, synthetic construct
  source 1..80: mol_type = other DNA
tctgaaggcgcctggaaacaaatacaaaaagtggaaacttgggctttgagacacccaggattcacggtgatagctctttt

SEQ ID NO: 133925 - DNA, 80 bp, synthetic construct
  source 1..80: mol_type = other DNA
ggccagcctgatgaatcgcaagcgcccagagcgcattacctggcacgagctacagattgagtgcagggatgaggtgggcc

SEQ ID NO: 133926 - DNA, 80 bp, synthetic construct
  source 1..80: mol_type = other DNA
aggtgccgcgccagcggcgtactgacaactagctgtggtaataccctcacttgttacatcaaggcccaagcagcctgtcg

SEQ ID NO: 133927 - DNA, 80 bp, synthetic construct
  source 1..80: mol_type = other DNA
gaagaaaaatacgtcgactacatgagttcgctcaagaggtatgaagacgtcacggtgatggaagattccgtgctgtgaat

SEQ ID NO: 133928 - DNA, 80 bp, synthetic construct
  source 1..80: mol_type = other DNA
attataacaaaagaaacatcaacactgcctggcttggttaatactcttgtagtattaactggaaagggtattggaacaga

SEQ ID NO: 133929 - DNA, 80 bp, synthetic construct
  source 1..80: mol_type = other DNA
cgccccccatggcgaggcgtggcgcggcagtgagcagcccgacccacccggaggccagcggacacggggcgtgcgccaag

SEQ ID NO: 133930 - DNA, 80 bp, synthetic construct
  source 1..80: mol_type = other DNA
gatactctgtcctagtgctgaatccatcggtagcggctaccctgggcttcggcatgtacatgtcgaaggcctatgggatt

SEQ ID NO: 133931 - DNA, 80 bp, synthetic construct
  source 1..80: mol_type = other DNA
cgtctctgctacgggtaccatatttcgtgagggctcacgccctattacgaatgtgcaccctggtgagacaccttgcagga

SEQ ID NO: 133932 - DNA, 80 bp, synthetic construct
  source 1..80: mol_type = other DNA
tgccctcctccggacgaggacaccgcctccgacgctgggtcatgtagttctatgccacctcttgagggcgagccaggcga

SEQ ID NO: 133933 - DNA, 80 bp, synthetic construct
  source 1..80: mol_type = other DNA
ccaggagtttgatgagatggaggagtgtgcagcacacctgccctatgtcgagcaggggatgcagttggctgagcaattca

SEQ ID NO: 133934 - DNA, 80 bp, synthetic construct
  source 1..80: mol_type = other DNA
catggccaatgccatctgttctgcagttcccatgaattgggtacccacagggaggacaacatggtccatccatgcaaaag

SEQ ID NO: 133935 - DNA, 80 bp, synthetic construct
  source 1..80: mol_type = other DNA
atccctggagccgtgtacgtgtggggcaagtgacttatacctagtcacgcggaacgccgatgtcatcccggcccgaaggc

SEQ ID NO: 133936 - DNA, 80 bp, synthetic construct
  source 1..80: mol_type = other DNA
gaacgcaccatcgcggacttccccctgaccacccgcagcgccgactttcgagacgggcgcatgtccaagaccttcatgac

SEQ ID NO: 133937 - DNA, 80 bp, synthetic construct
  source 1..80: mol_type = other DNA
ccaggttggactcaactcttacctggtggggtctcagttgccctgtgagccagagcccgacgtggcagtgttgacatcaa

SEQ ID NO: 133938 - DNA, 80 bp, synthetic construct
  source 1..80: mol_type = other DNA
atctctgtgcgtcgcgtaacccgccgtggacgcacgctgacccttcccaacgcgcgttaccaccctagcattctcgttta

SEQ ID NO: 133939 - DNA, 80 bp, synthetic construct
  source 1..80: mol_type = other DNA
tggccagcacccccaggagtcaagtcccttgcgccctgcacttgcggcgcgtcggacctattcctggttactaggcaggc

SEQ ID NO: 133940 - DNA, 80 bp, synthetic construct
  source 1..80: mol_type = other DNA
taaaggattggttggccttgccaaaccccggttgtgatgtgtccaccgatccacttccttccagaatgtgattgcccgtt

SEQ ID NO: 133941 - DNA, 80 bp, synthetic construct
  source 1..80: mol_type = other DNA
tggcatggacggggtggttattatgaatgtgaggtttactggtcccaattttagcggtacggttttcctggccaatacca

SEQ ID NO: 133942 - DNA, 80 bp, synthetic construct
  source 1..80: mol_type = other DNA
gggcaaataacatggagagatatggcgcacacactaataatgattgggtccaatgcaactgacaggatgggaatgggcgt

SEQ ID NO: 133943 - DNA, 80 bp, synthetic construct
  source 1..80: mol_type = other DNA
gatgctcatcatactgggccaagccgaagcggcgcttgagaagctcatcatcttgcactccgctagtgctgctagtgcca

SEQ ID NO: 133944 - DNA, 80 bp, synthetic construct
  source 1..80: mol_type = other DNA
agcaattactaacaagggactgcaaataggagtagataccacagatggtaaacaagacccaatatatgcaaatcagctgt

SEQ ID NO: 133945 - DNA, 80 bp, synthetic construct
  source 1..80: mol_type = other DNA
tcaccccggggccgagacagcagctgcagcttgtcaacagcaacggcagttggcacatcaaccgcactgccttgaactgc

SEQ ID NO: 133946 - DNA, 80 bp, synthetic construct
  source 1..80: mol_type = other DNA
aaggtgagcttcccttctatggtaaggctataccgatagctcagctcaagggggggaggcacctcatcttttgccattct

SEQ ID NO: 133947 - DNA, 80 bp, synthetic construct
  source 1..80: mol_type = other DNA
gcgatcgcgcattgacaccatcgtggtgtccgcgactttttgttctgccctatacataggggatgtgtgtggcgcgataa

SEQ ID NO: 133948 - DNA, 80 bp, synthetic construct
  source 1..80: mol_type = other DNA
tacaggttgggggcggtacagaatgaagtgacactcacccatcctgtgaccaaatacatcatggccgacatgtcagccca

SEQ ID NO: 133949 - DNA, 80 bp, synthetic construct
  source 1..80: mol_type = other DNA
cgagatactcggctcccccaggtgacgctccgcagccagcatatgacctggaactaataacatcatgttcatccaacgtc

SEQ ID NO: 133950 - DNA, 80 bp, synthetic construct
  source 1..80: mol_type = other DNA
gcataggctatacgcgatggtcgtctgtggattggacatctcgcggtgggtagtgagtcccccgggccgggttcggtgga

SEQ ID NO: 133951 - DNA, 80 bp, synthetic construct
  source 1..80: mol_type = other DNA
atttctgggaacggggccgaggtggagatagatacggaggatagggtggcctttagatgtagcatgataaatatgtggcc

SEQ ID NO: 133952 - DNA, 80 bp, synthetic construct
  source 1..80: mol_type = other DNA
accctgacctaagctcaggctcttggtctactgtgagcgatgaggacgatgtcgtgtgttgttccatgtcctattcctgg

SEQ ID NO: 133953 - DNA, 80 bp, synthetic construct
  source 1..80: mol_type = other DNA
ccgcgcacagcatggtggccccggcgacctatcttttgaactacgccggccgcatagtgtcgagcgtgttcttgcaatac

SEQ ID NO: 133954 - DNA, 80 bp, synthetic construct
  source 1..80: mol_type = other DNA
taacctggatcccgcggtcatggcagccatgcaaagccagccttctggggttacagcttcagatgactggacagcggcca

SEQ ID NO: 133955 - DNA, 80 bp, synthetic construct
  source 1..80: mol_type = other DNA
ctccctcacttgccctaccgactgcttccgcaaacatccagaagcgacttatctcaagtgtggttctgggccctggctta

SEQ ID NO: 133956 - DNA, 80 bp, synthetic construct
  source 1..80: mol_type = other DNA
ggtgtacctgagacgcgagtaagccctcgagtcaaatacgtagtcgttgcaagtccgcaccaggtactggtatcccacca

SEQ ID NO: 133957 - DNA, 80 bp, synthetic construct
  source 1..80: mol_type = other DNA
cgaagcagccttggagaagttggtcattctgcacgcggccggcgctgccagctctaatggcctcctgtatttcatcctct

SEQ ID NO: 133958 - DNA, 80 bp, synthetic construct
  source 1..80: mol_type = other DNA
gaagaagctgtgctgcctgtgagccccgtccaaggacgttaaaagaagaagtcaggccccaaagccacggtttgagcaaa

SEQ ID NO: 133959 - DNA, 80 bp, synthetic construct
  source 1..80: mol_type = other DNA
ttcaagcagaagattttgggtcttctgcagagcacggctaagcaggctgaagagctaaaacccgcagtccagtctgcttg

SEQ ID NO: 133960 - DNA, 80 bp, synthetic construct
  source 1..80: mol_type = other DNA
cacaacctcactggatgctccgaccgcttgagcgcttgcaggccactctcttacttcgaccaagggtggggccctctttc

SEQ ID NO: 133961 - DNA, 80 bp, synthetic construct
  source 1..80: mol_type = other DNA
ccgcgccagtggggtgctgcccaccagcatgggaaacaccctcacatgctatctgaaggcacaggccgcctgcagtgcgg

SEQ ID NO: 133962 - DNA, 80 bp, synthetic construct
  source 1..80: mol_type = other DNA
aaaggacagcggccggaataatgaaaaatccaaccgtagacgggattgttgcaatagacttagatcctgtggtttatgat

SEQ ID NO: 133963 - DNA, 80 bp, synthetic construct
  source 1..80: mol_type = other DNA
atttacagtggccatattaccggccaccggatggcatgggacatgatgatgaaatggtcccctacgacggccctgctgat

SEQ ID NO: 133964 - DNA, 80 bp, synthetic construct
  source 1..80: mol_type = other DNA
agaccaaggagtgtccaacagcaaacagagcatggaacagtttcaaagtggaagactttggatttggcatggtgttcact

SEQ ID NO: 133965 - DNA, 80 bp, synthetic construct
  source 1..80: mol_type = other DNA
cacgccacctactttctggccgccgtgctcctcggggaccacgcggagcaggtcaacacgttcctgcgtctcgtgtttga

SEQ ID NO: 133966 - DNA, 80 bp, synthetic construct
  source 1..80: mol_type = other DNA
ttacccgtggggccaggcagaacatccagctcatcaacaccaatggcagctggcacataaaccgtactgccctcaactgc

SEQ ID NO: 133967 - DNA, 80 bp, synthetic construct
  source 1..80: mol_type = other DNA
ctattggatcgtcggtggataccgctgcagctgctgccgcgtctgctgctgcctctactgctcgtggcatggcagcagat

SEQ ID NO: 133968 - DNA, 80 bp, synthetic construct
  source 1..80: mol_type = other DNA
gcccagggcatcggtaaacatctgttcaaactcaaaatcgaccacatccaaagccccatacgagacggggtcgtgggtca

SEQ ID NO: 133969 - DNA, 80 bp, synthetic construct
  source 1..80: mol_type = other DNA
gcggctttgccgacctcatggggtacatccctgtcgtcggtgcccccctaggtggcgtcgctgcagcgctggcgcatggc

SEQ ID NO: 133970 - DNA, 80 bp, synthetic construct
  source 1..80: mol_type = other DNA
cacgcagggccacgggggcgggcccgacgaccgcctcgaacagcaggcgtgagagggggcggttgaaaaatggaatgggg

SEQ ID NO: 133971 - DNA, 80 bp, synthetic construct
  source 1..80: mol_type = other DNA
gttatcatgtctctctgtcacgtggactcttgtcaagaacttggagaaacctggattgaaacgtggaggtgccaagggac

SEQ ID NO: 133972 - DNA, 80 bp, synthetic construct
  source 1..80: mol_type = other DNA
ttacagtctggtggaatgagaagaacgcacagattcatactcggaaaacaggatgggtctgtgcctctccatcagcgccc

SEQ ID NO: 133973 - DNA, 80 bp, synthetic construct
  source 1..80: mol_type = other DNA
gccgtaggtagcgtggtcatagtaggcaggattgtcctgtccggcaagccagccatcatacctgacagacaagtactcta

SEQ ID NO: 133974 - DNA, 80 bp, synthetic construct
  source 1..80: mol_type = other DNA
acatgtgactgctgaggccgcggcacgccgcttgaaacgcgggtcccctccctcactcgcgagttcgtccgcgagccaac

SEQ ID NO: 133975 - DNA, 80 bp, synthetic construct
  source 1..80: mol_type = other DNA
tcctgtgggacgacgtggacagcgcggtgttctcgccggcctttcaaaagcgccaggaggcgccgccgagcgagggcgcg

SEQ ID NO: 133976 - DNA, 80 bp, synthetic construct
  source 1..80: mol_type = other DNA
acgcatctaacatctccggcccgtccgacgacaaaccctactgctggcactatccgccgcgcccatgcgggatcgtaccg

SEQ ID NO: 133977 - DNA, 80 bp, synthetic construct
  source 1..80: mol_type = other DNA
ctcctttgcgcccagacgtagaatacagtggaaagggcggtcagtaaagcgagttttgcgacccggcactacaatagttt

SEQ ID NO: 133978 - DNA, 80 bp, synthetic construct
  source 1..80: mol_type = other DNA
cacctccgaatgccccaatgaacgaagagcatggaacttttttgaggtagaagactatggatttggtatgtttacgacca

SEQ ID NO: 133979 - DNA, 80 bp, synthetic construct
  source 1..80: mol_type = other DNA
ggttggcatagcgtactttagtatgcaagctaactgggccaaggtcatcctggtcctgttcctctttgctggagtcgacg

SEQ ID NO: 133980 - DNA, 80 bp, synthetic construct
  source 1..80: mol_type = other DNA
ggtgttgcggagcgccaccacgacgggcgcgccgaggagcaccgcggccagaaccaggtccatggccgtaacgcgcgcgg

SEQ ID NO: 133981 - DNA, 80 bp, synthetic construct
  source 1..80: mol_type = other DNA
ttgtaaattacacatttcaaggagattatcatggattccagaaagacaacatgggaaagactagttacaaggttactgtt

SEQ ID NO: 133982 - DNA, 80 bp, synthetic construct
  source 1..80: mol_type = other DNA
atgttagttatccgtttgatgctcaaaaccaactaaatctaagactaggacagggccctctttttataaactcagcccac

SEQ ID NO: 133983 - DNA, 80 bp, synthetic construct
  source 1..80: mol_type = other DNA
cgctgcattatacagcaaagacttccgcgccttctcgtactttaaataacaaaaccacgtacggccgctgcaagcagcgc

SEQ ID NO: 133984 - DNA, 80 bp, synthetic construct
  source 1..80: mol_type = other DNA
gagcccgctggggcggctgggcttccgacgccccccgtggaccccacgacacccaccccaacgcctcccctgttggtata

SEQ ID NO: 133985 - DNA, 80 bp, synthetic construct
  source 1..80: mol_type = other DNA
ttccaacgtccccttatatctgccatagattggaacgtcaacctttgcgcgtttgccatgacttccacactcttcaatac

SEQ ID NO: 133986 - DNA, 80 bp, synthetic construct
  source 1..80: mol_type = other DNA
agtggaagacgaaaggttttgggatctcgtgcacagagagagggagcttcataaacagggaaaatgtgccacgtgtgtct

SEQ ID NO: 133987 - DNA, 80 bp, synthetic construct
  source 1..80: mol_type = other DNA
tatctccagtctgctgacccccaacactcgcctgctgctgctcttgatcgcgccgttcaccaacagtagcactatcagcc

SEQ ID NO: 133988 - DNA, 80 bp, synthetic construct
  source 1..80: mol_type = other DNA
gataaggcaaatcgttacagaataaaagtaaatactacaaatcacaaaactgttaaaattaagccacataccaaaaaacc

SEQ ID NO: 133989 - DNA, 80 bp, synthetic construct
  source 1..80: mol_type = other DNA
gtcgacccgaacatcaggacaggcgttaggaccatcactacggggggccccattacatattccacctatggcaaatttct

SEQ ID NO: 133990 - DNA, 80 bp, synthetic construct
  source 1..80: mol_type = other DNA
tgcacgtgcggtgccgtggacctatatttggtcacgaggcacgcagatgtcatcccagtgcgccggcgaggagacagcag

SEQ ID NO: 133991 - DNA, 80 bp, synthetic construct
  source 1..80: mol_type = other DNA
cgaggaagatgacagcgtcgtgtgctgttccatgtcatactcctggacgggggctttgattacaccatgcgctgccgaag

SEQ ID NO: 133992 - DNA, 80 bp, synthetic construct
  source 1..80: mol_type = other DNA
tgctgcgcatggtacgtgaaaggccgtgcggtgccggcgttcacctatggcatcctccagttgtggcctctactcctact

SEQ ID NO: 133993 - DNA, 80 bp, synthetic construct
  source 1..80: mol_type = other DNA
ccccgcgaggcgtaagggcgacactcgtgccagtctcctcagtcctagaccactgagcacgctcaagggatcatctggag

SEQ ID NO: 133994 - DNA, 80 bp, synthetic construct
  source 1..80: mol_type = other DNA
ggagcggaatataaagactgtcaatcaaactatttacagcaaggaatcgatcagctgcaaactgttatagatacaattaa

SEQ ID NO: 133995 - DNA, 80 bp, synthetic construct
  source 1..80: mol_type = other DNA
ctggacaggggcactcataacccccagtagtccagaggaggaaaaactgcctatcaaccctctaagcaactcactgttgc

SEQ ID NO: 133996 - DNA, 80 bp, synthetic construct
  source 1..80: mol_type = other DNA
agacaccgggcccgaagcgtccgcgccaaactcctgtcccagggagggaaagctgctatatgcggcaagtaccttttcaa

SEQ ID NO: 133997 - DNA, 80 bp, synthetic construct
  source 1..80: mol_type = other DNA
acaggttaaagaggatggcaatcagtggagacgattgtgtggtgaagcctctggatgagaggttcagcacttccctcctc

SEQ ID NO: 133998 - DNA, 80 bp, synthetic construct
  source 1..80: mol_type = other DNA
gggtggacgtggtattggagcatggaagctgcgtcaccaccatggcaaaaaataaaccaacattggacattgaactcttg

SEQ ID NO: 133999 - DNA, 80 bp, synthetic construct
  source 1..80: mol_type = other DNA
acgggtactgtcccagttgggcctggacgtgattcccgcgaaacccaaattcatgaaagatggtgttgatgggtcggctg

SEQ ID NO: 134000 - DNA, 80 bp, synthetic construct
  source 1..80: mol_type = other DNA
tccacagaggaggcctgtgacctgacccccccccactctgccaaatccaagtttggctatggggcaaaggacgtgcgtag

SEQ ID NO: 134001 - DNA, 80 bp, synthetic construct
  source 1..80: mol_type = other DNA
gagcgtggccgggcagagtcagtatgacctggctttggaagagggcgagaggctggcgcgcctggggtcgtcgtcgccgg

SEQ ID NO: 134002 - DNA, 80 bp, synthetic construct
  source 1..80: mol_type = other DNA
tggataaacgacgactacgcaaccccctgcgcaggggagtggttgtgcgacgtttggtcctggatttgcactgtgctttc

SEQ ID NO: 134003 - DNA, 80 bp, synthetic construct
  source 1..80: mol_type = other DNA
gagatggaagatgcaactcctccgcccaggggcgagaagcggccgcggcctgacgcggaggagacaaccctgcaggtaga

SEQ ID NO: 134004 - DNA, 80 bp, synthetic construct
  source 1..80: mol_type = other DNA
ctaccatggacatcaggactccttgtgacattcaaaaatgcacatgcgaaaaaacaagaagtagttgtccttggatcgca

SEQ ID NO: 134005 - DNA, 80 bp, synthetic construct
  source 1..80: mol_type = other DNA
tctcaagtgggagtatgttgtgctagcgttcctgctcttggcagacgccagggtctgcgcgtgtctttggatgatgcttt

SEQ ID NO: 134006 - DNA, 80 bp, synthetic construct
  source 1..80: mol_type = other DNA
gtttcagacaacgtgagtggcgctttgtttgtatttccctggtgggaaagttttgaagcgttaacgtgttgaggaaaaga

SEQ ID NO: 134007 - DNA, 80 bp, synthetic construct
  source 1..80: mol_type = other DNA
tatctggaacaaacgaaaactgacatttcaggactctttagacgtgaggaccagggagggatggtttgggacgcatggac

SEQ ID NO: 134008 - DNA, 80 bp, synthetic construct
  source 1..80: mol_type = other DNA
atgaactccacggggttcgtcaaaacctgcggtgctcccccctgcaaaacccggccggacaccaagaacaataatacctt

SEQ ID NO: 134009 - DNA, 80 bp, synthetic construct
  source 1..80: mol_type = other DNA
gggtaatgaggtgttgctcggccctgctgacgtagagggcgcgaaggggtggagactcctcgctcccatcaccgcatatg

SEQ ID NO: 134010 - DNA, 80 bp, synthetic construct
  source 1..80: mol_type = other DNA
cagacataccaggtcgggtacctccacgctcctacgggcagcgggaagagcacgaaagttcctgtggcttatgcctctca

SEQ ID NO: 134011 - DNA, 80 bp, synthetic construct
  source 1..80: mol_type = other DNA
cactcttgtcttgcatgtctgtgccagtgtccgctgtggaggttaagaacaccacgcaaacctacatggctaccaatgac

SEQ ID NO: 134012 - DNA, 80 bp, synthetic construct
  source 1..80: mol_type = other DNA
cacagatgggaagaccgtcatggatgtgatttcccgagaagatcagagaggaagtggacaggttgtgacctatgctctca

SEQ ID NO: 134013 - DNA, 80 bp, synthetic construct
  source 1..80: mol_type = other DNA
cttgcttccgggttgggccacgcctttgcggcagccgccggccgtaagggttgacgtcaactgcattaccgcttgttaac

SEQ ID NO: 134014 - DNA, 80 bp, synthetic construct
  source 1..80: mol_type = other DNA
tgaggctcctctcaaaaccatgggacatgatcacaaacgtgaccactatggcaatgactgacaccacgccttttggtcaa

SEQ ID NO: 134015 - DNA, 80 bp, synthetic construct
  source 1..80: mol_type = other DNA
gatgcttggtagactacccatacaggctgtggcactatccatgcacagtcaactatacaaaacacaaggttcgcatgttc

SEQ ID NO: 134016 - DNA, 80 bp, synthetic construct
  source 1..80: mol_type = other DNA
aggtccctgcatgcccgcccctgcgcacgactataagcgcgcgttgtggcgggtgtctgctgaggaatatgtcgaagtta

SEQ ID NO: 134017 - DNA, 80 bp, synthetic construct
  source 1..80: mol_type = other DNA
tggaacagtttggaagtggaagacttcggatttggacttacgagcacacgaatgttcctgcgggtgagagaaagcaacac

SEQ ID NO: 134018 - DNA, 80 bp, synthetic construct
  source 1..80: mol_type = other DNA
ggacactctgctctgtgatattggggagtcatcttctaatccaacaatagaggaaggaagaacattgagagttttgaaga

SEQ ID NO: 134019 - DNA, 80 bp, synthetic construct
  source 1..80: mol_type = other DNA
ggccctgctgaggtggctacgcagtggatgaataggctcatcgcttttgcctcacggggcaaccacgtatccccaacgca

SEQ ID NO: 134020 - DNA, 80 bp, synthetic construct
  source 1..80: mol_type = other DNA
cggacacaattgtaagtcctgtgagcaccaccggaatagtactggaaatactgacttaatgtgctctttgtgctatctgc

SEQ ID NO: 134021 - DNA, 80 bp, synthetic construct
  source 1..80: mol_type = other DNA
cgcgccgaccctccgtgcagtccaggagacgggcgcaatccttccagttcatcagcgcggtggtgagcgacggctgcgtg

SEQ ID NO: 134022 - DNA, 80 bp, synthetic construct
  source 1..80: mol_type = other DNA
gaaccaaagacgagggccgacccgggacgtggccgagatcgtactggacctcgttggccaagtgcgcgttcatggttcgg

SEQ ID NO: 134023 - DNA, 80 bp, synthetic construct
  source 1..80: mol_type = other DNA
ctcggcgtacccacatacaactggggagagaatgagaccgatgtactcatcttgaactccaccaggccccctggtggtgg

SEQ ID NO: 134024 - DNA, 80 bp, synthetic construct
  source 1..80: mol_type = other DNA
tgcccaagctctgtctgacctggccgagaaaacctttagccggggaccgccgacatctgactccggaacggggctcaccg

SEQ ID NO: 134025 - DNA, 80 bp, synthetic construct
  source 1..80: mol_type = other DNA
cttggccgaacttgccaccaaaagtttggcagctcctcaactccggtattacgggcgacaacacgacggcatcctctgag

SEQ ID NO: 134026 - DNA, 80 bp, synthetic construct
  source 1..80: mol_type = other DNA
aggacacccaggtccatgccaggaacaagaagggttatggagatcacagcggagtggctctggagaaccctgggaaggaa

SEQ ID NO: 134027 - DNA, 80 bp, synthetic construct
  source 1..80: mol_type = other DNA
tgttgtcacctcctgggtcatcaaatgggagtacgtcgtgctcctattcctcttactggcggacgcgcgcgtttgcgcct

SEQ ID NO: 134028 - DNA, 80 bp, synthetic construct
  source 1..80: mol_type = other DNA
catccccccgtcagcctgcctctccccccaggcctaccagcaggtggtgacggtggacagcatcgggatgctgccccgct

SEQ ID NO: 134029 - DNA, 80 bp, synthetic construct
  source 1..80: mol_type = other DNA
cccgccaagggcgggaagaaggcagctcgcctcatcgtataccctgatctcggcgtcagggtctgcgaaaagatggccct

SEQ ID NO: 134030 - DNA, 80 bp, synthetic construct
  source 1..80: mol_type = other DNA
ctggcccttcttgctggccaagctgacggacatttacaaggtccccctggacgggtacggccgcatgaacggccggggcg

SEQ ID NO: 134031 - DNA, 80 bp, synthetic construct
  source 1..80: mol_type = other DNA
gtcctgggctcagcccgggcatccttggcctctgtatggcaatgagggttgcggatgggcaggctggctcctgtcccctc

SEQ ID NO: 134032 - DNA, 80 bp, synthetic construct
  source 1..80: mol_type = other DNA
ggtgttagggtcctggaggacgggataaattacgcaacagggaatttacccggttgctctttttctatctttttgcttgc

SEQ ID NO: 134033 - DNA, 80 bp, synthetic construct
  source 1..80: mol_type = other DNA
gtccgtcgtccacagcatccaggacgcccaccggtacagcacggagacgtaggccaggagctcgttgagccgcagtgcgg

SEQ ID NO: 134034 - DNA, 80 bp, synthetic construct
  source 1..80: mol_type = other DNA
atgacgcgcaagggaagaggtactattacctcacccgtgaccctgagattcccctggccagagccgcctgggagacagct

SEQ ID NO: 134035 - DNA, 80 bp, synthetic construct
  source 1..80: mol_type = other DNA
tgaagatcactggttcagcagagagaattcatacagtggtgtggaaggagaaggcctccatcggttagggtatgtgttgg

SEQ ID NO: 134036 - DNA, 80 bp, synthetic construct
  source 1..80: mol_type = other DNA
tgctcgccaccgccacccctccaggctccattactgtgccccaccccaacatcgaggaggttgctctgtccaccaccgga

SEQ ID NO: 134037 - DNA, 80 bp, synthetic construct
  source 1..80: mol_type = other DNA
ggcggatgcgtgagcactttgtgggcaaaacatgggaagcgttggacaccatgtatgtggtggccacagcggagaaaggg

SEQ ID NO: 134038 - DNA, 80 bp, synthetic construct
  source 1..80: mol_type = other DNA
tacgcctacattaactcgggtcagctggaggcggacgatgcctgcgccaacctctatcacaccaacacggtcgcgtacgt

SEQ ID NO: 134039 - DNA, 80 bp, synthetic construct
  source 1..80: mol_type = other DNA
gaagcaattaacaaaaacggcctgcagatagggactaacggtgccgctactgaaggaaataaggaaatttacgcagataa

SEQ ID NO: 134040 - DNA, 80 bp, synthetic construct
  source 1..80: mol_type = other DNA
acgtggatatgatggtgggagcggccaccctatgctcagctctctacgtaggagatctttgtggagcgctatttcttgtt

SEQ ID NO: 134041 - DNA, 80 bp, synthetic construct
  source 1..80: mol_type = other DNA
cgccccgaatacgacctagagctaataacatcttgctcgtccaacgtctccgtggcccatgacaacaacggacagagata

SEQ ID NO: 134042 - DNA, 80 bp, synthetic construct
  source 1..80: mol_type = other DNA
gcgggggggatgtatatcacagcgcatcccgagcccgaccccgctacttgctgctatgcctactcctactctcagtggtg

SEQ ID NO: 134043 - DNA, 80 bp, synthetic construct
  source 1..80: mol_type = other DNA
ggagcatagtggaaacgagatagtggatgttatgtgccatgcgactttgacgcacagactgatgtctccccacagagttc

SEQ ID NO: 134044 - DNA, 80 bp, synthetic construct
  source 1..80: mol_type = other DNA
cgacgggggctgctctggaggcgcctatgatgtgatcatctgtgatgaatgtcatgcgcaggacgccacctccatattgg

SEQ ID NO: 134045 - DNA, 80 bp, synthetic construct
  source 1..80: mol_type = other DNA
gatgaaccgcctgatagcctttgcatctcggggcaaccacgtatcgcccacccactatgtgcccgagacggatgcatctc

SEQ ID NO: 134046 - DNA, 80 bp, synthetic construct
  source 1..80: mol_type = other DNA
tggaagacgccgaggcactgttcaataaatactgctcggtgtctcttaaggactgaaaagcccgcgcttttttaagaacc

SEQ ID NO: 134047 - DNA, 80 bp, synthetic construct
  source 1..80: mol_type = other DNA
gttagttcggaactgctactaggtcaacaagcagcgcctaacagacccaattacattggcttcagagataacttcatagg

SEQ ID NO: 134048 - DNA, 80 bp, synthetic construct
  source 1..80: mol_type = other DNA
agacgaccgagggtcagcccccctccgtggagggatcggcacccccggcctcggattccaactcgtggtccacgtgctcc

SEQ ID NO: 134049 - DNA, 80 bp, synthetic construct
  source 1..80: mol_type = other DNA
tcttgacagacttcaaaaattggctgacctctaaattgttccccaagctgcccggcctccccttcatctcttgtcaaaag

SEQ ID NO: 134050 - DNA, 80 bp, synthetic construct
  source 1..80: mol_type = other DNA
ggagagccaggccgccaggtcctcgggggcgtccagcgtctggccccgctgtatcagatcccgcaacaggatggccgtgg

SEQ ID NO: 134051 - DNA, 80 bp, synthetic construct
  source 1..80: mol_type = other DNA
tgtcagtgggcagcgtggtaatcgtcgggagggtcgttgtatcaggccaacctgctgtcatccccgatcgggaggtgctg

SEQ ID NO: 134052 - DNA, 80 bp, synthetic construct
  source 1..80: mol_type = other DNA
tcttactcatgtgtgttgtgcacccggctctggtatttgacatcaccaagctactgctggctgccttcgggcccctttgg

SEQ ID NO: 134053 - DNA, 80 bp, synthetic construct
  source 1..80: mol_type = other DNA
tggcccttgcaccccgcaaccctcgtctaactacacgagggcgctgtggagggtctcagccagtgagtacgtcgaggtcc

SEQ ID NO: 134054 - DNA, 80 bp, synthetic construct
  source 1..80: mol_type = other DNA
gggccagtagatactccagttaattggcatggaccaaaacatgaactgtgtagaggaaatcaaaaaatacatccagaagt

SEQ ID NO: 134055 - DNA, 80 bp, synthetic construct
  source 1..80: mol_type = other DNA
aggagatgtcgtggtgtgtgccactgacgctctcataactgggtacacgggggacttcgactctgtgatagactgcaacg

SEQ ID NO: 134056 - DNA, 80 bp, synthetic construct
  source 1..80: mol_type = other DNA
acctatatgaccacctagcgccaatgcaacattgggccgcagctggcctcaaagacctagcagtggccactgaacctgta

SEQ ID NO: 134057 - DNA, 80 bp, synthetic construct
  source 1..80: mol_type = other DNA
agtgtaccactccatgctccggttcctggctaagggacatctgggactggatatgcgaggtgctgagcgactttaagacc

SEQ ID NO: 134058 - DNA, 80 bp, synthetic construct
  source 1..80: mol_type = other DNA
cgggtcacgggtacgcccaggctcggggcgacgtacacgctaaccaccaactccagcagcgtctggcccagggcgtacag

SEQ ID NO: 134059 - DNA, 80 bp, synthetic construct
  source 1..80: mol_type = other DNA
gttgccaatcagagctggagctgccccaccgattgcttcaggaaacacccagaaacaacctacaccaaatgtggttcagg

SEQ ID NO: 134060 - DNA, 80 bp, synthetic construct
  source 1..80: mol_type = other DNA
cgcagctcgctgatggcgtacaggccgggcgtagtggcctgaaacacgtcatgcgcctccagcagggcgtcggcctcctc

SEQ ID NO: 134061 - DNA, 80 bp, synthetic construct
  source 1..80: mol_type = other DNA
cgaactttgcccttttgtgtttatggaggaaaaactgctgattattacggaactttggtccatgacgaaccggtttttct

SEQ ID NO: 134062 - DNA, 80 bp, synthetic construct
  source 1..80: mol_type = other DNA
gtgctactcacctgcctactgcacccctctcttggctttgacatgacaaaggtgcttctagcgttgctgggcgctggcta

SEQ ID NO: 134063 - DNA, 80 bp, synthetic construct
  source 1..80: mol_type = other DNA
caccacccaggaggaaaaaggtggtgcgcctggatgagtccagcgtagcggaggctctggccgcactggcccagaagtcc

SEQ ID NO: 134064 - DNA, 80 bp, synthetic construct
  source 1..80: mol_type = other DNA
tacatcaagatgctggacccccgtaagccctactgtcgctgtgagtcgccctggcgccgccaccgcctctctccgcacgc

SEQ ID NO: 134065 - DNA, 80 bp, synthetic construct
  source 1..80: mol_type = other DNA
tttcaactggtctgatccatctgcaccagaatattgtggacgtacagtacctctacggggtgtccacagcagtagtgtca

SEQ ID NO: 134066 - DNA, 80 bp, synthetic construct
  source 1..80: mol_type = other DNA
cttcttcttcaattagtggtgattactggaacttcagaaataataactccactgtgtcgaataaatatgaaaatgcagtg

SEQ ID NO: 134067 - DNA, 80 bp, synthetic construct
  source 1..80: mol_type = other DNA
attaatcctggaacaaattttacactagtgggacctactgatgtaccaattatttggtacgacaatggattagaagaccc

SEQ ID NO: 134068 - DNA, 80 bp, synthetic construct
  source 1..80: mol_type = other DNA
catatctcaacacccccggcctccccgtgtgccaggaccatcttgagttctgggagggagtattcacgggcttgacccac

SEQ ID NO: 134069 - DNA, 80 bp, synthetic construct
  source 1..80: mol_type = other DNA
gacctcctccccataaactaaccccattacccatccagtaaaaaataaggatgatgattttgaattgatcaataaagaat

SEQ ID NO: 134070 - DNA, 80 bp, synthetic construct
  source 1..80: mol_type = other DNA
gctgaagatgtggacctcaaagagaacccccctggggttctcgtatgacacccgctgctttgactcgactgtcactgaac

SEQ ID NO: 134071 - DNA, 80 bp, synthetic construct
  source 1..80: mol_type = other DNA
ccccgacggcgttggcgcgggccgcggccgtgtcctggccctcgaacagcggccacgcggagatgtcggtgtgcggctcg

SEQ ID NO: 134072 - DNA, 80 bp, synthetic construct
  source 1..80: mol_type = other DNA
cacatttcgaccccgtgtgcatcagactgtgcaagactgcaattgctctgtttttgttggccacgttaccggccacagaa

SEQ ID NO: 134073 - DNA, 80 bp, synthetic construct
  source 1..80: mol_type = other DNA
taggcaaaatcgtcctggctagaatgcgtcgaggaatggggtgcctaaaacccgcgttggtgtctttttttgggtggtta

SEQ ID NO: 134074 - DNA, 80 bp, synthetic construct
  source 1..80: mol_type = other DNA
atgcactttggcataatgatcacacaaaaggattactacacgttgtgatacctaacgcggggcttattgcggccggaata

SEQ ID NO: 134075 - DNA, 80 bp, synthetic construct
  source 1..80: mol_type = other DNA
agtatatcatgacctgcatgtcagcagacttggaggtcattactagtaattgggtgttgcttggtggagtcctggccgct

SEQ ID NO: 134076 - DNA, 80 bp, synthetic construct
  source 1..80: mol_type = other DNA
atcgtgtatcccgacctaggggtacgggtatgcgagaagcgggcactctacaacattgtccagggactcccccaggtcat

SEQ ID NO: 134077 - DNA, 80 bp, synthetic construct
  source 1..80: mol_type = other DNA
tctgtccatggtttcggccgcccccctgcccggagccagcggccatcctcctgttccgggccgcgcagccccccccgacg

SEQ ID NO: 134078 - DNA, 80 bp, synthetic construct
  source 1..80: mol_type = other DNA
tacgagatgaggtgtcgttcagagtaggactgtacgactacccggtggggtcgcaattaccttgcgagcctgaaccggat

SEQ ID NO: 134079 - DNA, 80 bp, synthetic construct
  source 1..80: mol_type = other DNA
acctccggcgttgtcagcttgttcagccccggcgctcggcagagagtccagctcatcaactctaatggcagctggcatgt

SEQ ID NO: 134080 - DNA, 80 bp, synthetic construct
  source 1..80: mol_type = other DNA
gtgctgacagcgaagtggttaaatcgaccgtgatgctttattgtctgtcgtctgaacgcggccggggtcgctactcgagg

SEQ ID NO: 134081 - DNA, 80 bp, synthetic construct
  source 1..80: mol_type = other DNA
gacgtgcccatggctggaccattagtggccgggggcttgctgatagcgtgctacgtcataactggcacgtcagcagacct

SEQ ID NO: 134082 - DNA, 80 bp, synthetic construct
  source 1..80: mol_type = other DNA
ggtgtgccctaccgattgtttccgaaaacacccggacactacctttggcaaatgcggatcaggcccttggttgactccaa

SEQ ID NO: 134083 - DNA, 80 bp, synthetic construct
  source 1..80: mol_type = other DNA
gtcttgtgttaatcatcatcacaatctttacactcacccctggatataagaagatgatagtgctagtcatgtggtggctt

SEQ ID NO: 134084 - DNA, 80 bp, synthetic construct
  source 1..80: mol_type = other DNA
gcgtcggcgcagggccgcgtgggcggcatctcggtccattccgccaccctgcgggcgacccgggaggtgctctgatagtc

SEQ ID NO: 134085 - DNA, 80 bp, synthetic construct
  source 1..80: mol_type = other DNA
caagttttacgcccgcaagatctacaaaactccttacgtgcccatagacaaggaggtgaaaattgatagtttttacatgc

SEQ ID NO: 134086 - DNA, 80 bp, synthetic construct
  source 1..80: mol_type = other DNA
cgcgtccacggcgtccatcagcgcgcgggccccggcctccaggcccgccccgccctgcgcggaccacgcggccgcagcct

SEQ ID NO: 134087 - DNA, 80 bp, synthetic construct
  source 1..80: mol_type = other DNA
ccagaacccaactaccacaaggcattgtggagggtttctgcggaggactacgttgaggtcgtgcgcgtgaaggactgcca

SEQ ID NO: 134088 - DNA, 80 bp, synthetic construct
  source 1..80: mol_type = other DNA
gccgcctatgtggcacaaggatacaatgtcctcgtgttgaatccatcggtggcggccacgttaggctttggctctttcat

SEQ ID NO: 134089 - DNA, 80 bp, synthetic construct
  source 1..80: mol_type = other DNA
tagcatggcacgtcgcagcaaacgtgtctagtgtgacaagtcggaactggacgtgggaaggtcctgaagagaacaccgtg

SEQ ID NO: 134090 - DNA, 80 bp, synthetic construct
  source 1..80: mol_type = other DNA
atgccatcggccacccaggccgaaattcccgccagctctaccgatatgggcacgacctgattataatccccctttaatag

SEQ ID NO: 134091 - DNA, 80 bp, synthetic construct
  source 1..80: mol_type = other DNA
tagacactactgaatacaaggagtataaaaaagtaaccgtggaattccagcataacaactcagggtttgtgggatacctg

SEQ ID NO: 134092 - DNA, 80 bp, synthetic construct
  source 1..80: mol_type = other DNA
tggtcctagagatggggataccagaaatgaactttggacatttatgggagtgggctgactcattggccatgggactactc

SEQ ID NO: 134093 - DNA, 80 bp, synthetic construct
  source 1..80: mol_type = other DNA
ttgatgacacaggcaaaaggtattactacctcacccgtgacccgaccacaccacttgcgagagccgcttgggagacggct

SEQ ID NO: 134094 - DNA, 80 bp, synthetic construct
  source 1..80: mol_type = other DNA
ctcgccgcaagaggcggctgcatagagggaacgtgtactgggtgcgcgattctgtaacgggagtccgagtgccggtgcgc

SEQ ID NO: 134095 - DNA, 80 bp, synthetic construct
  source 1..80: mol_type = other DNA
tacttagtattgtttttggaggatcgtgagattaacacagtgccggcagtttctttgagcgttgattttcaatgtctaag

SEQ ID NO: 134096 - DNA, 80 bp, synthetic construct
  source 1..80: mol_type = other DNA
ggcccggtcatgtgcccttctgggcatgcagtaggtatcttcagggctgccgtgtgcacacggggcgtcgcgaaggcact

SEQ ID NO: 134097 - DNA, 80 bp, synthetic construct
  source 1..80: mol_type = other DNA
agtacttcattgcacggctggaagccatactccatgtgtggatcccaggtctctccgttcggggtggccgggacgctgcc

SEQ ID NO: 134098 - DNA, 80 bp, synthetic construct
  source 1..80: mol_type = other DNA
tttggagcgccggtctggtgatcttcgagactgccgtccacaacgcgtccttgttctcggccccccgcggccccaaaagg

SEQ ID NO: 134099 - DNA, 80 bp, synthetic construct
  source 1..80: mol_type = other DNA
tgcattgtgagggctctagatgtgggggtcatgtgcaaagatgacatcacatacctgtgcccagtgctttcagcgggaaa

SEQ ID NO: 134100 - DNA, 80 bp, synthetic construct
  source 1..80: mol_type = other DNA
ccagttcatcagcgcggtggtgagcgacggctgcgtgccggatcccgccgccgaccccgccccctcctcgcccccggagg

SEQ ID NO: 134101 - DNA, 80 bp, synthetic construct
  source 1..80: mol_type = other DNA
ccctgccgggtaaccctgctgtggcctccctcatgtcattctccgccgctttaaccagcccactgtctacgtcaaccacc

SEQ ID NO: 134102 - DNA, 80 bp, synthetic construct
  source 1..80: mol_type = other DNA
tcaggtccttcttgacatagtcttggaggctcactggggcgtcctgggcgccgtgctatattatagtatggttgccaact

SEQ ID NO: 134103 - DNA, 80 bp, synthetic construct
  source 1..80: mol_type = other DNA
ccgaaccacaacagtcacaggaaagataatccatgaatggtgttgcagatcctgcacgctaccccccttacgtttcagag

SEQ ID NO: 134104 - DNA, 80 bp, synthetic construct
  source 1..80: mol_type = other DNA
gcgtcccggcgcggcgagcgtctgacggtctgtctctggcggtcccgcgtcgggtcgtggatccgtgtcggcagccgcgc

SEQ ID NO: 134105 - DNA, 80 bp, synthetic construct
  source 1..80: mol_type = other DNA
gggccagaccagactacaaccctccgttgctccctccatggaaggacccgacctacgaaccacccgtagttcacgggtgt

SEQ ID NO: 134106 - DNA, 80 bp, synthetic construct
  source 1..80: mol_type = other DNA
gctacaaggtagcttctgctggcatctcttacaaagaccgggaatggtgcttcacaggggaaaggaataaccaaattttg

SEQ ID NO: 134107 - DNA, 80 bp, synthetic construct
  source 1..80: mol_type = other DNA
gcatgtcagtggatgaacaggctgatagcgtttgcctcgcggggcaaccatgtgtcacccacgcactatgtacccgagac

SEQ ID NO: 134108 - DNA, 80 bp, synthetic construct
  source 1..80: mol_type = other DNA
ttgaactacctgggctggcacctcaagaagttgtcaaccctgaatggaggactcttctatgcagatgacacggctggctg

SEQ ID NO: 134109 - DNA, 80 bp, synthetic construct
  source 1..80: mol_type = other DNA
taaatcctctgagcaattccctcattcggcaccacaacctagtgtattccacctcttcaaagagcgcttccatgcgccag

SEQ ID NO: 134110 - DNA, 80 bp, synthetic construct
  source 1..80: mol_type = other DNA
aacaaacccagaaagccgacgaatgattatatcgtcttggaatccaaaggatatccccttaatggtactacctccatgtc

SEQ ID NO: 134111 - DNA, 80 bp, synthetic construct
  source 1..80: mol_type = other DNA
caaggtgccatattttgtgcgcgtccagggcctactcaggctctgtgggttcgtgcgcaagatgctggtgggacaataca

SEQ ID NO: 134112 - DNA, 80 bp, synthetic construct
  source 1..80: mol_type = other DNA
gaggacaattctacacctatacctactaccataatggccaagaatgaggtgttttgcgtcgaccctcaaaagggaggtcg

SEQ ID NO: 134113 - DNA, 80 bp, synthetic construct
  source 1..80: mol_type = other DNA
acctacggcgtgcagtgcttcagccgctaccccgaccacatgaagcagcacgacttcttcaagtccgccatgcccgaagg

SEQ ID NO: 134114 - DNA, 80 bp, synthetic construct
  source 1..80: mol_type = other DNA
agcggaggaggatgatcgggagatctctattccagctgagattctgcggaagttcaagcagtttcctcccgctatgccca

SEQ ID NO: 134115 - DNA, 80 bp, synthetic construct
  source 1..80: mol_type = other DNA
ccccgcatgccgaagccatgctacaattagcgctatcggaactgtccccgggatcgtggccgcggataaacggtgcggta

SEQ ID NO: 134116 - DNA, 80 bp, synthetic construct
  source 1..80: mol_type = other DNA
tcaaacccacccttaccggccccactccactcttgtatcggctgggggccgtccaaaatgagataataacaacccatcca

SEQ ID NO: 134117 - DNA, 80 bp, synthetic construct
  source 1..80: mol_type = other DNA
aggactttgtgaggcgggggggagaggggaactcgtgggcgctgattgacgcgggaaatcctcgccacttcttacccgcc

SEQ ID NO: 134118 - DNA, 80 bp, synthetic construct
  source 1..80: mol_type = other DNA
gctggtccccagtaacacctacagtggcagtcaggtacgtcggagcaaccactgcttcgatacgtggtcatgtagacctg

SEQ ID NO: 134119 - DNA, 80 bp, synthetic construct
  source 1..80: mol_type = other DNA
accgcctagaggcggcgtgcaattggactaggggggacccctgcggtttggagcatagggatcgcacagagctgtctccc

SEQ ID NO: 134120 - DNA, 80 bp, synthetic construct
  source 1..80: mol_type = other DNA
ttctaccccgtatttgccgtgccagaggtgcttgccacctatcacatctttttccaaaactgcaagatacccctatcctg

SEQ ID NO: 134121 - DNA, 80 bp, synthetic construct
  source 1..80: mol_type = other DNA
ggccggcaatcatacccgatagagaagtcctctacaaagaattcgatgagatggaagagtgctctcagcacttaccgtac

SEQ ID NO: 134122 - DNA, 80 bp, synthetic construct
  source 1..80: mol_type = other DNA
ccacgcagtggcaggtcctgccttgctcattcaccaccatgcccgccctatcaacaggcttgattcacctccaccaaaac

SEQ ID NO: 134123 - DNA, 80 bp, synthetic construct
  source 1..80: mol_type = other DNA
tttacagcaaagttagtaagttagttattccagaactaaaggaactttgcgtggatttttacgtgcccagacaagagcca

SEQ ID NO: 134124 - DNA, 80 bp, synthetic construct
  source 1..80: mol_type = other DNA
gatcgagtaaaccatgttaaggaccagcgatcgcagctcggcgtttacgggaccgagttgttggacgtccgccagcagcg

SEQ ID NO: 134125 - DNA, 80 bp, synthetic construct
  source 1..80: mol_type = other DNA
cgctccagtcgatgcggtgaatggctgcgagtggcgggagcatggggtggcgctggttctcggtggtgtatgggttaaac

SEQ ID NO: 134126 - DNA, 80 bp, synthetic construct
  source 1..80: mol_type = other DNA
aaacggaccatcacgctgtgtcgcgaggctcagcgaaactgagatggttcgtcgagagaaaccttgtcacaccagaaggg

SEQ ID NO: 134127 - DNA, 80 bp, synthetic construct
  source 1..80: mol_type = other DNA
actgtcgccgcgagcgccgcttccaagatggccaccccatcgatgatgccgcagtggtcttacatgcacatcgccggcca

SEQ ID NO: 134128 - DNA, 80 bp, synthetic construct
  source 1..80: mol_type = other DNA
gcaggccgacagcaccgctctgctgcgctttatagaatcgcaacgtctcgccgtccccgggggggtgatctcccccgagc

SEQ ID NO: 134129 - DNA, 80 bp, synthetic construct
  source 1..80: mol_type = other DNA
ggctggaattcaataacagtgatgcctctgctctgtggcatagggtgcgccatgctccactggtctctcattttacctgg

SEQ ID NO: 134130 - DNA, 80 bp, synthetic construct
  source 1..80: mol_type = other DNA
gttgtatgtgccactgatgccctcatgactggctacacaggtgattttgactcagtgattgactgtaacgtctcagtcac

SEQ ID NO: 134131 - DNA, 80 bp, synthetic construct
  source 1..80: mol_type = other DNA
acttcaaaaattggctgacctctaaattgttccccaagctgcccggcctccccttcatctcttgtcaaaaggggtacaag

SEQ ID NO: 134132 - DNA, 80 bp, synthetic construct
  source 1..80: mol_type = other DNA
gcgaggacgcgttcaaagaaaaaaataacacagagctccagcagccccggagaagccggatacggcgaccgtaaggcgct

SEQ ID NO: 134133 - DNA, 80 bp, synthetic construct
  source 1..80: mol_type = other DNA
tcactggctttggtcggagctgccatccatccatttgcacttttattggttcttgctggctggttgttccacgtcaaagg

SEQ ID NO: 134134 - DNA, 80 bp, synthetic construct
  source 1..80: mol_type = other DNA
ccccaccatgcgcgaaggacaggcctaccctgctaacttcccctatccgcttataggcaagaccgcagttgacagcatta

SEQ ID NO: 134135 - DNA, 80 bp, synthetic construct
  source 1..80: mol_type = other DNA
gaaacaccatcagcgacggatgtctcacgcttgccagcacggtgggatctgcaatcatgcccacatccagatcttcagca

SEQ ID NO: 134136 - DNA, 80 bp, synthetic construct
  source 1..80: mol_type = other DNA
atttgtcggacgcggatgttttgcttggccagttcccctaacagacgctctccgcctaaggaaagtaactcttgtaaaga

SEQ ID NO: 134137 - DNA, 80 bp, synthetic construct
  source 1..80: mol_type = other DNA
ccctccgaccccctgacgcccctccgaccccctgacgcccctccgacccccagaccgccgtgtctccccgcccgcaggtg

SEQ ID NO: 134138 - DNA, 80 bp, synthetic construct
  source 1..80: mol_type = other DNA
cgggactggcttacttcagcatgcaagccaattgggctaaggtcgtcctagtcctattcctctttgcaggggttgatgct

SEQ ID NO: 134139 - DNA, 80 bp, synthetic construct
  source 1..80: mol_type = other DNA
catccatgggccaatccgtcaactgcaacatgcatggaatcaccagaacgatcacaacagacaagcttatttttattaaa

SEQ ID NO: 134140 - DNA, 80 bp, synthetic construct
  source 1..80: mol_type = other DNA
accgctcgggtcggccgaattccgcggctaacgagggcgtggctgccccgtcgtttccaagaccccataagccagccgac

SEQ ID NO: 134141 - DNA, 80 bp, synthetic construct
  source 1..80: mol_type = other DNA
tactccgctccacccggggacatgccccagcccgcttatgaccttgagcacattgactcttgctcatccaatgtctcagt

SEQ ID NO: 134142 - DNA, 80 bp, synthetic construct
  source 1..80: mol_type = other DNA
cccgcgcgcgctggcaacgtcggcggcgtggaggaatatgacgaggacgatgagtacgagccagaggacggcgagtacta

SEQ ID NO: 134143 - DNA, 80 bp, synthetic construct
  source 1..80: mol_type = other DNA
ccaggtgactgggttatcaaagccaatctggctgagtgcaaagcccctcattccgactcgggagggtccctggcacgtag

SEQ ID NO: 134144 - DNA, 80 bp, synthetic construct
  source 1..80: mol_type = other DNA
cacgctataaacactacctggccatggtgatgtggtggctccagtacatgatagccagacttgaggcactgctgcatgtc

SEQ ID NO: 134145 - DNA, 80 bp, synthetic construct
  source 1..80: mol_type = other DNA
gattacaaccctccactgctagagtcctggaaggacccggactacgtccctccggtggtgcacgggtgcccattgccacc

SEQ ID NO: 134146 - DNA, 80 bp, synthetic construct
  source 1..80: mol_type = other DNA
gcccgccccgccctgcgcggaccacgcggccgccgcctgcacgctgggaggacggcgggaccccgcgatgatggccgtga

SEQ ID NO: 134147 - DNA, 80 bp, synthetic construct
  source 1..80: mol_type = other DNA
cttctttcataatagatggaccaaacacaccggagtgtccaaatacctcaagagcatggaatgtgtgggaggtggaagat

SEQ ID NO: 134148 - DNA, 80 bp, synthetic construct
  source 1..80: mol_type = other DNA
caacgctgctctaggcgcatggtcggatgaacagaacaagtggagctcggcaaaagaggcagtggaagacccagaatttt

SEQ ID NO: 134149 - DNA, 80 bp, synthetic construct
  source 1..80: mol_type = other DNA
tgtgatgaccgggaacaagtcgcgctgctgggtagctctaactcccaccgtagcaagcacgacccttgatgccccgctca

SEQ ID NO: 134150 - DNA, 80 bp, synthetic construct
  source 1..80: mol_type = other DNA
agaccgccatatggcgagtggctgcggctgagtacgctgaggttacacgccaaggctcgtcctcgttcataacggggctg

SEQ ID NO: 134151 - DNA, 80 bp, synthetic construct
  source 1..80: mol_type = other DNA
cccagcatcccgatcactgtgtactacgcagtgctggaacgtgcctgccgcagcgtgctcctacatgccccatcggaggc

SEQ ID NO: 134152 - DNA, 80 bp, synthetic construct
  source 1..80: mol_type = other DNA
tcgggtgtctggaagcctcaggaaacttggggtacccccattgagagcgtggagacatcgggcccgagcagtccgcgcca

SEQ ID NO: 134153 - DNA, 80 bp, synthetic construct
  source 1..80: mol_type = other DNA
gtagcaacagcgctgggcatggtggtgaaatatatctttaagcaacaagctgattgctaagggaagacctttagtgtagg

SEQ ID NO: 134154 - DNA, 80 bp, synthetic construct
  source 1..80: mol_type = other DNA
gggccccactgacccccggcataaatcacgcaatttgggtaaggtcatcgacacccttacatgcggatttgccgacctca

SEQ ID NO: 134155 - DNA, 80 bp, synthetic construct
  source 1..80: mol_type = other DNA
ctgcccgccatactgtctccaggagccctggtcgtcggtgtgatatgtgcggccattctacgccggcatgtgggtcctgg

SEQ ID NO: 134156 - DNA, 80 bp, synthetic construct
  source 1..80: mol_type = other DNA
tcgtgttcctcgatgccccctcttgagggggaacccggggatcccgatcttattgatgggtcttgggcgacggttagtag

SEQ ID NO: 134157 - DNA, 80 bp, synthetic construct
  source 1..80: mol_type = other DNA
gcaattgttgcggcggttgaacttattacgcttttgcaccaccattttcaatacttaattaatatgatgcttattggata

SEQ ID NO: 134158 - DNA, 80 bp, synthetic construct
  source 1..80: mol_type = other DNA
cgccgcctggatctgttacggtccctcatcccaacatacaagaagtggcactacccttaacgggggaggtgcccttctat

SEQ ID NO: 134159 - DNA, 80 bp, synthetic construct
  source 1..80: mol_type = other DNA
tcccgtgcgccggcgaggtgatagcaggggtagcctgctttcgccccggcccatttcctacttgaaaggctcctcggtgg

SEQ ID NO: 134160 - DNA, 80 bp, synthetic construct
  source 1..80: mol_type = other DNA
tttagcgcatgctataggaacatccatcactcaaaaagggatcattttcatcttgctgatgctggtgacaccatcaatgg

SEQ ID NO: 134161 - DNA, 80 bp, synthetic construct
  source 1..80: mol_type = other DNA
gggtgggaacctccgccacctctactgacgagacaccgacttctgacgaaccagacgcacactccgatgctggctcatat

SEQ ID NO: 134162 - DNA, 80 bp, synthetic construct
  source 1..80: mol_type = other DNA
cgtatcgacccgcgaacttagaaacaggatttttcccactctgtatgctatatttcaacagagcaggggccaagaacaag

SEQ ID NO: 134163 - DNA, 80 bp, synthetic construct
  source 1..80: mol_type = other DNA
taagactgtcaacattgcttagagcgaaaggtgtggctttacacatttgccgacccaattggggcacaccggtgggcttg

SEQ ID NO: 134164 - DNA, 80 bp, synthetic construct
  source 1..80: mol_type = other DNA
aacagctgatgcctttcctcagagcaacgctccaattcaagatgaagaaagggacataccagaacgctcatggaattcag

SEQ ID NO: 134165 - DNA, 80 bp, synthetic construct
  source 1..80: mol_type = other DNA
ggggcgttgccagggccctggcgcacggcgtccgggtcgtggaagacggcgtgaactatgcaacagggaaccttcctggt

SEQ ID NO: 134166 - DNA, 80 bp, synthetic construct
  source 1..80: mol_type = other DNA
caccaggacccccagcgtcaaccccaagagcgcccatacgacgaaccaccggcgcccccgcgcgggagcgccctggcgca

SEQ ID NO: 134167 - DNA, 80 bp, synthetic construct
  source 1..80: mol_type = other DNA
aaggatagactcaatcggttgacgaaagaagagttcaccaggtaccggaaagaagccataatcgaggttgatcgctccgc

SEQ ID NO: 134168 - DNA, 80 bp, synthetic construct
  source 1..80: mol_type = other DNA
cggagccacgaggggtgtcctcggccagggcccagggacgcttagtcacggtgcgtcccggcggacatactgggcctacc

SEQ ID NO: 134169 - DNA, 80 bp, synthetic construct
  source 1..80: mol_type = other DNA
atggcgcgggcgtggcgggagccctcgtagcattcaagatcatgagcggcgaggtcccctccacagaggacctagtcaac

SEQ ID NO: 134170 - DNA, 80 bp, synthetic construct
  source 1..80: mol_type = other DNA
cagatcggcatggcgttactgatcgccataaccgccttcacgatcacaccggcatacaaaatccttctcagccgatgttt

SEQ ID NO: 134171 - DNA, 80 bp, synthetic construct
  source 1..80: mol_type = other DNA
tggacttgagtacacggaaacgtccaagacaataagtgttccatatccgtgtttacttaaggtgacgtcaatatttgtgt

SEQ ID NO: 134172 - DNA, 80 bp, synthetic construct
  source 1..80: mol_type = other DNA
gcctttgcatggaatcccaaatcgcacacttgctatttattcgatccatttggattctctgatcagcggttaaaacaaat

SEQ ID NO: 134173 - DNA, 80 bp, synthetic construct
  source 1..80: mol_type = other DNA
gcataatggagcatacattggttataccaaagacggttctgatagagaattatatgaggtgtcagtcaaaacattgttta

SEQ ID NO: 134174 - DNA, 80 bp, synthetic construct
  source 1..80: mol_type = other DNA
cattgactgctggtgcacgaaatcatctgtttacgtgcgctatggaagatgcacaaaaactcggcattcccgtcgaagca

SEQ ID NO: 134175 - DNA, 80 bp, synthetic construct
  source 1..80: mol_type = other DNA
tgggttcagatcactcccacgctggcggcaccctccctcagagcagttacggcccccctgcggagggctgttgactactt

SEQ ID NO: 134176 - DNA, 80 bp, synthetic construct
  source 1..80: mol_type = other DNA
cgtgctgatcatgttctcgggagtggatgcgaacacatacaccaccggcggcagcgcggctcgctctgcttccgggcttg

SEQ ID NO: 134177 - DNA, 80 bp, synthetic construct
  source 1..80: mol_type = other DNA
tgtagcaaagaccctacagttcataccagtggaaacccttagtacacagactaggtccccatccttctctgacaattcaa

SEQ ID NO: 134178 - DNA, 80 bp, synthetic construct
  source 1..80: mol_type = other DNA
tgtaactattttggttgccacaaccccggtacatcttctcaattttgctagattggatttaattaaacagcatgagtata

SEQ ID NO: 134179 - DNA, 80 bp, synthetic construct
  source 1..80: mol_type = other DNA
ggcttgataggggggacgacatcccttaacaccttcagggttgcgtctatcttctcacctgggccgtcccagaagattca

SEQ ID NO: 134180 - DNA, 80 bp, synthetic construct
  source 1..80: mol_type = other DNA
tcttcatcgttgaccgcctgaagtctctgattaagtacaaaggctatcaggtggctcccgctgaattggaatccatcttg

SEQ ID NO: 134181 - DNA, 80 bp, synthetic construct
  source 1..80: mol_type = other DNA
gaggagatacttatgctaccacagctgaggaagaggctgctaaaaaagagctagttattttgccagtaacagaagatgaa

SEQ ID NO: 134182 - DNA, 80 bp, synthetic construct
  source 1..80: mol_type = other DNA
ctgcggagacgatctggtggtcgtagctgagagcattggggtcaatgaggatatcgccagcctgcgagctttcacggaag

SEQ ID NO: 134183 - DNA, 80 bp, synthetic construct
  source 1..80: mol_type = other DNA
gacttcgtgcccgtggagagcatggagacgaccatgagagcccctgttttcactgacaactcgaccccacctgctgtgcc

SEQ ID NO: 134184 - DNA, 80 bp, synthetic construct
  source 1..80: mol_type = other DNA
cgtggacctcctggtgggcgcggctacgttctgctctgccatgtacgtcggcgacttgtgcggtggtgtcttcctgctcg

SEQ ID NO: 134185 - DNA, 80 bp, synthetic construct
  source 1..80: mol_type = other DNA
gacgtgtttaacgccattttaatgcggaaatgatgtgttttgggcgttggttgtgaaaattctgtatttttggcgcgaaa

SEQ ID NO: 134186 - DNA, 80 bp, synthetic construct
  source 1..80: mol_type = other DNA
gcggtaacctagtgttgcttggccctgctgacagtttaagggagatgggctggcgcttgctggcgcccatcacggcctac

SEQ ID NO: 134187 - DNA, 80 bp, synthetic construct
  source 1..80: mol_type = other DNA
cgctgtctcacgcagtcagcgccgcgggcgcacaggtagaggaagacagggcacttataggtatgtttccactggtgaac

SEQ ID NO: 134188 - DNA, 80 bp, synthetic construct
  source 1..80: mol_type = other DNA
cgcttctcacgttcttcaaatttacagcaattgctccaacaaaggctttgattaacagatggaggtcagttgagaaagga

SEQ ID NO: 134189 - DNA, 80 bp, synthetic construct
  source 1..80: mol_type = other DNA
cccatatcgatgcccacctcctttcacagacgaagcaggggggagaaaatttcgcgtacctcgtagcctaccaggctact

SEQ ID NO: 134190 - DNA, 80 bp, synthetic construct
  source 1..80: mol_type = other DNA
ggcctaccaagccacagtgtgcgcaagagcgaaagctcctcccccctcttgggaccaaatgtggaaatgcctaataagac

SEQ ID NO: 134191 - DNA, 80 bp, synthetic construct
  source 1..80: mol_type = other DNA
ttcaataccttcgcgaaattgggcagccttcagagggtggagttttactcgccttaaaactaaagagacaccttctcttg

SEQ ID NO: 134192 - DNA, 80 bp, synthetic construct
  source 1..80: mol_type = other DNA
gagagaaaaagctaggggagttcggcgtggcaaaaggaagccgagctatctggtacatgtggctggggagccgctttctg

SEQ ID NO: 134193 - DNA, 80 bp, synthetic construct
  source 1..80: mol_type = other DNA
tctcccctggtgccctggtcgtcggggtcgtgtgcgcagcaatactgcgtcggcacgtgggcccgggtgagggagctgtg

SEQ ID NO: 134194 - DNA, 80 bp, synthetic construct
  source 1..80: mol_type = other DNA
gtgtcattctagccggaccgatgccagtgactgtggctagcgccgcccagaggagaggaagaattggaaggaaccaaaat

SEQ ID NO: 134195 - DNA, 80 bp, synthetic construct
  source 1..80: mol_type = other DNA
cttccaggagatcacgagcgtaagccgcgcactggggcagaacgacaccgacagtctaagggccacccttaacttcttgc

SEQ ID NO: 134196 - DNA, 80 bp, synthetic construct
  source 1..80: mol_type = other DNA
tggaagcctggctgaaagagcatggagaggagcgcctgacccgcatgctggtcagtggggatgattgcgttgtgagacca

SEQ ID NO: 134197 - DNA, 80 bp, synthetic construct
  source 1..80: mol_type = other DNA
tgccggccatgccgtagtatttgctgatgctcaaccccaacacgaccatggggcgtgccgccatgacgggccgcagcagg

SEQ ID NO: 134198 - DNA, 80 bp, synthetic construct
  source 1..80: mol_type = other DNA
gccagtcaactctctgctccgtcgctgtacgccacctgcaacacccatggcaaactgccagacgcagagctagtagacgc

SEQ ID NO: 134199 - DNA, 80 bp, synthetic construct
  source 1..80: mol_type = other DNA
cggtgacgacttagtcgtcatcgccgagagcggtggtgtggaagaggatcgccgagccctgattgccttcacggaggcta

SEQ ID NO: 134200 - DNA, 80 bp, synthetic construct
  source 1..80: mol_type = other DNA
cgcccccccggacgcggccaaagcgaccccagacctcgtcccactccgcctcggcctcctccagggacctccgcagggcg

SEQ ID NO: 134201 - DNA, 80 bp, synthetic construct
  source 1..80: mol_type = other DNA
gcggcgatggcatatgtcagaccacttgcccctgtggggcagtaattgccggccatgtgaagaacgggacaatgaagatc

SEQ ID NO: 134202 - DNA, 80 bp, synthetic construct
  source 1..80: mol_type = other DNA
tgtgaagtgtgacaagtttttagattgtcacactaaataaaaaagagtcaataagcagggataactttgtgaaaaaacag

SEQ ID NO: 134203 - DNA, 80 bp, synthetic construct
  source 1..80: mol_type = other DNA
acagacgccctcatgaccggttacactggagactttgactctgtcatcgactgcaatgttaccgtgacacaagtggtgga

SEQ ID NO: 134204 - DNA, 80 bp, synthetic construct
  source 1..80: mol_type = other DNA
acagggccagggcggtcagggcgaagctcattgcccaggtggggaaagccgctatatgcggtaagtacctctttaactgg

SEQ ID NO: 134205 - DNA, 80 bp, synthetic construct
  source 1..80: mol_type = other DNA
accaacctgaaatataccgtgattattaccgtgcataccggcgatcagcatcaggtgggcaacgaaacccagggcattac

SEQ ID NO: 134206 - DNA, 80 bp, synthetic construct
  source 1..80: mol_type = other DNA
gggtaggcacctcatcttctgtcattccaagaagaaatgtgacgaacttgcagcaaaactaaccggcctcggcctcaacg

SEQ ID NO: 134207 - DNA, 80 bp, synthetic construct
  source 1..80: mol_type = other DNA
tgtgtccctggcagctatagctaaccaggcagtggtcctgatgggtttggacaaaggatggccaatatcaaaaatggact

SEQ ID NO: 134208 - DNA, 80 bp, synthetic construct
  source 1..80: mol_type = other DNA
aggaaaattctgccacaaataattaaggacgctatccagcagcgcctaagaacagctgtgttggcaccgacgcgggtggt

SEQ ID NO: 134209 - DNA, 80 bp, synthetic construct
  source 1..80: mol_type = other DNA
gaagtctggaagagggaactgaatctgttggacaagcgacagtttgagttgtataaaaggaccgacattgtggaggtgga

SEQ ID NO: 134210 - DNA, 80 bp, synthetic construct
  source 1..80: mol_type = other DNA
gggtgattgtggaaagcgacataaatgggaaaaatttacctgatttgggtgctgctgaattggacttgcactgctatgaa

SEQ ID NO: 134211 - DNA, 80 bp, synthetic construct
  source 1..80: mol_type = other DNA
atgactgcagttggactcatgtttgccatcgttgggggtctggcagaacttgacatagactctatggctatccccatgac

SEQ ID NO: 134212 - DNA, 80 bp, synthetic construct
  source 1..80: mol_type = other DNA
acggccgccgcattttttaacgttaacgtatttttttccaaatcgggattcatacgccctcttaactcaaacgcgggagc

SEQ ID NO: 134213 - DNA, 80 bp, synthetic construct
  source 1..80: mol_type = other DNA
gatggcctaccccccctggaacgcgctcgctcactccgtgcacttgcggatcggcggacctgtacctggttaccaggcat

SEQ ID NO: 134214 - DNA, 80 bp, synthetic construct
  source 1..80: mol_type = other DNA
attccagattgaggagtttggcatgggggtcttcacaacacgagtgtttatggacgcgacctttgactattcagtggact

SEQ ID NO: 134215 - DNA, 80 bp, synthetic construct
  source 1..80: mol_type = other DNA
cagaaatgggtaggcttccaacattcatgactcagaagacaagagacgcactggacaacctagcagtgctgcacacggct

SEQ ID NO: 134216 - DNA, 80 bp, synthetic construct
  source 1..80: mol_type = other DNA
ttttcagcgtactgcagagccaggagcaactggaaaaagccctagcatttgaaatgtatgggtcagtctactctgtcact

SEQ ID NO: 134217 - DNA, 80 bp, synthetic construct
  source 1..80: mol_type = other DNA
ttaaggcggcggcgtcaaaggtgaaggctaacttgctatccgtagaggaagcttgcagcctgacgcccccacattcagcc

SEQ ID NO: 134218 - DNA, 80 bp, synthetic construct
  source 1..80: mol_type = other DNA
cgaaggcgggatgcaggccggccagagccgtcgcggtatccggtgtcgggtgttccagggcctcccggtactgccccagc

SEQ ID NO: 134219 - DNA, 80 bp, synthetic construct
  source 1..80: mol_type = other DNA
gtctataggatcaaacaacaaggaatctttgggaaaacccaagtgggggttggagtgcagaaagaaggagtcttccacac

SEQ ID NO: 134220 - DNA, 80 bp, synthetic construct
  source 1..80: mol_type = other DNA
acaccaaagccgtttttccgggatgaggtctcgttctgcgttgggcttaattcctatgctgtcgggtcccagcttccctg

SEQ ID NO: 134221 - DNA, 80 bp, synthetic construct
  source 1..80: mol_type = other DNA
ctcgcgagtcacctttaggtaggcgtggagcttggccatgtacgcgctgacctccttgtgggacgagaacagccgcgtcc

SEQ ID NO: 134222 - DNA, 80 bp, synthetic construct
  source 1..80: mol_type = other DNA
agtaacacctggcacggccgtttccccatcaacgcatccactgctggtccaagcgtccctacccccgcgcccgactacat

SEQ ID NO: 134223 - DNA, 80 bp, synthetic construct
  source 1..80: mol_type = other DNA
agagtttagcgtggattatttggcactcatttgtggatttggagcacccctgttggcgcgactgcttttttatctagaac

SEQ ID NO: 134224 - DNA, 80 bp, synthetic construct
  source 1..80: mol_type = other DNA
cacggtcctagaccaagcggagaccgctggagcgcgccttgtcgtgctcgcgaccgctacgccgccagggtctgtaacca

SEQ ID NO: 134225 - DNA, 80 bp, synthetic construct
  source 1..80: mol_type = other DNA
gtgcttcgggacccgcctaccagcccctcgcccccgcggcctccccggcgcgggctcgtgttccggccgtggcctggatc

SEQ ID NO: 134226 - DNA, 80 bp, synthetic construct
  source 1..80: mol_type = other DNA
cacgagcaccccgacgggttcaccaccgtctctaccgtgacctccgaggctgtcggcggccaggtccccccgcggacctt

SEQ ID NO: 134227 - DNA, 80 bp, synthetic construct
  source 1..80: mol_type = other DNA
ggcctcaactcttttgtggtggggtctcagctgccttgtgaacctgagccggacacggaagtgttggcatcaatgctgac

SEQ ID NO: 134228 - DNA, 80 bp, synthetic construct
  source 1..80: mol_type = other DNA
cacagcctactactgtacccactacacatccaaccaccacagccagtacaactaccgagaccactactcatactacacag

SEQ ID NO: 134229 - DNA, 80 bp, synthetic construct
  source 1..80: mol_type = other DNA
attcaacagctcggggtgtccagagaggcttgcgtcatgcaagcgtctggaggacttctcccagggttggcgccggctca

SEQ ID NO: 134230 - DNA, 80 bp, synthetic construct
  source 1..80: mol_type = other DNA
gatctagcgtctggcccgcggggaccaccatcacttccaccggagggctgtcgtgcatggatatcacgagccccatgaat

SEQ ID NO: 134231 - DNA, 80 bp, synthetic construct
  source 1..80: mol_type = other DNA
cttctgctctattccaacatcagtcacaaggcaccgagcgccgaacactgtgactgatgggggagaagaccacaggatct

SEQ ID NO: 134232 - DNA, 80 bp, synthetic construct
  source 1..80: mol_type = other DNA
tgatagctgcccaagttgtcatcgtttctccgaacatcaccatttttgtccaggactgcaactgttccatctacccgggc

SEQ ID NO: 134233 - DNA, 80 bp, synthetic construct
  source 1..80: mol_type = other DNA
taaagcggtggactttgtgcctgtcgagtccctagaaaccaccatgaggtctccagtctttactgacaactccactccgc

SEQ ID NO: 134234 - DNA, 80 bp, synthetic construct
  source 1..80: mol_type = other DNA
gggtatttgcatgcccctactggcagtggaaaaagcaccaaggtcccagcggcatacgctgcgcagggctacaaagtact

SEQ ID NO: 134235 - DNA, 80 bp, synthetic construct
  source 1..80: mol_type = other DNA
gtctgaagcagcgatgcgggtgggggcgcggagtcgacgtgaagcgcgagagaggaagcccacgaagtcacagcggacac

SEQ ID NO: 134236 - DNA, 80 bp, synthetic construct
  source 1..80: mol_type = other DNA
aatgctcgtgacaggtccattgctctcacgtttctcgcagttggaggagtcctgctcttcctctccgtgaacgtgcacgc

SEQ ID NO: 134237 - DNA, 80 bp, synthetic construct
  source 1..80: mol_type = other DNA
gaatacgagactgatgtcaccaacgatgaggacatgaggccgtactgctggcattaccctccgaagcctggtggtatcgt

SEQ ID NO: 134238 - DNA, 80 bp, synthetic construct
  source 1..80: mol_type = other DNA
ggggtcgcaagcccgcgcggttaattgtttatccagacttatccgtgcgggtttgcgagaagatggcactctacgatgtg

SEQ ID NO: 134239 - DNA, 80 bp, synthetic construct
  source 1..80: mol_type = other DNA
aaaagctggggaaaagctaaaatcataggagcagacatacaaaataccacctttatcatcgacggcccaaacaccccaga

SEQ ID NO: 134240 - DNA, 80 bp, synthetic construct
  source 1..80: mol_type = other DNA
gaagtcctggggagaatgcctgagcacttcgcaggcaagaccagagaggcttttgataccatgtatctggtggcgacagc

SEQ ID NO: 134241 - DNA, 80 bp, synthetic construct
  source 1..80: mol_type = other DNA
gggccaaagtcatcggcattctgctcctgttcgcaggggtagacgcggagacctataccacaggaggaactgttgcccga

SEQ ID NO: 134242 - DNA, 80 bp, synthetic construct
  source 1..80: mol_type = other DNA
ggaggcaggaagtgggaggcaacatcaccagggtggagtctgagaacaagatcatcgtcttggactcattcgagccactc

SEQ ID NO: 134243 - DNA, 80 bp, synthetic construct
  source 1..80: mol_type = other DNA
aaatcccgcagtggcatcaatgatggctttcagcgccgcattgactagcccactatccaccagcaccactatcctcttaa

SEQ ID NO: 134244 - DNA, 80 bp, synthetic construct
  source 1..80: mol_type = other DNA
tcacaccatcgccggtagtggtaggcaccacagatgaggagggtagaccgacttacgcgtttggcgaaaacaagacagac

SEQ ID NO: 134245 - DNA, 80 bp, synthetic construct
  source 1..80: mol_type = other DNA
gcgtcggcatcgcgacgccccggctcgggatcgggatcgcatcggaaagggacacgcggacgcggtggggaaagacccgc

SEQ ID NO: 134246 - DNA, 80 bp, synthetic construct
  source 1..80: mol_type = other DNA
atgctaatattctttgtcttgatggtggttgtggttccggagccggggcagcagagaaccattcaggacaatcaagtggc

SEQ ID NO: 134247 - DNA, 80 bp, synthetic construct
  source 1..80: mol_type = other DNA
ggacatagagcttcagaagaccgaggccacccaactggcgaccctaaggaagttatgcattgagggaaaaattaccaaca

SEQ ID NO: 134248 - DNA, 80 bp, synthetic construct
  source 1..80: mol_type = other DNA
gtccgggagggcaacacctcccggtgttggttacagctcacccccacagtcgcggccagggacatcagctcctccactgc

SEQ ID NO: 134249 - DNA, 80 bp, synthetic construct
  source 1..80: mol_type = other DNA
attggccaaagtcatcgaacaggctcatgcgaagggaatctgcggacttagatcggtttcacgtctagagcatgtgatgt

SEQ ID NO: 134250 - DNA, 80 bp, synthetic construct
  source 1..80: mol_type = other DNA
gaagtagttgacgtcggtcgacacgggggtggcgataaactcacacacggcgtcctggccgtggtccatccctgcgcgcc

SEQ ID NO: 134251 - DNA, 80 bp, synthetic construct
  source 1..80: mol_type = other DNA
gctcctgggaaacccaccctggactttgaattgacaaaaaccactgccaaggaagtcgccctcctgcgcagttattgcat

SEQ ID NO: 134252 - DNA, 80 bp, synthetic construct
  source 1..80: mol_type = other DNA
ggtcttgattgtgttgctactctttgccggcgttgacggaggaaccaccacggtggggggggcggcagctcgcaccacta

SEQ ID NO: 134253 - DNA, 80 bp, synthetic construct
  source 1..80: mol_type = other DNA
gcggtgctgtattaccttccttgctggattgaaatcaaaatctttatctgctgggtcagacattgttgggaggaaccatg

SEQ ID NO: 134254 - DNA, 80 bp, synthetic construct
  source 1..80: mol_type = other DNA
aggccgaaacgccgaggcgcgaaacacgccgtcggtgacctgcaggagctcgtttattaatagccagtccatgctcagcg

SEQ ID NO: 134255 - DNA, 80 bp, synthetic construct
  source 1..80: mol_type = other DNA
ggggattgtggtggatccaatattttatagctaggaccgaggctgtgctgcatgtctatattccatccttcaacgtgcgc

SEQ ID NO: 134256 - DNA, 80 bp, synthetic construct
  source 1..80: mol_type = other DNA
ctggggaaagggaaggaacgcccgaaaccagagaaaaggaccaaaagggaaacgcgtccaaccgataaatcaagcgccga

SEQ ID NO: 134257 - DNA, 80 bp, synthetic construct
  source 1..80: mol_type = other DNA
caggccacagcaccacgtgggtaggtgatgtaattttattttcctcgtctgcggcctaatggatttccgggcgcggtgcc

SEQ ID NO: 134258 - DNA, 80 bp, synthetic construct
  source 1..80: mol_type = other DNA
gacggtgggacccacataactggcgactcagcgggccaagatgtccgcgggcttgcttctctctttaacctgtggtctaa

SEQ ID NO: 134259 - DNA, 80 bp, synthetic construct
  source 1..80: mol_type = other DNA
ctcgacacatcccctatctcgccgagggacaacacttggccgaacagttcaagcaaaaagtcctcgggctgctccagacc

SEQ ID NO: 134260 - DNA, 80 bp, synthetic construct
  source 1..80: mol_type = other DNA
aaagggtggtcgtaagccggcccggctgatcgtgtacccggacctgagtgtccgggtctgcgagaaaagggccctgtacg

SEQ ID NO: 134261 - DNA, 80 bp, synthetic construct
  source 1..80: mol_type = other DNA
accaaagtgtgcggggcgccaccttgtgtcatcagaggagtgggcaacaacaccttgctctgccctacggactgcttccg

SEQ ID NO: 134262 - DNA, 80 bp, synthetic construct
  source 1..80: mol_type = other DNA
cgttccaagtatggatacggggcaaaagaggtgcgctccctagctcgcaaggccgttaaccatatcaactccgtatggga

SEQ ID NO: 134263 - DNA, 80 bp, synthetic construct
  source 1..80: mol_type = other DNA
ccgaattcttcacggaagtggatggggtgcggttgcacaggtacgctccggcatgcaggcccctcttacgggacgaggtc

SEQ ID NO: 134264 - DNA, 80 bp, synthetic construct
  source 1..80: mol_type = other DNA
tgtgcctggtacgaactaacaccagctgaaacaacaaccaggttgagggcctacttcaacacgccaggcctccccgtctg

SEQ ID NO: 134265 - DNA, 80 bp, synthetic construct
  source 1..80: mol_type = other DNA
ctgcccctccgactgcttccggaaacatcctgaggctacgtatgggaggtgtggttcaggaccctggcttacccccagat

SEQ ID NO: 134266 - DNA, 80 bp, synthetic construct
  source 1..80: mol_type = other DNA
gggaaggccatccctctagagtacatcaaggggggcaggcacttaatcttttgtcactctaaaaagaagtgcgacgagct

SEQ ID NO: 134267 - DNA, 80 bp, synthetic construct
  source 1..80: mol_type = other DNA
gccgcaggcctctttagagctgcggtttgtacccggggagtggcgaaagcagttgatttcatccctgttgaggctttgga

SEQ ID NO: 134268 - DNA, 80 bp, synthetic construct
  source 1..80: mol_type = other DNA
ggtgtcagtggaagaaaatcacccgtttactttacgcgcaccgattcagcggatttatggagtccggtacaccgagactt

SEQ ID NO: 134269 - DNA, 80 bp, synthetic construct
  source 1..80: mol_type = other DNA
tatatggaggtgggtgcgcagagactgacgaagaccatgcacactggcttgaagcaagaatgctccttgacaatatttac

SEQ ID NO: 134270 - DNA, 80 bp, synthetic construct
  source 1..80: mol_type = other DNA
aaacacaattttagaagacaacaacgaagtggaagtcatcacgaagcttggtgaaaggaagattctgaggccgcgctgga

SEQ ID NO: 134271 - DNA, 80 bp, synthetic construct
  source 1..80: mol_type = other DNA
gaggataagccttattgctggcactacccgcctagaccatgcacagtggtcgaggctgcccatgtctgtggcccggtgta

SEQ ID NO: 134272 - DNA, 80 bp, synthetic construct
  source 1..80: mol_type = other DNA
ggccgtacctgggctcagcccgggtacccttggcctctttatgggaatgagggctgcggttgggcagtgtggctcctgtc

SEQ ID NO: 134273 - DNA, 80 bp, synthetic construct
  source 1..80: mol_type = other DNA
taattttaccggttgtgagcaaagagtcgccgcgtgtcacgacatggggtttttccatcaaggttggggcccaatcacct

SEQ ID NO: 134274 - DNA, 80 bp, synthetic construct
  source 1..80: mol_type = other DNA
ctcgggccatatcacaggtcatagaatggcgtgggacatgatgatgaactggagccctaccaccgctctggttatggcac

SEQ ID NO: 134275 - DNA, 80 bp, synthetic construct
  source 1..80: mol_type = other DNA
gctggcgtgtcgggggctctcgtggctttcaagatcatgagcggtgaggccccatctgtagaggatatggttaatatgct

SEQ ID NO: 134276 - DNA, 80 bp, synthetic construct
  source 1..80: mol_type = other DNA
tcccttttcactccgtacatgctccatcagctgcagaccaaaatccagaggctggtgaacagctcggtagcagctggaac

SEQ ID NO: 134277 - DNA, 80 bp, synthetic construct
  source 1..80: mol_type = other DNA
gagcggcaggctttttaaaatcgatttgacgtgataaaaaaaaaaaaacacgggccccccctttttttggtgttataaag

SEQ ID NO: 134278 - DNA, 80 bp, synthetic construct
  source 1..80: mol_type = other DNA
gaagtggacgccgcgatcacaggtagcagccagaggttggatgtcaaattggatgacgatggagatttccatcttattga

SEQ ID NO: 134279 - DNA, 80 bp, synthetic construct
  source 1..80: mol_type = other DNA
cggcagatggtgattacgaacccccgcggcgccgggcccggcactaccgggacttggaggagtgcgagggcctggcgcgg

SEQ ID NO: 134280 - DNA, 80 bp, synthetic construct
  source 1..80: mol_type = other DNA
ggaaaaaacccaagctattgatggagagtttcgcctcagaggggaacaaaggaagacttttgtggaattaatgaggagag

SEQ ID NO: 134281 - DNA, 80 bp, synthetic construct
  source 1..80: mol_type = other DNA
ccggcaaacgggtttactacctcacccgtgaccctgaaatacccctggcacgagccgcctgggaaactgtccgacacact

SEQ ID NO: 134282 - DNA, 80 bp, synthetic construct
  source 1..80: mol_type = other DNA
aattcgggtacggtgcgaaagaggtccggagtcacaccaggagggccatagaccacatcaactccgtgtgggaggaccta

SEQ ID NO: 134283 - DNA, 80 bp, synthetic construct
  source 1..80: mol_type = other DNA
tgaaatggccatgtggagaagtactgccccagaactcaacttggtgttgagtgagggagaagcaaacctgaccattgtgg

SEQ ID NO: 134284 - DNA, 80 bp, synthetic construct
  source 1..80: mol_type = other DNA
ctagctcagctgccttgctgggtggaaatcaaaatctttatatgctgggtcagacattgtgggaaggaactatgaaggtg

SEQ ID NO: 134285 - DNA, 80 bp, synthetic construct
  source 1..80: mol_type = other DNA
ctggccaatctaatcaccatcaatgctgccgcagccgctggcactcatgggctcttctactccatcctcttcatctgcgt

SEQ ID NO: 134286 - DNA, 80 bp, synthetic construct
  source 1..80: mol_type = other DNA
gacagggaggttctctaccaggagttcgatgagatggaagagtgcgcctctagggcggctctcatcgaagagaggcagcg

SEQ ID NO: 134287 - DNA, 80 bp, synthetic construct
  source 1..80: mol_type = other DNA
agccgtgaatgtcccgaggacagacgagaatatccagggacgccccgaccatccccgtgtgaccgtccatgaggacccca

SEQ ID NO: 134288 - DNA, 80 bp, synthetic construct
  source 1..80: mol_type = other DNA
ggcgcgggcgacgccatggcgcccggcgcgccggacttctgcgaggacgaggcgcactcgcaccgcgcctgcgcgcgctg

SEQ ID NO: 134289 - DNA, 80 bp, synthetic construct
  source 1..80: mol_type = other DNA
cggctaggttaggaaacatggtgctgctcggtcccgcggatgatatgcgtcacggaggatggaagctcttggctcccatc

SEQ ID NO: 134290 - DNA, 80 bp, synthetic construct
  source 1..80: mol_type = other DNA
tgtctgtggtcctgtctactgcttcacccctagtcctgtagtggttggcaccactgacaggaaggggcttcccacgtaca

SEQ ID NO: 134291 - DNA, 80 bp, synthetic construct
  source 1..80: mol_type = other DNA
aacccccccatgaatgtgtgtaaccccccaaaaaataaagagccgtaacccaatcaaaccaggcgtggtgtgagtttgtg

SEQ ID NO: 134292 - DNA, 80 bp, synthetic construct
  source 1..80: mol_type = other DNA
atgggaaggccgtactccagcaccttcatgaggttcccgaactcgtgctccacacatcgcttgttgttaatgaaaatggc

SEQ ID NO: 134293 - DNA, 80 bp, synthetic construct
  source 1..80: mol_type = other DNA
cgccccgcgcgtcattttggaggtccgcgcgggagtggcgtgcgagcgcccgccggcgcccacgaggcccccgtggagtg

SEQ ID NO: 134294 - DNA, 80 bp, synthetic construct
  source 1..80: mol_type = other DNA
gcaggcggaaggacaacggaaatgccggtggaatgtccaaggaacatgcggcgggatgtacaacggatatggtgggatgt

SEQ ID NO: 134295 - DNA, 80 bp, synthetic construct
  source 1..80: mol_type = other DNA
gtgactcgtaccttggtcatctaatcacgctgtaccaggaggctattggccagacgcaggtggacgaacagaccttccag

SEQ ID NO: 134296 - DNA, 80 bp, synthetic construct
  source 1..80: mol_type = other DNA
atgggagattcttatggattccagtactctcccgctcagcgggtggagtttctcctaaaagcatgggcggaaaagaagga

SEQ ID NO: 134297 - DNA, 80 bp, synthetic construct
  source 1..80: mol_type = other DNA
taaaccctctgagtaactctctcattcggcaccacaacctagtgtattctacttccacaaaaagcgcatccttgcgccaa

SEQ ID NO: 134298 - DNA, 80 bp, synthetic construct
  source 1..80: mol_type = other DNA
tcccaaggggccccgggtcgacccgacccacacccacccacccacatacacacacaaccagacgcgggaggaaagtctgc

SEQ ID NO: 134299 - DNA, 80 bp, synthetic construct
  source 1..80: mol_type = other DNA
ggcaagtttctggcagatgggggctgttcgggaggcgcttatgacatcatcatctgcgatgagtgccactccacggaccc

SEQ ID NO: 134300 - DNA, 80 bp, synthetic construct
  source 1..80: mol_type = other DNA
cgctaacgtgattactacaacggaatctgatcgtattgctgggttatttaacatcccagcggggatcattccaactggaa

SEQ ID NO: 134301 - DNA, 80 bp, synthetic construct
  source 1..80: mol_type = other DNA
gccacttttgattactctaaatgcaaatttgttgagctatggaatttcttaaactgctataatgctacaatggatatgcc

SEQ ID NO: 134302 - DNA, 80 bp, synthetic construct
  source 1..80: mol_type = other DNA
ggaactcaatgcgatctttgaagacaatgagatcgatttgtcaatagtggttcaagaagacccaaagttttacagaagag

SEQ ID NO: 134303 - DNA, 80 bp, synthetic construct
  source 1..80: mol_type = other DNA
acccaccatgcgggagggacaagcttatcccgctaactacccttacccccttattggtcaaacggccgtgccaagcctga

SEQ ID NO: 134304 - DNA, 80 bp, synthetic construct
  source 1..80: mol_type = other DNA
ggtcgacagtaataaaacgccccgggcgttcaaagcggacacgtccggcgggccggtccagttcccggcccaggcatgag

SEQ ID NO: 134305 - DNA, 80 bp, synthetic construct
  source 1..80: mol_type = other DNA
caggcgacggcgtgctatccgcaagcaattgcggggtggttttttgccagccttaattccaattatcgctgctgcgattg

SEQ ID NO: 134306 - DNA, 80 bp, synthetic construct
  source 1..80: mol_type = other DNA
ctctgcccctcctggtgatccccccagaccggaatatgacctggagctaataacatcctgttcctcaaatgtgtctgtgg

SEQ ID NO: 134307 - DNA, 80 bp, synthetic construct
  source 1..80: mol_type = other DNA
tgggggcagcttatggcttccaatattcaccgcagcagagggttgagtacctcttaaagctgtggcgtgggaagaagacc

SEQ ID NO: 134308 - DNA, 80 bp, synthetic construct
  source 1..80: mol_type = other DNA
ggcgggccgggtctctgtccgtctagctggcgctccccgccggccgccgccatgaccgcaccacgctcgcgggcccccac

SEQ ID NO: 134309 - DNA, 80 bp, synthetic construct
  source 1..80: mol_type = other DNA
ttcttgctagaaatcttaaaaagctgtggacgggcttcgacgagcgcaccgtcgcctcggacctggccgagatcgtcttc

SEQ ID NO: 134310 - DNA, 80 bp, synthetic construct
  source 1..80: mol_type = other DNA
caagagagcactcgcacctccagtgaatgacctgaaatactcatggaagacatggggaaaagcaaagatcttcactccag

SEQ ID NO: 134311 - DNA, 80 bp, synthetic construct
  source 1..80: mol_type = other DNA
gtggcgtcgcaggcggaaaatacgtccaggccgcgctattgcgcttaggtgcatggactggtacatacatctatgaccac

SEQ ID NO: 134312 - DNA, 80 bp, synthetic construct
  source 1..80: mol_type = other DNA
ttggacctggcttcctcctcaaggacgtcttgctatggacaccatacttcgttagggcccacgccttgctgaagatgtgc

SEQ ID NO: 134313 - DNA, 80 bp, synthetic construct
  source 1..80: mol_type = other DNA
tttcgcccgcgtgtgcatcacatcgtgcaggactgcaattgctccatctacactggccagatcactggacatcgcatggc

SEQ ID NO: 134314 - DNA, 80 bp, synthetic construct
  source 1..80: mol_type = other DNA
actcccctgtcaattcctggctgggtaacatcgtccagtacgcccctacaatctgggtccggatggtcataatgactcac

SEQ ID NO: 134315 - DNA, 80 bp, synthetic construct
  source 1..80: mol_type = other DNA
accggctgtactgcggcggccctatgtataactctcggggccagtcatgtggaactcggaggtgcagggccagtggtgtc

SEQ ID NO: 134316 - DNA, 80 bp, synthetic construct
  source 1..80: mol_type = other DNA
ttggagacaccgggcccggagcgtccgcgctaagcttctgtccagaggaggcagggccgccacatgcggcaaatacctct

SEQ ID NO: 134317 - DNA, 80 bp, synthetic construct
  source 1..80: mol_type = other DNA
gacaccgcgcccctggatgtttgccccgggacccccggcccgggcgccgacgccggtggtccctcagcggtagacccaca

SEQ ID NO: 134318 - DNA, 80 bp, synthetic construct
  source 1..80: mol_type = other DNA
gtgaactgagtcctctcttgttctcaaccactgagctcgcgatcctcccgtgttctttcacacccatgccggccttgtca

SEQ ID NO: 134319 - DNA, 80 bp, synthetic construct
  source 1..80: mol_type = other DNA
gcttacaggccccacccccctgctatacaggctggggcctgtgcaaaatgagaccactaccacacatccaatcaccaaat

SEQ ID NO: 134320 - DNA, 80 bp, synthetic construct
  source 1..80: mol_type = other DNA
tgctccatttggtggaatcagtatttcctcgcccgagctgaggccatgatacacgagtgggtgcccgacctacgggttag

SEQ ID NO: 134321 - DNA, 80 bp, synthetic construct
  source 1..80: mol_type = other DNA
gatgggaaagcccctcagaaccgtttcggagagggaccctgcctattggaagcgtccagcccgtgtcaggccgcaaagcg

SEQ ID NO: 134322 - DNA, 80 bp, synthetic construct
  source 1..80: mol_type = other DNA
gtgtgtaggcgatgcgggtcccccgagtccgcgggaagggcgtgggtttggcgcgcgtatgcgtattcgccaacggaggc

SEQ ID NO: 134323 - DNA, 80 bp, synthetic construct
  source 1..80: mol_type = other DNA
gggcataagtgaaattgctaagggaaatccgtttgccatggaaattaacctccaagctaatctctggagaagttttcttt

SEQ ID NO: 134324 - DNA, 80 bp, synthetic construct
  source 1..80: mol_type = other DNA
aaaggtttgcgggcctgtatactgtttcacacccagccccgtggtagtggggacgacggacagagccggcgttcctacct

SEQ ID NO: 134325 - DNA, 80 bp, synthetic construct
  source 1..80: mol_type = other DNA
cagaaccactactgacagtggaaagttgatcactgactggtgctgtcgcagttgctcccttccgcccctacgattccgga

SEQ ID NO: 134326 - DNA, 80 bp, synthetic construct
  source 1..80: mol_type = other DNA
tgtcaggagcgcttgtcgcgtttaagatcatgagcggcgagacacccgcagccgaggacatggtgaacctgctcccagct

SEQ ID NO: 134327 - DNA, 80 bp, synthetic construct
  source 1..80: mol_type = other DNA
atatccgaactgaagaggacatctaccaatcttgccaactagaccctaccgcgaggaaagcaatatcatccctcacagaa

SEQ ID NO: 134328 - DNA, 80 bp, synthetic construct
  source 1..80: mol_type = other DNA
ccgctcgggaacgcccgcgttgtcgccgcggatcaggttggcaggcgtcaggcaccgcgccagccgcagggagctcgcgc

SEQ ID NO: 134329 - DNA, 80 bp, synthetic construct
  source 1..80: mol_type = other DNA
tcgagctggtcgacgacgggtacgatacagtcgaagaggctcgtgttgttttccgagtagcggaccacggaggcccggag

SEQ ID NO: 134330 - DNA, 80 bp, synthetic construct
  source 1..80: mol_type = other DNA
caccccggcctgcgtatgcgtgcgggccccgttctcgatcaaaaaggcgaggacgcgctcaaagaagaagatgacgcaga

SEQ ID NO: 134331 - DNA, 80 bp, synthetic construct
  source 1..80: mol_type = other DNA
tcttcagccagccagctatctgctccatccttgaaggcgacatgtaccacccatcaagactccccagacgccgagctcat

SEQ ID NO: 134332 - DNA, 80 bp, synthetic construct
  source 1..80: mol_type = other DNA
atacacatggaaggtgtatttcacacaatgtggcatgtcacaagaggatcggtgatctgccacgagactgggagattgga

SEQ ID NO: 134333 - DNA, 80 bp, synthetic construct
  source 1..80: mol_type = other DNA
acgacttcctcgtacgcatgggccgccaacagtcggtattaaggcgtcgacgcagacgcacccgctgcgtcggcatggtg

SEQ ID NO: 134334 - DNA, 80 bp, synthetic construct
  source 1..80: mol_type = other DNA
caccctgacttgtcccaccgattgcttccgaaaacatccggaggcaacgtatactagatgtggttcaggtccttggctga

SEQ ID NO: 134335 - DNA, 80 bp, synthetic construct
  source 1..80: mol_type = other DNA
ggaggagcagatggagagctgggacagcctagacgaggaggacctagaggacgtggaggaagaaaccatcgccagcgaca

SEQ ID NO: 134336 - DNA, 80 bp, synthetic construct
  source 1..80: mol_type = other DNA
tcagagtacttgctccccacaagggaaaaattcccatcagcgctgccagtgtgggcacggcccgactacaacccgccggt

SEQ ID NO: 134337 - DNA, 80 bp, synthetic construct
  source 1..80: mol_type = other DNA
aatgacatccctagccacaaggatcagcttcgccagcgccaggcgaccgatcagagagttttcgtccagcacgtgctgga

SEQ ID NO: 134338 - DNA, 80 bp, synthetic construct
  source 1..80: mol_type = other DNA
tctctcgtgcctcactacccccgtctccgcaattcatgccaagaacgcgtcaggggtttatcatctcaccaatgactgtc

SEQ ID NO: 134339 - DNA, 80 bp, synthetic construct
  source 1..80: mol_type = other DNA
gttgagtttaaggaaccagcttgcaatgttacatttaaatcagaagctaatgaatgcactactcttataaaatgcaccac

SEQ ID NO: 134340 - DNA, 80 bp, synthetic construct
  source 1..80: mol_type = other DNA
tgaagagattcaggaaagaggaggagtcggagggagccatttggtaaacgtaggaagtgaaaaagaggctaactgtcagg

SEQ ID NO: 134341 - DNA, 80 bp, synthetic construct
  source 1..80: mol_type = other DNA
cctgcactgtcatccggactgatccacctccatcagaatgttgtggacgtgcaatacctatatggagtatccacgagcac

SEQ ID NO: 134342 - DNA, 80 bp, synthetic construct
  source 1..80: mol_type = other DNA
cagtcaaccgcgcttacgcacgtgtttaatcgctttcccgagaaccagatactggtgcgtccaccagccgctaccatcac

SEQ ID NO: 134343 - DNA, 80 bp, synthetic construct
  source 1..80: mol_type = other DNA
agacctatctgatggctcttggtcgacagtcagcacaaaatctgaggtggtttgctgctccatgtcctactcttggacgg

SEQ ID NO: 134344 - DNA, 80 bp, synthetic construct
  source 1..80: mol_type = other DNA
gccgcgtgtcggcgccggcctcgccgccgtcgtccgcgcggcccacgcagtagcgaaacagcaggcttcgggccgtcggc

SEQ ID NO: 134345 - DNA, 80 bp, synthetic construct
  source 1..80: mol_type = other DNA
actgtccgacttcaagacctggctgaaggccaagctactaccccagatgcccggcgtcccctttttctcctgtcaaaagg

SEQ ID NO: 134346 - DNA, 80 bp, synthetic construct
  source 1..80: mol_type = other DNA
atgtgttttatcttccgcctgaaaagtgtgacaccctgttgtgcgacattggagaatcttcaccaagcccaacagtggaa

SEQ ID NO: 134347 - DNA, 80 bp, synthetic construct
  source 1..80: mol_type = other DNA
gtgcgcagaagaggcgacactcgtggcgccctcctaagccccaggccaatttcaactcttaaggggtcatccggtgggcc

SEQ ID NO: 134348 - DNA, 80 bp, synthetic construct
  source 1..80: mol_type = other DNA
agtcccatttcaagtcgggcccattcggccacttggggattggcagcaaggaacgcttgccacagctgggtggcaaaatg

SEQ ID NO: 134349 - DNA, 80 bp, synthetic construct
  source 1..80: mol_type = other DNA
gctcgcaatatggcagctgattttagtctctacagccaattgacatcgaatgccgcaatgcgcactgcagtccgaggaga

SEQ ID NO: 134350 - DNA, 80 bp, synthetic construct
  source 1..80: mol_type = other DNA
ccaatgttgtgacctggacccccaagcccgcgtggccatcaagtccctcactgagaggctttatgttgggggccctctta

SEQ ID NO: 134351 - DNA, 80 bp, synthetic construct
  source 1..80: mol_type = other DNA
ggaaaatcaagaggacagtgagtgctttgatggttggcttgcaaaggcgcggaaaaaggaggtcagtgacgaactggatg

SEQ ID NO: 134352 - DNA, 80 bp, synthetic construct
  source 1..80: mol_type = other DNA
attctacccatgagatgtattgggtgtcaggtgcgtcgggaaacatcgtgagttctgtgaacacaacatcaaagatgctg

SEQ ID NO: 134353 - DNA, 80 bp, synthetic construct
  source 1..80: mol_type = other DNA
tctaaaaccttagccggccctaagggccccatttgccaaatgtacaccaatgtggaccaggacatggtggggtggccagc

SEQ ID NO: 134354 - DNA, 80 bp, synthetic construct
  source 1..80: mol_type = other DNA
ccctggtgagacatcttgcgggagctaggtatatccagatgctgttgatcaccatgggcaggtggaccggcacttacatc

SEQ ID NO: 134355 - DNA, 80 bp, synthetic construct
  source 1..80: mol_type = other DNA
tccaccccccaggaggaagaagactgtacaactcagcgagtctacaatgtcacttgcgcttgcgcagctcgccgagaagt

SEQ ID NO: 134356 - DNA, 80 bp, synthetic construct
  source 1..80: mol_type = other DNA
gacatctggagacgtcgttgtgtgcgcgaccgatgccctcatgactggctacactggtgactttgactcagtgatagact

SEQ ID NO: 134357 - DNA, 80 bp, synthetic construct
  source 1..80: mol_type = other DNA
tgttggaaactacaaagagagacttaggaatgtccaaggagccaggcactagctatttggatgtggacttgcacccagca

SEQ ID NO: 134358 - DNA, 80 bp, synthetic construct
  source 1..80: mol_type = other DNA
tctcttggagagcatgcggccccccgcggggggatggtacggatgcacctggatgaattccaccggattcaccaagacgt

SEQ ID NO: 134359 - DNA, 80 bp, synthetic construct
  source 1..80: mol_type = other DNA
acaaaaccaggaatctatcgaatcatgaccaggggaatcctgggcacctttcaagctggagttggtgtgatgcatgaagg

SEQ ID NO: 134360 - DNA, 80 bp, synthetic construct
  source 1..80: mol_type = other DNA
cattccagctagacgtaggggagacaatcgggcatctctgctcagcccgcggcccataagtaccctcaaagggtcttctg

SEQ ID NO: 134361 - DNA, 80 bp, synthetic construct
  source 1..80: mol_type = other DNA
atggtgctgttgataccagaaccagaaaaacaaaggaccccacaagacaatcaattgatctacgtcatattgaccattct

SEQ ID NO: 134362 - DNA, 80 bp, synthetic construct
  source 1..80: mol_type = other DNA
cctaacagcagcatcgtgttcgaggccgagaacatgattttgcacctccccggctgtgtcccatgcgttaaggttgaaaa

SEQ ID NO: 134363 - DNA, 80 bp, synthetic construct
  source 1..80: mol_type = other DNA
gcacgactatctgtgcgacgccagcatccgcggtggaagatatggctggacgctggaacacgatgaagctggcgtatgta

SEQ ID NO: 134364 - DNA, 80 bp, synthetic construct
  source 1..80: mol_type = other DNA
agggggggccgagcgtttcgttttctcccccgaagtcaggtcttcgacgctggaaggcggagtccaggttggtcgtcggc

SEQ ID NO: 134365 - DNA, 80 bp, synthetic construct
  source 1..80: mol_type = other DNA
ggttttcctggccaataccaaccttatcctacacggtgtaagcttctatgggtttaacaatacctgcgtggaagcctgga

SEQ ID NO: 134366 - DNA, 80 bp, synthetic construct
  source 1..80: mol_type = other DNA
acgtcatcgtgctggtacccagtgtcgcctacattggcagctcccaacgcctccgtgcctgtgagggggttccgtaagca

SEQ ID NO: 134367 - DNA, 80 bp, synthetic construct
  source 1..80: mol_type = other DNA
cccgccgagaccacagtcaggctacgagcatacatgaacactccgggtcttcccgtgtgccaagaccaccttgaattttg

SEQ ID NO: 134368 - DNA, 80 bp, synthetic construct
  source 1..80: mol_type = other DNA
ctcgtgttggccaccaacaacgctcagttcatcatggataacagctacccgcatccgcacggaacgcagggtgcggtgcg

SEQ ID NO: 134369 - DNA, 80 bp, synthetic construct
  source 1..80: mol_type = other DNA
tgacccgctggcgctcaaagaattcaaagagtttgcagccggaagaaaatccttgaccctgaatctaatcacagaaatgg

SEQ ID NO: 134370 - DNA, 80 bp, synthetic construct
  source 1..80: mol_type = other DNA
caactcgtcaggatgtcccgaacgcatgtccgcctgccgcagtatcgaggccttccgggtgggatggggcgccttgcaat

SEQ ID NO: 134371 - DNA, 80 bp, synthetic construct
  source 1..80: mol_type = other DNA
ctccgttttaatggcccaggataccctaggccaagacctcaatttcgagatgtacggagctgtgtactcagtaagtcctc

SEQ ID NO: 134372 - DNA, 80 bp, synthetic construct
  source 1..80: mol_type = other DNA
tcgacgcggcgccgagtatcaaagagcgcccccaggcggccggcgtgccgcgccaggtggccggtgccgtcgccgcgggc

SEQ ID NO: 134373 - DNA, 80 bp, synthetic construct
  source 1..80: mol_type = other DNA
aaggagaaggacgagtgatactaggggaaccctctgccattacggctgctagtgcagcccaaaggagaggacgcattgga

SEQ ID NO: 134374 - DNA, 80 bp, synthetic construct
  source 1..80: mol_type = other DNA
aactgtcgcccttgctcctctccaccacgcagtggcagatcctcccctgttccttcactaccttgcctgctctctcgact

SEQ ID NO: 134375 - DNA, 80 bp, synthetic construct
  source 1..80: mol_type = other DNA
gccccccctggaggtggagcctggggatccggatctcagcgacgggtcatggtcgacggttagtagtagggctgacacgg

SEQ ID NO: 134376 - DNA, 80 bp, synthetic construct
  source 1..80: mol_type = other DNA
acggacgccctcatgaccgggtacacgggcgatttcgactctgtgattgactgcaatgtcgcagtgactcagatagttga

SEQ ID NO: 134377 - DNA, 80 bp, synthetic construct
  source 1..80: mol_type = other DNA
gataaaggaccgggcttccaacgtcagcgctagactcctctcaacagaggaggcatgcaagctcacccccccgcactcgg

SEQ ID NO: 134378 - DNA, 80 bp, synthetic construct
  source 1..80: mol_type = other DNA
catagctcggcgagcgtgtcgtcgaacgccaggcggctgcttcgctggatggccttatagatctccggatcgatgcggac

SEQ ID NO: 134379 - DNA, 80 bp, synthetic construct
  source 1..80: mol_type = other DNA
tccagcaacagggtacccactgggtggcccttgcggacatacaaaaatcggtccgtgtgattaaaaagcagcacagtaag

SEQ ID NO: 134380 - DNA, 80 bp, synthetic construct
  source 1..80: mol_type = other DNA
cttggagatgaagacaatacgcgattgtgatagtttttaaaaaaactatcatctgcagtaaccatttatgtgatgccatg

SEQ ID NO: 134381 - DNA, 80 bp, synthetic construct
  source 1..80: mol_type = other DNA
agcgacggatcctggtcgactgtaagcagtgaggctggtactgaggatgttgtgtgttgttccatgtcttatacatggac

SEQ ID NO: 134382 - DNA, 80 bp, synthetic construct
  source 1..80: mol_type = other DNA
cggtcccagccacgtgggagacgccagcccatccctaaacatcggcgccccactggcaagtcctggggacacccaggata

SEQ ID NO: 134383 - DNA, 80 bp, synthetic construct
  source 1..80: mol_type = other DNA
cccattttttctccatactcatagcccaggaacaccttgaaaaggctctagattgtgaaatctatggggccgtgcactcc

SEQ ID NO: 134384 - DNA, 80 bp, synthetic construct
  source 1..80: mol_type = other DNA
acctccgagccaaaccccatcattgtggacgatcgatctgaagatggatcattctcatcaatgcctccactggaagggga

SEQ ID NO: 134385 - DNA, 80 bp, synthetic construct
  source 1..80: mol_type = other DNA
gcgtgagggttctggaggacgggataaactatgcaaccggaaacctacctggttgctccttttctatcttcttgcttgct

SEQ ID NO: 134386 - DNA, 80 bp, synthetic construct
  source 1..80: mol_type = other DNA
gtggcgccggatgccctctgggacgtcatacgccaggccgtgggtgttggtctcggccgagttgacaaacagggctgggt

SEQ ID NO: 134387 - DNA, 80 bp, synthetic construct
  source 1..80: mol_type = other DNA
ctggggggtcctggcaggactggccttcttttccatgcagggcaattgggctaaagtcatcttggtcctcttccttttcg

SEQ ID NO: 134388 - DNA, 80 bp, synthetic construct
  source 1..80: mol_type = other DNA
ggcggtatagagcatcggttgcaagcagcatgcaactggaccaggggggaagcctgcggcttggagcatagagatcgcgc

SEQ ID NO: 134389 - DNA, 80 bp, synthetic construct
  source 1..80: mol_type = other DNA
agggagaggtggtgggtctttacgggaatggcctgaagaccaatgaagcttatgttagtagcatagcacaaggagaagcc

SEQ ID NO: 134390 - DNA, 80 bp, synthetic construct
  source 1..80: mol_type = other DNA
ttctaggagggtgggtggcctcgcagatcgcgccacccacggccgccactgcgttcgtcgttagtgggatggccggtgcc

SEQ ID NO: 134391 - DNA, 80 bp, synthetic construct
  source 1..80: mol_type = other DNA
ggtgaactggtcactttcagaagccccaatggggctgagcggaaattgaaaccagtctggaaggacagtagaatgttccg

SEQ ID NO: 134392 - DNA, 80 bp, synthetic construct
  source 1..80: mol_type = other DNA
atcggggtcccccgggtcagccgccaacccggaggtcacccccacatcgaccccaaaccccaacaatgtcacacaaaaca

SEQ ID NO: 134393 - DNA, 80 bp, synthetic construct
  source 1..80: mol_type = other DNA
ggtctcgggcctcgcaggggcggcagtgggtagtgttggcttgggcaaggtcttagttgatgtcctggccggctatggcg

SEQ ID NO: 134394 - DNA, 80 bp, synthetic construct
  source 1..80: mol_type = other DNA
ttctattgtggcatcactttcagacctcactcccataggcaggatggtaacggcgaatccttatgtggcatcttcagagg

SEQ ID NO: 134395 - DNA, 80 bp, synthetic construct
  source 1..80: mol_type = other DNA
tgcgccaccacaacatggtgtactccaccacgtcgcgcagtgcgagccagaggcagaaaaaggtcacatttgacagactg

SEQ ID NO: 134396 - DNA, 80 bp, synthetic construct
  source 1..80: mol_type = other DNA
gggggcgtcttggccgctctggccgcatactgcctatccgtagggagtgtggtcatagtgggcaggattgtcttgtccgg

SEQ ID NO: 134397 - DNA, 80 bp, synthetic construct
  source 1..80: mol_type = other DNA
gcaggttgggcacttacaggtacgtgtcaccaggagaacgaccgtctggcatgtttgactccgcagtcctctgtgagtgc

SEQ ID NO: 134398 - DNA, 80 bp, synthetic construct
  source 1..80: mol_type = other DNA
cccatgggattgatcctaacatcaggactggggtgaggacaatcactactggcagccccatcacgtactccacctacggc

SEQ ID NO: 134399 - DNA, 80 bp, synthetic construct
  source 1..80: mol_type = other DNA
cgggcagtaccgctccatcaagccccgcagtaatccctgtctccggggttccaccaagctcctcatgagtgacctaacgg

SEQ ID NO: 134400 - DNA, 80 bp, synthetic construct
  source 1..80: mol_type = other DNA
caattgaaaatacaacggcaaacatttccctgacagccattgcaaatcaggcagccatattgatgggacttgacaaggga

SEQ ID NO: 134401 - DNA, 80 bp, synthetic construct
  source 1..80: mol_type = other DNA
agcgcgcccagtttggtgcgatggccctcaaccgtggggagatagcccagcccaaagtcccgggcccaggccaacacacg

SEQ ID NO: 134402 - DNA, 80 bp, synthetic construct
  source 1..80: mol_type = other DNA
tttgacaggctgcaggtcctggacgatcattaccgggacgtgctcaaggaggctaaggccaaggcatccacagtgaaggc

SEQ ID NO: 134403 - DNA, 80 bp, synthetic construct
  source 1..80: mol_type = other DNA
gagtcgtactacttcggggcttgtgagcctctttagcactggtcccaagcagcggctcaatttgatcaacaccaacggca

SEQ ID NO: 134404 - DNA, 80 bp, synthetic construct
  source 1..80: mol_type = other DNA
ctcagccccatcactgaaagcaacatgcaccacgcatggggtgcatgccgatgcggatctgatagaagcaaacttgttgt

SEQ ID NO: 134405 - DNA, 80 bp, synthetic construct
  source 1..80: mol_type = other DNA
tctatcagtgctgcaacctcgaccccgaggctcgcaccatcattaacgcccttaccgagaggttgtacgtggggggaccc

SEQ ID NO: 134406 - DNA, 80 bp, synthetic construct
  source 1..80: mol_type = other DNA
ccaccctccacgggcccactcccctactatatcggttagggggtgtgcaaaatgaggtgacactaacccaccccgtcact

SEQ ID NO: 134407 - DNA, 80 bp, synthetic construct
  source 1..80: mol_type = other DNA
ctggtgcgcgggggtatcgtgtcgtgtgcagtaaagtccggcatattcaccgcccgggtgctcaccgcgggatccgcaga

SEQ ID NO: 134408 - DNA, 80 bp, synthetic construct
  source 1..80: mol_type = other DNA
tcatgaaaactgagaactggatcataaggaatcctggctatgctttcctggcggcggtacttggctggatgcttggcagt

SEQ ID NO: 134409 - DNA, 80 bp, synthetic construct
  source 1..80: mol_type = other DNA
accgagctggacggagtccggatacacaggtacgcccccccagctaaacctctcctgagagatgaggtaacattcagcgt

SEQ ID NO: 134410 - DNA, 80 bp, synthetic construct
  source 1..80: mol_type = other DNA
ggaaaaagaggaacaggctctcaaggtgaaactttaggagaaaaatggaaaaagaaattgaatcaattatcccggaaaga

SEQ ID NO: 134411 - DNA, 80 bp, synthetic construct
  source 1..80: mol_type = other DNA
ggagacaggagatgggcgggaacataactcgggtggagtcagaaaacaagatcgtcatcctcgactcgtttgagccttta

SEQ ID NO: 134412 - DNA, 80 bp, synthetic construct
  source 1..80: mol_type = other DNA
ccactgggttccgacaagtcgaaccacttggtccatccatgcacatcatcaatggatgacaactgaggacatgctagacg

SEQ ID NO: 134413 - DNA, 80 bp, synthetic construct
  source 1..80: mol_type = other DNA
atccacctgccctgcccatatgggcgaggcccgactacaacccaccaactttggagacttggaagagaccggattacacc

SEQ ID NO: 134414 - DNA, 80 bp, synthetic construct
  source 1..80: mol_type = other DNA
cagcagagagtgttcaaagaaaaggtggacacgaaggcacctgaaccaccagaaggggtgagaaaagttttggatgaaac

SEQ ID NO: 134415 - DNA, 80 bp, synthetic construct
  source 1..80: mol_type = other DNA
acgacgacgcccttgactccgattcgtcatcggatgactccctgcagatagatggccccgtgtgtcgcccgtggagcaat

SEQ ID NO: 134416 - DNA, 80 bp, synthetic construct
  source 1..80: mol_type = other DNA
agttacaaggcaaaatcagattgccaagggcaacctgtatgccatggagatcaacctccaggccaacctgtggaagagtt

SEQ ID NO: 134417 - DNA, 80 bp, synthetic construct
  source 1..80: mol_type = other DNA
ttgggagactgcccggcacactccagtcaactcgtggctgggaaacatcatcatgtacgctcctgctatttgggtccgta

SEQ ID NO: 134418 - DNA, 80 bp, synthetic construct
  source 1..80: mol_type = other DNA
aattgggccaaggtcgtcatcgtgctaatcatgttttcaggagtggacgcgacaacacacaccactggtggcagcgcggc

SEQ ID NO: 134419 - DNA, 80 bp, synthetic construct
  source 1..80: mol_type = other DNA
agctaacatctctggcccttcatctgaaaagccatactgctggcattatgcacctagaccttgcgacactgtccccgctc

SEQ ID NO: 134420 - DNA, 80 bp, synthetic construct
  source 1..80: mol_type = other DNA
gtttatacttaatgcgcgaggggatgaccccatcctcggctctggatatgacggcccgcaacatggaaccgtcgctgtat

SEQ ID NO: 134421 - DNA, 80 bp, synthetic construct
  source 1..80: mol_type = other DNA
ttaatgaccagacaccgtcctgagtgtgttacttttcagcagattaaggataattgcgctaatgagcttgatctgctggc

SEQ ID NO: 134422 - DNA, 80 bp, synthetic construct
  source 1..80: mol_type = other DNA
ccgtagcgtattaccgtggcctcgacgtatccgtcattccatctagcggagacgtcgttgtcgtagcaacggatgcgctg

SEQ ID NO: 134423 - DNA, 80 bp, synthetic construct
  source 1..80: mol_type = other DNA
tagacctctattctagactgtcgacaggtcttataagtatactaaattcgcctattatttctcatcccggactttttgcc

SEQ ID NO: 134424 - DNA, 80 bp, synthetic construct
  source 1..80: mol_type = other DNA
gaaaccccagggtcacgcgggcaacgtcgccctcgaagctgctctcggcgtgggccgtctggccggccgttaggctggtg

SEQ ID NO: 134425 - DNA, 80 bp, synthetic construct
  source 1..80: mol_type = other DNA
gcgtgcttaatgagaccaccaactggttgtggtcgcacctcgagcgtgaaaagcgtcccaggatgtgctcccgagaggag

SEQ ID NO: 134426 - DNA, 80 bp, synthetic construct
  source 1..80: mol_type = other DNA
aggccccggtgccacctccgcgacggagacgcactgtggtcctgtctgagagcaacgtagggggagttctgaaagatctt

SEQ ID NO: 134427 - DNA, 80 bp, synthetic construct
  source 1..80: mol_type = other DNA
atgaactcgacggggtttgtgaagacgtgtggggccccaccttgcaatataggtcccgccggcgaaaatgataccctacg

SEQ ID NO: 134428 - DNA, 80 bp, synthetic construct
  source 1..80: mol_type = other DNA
agtggcttagcgggggccgctgtaggaagcattgggcttgggaaggtcattgtggatgtgcttgctggttacggagctgg

SEQ ID NO: 134429 - DNA, 80 bp, synthetic construct
  source 1..80: mol_type = other DNA
acatctggaagcaacggttgaactcatgcaccaaagaggaattttttgcttacagacgcacaggagtcatggagaccaac

SEQ ID NO: 134430 - DNA, 80 bp, synthetic construct
  source 1..80: mol_type = other DNA
gcttgggatatgatgatgaactggtctccaacgaccaccatagctctggcgtacgcgttgcgcgttcccggagtcatttt

SEQ ID NO: 134431 - DNA, 80 bp, synthetic construct
  source 1..80: mol_type = other DNA
caacatttaaaatccagccattcctggctttgggatttttcctaagaaaactgacatctagagaaaatttactgttagga

SEQ ID NO: 134432 - DNA, 80 bp, synthetic construct
  source 1..80: mol_type = other DNA
accagacctggcagatagagagggcatctctcattgaagtgaaaacatgtctgtggcccaagacccacacattgtggagc

SEQ ID NO: 134433 - DNA, 80 bp, synthetic construct
  source 1..80: mol_type = other DNA
aaaacgttaaggctggtgggagggcattaaagcaaaccactgcaatgcagccgtgctatggctcctacgctcgtccaacc

SEQ ID NO: 134434 - DNA, 80 bp, synthetic construct
  source 1..80: mol_type = other DNA
tcgcagcccgccacaaacggtagctcctcgttggcctcgctgccaacaaaccgcacgtcgggtgcgccgggggggtccgg

SEQ ID NO: 134435 - DNA, 80 bp, synthetic construct
  source 1..80: mol_type = other DNA
accaaccagaccatgttcttcaacatactcgggggttgggttgccacccacctggccggacctcaagcttcctcagcgtt

SEQ ID NO: 134436 - DNA, 80 bp, synthetic construct
  source 1..80: mol_type = other DNA
aagtggcaagtgggattgatgttgcccaaaccgtggtgatgtcactcggcagtagcaaagaccacctgccttctgcatgg

SEQ ID NO: 134437 - DNA, 80 bp, synthetic construct
  source 1..80: mol_type = other DNA
tcagctgctacagcttggatggtgttgcgagcaatggcttttccgtcaacctcagcaatagccatgcccatgctagcaat

SEQ ID NO: 134438 - DNA, 80 bp, synthetic construct
  source 1..80: mol_type = other DNA
aggaagcatgtagcctgacgcccccgcactccgccagatcaaaatttggctacggggcgaaggatgtccgaagccactcc

SEQ ID NO: 134439 - DNA, 80 bp, synthetic construct
  source 1..80: mol_type = other DNA
atggggccggctcaaagaccttagccggcccaaaaggcccgatcgcccaaatgtacaccaatgtagaccaggacctcgtc

SEQ ID NO: 134440 - DNA, 80 bp, synthetic construct
  source 1..80: mol_type = other DNA
acagggtttgtcaagacttgcggggctccaccctgcaacttagggcctacaggcaacaatagccttaagtgtcctactga

SEQ ID NO: 134441 - DNA, 80 bp, synthetic construct
  source 1..80: mol_type = other DNA
tcaaagacccttgctggccctaaaggacctgtctgccagatgtacaccaatgtggatcaagatatggtaggctggccagc

SEQ ID NO: 134442 - DNA, 80 bp, synthetic construct
  source 1..80: mol_type = other DNA
acctgtatccggagacgtggtagtatgtgctactgatgccctcatgaccggatatacaggggattttgacaccgttatag

SEQ ID NO: 134443 - DNA, 80 bp, synthetic construct
  source 1..80: mol_type = other DNA
tttctccggccgtgaataacttcgtataatgtatgctatacgaagttatgcggccgcgggaagcttggatctgatatcat

SEQ ID NO: 134444 - DNA, 80 bp, synthetic construct
  source 1..80: mol_type = other DNA
gagtaggagtcatggtggagggagtgttccacactctatggcatacgaccaagggtgctgccttgatgagcggtgaaggc

SEQ ID NO: 134445 - DNA, 80 bp, synthetic construct
  source 1..80: mol_type = other DNA
gtggcgctgggacccccggtggcccggcggcggacgcggcgccgccgctccggacgcccagcccagctgggcccagcgac

SEQ ID NO: 134446 - DNA, 80 bp, synthetic construct
  source 1..80: mol_type = other DNA
aacacgattcacggcaccgaggacatgacgcccccggccccaaaccgaaaccccgacttccccctcgcgggcctggccgc

SEQ ID NO: 134447 - DNA, 80 bp, synthetic construct
  source 1..80: mol_type = other DNA
ccgtgtgtcaagaccatcttgaattttgggaggcagttttcaccggcctcacacacatagacgcccacttcctctcccaa

SEQ ID NO: 134448 - DNA, 80 bp, synthetic construct
  source 1..80: mol_type = other DNA
ttcccacgttacgtcacttctgccattacatgtaactcagtcataggccgccatcttgcccgcgtccaaaatggcttcca

SEQ ID NO: 134449 - DNA, 80 bp, synthetic construct
  source 1..80: mol_type = other DNA
catgaacttttttgatcaagcgtcacagaaagcaaacttcagtccaaaaattgtgatgtatgcagaaaatgtagacttgg

SEQ ID NO: 134450 - DNA, 80 bp, synthetic construct
  source 1..80: mol_type = other DNA
cccttttaatgagctctgtgattatcccacatcccaatctgaacacagtttaacacatacagtaagcacagtaatctttt

SEQ ID NO: 134451 - DNA, 80 bp, synthetic construct
  source 1..80: mol_type = other DNA
gaggaaagatgaccgacggggcgcactgctctcgccgagacctctctcaaccctcaaaggatcgtccggcgggcccgtgc

SEQ ID NO: 134452 - DNA, 80 bp, synthetic construct
  source 1..80: mol_type = other DNA
tggcgcaggcgctcctggcgggcggttaaaagccgggcctcggcgacgggccccacttacattcgcgtggcggacagcga

SEQ ID NO: 134453 - DNA, 80 bp, synthetic construct
  source 1..80: mol_type = other DNA
cacgcaagggccgattactctttctcggtcctgcggacgacatgaaggacaaagggtggaggttgctggcccccatcacg

SEQ ID NO: 134454 - DNA, 80 bp, synthetic construct
  source 1..80: mol_type = other DNA
gtacctgagcccaactacaccagggccctatggagggtatccgctgaggaatacgtcgagatcaagagcgtggtggacgg

SEQ ID NO: 134455 - DNA, 80 bp, synthetic construct
  source 1..80: mol_type = other DNA
tctgcaccatctttgagggctacgtgcaccactgcccgtgaccatccggatgctgaactactggaggctaacctcctgtg

SEQ ID NO: 134456 - DNA, 80 bp, synthetic construct
  source 1..80: mol_type = other DNA
gatatcatctccagagaagaccaaaggggcagtggacaagtggtcacatacgccctaaacaccttcaccaacctagccgt

SEQ ID NO: 134457 - DNA, 80 bp, synthetic construct
  source 1..80: mol_type = other DNA
cgccaaggcgctggctcctccaccgagctgggatactatgtggaaatgcctgattcgcctcaaacctaccttacacggtc

SEQ ID NO: 134458 - DNA, 80 bp, synthetic construct
  source 1..80: mol_type = other DNA
ctaagacacgtgagtactgtctacacgccaagttgtcggacactaaggttgcagccagatgcccaacgatgggaccagcc

SEQ ID NO: 134459 - DNA, 80 bp, synthetic construct
  source 1..80: mol_type = other DNA
aggggcaagcctgggatatataggtttgtctcgcaaggtgagagaccatctggaatgttcgactccgtcatcctcgctga

SEQ ID NO: 134460 - DNA, 80 bp, synthetic construct
  source 1..80: mol_type = other DNA
ggacacaggatggcgtgggacatgatgatgaattggtcacctacggctggtctgatagtctcctacgccctacgcgtacc

SEQ ID NO: 134461 - DNA, 80 bp, synthetic construct
  source 1..80: mol_type = other DNA
gatggtggttgcgcgggaggcgcgtacgatatcatcatctgtgatgaatgccattccactgatgcgacgacggtcctggg

SEQ ID NO: 134462 - DNA, 80 bp, synthetic construct
  source 1..80: mol_type = other DNA
gcgcgcctactggacttatccagttggttcaccgtcggcgccggcgagggcgacatttttcacagcgtgtcgcgcgcccg

SEQ ID NO: 134463 - DNA, 80 bp, synthetic construct
  source 1..80: mol_type = other DNA
taactcgaaagggcaatcatgtgggtaccgcaggtgccgcgcgagtggcgtgttacccaccagtatgggaaacactataa

SEQ ID NO: 134464 - DNA, 80 bp, synthetic construct
  source 1..80: mol_type = other DNA
cattttatatgaagctgagtcagtcatcctgcacttgcccgggtgcgttccatgcgtcaaggcagggaacgtgtctaggt

SEQ ID NO: 134465 - DNA, 80 bp, synthetic construct
  source 1..80: mol_type = other DNA
cacggcccctaaggatcacgggcggtctgtgggtcccatgctgccgtgcctggccgggcccggtgggtcgcggaaaccgg

SEQ ID NO: 134466 - DNA, 80 bp, synthetic construct
  source 1..80: mol_type = other DNA
gtggcccccgggactctgtaatcatcctcttggtcctgttccggccccacctagcctttgacattgcaaaatacatcctg

SEQ ID NO: 134467 - DNA, 80 bp, synthetic construct
  source 1..80: mol_type = other DNA
tcagggctacaaagtgctcgtgctcaacccttcggtcgcagcgacgttggggttcgggtcatacatgtccaaaacatacg

SEQ ID NO: 134468 - DNA, 80 bp, synthetic construct
  source 1..80: mol_type = other DNA
aaagacggccgctcactggttgttccatgcagaaaccaggatgaactgataggaagagccagaatctcgcagggggctgg

SEQ ID NO: 134469 - DNA, 80 bp, synthetic construct
  source 1..80: mol_type = other DNA
cccggttcgagaccggctggatctgccactcccgacgcgccggccgtgcgtccacgacggaaaccccgccgagacctagc

SEQ ID NO: 134470 - DNA, 80 bp, synthetic construct
  source 1..80: mol_type = other DNA
cgggggccaggccagggagaccggcgacgaccggcccgttctgaccaagtctgcggtggagcggtttctgttgtaccgcc

SEQ ID NO: 134471 - DNA, 80 bp, synthetic construct
  source 1..80: mol_type = other DNA
ccggttttgtgtctcgcgaccgcttatcatgcgctattgttaacactgccggtcgcgaaactgggggcgtacactggctg

SEQ ID NO: 134472 - DNA, 80 bp, synthetic construct
  source 1..80: mol_type = other DNA
cttgcgtgagtgtcctttcgacccccctcccccgggttttgttaggtcgcgatctgcagtcgcaatgaagaccaatccgc

SEQ ID NO: 134473 - DNA, 80 bp, synthetic construct
  source 1..80: mol_type = other DNA
cctaaaacagcacccaatccatgcgaatggaaggacaacaacaaaataaaagttagaggacaagcaccccttataggaac

SEQ ID NO: 134474 - DNA, 80 bp, synthetic construct
  source 1..80: mol_type = other DNA
acgagactgggagattggagccatcttgggctgacgtcaggaatgacatgatatcatacggtggtggatggaggcttgga

SEQ ID NO: 134475 - DNA, 80 bp, synthetic construct
  source 1..80: mol_type = other DNA
tgcccgatcgaagttcgggtatagtgcgaaagacgttcgttctttgtccggcaaggccgttaaccagatccgctccgtct

SEQ ID NO: 134476 - DNA, 80 bp, synthetic construct
  source 1..80: mol_type = other DNA
gggagccaacctttgcgtggagcgagtgctggattgcaggacggcttttaagcctgtgcttgtggatgaagggaggaagg

SEQ ID NO: 134477 - DNA, 80 bp, synthetic construct
  source 1..80: mol_type = other DNA
ccaagtccatcgacttcatccccgtcgagtccctcgacgttgtgactaggtctccaaacttcactgacaacagtacacct

SEQ ID NO: 134478 - DNA, 80 bp, synthetic construct
  source 1..80: mol_type = other DNA
tctgatcgttcaagagtgcaactgttccatatacaccggccacgtcactggtcacaggatggcctgggacatgatgatga

SEQ ID NO: 134479 - DNA, 80 bp, synthetic construct
  source 1..80: mol_type = other DNA
actggaccaggggggagcgttgcgatatcgaggatcgtgaccgcagcgagcaacatccgctgctgcattcgacaactgag

SEQ ID NO: 134480 - DNA, 80 bp, synthetic construct
  source 1..80: mol_type = other DNA
gtacttttgccagcagaaagtggccctggaacagcaaatacctctcctccgaccgtcctttcgctgttgccgctcagtca

SEQ ID NO: 134481 - DNA, 80 bp, synthetic construct
  source 1..80: mol_type = other DNA
ggacacaggatggcatgggacatgatgctcaactggtcgcccacggtgagctatgtggtttctagtgccctgagagtacc

SEQ ID NO: 134482 - DNA, 80 bp, synthetic construct
  source 1..80: mol_type = other DNA
gaccaatgtggacatccagccggcacggtcctgggggacctatgtgctagtggtctctctgtttacaccttacatcatcc

SEQ ID NO: 134483 - DNA, 80 bp, synthetic construct
  source 1..80: mol_type = other DNA
gaggcattgtgggcgggaaatatgttcaggcagcgctcttacgactgggcgcctggactggtacatatttgtatgaccac

SEQ ID NO: 134484 - DNA, 80 bp, synthetic construct
  source 1..80: mol_type = other DNA
gggcttggtctcccgcggtgggtgggtgggcggcggtggccgggccgtgccgggccgagtggacggagtttggaaaaacg

SEQ ID NO: 134485 - DNA, 80 bp, synthetic construct
  source 1..80: mol_type = other DNA
aactggacctccaaatggcaaggttatttggtatgatggcgaacttaatgatccatgtgaacaaaagtacaaactcagaa

SEQ ID NO: 134486 - DNA, 80 bp, synthetic construct
  source 1..80: mol_type = other DNA
caaagggggacaaagagaaagatggaaaacgagggggaggactttttaaaggagttaaccttgagtttaatgtctcgtcg

SEQ ID NO: 134487 - DNA, 80 bp, synthetic construct
  source 1..80: mol_type = other DNA
agtagaggcagcgcttgagaacctaatcgttctcaatgctgcttctgctgctagcagccaggggtggatctactgccttg

SEQ ID NO: 134488 - DNA, 80 bp, synthetic construct
  source 1..80: mol_type = other DNA
ggtgtgtcctaccgactgtttccggaagcacccagaagccacatatgcgaggtgtgggtcaggcccttggctcactcccc

SEQ ID NO: 134489 - DNA, 80 bp, synthetic construct
  source 1..80: mol_type = other DNA
ggggcggacaccgccgaccttgcgggacagaccccccccgacgacacttccgactcagaaacgggctccatttcctccat

SEQ ID NO: 134490 - DNA, 80 bp, synthetic construct
  source 1..80: mol_type = other DNA
gatggctctgttaacacctgtgacaatggctgaggtgagacttgcaacaatgctcttctgcactgtggtcatcatcggcg

SEQ ID NO: 134491 - DNA, 80 bp, synthetic construct
  source 1..80: mol_type = other DNA
agttaaagatggcgaagatggaaatgagaatgctgattgggtaaaagatccaaatcttgcttctcgaaaccaaatatgca

SEQ ID NO: 134492 - DNA, 80 bp, synthetic construct
  source 1..80: mol_type = other DNA
ggcaattggaattagcatatgatgctccatttgatgttaaaaacaacatgcttactattaaagcaggccatggcttagca

SEQ ID NO: 134493 - DNA, 80 bp, synthetic construct
  source 1..80: mol_type = other DNA
cgccgctttacgccagaaaaaggttaccttcgacaggctgcaggtgcttgatgaccactacaaaactgttctcaaggagg

SEQ ID NO: 134494 - DNA, 80 bp, synthetic construct
  source 1..80: mol_type = other DNA
agaggccttattgcagacatttgtttcgatgcaaaatgggtttggggcacgaaacgtgtttttagctaaggtttcccagg

SEQ ID NO: 134495 - DNA, 80 bp, synthetic construct
  source 1..80: mol_type = other DNA
ggtgggctggagaaactcggccgtcccggagcaggcggtcgtcgggagtggaggcgcggcgcccaccccgtgtgccgcgc

SEQ ID NO: 134496 - DNA, 80 bp, synthetic construct
  source 1..80: mol_type = other DNA
gctgaggcaatgcgctcagcccagcggcggacagcggctggaatcatgaaaaacgctgtagtggatggcatcgtggccac

SEQ ID NO: 134497 - DNA, 80 bp, synthetic construct
  source 1..80: mol_type = other DNA
gctatgctccagtttacatatgaccacattcaagagcatgttaatgaaatgttggcacgtatctcctcgtcgtggtgcca

SEQ ID NO: 134498 - DNA, 80 bp, synthetic construct
  source 1..80: mol_type = other DNA
tacggtcgctgggccttaatgccgtcgccttctacaggggcgttgacgtggccgtcattcccactagtggggacgttgtc

SEQ ID NO: 134499 - DNA, 80 bp, synthetic construct
  source 1..80: mol_type = other DNA
ctggtctccgcctggaaggccaagaaaacccctatggggttctcgtatgacacccgctgctttgactctacagtcacaga

SEQ ID NO: 134500 - DNA, 80 bp, synthetic construct
  source 1..80: mol_type = other DNA
gccttatatacccccccgccccacccccgttagaacgcgacgggtgcattcaagatggccctggtccaaaagcgtgccag

SEQ ID NO: 134501 - DNA, 80 bp, synthetic construct
  source 1..80: mol_type = other DNA
tgggctttgtacggaggaagcacagttgtgttgactccactgataaaacatctggtgacatcacagtatgttaccacctc

SEQ ID NO: 134502 - DNA, 80 bp, synthetic construct
  source 1..80: mol_type = other DNA
cgtgtcgcatgccgacgcgtcacagcgccccttgaaccggcgacacagcaggtttgtgacctgggagaactgcgcgggcc

SEQ ID NO: 134503 - DNA, 80 bp, synthetic construct
  source 1..80: mol_type = other DNA
ggcctatcaagtagcatctgccggaataacttacacagatagaagatggtgctttgatggcactaccaacaacaccataa

SEQ ID NO: 134504 - DNA, 80 bp, synthetic construct
  source 1..80: mol_type = other DNA
tttgtccaagactgcaattgctccatctaccctggtaccatcactggacaccgcatggcatgggacatgatgatgaactg

SEQ ID NO: 134505 - DNA, 80 bp, synthetic construct
  source 1..80: mol_type = other DNA
aacactttgaccgtagcaactggtccaggtgtgactattaataatacttccttgcaaactaaagttactggagccttggg

SEQ ID NO: 134506 - DNA, 80 bp, synthetic construct
  source 1..80: mol_type = other DNA
ttcgggtagagggccttgacgaaggccgcgatctgcttgaaagcttgctgggccttggccccctcgctgaaaaacaggcc

SEQ ID NO: 134507 - DNA, 80 bp, synthetic construct
  source 1..80: mol_type = other DNA
taatggatgaggcccatttcacagacccagccagtatagcggctagagggtacatatcaactcgtgttggaatgggagag

SEQ ID NO: 134508 - DNA, 80 bp, synthetic construct
  source 1..80: mol_type = other DNA
cgccataagggcggcgctgcaaagccagccgtccggtctagcatcggacgactgggaggccgcgatgcaacgcatcatgg

SEQ ID NO: 134509 - DNA, 80 bp, synthetic construct
  source 1..80: mol_type = other DNA
tgcctcaccatgggcagtgtcgtcatttgcggccgggtcgtcacctccgggaagcccgcggtcatgccggaccgagaggt

SEQ ID NO: 134510 - DNA, 80 bp, synthetic construct
  source 1..80: mol_type = other DNA
agtgctatccacggcaactcagaccttcttggcatccaccatcaacggagtgatgtggactgtttttcatggtgccggct

SEQ ID NO: 134511 - DNA, 80 bp, synthetic construct
  source 1..80: mol_type = other DNA
cagccacctcccctacctcgccgaagcacaggcgctagcagaacagttcaagcagaaagcgcttggtctactccagtcta

SEQ ID NO: 134512 - DNA, 80 bp, synthetic construct
  source 1..80: mol_type = other DNA
gtgacctgcctgtttggctctcatggcaagtggctaaggctggattgaagacgaatgaccgaaagtggtgctttgagggc

SEQ ID NO: 134513 - DNA, 80 bp, synthetic construct
  source 1..80: mol_type = other DNA
tggttttggagtttttaccaccaatatatggctaaaattgagagaaaaacaggatgcattttgtgactcaaaactcatgt

SEQ ID NO: 134514 - DNA, 80 bp, synthetic construct
  source 1..80: mol_type = other DNA
aacaaagcgtaaactcactccattagctgacgctgaccggctggacttatccagctggtttaccgtcggcgccggcgtgg

SEQ ID NO: 134515 - DNA, 80 bp, synthetic construct
  source 1..80: mol_type = other DNA
agtttatcctggagcaccgagccaagggctcctgtaagtacgccctcccgctgcgcatccccccgtcagcctgcctgtcc

SEQ ID NO: 134516 - DNA, 80 bp, synthetic construct
  source 1..80: mol_type = other DNA
tcctctctcagagtaacataccaggaacagttttggaactgacagacgcaatagcattgggaataatggttcttaaaata

SEQ ID NO: 134517 - DNA, 80 bp, synthetic construct
  source 1..80: mol_type = other DNA
ttccggtgtaggggagatcagctgggaagaaagcaggttcctgagcagctgcgacttaccgcagccggtgggcccgtaaa

SEQ ID NO: 134518 - DNA, 80 bp, synthetic construct
  source 1..80: mol_type = other DNA
tggaggcaggaagtaggaggcaatatcacccgggtggagtctgagaacaaagtcatcgttctcgactcttttgaccctct

SEQ ID NO: 134519 - DNA, 80 bp, synthetic construct
  source 1..80: mol_type = other DNA
aagccaacggcacatgcgaaccaaatccccgccttaacttttatccagtttttgcagtgccagaagcacttgcaacatat

SEQ ID NO: 134520 - DNA, 80 bp, synthetic construct
  source 1..80: mol_type = other DNA
gtcagcagtaaacatgacatccagaatgttgctaaatcgattcacaatggctcacaggaaaccaacgtatgaaagagacg

SEQ ID NO: 134521 - DNA, 80 bp, synthetic construct
  source 1..80: mol_type = other DNA
aagcccatgggatcaatcccaacatcaggacgggggttcgcaccgtgacaacaggggaccctataacctattccacatac

SEQ ID NO: 134522 - DNA, 80 bp, synthetic construct
  source 1..80: mol_type = other DNA
tcctgtcttctcccggcaaaaatcacatcggactgggttagtatgccgctggtatggtagtcattcaaggccataaatct

SEQ ID NO: 134523 - DNA, 80 bp, synthetic construct
  source 1..80: mol_type = other DNA
gcatggggggcatgtcgcgtgtagggtgaagttgtcagctctcacacttaagggaacatcctacaagatgtgtaccgaca

SEQ ID NO: 134524 - DNA, 80 bp, synthetic construct
  source 1..80: mol_type = other DNA
gaaagcccgcccgacttatcgtatacccggacctttcagttcgggtgtgcgaaaagagagctctctacgacattacgcag

SEQ ID NO: 134525 - DNA, 80 bp, synthetic construct
  source 1..80: mol_type = other DNA
gggggggtgcgtgggagtgggagtgcgtgagagtgggggtgcgtgagagtgggggtgcgtgggagtggggatgcgtggga

SEQ ID NO: 134526 - DNA, 80 bp, synthetic construct
  source 1..80: mol_type = other DNA
cagtcaacaagggcatcttggtcacagtcaatccaatagcctccaccaatgatgatgaagtgttgatcgaggtgaatcct

SEQ ID NO: 134527 - DNA, 80 bp, synthetic construct
  source 1..80: mol_type = other DNA
caaagtccttagattttatcccagtggaaaacatggagacgactatgcgctctccttcattcacagacaacagcacgcca

SEQ ID NO: 134528 - DNA, 80 bp, synthetic construct
  source 1..80: mol_type = other DNA
ttgcttcagaaaacatcctgaggcgacttacatcaaatgtgggtctgggccgtggttaacgcctcggtgtctggtcgact

SEQ ID NO: 134529 - DNA, 80 bp, synthetic construct
  source 1..80: mol_type = other DNA
ggtcgtggcgttcagggccttactggcctctcttccctcggtcctcagcagaaactcagtttaatcaacaccaacggcag

SEQ ID NO: 134530 - DNA, 80 bp, synthetic construct
  source 1..80: mol_type = other DNA
gggtcgcagactcgtccaccaaaatgatgggacgtctggcggaagcagaaaggctcctagtcccccacggctggcccgcg

SEQ ID NO: 134531 - DNA, 80 bp, synthetic construct
  source 1..80: mol_type = other DNA
ctccccaatggagaagaagatcattacgtggggcgcggacactgccgcatgtggcgacatcctacatggccttcccgtgt

SEQ ID NO: 134532 - DNA, 80 bp, synthetic construct
  source 1..80: mol_type = other DNA
cacccggccttggtgttcgacatcaccaagctgctgctggccatcttcggacccctttggattcttgaagccagtctgct

SEQ ID NO: 134533 - DNA, 80 bp, synthetic construct
  source 1..80: mol_type = other DNA
ttatcaccttggtaaaaactttacagagggtattgctgttgtttataaagaaaacattgccgcgtacaagtttaaggcga

SEQ ID NO: 134534 - DNA, 80 bp, synthetic construct
  source 1..80: mol_type = other DNA
taactccacggacgactggcgccaggtcatggaccgcatcatgtcgctgactgcgcgcaaccctgacgcgttccggcagc

SEQ ID NO: 134535 - DNA, 80 bp, synthetic construct
  source 1..80: mol_type = other DNA
tctctccactcagtaacaccctcattcggcaccataacatggtgtactccaccacgtcacgcagcgccagcctccggcaa

SEQ ID NO: 134536 - DNA, 80 bp, synthetic construct
  source 1..80: mol_type = other DNA
ggaggaagcgatcctacatttgccggggtgcgtgccctgcgtccgcgagggcaacgcctctaaatgttggataacgctca

SEQ ID NO: 134537 - DNA, 80 bp, synthetic construct
  source 1..80: mol_type = other DNA
gagtggtgaagcttctcagttggccttggaatgctagggaggatgtggtgcgcatggcaatgacagataccacggccttt

SEQ ID NO: 134538 - DNA, 80 bp, synthetic construct
  source 1..80: mol_type = other DNA
tttgggaagctcaacgagccaaaaagtcatatacttggtcatgatactgctgattgccccggcatacagcatcaggtgca

SEQ ID NO: 134539 - DNA, 80 bp, synthetic construct
  source 1..80: mol_type = other DNA
tcagcaaacgcgaggccttctagggtgcattatcaccagcctcactggccgggataagaatcaggtggagggagaagtcc

SEQ ID NO: 134540 - DNA, 80 bp, synthetic construct
  source 1..80: mol_type = other DNA
tccgtcaaaagaaggtgaccttcgataggcaacaagtgcttgaccagcactaccatgatactcttaaggaggtgaaggcc

SEQ ID NO: 134541 - DNA, 80 bp, synthetic construct
  source 1..80: mol_type = other DNA
aaaaattttagtgaggaagtcaggccggaaaattcccgccaccggaagttgagtagacggtgctgcctgcgactcaaccc

SEQ ID NO: 134542 - DNA, 80 bp, synthetic construct
  source 1..80: mol_type = other DNA
agtaaccggcacgacggaaacagagaaaacgcgaccgctccaacaagggtgggggggggtgggcctcgtcctcacgcaga

SEQ ID NO: 134543 - DNA, 80 bp, synthetic construct
  source 1..80: mol_type = other DNA
ggcagcccaatggatgaaccgcttgatagcattcgcgtcgcggggaaaccatgtgtcgcccacacactatgtgcccgaga

SEQ ID NO: 134544 - DNA, 80 bp, synthetic construct
  source 1..80: mol_type = other DNA
gtgatgtacggtaagtactgtcagatggtcctactcaaggccggtgctttaactggcacatacatatatgaccatctcgc

SEQ ID NO: 134545 - DNA, 80 bp, synthetic construct
  source 1..80: mol_type = other DNA
gaatggaagaaccggcaccagctggcttcgaacctgaaatgttgaggaagaaacagatcactgtccttgatctgcacccc

SEQ ID NO: 134546 - DNA, 80 bp, synthetic construct
  source 1..80: mol_type = other DNA
ccacgctccgtccccaacggttctgggtcaccttggccttgctgggttgctccttcagcgcacgctgcccgttctcactg

SEQ ID NO: 134547 - DNA, 80 bp, synthetic construct
  source 1..80: mol_type = other DNA
attcttttttacaatacgagtagttatactgccttcttcccatttcaccttgtatacctccctctcccactttgttgcgg

SEQ ID NO: 134548 - DNA, 80 bp, synthetic construct
  source 1..80: mol_type = other DNA
actgggctgatacaccttcaccaaaacatcgtggacgtgcagtacttgtacgggatctcacctgccataatttccttggc

SEQ ID NO: 134549 - DNA, 80 bp, synthetic construct
  source 1..80: mol_type = other DNA
gccgcgtacgcggcccagggctacaaggtgctggtactcaacccctccgttgctgcaacgctgggctttggcgcttacat

SEQ ID NO: 134550 - DNA, 80 bp, synthetic construct
  source 1..80: mol_type = other DNA
aaatgaagccctgctatggctcatttgcaagacctaccaatgaaaaaggcggacaagctaaatttaagccagtggaagag

SEQ ID NO: 134551 - DNA, 80 bp, synthetic construct
  source 1..80: mol_type = other DNA
tacgtgcgtacctcaacactcctggcctccctgtgtgtcaagaccatcttgagttctgggaaggagtttttactggactt

SEQ ID NO: 134552 - DNA, 80 bp, synthetic construct
  source 1..80: mol_type = other DNA
ggccaactcttcaccttccgccctcgcctccaccataccgtgcaggactgtaattgctccatctaccctggccacgtcac

SEQ ID NO: 134553 - DNA, 80 bp, synthetic construct
  source 1..80: mol_type = other DNA
tgagagacccttcccatattaccgctgaggcagcagcgcgccgccttgcgcgtgggtcccctccatcagaggcaagctca

SEQ ID NO: 134554 - DNA, 80 bp, synthetic construct
  source 1..80: mol_type = other DNA
aacagagagactctacgtgggcggtcccatgcataacagcaagggagacctgtgcgggtatcgcagatgccgtgcaagcg

SEQ ID NO: 134555 - DNA, 80 bp, synthetic construct
  source 1..80: mol_type = other DNA
agctccaattgatacctgcggatttttagtctgcccggttaacagctgtgaataatacgcggtaggtatcagtacaaatt

SEQ ID NO: 134556 - DNA, 80 bp, synthetic construct
  source 1..80: mol_type = other DNA
tggccgatctggctgaaaagacattcggcccggcgccgccggattccgactctggagctggccttactaccccagctgac

SEQ ID NO: 134557 - DNA, 80 bp, synthetic construct
  source 1..80: mol_type = other DNA
ccgcgaagactgtgtgtggcccagtgtactgtttcacccccagcccagtggtagtgggcacgaccgacaggcttggagcg

SEQ ID NO: 134558 - DNA, 80 bp, synthetic construct
  source 1..80: mol_type = other DNA
gctgctcatagggcaagctgaagccgccctcgagaacctaataacactcaatgcggtatccgccgctggttctcatgggt

SEQ ID NO: 134559 - DNA, 80 bp, synthetic construct
  source 1..80: mol_type = other DNA
cggtggcagtgatggggaaagcctacgggttccagtactcgcctaaacagcgagttgactatctgctcgaaatgtggcgc

SEQ ID NO: 134560 - DNA, 80 bp, synthetic construct
  source 1..80: mol_type = other DNA
tctcaaaagatgtttccacaaggtacgaaaaccgttgtgtaaaggtagacaactgacagaaactatccgacagagaaaac

SEQ ID NO: 134561 - DNA, 80 bp, synthetic construct
  source 1..80: mol_type = other DNA
acgaacagaccttccaggaaatcaccagcgtgagtcgggctcttggtcagcaagacaccagtagcttggaagccacgctg

SEQ ID NO: 134562 - DNA, 80 bp, synthetic construct
  source 1..80: mol_type = other DNA
tggttgccacagatgctcttatgacaggcttttcagggaacttcgactccgtcattgattgtaatgtcgcggttactcaa

SEQ ID NO: 134563 - DNA, 80 bp, synthetic construct
  source 1..80: mol_type = other DNA
accgccttattgcgttcgcatcgcgaggcaatcacgtgtctcccacgcactacgttcccgagtccgatgcagctgctcgc

SEQ ID NO: 134564 - DNA, 80 bp, synthetic construct
  source 1..80: mol_type = other DNA
ctctgccctggagccctagtagtcggggtcatatgcgccgcggttctacggcgccatatcggcccgggcgagggagccgt

SEQ ID NO: 134565 - DNA, 80 bp, synthetic construct
  source 1..80: mol_type = other DNA
agcttataacatcgtgctcctctaacgtgtcagtcgcccacgacggcgctggaaagagggtctattaccttacccgtgac

SEQ ID NO: 134566 - DNA, 80 bp, synthetic construct
  source 1..80: mol_type = other DNA
cttgaggacgtaagagctgctgcttccaaggttagcgctcggctcctctcaatggaggaggcgtgcgcactgaccccgcc

SEQ ID NO: 134567 - DNA, 80 bp, synthetic construct
  source 1..80: mol_type = other DNA
ccgttagaacgcgacgggtgccttcaagatggccctggtccaaaagcgtgctagaaaaaagttggtaaaggcggcaaagc

SEQ ID NO: 134568 - DNA, 80 bp, synthetic construct
  source 1..80: mol_type = other DNA
ggcagtcccgtcacattgggttccaacaagtcgaacaacctggtccatacacgctaagcatgaatggatgacgacggaag

SEQ ID NO: 134569 - DNA, 80 bp, synthetic construct
  source 1..80: mol_type = other DNA
caagtgtctgcggccctgtgtactgcttcacaccatcgccagtggttgtgggcactactgatgctgagggcgtcccaacc

SEQ ID NO: 134570 - DNA, 80 bp, synthetic construct
  source 1..80: mol_type = other DNA
ccaccacgtgctccttgcagaccatctccactccgtggaagcagaacaggacgccctcctgccgggtattgcgatgctcc

SEQ ID NO: 134571 - DNA, 80 bp, synthetic construct
  source 1..80: mol_type = other DNA
ttccatgatcttcatgaacatgaagttcaatggagagaagtttaatggggtgctgttcatggccaacagccacatgaccc

SEQ ID NO: 134572 - DNA, 80 bp, synthetic construct
  source 1..80: mol_type = other DNA
cattacccatttgggcgaggccggattataacccccccctattggagacctggaagaaacccgattatgtcccaccactg

SEQ ID NO: 134573 - DNA, 80 bp, synthetic construct
  source 1..80: mol_type = other DNA
accgaagtctccccctgagtctttacaaagctgtcgtcacgcaacactgcctcgaaggcccggaacgtcccactaaaccc

SEQ ID NO: 134574 - DNA, 80 bp, synthetic construct
  source 1..80: mol_type = other DNA
cagccatagcttaccgcacaaatcaggcacagcagtcaggaaaactataaactgactgccgcctgtgcgcaatatataga

SEQ ID NO: 134575 - DNA, 80 bp, synthetic construct
  source 1..80: mol_type = other DNA
ctattgaacagcactcgaccaccgctggggtcatggttcggctgcacgtggatgaactcttctggctacaccaagacttg

SEQ ID NO: 134576 - DNA, 80 bp, synthetic construct
  source 1..80: mol_type = other DNA
tagatgggccaaacacaccggagtgtccaagtgcctcaagagcatggaatgtgtgggaggtggaagattacgggtttgga

SEQ ID NO: 134577 - DNA, 80 bp, synthetic construct
  source 1..80: mol_type = other DNA
ctgatgacacagccggttgggacacccgcatcacaagagctgacctggagaatgaagccaaggttcttgagttgttggac

SEQ ID NO: 134578 - DNA, 80 bp, synthetic construct
  source 1..80: mol_type = other DNA
ggcgcctggctcggggagggaggagggagggtcagccgcaccaccggcgcgaagccagaggccaggaaactttgatagag

SEQ ID NO: 134579 - DNA, 80 bp, synthetic construct
  source 1..80: mol_type = other DNA
ccaagactcctcccataccaccgccgcggcggaggaagcaggtgatcttaacagagtccactgtatccgctgctctcgcc

SEQ ID NO: 134580 - DNA, 80 bp, synthetic construct
  source 1..80: mol_type = other DNA
ctggttgaatttggggctcctcacgctgtcaagatggacgtgtacaacctcggagaccagactggagtgttactgaaggc

SEQ ID NO: 134581 - DNA, 80 bp, synthetic construct
  source 1..80: mol_type = other DNA
ttcacaccacttccaccagctgattatgaaggatgggagggaaatagtggtgccatgccgcaaccaagatgaacttgtgg

SEQ ID NO: 134582 - DNA, 80 bp, synthetic construct
  source 1..80: mol_type = other DNA
ggctactggtgggtgagcggagacggcattcgggcctgcctgcggctcgtcgacggcgtcggcggtattgaccagttttg

SEQ ID NO: 134583 - DNA, 80 bp, synthetic construct
  source 1..80: mol_type = other DNA
aggatggagattgagcgcacaatggcaaaagggggaggaggtgcaggtcatcgccgtagagcctgggaagaatccaaaga

SEQ ID NO: 134584 - DNA, 80 bp, synthetic construct
  source 1..80: mol_type = other DNA
aggttataatcgaagcacctccgccagtaaccagaaaaccactttcagaaataaaatatgttaatgttaccatgggtcaa

SEQ ID NO: 134585 - DNA, 80 bp, synthetic construct
  source 1..80: mol_type = other DNA
gcgacactcgcgcttccctcctgagtcctagacccttggccatcctgaagggatcatcaggcggaccaatgatgtgtccg

SEQ ID NO: 134586 - DNA, 80 bp, synthetic construct
  source 1..80: mol_type = other DNA
gattcagaaaggaagaggaagaggcaggtgtcctgtggtagaaggcaaaactaacatgaaacaaggctgaaagtcaggtc

SEQ ID NO: 134587 - DNA, 80 bp, synthetic construct
  source 1..80: mol_type = other DNA
ttgctaggcccgtccggccgtggaggtccgccagcccgctccccccgaggtcggccagggccgccaggagctgggcgcga

SEQ ID NO: 134588 - DNA, 80 bp, synthetic construct
  source 1..80: mol_type = other DNA
taggaatgagtaacagggacttcttagaaggagtctccggggctacttgggttgacattgtccttgaaggagacagttgc

SEQ ID NO: 134589 - DNA, 80 bp, synthetic construct
  source 1..80: mol_type = other DNA
gacagtcgatttcagcctagaccctacattctctattgagacttccaccgtgccccaggacgccgtgtcccgctcccaac

SEQ ID NO: 134590 - DNA, 80 bp, synthetic construct
  source 1..80: mol_type = other DNA
tccatctcacataacagcggagacagcccgccgcaggttggccaggggatctccaccctcactggccagctcgtcggcga

SEQ ID NO: 134591 - DNA, 80 bp, synthetic construct
  source 1..80: mol_type = other DNA
gtgaggcgcgtgtactgcggtctgtctcgtctcctcttctccccttccctccccctccgcatcccaggatcacaccggtc

SEQ ID NO: 134592 - DNA, 80 bp, synthetic construct
  source 1..80: mol_type = other DNA
tctgcgcgctcggcgaggtcctgcagcaccccccgggcggccagggcgtacatgctaatcaacaggaggctggtgcccac

SEQ ID NO: 134593 - DNA, 80 bp, synthetic construct
  source 1..80: mol_type = other DNA
catctccggtccttctgaagaaaaaccgtactgctggcactatgcacccagaccttgtaagactgtcccagcagcagatg

SEQ ID NO: 134594 - DNA, 80 bp, synthetic construct
  source 1..80: mol_type = other DNA
agggatgacgcagcagaaatgcccacagcaacacgcgggcgtggctcgggctctccggcggcttaatggatctccgggca

SEQ ID NO: 134595 - DNA, 80 bp, synthetic construct
  source 1..80: mol_type = other DNA
ttgtttgttgtctttaatggaccgcccgcagggaggtggcatttcagtgtcgggtgacgagcgcgatccggccgggatcc

SEQ ID NO: 134596 - DNA, 80 bp, synthetic construct
  source 1..80: mol_type = other DNA
ctcctcgcttaggtactcgtcctccaggagcgccagccagtcctcgatctgcagctgctgggtgcggggccccaggcttt

SEQ ID NO: 134597 - DNA, 80 bp, synthetic construct
  source 1..80: mol_type = other DNA
tgttttccacacattgtggcacacaactagaggagcagccatcatgagtggagaaggaaagctaacgccatactggggta

SEQ ID NO: 134598 - DNA, 80 bp, synthetic construct
  source 1..80: mol_type = other DNA
ccgcacggccgtggttaacaacatcaacggcgtgttggagggctatataaataacctgtttggaaccatcgagcgcctgc

SEQ ID NO: 134599 - DNA, 80 bp, synthetic construct
  source 1..80: mol_type = other DNA
aagtgttaatgtcaataaacaagaccgacgcccaaagcgctattaacatccccagtgccaacggagcaaacacctgcatt

SEQ ID NO: 134600 - DNA, 80 bp, synthetic construct
  source 1..80: mol_type = other DNA
gggcgcaattgcggccacgggctgcgtgtcaaaggctagcaaatgaatgacggttccgtttggaaatagcaacaaggccg

SEQ ID NO: 134601 - DNA, 80 bp, synthetic construct
  source 1..80: mol_type = other DNA
cgccgacgagcttctcaacgtggtgacctatatatgcgatgatcacatgccgagggtggtgacgcacacaaacgccacgg

SEQ ID NO: 134602 - DNA, 80 bp, synthetic construct
  source 1..80: mol_type = other DNA
agaatgaagtcttctgcgtagatccgtcgaagggtggacgcaagccggcacgcctaatagtttacccagacttgggcgtg

SEQ ID NO: 134603 - DNA, 80 bp, synthetic construct
  source 1..80: mol_type = other DNA
cccaggagcgggtttccacgggccttaccggcttgggcacggcctgactacaacccgccgctcgtggaatcgtggaggag

SEQ ID NO: 134604 - DNA, 80 bp, synthetic construct
  source 1..80: mol_type = other DNA
gtgaggatttactgtgccccacggactgcttcaggaagcatcctgatgccagctataagaagtgcggagctggcccctgg

SEQ ID NO: 134605 - DNA, 80 bp, synthetic construct
  source 1..80: mol_type = other DNA
tgtggctttcggaaattgagccagccagaattgcatgtgtcctcattgttgtgttcctattgctggtggtgctcatacct

SEQ ID NO: 134606 - DNA, 80 bp, synthetic construct
  source 1..80: mol_type = other DNA
tcataacatggtgtattccaccacgtcacgcagcgccagcctccgccagaagaaggtcacatttgacagaatgcaagtgt

SEQ ID NO: 134607 - DNA, 80 bp, synthetic construct
  source 1..80: mol_type = other DNA
gccatggctacgtgcgccaagcctgtaaaatttctaatgtggagctgagcaatctagtttcttacatgggcatcttgcat

SEQ ID NO: 134608 - DNA, 80 bp, synthetic construct
  source 1..80: mol_type = other DNA
gtggcatcgtgccggcgctcaacatctgtggaccggtgttctgtttcactcctagtcctatagtggtgggcacaacggac

SEQ ID NO: 134609 - DNA, 80 bp, synthetic construct
  source 1..80: mol_type = other DNA
acgatatgggtgcgtatggttctgatgacccattttttctccatcctccagtcacaagagcaattggagaaagcactcga

SEQ ID NO: 134610 - DNA, 80 bp, synthetic construct
  source 1..80: mol_type = other DNA
ctagttggcccgcgtgggtcagccaggcgacgagcgcctcgtaaagcggcagccttcgctctccatcctgcatcagggcc

SEQ ID NO: 134611 - DNA, 80 bp, synthetic construct
  source 1..80: mol_type = other DNA
gccacggcctgttcctgctatatcctgaacaaacccgtgtttatcacgatggacggcgccgttcgccggacggccgatct

SEQ ID NO: 134612 - DNA, 80 bp, synthetic construct
  source 1..80: mol_type = other DNA
gcctggcatccccttcttgtcctgccagcggggctttaggggggagtggcgaggagacggcgtgatgcacacggtgtgtc

SEQ ID NO: 134613 - DNA, 80 bp, synthetic construct
  source 1..80: mol_type = other DNA
ctggatttttcaaaattttgtacagtcccctgaaggagaatttacagtttccccaaggaatgttcctggaaatgttttga

SEQ ID NO: 134614 - DNA, 80 bp, synthetic construct
  source 1..80: mol_type = other DNA
cattgcttggagtgatgacgatgggcgtgttcttcctcctcatgcaaaggaaagggattggcaagattggcctcggtgga

SEQ ID NO: 134615 - DNA, 80 bp, synthetic construct
  source 1..80: mol_type = other DNA
cgtgcgcagtcttgaatgctctggacatggaaaaaatgaaaggtggtaagcgactcccttccgtggtttggtggaaaagt

SEQ ID NO: 134616 - DNA, 80 bp, synthetic construct
  source 1..80: mol_type = other DNA
cgaaggccggctaggctcgccaataggcgctgcataggtccgtccgagggcggaccggcgggtgaggtcgtgacgacggt

SEQ ID NO: 134617 - DNA, 80 bp, synthetic construct
  source 1..80: mol_type = other DNA
gtctgaacgtcgaaaacccgaaactgtggagcgccgaaatcccgaatctctatcgtgcggtggttgaactgcacaccgcc

SEQ ID NO: 134618 - DNA, 80 bp, synthetic construct
  source 1..80: mol_type = other DNA
tgtgaccaagtataacgcacgttctagcggagataatacagaatctctatttccaaaaaaattcgaatgggccgcttcaa

SEQ ID NO: 134619 - DNA, 80 bp, synthetic construct
  source 1..80: mol_type = other DNA
aggtttggaaccgtgtctggatagaggagaatgaatggatggaagacaaaaccccagtagagaaatggagtgacgtccca

SEQ ID NO: 134620 - DNA, 80 bp, synthetic construct
  source 1..80: mol_type = other DNA
atgaatggatcttggcggacaagcgcccaactgcatggttccttccatcgatcagagcagcaaatgtcatggcagcctcg

SEQ ID NO: 134621 - DNA, 80 bp, synthetic construct
  source 1..80: mol_type = other DNA
cctcaccttcgacggcgcgcttcgccccagcgccgcagagctgctttgtttgccgctgtttcaacagaaatgaccgcccc

SEQ ID NO: 134622 - DNA, 80 bp, synthetic construct
  source 1..80: mol_type = other DNA
tcgacgagaccagagaggatccgggcaggtagtgacttatgctctgaacaccatcaccaacttgaaagtccaattgatca

SEQ ID NO: 134623 - DNA, 80 bp, synthetic construct
  source 1..80: mol_type = other DNA
aacacgggttgtcttgaaggagatggaaaaggccttgcaggggaaacgtgtcaagtttcattcagcagcagttgacaatg

SEQ ID NO: 134624 - DNA, 80 bp, synthetic construct
  source 1..80: mol_type = other DNA
ggtaccagaaccattggttcgctcacgggccagacggcgtccagctttgcgggcctcttcaacatagggtcaaggcagaa

SEQ ID NO: 134625 - DNA, 80 bp, synthetic construct
  source 1..80: mol_type = other DNA
cttcagggggcccgctgctctgttcgtcaggccatgtggtcggactgttccgcgcagctgtctgcacccgtggtgtcgcc

SEQ ID NO: 134626 - DNA, 80 bp, synthetic construct
  source 1..80: mol_type = other DNA
cctgccagacaagctaaaatacaaccccaccaatgtggaaatatctgacaaccccaacacctacgactacatgaacaagc

SEQ ID NO: 134627 - DNA, 80 bp, synthetic construct
  source 1..80: mol_type = other DNA
gaacatcgatatggtattctgcagaatccctatgtaaaggttgcccctgctgtaccgtggaaatatcagcaaattcagat

SEQ ID NO: 134628 - DNA, 80 bp, synthetic construct
  source 1..80: mol_type = other DNA
atctgatcgtcgggcgacgtcgcctggccgccgatgatcagggcgtccaccatgtccagcgccgccaggtggcccccgaa

SEQ ID NO: 134629 - DNA, 80 bp, synthetic construct
  source 1..80: mol_type = other DNA
tgtttctggaagaaatgctcaggacccgagtaggaacaaaacatgcagtattactagttgcagtttctttcatgacattg

SEQ ID NO: 134630 - DNA, 80 bp, synthetic construct
  source 1..80: mol_type = other DNA
ttattgaagccaaagactcaaaactaactttagttttgacaaaatgcggaagtcaaatactagcaaatatgtcattgctg

SEQ ID NO: 134631 - DNA, 80 bp, synthetic construct
  source 1..80: mol_type = other DNA
gacggtcgttcttactgagtccaaggttgctgaagccctagcggacctggctacgaagacctttggccaggcagagtcgt

SEQ ID NO: 134632 - DNA, 80 bp, synthetic construct
  source 1..80: mol_type = other DNA
ggtggggttaatagctttaggcttagtagcgggtgggcttttggctctttgctacctatacctcccttgcttttcctact

SEQ ID NO: 134633 - DNA, 80 bp, synthetic construct
  source 1..80: mol_type = other DNA
acatcatcaccttcaaggacaaaactgatatccaccgcctagaaccagtgaaatgtgacacccttttgtgtgacattgga

SEQ ID NO: 134634 - DNA, 80 bp, synthetic construct
  source 1..80: mol_type = other DNA
tgtcccgaacgcgtcaacccccgttaccgggtttagacgccacttagacctcatggtgggtgctgctgccctctgctcag

SEQ ID NO: 134635 - DNA, 80 bp, synthetic construct
  source 1..80: mol_type = other DNA
tacctcaatggcagccatcaaaaggatggcatgactggcagcaggttcctttctgctcccaccactttcatgaattgatc

SEQ ID NO: 134636 - DNA, 80 bp, synthetic construct
  source 1..80: mol_type = other DNA
cctccatgcaacataaggccaggcaaccataacgggaacaccactttgagatgtcccaccgattgctttcgaaaacatcc

SEQ ID NO: 134637 - DNA, 80 bp, synthetic construct
  source 1..80: mol_type = other DNA
ggcagctcctttatttccacagaagggacctccgactgatggccaatgccatttgttcatctgtgccagttgactgggtt

SEQ ID NO: 134638 - DNA, 80 bp, synthetic construct
  source 1..80: mol_type = other DNA
tccccggttggacgatcccgggcccttgggttccgcggacgccgggcggcaagacctgccccggcgcgtcgtccgtcacg

SEQ ID NO: 134639 - DNA, 80 bp, synthetic construct
  source 1..80: mol_type = other DNA
agctcctctgccagtcagctgtcagctccgtcgatgaaggccacgtgcaagacgcacgggccacaccctgacgttgagat

SEQ ID NO: 134640 - DNA, 80 bp, synthetic construct
  source 1..80: mol_type = other DNA
ctttaaaacgtggctatcatccaagctcatgccatctctacctggcatacccttcttgtcttgccagaaaggtttcaagg

SEQ ID NO: 134641 - DNA, 80 bp, synthetic construct
  source 1..80: mol_type = other DNA
actcgctccccccagcgctgcttcggctttcgtgggcgctggtatcgctggtgcggctgttggcagcataggtcttggga

SEQ ID NO: 134642 - DNA, 80 bp, synthetic construct
  source 1..80: mol_type = other DNA
gtaggcggcgttgagcatcggttcaacgccgcttgcaactggactcgtggagaacggtgtgagctggatgacagggacag

SEQ ID NO: 134643 - DNA, 80 bp, synthetic construct
  source 1..80: mol_type = other DNA
accaacgactgttccaacagcagcatcgtgtttgaatcacaagccgccattctgcatacaccggggtgtgtcccctgcgt

SEQ ID NO: 134644 - DNA, 80 bp, synthetic construct
  source 1..80: mol_type = other DNA
tggatggaacatagttaagttaatgagcggaaaggatgtgttctatctcccacctgaaaagtgtgataccctgttgtgtg

SEQ ID NO: 134645 - DNA, 80 bp, synthetic construct
  source 1..80: mol_type = other DNA
attggtgggataatgacaccgatgtctttatactgagtagcagccgacccccccggtgagggtggtttggttgcacctgg

SEQ ID NO: 134646 - DNA, 80 bp, synthetic construct
  source 1..80: mol_type = other DNA
acctatccaaggcacatggcatcaatcccaacattaggactggagtcaggaccgtgatgaccggggaggccatcacgtac

SEQ ID NO: 134647 - DNA, 80 bp, synthetic construct
  source 1..80: mol_type = other DNA
tgacccctcacacatcactgcagagacggcagctcgacgcttaaagaggggatctcccccctccttggcaagttcatctg

SEQ ID NO: 134648 - DNA, 80 bp, synthetic construct
  source 1..80: mol_type = other DNA
cgtcggcgctcctctagggggcgccgccagggccctggcacacggtgtccgggttctggaagacggcgtgaactacgcaa

SEQ ID NO: 134649 - DNA, 80 bp, synthetic construct
  source 1..80: mol_type = other DNA
cgatcccaacatccgatcaggtgtcaggaccatcaccacaggcgcccccctcacatactccacctacgggaagttccttg

SEQ ID NO: 134650 - DNA, 80 bp, synthetic construct
  source 1..80: mol_type = other DNA
ccttggtgcggtcccgcccgccggccaatgggaggcggcaaggcgcgcggcccttgggccgcccgccgtcccgttggtcc

SEQ ID NO: 134651 - DNA, 80 bp, synthetic construct
  source 1..80: mol_type = other DNA
cgcatcctaacattacagagacagccctgcctacaactggagaggtgcctttttacggtagggcaatcccacttgatttc

SEQ ID NO: 134652 - DNA, 80 bp, synthetic construct
  source 1..80: mol_type = other DNA
tctacaatacaagtacagttttgagcagctaaaaacccactggctagaaccatgggaggatttagagtgtgctattaaag

SEQ ID NO: 134653 - DNA, 80 bp, synthetic construct
  source 1..80: mol_type = other DNA
gggggaggttcaagtggtttctactgcaacacaatctttcctagcgacctgtgtcaacggcgtatgctggactgtttacc

SEQ ID NO: 134654 - DNA, 80 bp, synthetic construct
  source 1..80: mol_type = other DNA
gcagcacaaggtctagaatttggtaatgatacgtcaacaaatacaaacccacttaaaacaaaactaggattgggattgga

SEQ ID NO: 134655 - DNA, 80 bp, synthetic construct
  source 1..80: mol_type = other DNA
tgtgccagtcaccctcgctggaccaaaaagcaatcacaaccggcgtgaaggttacaaagtccagagccaggggccgtggg

SEQ ID NO: 134656 - DNA, 80 bp, synthetic construct
  source 1..80: mol_type = other DNA
ggcacgttccaggtttggctacggtgccaaggacgtccgcggtcataccagaaaggccattaaccacatcaactccgtgt

SEQ ID NO: 134657 - DNA, 80 bp, synthetic construct
  source 1..80: mol_type = other DNA
aagaaaaccccaatggggttctcttatgacaccagatgctttgactcaacagtcacggagcgcgatatacgcacagaaca

SEQ ID NO: 134658 - DNA, 80 bp, synthetic construct
  source 1..80: mol_type = other DNA
ttgaagaccaccgcgatgccctccgtgtagttctgcccctccgggcgcgtcgggcagcggcgcggctgctcaaactgcac

SEQ ID NO: 134659 - DNA, 80 bp, synthetic construct
  source 1..80: mol_type = other DNA
tggtgctggttcgaggacactcgcgggcgttaaacatcctgcgctccaaatgtacacaaatgtagatcaggacctcgttg

SEQ ID NO: 134660 - DNA, 80 bp, synthetic construct
  source 1..80: mol_type = other DNA
ccgccggatgcccgcggtggcctaatgcggcgggaggcgtgggccgctggcgccgcggcccgtctgctggcccgcggcca

SEQ ID NO: 134661 - DNA, 80 bp, synthetic construct
  source 1..80: mol_type = other DNA
tttccgaagctgtaggaacggtggaaggactagaggttagaggagaccccgcatcataagcatcaaaaaaacagcatatt

SEQ ID NO: 134662 - DNA, 80 bp, synthetic construct
  source 1..80: mol_type = other DNA
aaacctgcggctcacgagctctcccgatcggcgggatggggttatttttcctaagatggtgcgggtccggtctacccgtg

SEQ ID NO: 134663 - DNA, 80 bp, synthetic construct
  source 1..80: mol_type = other DNA
tcgtgcggtgctctaccagcaatatgatgaaattgaggagtgctcgcgccatattccatacttggctgagggtcaacaga

SEQ ID NO: 134664 - DNA, 80 bp, synthetic construct
  source 1..80: mol_type = other DNA
tttatatcggttagcggctaactgtttgacagttcgttatttattaaagctgtttctccggggatttaatacccagctaa

SEQ ID NO: 134665 - DNA, 80 bp, synthetic construct
  source 1..80: mol_type = other DNA
cccctgaagagcggagtggatgtgtattatagagcatctgagacgagcgacacactgctttgcgacataggagagtcagc

SEQ ID NO: 134666 - DNA, 80 bp, synthetic construct
  source 1..80: mol_type = other DNA
aattaagcaaaaccaagacggagatgttaatgatgattgggaaaaggatgataaggtatccactcaaaaccaaatttgca

SEQ ID NO: 134667 - DNA, 80 bp, synthetic construct
  source 1..80: mol_type = other DNA
tttagttcattatgccataataggtccaggattgcaggcaaaagccacaagagaggcccagaaaaggacagctgctggga

SEQ ID NO: 134668 - DNA, 80 bp, synthetic construct
  source 1..80: mol_type = other DNA
caggaccaacacccctgttatacaggcttggggcggtgcagaatgacatcatctcaacacatccaatcacaaaatacatc

SEQ ID NO: 134669 - DNA, 80 bp, synthetic construct
  source 1..80: mol_type = other DNA
gaaacatctaaccttctttttgatactaacactcctaaaaccggaggtgagctctgggttccctctctgacagaggggtg

SEQ ID NO: 134670 - DNA, 80 bp, synthetic construct
  source 1..80: mol_type = other DNA
ctagactggaacaccagatgtgggaatctgtgcgggacgaactgaatgtcttgctcaaagagaacgcggtggatctcagc

SEQ ID NO: 134671 - DNA, 80 bp, synthetic construct
  source 1..80: mol_type = other DNA
tcatgcgtgggggttggttgtcatgtctatccatgacatggacactcataaagaacatggaaaaaccaggactaaaaaga

SEQ ID NO: 134672 - DNA, 80 bp, synthetic construct
  source 1..80: mol_type = other DNA
gccaggagattctaacaactataatgttacagtatttcagggtaatgattctaaggttttcctgtatagatttccatttt

SEQ ID NO: 134673 - DNA, 80 bp, synthetic construct
  source 1..80: mol_type = other DNA
tagatgcccattttttgtcgcaggcaaaacagcagggcctaaattttgcatatttggtggcttatcaagccactgtctgt

SEQ ID NO: 134674 - DNA, 80 bp, synthetic construct
  source 1..80: mol_type = other DNA
ccagcctcttgtggaatggacccatggctgtgtccatgacaggagtcatgcgggggaactactatgcttttgtgggtgtt

SEQ ID NO: 134675 - DNA, 80 bp, synthetic construct
  source 1..80: mol_type = other DNA
atgcgtaccacagcccacgcataattacaaaactgccatatggagggtggcggcggcagaatatgcggaggtaacacgct

SEQ ID NO: 134676 - DNA, 80 bp, synthetic construct
  source 1..80: mol_type = other DNA
cccaaccagagtacgacctggagcatattacatcctgctcctccaacgtgtcagtcgcgcacgatggtagcggcaaaagg

SEQ ID NO: 134677 - DNA, 80 bp, synthetic construct
  source 1..80: mol_type = other DNA
aaaccttgaaatgccagacacgcatcttgtgtttaagcctactgttaccgacggaacaattgcctctgaggcgctattag

SEQ ID NO: 134678 - DNA, 80 bp, synthetic construct
  source 1..80: mol_type = other DNA
atccagacctcacatcagattcctggtccactgtcagcggatcggaggacgtagtatgttgctcaatgtcatattcatgg

SEQ ID NO: 134679 - DNA, 80 bp, synthetic construct
  source 1..80: mol_type = other DNA
cagccaacatttttagaggaagctacttggcgggagctggactagctttttcgctcataaagaatgcacaaactcctagg

SEQ ID NO: 134680 - DNA, 80 bp, synthetic construct
  source 1..80: mol_type = other DNA
ttaccttctcgccccgcgtgcaccagacaatgcaggactgcaattgttccatctaccccggccatgtaacgggtcaccgc

SEQ ID NO: 134681 - DNA, 80 bp, synthetic construct
  source 1..80: mol_type = other DNA
catggaagatagaaaaagcctcttttatcgaagttaaaagttgccactggccaaaatcacacactctctggagtaatgga

SEQ ID NO: 134682 - DNA, 80 bp, synthetic construct
  source 1..80: mol_type = other DNA
tgcacggtaagaaccaagcatataaaattcatttatagctttgtagggacaacatcctttttctacagaaagggcatatg

SEQ ID NO: 134683 - DNA, 80 bp, synthetic construct
  source 1..80: mol_type = other DNA
cacgacccccccgcccacgtctacccacgcgaccccccgccccacgactccggggccccaaacaaccgctcccggacctg

SEQ ID NO: 134684 - DNA, 80 bp, synthetic construct
  source 1..80: mol_type = other DNA
ccagcagtgcctcagacctatcaggtcgggtacttacacgcccccacgggtagtgggaagagtacgaaagtgcctgtggc

SEQ ID NO: 134685 - DNA, 80 bp, synthetic construct
  source 1..80: mol_type = other DNA
tctgatagtgctgttgttatttgccggcgtcgatgcaaacacccaaatctccggggggactgctgctcactccctatttg

SEQ ID NO: 134686 - DNA, 80 bp, synthetic construct
  source 1..80: mol_type = other DNA
tacggccccaaggacatgttttgcacctcaccggctacgcggggcgactcgtccgagtcaaaacccggggcatcggttga

SEQ ID NO: 134687 - DNA, 80 bp, synthetic construct
  source 1..80: mol_type = other DNA
gtaggcttccaacttttatgacccagaaagcaaggaatgcactggacaatttagcagtcctgcatacggctgaagcaggc

SEQ ID NO: 134688 - DNA, 80 bp, synthetic construct
  source 1..80: mol_type = other DNA
ggaggccagggtgtgccggcacgacggtggccagaagctcccccaccgcatccgcgggcacgtaggcggcaaacgccgta

SEQ ID NO: 134689 - DNA, 80 bp, synthetic construct
  source 1..80: mol_type = other DNA
ttcatcaatcatcaggttacactcattcaccatccctaggtaattctcatttttccagccttggattatttctacaaatt

SEQ ID NO: 134690 - DNA, 80 bp, synthetic construct
  source 1..80: mol_type = other DNA
agcgcgggaacccaggaggacgcggcgagcctgcgagccttcacggaggctatgaccaggtactcggccccccccgggga

SEQ ID NO: 134691 - DNA, 80 bp, synthetic construct
  source 1..80: mol_type = other DNA
tgaactgcaacgactccttgcagaccgggtttatcgctgccctgttttacaggcataactacaacctcaccggttgccga

SEQ ID NO: 134692 - DNA, 80 bp, synthetic construct
  source 1..80: mol_type = other DNA
aatatgacgacagggagatctcggtagcggcggaatgccatcgaccgccgcggccaaggtacccccccgcactgcctgtg

SEQ ID NO: 134693 - DNA, 80 bp, synthetic construct
  source 1..80: mol_type = other DNA
gcgcggagttcgtaaacgatcatccggtggacacacagaaagagagcgtgcggcggccgacggctgagggtcgggagtct

SEQ ID NO: 134694 - DNA, 80 bp, synthetic construct
  source 1..80: mol_type = other DNA
gcgtcggtgaatagcgtggtggccaggcttccgggccccaacgagccctccgccccaacaaggtccacagggccggtggt

SEQ ID NO: 134695 - DNA, 80 bp, synthetic construct
  source 1..80: mol_type = other DNA
agaaaagaccaaagaggcagcgggcaagtcggcacctatggccttaatactttcaccaacatggaagcccaattaattag

SEQ ID NO: 134696 - DNA, 80 bp, synthetic construct
  source 1..80: mol_type = other DNA
tattactcctgtgcctactcctacttaccgtaggggtaggcatctttctgctccccgctcggtaggcgggtagcataagc

SEQ ID NO: 134697 - DNA, 80 bp, synthetic construct
  source 1..80: mol_type = other DNA
cctacgcgatcgggtctcaattgccatgtgaaccggagccggacgtgacagtggtgacatcaatgctggtcgacccatct

SEQ ID NO: 134698 - DNA, 80 bp, synthetic construct
  source 1..80: mol_type = other DNA
tttggatggaaccccaaatctcatacatgctatttatttgaaccatttggattttctgacaagcgtctaaaacaaatata

SEQ ID NO: 134699 - DNA, 80 bp, synthetic construct
  source 1..80: mol_type = other DNA
gtggacgcggaaacccatgttacgggtgccgttacgggccgcaccgcccaaggtctcgtcagcatcttctcacctggtgc

SEQ ID NO: 134700 - DNA, 80 bp, synthetic construct
  source 1..80: mol_type = other DNA
ttacaccagtggatcaacgaggactatcctagtccctgcaacggtgactggttacatgacatctgggactgggtctgtat

SEQ ID NO: 134701 - DNA, 80 bp, synthetic construct
  source 1..80: mol_type = other DNA
ctggattttgtgccggtggagaacatgcagaccgtccagcggtccccatctttctctgacaattcaactccgccagctgt

SEQ ID NO: 134702 - DNA, 80 bp, synthetic construct
  source 1..80: mol_type = other DNA
aggtcgagctgctcctcctgcatctccagcaggtggcggcccacgtcgtccagacttcgcacggccttgcccatcacgag

SEQ ID NO: 134703 - DNA, 80 bp, synthetic construct
  source 1..80: mol_type = other DNA
tgaatgatccaggagcaccttggaagatatggatgctcagaatggtctgtctcgcgattagtgcgtacaccccctgggca

SEQ ID NO: 134704 - DNA, 80 bp, synthetic construct
  source 1..80: mol_type = other DNA
cttcaactgagcggtgaaaaccaagctcaaactcactccattgcccgctgcccaactctacttgtcgggatggttcatgg

SEQ ID NO: 134705 - DNA, 80 bp, synthetic construct
  source 1..80: mol_type = other DNA
tattgcgtgaagtattccatgagcccggggactaaccacggttccacggtgcacttttccaatgcgcctgcttaaaatcg

SEQ ID NO: 134706 - DNA, 80 bp, synthetic construct
  source 1..80: mol_type = other DNA
aaacatctgagaaaccattgaaagtatttgtggaagttggccataatgtaaccctcccccatctcatgcctgattcacac

SEQ ID NO: 134707 - DNA, 80 bp, synthetic construct
  source 1..80: mol_type = other DNA
cacgcgcgctgggcggccttcgaacagctcctggccgatttcccggaggcggccgacatgcgcgcccccgggccctattc

SEQ ID NO: 134708 - DNA, 80 bp, synthetic construct
  source 1..80: mol_type = other DNA
ctggttggccaagcagaggcagcgttggagaacctcatcatccttaatgctgcctctgctgctagtaaccaaggctgggt

SEQ ID NO: 134709 - DNA, 80 bp, synthetic construct
  source 1..80: mol_type = other DNA
accgggctaaccaggaaatccgtggccccggcccccaataaagatcgcggtagcccggccgtgtgacactatcgtccata

SEQ ID NO: 134710 - DNA, 80 bp, synthetic construct
  source 1..80: mol_type = other DNA
tcttgaccaggcagagacggcaggcgccaagctcgtagtcttggccacagcgactcctcccggatctgtgacaacaccac

SEQ ID NO: 134711 - DNA, 80 bp, synthetic construct
  source 1..80: mol_type = other DNA
gtggcagatacctcttcaactgggcagttaagacgaagctcaaactcactccattgccagaggcacgccgcctggacttg

SEQ ID NO: 134712 - DNA, 80 bp, synthetic construct
  source 1..80: mol_type = other DNA
ccgcgcgtggcggcccaacatggcccctgtagccgggtgcgtgggatcgcgcacgtttgcagcgcacatgcgagacacat

SEQ ID NO: 134713 - DNA, 80 bp, synthetic construct
  source 1..80: mol_type = other DNA
cagccagctatacagtcatcgtggcccaagcttgaacaattttgggccaaacacatgtggaacttcatcagtggcataca

SEQ ID NO: 134714 - DNA, 80 bp, synthetic construct
  source 1..80: mol_type = other DNA
ataaagttaatggccgccgtccgccagggccacaggggtgacgtctcttggttggcccggagccactgggtgtggaccag

SEQ ID NO: 134715 - DNA, 80 bp, synthetic construct
  source 1..80: mol_type = other DNA
agatttctagccattccaccaacagcaggagtcttggctagatggggaaccttcaagaagtcaggggctattaaggtcct

SEQ ID NO: 134716 - DNA, 80 bp, synthetic construct
  source 1..80: mol_type = other DNA
aaagtggaggcgaggttgctcacagttgaagaagcttgcgacctaacgccaccacactccgcccgatccaaattcgggta

SEQ ID NO: 134717 - DNA, 80 bp, synthetic construct
  source 1..80: mol_type = other DNA
gcaagcgtccaagggcatacaattatatggtagacccactactcagcttctcctactaaaactcagtcattcttatttca

SEQ ID NO: 134718 - DNA, 80 bp, synthetic construct
  source 1..80: mol_type = other DNA
atgcgtcacatttctaacccgagtcatgataacgaagccgccttacgccaacttttagaaagagttgggtgtgaggatga

SEQ ID NO: 134719 - DNA, 80 bp, synthetic construct
  source 1..80: mol_type = other DNA
tccgcgttcaacgttagcagcgactacgacatgttgtactttttatgtctggggttcattccacagtacctgtcggcggt

SEQ ID NO: 134720 - DNA, 80 bp, synthetic construct
  source 1..80: mol_type = other DNA
cgaaatcttggcctgaatgcagtcgcgttctatcggggtgtggatgtatcagtaatcccaactgcggtggacgtggtcat

SEQ ID NO: 134721 - DNA, 80 bp, synthetic construct
  source 1..80: mol_type = other DNA
aggtctaaaaaccccgccaaaaaaaaacacacacgccctgggtgtttttcgcgaaaacacttccgcgttctcacttcctc

SEQ ID NO: 134722 - DNA, 80 bp, synthetic construct
  source 1..80: mol_type = other DNA
taacctcccccgggagacggcggcggagcaggtggtcgtcctgcaggcccagcgcacagcggctgccgctgccctggaga

SEQ ID NO: 134723 - DNA, 80 bp, synthetic construct
  source 1..80: mol_type = other DNA
aggtaacattccggccttgttagacgttgcaaagtatgaagctagcattcagaaagccaaagaggagggaaaagaaattg

SEQ ID NO: 134724 - DNA, 80 bp, synthetic construct
  source 1..80: mol_type = other DNA
cggcactaggaagagttcggagcgatcgcagcccaggggaagacgccaacgtatccccaaagctgcctcttcacagggta

SEQ ID NO: 134725 - DNA, 80 bp, synthetic construct
  source 1..80: mol_type = other DNA
atataacagcagaaacagcaggtcgccggttggccagggggtcaccaccttccctggccagttcctccgcgagccaactg

SEQ ID NO: 134726 - DNA, 80 bp, synthetic construct
  source 1..80: mol_type = other DNA
cagaagatataacccggtctgctcatctgggcgatggtgatgaaatcagagaagctatacacaagtcccaggacgccgaa

SEQ ID NO: 134727 - DNA, 80 bp, synthetic construct
  source 1..80: mol_type = other DNA
catctggggctcagtggaaaaggtgaggaaactcattggagcagaggaatacagagactatttggcaaacatggacagac

SEQ ID NO: 134728 - DNA, 80 bp, synthetic construct
  source 1..80: mol_type = other DNA
ccgggcaacggtggggcaactcgtagcaaataggcgactgatgtacgaagagaagacacacaggcgccacccggcgctgg

SEQ ID NO: 134729 - DNA, 80 bp, synthetic construct
  source 1..80: mol_type = other DNA
gacctacccccctgctctataggctggggggagtacagaatgacatcaccgtaacgcatccaatcaccaagtatatcatg

SEQ ID NO: 134730 - DNA, 80 bp, synthetic construct
  source 1..80: mol_type = other DNA
ctccggttcctggctcagtgagatctgggactggatttgcacggtgttgagtgacttcaagacctggctgagtgctaagc

SEQ ID NO: 134731 - DNA, 80 bp, synthetic construct
  source 1..80: mol_type = other DNA
cacaccaaagtgcctggtccactacccttacagactctggcattacccctgcacagtcaattttaccatcttcaagataa

SEQ ID NO: 134732 - DNA, 80 bp, synthetic construct
  source 1..80: mol_type = other DNA
cccccaatagccgcgcgccccggcgagggcggagagagggaatccccccctctcggagcggccccgtccccggagaccaa

SEQ ID NO: 134733 - DNA, 80 bp, synthetic construct
  source 1..80: mol_type = other DNA
atgagacatattatctgccacggaggtgttattaccgaagaaatggccgccagtcttttggaccagctgatcgaagaggt

SEQ ID NO: 134734 - DNA, 80 bp, synthetic construct
  source 1..80: mol_type = other DNA
ttatccgagctggcagagaggtctttcccaacaacatccactggatctgacaaaaccgcggattcgggcgtgcctaccac

SEQ ID NO: 134735 - DNA, 80 bp, synthetic construct
  source 1..80: mol_type = other DNA
gcgcgcgcagggccttatccgcatgtgcatgttggtgcgcaagcttgtgggaggccattacattcagatggccctcgtca

SEQ ID NO: 134736 - DNA, 80 bp, synthetic construct
  source 1..80: mol_type = other DNA
gccatggagattagaccggttcactcacagggtggcttggttcgatccatggtaatggctgacaacggtgcgatgctcag

SEQ ID NO: 134737 - DNA, 80 bp, synthetic construct
  source 1..80: mol_type = other DNA
aagatggttggggctaagtatgtgcaggcttgcctgctaaagcttggggcttggacgggcacctacatctatgaccatct

SEQ ID NO: 134738 - DNA, 80 bp, synthetic construct
  source 1..80: mol_type = other DNA
gggcgggggatcagcaaacgcgttccccgcgctccataaacccgcgtcgggttgcgccgcctccgaagccatggatgcgc

SEQ ID NO: 134739 - DNA, 80 bp, synthetic construct
  source 1..80: mol_type = other DNA
aacctacggcgtctgttcaaaggctttcaagtttcttggaactcccgcagacacaggccacggcactgtagtgttggaat

SEQ ID NO: 134740 - DNA, 80 bp, synthetic construct
  source 1..80: mol_type = other DNA
cataaaatccacacggagttgtggtgttcacgtaaccccccgccgatggggagggggcgcggtaccccgccgatggagag

SEQ ID NO: 134741 - DNA, 80 bp, synthetic construct
  source 1..80: mol_type = other DNA
tatgccgccgttggagggggaacctggagacccggacctcagctcagggtcctggtcgacggtcagtgaggacggagata

SEQ ID NO: 134742 - DNA, 80 bp, synthetic construct
  source 1..80: mol_type = other DNA
gcctaaagaatgtaagagaagtcaaaggcctaacaaaaggaggaccaggacatgaagaacccattcccatgtcaacatat

SEQ ID NO: 134743 - DNA, 80 bp, synthetic construct
  source 1..80: mol_type = other DNA
agtagggacgaaacatgcaatattactagttgcagtctctttcgtgacattgatcacagggaacatgtcctttcgagatt

SEQ ID NO: 134744 - DNA, 80 bp, synthetic construct
  source 1..80: mol_type = other DNA
gtcaactcctcgggctgcccagagcggatggctgcgtgtaagcccctcgcggacttccggcaggggtgtggccaaataac

SEQ ID NO: 134745 - DNA, 80 bp, synthetic construct
  source 1..80: mol_type = other DNA
acatttatgcccaacagtacagtgtatccccgaaacaaaaccgccgacccaggcaacatgctcatccaaatctcgcctaa

SEQ ID NO: 134746 - DNA, 80 bp, synthetic construct
  source 1..80: mol_type = other DNA
ccgcctgcacgtcgagctcgcgcgccttctccgtctggtccaccagaatttcgacctgatccgcgatctcctccgccgag

SEQ ID NO: 134747 - DNA, 80 bp, synthetic construct
  source 1..80: mol_type = other DNA
ctggtggggggtgtactgtcatgccacgaacagccacgatgtaacattaccacaggcaatgagaggagtgttatatgtac

SEQ ID NO: 134748 - DNA, 80 bp, synthetic construct
  source 1..80: mol_type = other DNA
gctgccgttctgtattacagcatggctgccaattgggccaaggtcatcctagtcctgcttttgttcgcgggagttgacgc

SEQ ID NO: 134749 - DNA, 80 bp, synthetic construct
  source 1..80: mol_type = other DNA
atcagattttctgatctggtcaacgaacagatacagcatacgtttttgatcccgggagagactatatgccgcctcagtga

SEQ ID NO: 134750 - DNA, 80 bp, synthetic construct
  source 1..80: mol_type = other DNA
ggaccttagtattgtggttgagaaacaggaggggatgtacaaatcagcacctagacgcctgactgccaccactgagaaac

SEQ ID NO: 134751 - DNA, 80 bp, synthetic construct
  source 1..80: mol_type = other DNA
ccagagaggaagtggacaggttggaacctatggcttaaacaccttcaccaacatggaggcccaactaataagacaaatgg

SEQ ID NO: 134752 - DNA, 80 bp, synthetic construct
  source 1..80: mol_type = other DNA
tgacaagactccagtccattcgtgggaagacataccttacctagggaaaagagaggatctgtggtgtggatccctgattg

SEQ ID NO: 134753 - DNA, 80 bp, synthetic construct
  source 1..80: mol_type = other DNA
ctggagggcttcttactgtgtgttacgtgctcactggacgatcggccgatttggaactggagagagctgccgatgtaaaa

SEQ ID NO: 134754 - DNA, 80 bp, synthetic construct
  source 1..80: mol_type = other DNA
tggcgtttaaacgatcttgctgatgcggttggtcatattgttgggacaatacaaggaatccgaacgcaaatgagagtggg

SEQ ID NO: 134755 - DNA, 80 bp, synthetic construct
  source 1..80: mol_type = other DNA
ctccaaggctgtgaccgctatcctcagttccctaaccataaccagccttctccgtaggctccacgagtggataaacgggg

SEQ ID NO: 134756 - DNA, 80 bp, synthetic construct
  source 1..80: mol_type = other DNA
tgaggcagctctggaaaatgtcattgtccttaatgccacatcggccgcatcaacacatggtgtttggtggggccttcttg

SEQ ID NO: 134757 - DNA, 80 bp, synthetic construct
  source 1..80: mol_type = other DNA
cgcccccgccggggcgcgcggctattggaggaatcgtaaatgccgcccctttggtggagtggataggcgccgggtataag

SEQ ID NO: 134758 - DNA, 80 bp, synthetic construct
  source 1..80: mol_type = other DNA
tgagaggtgggatggttgctccactttatggcatagaaggaacaaagacaccagtttccccaggtgaaatgaggctaaga

SEQ ID NO: 134759 - DNA, 80 bp, synthetic construct
  source 1..80: mol_type = other DNA
caaggaacggcgaaaaggacgacaataggtcttaatatacaaaaccctgaccagaaagcttacacgcaactcaggcaaag

SEQ ID NO: 134760 - DNA, 80 bp, synthetic construct
  source 1..80: mol_type = other DNA
agactctgtttggatttggatcaagcaagtgtattgctgtctttatttaggggttttgcgcgcgcggtaggcccgggacc

SEQ ID NO: 134761 - DNA, 80 bp, synthetic construct
  source 1..80: mol_type = other DNA
tgaatgctgcttctgctgctatcaatcaaggcctactgtttgggctggccttcatctgctttgcgtggcacatccggggt

SEQ ID NO: 134762 - DNA, 80 bp, synthetic construct
  source 1..80: mol_type = other DNA
ggctgtggatatctcatgttccttggaggcgtcaaacccactcacatctcctatatcatgctcatattctttgtcctgat

SEQ ID NO: 134763 - DNA, 80 bp, synthetic construct
  source 1..80: mol_type = other DNA
cgccggcatgtacggcggcgccaaacggcgttctagccaacaccctgttcgcgtgcgcggacattaccgcgccccctggg

SEQ ID NO: 134764 - DNA, 80 bp, synthetic construct
  source 1..80: mol_type = other DNA
tggtgtgttgttaccatcagagtttgtataacttccgagtgaatgtcaaacgtctccgatatacatagggtatcagatat

SEQ ID NO: 134765 - DNA, 80 bp, synthetic construct
  source 1..80: mol_type = other DNA
aataatcctggactttgactactgtccaggaacaacagtcaccgttactgaacattgtggaaacaggggagcgtcgctgc

SEQ ID NO: 134766 - DNA, 80 bp, synthetic construct
  source 1..80: mol_type = other DNA
acactatggtgaaaaccctgtgtggtctaagggaacttctcccctttaattaaagttattctgattaataaagcttacct

SEQ ID NO: 134767 - DNA, 80 bp, synthetic construct
  source 1..80: mol_type = other DNA
ggcgtcgaaaggctaaaaagaatggcaatcagtggagatgactgcgtagtgaaaccaattgatgataggtttgcaacagc

SEQ ID NO: 134768 - DNA, 80 bp, synthetic construct
  source 1..80: mol_type = other DNA
acgttggccgatgccatgaacgggctgttccgcgacgcgctggcggccgggaccgtggccgagcagctcctcatgttcga

SEQ ID NO: 134769 - DNA, 80 bp, synthetic construct
  source 1..80: mol_type = other DNA
agattgggatacatcctggaggagatagacaagaaggatggagacctaatgtatgctgatgacacagcaggctgggacac

SEQ ID NO: 134770 - DNA, 80 bp, synthetic construct
  source 1..80: mol_type = other DNA
cggccagcaagtgggctttattgcataagtgacatcgtccttttccccaagatagaaaggcaggagagtgtcttctgcat

SEQ ID NO: 134771 - DNA, 80 bp, synthetic construct
  source 1..80: mol_type = other DNA
gtgccccctccgagacaacgctggcaacggcgtaaaaaaggagcgcatgcgcttgacgaaggaagcgatgactcagcaga

SEQ ID NO: 134772 - DNA, 80 bp, synthetic construct
  source 1..80: mol_type = other DNA
gtgggcccatgacgaactcccgtggtcaatcatgtggataccgcaggtgccgagctagtggcgtgcttaccacgagcttg

SEQ ID NO: 134773 - DNA, 80 bp, synthetic construct
  source 1..80: mol_type = other DNA
gacgaggcggcggccgaggccgccatttcggaaacgagctccacttcttccatgcccccccttgaggtggagccggtgga

SEQ ID NO: 134774 - DNA, 80 bp, synthetic construct
  source 1..80: mol_type = other DNA
tacccgcgatgctgatgtcatccctgctcggcgcaggggagactccacagcgagcttgcttagtcctaggcctctcgcct

SEQ ID NO: 134775 - DNA, 80 bp, synthetic construct
  source 1..80: mol_type = other DNA
gagctaggtacatccagatgctgctgatcaccataggcaggtggactggcacttacatttatgaccacctctccccttta

SEQ ID NO: 134776 - DNA, 80 bp, synthetic construct
  source 1..80: mol_type = other DNA
tttcaacagctacccagtccttcctcgggaccggggtgaacggcgtgctctggaccgtctaccatggagcgggctcgaag

SEQ ID NO: 134777 - DNA, 80 bp, synthetic construct
  source 1..80: mol_type = other DNA
atagacctgggctgtggaagaggaggctggtcatattactgtgcaggactgaaaaaagtcacagaagtgcgaggatacac

SEQ ID NO: 134778 - DNA, 80 bp, synthetic construct
  source 1..80: mol_type = other DNA
tacccctccttcgctgtcccgagcgcgcataaccacttgcgccaagttgagttccacgagccgtgcgaacacgccgtagt

SEQ ID NO: 134779 - DNA, 80 bp, synthetic construct
  source 1..80: mol_type = other DNA
taaggctaagggcatatctcaacacgcccgggctccctgtttgccaagatcaccttgagttctgggaaggcgtcttcgtg

SEQ ID NO: 134780 - DNA, 80 bp, synthetic construct
  source 1..80: mol_type = other DNA
atcttggtcttattgctgttcgccggggttgacgcaaaggtcatcggggccgcccctgccaaaagcgcatacagccttgc

SEQ ID NO: 134781 - DNA, 80 bp, synthetic construct
  source 1..80: mol_type = other DNA
ggggcccccccttgtaacatctatgggggagagcgatggactgagacgaactcctcatacctcaagtgcaccaccgactg

SEQ ID NO: 134782 - DNA, 80 bp, synthetic construct
  source 1..80: mol_type = other DNA
tcccttcatggcagtaaactgctgcgagccagtccggtatttgggagttaagatccaaacagtctctttggtaatcagat

SEQ ID NO: 134783 - DNA, 80 bp, synthetic construct
  source 1..80: mol_type = other DNA
cggtccccttatcggggccaacgaccacatccctcccccgcgtggcgcatctccccccggtatacgacgacgcagccgtg

SEQ ID NO: 134784 - DNA, 80 bp, synthetic construct
  source 1..80: mol_type = other DNA
gacaaactggctctgaaaggcacaacctatggcatgtgtacagaaaaattctcgttcgcgaaaaatccggtggacactgg

SEQ ID NO: 134785 - DNA, 80 bp, synthetic construct
  source 1..80: mol_type = other DNA
ccgcggtccgggccagcgcatggtccaacacggagagcgcccgcgcgcggtcggcgtccgacagcccggcggcgtgaggc

SEQ ID NO: 134786 - DNA, 80 bp, synthetic construct
  source 1..80: mol_type = other DNA
agggacatggcgtggttggcctcgcccagaccgtcgcgaaacttgaagttcctcccctccaccaggttgcgcatcagctg

SEQ ID NO: 134787 - DNA, 80 bp, synthetic construct
  source 1..80: mol_type = other DNA
tggcacatcaacaggaccgccctcaattgtaatgagagcttgaacgcgggcttcatggccggtttgttctatgcgcacaa

SEQ ID NO: 134788 - DNA, 80 bp, synthetic construct
  source 1..80: mol_type = other DNA
tcggccgggttgcggcctaaaacaggggccgtggtgtcggcggcgtcccagggtgaagagagggattcccgcgattcgga

SEQ ID NO: 134789 - DNA, 80 bp, synthetic construct
  source 1..80: mol_type = other DNA
ggagctctggaggctgagatggatggtgcaaagggaaggctgtcctctggccacttgaaatgtcgcctgaaaatggataa

SEQ ID NO: 134790 - DNA, 80 bp, synthetic construct
  source 1..80: mol_type = other DNA
gcagcagtgatgggatccgcatacggcttccaatattcacccaaacagcgggtcgagcagctcctcaagatgtggcgctc

SEQ ID NO: 134791 - DNA, 80 bp, synthetic construct
  source 1..80: mol_type = other DNA
gaaaaaaaaaaaccacagcgcatgcgccgggccgttgtggggccccgggccgaggccccttgggtccgccggtgccccgg

SEQ ID NO: 134792 - DNA, 80 bp, synthetic construct
  source 1..80: mol_type = other DNA
gctatgaccaggtactctgctccccccggcgatgacccacgcccggagtacgaccttgagctgatcacatcctgctcatc

SEQ ID NO: 134793 - DNA, 80 bp, synthetic construct
  source 1..80: mol_type = other DNA
agaaggcagggtcgtgcttggagtcccgtcagctatcactagcgcgagtgcagcacaacgcagaggaagagtcggaagga

SEQ ID NO: 134794 - DNA, 80 bp, synthetic construct
  source 1..80: mol_type = other DNA
cctgggcccgtccagactacaaccctcctgtgatcgagacatggaagaggccggactatgaaccacccactgtcctaggc

SEQ ID NO: 134795 - DNA, 80 bp, synthetic construct
  source 1..80: mol_type = other DNA
tcgcccccgcccccgggagctcccaacccccgtgccccttcctctacggcgacacggtccccgtcgtcgtcggtgcccgc

SEQ ID NO: 134796 - DNA, 80 bp, synthetic construct
  source 1..80: mol_type = other DNA
gtgcttgagctgcttgatggggaacatcggcgtcttgccagggccatcattgagctcacctatcgtcacaaagttgtgaa

SEQ ID NO: 134797 - DNA, 80 bp, synthetic construct
  source 1..80: mol_type = other DNA
gagaacgaagctcaaactcactccactccgcggcgcagccaacctggatttatccggatggttcgttgcgggcggaagcg

SEQ ID NO: 134798 - DNA, 80 bp, synthetic construct
  source 1..80: mol_type = other DNA
agggaagatgggctttggaatggtgactcttggggccagcgcatggcttatgtggctctcggaaattgagccagccagaa

SEQ ID NO: 134799 - DNA, 80 bp, synthetic construct
  source 1..80: mol_type = other DNA
ggtagggttgaactcctacgcaataggatctcaactcccctgtgagcccgaaccagatgtttctgtgctgacctcgatgt

SEQ ID NO: 134800 - DNA, 80 bp, synthetic construct
  source 1..80: mol_type = other DNA
ggtacaacataaaatgggagtagttgtccaaccgccgtccctgtggttgttactttggagaaaaaaggcagtcttaaact

SEQ ID NO: 134801 - DNA, 80 bp, synthetic construct
  source 1..80: mol_type = other DNA
tctactccacttcatacaccgactctgtcacccatacctgaattggaagaggaggacgaactagacctccggtgttatga

SEQ ID NO: 134802 - DNA, 80 bp, synthetic construct
  source 1..80: mol_type = other DNA
ttgctgcttaaggtggaggcatgacatgggcggcaacatcacacgggtggagtctgaaaccaaggtggtcattctcgatt

SEQ ID NO: 134803 - DNA, 80 bp, synthetic construct
  source 1..80: mol_type = other DNA
cggtcagtgtctagattggagcaccaaatgtgggactcggtcaaggatgagctcaacaccttgctgaaggagaatggcgt

SEQ ID NO: 134804 - DNA, 80 bp, synthetic construct
  source 1..80: mol_type = other DNA
aggttttgatgggtgtgccgtattttgtcagggcgcatgccatcctgagggcctgtgctatggtaaggaacatcgtgggt

SEQ ID NO: 134805 - DNA, 80 bp, synthetic construct
  source 1..80: mol_type = other DNA
atgtcatatgggccggatatggtatcggtctaccagtcattagggcgtgtacgtttattgctacttaatgaagttttgat

SEQ ID NO: 134806 - DNA, 80 bp, synthetic construct
  source 1..80: mol_type = other DNA
actgattccaccactattttgggcattggcacggtcctggatcaagcggagactgctggagcgcgactagtcgtactcgc

SEQ ID NO: 134807 - DNA, 80 bp, synthetic construct
  source 1..80: mol_type = other DNA
tgcgcggcctttctcagagaggtgtgtgtaagagcgaaggtgtcgcgcaccatgactttgaggaattggtgtttaaagtc

SEQ ID NO: 134808 - DNA, 80 bp, synthetic construct
  source 1..80: mol_type = other DNA
gaaagtgcagctcgcagactagcccgagggtctcctccctcgttggccagctcttcagcgagccagctctccgctccgtc

SEQ ID NO: 134809 - DNA, 80 bp, synthetic construct
  source 1..80: mol_type = other DNA
gcatcggagggtagctgaagcccacctccaccacggtgccttcgccctcgctgtcggagacaatctccggggatggcggc

SEQ ID NO: 134810 - DNA, 80 bp, synthetic construct
  source 1..80: mol_type = other DNA
atggtttgggtgtacatggatgaatagcactgggttcacgaagacctgcggggccccgccatgccaagtgcaggcagcag

SEQ ID NO: 134811 - DNA, 80 bp, synthetic construct
  source 1..80: mol_type = other DNA
agaatctggtttgccatgtagtacatcgccagctcgctcacgttgttgggggccaggttaataaagtttatcgcgccgta

SEQ ID NO: 134812 - DNA, 80 bp, synthetic construct
  source 1..80: mol_type = other DNA
ggccgtggcgcggcggctgctgtttaatagcctggtgccggcgcaactaaaggggcgtgatttcggtggcgaccacacgg

SEQ ID NO: 134813 - DNA, 80 bp, synthetic construct
  source 1..80: mol_type = other DNA
gggactggatatgcacggtgttagttgactttaagacccggctccaatccaagcttctgccgcggctgccaggagtcccc

SEQ ID NO: 134814 - DNA, 80 bp, synthetic construct
  source 1..80: mol_type = other DNA
acggacgcattaccattagtaatcgcatccagactcgaagtgtaacatccctcactaccatttggtctatctcgcctacg

SEQ ID NO: 134815 - DNA, 80 bp, synthetic construct
  source 1..80: mol_type = other DNA
gtctgcctgctgatgtacctggagaactgtccccggagccacgccacgccctcgctgttcgtcaaggtgtcggcgtggtt

SEQ ID NO: 134816 - DNA, 80 bp, synthetic construct
  source 1..80: mol_type = other DNA
atgatggttgtgttaatccctgaacctgagaaacagcgttcccagacggacaaccaactggcagtattcttgatatgtgt

SEQ ID NO: 134817 - DNA, 80 bp, synthetic construct
  source 1..80: mol_type = other DNA
agcagcccggggaggttctcggccaagagcgccgtctccggaagcccgtgggcccggtgcaaggcgcacagttgctccag

SEQ ID NO: 134818 - DNA, 80 bp, synthetic construct
  source 1..80: mol_type = other DNA
ctaatggccagaggtagccccttggtgaaggtattaacaaatcgattaagttgggagggatgcatgcgaggggaaatcag

SEQ ID NO: 134819 - DNA, 80 bp, synthetic construct
  source 1..80: mol_type = other DNA
gaggtaacttgattttccttggtcctgctgatgatatacgggacgggggatggcgtctccttgccccaatcacagcttat

SEQ ID NO: 134820 - DNA, 80 bp, synthetic construct
  source 1..80: mol_type = other DNA
aacttccagagaccacccggacatggagctcattgaggccaacctcctctggaggcaggagatgggaagcaacatcactc

SEQ ID NO: 134821 - DNA, 80 bp, synthetic construct
  source 1..80: mol_type = other DNA
cgtaccattgccggcgcagcaggctttactatctcaaagtttgccagcatttttatgccaggtcccgcccagaacctgca

SEQ ID NO: 134822 - DNA, 80 bp, synthetic construct
  source 1..80: mol_type = other DNA
cagtgggaagagaaaaagaatggaggaggaagcgatgctaatcaaatgcaaactcacacgtttggagttgctgccatggg

SEQ ID NO: 134823 - DNA, 80 bp, synthetic construct
  source 1..80: mol_type = other DNA
atgacccaagacaacatcaaatgtccttgccaggtccctgctcccgaatttttcacagaggtggatggcgtcagactcca

SEQ ID NO: 134824 - DNA, 80 bp, synthetic construct
  source 1..80: mol_type = other DNA
ggagggggcagtacagtggatgaacaggctaatagccttcgcctcacgtgggaaccatgtgtcacctactcattacgttc

SEQ ID NO: 134825 - DNA, 80 bp, synthetic construct
  source 1..80: mol_type = other DNA
ccaaacgcagtgatattacaaaatgcatggaaagtgagttgcacaatactggcagtggtgtccgtttccccactgcttct

SEQ ID NO: 134826 - DNA, 80 bp, synthetic construct
  source 1..80: mol_type = other DNA
cgaatcagttggacgtcaccgtatcccccagaccccccgaagcttcgggccccggggatctcgagggtcgtgtagtgtag

SEQ ID NO: 134827 - DNA, 80 bp, synthetic construct
  source 1..80: mol_type = other DNA
cgcggtaccctgcaacaaagcctgtcgtgtctgcgctttaagcacggccgggcgagtcgcgccacggcgcggacattcgt

SEQ ID NO: 134828 - DNA, 80 bp, synthetic construct
  source 1..80: mol_type = other DNA
tcttggtactgaatccatctgtagccgcaacccttgggtttggggcatatatgtccaaggcctatggtatcgaccccaac

SEQ ID NO: 134829 - DNA, 80 bp, synthetic construct
  source 1..80: mol_type = other DNA
cagacgtgatccctgtccgcagacgtggtgacactcggggcgctcttttgagtcccaagccaatatctaccctcaagggc

SEQ ID NO: 134830 - DNA, 80 bp, synthetic construct
  source 1..80: mol_type = other DNA
ggctttgaaagaaggagcttcgtatcccatgaccagacccattggctccatggccagaccggtttatgggaaagaaaaaa

SEQ ID NO: 134831 - DNA, 80 bp, synthetic construct
  source 1..80: mol_type = other DNA
ggccctgcgcgagtttaaagagtttgcagcaggaagaagaagcgtctcaggtgatctaatattagaaatagggaaacttc

SEQ ID NO: 134832 - DNA, 80 bp, synthetic construct
  source 1..80: mol_type = other DNA
tcctctgccgccagcggcgcgccctgtggtccggtttcagcgagcgcacggtcgccagcgctctggcggacatcatcttc

SEQ ID NO: 134833 - DNA, 80 bp, synthetic construct
  source 1..80: mol_type = other DNA
ggctgtccaccttgcccggcaaccctgctatcgcctccctcatgtcattcaccgctgcggtcacaagtcctctgaccacc

SEQ ID NO: 134834 - DNA, 80 bp, synthetic construct
  source 1..80: mol_type = other DNA
tccgctgtgcaagtcaaaaataccaccaccagctacatggcaaccaacgactgccaaaactctagcatcacctggcaact

SEQ ID NO: 134835 - DNA, 80 bp, synthetic construct
  source 1..80: mol_type = other DNA
cacctcgggcgatgtcgtcgtctgcgcaacggacgcccttatgaccggctacacaggagatttcgattccgtcatcgact

SEQ ID NO: 134836 - DNA, 80 bp, synthetic construct
  source 1..80: mol_type = other DNA
atcaagctctcgagctacaagctcaacgccgtggccgaagccgtcctgaaggacaagaagaaggacctgagctatcgcga

SEQ ID NO: 134837 - DNA, 80 bp, synthetic construct
  source 1..80: mol_type = other DNA
caaacctttactgcaatggtgggttcggtacctattaaagtgtcccaacaagcaggagaacaagaaggctctattcggtg

SEQ ID NO: 134838 - DNA, 80 bp, synthetic construct
  source 1..80: mol_type = other DNA
ggggaaggcacctcatcttttgtcattctaaaaagaaatgtgacgagctagcctccaaattgacatccttgggtgtgact

SEQ ID NO: 134839 - DNA, 80 bp, synthetic construct
  source 1..80: mol_type = other DNA
gatgatttggtcgtggtggctgagagtgatggcgtcgaggaggatagagcagctctgagagtcttcacggaggctatgac

SEQ ID NO: 134840 - DNA, 80 bp, synthetic construct
  source 1..80: mol_type = other DNA
acatacggaaggtgtatttcatacaatgtggcatgtaacaagaggatcagtaatttgccatgagagtgggagactggagc

SEQ ID NO: 134841 - DNA, 80 bp, synthetic construct
  source 1..80: mol_type = other DNA
aagctccctcaggccgtgatgggagccgcttacggcttccaatactcaccagggcagcgggttgaattcctcctgcaagc

SEQ ID NO: 134842 - DNA, 80 bp, synthetic construct
  source 1..80: mol_type = other DNA
cgcctcacagagggctaaaaaggtaacttttgacaggacgcaagtgctcgacgcccattatgactcagtcttaaaggaca

SEQ ID NO: 134843 - DNA, 80 bp, synthetic construct
  source 1..80: mol_type = other DNA
tccgttacatttaagacgtatatccgaaccatcgagtgtgtctgatcagccgtatattcgttttaatcgactgggatctc

SEQ ID NO: 134844 - DNA, 80 bp, synthetic construct
  source 1..80: mol_type = other DNA
ccagtactcccctaaccagagggttgagcacttgctcaaaatgtggcggtcaaagaaggtgcccatgggcttttcttacg

SEQ ID NO: 134845 - DNA, 80 bp, synthetic construct
  source 1..80: mol_type = other DNA
ctatggcaatgggcacgatggctggttgtggatacctcatgtttcttggaggcgtcaaacccacccacatctcttacatc

SEQ ID NO: 134846 - DNA, 80 bp, synthetic construct
  source 1..80: mol_type = other DNA
gtcggttacggccaggacagtcgtttgccgtctgaatttgacctgagcgcatttttacgcgccggagaaaaccgcctcgc

SEQ ID NO: 134847 - DNA, 80 bp, synthetic construct
  source 1..80: mol_type = other DNA
gcgcgtgcttagacccggcactactgtagtatttactcccggagagcggtccgtcacgcgggccttaaaacgggattacg

SEQ ID NO: 134848 - DNA, 80 bp, synthetic construct
  source 1..80: mol_type = other DNA
atgctgcctgccatactatctccgggcgccctcgttgtcggtgtgatatgtgcagccatactgcgtcgacacgtaggacc

SEQ ID NO: 134849 - DNA, 80 bp, synthetic construct
  source 1..80: mol_type = other DNA
ccccacgattgtctgtttggtgaggtttttaacgcgccccgccccgggaaacgtctgcgtgcttttggccatctgcacgc

SEQ ID NO: 134850 - DNA, 80 bp, synthetic construct
  source 1..80: mol_type = other DNA
tgagcgatcaggacgacgtcgtgtgttgctccatgtcctattcctggacgggggccctaataacaccatgtgctgcggag

SEQ ID NO: 134851 - DNA, 80 bp, synthetic construct
  source 1..80: mol_type = other DNA
cgggctacgccttcgggaatgggactggcaccccggcggattttgttgggctggcatgcgtcgcccaaccgagggccgcg

SEQ ID NO: 134852 - DNA, 80 bp, synthetic construct
  source 1..80: mol_type = other DNA
ccctcctactcaacatcttaggggggtgggtcgcctcacagttggccaatccgactgcatttacggcgttcgtggtgagc

SEQ ID NO: 134853 - DNA, 80 bp, synthetic construct
  source 1..80: mol_type = other DNA
gtcatactgcttacctgtttgttgcacccacaactggggtttgaggtcaccaaagccatcttagccttactaggtcctct

SEQ ID NO: 134854 - DNA, 80 bp, synthetic construct
  source 1..80: mol_type = other DNA
gcccccctgggaccaagtctttggagccgtgcaagtgtggagccgtcgacctatatctggtcacgcggaacgctgatgtc

SEQ ID NO: 134855 - DNA, 80 bp, synthetic construct
  source 1..80: mol_type = other DNA
cgactaggaagacttccgaacggtcccagcccagaggcaggcgtcagccaattccaaaagctcgccgccagacgggccgt

SEQ ID NO: 134856 - DNA, 80 bp, synthetic construct
  source 1..80: mol_type = other DNA
gaacatcgacatacagcctgcccgatcctggggaacttatgtgctcattgtctccctctttactccatatatgctccatc

SEQ ID NO: 134857 - DNA, 80 bp, synthetic construct
  source 1..80: mol_type = other DNA
tcaattcttggctagggaacatcatactgtacgcgcccacaatttgggtgcgcatggtgttgatgacccatttcttttca

SEQ ID NO: 134858 - DNA, 80 bp, synthetic construct
  source 1..80: mol_type = other DNA
agatgtattactccacggccatttcaggaaacatcgtcaactccgtcaatgtgcaatctaggaagctgctggcccgcttt

SEQ ID NO: 134859 - DNA, 80 bp, synthetic construct
  source 1..80: mol_type = other DNA
aaagagaagaggaaatggcaccaaccgatggcttatgctgatggtaactttggtggctatgggaggattagcagccttga

SEQ ID NO: 134860 - DNA, 80 bp, synthetic construct
  source 1..80: mol_type = other DNA
cgggccatcagccgcgggtgcaagcccccttcgaccctggcaaaactggtgaccgggctgggattcgcgatccacggagc

SEQ ID NO: 134861 - DNA, 80 bp, synthetic construct
  source 1..80: mol_type = other DNA
actgctcacttgtttactccacccctctcttgggtttgacatcaccaaagtgcttttagcgctactgggcccactgtaca

SEQ ID NO: 134862 - DNA, 80 bp, synthetic construct
  source 1..80: mol_type = other DNA
ctgaagatatggatttattgtgctacgagatgggctttccctgtagcgattcggaagacgagcaagacgagaacggaatg

SEQ ID NO: 134863 - DNA, 80 bp, synthetic construct
  source 1..80: mol_type = other DNA
agacaatgacacacctatccctaccaccataatggccaagaatgaagtgttttgcgtggacgcttcaaaggggggccgta

SEQ ID NO: 134864 - DNA, 80 bp, synthetic construct
  source 1..80: mol_type = other DNA
cgctcgcacagcgcgtcccccgtcgtctcgtgttttaggtcgcagggccggggcgcgtagtccgagaagccaaaatggcg

SEQ ID NO: 134865 - DNA, 80 bp, synthetic construct
  source 1..80: mol_type = other DNA
ccactacatggttctatgacaatgacaacccgtatagaacgtggcattattgtggctcctatgtgaccaaaacgtcagga

SEQ ID NO: 134866 - DNA, 80 bp, synthetic construct
  source 1..80: mol_type = other DNA
ctgtcgtcagtggggaaagctgttcacacagtgttgggagtggcgttcaacaccctttttggtggagttgggttcatccc

SEQ ID NO: 134867 - DNA, 80 bp, synthetic construct
  source 1..80: mol_type = other DNA
taaggacgccgtgctccatgttcccggctgcgtcccatgtgaaaaagacgactcgagtaatcagtcgcggtgttggattc

SEQ ID NO: 134868 - DNA, 80 bp, synthetic construct
  source 1..80: mol_type = other DNA
agacaagaattgcggtgtggcagcggggtgttcatccataatgacgtggaaacttggatagacagatacaaatttcatcc

SEQ ID NO: 134869 - DNA, 80 bp, synthetic construct
  source 1..80: mol_type = other DNA
gcagtcccccgtgaccgtcttgttcacgtaaggcgccagggccacgacgctcgaggcccccgcgatgggcaggtagcgcg

SEQ ID NO: 134870 - DNA, 80 bp, synthetic construct
  source 1..80: mol_type = other DNA
ccctgaactgcaatgattccataaacacggggttcttagctgggttgttttattaccataagttcaactccactgggtgt

SEQ ID NO: 134871 - DNA, 80 bp, synthetic construct
  source 1..80: mol_type = other DNA
gagtgggtgatcctccttttcttgctgttggcagacgccagggtctgcgcatgcctttggatgctcatcatactgggcca

SEQ ID NO: 134872 - DNA, 80 bp, synthetic construct
  source 1..80: mol_type = other DNA
cggcgcaaattaatgatgggcgctgtactaataactacagaacttgagtgcatgcaccgctttttttctaacagtaccat

SEQ ID NO: 134873 - DNA, 80 bp, synthetic construct
  source 1..80: mol_type = other DNA
tcttcgcggtctttccagtactcttggatcggaaacccgtcggcctccgaacggtaagagcctagcatgtagaactggtt

SEQ ID NO: 134874 - DNA, 80 bp, synthetic construct
  source 1..80: mol_type = other DNA
tagccggccgagaggcgccgccagcgcgccaggaactgactcatgtaacagaacccggggacctggtcccccgacatcaa

SEQ ID NO: 134875 - DNA, 80 bp, synthetic construct
  source 1..80: mol_type = other DNA
tgatgctgatggtatcacaagcagaagcagccttggagaaccttgttacgctgaacgccgtcgctgctgctgggacacat

SEQ ID NO: 134876 - DNA, 80 bp, synthetic construct
  source 1..80: mol_type = other DNA
cgtcgcgcgaacccagggccaccagcagttgcgtggtggtggttttccccatcccgtggggaccgtctatataaacccgc

SEQ ID NO: 134877 - DNA, 80 bp, synthetic construct
  source 1..80: mol_type = other DNA
atgatggaagactgggagagcctagacgaggaagcttccgaggccgaagaggtgtcagacgaaacaccgtcaccctcggt

SEQ ID NO: 134878 - DNA, 80 bp, synthetic construct
  source 1..80: mol_type = other DNA
acgtctggggacgtcgtggtatgcgccacggacgccctcatgacgggtttcaccggcgactttgactcagtgatagactg

SEQ ID NO: 134879 - DNA, 80 bp, synthetic construct
  source 1..80: mol_type = other DNA
tcgggtgacgtggcctgaccgccgattattagggcgtccaccatatccagcgccgccaggtggctcccgaacgcgcgatc

SEQ ID NO: 134880 - DNA, 80 bp, synthetic construct
  source 1..80: mol_type = other DNA
ggcgattcgagaggcctgcggatggcggcccagagctgggtatgctcggccggggcggccggtatatgtacggcgtgctg

SEQ ID NO: 134881 - DNA, 80 bp, synthetic construct
  source 1..80: mol_type = other DNA
agctaatgaaatgggattattggaaactacaaagagagatttaggaatgtctaaagaaccaggtgttgtttctccaacca

SEQ ID NO: 134882 - DNA, 80 bp, synthetic construct
  source 1..80: mol_type = other DNA
tctcgggaaccgtgttgtgttgccgcgcggccaaccggacgctgcgatcggtgcaggtcagaaacgccggctgcgcgtcg

SEQ ID NO: 134883 - DNA, 80 bp, synthetic construct
  source 1..80: mol_type = other DNA
ccggtctttccaccttgcccggcaatcctgcgattgcttccttgatggccttcactgcctcagtcaccagccccctttct

SEQ ID NO: 134884 - DNA, 80 bp, synthetic construct
  source 1..80: mol_type = other DNA
tcatcagacctcacagtagaaaaagcagcagatgtaacatgggaggaagaggctgagcaaacaggagtgtcccacaactt

SEQ ID NO: 134885 - DNA, 80 bp, synthetic construct
  source 1..80: mol_type = other DNA
atagttactagcggcgctcttagcgtacagtcacaagccccactgaccgtgcaagactccaaactaagcattgctactaa

SEQ ID NO: 134886 - DNA, 80 bp, synthetic construct
  source 1..80: mol_type = other DNA
tcgtagaccgtgcatcatgagcacacttcctaaacctcaaagacaaaccaaaagaaacacaccccgtcgcccacagaacg

SEQ ID NO: 134887 - DNA, 80 bp, synthetic construct
  source 1..80: mol_type = other DNA
ttacttttaataatgaagcagatagtgcttattctatcacttttaactattcatggaccaaggactatgacaatatccct

SEQ ID NO: 134888 - DNA, 80 bp, synthetic construct
  source 1..80: mol_type = other DNA
tcgtcactgggagagctcccggccatacggctttcacgctcacatccttgttcacgcggggtcccacacagaagctccaa

SEQ ID NO: 134889 - DNA, 80 bp, synthetic construct
  source 1..80: mol_type = other DNA
cagatgtggtcgctcatgtacttccatagaagggacctacgtttagcctccatggctatatgctcagcagtcccaacgga

SEQ ID NO: 134890 - DNA, 80 bp, synthetic construct
  source 1..80: mol_type = other DNA
cataaccggtgtagccgggacaattttctgacatgccaacgctgtgaaaaatacccgacagacatcagtccatgtataac

SEQ ID NO: 134891 - DNA, 80 bp, synthetic construct
  source 1..80: mol_type = other DNA
gcaagtctcaatgacatgacgcctgtcggaagaatggtgacagctaatccatatgtagcttcatcaactgccaatgctaa

SEQ ID NO: 134892 - DNA, 80 bp, synthetic construct
  source 1..80: mol_type = other DNA
ggcagctcttcaccttcagaccccgccagcatgcaactgtccaggactgcaattgttccatctatgtgggtagggtcacc

SEQ ID NO: 134893 - DNA, 80 bp, synthetic construct
  source 1..80: mol_type = other DNA
tcaggtcacgtcgccgggatcttccgcgccgccgtctgcacaagaggcgtcgcaaaggctctcgacttcgtgcctgtgga

SEQ ID NO: 134894 - DNA, 80 bp, synthetic construct
  source 1..80: mol_type = other DNA
gtgaggaccgtgaggcaccgaaaaatcttaagccgctcgtccccccgaacgacgcgccacacgaagacagagttggcgat

SEQ ID NO: 134895 - DNA, 80 bp, synthetic construct
  source 1..80: mol_type = other DNA
atctccatcagaacatcgtggatacccaattcctttatggcttgagttccagcgttgtttcgtgggccatcaagtgggag

SEQ ID NO: 134896 - DNA, 80 bp, synthetic construct
  source 1..80: mol_type = other DNA
aagacgttcaggtcctcgctatagaaccagggaaaaatcccaaacatgtccaaacgaaacctggccttttcaagacccta

SEQ ID NO: 134897 - DNA, 80 bp, synthetic construct
  source 1..80: mol_type = other DNA
cggcataggcacggtcctggaccaagcagagactgctggagcgcgtctcgtcgtgctcgcaactgctacgcccccggggt

SEQ ID NO: 134898 - DNA, 80 bp, synthetic construct
  source 1..80: mol_type = other DNA
tccactctgcttggcctaagctcgagcagttttggcagaagcatatgtggaacttcatcagcggcatacaataccttgct

SEQ ID NO: 134899 - DNA, 80 bp, synthetic construct
  source 1..80: mol_type = other DNA
gttctgcccaccgtgcgctaccaccccagcatcctttaattcgtgtgctgtgatactgttgcagagagatggctctcact

SEQ ID NO: 134900 - DNA, 80 bp, synthetic construct
  source 1..80: mol_type = other DNA
acccgcgcaaggatgacacgcaaattcgtgaagcgttccatatttttgcgcgacactccgccatgaatcactcccctgtg

SEQ ID NO: 134901 - DNA, 80 bp, synthetic construct
  source 1..80: mol_type = other DNA
tatagacattgaaccaattccatacgacccaaagtttgaaaaacaactaggacaggtaatgctcttggttctctgcgtgg

SEQ ID NO: 134902 - DNA, 80 bp, synthetic construct
  source 1..80: mol_type = other DNA
gcgtacgcagctccatgcgcggttctaggcgtggcgggccgcccggagacccgggctacgcggaaaccccctacgcgagc

SEQ ID NO: 134903 - DNA, 80 bp, synthetic construct
  source 1..80: mol_type = other DNA
gtgggttcaaagtggtgcagcaatgtctggcatggcagattcccaatcaatgccactaccaccggccctagcgtgcctat

SEQ ID NO: 134904 - DNA, 80 bp, synthetic construct
  source 1..80: mol_type = other DNA
ctctaatgcagtgcgtcgtaaaacaacgcctagttattccggacaatatcgaaccgcgcggcgaagtgtggtcgtaggac

SEQ ID NO: 134905 - DNA, 80 bp, synthetic construct
  source 1..80: mol_type = other DNA
cggcgccgccattggtagcatagggctaggcaaagtcatcatcgacatcctctccgggtatggtgctggtgtttcaggtg

SEQ ID NO: 134906 - DNA, 80 bp, synthetic construct
  source 1..80: mol_type = other DNA
cgccaaggtgcttggttgactatccctacaggttgtggcactacccatgcactgtgaactacaccgtacacaaggtgcgt

SEQ ID NO: 134907 - DNA, 80 bp, synthetic construct
  source 1..80: mol_type = other DNA
ccacgtttttctgctggatgtctgacgtctctggaactaagatagctggcatgctgctcatgtccctactgttgatgata

SEQ ID NO: 134908 - DNA, 80 bp, synthetic construct
  source 1..80: mol_type = other DNA
acgttgcaggaggaggagctggagcagcgggaccctgcggcggagaagtgaacatggaacaacaggtgcaagaaggccat

SEQ ID NO: 134909 - DNA, 80 bp, synthetic construct
  source 1..80: mol_type = other DNA
cttaacctatggccactgttgctgctggtcttgttgttaccccatcgggcgtacgcctatgacggcgttcaggctgggtc

SEQ ID NO: 134910 - DNA, 80 bp, synthetic construct
  source 1..80: mol_type = other DNA
atcctattgctggcaccacacacctaggccgtgcggtatcatcccagcacggaaagtgtgcggcccagtttactgtttca

SEQ ID NO: 134911 - DNA, 80 bp, synthetic construct
  source 1..80: mol_type = other DNA
gggttttgtatgagcgttggacacgtgatattatagcatgtctggaggcaatggaaacgcgccatgtatttaacgggaca

SEQ ID NO: 134912 - DNA, 80 bp, synthetic construct
  source 1..80: mol_type = other DNA
gagattaaggcgcgagcatcaaaggtgaaggcacgcttgctcactgtggaggaagcttgcgacctgacacccccccattc

SEQ ID NO: 134913 - DNA, 80 bp, synthetic construct
  source 1..80: mol_type = other DNA
agatggtggttggcgcggaggaaggaagtccagagatccacggccagggcggtttgcagacgatcccggtactggcggaa

SEQ ID NO: 134914 - DNA, 80 bp, synthetic construct
  source 1..80: mol_type = other DNA
aacattgaggaggttgccctgccaactacgggagaaatccccttttatggcaaggccatccccctctcccttataaaggg

SEQ ID NO: 134915 - DNA, 80 bp, synthetic construct
  source 1..80: mol_type = other DNA
ttgcagtcgagccggtcattttctctcccatggagaagaaaatcatcacctggggcgcggatactgccgcgtgcggtgac

SEQ ID NO: 134916 - DNA, 80 bp, synthetic construct
  source 1..80: mol_type = other DNA
gtggccggcgttgagcacaggttcgatgccgcctgcaactggacccgcggggagcaatgtgacttagacgatagggatag

SEQ ID NO: 134917 - DNA, 80 bp, synthetic construct
  source 1..80: mol_type = other DNA
ttatccaggagggccatcaaccacatccggtccgtgtgggaggacctcctggaagaccaacatactccaattgacacaac

SEQ ID NO: 134918 - DNA, 80 bp, synthetic construct
  source 1..80: mol_type = other DNA
ttgagttcgtgcctgccgagggcatggaaacaaccatgcggtcgccctcctttaccgacaactctacaccaccagcagtg

SEQ ID NO: 134919 - DNA, 80 bp, synthetic construct
  source 1..80: mol_type = other DNA
tgtggctctgtatctcccagactcctacaaatacaccccagccaatgtcactcttccaactaacaccaacacttatgact

SEQ ID NO: 134920 - DNA, 80 bp, synthetic construct
  source 1..80: mol_type = other DNA
aagggtcaccgccttggcgttggttcccagcgcctgttcggcccgctttcggaagtcccgggggttgtagccgtgcgtgc

SEQ ID NO: 134921 - DNA, 80 bp, synthetic construct
  source 1..80: mol_type = other DNA
tatgacgcgggttgtgcttggtatgagctcacacctgctgagaccacagtcagactacgggcgtatatgaacacccctgg

SEQ ID NO: 134922 - DNA, 80 bp, synthetic construct
  source 1..80: mol_type = other DNA
gagatatcaggaagcagtccaattctgtcaataacaatatcggaagatggcagtatgtcaataaaaaatgaagaggaaga

SEQ ID NO: 134923 - DNA, 80 bp, synthetic construct
  source 1..80: mol_type = other DNA
ccagacatccctcgatggcctccgcggacagcacgtcgcggggccccacgtcgaaaagaagactgagaaacgacagggac

SEQ ID NO: 134924 - DNA, 80 bp, synthetic construct
  source 1..80: mol_type = other DNA
agcgcactccacaagacaaccagctagcatatgtggtgataggtttgctattcatgatactgacagtggcagccaatgag

SEQ ID NO: 134925 - DNA, 80 bp, synthetic construct
  source 1..80: mol_type = other DNA
atgggcgaaagtcatcgtcattctcttgctgacctctggtgtggacgcggcaacaactctttcggggagtgccgtgggat

SEQ ID NO: 134926 - DNA, 80 bp, synthetic construct
  source 1..80: mol_type = other DNA
gaagagaggagggaccagatcgttgctcggattggctgcgctaattggactggcgagttcattgcagttatcaacctatc

SEQ ID NO: 134927 - DNA, 80 bp, synthetic construct
  source 1..80: mol_type = other DNA
gtggcattgaacatcgggtggacgtggcctgcaactggaccagggtggagccgtgcggcttggaacacagagaccgggcc

SEQ ID NO: 134928 - DNA, 80 bp, synthetic construct
  source 1..80: mol_type = other DNA
cgcatggtactgatggtgcatttcttttcaatactccagtcccaagaaacactccacagggtgcttgacttcgacatgta

SEQ ID NO: 134929 - DNA, 80 bp, synthetic construct
  source 1..80: mol_type = other DNA
tactctcatctctgactgtgacatccctcaggagggatgtcacaagtggatcaacgaagactgccccactccgtgcgatt

SEQ ID NO: 134930 - DNA, 80 bp, synthetic construct
  source 1..80: mol_type = other DNA
gcgcgacgaggaagacttccgagcggtcgcaacctcgaggtagacgtcagcctatccccaaggcacgtcggcccgagggc

SEQ ID NO: 134931 - DNA, 80 bp, synthetic construct
  source 1..80: mol_type = other DNA
gcggccctatgtacaactctcggggccaactatgcgggacccgcaggtgccgcgcaagcggggtgctcaccaccagcttg

SEQ ID NO: 134932 - DNA, 80 bp, synthetic construct
  source 1..80: mol_type = other DNA
cagaccttcagagcccagtgacaccctgctctgtgatataggggagtcttccccaagtcctgacgtcgaagaacaacgca

SEQ ID NO: 134933 - DNA, 80 bp, synthetic construct
  source 1..80: mol_type = other DNA
tggagacgttgtagtctgctcaactgacgcattgatgacaggcttcacgggggacttcgactcagtaatcgactgcaata

SEQ ID NO: 134934 - DNA, 80 bp, synthetic construct
  source 1..80: mol_type = other DNA
cgaatcgatgcgctcggtcgtcgggcgcatgtccctggggcagcgcggcctcaccacgctgttcgtgcaccacgaggcgc

SEQ ID NO: 134935 - DNA, 80 bp, synthetic construct
  source 1..80: mol_type = other DNA
cgagaacttgccgcaattacgattccaaaagaacgtgttccgcggttgtgttggtttaaacagttactcgaactgcaagc

SEQ ID NO: 134936 - DNA, 80 bp, synthetic construct
  source 1..80: mol_type = other DNA
cccacaacatgataagccgtattgctggcattatactcccagaccatgtagtactgtgccggccactgaagtgtgcggtc

SEQ ID NO: 134937 - DNA, 80 bp, synthetic construct
  source 1..80: mol_type = other DNA
cgacagcgggccacgccagaacctccagctggtaaataccaatggatcgtggcacataaaccgcactgctctgaactgca

SEQ ID NO: 134938 - DNA, 80 bp, synthetic construct
  source 1..80: mol_type = other DNA
tcgccgccggtacttcttaaccagagaccctaccactccaatcacccgagctgcttgggaaacagtaagacactcccctg

SEQ ID NO: 134939 - DNA, 80 bp, synthetic construct
  source 1..80: mol_type = other DNA
cgggcaagattatacccacaaccttcaaatcaaactttcctggacgttagcgcctgatttctgccagcgcctgcactgca

SEQ ID NO: 134940 - DNA, 80 bp, synthetic construct
  source 1..80: mol_type = other DNA
cgataatcttggtcatgtaattgtgtgtgggttgctcgatggggtgcgggccgtcgcgggcaatcagcggctggtggacc

SEQ ID NO: 134941 - DNA, 80 bp, synthetic construct
  source 1..80: mol_type = other DNA
cctttaccaacctggctgtccaattggtgagaatgatggaaggagagggtgtgatcggcccagatgatgtggagaaactc

SEQ ID NO: 134942 - DNA, 80 bp, synthetic construct
  source 1..80: mol_type = other DNA
ctgcatgcctcaggaaacttggggttccgcccttgcgagcttggagacaccgggcccggagcgtccgcgccacactccta

SEQ ID NO: 134943 - DNA, 80 bp, synthetic construct
  source 1..80: mol_type = other DNA
acgaaaacggtgtagccagtacacttgggaaatttgtcatggagtttagaaggaaaggcatggaaaaacttggaaacgcc

SEQ ID NO: 134944 - DNA, 80 bp, synthetic construct
  source 1..80: mol_type = other DNA
gcaccctaggcaatgacctgcgggtggatggggcaagcattcgctttgacaacatcgcgctgtacgccaactttttccct

SEQ ID NO: 134945 - DNA, 80 bp, synthetic construct
  source 1..80: mol_type = other DNA
ttaactttccaacaggatctaatcagacactgattggacctcctggacaaaaaattgattggcatgtgagcagtaatgat

SEQ ID NO: 134946 - DNA, 80 bp, synthetic construct
  source 1..80: mol_type = other DNA
agttactctccagtagagctcaatagggttgcagggacactcaggaagcttgggtgcccccccctacgggcttggagaca

SEQ ID NO: 134947 - DNA, 80 bp, synthetic construct
  source 1..80: mol_type = other DNA
gatgggtgcatacgtggggatatgagatgcatcttggactgtatttttaggttggctatgttcccagccatatccctccg

SEQ ID NO: 134948 - DNA, 80 bp, synthetic construct
  source 1..80: mol_type = other DNA
accagcgaatacctgttccgtcatagcgataacgagctcctgcactggatggtggcgctggatggtaagccgctggcaag

SEQ ID NO: 134949 - DNA, 80 bp, synthetic construct
  source 1..80: mol_type = other DNA
gagaggaccacttaaattctggaatcagcatcttaggaagggggccatcgacgttctctccccacagccgtcgtacaagt

SEQ ID NO: 134950 - DNA, 80 bp, synthetic construct
  source 1..80: mol_type = other DNA
tggcgtggttggcctcggccagaccgtcgcggaacttaaagttgcgcccctcgatcaggttgcgcatcagctgttccacc

SEQ ID NO: 134951 - DNA, 80 bp, synthetic construct
  source 1..80: mol_type = other DNA
tgcagatggccatgatcaagatggaggcactcaccggcacctatgtctatgaccacctgacccccctaggggactgggct

SEQ ID NO: 134952 - DNA, 80 bp, synthetic construct
  source 1..80: mol_type = other DNA
cacggtggaagtcttgtcagatgcccactatccaggaattccactcatgagatgtattgggtgtcaggtgtatcaggaaa

SEQ ID NO: 134953 - DNA, 80 bp, synthetic construct
  source 1..80: mol_type = other DNA
gccaaagtgtgcggtcctgtatactgcttcacccctagccccgtggtggtcggaaccaccgaccctcgcggggtccccac

SEQ ID NO: 134954 - DNA, 80 bp, synthetic construct
  source 1..80: mol_type = other DNA
cttaccatcaccagcctactccgtagattacatcagtgggtcaatgaagatacggccaccccttgcgctacctcgtggtt

SEQ ID NO: 134955 - DNA, 80 bp, synthetic construct
  source 1..80: mol_type = other DNA
gaacctggtggtactaaacgcagttgccgctgctagtaactcaggattgttctggggtttgctggtcatctgctgcgctt

SEQ ID NO: 134956 - DNA, 80 bp, synthetic construct
  source 1..80: mol_type = other DNA
ctaattacatcatgttcctctaacgtctccgtagcacatgacaacacggggaagaggtattactacctcacccgcgatcc

SEQ ID NO: 134957 - DNA, 80 bp, synthetic construct
  source 1..80: mol_type = other DNA
gaggtggaagactacggattcggcatgtttacgaccaacatatggatgaaatttcgagaaggaagttcagaagtgtgtga

SEQ ID NO: 134958 - DNA, 80 bp, synthetic construct
  source 1..80: mol_type = other DNA
tggtaaaaataaaattgtgagtaatgtgtattttggaggtgaggtttatcagccaggagttatagttgttgcttttaatc

SEQ ID NO: 134959 - DNA, 80 bp, synthetic construct
  source 1..80: mol_type = other DNA
aacgtcgtctagaagcgcttctcagcgtcagaagaaggttaccttcgacaggctgcaggtgctcgacgaccattacaaga

SEQ ID NO: 134960 - DNA, 80 bp, synthetic construct
  source 1..80: mol_type = other DNA
gcccaagagcaacaacagcgccaaggctaccgctcatggcgcgggcacaagaacgccatagttgcttgcttgcaagactg

SEQ ID NO: 134961 - DNA, 80 bp, synthetic construct
  source 1..80: mol_type = other DNA
tgatcccgaggacattgactgttggtgtgacgtcgaagaggtgtgggtgcactacggcagatgtacgcgcatgggacatt

SEQ ID NO: 134962 - DNA, 80 bp, synthetic construct
  source 1..80: mol_type = other DNA
tgcagctgcccccaggggataacatcatctatgttggggaactgagtcaccaatggttccaaaaagggagcagcattgga

SEQ ID NO: 134963 - DNA, 80 bp, synthetic construct
  source 1..80: mol_type = other DNA
cagggctcatgccgtcgggatcttccgcgcagctgtgtgctctaggggagtggcaaagtcaattgacttcatcccagtcg

SEQ ID NO: 134964 - DNA, 80 bp, synthetic construct
  source 1..80: mol_type = other DNA
cacgttaaagacaccccagaacgcacccccatcgcccccgcagaccgcgaacttcaccgagctggccgtctcctcgatct

SEQ ID NO: 134965 - DNA, 80 bp, synthetic construct
  source 1..80: mol_type = other DNA
gggggaggactggtcagaaacccactctcacggaattccacgcacgagatgtactgggtaagtcgagcttcaggcaatgt

SEQ ID NO: 134966 - DNA, 80 bp, synthetic construct
  source 1..80: mol_type = other DNA
cgacctcatggggtacattccgctcgtcggcgcccctctcggaggcgctgccagggccctggcgcatggcgtccgggttc

SEQ ID NO: 134967 - DNA, 80 bp, synthetic construct
  source 1..80: mol_type = other DNA
gcggttctcgccccagctggggccaaaatgacccccggcgtagatcccgcaacttgggtaaggtcatcgataccctaacg

SEQ ID NO: 134968 - DNA, 80 bp, synthetic construct
  source 1..80: mol_type = other DNA
gcccacttgcatgcgccgacggggagcggcaagagcaccaaggtcccggctgcgtatgcagctcagggctacaaggtgct

SEQ ID NO: 134969 - DNA, 80 bp, synthetic construct
  source 1..80: mol_type = other DNA
ttgtgtttcccgatctgggtgtacgcgtgtgcgagaaaatggctttgtacgacgtggtaaaaaaactccccatcgccgta

SEQ ID NO: 134970 - DNA, 80 bp, synthetic construct
  source 1..80: mol_type = other DNA
aggaattcagcatggctgggggagtattgtaaatagaaaattgaaaatgtaaataggaaatataagtgagtcaggccaat

SEQ ID NO: 134971 - DNA, 80 bp, synthetic construct
  source 1..80: mol_type = other DNA
agctaggagaagtggggatgtcttgtgggatattcccactcctaagatcatcgaggaatgtgaacatctggaggatggga

SEQ ID NO: 134972 - DNA, 80 bp, synthetic construct
  source 1..80: mol_type = other DNA
gggcgtgacttatcttgccttactagcagccttcaaagtcagaccaacttttgcagttggactacttttaaaaaagttga

SEQ ID NO: 134973 - DNA, 80 bp, synthetic construct
  source 1..80: mol_type = other DNA
gggacggaaacggatgcgtcggtgtcggacgaccccgacgacacgtccgactggtcttatgacgacattcccccacgacc

SEQ ID NO: 134974 - DNA, 80 bp, synthetic construct
  source 1..80: mol_type = other DNA
tttaagaaggaactagggaccttgaccagtgctatcaatcggcggagctcaaaacaaaagaaaagaggaggaaagaccgg

SEQ ID NO: 134975 - DNA, 80 bp, synthetic construct
  source 1..80: mol_type = other DNA
ggtctgcaaaaacttggctatgttctcagggaggtaggaggaaaaccaggaggcaagatttacgcagatgacaccgctgg

SEQ ID NO: 134976 - DNA, 80 bp, synthetic construct
  source 1..80: mol_type = other DNA
gagggagagttcaagctgaggacagagcaaaggaagacctttgtggaactcatgaagagaggagaccttcccgtttggct

SEQ ID NO: 134977 - DNA, 80 bp, synthetic construct
  source 1..80: mol_type = other DNA
catgctcaggaagaagcagatcacggtcctggatctccatccaggagcggggaaaacaaggaaaattttgccacagatta

SEQ ID NO: 134978 - DNA, 80 bp, synthetic construct
  source 1..80: mol_type = other DNA
ggtcaacttacaccgctatgcaccaccctgcaagcctctgcttagagatgaggtctcattcagcgtggggctcaatacct

SEQ ID NO: 134979 - DNA, 80 bp, synthetic construct
  source 1..80: mol_type = other DNA
ctgctcgcgacccgcgagtacgtccacgcgcgctgggcggccttcgaacagctcctggccgatttcccggaggcggccga

SEQ ID NO: 134980 - DNA, 80 bp, synthetic construct
  source 1..80: mol_type = other DNA
agcgaccaagcctccgaagctgattcgttttcctccatgccccccctcgaggaggagccgggggaccccgatctcagtga

SEQ ID NO: 134981 - DNA, 80 bp, synthetic construct
  source 1..80: mol_type = other DNA
gcgaccgacctatcggatgtcatcgtcattccaactcagcgagggaacaaccgatgctgggtgagagcaatggatgtggg

SEQ ID NO: 134982 - DNA, 80 bp, synthetic construct
  source 1..80: mol_type = other DNA
actcgctctggtggaggccaaagtcgtagcgcaggcgctggaagatgcgcgggccgccttggagcgcggcccggatagag

SEQ ID NO: 134983 - DNA, 80 bp, synthetic construct
  source 1..80: mol_type = other DNA
ggcttgggaggattttgagttagctctgaacacttttgccaaagtggctcttcgcccggacactatttataccattaaga

SEQ ID NO: 134984 - DNA, 80 bp, synthetic construct
  source 1..80: mol_type = other DNA
tttttggagaggtaaaatcctgcacctggcccgagacacacacactatggggtgatgcagtggaagaaacggagttgata

SEQ ID NO: 134985 - DNA, 80 bp, synthetic construct
  source 1..80: mol_type = other DNA
cccatctgggctcgacctgattacaacccacctttgttggaatcgtggaaggctccagactacaatccaccaacagtttc

SEQ ID NO: 134986 - DNA, 80 bp, synthetic construct
  source 1..80: mol_type = other DNA
tggctaaaagccaagctgctacccctcatgccaggtattcccttcctctcgtgccagaggggctataggggagagtggcg

SEQ ID NO: 134987 - DNA, 80 bp, synthetic construct
  source 1..80: mol_type = other DNA
actctcggcacgacggccgcgacggcagggccgcccccagacccagatcccacccccgcccgcaacggggcgccgccgct

SEQ ID NO: 134988 - DNA, 80 bp, synthetic construct
  source 1..80: mol_type = other DNA
ttttttttctgttctttttttttttaaatctttggtggctccatcttagccctagtcacggctagctgtgaaaggtccgt

SEQ ID NO: 134989 - DNA, 80 bp, synthetic construct
  source 1..80: mol_type = other DNA
gacaacccatttccatttgataccacctcttttaccttctcttatattgcccaagaaaatgaagacaaagactaataaaa

SEQ ID NO: 134990 - DNA, 80 bp, synthetic construct
  source 1..80: mol_type = other DNA
caggacgactcagagcatcacaagcctcttcacccttggaccaaaacagaacctgcagctcgtcaacaccaatggtagct

SEQ ID NO: 134991 - DNA, 80 bp, synthetic construct
  source 1..80: mol_type = other DNA
tcatgaaaaaccccactgtggatgggataacagtaatagatctagaaccaatatcttatgacccaaaatttgaaaagcaa

SEQ ID NO: 134992 - DNA, 80 bp, synthetic construct
  source 1..80: mol_type = other DNA
gagcccgagcggtcagagcccagctgatcacccggggggggaaagccgcaatatgcggtaggtacctcttcaattaggcg

SEQ ID NO: 134993 - DNA, 80 bp, synthetic construct
  source 1..80: mol_type = other DNA
ccccaggcctaccagcagggggtgacggtggacagcatcgggatgctgccccgcttcatccccgagaaccagcgcaccgt

SEQ ID NO: 134994 - DNA, 80 bp, synthetic construct
  source 1..80: mol_type = other DNA
acacgcagacgcacgagcaccccgacgggttcaccacagtctctaccgtgacctccgaggctgtcggcggccaggtcccc

SEQ ID NO: 134995 - DNA, 80 bp, synthetic construct
  source 1..80: mol_type = other DNA
tgggccaaggtcgcaatcatcatggttatgttctcaggggtcgatgcccacacatataccaccggtggcactgcatctcg

SEQ ID NO: 134996 - DNA, 80 bp, synthetic construct
  source 1..80: mol_type = other DNA
tggttttggcaggggtggccgagcgtttcgttttctcccccgaagtcaggtcttcgacgctggaaggcggagtccaggtg

SEQ ID NO: 134997 - DNA, 80 bp, synthetic construct
  source 1..80: mol_type = other DNA
gtcccatggaaatcaaggttatcacctggggcgcggacacagcggcttgcggagatattctttgtgggctgcccgtctcc

SEQ ID NO: 134998 - DNA, 80 bp, synthetic construct
  source 1..80: mol_type = other DNA
gaatgtttattgggggtgtggaacacaggctagaggcggcgtgcaacttcactcgtggagaccgctgcaatcttgaggac

SEQ ID NO: 134999 - DNA, 80 bp, synthetic construct
  source 1..80: mol_type = other DNA
attaggaagcgccagccttttcaggaaggatttattattatgtatgaggacttagagggaggaaacattccggctcttct

SEQ ID NO: 135000 - DNA, 80 bp, synthetic construct
  source 1..80: mol_type = other DNA
gctgcccacgagcatgggaaacaccatcacgtgctatctgaaggcacaggccgcctgcagggcggccaacatcaaggact

SEQ ID NO: 135001 - DNA, 80 bp, synthetic construct
  source 1..80: mol_type = other DNA
ccaacagtccggtccctcctccacgggatatggatcggatcaacctgcttccagtgctgattccccggagcgcgataagg

SEQ ID NO: 135002 - DNA, 80 bp, synthetic construct
  source 1..80: mol_type = other DNA
tgggtactgggataaatggcgttatgtggactgtataccatggggctggcagcaagaccatctgcggcccaaaaggccca

SEQ ID NO: 135003 - DNA, 80 bp, synthetic construct
  source 1..80: mol_type = other DNA
gacagtgcacaacggagatgcaaactcagtgggcaatgacacatcaaaccacggagtcacagccacagtaacaccccgag

SEQ ID NO: 135004 - DNA, 80 bp, synthetic construct
  source 1..80: mol_type = other DNA
ggagacgccgtcgcctgccgaccccccgggaggcgcgtccaagccccgcaagctgctggtgtccgagctggccgaggatc

SEQ ID NO: 135005 - DNA, 80 bp, synthetic construct
  source 1..80: mol_type = other DNA
cactgcccatatacatgatctctttgggcatgtctctgttcacaatctggcggtaccaggggaagcgctggttgaacatg

SEQ ID NO: 135006 - DNA, 80 bp, synthetic construct
  source 1..80: mol_type = other DNA
agaaggaggctatggaaataataaaaaagttcaagaaagaccttgctgccatgttgagaattatcaatgctaggaaggag

SEQ ID NO: 135007 - DNA, 80 bp, synthetic construct
  source 1..80: mol_type = other DNA
gaagagacctcaggctaatggctaacgccatctgctcggcagtccccgtggactgggtcccgaccggtaggacgacctgg

SEQ ID NO: 135008 - DNA, 80 bp, synthetic construct
  source 1..80: mol_type = other DNA
gtaccagccggtgggcgtccagaggtgcgagggtgatgtctttccaaggccgaagagttcgcgttagggtggtctcggtg

SEQ ID NO: 135009 - DNA, 80 bp, synthetic construct
  source 1..80: mol_type = other DNA
tggaccctccgtcggaagaggagctggattgaatcaggtatccagcctgtacccagagcttagcaaggtgctgacatcca

SEQ ID NO: 135010 - DNA, 80 bp, synthetic construct
  source 1..80: mol_type = other DNA
tgtgatgaagcagcgcccggcgggtccgctgtaactgctgttgtaggcggtaacaggcgcggatcagtaccgccagggcg

SEQ ID NO: 135011 - DNA, 80 bp, synthetic construct
  source 1..80: mol_type = other DNA
gaaacatcatactctacgcgcccacaatatgggctcgcatgatattgatgacccactttttctcaatactccagagccag

SEQ ID NO: 135012 - DNA, 80 bp, synthetic construct
  source 1..80: mol_type = other DNA
ctttttgtcacttgaaaaacatgtaaaaataatgtactagagacactttcaataaaggcaaatgcttttatttgtacact

SEQ ID NO: 135013 - DNA, 80 bp, synthetic construct
  source 1..80: mol_type = other DNA
aagtgtgaaaatggggaatgagatcgcaatgtgccttcaaagagcggggaaaaaggtcatccagctcaatcgtaagtctt

SEQ ID NO: 135014 - DNA, 80 bp, synthetic construct
  source 1..80: mol_type = other DNA
atcatcgacatagtcatcggggctcattgggggattttgggggccttactgtattacagtatggttgccaatttggctaa

SEQ ID NO: 135015 - DNA, 80 bp, synthetic construct
  source 1..80: mol_type = other DNA
aggccacggtgtgcgccagagccaaagctccccccccctcctgggacgtaatgtggaagtgcctgatccggcttaaaccc

SEQ ID NO: 135016 - DNA, 80 bp, synthetic construct
  source 1..80: mol_type = other DNA
gcgcgcgggcaggagctggtgctgcgcgcggaggttgctggcgaacgcgacgacgcggcggttgatctcctgaatctggc

SEQ ID NO: 135017 - DNA, 80 bp, synthetic construct
  source 1..80: mol_type = other DNA
acgcccagcctcagcctggaccctctatgcagtagccacaacagttatcactcccatgatgagacacacaattgaaaata

SEQ ID NO: 135018 - DNA, 80 bp, synthetic construct
  source 1..80: mol_type = other DNA
gttgatacaagaactccagaacccaaagaaggaacaaagaaactcatgaagttgacggcaaagtggctgtgggcggaact

SEQ ID NO: 135019 - DNA, 80 bp, synthetic construct
  source 1..80: mol_type = other DNA
cttgtgacctcacgcccgcgcattctgctcgatcaaagtttggatacggggcaaaggaggttagggctcatgctagcaag

SEQ ID NO: 135020 - DNA, 80 bp, synthetic construct
  source 1..80: mol_type = other DNA
cccccaaaacactgtaataaaaagtcaaatacaattccaccactaccaattagcgaggctcccgaatcggtcatgaaaat

SEQ ID NO: 135021 - DNA, 80 bp, synthetic construct
  source 1..80: mol_type = other DNA
tcccagggggggagggctgccacttgtggcaagtacctcttcaactgggcagtaaagaccaagcttagactcactccaat

SEQ ID NO: 135022 - DNA, 80 bp, synthetic construct
  source 1..80: mol_type = other DNA
ccgatgccctaatgacagggtatacgggggattttgattcagtcattgattgcaatgttgcagtcacacagacagttgac

SEQ ID NO: 135023 - DNA, 80 bp, synthetic construct
  source 1..80: mol_type = other DNA
ctatctactccagtacagcttgctccgaacgccttattttgtgcgcgcacacatccttttacgcgcgtgcatggttctcc

SEQ ID NO: 135024 - DNA, 80 bp, synthetic construct
  source 1..80: mol_type = other DNA
ggattgaaccatcatgggcagacgtcaagaaagacctaatatcatatggaggaggctggaagctagaaggagaatggaaa

SEQ ID NO: 135025 - DNA, 80 bp, synthetic construct
  source 1..80: mol_type = other DNA
gccgccgcagatactacctgaccagagacccaaccactccactcgcccgggctgcctgggaaacagttagacactcccct

SEQ ID NO: 135026 - DNA, 80 bp, synthetic construct
  source 1..80: mol_type = other DNA
agaaggagagcaaccaaaagaatatgacatagatatgaatttctttgatattccaaacaccggaacaggcggcaatggta

SEQ ID NO: 135027 - DNA, 80 bp, synthetic construct
  source 1..80: mol_type = other DNA
aaacagagaacggtgtgaacatgtgcaccctcatggccatggatcttggtgaactgtgtgaagacacaatcacttacaat

SEQ ID NO: 135028 - DNA, 80 bp, synthetic construct
  source 1..80: mol_type = other DNA
cgaactacaacctgttcgtgatggatgaggctcatttcaccgacccagctagcattgcagcaagaggttacatttccaca

SEQ ID NO: 135029 - DNA, 80 bp, synthetic construct
  source 1..80: mol_type = other DNA
aaagaaggtcatcacctggggggcagacaccgccgcctgcggcgacatcttagaaggcctgcctgtctccgctcggagag

SEQ ID NO: 135030 - DNA, 80 bp, synthetic construct
  source 1..80: mol_type = other DNA
aaatcctggggaaagccaggatatccttggcccatgtacggaaacgagggctgcggctgggcaggttggctcctgtcccc

SEQ ID NO: 135031 - DNA, 80 bp, synthetic construct
  source 1..80: mol_type = other DNA
gtcggctccttctttgaaggcgacctgcactgtccacgcagacgatccggatgcagagctgatttctgctaacctgctgt

SEQ ID NO: 135032 - DNA, 80 bp, synthetic construct
  source 1..80: mol_type = other DNA
gaaaccggagtattattaatgcatggccagccttactcaggtttgcatattcaaattacttttctggttatctgtgggat

SEQ ID NO: 135033 - DNA, 80 bp, synthetic construct
  source 1..80: mol_type = other DNA
gtggggggtgcgggctcccacaggcgaccgcgcgaccgtgtctagcttgctgacgcccaactcgcgcctgttgctgctgc

SEQ ID NO: 135034 - DNA, 80 bp, synthetic construct
  source 1..80: mol_type = other DNA
cgccggacagtttaatgcaattgatccctggataagacaaaactttgttcaagcacctgagggcgagttcacggtttccc

SEQ ID NO: 135035 - DNA, 80 bp, synthetic construct
  source 1..80: mol_type = other DNA
gctcagcaaactcgaggtttggtaggcaccatcatcaccagcctcacagggcgcgacaagaatgtggtggaaggtgagat

SEQ ID NO: 135036 - DNA, 80 bp, synthetic construct
  source 1..80: mol_type = other DNA
gtactctcctggcgaactcaatcgcgtggcagcatgcctcaggaagcttggggctccccctttgagagcctggagacacc

SEQ ID NO: 135037 - DNA, 80 bp, synthetic construct
  source 1..80: mol_type = other DNA
ttcgccacaaagacaaagctggcaagtatgctgtatatgctatttggcagcctggagaccctaacaactataatgttaca

SEQ ID NO: 135038 - DNA, 80 bp, synthetic construct
  source 1..80: mol_type = other DNA
atgctcatcttgctgggccaggccgaagcagcactagagaagctggtcgtcttgcatgccgcgagcgcagccagctgtaa

SEQ ID NO: 135039 - DNA, 80 bp, synthetic construct
  source 1..80: mol_type = other DNA
agactaccattacatcacaggggtcacagccgataacatcaagtgcccttgtcaggtgccggctccagagttcttcacgg

SEQ ID NO: 135040 - DNA, 80 bp, synthetic construct
  source 1..80: mol_type = other DNA
ggggtacaggcgcgcgtgcgcggcctccacgcgcgcgaagacccccggcccgaacacgcggccggaggccagcacggtgc

SEQ ID NO: 135041 - DNA, 80 bp, synthetic construct
  source 1..80: mol_type = other DNA
ctgcatcagcatggaggcttcggggtggatgagctgggcggcttctcgcgtgacgctctgcatctgcaggagcgcgttca

SEQ ID NO: 135042 - DNA, 80 bp, synthetic construct
  source 1..80: mol_type = other DNA
gagcacctgaaaaggaagcaagaagtcggcggtaacatcacacgggtcgagactgagaatgagatcataaccctcgactc

SEQ ID NO: 135043 - DNA, 80 bp, synthetic construct
  source 1..80: mol_type = other DNA
tcaagcaagtgtcttgctgtctttatttaggggttttgcgcgcgcggtaggcccgggaccagcggtctcggtcgttgagg

SEQ ID NO: 135044 - DNA, 80 bp, synthetic construct
  source 1..80: mol_type = other DNA
cctggggaagacgatgctggctctgaagctggctcgttcagttcaatgccaccactcgagggcgaacctggagatccgga

SEQ ID NO: 135045 - DNA, 80 bp, synthetic construct
  source 1..80: mol_type = other DNA
tcctattgaacatcttaggagggtgggtggcgtcacaactcgccaatcctacggcttccacagccttcgtggtcagcggc

SEQ ID NO: 135046 - DNA, 80 bp, synthetic construct
  source 1..80: mol_type = other DNA
gagaacgcggcgctgaccggggcgcgaacccccgacgacggcggcgacgccaaccgccgcgacggcgacgacgcccgcgg

SEQ ID NO: 135047 - DNA, 80 bp, synthetic construct
  source 1..80: mol_type = other DNA
gaactgcacaacagcagttggcctctgcaacctcatgagggggggatggttagctggcatgtcaataacctggacaattt

SEQ ID NO: 135048 - DNA, 80 bp, synthetic construct
  source 1..80: mol_type = other DNA
gctagatggagctcattcaagaagaatggagcgatcaaagtgttacagggtttcaaagcagagatctcaagcatgttgaa

SEQ ID NO: 135049 - DNA, 80 bp, synthetic construct
  source 1..80: mol_type = other DNA
aatgaccagaccgttcgcactgcgggctgggatgggggccggaaggcgaggccacagaccatggaatgctgcggcagcgc

SEQ ID NO: 135050 - DNA, 80 bp, synthetic construct
  source 1..80: mol_type = other DNA
ctaacctacctggaaacgcggcgtctttgttgaaccacaccggggcgcccttgacgagtgggataacgggtgaggaagtg

SEQ ID NO: 135051 - DNA, 80 bp, synthetic construct
  source 1..80: mol_type = other DNA
tggctccaggtgacgacgtgggtgtagacgccctctagcgccagggaggtggcgaggcgcgggcgtatgccgttggccga

SEQ ID NO: 135052 - DNA, 80 bp, synthetic construct
  source 1..80: mol_type = other DNA
gacggaagaacagacgagtatatctactctggccagtgtgacgatgatgacagcggacttgtgcagtggaaggaagcaca

SEQ ID NO: 135053 - DNA, 80 bp, synthetic construct
  source 1..80: mol_type = other DNA
ttctcgcatgccagagatcctatttttggcaatcaaatcattccggatactgcgattttaagtgttgttccattccatca

SEQ ID NO: 135054 - DNA, 80 bp, synthetic construct
  source 1..80: mol_type = other DNA
gagcagttggaaactatgtctaaaaaaccaggaggacccggaagaaaccgggtcgtcagtatgctaagacgcggagcatc

SEQ ID NO: 135055 - DNA, 80 bp, synthetic construct
  source 1..80: mol_type = other DNA
cgggccgataaaaagaaaccgcggcgcccccgcggacaccacacactggctctcgaaccccggacgcgcagaagggaccc

SEQ ID NO: 135056 - DNA, 80 bp, synthetic construct
  source 1..80: mol_type = other DNA
ttgcccattcagcgccaaacctttactgcaatggtgggttctgtacctattaaagtgtcccaacaagcaggagagcaaga

SEQ ID NO: 135057 - DNA, 80 bp, synthetic construct
  source 1..80: mol_type = other DNA
gtgatcctgacggatctgtgccaacccaacgcggatcgtgccgggacgctgcttctggcgctgcggcaccccgccgacct

SEQ ID NO: 135058 - DNA, 80 bp, synthetic construct
  source 1..80: mol_type = other DNA
gcaaaggctcctcccccttcttgggacgtgatgtggaagtgtctaactaggctcaaacctacattgactggtcctactcc

SEQ ID NO: 135059 - DNA, 80 bp, synthetic construct
  source 1..80: mol_type = other DNA
ccttctgcaggcgagcttgttgcgcgttccgtattacgtgcgcgcgcatgccctgctgcgggtgtgcctcctcttccgac

SEQ ID NO: 135060 - DNA, 80 bp, synthetic construct
  source 1..80: mol_type = other DNA
gcccttttggggcccctctacatacttcaggcttcgctgctgcgcgtgccttactttgtgagggcccacgcgttactcaa

SEQ ID NO: 135061 - DNA, 80 bp, synthetic construct
  source 1..80: mol_type = other DNA
cacaaccggcgcgtgtcagtaaatacggacgcgcgcacacgcggaggtaagttggagcacggggccccagtttattgacc

SEQ ID NO: 135062 - DNA, 80 bp, synthetic construct
  source 1..80: mol_type = other DNA
gttttcttgttcccgcacacgtttacacgtccggattcaagtcgcaacgctgctgacaaaatgacaacggtttcatgtcc

SEQ ID NO: 135063 - DNA, 80 bp, synthetic construct
  source 1..80: mol_type = other DNA
ttcataagaaaggtcaacagcaatgcggctttgggtgccatgtttgaagagcagaatcaatggaggagcgccagagaagc

SEQ ID NO: 135064 - DNA, 80 bp, synthetic construct
  source 1..80: mol_type = other DNA
aactacccatctctccgctgagcaacaccctcatccggcatcacaacatggtgtactccaccacgtcgcgcagtgccagt

SEQ ID NO: 135065 - DNA, 80 bp, synthetic construct
  source 1..80: mol_type = other DNA
cgtctgcccctgcggagcacaaatagctggacatgtcaagaacgggactatgcggatctctggtcccagaatgtgcagta

SEQ ID NO: 135066 - DNA, 80 bp, synthetic construct
  source 1..80: mol_type = other DNA
agggctgaaggattgcacgatgctggtatgcggtgacgacctagtcgttatcgccgaaagcggtggtgtggaggaggacg

SEQ ID NO: 135067 - DNA, 80 bp, synthetic construct
  source 1..80: mol_type = other DNA
aaatggcggaagctttgaaaggactcccagttcgatatcaaacctcagcagtgcagagggagcatcagggaaatgaaata

SEQ ID NO: 135068 - DNA, 80 bp, synthetic construct
  source 1..80: mol_type = other DNA
ccacttcgtggtaggtgccactaatcaggacctaaaatgtccctgccaagttccggctccggaattcttcactgaggtgg

SEQ ID NO: 135069 - DNA, 80 bp, synthetic construct
  source 1..80: mol_type = other DNA
tgtgggctgtggcctctgctcctcttgctcatggcgttgcccgagagggcgtacgcttttgatcgagaggcggctgcctc

SEQ ID NO: 135070 - DNA, 80 bp, synthetic construct
  source 1..80: mol_type = other DNA
agagtcctagtgatagtgtggtgtgctgctccatgtcttactcgtggaccggcgctctcattacaccatgcgccgctgag

SEQ ID NO: 135071 - DNA, 80 bp, synthetic construct
  source 1..80: mol_type = other DNA
aatattgtccagaacccaaaaaccacagcaaacaataaacaccccctctcggccccacggcaacacgccagtaagagtgg

SEQ ID NO: 135072 - DNA, 80 bp, synthetic construct
  source 1..80: mol_type = other DNA
tgccacccgcgcaacacatccattaaaatttcttgtaaactggcgccatgtaattcaaaaagtttgttaagagcaccctc

SEQ ID NO: 135073 - DNA, 80 bp, synthetic construct
  source 1..80: mol_type = other DNA
caatagggacaggtatagggaatttggaatgtgtctgtttaacgggaaattatttatctgacgacgtaaatgcaagttcg

SEQ ID NO: 135074 - DNA, 80 bp, synthetic construct
  source 1..80: mol_type = other DNA
acaaaatacatcatggcatgcatgtcagctgatctggaagtgaccaccagcgcctgggtgttgcttggaggggtgctcgc

SEQ ID NO: 135075 - DNA, 80 bp, synthetic construct
  source 1..80: mol_type = other DNA
gggtgtagacgccctcgagggccaggcacagtgggtgccgcagccggaggccgttggccctaagcacggctcccacggcc

SEQ ID NO: 135076 - DNA, 80 bp, synthetic construct
  source 1..80: mol_type = other DNA
ctggcgtatctggagcattggtggctttcaaaatcatgagcggcgaatgccctagcactgaggacctagtcaacctctta

SEQ ID NO: 135077 - DNA, 80 bp, synthetic construct
  source 1..80: mol_type = other DNA
cctgagccagagaagcaacgttcgcagacagacaaccagctagccgtgttcctgatttgtgtgttgaccctcgtgagcgc

SEQ ID NO: 135078 - DNA, 80 bp, synthetic construct
  source 1..80: mol_type = other DNA
ccaactatagaagaaggaagaacgttacgtgttctaaaaatggtggaaccatggctcagaggaaaccaattctgcataaa

SEQ ID NO: 135079 - DNA, 80 bp, synthetic construct
  source 1..80: mol_type = other DNA
ggcgggggcgccgggcgctaggtcctcgagcatggtgcggtggtagccgtagatgtaccttgacatccaggtgatgccgg

SEQ ID NO: 135080 - DNA, 80 bp, synthetic construct
  source 1..80: mol_type = other DNA
tgccgccacttgagggtgagccgggtgatccggaccttgattcgggctcctggtctacggtcagtgaagaaagcgacagt

SEQ ID NO: 135081 - DNA, 80 bp, synthetic construct
  source 1..80: mol_type = other DNA
cgacggcgacgcaccgggagacggtcgacgaagcgctcgatcatttccccgcggcggcgacgcatggtttcggtgacggc

SEQ ID NO: 135082 - DNA, 80 bp, synthetic construct
  source 1..80: mol_type = other DNA
tggcactgatgacagctgtttccatggttgcctcattgaagctttccaatttccaagggaagatcatgatgaccatcaac

SEQ ID NO: 135083 - DNA, 80 bp, synthetic construct
  source 1..80: mol_type = other DNA
aacccgccacagttaggacaactattgaaaccactactcaaactacacagctagacactacagtgcagaatactacttta

SEQ ID NO: 135084 - DNA, 80 bp, synthetic construct
  source 1..80: mol_type = other DNA
aagtttatgcaccaaaggcctatactcgcaaaccattgccaaaaacaatacaatatgatgtatacaaaggccaaaatatt

SEQ ID NO: 135085 - DNA, 80 bp, synthetic construct
  source 1..80: mol_type = other DNA
ggaaggtctgttcagggacatatctaaattgaccatccaggaagaaacagctatccttacctggctgaaggaaaaagggc

SEQ ID NO: 135086 - DNA, 80 bp, synthetic construct
  source 1..80: mol_type = other DNA
aatttgatgagatggaggagtgctcctcccgcattccatacatgtcagaggcacaggccattgcggagcagtttaaggag

SEQ ID NO: 135087 - DNA, 80 bp, synthetic construct
  source 1..80: mol_type = other DNA
aacttgttgtggaggcaagaaatgggggggaacataacgagggttgagtctgaaaacaaagttgtcatcctggactcctt

SEQ ID NO: 135088 - DNA, 80 bp, synthetic construct
  source 1..80: mol_type = other DNA
caacgcgggtataagggaatctggcgtggagacggcattatgcacactcgctgccactgtggggctgagatcactggaca

SEQ ID NO: 135089 - DNA, 80 bp, synthetic construct
  source 1..80: mol_type = other DNA
ggcgacagcccgccgtcgtcggggtagggcgacgcgccgggcgcaggaacaaaggccgcgtcgctgtccagctgctggcc

SEQ ID NO: 135090 - DNA, 80 bp, synthetic construct
  source 1..80: mol_type = other DNA
atcggtttataatgtcatgaaccgtattaaaaattcttttgaactccataacggataacgtatttaggctccggaataaa

SEQ ID NO: 135091 - DNA, 80 bp, synthetic construct
  source 1..80: mol_type = other DNA
tcgaagacgccgaggctctgttccacaagtactgcgcgctcactcttaaagactaaggcgggaattacctcatcgccacc

SEQ ID NO: 135092 - DNA, 80 bp, synthetic construct
  source 1..80: mol_type = other DNA
tgcaaagcggcgggcattgtggcgccgaccatgctggtgtgcggcgatgatctggtggtgattagcgaaagccagggcac

SEQ ID NO: 135093 - DNA, 80 bp, synthetic construct
  source 1..80: mol_type = other DNA
gtcttggcagaggcccaaattcaagactgggtgccaccgttggaggcacgaggcggccgtgatgggatcatatgggccgc

SEQ ID NO: 135094 - DNA, 80 bp, synthetic construct
  source 1..80: mol_type = other DNA
agatcagcgtcccagcgataatggtggccctgttgactctggtgttcgggggaataacatacactgatttggtaagatac

SEQ ID NO: 135095 - DNA, 80 bp, synthetic construct
  source 1..80: mol_type = other DNA
tgatccaagaggaagaatgtgaacaaacagtgcctgttgatttgtcagtgaaacgccctaaatgtaattaatgaactttg

SEQ ID NO: 135096 - DNA, 80 bp, synthetic construct
  source 1..80: mol_type = other DNA
tctttaccttgcttcgtcgctgaaatccggatttgccaacatcccatatcttaaacagacccccacggtttatactgcca

SEQ ID NO: 135097 - DNA, 80 bp, synthetic construct
  source 1..80: mol_type = other DNA
gagcagttcaaacaaaaggtcctcggtcttattcagactactaccaagcaagcagaggagctcaaaccggctgttcattc

SEQ ID NO: 135098 - DNA, 80 bp, synthetic construct
  source 1..80: mol_type = other DNA
agtgtaaggggcattacgtcgctgttcagtcagggctctaggcagaagatccaacttattaacaccaatggaagctggca

SEQ ID NO: 135099 - DNA, 80 bp, synthetic construct
  source 1..80: mol_type = other DNA
cgtcctaactgtggtaggaatcgtggctgctaatgaatatggtatgcttgagaagacaaaggaagacataaggagcatcc

SEQ ID NO: 135100 - DNA, 80 bp, synthetic construct
  source 1..80: mol_type = other DNA
ggtatactctggattacatgacaatggccctgtggagaaccctgctgcggaggaagagggtcttaggttgctcgccggcg

SEQ ID NO: 135101 - DNA, 80 bp, synthetic construct
  source 1..80: mol_type = other DNA
ccgagacgcggtgattgtccttgcagccttgttccacccccaactggtgtttgagatcactaagcacctcctggctgtgc

SEQ ID NO: 135102 - DNA, 80 bp, synthetic construct
  source 1..80: mol_type = other DNA
ccgtgatgtcggccgcggtgaagaacttgaagcaggggctgaggacgggcgaggccccgttgaggtgataggccccgttg

SEQ ID NO: 135103 - DNA, 80 bp, synthetic construct
  source 1..80: mol_type = other DNA
acagcttgcgtcattacgcagggaaagattttagcccaattgcaagctattaagcaagcgcgcgaagagtttttacttaa

SEQ ID NO: 135104 - DNA, 80 bp, synthetic construct
  source 1..80: mol_type = other DNA
ctgctgcttctcgccttgcctcccagggcgttggccctggatgctggcgacgcgggatcggcggggtgcgttgccttggc

SEQ ID NO: 135105 - DNA, 80 bp, synthetic construct
  source 1..80: mol_type = other DNA
tgtcgaaggtcaaacacctaaatatgccgataaaacatttcaacctgaacctcaaataggagaatctcagtggtacgaaa

SEQ ID NO: 135106 - DNA, 80 bp, synthetic construct
  source 1..80: mol_type = other DNA
ctgtttagcggtgtttcttggaccatgaaaataggaatagggattctgctgacatggttgggattaaattcaaggagcac

SEQ ID NO: 135107 - DNA, 80 bp, synthetic construct
  source 1..80: mol_type = other DNA
tctgtacgacgtgatcagcaagctccctgttgccgtgatgggaagctcctacggattccaatactcaccaggacagcggg

SEQ ID NO: 135108 - DNA, 80 bp, synthetic construct
  source 1..80: mol_type = other DNA
gatggtcgtctgtggattggacatctcgcggtgggtagtgagtcccccgggccgggttcggtggaactgtaaggtgacgg

SEQ ID NO: 135109 - DNA, 80 bp, synthetic construct
  source 1..80: mol_type = other DNA
ggaacatgagatgtggagaagcagggcagatgagatcaatgccattcttgaggaaaatgaggtagacatctcagtggtgg

SEQ ID NO: 135110 - DNA, 80 bp, synthetic construct
  source 1..80: mol_type = other DNA
agctccatgcccccccttgagggcgagcctggagaccccgacttaagttcgggatcatggtctacagtcagtgaggatgg

SEQ ID NO: 135111 - DNA, 80 bp, synthetic construct
  source 1..80: mol_type = other DNA
tcactccgatggagaagagggtgataacatggggggccgacgcggctgcgtgcggtgatatcctcaagggcctgccggtg

SEQ ID NO: 135112 - DNA, 80 bp, synthetic construct
  source 1..80: mol_type = other DNA
accattgagggcccatcttctgacaggccatattgctggcattacgctccaagaccctgcggcgttgagccggccaagaa

SEQ ID NO: 135113 - DNA, 80 bp, synthetic construct
  source 1..80: mol_type = other DNA
tggtgggtctggtgtgtgcaggtggcgacgtttgtggtctctgcggtctgcgtcacggggctcctcgtcctggcctctgt

SEQ ID NO: 135114 - DNA, 80 bp, synthetic construct
  source 1..80: mol_type = other DNA
tgatgagatagttgaagtaggcggttttcaaacggcggatggtggcaaggaggataacgtcttttggtccggcctgttgg

SEQ ID NO: 135115 - DNA, 80 bp, synthetic construct
  source 1..80: mol_type = other DNA
gttcggtccacatggcccaaagtggaagcattttggagtaagcacatgtggaacttcataagcgggatccagtacctagc

SEQ ID NO: 135116 - DNA, 80 bp, synthetic construct
  source 1..80: mol_type = other DNA
tatgacgcgggatgcgcttggtatgagctcactcctgccgagactacagttagactgcgggcgtatctgaacacccccgg

SEQ ID NO: 135117 - DNA, 80 bp, synthetic construct
  source 1..80: mol_type = other DNA
acacaggagtgatgggggccgccgttaaaaacggcatggcggtccacacagatcaaagcctctggatgaaatcgacgaga

SEQ ID NO: 135118 - DNA, 80 bp, synthetic construct
  source 1..80: mol_type = other DNA
gcggatgccagagtgtactcagaccaccaagctctaaagtccttcaaagattttgcatcagggaaacgatcacaaatcgg

SEQ ID NO: 135119 - DNA, 80 bp, synthetic construct
  source 1..80: mol_type = other DNA
gcttgatgatagggatagggtcgagatgagcccccttctcttctcgactacccaattgtctatcctcccatgctcatttt

SEQ ID NO: 135120 - DNA, 80 bp, synthetic construct
  source 1..80: mol_type = other DNA
ctcgacacggcaccagctcaatcagtcacagtgtataaaaagggccaagtacagagcgagtatatataggactaaaaaat

SEQ ID NO: 135121 - DNA, 80 bp, synthetic construct
  source 1..80: mol_type = other DNA
cctctgtcgagcaggaggcggcggtgcgtccgaggaagaggcgcgggtcgggccaggaaaacccctccccccagtccacg

SEQ ID NO: 135122 - DNA, 80 bp, synthetic construct
  source 1..80: mol_type = other DNA
taactgcggtgctcttccagcagctgcgcgttcgggacctggacgagctcgggcgtggtgagtatctccgaggaggacga

SEQ ID NO: 135123 - DNA, 80 bp, synthetic construct
  source 1..80: mol_type = other DNA
gcccgcccggactgacctggcctctggccgccacaaagggcgcgggggttaactacactatagggcaacaaaggatggta

SEQ ID NO: 135124 - DNA, 80 bp, synthetic construct
  source 1..80: mol_type = other DNA
catcaccgcggaagaggcgcgccgtcgtctcgcgcgaggctctcctccgtccctggccagctcctcagcgagccagctct

SEQ ID NO: 135125 - DNA, 80 bp, synthetic construct
  source 1..80: mol_type = other DNA
ggtacaccaagacttgcggcgctccaccgtgccgcatcaggaaggactttaattctaccatagatctgctgtgccccacg

SEQ ID NO: 135126 - DNA, 80 bp, synthetic construct
  source 1..80: mol_type = other DNA
cggcgcaccaccctgccgtactagagctgacttcaacgccagcacggacctgttgtgccccacggactgttttaggaagc

SEQ ID NO: 135127 - DNA, 80 bp, synthetic construct
  source 1..80: mol_type = other DNA
gagcgttaacccacccatccgttgtacagcttaaaggaacgtttacgtataacaaaatgacatgtcttatattaccacgt

SEQ ID NO: 135128 - DNA, 80 bp, synthetic construct
  source 1..80: mol_type = other DNA
cgccgccgggatcggtaacgaccccccaccccaacatagaggagatcgccctcggtcacgagggcgagatccccttctac

SEQ ID NO: 135129 - DNA, 80 bp, synthetic construct
  source 1..80: mol_type = other DNA
gggtggatgtgttaccataacagctgaggggaagccttcaatggatgtgtggcttgacgccatttaccaggagaaccctg

SEQ ID NO: 135130 - DNA, 80 bp, synthetic construct
  source 1..80: mol_type = other DNA
cgttgaatgtctgtgggcccgtctactgctttacaccctcaccggtggtggtgggcaccactgatattaaaggcctgcca

SEQ ID NO: 135131 - DNA, 80 bp, synthetic construct
  source 1..80: mol_type = other DNA
tctcacgacagcgcgtgccgcgcgcacgggttggtgtgacacaggcgggacaccagcaccaggagaggcttaagctcggg

SEQ ID NO: 135132 - DNA, 80 bp, synthetic construct
  source 1..80: mol_type = other DNA
caaacagcagcatcgtgtacgaggctgagacagttatcctgcaccttccggggtgtgttccgtgcatcaggactggaaac

SEQ ID NO: 135133 - DNA, 80 bp, synthetic construct
  source 1..80: mol_type = other DNA
tgtatgtgcgagagcgaaagctccccccccctcttgggatacaatgtggaagtgcctcatacggctcaagcccatactca

SEQ ID NO: 135134 - DNA, 80 bp, synthetic construct
  source 1..80: mol_type = other DNA
agctttggcaggaccacctagtggttccgggactggttcagactcaggtgtcccctctgccagcgttgactcttcggact

SEQ ID NO: 135135 - DNA, 80 bp, synthetic construct
  source 1..80: mol_type = other DNA
aagaaatgcctctttgaaaggtgtaccttgggtatcctgtctgagggtaactccagggtgcgccacaatgtggcctccga

SEQ ID NO: 135136 - DNA, 80 bp, synthetic construct
  source 1..80: mol_type = other DNA
tcctctggaggtcctgttatgtgcccttcgggacatgttgcggggatctttagggctgcagtgtgcaccagaggtgtagc

SEQ ID NO: 135137 - DNA, 80 bp, synthetic construct
  source 1..80: mol_type = other DNA
cccaaagccacgactcccgcgcgctaggtccttggggtaatggaaaaggccctactccccatccaagccagccaagttaa

SEQ ID NO: 135138 - DNA, 80 bp, synthetic construct
  source 1..80: mol_type = other DNA
acggcgtgcgcttacaccggtacgcaccaccgtgcaagcccctcatgcgcgatgaagtgacattctcagtcggcctcact

SEQ ID NO: 135139 - DNA, 80 bp, synthetic construct
  source 1..80: mol_type = other DNA
aggactcgcagccccccgggtggttggtgatcctggccaggagccatcccagatggcgggccctgcttcccggtggacag

SEQ ID NO: 135140 - DNA, 80 bp, synthetic construct
  source 1..80: mol_type = other DNA
tggtgaggtatgatgagtcaaaggttcgttgtcgcccctgtgagtgtggagctaatcatattaggttatatccagcaact

SEQ ID NO: 135141 - DNA, 80 bp, synthetic construct
  source 1..80: mol_type = other DNA
ggcacggcggtggtgttcacgcccggcgagcggtcctcggtcaggagcaagcgtagctatgacgaggtgtatggcgacga

SEQ ID NO: 135142 - DNA, 80 bp, synthetic construct
  source 1..80: mol_type = other DNA
tgcattttatgatttgttgcgtagaaactccgcgccaggacctaagcgactgcatatctactgggtcggaaaacctttca

SEQ ID NO: 135143 - DNA, 80 bp, synthetic construct
  source 1..80: mol_type = other DNA
ggctagttgccgcccccttagggactttgctcagggctcggggccgatcaccttcaacgggtccgatcgtgggcagaaca

SEQ ID NO: 135144 - DNA, 80 bp, synthetic construct
  source 1..80: mol_type = other DNA
gcgctggtatctcgggggctctcgtcgccttcaaaatcatgtctggcgagaagccctccatggaagacgtcgtcaatctt

SEQ ID NO: 135145 - DNA, 80 bp, synthetic construct
  source 1..80: mol_type = other DNA
gcccgaggcctgtgcgggctggacgacctgtgctcgcggcgacgcctgtcggacattaaggatattgcctcctttgtgtt

SEQ ID NO: 135146 - DNA, 80 bp, synthetic construct
  source 1..80: mol_type = other DNA
ggacattaatattagtgtggaaagaatagctgctcagcgtcagcgagaaacgcgagtgttggaatacctggaactacagc

SEQ ID NO: 135147 - DNA, 80 bp, synthetic construct
  source 1..80: mol_type = other DNA
ctaggagcagccatggtggagattgccttgggtggcgtgatgggcggcctgtggaagtatctaaatgcagtttctctctg

SEQ ID NO: 135148 - DNA, 80 bp, synthetic construct
  source 1..80: mol_type = other DNA
ctcggggggaggtattttttggatctgtcgacagaatagaccacggggacagaatcggggggaccggggccgtcggacga

SEQ ID NO: 135149 - DNA, 80 bp, synthetic construct
  source 1..80: mol_type = other DNA
cttcgggtcgttattcagtcccgcaagccgcgcaagtattacacgcgatcttcggacgggcggctctgccccgccgtccc

SEQ ID NO: 135150 - DNA, 80 bp, synthetic construct
  source 1..80: mol_type = other DNA
tggggcgtcttggcaggcctagcatactactctatggtggggaattgggccaaggtcgtcgtcgtgctggctctctttgc

SEQ ID NO: 135151 - DNA, 80 bp, synthetic construct
  source 1..80: mol_type = other DNA
tactctcactggccctactcctctcctgtaccggctgggagctgtccagaatgagataataaccactcacccaataacaa

SEQ ID NO: 135152 - DNA, 80 bp, synthetic construct
  source 1..80: mol_type = other DNA
acaccgagatgcatggtccactacccataccggctgtggcactacccttgcaccatcaactttaccatctttaaagtcag

SEQ ID NO: 135153 - DNA, 80 bp, synthetic construct
  source 1..80: mol_type = other DNA
attatgtttgcccccacgatatgggtgcgtatggttctgatgaaccattttttctccatcctccagtcgcaagaacaatt

SEQ ID NO: 135154 - DNA, 80 bp, synthetic construct
  source 1..80: mol_type = other DNA
ccctgctattaaacatcttgggcgggtgggtcgcatcacaactcgcaacgccgaccgcctctactagctttgtaataagt

SEQ ID NO: 135155 - DNA, 80 bp, synthetic construct
  source 1..80: mol_type = other DNA
tggcggctccattgcctggactctcatcaagaacgctgataagccctccttaaaaaggtggaggcctggaggcaggacgc

SEQ ID NO: 135156 - DNA, 80 bp, synthetic construct
  source 1..80: mol_type = other DNA
cttggccaccaataactctcagtttatcatggataacaaccacccgcacccccagggcacccaaggggccgtgcgggagt

SEQ ID NO: 135157 - DNA, 80 bp, synthetic construct
  source 1..80: mol_type = other DNA
ccctggtacttggcgggaaggcgctcgtagtcccgctgggctcgcagccccgacacagtgttggtggtgtcctgcagggc

SEQ ID NO: 135158 - DNA, 80 bp, synthetic construct
  source 1..80: mol_type = other DNA
tcatctcttggcctgaatgcagtggcctactataggtggctagacgtctcggtaataccaacagccggggacgttgtggt

SEQ ID NO: 135159 - DNA, 80 bp, synthetic construct
  source 1..80: mol_type = other DNA
cgaagtgggactggaaaaactgaagatgaaaggtctcacgtacacaatgtgtgacaaaacaaagttcacatggaagagag

SEQ ID NO: 135160 - DNA, 80 bp, synthetic construct
  source 1..80: mol_type = other DNA
taagcacttcatggtgcatcgggaatggttcaatgacctggctctcccatggacccccccctctggaaccagttggagaa

SEQ ID NO: 135161 - DNA, 80 bp, synthetic construct
  source 1..80: mol_type = other DNA
catgactctcggcgtgggagcggatgtcggctgtgcagtggacacagagcgaatggagctccgctgtggtgagggtttgg

SEQ ID NO: 135162 - DNA, 80 bp, synthetic construct
  source 1..80: mol_type = other DNA
aaatactttgactccagtgcatcgatatttaatagattaacatcggtgtctgtaattaaatcgcgggccctcatcccaga

SEQ ID NO: 135163 - DNA, 80 bp, synthetic construct
  source 1..80: mol_type = other DNA
atgaaaatgaatatatctgtggtcatacttttggtcagtggctggaattcaatcacagtgatccctcttttgtgcggcat

SEQ ID NO: 135164 - DNA, 80 bp, synthetic construct
  source 1..80: mol_type = other DNA
agcatatgtggaactttatcagcggcatccagtacttagcggggttgtccaccttgccagggaatcccgctgtggcctcg

SEQ ID NO: 135165 - DNA, 80 bp, synthetic construct
  source 1..80: mol_type = other DNA
aggacaacaccgaggtagagatagtcacccggatgggtgagaggaaaatcctcaagccgagatggcttgatgcaagagtt

SEQ ID NO: 135166 - DNA, 80 bp, synthetic construct
  source 1..80: mol_type = other DNA
tgtcccggttatgggttggcgtggggctgccgtgcggcagggatacggcgctaacgatgcatctcaacaattgttgtgta

SEQ ID NO: 135167 - DNA, 80 bp, synthetic construct
  source 1..80: mol_type = other DNA
acatgatgatgagctggtcaccaaccatcaccatgttgaccgcctatgccatgcgcattccagagatgattgttgatgtc

SEQ ID NO: 135168 - DNA, 80 bp, synthetic construct
  source 1..80: mol_type = other DNA
ggtaaattatgcaacagggaatttacccggttgctctttttctatcttcctacttgctcttctgtcttgcgttacagtgc

SEQ ID NO: 135169 - DNA, 80 bp, synthetic construct
  source 1..80: mol_type = other DNA
catcgggggggtttgaaagacggttggcgtctattatggccgctgacacagccttgcacgcagaagttatattcaacact

SEQ ID NO: 135170 - DNA, 80 bp, synthetic construct
  source 1..80: mol_type = other DNA
ccggactataaccctccccttctggagtcttggaaaagaccagattatgatcctccccaggtctcggggtgtccattacc

SEQ ID NO: 135171 - DNA, 80 bp, synthetic construct
  source 1..80: mol_type = other DNA
attagagattgcgtttgatacaccattatatgaaaaaaatggaagactagctttaaaaacaggccatggattagctgttc

SEQ ID NO: 135172 - DNA, 80 bp, synthetic construct
  source 1..80: mol_type = other DNA
gaccatctcgagttttgggagtcagttttcaccggccttacacacatagacagccacttcttatcccaaacaaagcaagc

SEQ ID NO: 135173 - DNA, 80 bp, synthetic construct
  source 1..80: mol_type = other DNA
aatggtgctgctgcagatggaggacaaggcatggctagtacacaggcaatggttcttggacctccccctaccctggcttc

SEQ ID NO: 135174 - DNA, 80 bp, synthetic construct
  source 1..80: mol_type = other DNA
accagtgctgcgatttagatcctgcagcgcggaaggtcatcacatcactcacagagcggctgtatattggcggccccatg

SEQ ID NO: 135175 - DNA, 80 bp, synthetic construct
  source 1..80: mol_type = other DNA
gaaccccggtcaggagtggatacgagtgcatactacgtgatgacagttggtagcaagtcattcctcgtgcatcgcgaatg

SEQ ID NO: 135176 - DNA, 80 bp, synthetic construct
  source 1..80: mol_type = other DNA
tggttgctgcagatcaccgtcctgctgctggcccatcgcatcagccagctggcccacctggtttacgtcctgcactttgc

SEQ ID NO: 135177 - DNA, 80 bp, synthetic construct
  source 1..80: mol_type = other DNA
ggttttggagaagttcctctgcatctgatgaaacaaaaagcccgtccatgcggattcccctcatcacatcagccaggact

SEQ ID NO: 135178 - DNA, 80 bp, synthetic construct
  source 1..80: mol_type = other DNA
cggctggcctgcgccagctggcactcggtcgtacacaccatgcacttgcggggctagtgacctatatttggtaacccgtg

SEQ ID NO: 135179 - DNA, 80 bp, synthetic construct
  source 1..80: mol_type = other DNA
ccaccatccttgacttccaccctggggcggggaaaacccgtaggttcctgcctcaaatattggcggagtgtgccagaagg

SEQ ID NO: 135180 - DNA, 80 bp, synthetic construct
  source 1..80: mol_type = other DNA
aagtgaaaaaaggagagactacagatggagtgtacagagtgatgactcgcagactgctgggttcaacacaggttggagtg

SEQ ID NO: 135181 - DNA, 80 bp, synthetic construct
  source 1..80: mol_type = other DNA
cgagatagacccaggtttgcgggacggggaacgtatgggcgtgttcatatatacccatcgtcaaaaatagctgtaaaaac

SEQ ID NO: 135182 - DNA, 80 bp, synthetic construct
  source 1..80: mol_type = other DNA
ttcttcatagcggcgtggtacatcaagggtcggattacaccgatgaccgcctacggtctccttgacctctggccttttgt

SEQ ID NO: 135183 - DNA, 80 bp, synthetic construct
  source 1..80: mol_type = other DNA
gtgggcctcgccttcatacaacccccctctgttggaagtgtggaaaagaccggactacgagccacccgtagtacatggct

SEQ ID NO: 135184 - DNA, 80 bp, synthetic construct
  source 1..80: mol_type = other DNA
ctggtaaccgcgtacgagcagacggtgaaccaggagattaactttcaaaaaagctttaacaaccacgtgcgcacgcttgt

SEQ ID NO: 135185 - DNA, 80 bp, synthetic construct
  source 1..80: mol_type = other DNA
ttcttagtaggcctaaacacgtacgcggtagggtcgcagctaccttgtgatccagaacctgacgtggtggctctaacatc

SEQ ID NO: 135186 - DNA, 80 bp, synthetic construct
  source 1..80: mol_type = other DNA
cgacaggagggtcgatggcccgcaccacccgtgggttttcaaacctcttttccgctgggtcagctcagcacatccagctt

SEQ ID NO: 135187 - DNA, 80 bp, synthetic construct
  source 1..80: mol_type = other DNA
cctgtctctctgtgtatggtgacccagacaacaacaccgacacaagaggacaataatccgttatgggacgctctttataa

SEQ ID NO: 135188 - DNA, 80 bp, synthetic construct
  source 1..80: mol_type = other DNA
ctggcgcccttgtcagactgggcgtgcaacggcctacgagatctggccgtcgccgtcgagcctgtcgtcttctcccctat

SEQ ID NO: 135189 - DNA, 80 bp, synthetic construct
  source 1..80: mol_type = other DNA
caaaatgtggcgctcgaagaaaacgccaatggggttttcatatgacaccaggtgcttcgattcgaccgtcaccgagcggg

SEQ ID NO: 135190 - DNA, 80 bp, synthetic construct
  source 1..80: mol_type = other DNA
aggtcgcactggtagggggaggttaggcatataccggtatgtcaccccaggagagaggccatccggcatatttgacacct

SEQ ID NO: 135191 - DNA, 80 bp, synthetic construct
  source 1..80: mol_type = other DNA
aaatttttttgtgattttctacaacggtttagagaattatggttataaacatcggcggggtaccgcgccccctccccatc

SEQ ID NO: 135192 - DNA, 80 bp, synthetic construct
  source 1..80: mol_type = other DNA
ctggcacacgcacttcaagaaacacaaacatagcaaaagcattttcctcaaaatcttcaaacattaagctgcaatcttga

SEQ ID NO: 135193 - DNA, 80 bp, synthetic construct
  source 1..80: mol_type = other DNA
actacgttgaggtacggaggttgggcgactgccactatgtggtaggggtcactgctgaagggttaaagtgcccttgtcag

SEQ ID NO: 135194 - DNA, 80 bp, synthetic construct
  source 1..80: mol_type = other DNA
ctcaaaaagccgcactgtccgaaggagtgtacaggatcatgcaaagagggttattcgggaaaacccaggttggagtaggg

SEQ ID NO: 135195 - DNA, 80 bp, synthetic construct
  source 1..80: mol_type = other DNA
aaatccctactttttaagacagctactggaatcaacatgtgcacactcatagctatggacttgggagagatgtgtgatga

SEQ ID NO: 135196 - DNA, 80 bp, synthetic construct
  source 1..80: mol_type = other DNA
ggcttcaccacaccaactggaacttctgattccggccccgtcattgcggatgacaagtctgacgacgggtcctactcgtc

SEQ ID NO: 135197 - DNA, 80 bp, synthetic construct
  source 1..80: mol_type = other DNA
gtgcccgaccccgctggttcatgtggtgcctactcctactttctgtaggggtaggcatctacctgctccccaaccgatga

SEQ ID NO: 135198 - DNA, 80 bp, synthetic construct
  source 1..80: mol_type = other DNA
aatataaacatttcatacctacttaaaatcatatcccatggcactggtagctcttgtaatacagtaaagcatacagatga

SEQ ID NO: 135199 - DNA, 80 bp, synthetic construct
  source 1..80: mol_type = other DNA
ggatgtcctctgaaggcgcctggaaacaaatacaaagagtggagacctgggccttgagacacccaggattcacggtgata

SEQ ID NO: 135200 - DNA, 80 bp, synthetic construct
  source 1..80: mol_type = other DNA
atgtcctcaacgagcctggccgggtggatctcccaacccggagtacaaaacgcgccggggccccgcgacgtatcccggcc

SEQ ID NO: 135201 - DNA, 80 bp, synthetic construct
  source 1..80: mol_type = other DNA
gcccccgcccagctgggacacgatgtggaaatgtctgactcggcttaagcctatgctcacagggcctacccccttgctct

SEQ ID NO: 135202 - DNA, 80 bp, synthetic construct
  source 1..80: mol_type = other DNA
gggtaaaggggtttacctggacccccagacaggcgaagtgcttaacccgggtcttccccagcatgccgaggaagaagcag

SEQ ID NO: 135203 - DNA, 80 bp, synthetic construct
  source 1..80: mol_type = other DNA
ggaagcgcaggatgggaaaagaaggtggcgaccttccccaccctttaatctggggcctgaactggagattagctgtgaat

SEQ ID NO: 135204 - DNA, 80 bp, synthetic construct
  source 1..80: mol_type = other DNA
gttctagctggtcaggcatcacagctaaatgctgtcgtagatttgcaagacagaaacacagagctgtcctaccaactttt

SEQ ID NO: 135205 - DNA, 80 bp, synthetic construct
  source 1..80: mol_type = other DNA
tcccacgccgagcctgaagcccgtgaccctgcagcaggtgctgccgagccgcgggatcaagcgcgagggcgagaacatgt

SEQ ID NO: 135206 - DNA, 80 bp, synthetic construct
  source 1..80: mol_type = other DNA
ctcgtccatgcctcctctcgagggagagccgggcgatccggacttgagttgcgactcttggtccaccgttagtgacaacg

SEQ ID NO: 135207 - DNA, 80 bp, synthetic construct
  source 1..80: mol_type = other DNA
ggtgacgatacaacaacgtcctctgagcccgccccctctgcctgccctccagactccgacgttgagtcctgttcttccat

SEQ ID NO: 135208 - DNA, 80 bp, synthetic construct
  source 1..80: mol_type = other DNA
gactttgtacccgttgagtctatggaaaccaccatgcggtccccggtcttcacggacaattcgtcccccccggccgtacc

SEQ ID NO: 135209 - DNA, 80 bp, synthetic construct
  source 1..80: mol_type = other DNA
ggggtgggccggccgcggggccccgggggggtgtcgtcgagggacccgctgttttctgacggcggccgcggcggcggcgg

SEQ ID NO: 135210 - DNA, 80 bp, synthetic construct
  source 1..80: mol_type = other DNA
gggtgtgctttgccccctcagaaggtaactcccattccaccacctaggaggaagaaaactatacaccttgaccaatccac

SEQ ID NO: 135211 - DNA, 80 bp, synthetic construct
  source 1..80: mol_type = other DNA
tgcttcacgccaggtcatggccatactcagttcccttactataaccagcctcctacgtaagttgcatgagtggatcaaca

SEQ ID NO: 135212 - DNA, 80 bp, synthetic construct
  source 1..80: mol_type = other DNA
ccgctaaaagaccgcatcgacacgcgcgtccttcttgtcgtctctctcttcccccccccccatcaccccgcaatttgcac

SEQ ID NO: 135213 - DNA, 80 bp, synthetic construct
  source 1..80: mol_type = other DNA
ggtcacgagacacgctgacgtcattccggtgcgccggcgaggtgatggtaggggcagcctactctctcccaggcctgtct

SEQ ID NO: 135214 - DNA, 80 bp, synthetic construct
  source 1..80: mol_type = other DNA
caaaagccctacagttcataccagtggaaaccctgagtacacaggctaggtctccatccttctctgacaacagcacgcca

SEQ ID NO: 135215 - DNA, 80 bp, synthetic construct
  source 1..80: mol_type = other DNA
cgctacccctccgggctccgtcactgtgcctcatcctaacatcgaggaggttgctctgtccaccaccggagagatcccct

SEQ ID NO: 135216 - DNA, 80 bp, synthetic construct
  source 1..80: mol_type = other DNA
tgcaaaatccaatacgaccaccggatcgatataaaatcccgtatcagggtcaaaaaccctggctcctttatatcctacat

SEQ ID NO: 135217 - DNA, 80 bp, synthetic construct
  source 1..80: mol_type = other DNA
atgattcagacctcatctgccctaccgactgtttcaggaaacatcccgaggccacatacagccggtgcggtgcggggccc

SEQ ID NO: 135218 - DNA, 80 bp, synthetic construct
  source 1..80: mol_type = other DNA
cgaggaagaccaggaggaaggacactgggtgagcaatggaaggagaagctaaacgggctcagcaaggaggatttcctgaa

SEQ ID NO: 135219 - DNA, 80 bp, synthetic construct
  source 1..80: mol_type = other DNA
ggatttaatcgcgagcacctgctgcgcgaggaagactttgaaccaaatgagcgttcgggcattagtccagcacgggccca

SEQ ID NO: 135220 - DNA, 80 bp, synthetic construct
  source 1..80: mol_type = other DNA
cctccacgccaccacccacaccgcctccccgcagaaatcagttccccttgatacaatacttagaagagccccctccccga

SEQ ID NO: 135221 - DNA, 80 bp, synthetic construct
  source 1..80: mol_type = other DNA
gactcaattcgttcgtagtgggatcacaactcccatgcgagccagagccggacgtggcagtgctaacatccatgctgaca

SEQ ID NO: 135222 - DNA, 80 bp, synthetic construct
  source 1..80: mol_type = other DNA
ttccaggtgggactcaacccagcaaaggagcattctttccgccgctatggaggttatggtgcgattctctgctgaaccag

SEQ ID NO: 135223 - DNA, 80 bp, synthetic construct
  source 1..80: mol_type = other DNA
ggtccccggtcttcacagacaactcatctcccccggccgtaccgcaaacattccaagtggcccatctacacgctcccact

SEQ ID NO: 135224 - DNA, 80 bp, synthetic construct
  source 1..80: mol_type = other DNA
tattcatgatactgacagtagcagccaatgagatgggactgctggaaaccacaaagaaagacttagggattggccatgtg

SEQ ID NO: 135225 - DNA, 80 bp, synthetic construct
  source 1..80: mol_type = other DNA
gtttgtggtggctgagctatatgctagtcctggcagaagccctaattcaagagtgggcaccgccactagaagctcgagga

SEQ ID NO: 135226 - DNA, 80 bp, synthetic construct
  source 1..80: mol_type = other DNA
aaccactgttccaggcgagacttgataccctcaaacacgggttccgttgctttgcgtatatgagccgtataacccacttt

SEQ ID NO: 135227 - DNA, 80 bp, synthetic construct
  source 1..80: mol_type = other DNA
gtacggcatgcgcgcggcccagttccacgcgcggtttatggacgccatcacaccgacggggaccgtcatcacgctcctgg

SEQ ID NO: 135228 - DNA, 80 bp, synthetic construct
  source 1..80: mol_type = other DNA
atgagtggatggaagacaaaacaccagttgagaggtggagtgatgttccatactctggaaagagagaagacatttggtgt

SEQ ID NO: 135229 - DNA, 80 bp, synthetic construct
  source 1..80: mol_type = other DNA
tctcatcgcggagtatgatgacagggaaccatctatacctgctgagtgtcatcggcctcctaggccaaaatatcccccag

SEQ ID NO: 135230 - DNA, 80 bp, synthetic construct
  source 1..80: mol_type = other DNA
caaacacaaacggccacgagtctgtaccaaagaagagttcatcaacaaggttcgtagcaatgcagcattaggggctatat

SEQ ID NO: 135231 - DNA, 80 bp, synthetic construct
  source 1..80: mol_type = other DNA
gccgactcgctcgccgcgcccgcctccgcgccgcgggaggcgcgcaagcgcaagagccccgccccggccagggcgccgcc

SEQ ID NO: 135232 - DNA, 80 bp, synthetic construct
  source 1..80: mol_type = other DNA
cctgcccgtgtgccaggatcatttggagttttgggagagtgtgttcaccggcctcacacacattgatgcccactttctgt

SEQ ID NO: 135233 - DNA, 80 bp, synthetic construct
  source 1..80: mol_type = other DNA
ccaagccacagtgtgcgcaagggcgaaggcccctcccccgtcttgggatgtcatgtggaaatgcctactacgactcaaac

SEQ ID NO: 135234 - DNA, 80 bp, synthetic construct
  source 1..80: mol_type = other DNA
gccatcaaccaagtcaggaatctaatcggaaaagaagaatatattgactatatgccagcaatgaaaaggtatgagacatc

SEQ ID NO: 135235 - DNA, 80 bp, synthetic construct
  source 1..80: mol_type = other DNA
ttggatgaactccacggggttcgtcaagacgtgcggtgctccgccatgtcgcaccaggccggacggcaataacaccttaa

SEQ ID NO: 135236 - DNA, 80 bp, synthetic construct
  source 1..80: mol_type = other DNA
ggcagcggcgcggaagagaactccaacgcggcagccgcggcaatgcagccggtggaggacataaacgatcatgccattcg

SEQ ID NO: 135237 - DNA, 80 bp, synthetic construct
  source 1..80: mol_type = other DNA
tggttgacacctcgttgcatggttgactacccataccggctttggcattacccatgtacagtcgatttcagattgttcaa

SEQ ID NO: 135238 - DNA, 80 bp, synthetic construct
  source 1..80: mol_type = other DNA
gaattcgagtcacgagatgtactgggtaagtggagcatcaggcaatatcattcactctgtcaacatgaccagccaagtgt

SEQ ID NO: 135239 - DNA, 80 bp, synthetic construct
  source 1..80: mol_type = other DNA
agccactgttgttacgtcgttgttgtgtcacgataattcagaaatacgctcggatcaccctttattatggcacgatcggg

SEQ ID NO: 135240 - DNA, 80 bp, synthetic construct
  source 1..80: mol_type = other DNA
ttggaaggcgagcctggagaccccgacctcagctcgggatcgtggtccacggtcagcgaggaccatgatagtgtcgtttg

SEQ ID NO: 135241 - DNA, 80 bp, synthetic construct
  source 1..80: mol_type = other DNA
ttcgtgtgcatcatcgccctgacggagctgtatttcatcctgcggcgggactcggcccccaaaaacgcggaaccagcggc

SEQ ID NO: 135242 - DNA, 80 bp, synthetic construct
  source 1..80: mol_type = other DNA
tcgggaaagacacacagagtccttcccgaactgattcgtgagtgcattgacaaaaggttgaggactgttgtattggctcc

SEQ ID NO: 135243 - DNA, 80 bp, synthetic construct
  source 1..80: mol_type = other DNA
ctcgcatctgccctccggggcatgggcttaaacgcagttgctttctacagaggactggacgtctccgttataccaactca

SEQ ID NO: 135244 - DNA, 80 bp, synthetic construct
  source 1..80: mol_type = other DNA
gtattgagcgtatgttttggaataacaggcgcacgcttcattatctaatctcccagcgtggtttaatcagacgatcgaaa

SEQ ID NO: 135245 - DNA, 80 bp, synthetic construct
  source 1..80: mol_type = other DNA
cccaagtgatcattgacgtgtttgtcggtggccactggggcgtgctagctgggctgctatattacagcatggtggccaac

SEQ ID NO: 135246 - DNA, 80 bp, synthetic construct
  source 1..80: mol_type = other DNA
ggtcgcagcaggtggatcctgccatgttggcagcactgcaaagccaaccctcgggcgtgaccccctcagacgactgggcg

SEQ ID NO: 135247 - DNA, 80 bp, synthetic construct
  source 1..80: mol_type = other DNA
gagaaaagaaaaagctaaggccaaaatggttagatgcacgtgtgtacgccgaccccatggctttgaaggatttcaaggag

SEQ ID NO: 135248 - DNA, 80 bp, synthetic construct
  source 1..80: mol_type = other DNA
tccctggactttgtgcccgtggagagcctgcagtcctcccaacggtctccatccttctctgacaattcatctcctcctgc

SEQ ID NO: 135249 - DNA, 80 bp, synthetic construct
  source 1..80: mol_type = other DNA
ccaccacggctgacaattcagagcacggccgaagcgtggggctgccaagccaaatagagtatttcagcgagccatagtgt

SEQ ID NO: 135250 - DNA, 80 bp, synthetic construct
  source 1..80: mol_type = other DNA
ccacgcgcatatccgggggcacgtagaaattaccttcctcttcggactcgatatccacgacgtcaaagtcgtgggcggtc

SEQ ID NO: 135251 - DNA, 80 bp, synthetic construct
  source 1..80: mol_type = other DNA
tcctggggcataattcccttcacaaatttgcatttcccaagctttaatttcagacggaggaatcatatcaacctggggag

SEQ ID NO: 135252 - DNA, 80 bp, synthetic construct
  source 1..80: mol_type = other DNA
gaagaaaaatcccagactgtgcacaagggaagaattcatctcaaaagttaggtcaaacgcagccataggcgcagtctttc

SEQ ID NO: 135253 - DNA, 80 bp, synthetic construct
  source 1..80: mol_type = other DNA
ccacgactcttagtcccagctgttgccgtggccacccccgcccgccgccctcgcggggctaactggcagagcactcttaa

SEQ ID NO: 135254 - DNA, 80 bp, synthetic construct
  source 1..80: mol_type = other DNA
gcacgggtggccttaaataggggaatgttctgattagcacgggaactggatttagtgtctataatccacacagtttcctg

SEQ ID NO: 135255 - DNA, 80 bp, synthetic construct
  source 1..80: mol_type = other DNA
gtggcttcgccgacctcatggggtacatccccgtcatcggtgctcctcttggtggcattgcagcagccttggctcacgga

SEQ ID NO: 135256 - DNA, 80 bp, synthetic construct
  source 1..80: mol_type = other DNA
gttttggtgctcaacccatccgttgctgctaccctggggttcggagcgtatatgtcaaaagcatacggcattgaccccaa

SEQ ID NO: 135257 - DNA, 80 bp, synthetic construct
  source 1..80: mol_type = other DNA
gagccttctggactcgcttctggttatgggcgaccggggcatccttatccataacacgatctttggggagcaggtgttcc

SEQ ID NO: 135258 - DNA, 80 bp, synthetic construct
  source 1..80: mol_type = other DNA
tagtccaccgagaatggttcatggacctcaaccttccatggagtagcgctggaggcaacgtgtggagaaacagggaaact

SEQ ID NO: 135259 - DNA, 80 bp, synthetic construct
  source 1..80: mol_type = other DNA
acgcagacgtcattccagccagacgtagaggagactccactgctagtttgctcagtccccgccccctggccacactgaag

SEQ ID NO: 135260 - DNA, 80 bp, synthetic construct
  source 1..80: mol_type = other DNA
actgcacctccagcttacactagaaaacctttgtcaaaaccaaaaaaagtagatgttaagattggtcataatgtaacatt

SEQ ID NO: 135261 - DNA, 80 bp, synthetic construct
  source 1..80: mol_type = other DNA
ctctccccgagacctctttcaactttaaaggggtcttcaggtggaccggtgctttgctccaggggccacgctgtcgggat

SEQ ID NO: 135262 - DNA, 80 bp, synthetic construct
  source 1..80: mol_type = other DNA
tacctctagatgtcatcaagggggggagacacctgattttctgtcattcaaagaaaaagtgtgacgagctgcagaagcag

SEQ ID NO: 135263 - DNA, 80 bp, synthetic construct
  source 1..80: mol_type = other DNA
ctgggtgggttgaagctgtaacaattcctcccagcacgctaacgtgggacgctgtctggtgcgacccattagataaaagt

SEQ ID NO: 135264 - DNA, 80 bp, synthetic construct
  source 1..80: mol_type = other DNA
gggaactgtccgttccggcggagatcctgcggaaaaccaggaagtttccccgagcgatgcccgtatgggcacgcccggat

SEQ ID NO: 135265 - DNA, 80 bp, synthetic construct
  source 1..80: mol_type = other DNA
aacttgctcatagcgctgaatctccagagcatgatagggatgatggcgttgcatccgaggctgagtcctacagctctatg

SEQ ID NO: 135266 - DNA, 80 bp, synthetic construct
  source 1..80: mol_type = other DNA
gctccctgcctccctcgcccccccaaagggtcgtgaggcggcgcacggcccacggaggtcccccgaccgctcaagcgggc

SEQ ID NO: 135267 - DNA, 80 bp, synthetic construct
  source 1..80: mol_type = other DNA
cctgcgccgaactataagttcgcgctgtggagggtgtctgcagaggaatacgtggagataaggcgggtgcgggacttcca

SEQ ID NO: 135268 - DNA, 80 bp, synthetic construct
  source 1..80: mol_type = other DNA
aggagagggttggagaccggggttggggaatgaatccctacccttcaccgacaacccccgggtaatcacggtgtgccgat

SEQ ID NO: 135269 - DNA, 80 bp, synthetic construct
  source 1..80: mol_type = other DNA
ttgagaacgacaacagtgtcaggaaagttgatacacgaatggtgttgccgctcgtgcacacttcctcctctgcgatacat

SEQ ID NO: 135270 - DNA, 80 bp, synthetic construct
  source 1..80: mol_type = other DNA
tacgctcaccggcccaacacctctgctctatcgcttaggccctgtcaccaatgagaccactctcacacaccccgtaacca

SEQ ID NO: 135271 - DNA, 80 bp, synthetic construct
  source 1..80: mol_type = other DNA
cgcgcatcgggggcgagctctgccgtcagcttggcggcatccatggcccgcgcctgccgcagcgcttcctcggccatgcg

SEQ ID NO: 135272 - DNA, 80 bp, synthetic construct
  source 1..80: mol_type = other DNA
gaaagtgatgaggccagcggccgacgggaaaactgtgatggatgtcatctccagagaggatcagagaggaagcgggcagg

SEQ ID NO: 135273 - DNA, 80 bp, synthetic construct
  source 1..80: mol_type = other DNA
ggcccaggtgttcatcgtctcgccgcagtaccactggtttgtgcaagaatgcaattgctccatctaccctggcaccatca

SEQ ID NO: 135274 - DNA, 80 bp, synthetic construct
  source 1..80: mol_type = other DNA
acacctcggtgctctgtgaatgctatgatgctgggtgcgcctggtacgagctgacaccggctgagactacaacaaggctg

SEQ ID NO: 135275 - DNA, 80 bp, synthetic construct
  source 1..80: mol_type = other DNA
tggagagctgctcagcgagggaggcatccccggaatagtggctttgtttgtggtcctcgaatatgtcatccggaggaggc

SEQ ID NO: 135276 - DNA, 80 bp, synthetic construct
  source 1..80: mol_type = other DNA
gcttgggacatgatgatgaactggtcaccaacgtcggctctcgtcgtgtctcagctattgaggatcccccagagcatatt

SEQ ID NO: 135277 - DNA, 80 bp, synthetic construct
  source 1..80: mol_type = other DNA
tcttccagcagctgcgcgttcgggacctggacgagctcggacggggtgagtatctccgaggaggacgacctggtgccgtg

SEQ ID NO: 135278 - DNA, 80 bp, synthetic construct
  source 1..80: mol_type = other DNA
acctgtggggccgtgatagctggacacgtcaaaaatggcaccatgaaaatcacaggacccaagacatgcagtaacacttg

SEQ ID NO: 135279 - DNA, 80 bp, synthetic construct
  source 1..80: mol_type = other DNA
gtgctctcccccctcccaagaagactccgacgccccccccaaggagacgtcggacagtgggtctaaacgagaacaccata

SEQ ID NO: 135280 - DNA, 80 bp, synthetic construct
  source 1..80: mol_type = other DNA
gggcgcagaacacgtgctcgctgccgtgaatcgcggcttgcagcaggtaaaacaccgccgggtagctgcggtcctcgaac

SEQ ID NO: 135281 - DNA, 80 bp, synthetic construct
  source 1..80: mol_type = other DNA
ctactggccatctttggacccctttggattctccagactagtctgctcaaagtgccctacttcgtgcgcgtccaaggcct

SEQ ID NO: 135282 - DNA, 80 bp, synthetic construct
  source 1..80: mol_type = other DNA
agcttttcaaacgctgggggcgacatccaagatgagatacatgattttaggcttgctcgcccttgcggcagtctgcagtg

SEQ ID NO: 135283 - DNA, 80 bp, synthetic construct
  source 1..80: mol_type = other DNA
atataaggtgggggtcttatgtagttttgtatctgttttgcagcagccgccgccgccatgagcaccaactcgtttgatgg

SEQ ID NO: 135284 - DNA, 80 bp, synthetic construct
  source 1..80: mol_type = other DNA
ggcataatggctcctgtccccacgcggctcccgtccgacctggggcccaaatgacccccggcgaaggtcccgcaatttgg

SEQ ID NO: 135285 - DNA, 80 bp, synthetic construct
  source 1..80: mol_type = other DNA
ataatgtgcgatgagtgccactcaactgactcaactactatcttgggcatcggcacagtcctggaccaagcggagacggc

SEQ ID NO: 135286 - DNA, 80 bp, synthetic construct
  source 1..80: mol_type = other DNA
aaaatataggccagacccgggatcgtacatctccagttgaaaatccaccaattaaataaaaaataacgttgacgtcccta

SEQ ID NO: 135287 - DNA, 80 bp, synthetic construct
  source 1..80: mol_type = other DNA
caattcccctcgaattcatcaaagggggtagacatctcatcttttgccattccaagaagaagtgtgacgagctcgccaaa

SEQ ID NO: 135288 - DNA, 80 bp, synthetic construct
  source 1..80: mol_type = other DNA
ctaccagccctgttgagtcccggcgctctcgtcgtgggcgtcgtgtgcgctgccatcctccggcgacatgtgggcccctc

SEQ ID NO: 135289 - DNA, 80 bp, synthetic construct
  source 1..80: mol_type = other DNA
acgctgtttaccgtcgatgcgggcacgccatgctcgcggtccgctccctccagcacctcacgaccgtcatcttcataacg

SEQ ID NO: 135290 - DNA, 80 bp, synthetic construct
  source 1..80: mol_type = other DNA
gtcgcccacggctaccatgatcttggcgtacgcgatgcgtgtccccgaggtcattatagacatcattagcggggctcatt

SEQ ID NO: 135291 - DNA, 80 bp, synthetic construct
  source 1..80: mol_type = other DNA
gtgaccacgtcggcggcgacgtcctcgtcgagcgtaccgacgggcggcacacctatcacgtgactggccgtcaggagctc

SEQ ID NO: 135292 - DNA, 80 bp, synthetic construct
  source 1..80: mol_type = other DNA
aacgcaagttcaaagaagagctgctgcaggccgtcgcgcctgaaatatacggcccagcggatcacattaccaagcgcgaa

SEQ ID NO: 135293 - DNA, 80 bp, synthetic construct
  source 1..80: mol_type = other DNA
gcggcgagacgactggccagggggtctcccccgtctgaggccagttcatcggcaagccaactttccgctccatccttgaa

SEQ ID NO: 135294 - DNA, 80 bp, synthetic construct
  source 1..80: mol_type = other DNA
acagttctgtaatattttctatggcatctcgatccagcaaatttcctcgttgcgggggttgggttggctgttgctgtaag

SEQ ID NO: 135295 - DNA, 80 bp, synthetic construct
  source 1..80: mol_type = other DNA
ttttcgtctgcggtgtcggtggcgtgctgatcacgtggggggttaacgggcgaatgggagctcgggtccacagctgacgt

SEQ ID NO: 135296 - DNA, 80 bp, synthetic construct
  source 1..80: mol_type = other DNA
accaccacatcttgcacctcccggggtgtgtgccctgtgtgatgactgggaaccggtctcactgctgggtggctctcacc

SEQ ID NO: 135297 - DNA, 80 bp, synthetic construct
  source 1..80: mol_type = other DNA
ggggggggcgcgcgtacaggggctgggtcgctcagaggacgcatgcgtagcgcaggggggtgtacgtgccgacctcgggg

SEQ ID NO: 135298 - DNA, 80 bp, synthetic construct
  source 1..80: mol_type = other DNA
tgcttcccgcgggaaccatgtctcacccacgcactacgtgcctgagagcgatgctgcggcccgtgtgacccagatactca

SEQ ID NO: 135299 - DNA, 80 bp, synthetic construct
  source 1..80: mol_type = other DNA
gtgagctcaatcgcgtggcatcaagcctcaggaagcttggggctccaccattgagagcctggagacatcgggccagagcg

SEQ ID NO: 135300 - DNA, 80 bp, synthetic construct
  source 1..80: mol_type = other DNA
tcggtcgcgcacgatgcatctggcaaaagagtttattacctcacccgtgaccccaccaccccccttgcacgggctgcgtg

SEQ ID NO: 135301 - DNA, 80 bp, synthetic construct
  source 1..80: mol_type = other DNA
aaacagcgatgaagcatctcttgagtttcaagaaagaactaggaactctgaccagtgccatcaaccgccggagcacaaaa

SEQ ID NO: 135302 - DNA, 80 bp, synthetic construct
  source 1..80: mol_type = other DNA
tgggcatcggcacagtcctggaccaagcggagacggctggagcgcggctcgtcgtgctcgccaccgctacgcctccggga

SEQ ID NO: 135303 - DNA, 80 bp, synthetic construct
  source 1..80: mol_type = other DNA
ggcgatgacctagtagtcatctcagaaagccaggggactgaggaggacgagcggaacctgagagccttcacggaggccat

SEQ ID NO: 135304 - DNA, 80 bp, synthetic construct
  source 1..80: mol_type = other DNA
tcctcccagatcccccggccgccgagtcccaatgcaggcgcgcggccatggtgctgcacaggcacaacagctcccagaca

SEQ ID NO: 135305 - DNA, 80 bp, synthetic construct
  source 1..80: mol_type = other DNA
tctaaataagttactaggaccccagggaccacaatgtggtagcttacaccgcgtcgctgaagcatggttagtagagatga

SEQ ID NO: 135306 - DNA, 80 bp, synthetic construct
  source 1..80: mol_type = other DNA
cgggaagaggtaggcacggcatatatcggtatgtctcgtctggggagagaccgtctggcattttcgactccgttgtgctc

SEQ ID NO: 135307 - DNA, 80 bp, synthetic construct
  source 1..80: mol_type = other DNA
ccgccgcgcccgcgtttctgccgcccgctcgctcctgtgtggaccccgcggtgggcggcgtggggtgtgccgtgtgtgtg

SEQ ID NO: 135308 - DNA, 80 bp, synthetic construct
  source 1..80: mol_type = other DNA
gcttcgccgacctcatggggtacatcccgctcgtcggcgcccccctaggtggcgcggccagagccctggcgcatggcgtc

SEQ ID NO: 135309 - DNA, 80 bp, synthetic construct
  source 1..80: mol_type = other DNA
cctaatggatttccgggcgcggtgcccctgtctgcagagcacttaacggattgatatctcgcgggcacgcgcgcccttaa

SEQ ID NO: 135310 - DNA, 80 bp, synthetic construct
  source 1..80: mol_type = other DNA
cagaacccacgtggccatcataccacaagcgcaggtagattaagtggcgacccctcataaacacgctggacataaacatt

SEQ ID NO: 135311 - DNA, 80 bp, synthetic construct
  source 1..80: mol_type = other DNA
tgtggagagggccaaagtatgaagaggatgtcaacctgggcagcgggacgagagctgtggtgaagggagaggtccatagc

SEQ ID NO: 135312 - DNA, 80 bp, synthetic construct
  source 1..80: mol_type = other DNA
tgattactctaaatgcaaattcgcggacatatggaatttcttagactgctatcaggagaaaattgatatgccctcctatt

SEQ ID NO: 135313 - DNA, 80 bp, synthetic construct
  source 1..80: mol_type = other DNA
agcagctcgcgtgacccagatactatcatccctcactgtgacatctcttctcagacgcctccacaagtggatcaatgaag

SEQ ID NO: 135314 - DNA, 80 bp, synthetic construct
  source 1..80: mol_type = other DNA
ttaaagatcttgattttcccagtgggtctaatcaaactcttgtgggtcctcctggtacaaaagttgactggtatacatct

SEQ ID NO: 135315 - DNA, 80 bp, synthetic construct
  source 1..80: mol_type = other DNA
gccgcaagcccgctcgcctcattgtgtaccctgacctgggggtgcgtgtctgtgagaaacgcgccctgtatgacgtgata

SEQ ID NO: 135316 - DNA, 80 bp, synthetic construct
  source 1..80: mol_type = other DNA
cgcgccaagctcatcgcccagggggggaaagccagaatttgtggcgtgtacctctttaactggtcggtgaaaaccaagct

SEQ ID NO: 135317 - DNA, 80 bp, synthetic construct
  source 1..80: mol_type = other DNA
cgtgtaagtaacagagtctgactaagggtgtgagggggggaaaagaacgggctggtgtgctgtaacacgagcccacccgc

SEQ ID NO: 135318 - DNA, 80 bp, synthetic construct
  source 1..80: mol_type = other DNA
gtgacgtcaattgcccgaggcgcataaagggccggtggtccgcctagccgcagcaaattaaaaatcgtgagtcacagcga

SEQ ID NO: 135319 - DNA, 80 bp, synthetic construct
  source 1..80: mol_type = other DNA
cgacatccaaactgaacattctatttaccagtgctgccagttggagccagcggcacggaaggccattacatccctcactg

SEQ ID NO: 135320 - DNA, 80 bp, synthetic construct
  source 1..80: mol_type = other DNA
ttgttattgatgaccacgtatcattagcaataacagcaaatgcttgggcgccttgaggcaaggctacccgatatacaggc

SEQ ID NO: 135321 - DNA, 80 bp, synthetic construct
  source 1..80: mol_type = other DNA
aaacatcatgtggagatcagtagaaggggagctcaacgcaatcctggaagagaatggagttcaactgacggtcgttgtgg

SEQ ID NO: 135322 - DNA, 80 bp, synthetic construct
  source 1..80: mol_type = other DNA
acattaacaggacagctctgaactgcaatgattccctccagaccggatttatagcggccttgttctacagaaacaacgtc

SEQ ID NO: 135323 - DNA, 80 bp, synthetic construct
  source 1..80: mol_type = other DNA
aacactaatccccttatgtagatccacaaaactccagaaaactccacactggattgagctgacagccctgctagcagggg

SEQ ID NO: 135324 - DNA, 80 bp, synthetic construct
  source 1..80: mol_type = other DNA
ccagggaggaagaacggcagcttcatcattgacgggaagtcacgaaaggagtgccccttctctaacagagtgtggaactc

SEQ ID NO: 135325 - DNA, 80 bp, synthetic construct
  source 1..80: mol_type = other DNA
cctccctttgccccccaatccaaaccaaataagctgccccgtcttaccgcgacaaagcacacagaacaaaacacactccg

SEQ ID NO: 135326 - DNA, 80 bp, synthetic construct
  source 1..80: mol_type = other DNA
tctgctgtcctgtttgaccatcccagcttccgcttatgaagtgcgcaacgtgtccgggatataccatgtcacgaacgact

SEQ ID NO: 135327 - DNA, 80 bp, synthetic construct
  source 1..80: mol_type = other DNA
acgtcgagagcgcagtagtccaacgtctcgcggaccaggttgtaggccgtctcttgttttttctcccacagttcgcgatt

SEQ ID NO: 135328 - DNA, 80 bp, synthetic construct
  source 1..80: mol_type = other DNA
cagctcggtgctctgtgagtgctatgatgcgggatgcgcctggtacgaactgactccagcagagacgaccgttaggttga

SEQ ID NO: 135329 - DNA, 80 bp, synthetic construct
  source 1..80: mol_type = other DNA
tgggctaaggtccttggcatcttgttcctattcgccggcgtagatgctggtacggatgtgggacattctgtcagccacac

SEQ ID NO: 135330 - DNA, 80 bp, synthetic construct
  source 1..80: mol_type = other DNA
tctcggctctggcacgcgggctgtggtaagctgcgctgaagctcccaacatgaagatcattggtaaccgcattgaaagga

SEQ ID NO: 135331 - DNA, 80 bp, synthetic construct
  source 1..80: mol_type = other DNA
tggatgaattccaccgggtatgtaaaaacctgtggtgcgcctccatgcaacataaagcctgatgcctccagctcaaatac

SEQ ID NO: 135332 - DNA, 80 bp, synthetic construct
  source 1..80: mol_type = other DNA
caactggagaatgcggtgcttcacattcctggctgcgttccatgtgagcgagcgggcaatcttagtcgctgctggacacc

SEQ ID NO: 135333 - DNA, 80 bp, synthetic construct
  source 1..80: mol_type = other DNA
ggcgtgttcaccaccaacatctggctgaagctgagagaggtgtacacccagatgtgcgaccacagactgatgagcgccgc

SEQ ID NO: 135334 - DNA, 80 bp, synthetic construct
  source 1..80: mol_type = other DNA
tcggaggccccatgtacaattcaaagggccaactctgcggctaacgcagatgccgggcgagcggcgtgcttcccacgagt

SEQ ID NO: 135335 - DNA, 80 bp, synthetic construct
  source 1..80: mol_type = other DNA
gtagtttctggctcggtgagcgacggtccggttgcttgggtcccctggctgccatcaaaaccccaccctcgcagcggcat

SEQ ID NO: 135336 - DNA, 80 bp, synthetic construct
  source 1..80: mol_type = other DNA
aggccgtagaccacatcaactccgtgtggcaagacctcctggaagacaatgaaacaccaattgacaccaccatcatggca

SEQ ID NO: 135337 - DNA, 80 bp, synthetic construct
  source 1..80: mol_type = other DNA
tggatgaacgcaacgggcttcactaaaacatgcggcgcgccgccatgtgtgcttggcccttccagtgcgagtaacaacaa

SEQ ID NO: 135338 - DNA, 80 bp, synthetic construct
  source 1..80: mol_type = other DNA
gttcaaagaaaaaaataacacagagctccagcagccccggagaggccggatacggcgaccgtaaggcgctgatggtgagc

SEQ ID NO: 135339 - DNA, 80 bp, synthetic construct
  source 1..80: mol_type = other DNA
agattggagttcatggaatgttaaatgccgcagctacagcttggatgatcattaaagcgatcacctttcccacaacttcc

SEQ ID NO: 135340 - DNA, 80 bp, synthetic construct
  source 1..80: mol_type = other DNA
ggccacttgcaccacccacgcgaagacttttgacattgacatggtaaatgccaatctcttcatggggggggatgtgacca

SEQ ID NO: 135341 - DNA, 80 bp, synthetic construct
  source 1..80: mol_type = other DNA
cgtcccgtaccggtggaacgcctccacccgcgaggggttgtacttgaggtcggtggtgtgccagccccggctcgtgcggg

SEQ ID NO: 135342 - DNA, 80 bp, synthetic construct
  source 1..80: mol_type = other DNA
atcacccgggtagagtcagagaacaaggtggtaatcctggactcgttcgacccgctcgtagctgaggacgacgaccggga

SEQ ID NO: 135343 - DNA, 80 bp, synthetic construct
  source 1..80: mol_type = other DNA
aggatgggcggaccatcgtggtgccatgtaggagccaggatgagctgattggcagagccagaatctcaccaggagcagga

SEQ ID NO: 135344 - DNA, 80 bp, synthetic construct
  source 1..80: mol_type = other DNA
ttattttccttcttccgttagctgtgaaatgaggcgcgcggtggaactgcagacagtggcttttcctgagacaccacctc

SEQ ID NO: 135345 - DNA, 80 bp, synthetic construct
  source 1..80: mol_type = other DNA
tgcacattaccaccgctaagatacagaggcgaggatggatgttggtacggaatggaaatcagaccattgaaagagaaaga

SEQ ID NO: 135346 - DNA, 80 bp, synthetic construct
  source 1..80: mol_type = other DNA
tggcctggagcagataaaaacccattggttgaacccagatgaggattgggaggaagccattaagaaatatgccaagatag

SEQ ID NO: 135347 - DNA, 80 bp, synthetic construct
  source 1..80: mol_type = other DNA
tgctgatgataagtcaggctgaggccgccatggcgaacttgataaccatcaatgccgccgcagccgccagcctccacggt

SEQ ID NO: 135348 - DNA, 80 bp, synthetic construct
  source 1..80: mol_type = other DNA
gtgctgaacccgtctgttgctgccaccttagggttcggtgcttacatgtcaaaggcccatgggatcgacccaaacatcag

SEQ ID NO: 135349 - DNA, 80 bp, synthetic construct
  source 1..80: mol_type = other DNA
ccagacgagggaacttgatcctccttggacccgccgatgacgttaaagacaagggttggtcattactcgctccaattacg

SEQ ID NO: 135350 - DNA, 80 bp, synthetic construct
  source 1..80: mol_type = other DNA
tggtcaacttgctgcccgctatactgtcccccggggccctggttgttggcgtaatatgcgcagcagtattgcgtcgacac

SEQ ID NO: 135351 - DNA, 80 bp, synthetic construct
  source 1..80: mol_type = other DNA
cgcgttttgtacctctaccgcacccgatatcttaacgggggttattatggaatcgtctaacattaacgcgctacaacaac

SEQ ID NO: 135352 - DNA, 80 bp, synthetic construct
  source 1..80: mol_type = other DNA
ttattctcctggtgaactcaaccgggtggcatccagcctcagattgcttggggcgccaccgttgagagcctggagacatc

SEQ ID NO: 135353 - DNA, 80 bp, synthetic construct
  source 1..80: mol_type = other DNA
acgccccctccgcgtcccgcacccgagaccccggcccggctgccctcaccaccgaagcccacctcgtcactgtggggtgt

SEQ ID NO: 135354 - DNA, 80 bp, synthetic construct
  source 1..80: mol_type = other DNA
tacagttgtaccctgttgacgatagaaacgcgccaaacattgcccgtcgagcagtagccgagaacagtggaatatattca

SEQ ID NO: 135355 - DNA, 80 bp, synthetic construct
  source 1..80: mol_type = other DNA
atgtatatcggtggggtagaacaccgactggaggcagcatgcaactggactagggaggaagcctgtgctctggaggacag

SEQ ID NO: 135356 - DNA, 80 bp, synthetic construct
  source 1..80: mol_type = other DNA
tccaggttgtctctacggccacgcagaccttcctcgctacctctgttaacggggttctttggacggtctaccatggcgct

SEQ ID NO: 135357 - DNA, 80 bp, synthetic construct
  source 1..80: mol_type = other DNA
accaccagatgatgtcgtgtctgcgtaccgactacgaatccagcgatgaggattaagggtaaggggcggggcctattaca

SEQ ID NO: 135358 - DNA, 80 bp, synthetic construct
  source 1..80: mol_type = other DNA
tctgggggtgtaccgcaacgaccgtattcacaaagctgtgagcgccagccgacgtcgcgagcttagcgaccgcgagctaa

SEQ ID NO: 135359 - DNA, 80 bp, synthetic construct
  source 1..80: mol_type = other DNA
ctcccctgtctgccatgcgagtcgagccgaacccccgcaggggctgcagcaacgctaggtcggccacgaccctctcggcc

SEQ ID NO: 135360 - DNA, 80 bp, synthetic construct
  source 1..80: mol_type = other DNA
tgtggccgctcctactgctccttctatgcctcccacatcgcgcatacgctatggacaatgagcaggctgcgtccatcgga

SEQ ID NO: 135361 - DNA, 80 bp, synthetic construct
  source 1..80: mol_type = other DNA
cagggtgcggctgtagcaggccccgggccgcgagctgatgcgcatcgagttttggacgatcacgttgtccgcggcgaccg

SEQ ID NO: 135362 - DNA, 80 bp, synthetic construct
  source 1..80: mol_type = other DNA
tagtcgacttcagcctagaccctacctttgcaattgagacaactacagttccccaggacgccgtcgcgagaagccagcgg

SEQ ID NO: 135363 - DNA, 80 bp, synthetic construct
  source 1..80: mol_type = other DNA
tctcttgggtggacggggtgcagatacaccgattcgcccccaccccaggtcccttctttcgggatgaggtaacgttcacc

SEQ ID NO: 135364 - DNA, 80 bp, synthetic construct
  source 1..80: mol_type = other DNA
gctcctacataccaccacgcagtgggccatattgccgtgctctttcacacccacacccgctcttagcactggtctcatac

SEQ ID NO: 135365 - DNA, 80 bp, synthetic construct
  source 1..80: mol_type = other DNA
cagggtgcaggtgctggacacatactacgattcagtcttgcaggacgttaagcgggccgcctccaaggttagcgcgaggc

SEQ ID NO: 135366 - DNA, 80 bp, synthetic construct
  source 1..80: mol_type = other DNA
tgatgctggtgctggggacaagaaagatgcagctggttgccgaatggagtggctgtgtggaatggcatccggaactagtg

SEQ ID NO: 135367 - DNA, 80 bp, synthetic construct
  source 1..80: mol_type = other DNA
tggtatctggtggctttttgtgcggcatggcatgtgcggggtaaacttgtcccgctggtgacctacggcctgacaggtct

SEQ ID NO: 135368 - DNA, 80 bp, synthetic construct
  source 1..80: mol_type = other DNA
atcttaaaactgacgattctggcctctataatggaaaggcccataccaaagagcttgaacataacacctatgttaggctt

SEQ ID NO: 135369 - DNA, 80 bp, synthetic construct
  source 1..80: mol_type = other DNA
acggggccggagtctccggcgccctagtggcctttaaaatcatgggaggtgagctccctaccacagaggacatggttaat

SEQ ID NO: 135370 - DNA, 80 bp, synthetic construct
  source 1..80: mol_type = other DNA
taacccaccctcttggccctctgccctattgtaccaggaaagtccccctccaacaacggtacttttgcctcgcgacgccc

SEQ ID NO: 135371 - DNA, 80 bp, synthetic construct
  source 1..80: mol_type = other DNA
ggtatcgatcctaacatcaggaccggagtcaggaccataaccaccggcggtcctattacatactctacctatggcaaatt

SEQ ID NO: 135372 - DNA, 80 bp, synthetic construct
  source 1..80: mol_type = other DNA
aaccatgggctttgtgtcctttttttcagcaggacctgctcaaaagatccagcttataaacaccaatggcagctggcaca

SEQ ID NO: 135373 - DNA, 80 bp, synthetic construct
  source 1..80: mol_type = other DNA
catgtggcacgtcacaagaggggcagtgttgacgcacaatgggaaaagactggaaccaaactgggcaagtgtgaaaaaag

SEQ ID NO: 135374 - DNA, 80 bp, synthetic construct
  source 1..80: mol_type = other DNA
ctttttttgcgaaccgtcccgttccgggatgccgtgccgcccgttgcagggcctggtgctcgtgggcctctgggtctgtg

SEQ ID NO: 135375 - DNA, 80 bp, synthetic construct
  source 1..80: mol_type = other DNA
ggggtggtacccgcatcggaagtgtgtggccctgtctactgtttcacgccgagtcctgtggcggtgggcaccaccgacag

SEQ ID NO: 135376 - DNA, 80 bp, synthetic construct
  source 1..80: mol_type = other DNA
ggtgttcccgggcccccgtcccccccgaccccccaacgatcccacgggccgccggccgatgaggtcgcaccggccagggt

SEQ ID NO: 135377 - DNA, 80 bp, synthetic construct
  source 1..80: mol_type = other DNA
ctatggagtcacatattccatcactccgcttgatctacctcagatcatacagcgcctacatggcatggctgctttttcac

SEQ ID NO: 135378 - DNA, 80 bp, synthetic construct
  source 1..80: mol_type = other DNA
gggcccacacccggggcataatttccggccgcaccaccgttgatgacgtgattgactctgtagtagccgacgctagacgg

SEQ ID NO: 135379 - DNA, 80 bp, synthetic construct
  source 1..80: mol_type = other DNA
accctccgccatttcaggaccctcttcacatccggcccgtctcagaacatccaacttatgaacaccaatggcaggtggca

SEQ ID NO: 135380 - DNA, 80 bp, synthetic construct
  source 1..80: mol_type = other DNA
gcgaaggcggacccagacctgccgtatgctaattaaatacataaaacccaccctcggtgtccgattggtttctggggacg

SEQ ID NO: 135381 - DNA, 80 bp, synthetic construct
  source 1..80: mol_type = other DNA
ttaacagcggtcgtaccaccaggccccgactaacaggggaaagtgaatacttaaatgaccccatcttgtttccagtgcgc

SEQ ID NO: 135382 - DNA, 80 bp, synthetic construct
  source 1..80: mol_type = other DNA
cctgcggatttagtgattgttggggataaacttgtattcttagaagcattagaacggcgggtctaccaagctacgcgcgt

SEQ ID NO: 135383 - DNA, 80 bp, synthetic construct
  source 1..80: mol_type = other DNA
aagccctgggttttttgaatgaagatcattggtttggcagagaaaactcatggagtggagtggaaggggaaggtctgcac

SEQ ID NO: 135384 - DNA, 80 bp, synthetic construct
  source 1..80: mol_type = other DNA
tgcgaaccgattgggaaaaagtggatctcctgccaccagttggaagaatggctgttgatgtgatgaaagtagaaatctcg

SEQ ID NO: 135385 - DNA, 80 bp, synthetic construct
  source 1..80: mol_type = other DNA
tcgccccggtggaccggggaacgcgggccgccggcccaggcccggcggccccctggggcgcgccctcgaagccggccctg

SEQ ID NO: 135386 - DNA, 80 bp, synthetic construct
  source 1..80: mol_type = other DNA
tccttccagggacgtaatgtgcgcgtcagggttgtttcggtcacggtgaatggatgcgctcctggttgagcgctggccag

SEQ ID NO: 135387 - DNA, 80 bp, synthetic construct
  source 1..80: mol_type = other DNA
ctgtgaccactccccacgcaaacatcgaggaggtcgccctgccgacgacgggtgagatacccttttacggtagggcgatt

SEQ ID NO: 135388 - DNA, 80 bp, synthetic construct
  source 1..80: mol_type = other DNA
ccgtgctgcctgtagctccgtcgtggggacgtaaaacctgggaggctgcaaactgtggaagctgtacgcacggtgtagca

SEQ ID NO: 135389 - DNA, 80 bp, synthetic construct
  source 1..80: mol_type = other DNA
gacggggttgcggacggttgccgtggccacgacggcggtgtagcccacgcccaggtccacgttcccgcgcggctgggtga

SEQ ID NO: 135390 - DNA, 80 bp, synthetic construct
  source 1..80: mol_type = other DNA
gggctaaagtcttggcagttctgctcctcttcgcgggtgtcgacgcgcatacttacaccacgggtggatcaacagcccga

SEQ ID NO: 135391 - DNA, 80 bp, synthetic construct
  source 1..80: mol_type = other DNA
gaaaccactaatggttgtgtctattctatttcatttgatttcacctgttcaaaggattacactggccaacaatttgatgt

SEQ ID NO: 135392 - DNA, 80 bp, synthetic construct
  source 1..80: mol_type = other DNA
ccttgaactgcaatgacagcctgaacaccggcttcctagcatcgctgttctacacccacaagttcaactcttcagggtgt

SEQ ID NO: 135393 - DNA, 80 bp, synthetic construct
  source 1..80: mol_type = other DNA
tggagctggacttctcttttccattatgaagaacacaaccaacacaagaaggggaactggcaacatgggagagacgcttg

SEQ ID NO: 135394 - DNA, 80 bp, synthetic construct
  source 1..80: mol_type = other DNA
atgatggcatcgaatgatgtcagcgctccgactgacggagctgctggtctcgtcccagaggtcaccaatgagaccatggc

SEQ ID NO: 135395 - DNA, 80 bp, synthetic construct
  source 1..80: mol_type = other DNA
atttaaacctggcaacatcggcacccctctccgtgcaaaacaattctctctccttaggggttaacccgccttttctcatc

SEQ ID NO: 135396 - DNA, 80 bp, synthetic construct
  source 1..80: mol_type = other DNA
tgccctaacaccagcatcacttggcagcttcaagaggcagtgcttcacgttcctgggtgcgtcccctgcgtaaaggaggg

SEQ ID NO: 135397 - DNA, 80 bp, synthetic construct
  source 1..80: mol_type = other DNA
ccagatgttacgcaacggggagaagcgttccatggcgggcacgctttgaccagtcagacgggcgcaatcttgtacgctct

SEQ ID NO: 135398 - DNA, 80 bp, synthetic construct
  source 1..80: mol_type = other DNA
ggggctaagtcctttggccgcccggagtcggaacctgattccggggcaggcttcactacaccaactgagacttctgattc

SEQ ID NO: 135399 - DNA, 80 bp, synthetic construct
  source 1..80: mol_type = other DNA
ctcgctgtcccacgcgtcttcacaccccacctcccaatcgtccagctccaaagcgtgttctctgtcgtctgcggtgcgcc

SEQ ID NO: 135400 - DNA, 80 bp, synthetic construct
  source 1..80: mol_type = other DNA
aggagccccaaccagggacaagagtgatcatgagagcagtgaatgattggattctagagcggctggcccaaaaaagcaaa

SEQ ID NO: 135401 - DNA, 80 bp, synthetic construct
  source 1..80: mol_type = other DNA
ccgggcgccgtggtcgacctgctcgcaggcggccattggggcatgctggctggcatagcgtacttcagcatgcaagctaa

SEQ ID NO: 135402 - DNA, 80 bp, synthetic construct
  source 1..80: mol_type = other DNA
atgccccgatggccaaagagcatggaacatttgggaagttgaggactatgggtttggaattttcacgacaaacatatggc

SEQ ID NO: 135403 - DNA, 80 bp, synthetic construct
  source 1..80: mol_type = other DNA
tgggcatgccgcccgggcaccccgccgtcggtacggaagcagcagtggagaaaaaagtgccggtggatgtcgtttatggt

SEQ ID NO: 135404 - DNA, 80 bp, synthetic construct
  source 1..80: mol_type = other DNA
tgagttcgcccggaggcgccaagcgtccgcgctgggggtcgctggcgtcgggtgtgttgggcaaccacagacgcccggtg

SEQ ID NO: 135405 - DNA, 80 bp, synthetic construct
  source 1..80: mol_type = other DNA
tcaattgggcagtaagaacaaagctcaagctcactccaatagcggctgctggccagctggacttgtccggctggttcaca

SEQ ID NO: 135406 - DNA, 80 bp, synthetic construct
  source 1..80: mol_type = other DNA
cggggtatgacccacccctcctggagacttggaagcagcctgattatgaccccccccaggtgtcaggttgcccgctacca

SEQ ID NO: 135407 - DNA, 80 bp, synthetic construct
  source 1..80: mol_type = other DNA
tggcgtggaactgggcaaaggtcctgctagtgctgttgttgtttgccggcgtcgatgcgagaacccacaccaccggggtg

SEQ ID NO: 135408 - DNA, 80 bp, synthetic construct
  source 1..80: mol_type = other DNA
gccggtctcccacaggtgggccaggcgcgtcaggtggcccaggacgtcgctgaccgccgcccgcagggccatgcactgca

SEQ ID NO: 135409 - DNA, 80 bp, synthetic construct
  source 1..80: mol_type = other DNA
tggtcatttgcgagagccagggagtcacggaggatgaagcctgcctgagagtcttcacggaggctatgaccaggtactcg

SEQ ID NO: 135410 - DNA, 80 bp, synthetic construct
  source 1..80: mol_type = other DNA
agttcccgtgtggcggacagatcgttggtggagtatacgtgttgccgcgcaggggcccacgattgggtgtgcgcgcgacg

SEQ ID NO: 135411 - DNA, 80 bp, synthetic construct
  source 1..80: mol_type = other DNA
cgggccgaagacatgtagtaacacctggcatgggaccttccccatcaatgcttacaccacgggccccggcgtgcctatcc

SEQ ID NO: 135412 - DNA, 80 bp, synthetic construct
  source 1..80: mol_type = other DNA
tggaacgcaacaaccgccattggactctgccacatcatgcgtgggggttggctgtcatgcctgtccataacatggacact

SEQ ID NO: 135413 - DNA, 80 bp, synthetic construct
  source 1..80: mol_type = other DNA
gtgtcgcaggctttcataatatcgccggaacgccacaacttcacccaggagtgcaactgttctatctatcaaggccatat

SEQ ID NO: 135414 - DNA, 80 bp, synthetic construct
  source 1..80: mol_type = other DNA
agttgcaggtcctttgcaagtgaccaacgactctcacgcactaacagtaggtacaggtcagggtgttgccattgataata

SEQ ID NO: 135415 - DNA, 80 bp, synthetic construct
  source 1..80: mol_type = other DNA
atgtagttggatcacaattaccttgtgaacccgagcccgacgagctagtagttacatcaatgctgcgggaccccgaccac

SEQ ID NO: 135416 - DNA, 80 bp, synthetic construct
  source 1..80: mol_type = other DNA
gtgcggtacaagtgtaattgcggtggctcaaatgagggactgacaactacagacaaagtgattaataactgcaaggttga

SEQ ID NO: 135417 - DNA, 80 bp, synthetic construct
  source 1..80: mol_type = other DNA
aacattgtgagctctgtgaacacaacatcaaagatgttgttgaacaggttcacaacaaggcataggaaacctacttatga

SEQ ID NO: 135418 - DNA, 80 bp, synthetic construct
  source 1..80: mol_type = other DNA
gaaacaaccacacagttaactactagagaaacaacgcagcctaccactgtgcccaccacacatactgaaaccactactca

SEQ ID NO: 135419 - DNA, 80 bp, synthetic construct
  source 1..80: mol_type = other DNA
gccggtggcccgtggccgcggcccgttggtcgaacccccggccccgcccatccgcgccatctgccatgggcgtggcgcga

SEQ ID NO: 135420 - DNA, 80 bp, synthetic construct
  source 1..80: mol_type = other DNA
gaagaaaggagcgacctcgagccttcaataccatcggagtatatgctccccaggaacaggttcccgccagccttaccggc

SEQ ID NO: 135421 - DNA, 80 bp, synthetic construct
  source 1..80: mol_type = other DNA
cgcgctaggctcatcgcccagggagggaaggctgcaatatgcggcaagtacctctttaactgggcggtaaaaacaaagct

SEQ ID NO: 135422 - DNA, 80 bp, synthetic construct
  source 1..80: mol_type = other DNA
gcacttggatgaatgataccggatacactaagacatgcggtgctccaccctgccgcatcaggaaggacttcaacgccagc

SEQ ID NO: 135423 - DNA, 80 bp, synthetic construct
  source 1..80: mol_type = other DNA
agtccaggtgggtcggcggcgcttgggaaggccggccgagtagcgtgcccggtgccgaccaaccgggacgacgcccatct

SEQ ID NO: 135424 - DNA, 80 bp, synthetic construct
  source 1..80: mol_type = other DNA
cacagggggaaataggagcagtcagcctggactatcctgaagggacctcaggctccccaatactggacaagaatggtgac

SEQ ID NO: 135425 - DNA, 80 bp, synthetic construct
  source 1..80: mol_type = other DNA
gtagggcttttgcttacaccaacgaagatgcagcttctgtaggggtcctcgcgcttgctgtcattactgtgttcactctc

SEQ ID NO: 135426 - DNA, 80 bp, synthetic construct
  source 1..80: mol_type = other DNA
ctacatcaactcagcccaccgccaccacaacagcagaggcatttttgttgctgccaccatctagcagtcccactgctagt

SEQ ID NO: 135427 - DNA, 80 bp, synthetic construct
  source 1..80: mol_type = other DNA
tcgagggacgcaccgatgttggccactctgcggcgcacccagcgcgtgggcttgccggcttgttcaatccagggtcccaa

SEQ ID NO: 135428 - DNA, 80 bp, synthetic construct
  source 1..80: mol_type = other DNA
tgtggcccctgacaaggagatcttatatgaggcctttgatgagatggaagaatgcgcctccaaagccgccctcattgagg

SEQ ID NO: 135429 - DNA, 80 bp, synthetic construct
  source 1..80: mol_type = other DNA
ggagaaagcattcgactttgacatctacggagtgacctattccgtttctccacttgatctcccagcaatcattcaacgac

SEQ ID NO: 135430 - DNA, 80 bp, synthetic construct
  source 1..80: mol_type = other DNA
tgtggtgtagatgttcgcgattgtctcggaagcccccagcacccgccagtaagtcatcggctcgggtacgtagacgatat

SEQ ID NO: 135431 - DNA, 80 bp, synthetic construct
  source 1..80: mol_type = other DNA
ctgctccctccctgaaggccacgtgtactacgggtggggtgcatccggacgctgagctgattgaggcaaacctcctatgg

SEQ ID NO: 135432 - DNA, 80 bp, synthetic construct
  source 1..80: mol_type = other DNA
tggctcccggccaaattggggccccaatgacccccggcgtaggtcgcggaatttgggtaaggtcatcgataccctcacat

SEQ ID NO: 135433 - DNA, 80 bp, synthetic construct
  source 1..80: mol_type = other DNA
atatgccggactttactgcacacgacacgatacccccgcgcaccaggctctcatgaacgacgccgaacggtacttcgccg

SEQ ID NO: 135434 - DNA, 80 bp, synthetic construct
  source 1..80: mol_type = other DNA
tatgacccccccgtcgtgcacgggtgttccttgccaccagctagggaggttccggtccccccccctaggaggaagcggct

SEQ ID NO: 135435 - DNA, 80 bp, synthetic construct
  source 1..80: mol_type = other DNA
ttcgccaaactcgaacagttctgggcgaagcacatgtggaatttcatcagcggcattcaatatctcgctggcctgtccac

SEQ ID NO: 135436 - DNA, 80 bp, synthetic construct
  source 1..80: mol_type = other DNA
cgggcccgagctgtccgcgctaagctgatcgcccagggagtgagagccaaaatctgtggcatatatctcttcaactgggc

SEQ ID NO: 135437 - DNA, 80 bp, synthetic construct
  source 1..80: mol_type = other DNA
ggggcgacagcaggtggagcctactctcccccaggcccatctcctacttgaagggctcttcgggtggtccactgctctgc

SEQ ID NO: 135438 - DNA, 80 bp, synthetic construct
  source 1..80: mol_type = other DNA
cttgcgagcctggagacatcgggcaagggcagtccgagctaagcttatcgcccagggtgggaaagccgctatatgcggca

SEQ ID NO: 135439 - DNA, 80 bp, synthetic construct
  source 1..80: mol_type = other DNA
agatgttcaaacggacatacccagtgagccctggaacacagggcatgactggatcctggctgacaaaaggcccacggcat

SEQ ID NO: 135440 - DNA, 80 bp, synthetic construct
  source 1..80: mol_type = other DNA
cctggaacgtcaggatctccaattgtcgacaaaaaaggaaaagttgtaggcctttatggcaacggtgtcgtcacaaggag

SEQ ID NO: 135441 - DNA, 80 bp, synthetic construct
  source 1..80: mol_type = other DNA
tccattgccggctgctgccaaactcgatttatcgagctggttcacggtcggcgctggcggggtggacatttatcacggcg

SEQ ID NO: 135442 - DNA, 80 bp, synthetic construct
  source 1..80: mol_type = other DNA
cgcgccccacccgagggccccccgctcgtcgcggtctgggctcggtgtgtgcggcggcccgtcggtgcggcccagggagc

SEQ ID NO: 135443 - DNA, 80 bp, synthetic construct
  source 1..80: mol_type = other DNA
gcataaagaacatgtactgctggagcctgtgggccgcgtcgcgcaaccccgccaccgcggcggcgtacttggccgcggcg

SEQ ID NO: 135444 - DNA, 80 bp, synthetic construct
  source 1..80: mol_type = other DNA
gttccccaagcctctgccaatatgggcccgcccagactacaacccaccgttgttggaggtatggaagaaaccagactacg

SEQ ID NO: 135445 - DNA, 80 bp, synthetic construct
  source 1..80: mol_type = other DNA
gcttcctgctcgtcggcgtgggggaagccactgtggtcctccgggacgttttctggatggccgacatttccccaggcgct

SEQ ID NO: 135446 - DNA, 80 bp, synthetic construct
  source 1..80: mol_type = other DNA
ccgctatgtacataggcgatttgtgcggaggtgctttcttggttgggcagctttttacaatgagaccccgcttacacaac

SEQ ID NO: 135447 - DNA, 80 bp, synthetic construct
  source 1..80: mol_type = other DNA
agacaccccagaatgtcccgatggccaaagagcatggaacatttgggaagttgaggactatgggtttggagttttcacga

SEQ ID NO: 135448 - DNA, 80 bp, synthetic construct
  source 1..80: mol_type = other DNA
aagccacagtcaggtccagagtatgtatatgttaatatgggagagaacaaaaccttagttggacctccaggaataccagt

SEQ ID NO: 135449 - DNA, 80 bp, synthetic construct
  source 1..80: mol_type = other DNA
acgggttcacgggagtgcagcacggactcctgccgtgcctgcacgttgccgcgacggtgacgaccatcggccgcgagatg

SEQ ID NO: 135450 - DNA, 80 bp, synthetic construct
  source 1..80: mol_type = other DNA
gcgagccctctcagtggaggaagcttgcgacctgacgccccctcactccgccagatccaaatttggctatggggcaaagg

SEQ ID NO: 135451 - DNA, 80 bp, synthetic construct
  source 1..80: mol_type = other DNA
gtgccgccaagcaagcttttgggtttaccggtttgttccagctgggccccagacagaaactccagctaattaacaccaac

SEQ ID NO: 135452 - DNA, 80 bp, synthetic construct
  source 1..80: mol_type = other DNA
tactgtctatcagtgggctgtgtggtcatctgcggcagaatctccaccactggtaaaccagtgctaattcctgatcggga

SEQ ID NO: 135453 - DNA, 80 bp, synthetic construct
  source 1..80: mol_type = other DNA
tcccctcgagcgggagccaggagaccctgacctagagtctggaccggtagagcagcgccccacctcacagaagggagagg

SEQ ID NO: 135454 - DNA, 80 bp, synthetic construct
  source 1..80: mol_type = other DNA
aaaaacgggccaaggtggacgtggccacccacggccggacgtacggcacgctggagctgttccaaaaaatgatccttatg

SEQ ID NO: 135455 - DNA, 80 bp, synthetic construct
  source 1..80: mol_type = other DNA
ggaaaaagccggactacgaaccacctgtggtccatggctgcccacttccacctccacagtcccctcctgtgcctccgccc

SEQ ID NO: 135456 - DNA, 80 bp, synthetic construct
  source 1..80: mol_type = other DNA
aagggaaatctcttagaggatggtctacgtatggatgtgacgtatctggtatcatgggtcaattctttgactacgtttag

SEQ ID NO: 135457 - DNA, 80 bp, synthetic construct
  source 1..80: mol_type = other DNA
gccttgctgcatgtctatgtacctcccttggaggtcagaggcagtcgggacgctataatcatccttgcggccctattcca

SEQ ID NO: 135458 - DNA, 80 bp, synthetic construct
  source 1..80: mol_type = other DNA
tgagcttgcctccaagctcagggccatagggctaaacgcggtggcgttttacaggggccttgacgtatccgtaataccaa

SEQ ID NO: 135459 - DNA, 80 bp, synthetic construct
  source 1..80: mol_type = other DNA
cgacgcagcggacaacgccgctaccggactaacatctacccaggatatcccccaagcttttgcctttgtcaatgaatggg

SEQ ID NO: 135460 - DNA, 80 bp, synthetic construct
  source 1..80: mol_type = other DNA
gaatcattattggccgatgtaactggaggaacgaacgtgaaactcactattcaacctgtagaaaaagatagtaagaatag

SEQ ID NO: 135461 - DNA, 80 bp, synthetic construct
  source 1..80: mol_type = other DNA
atctggtggaaccagtacactattgccaggtgtgaagcagcactgcagatatgggttcctcccctgctggccagaggagc

SEQ ID NO: 135462 - DNA, 80 bp, synthetic construct
  source 1..80: mol_type = other DNA
caaaccacttctgggaaaagacagttgctgctgcggacaccctgtatctcctaggaaccagtgaggcaaacagcagggca

SEQ ID NO: 135463 - DNA, 80 bp, synthetic construct
  source 1..80: mol_type = other DNA
aagagtgatttgtaagtgaaggaaggatacataccatacccggattacggttgacggaaagctgtagtcgtgctggagct

SEQ ID NO: 135464 - DNA, 80 bp, synthetic construct
  source 1..80: mol_type = other DNA
cggacggcgtcgggattgaagcgggcgagcagggccccggtggccaggtacgtcatgcggccggcatagcgtgcggccac

SEQ ID NO: 135465 - DNA, 80 bp, synthetic construct
  source 1..80: mol_type = other DNA
tacgctctgttctgccctctacgtgggagacgtgtgtggcgcgctgatgatagctgctcaggtcgtcgtcgtgtcgccac

SEQ ID NO: 135466 - DNA, 80 bp, synthetic construct
  source 1..80: mol_type = other DNA
acacattggatgttcaaatggggaggtttatggaaacgtgggcagatatgatgcctcatcaccctcattgggtaaacgaa

SEQ ID NO: 135467 - DNA, 80 bp, synthetic construct
  source 1..80: mol_type = other DNA
gaccctttgcggacttcgcgacctcctccccatgaactgattgattaaagcccagaaaccaatcaaacccccattcccat

SEQ ID NO: 135468 - DNA, 80 bp, synthetic construct
  source 1..80: mol_type = other DNA
tacgcctacgccccaatgcccacgcaagatgaggtaggtaacccccccgtgggtgtgacgttgcgtttagttcattggag

SEQ ID NO: 135469 - DNA, 80 bp, synthetic construct
  source 1..80: mol_type = other DNA
gcggtccagggccgcgtgtcgcataaggccgtcgcagtcccacacgaggggcggcagcagcgccgggtcgcgcatcaggt

SEQ ID NO: 135470 - DNA, 80 bp, synthetic construct
  source 1..80: mol_type = other DNA
cacacagctgctcagctccctcacagtaacatcccttttgaagaggctccacacatggatcggcgaggactactccacgc

SEQ ID NO: 135471 - DNA, 80 bp, synthetic construct
  source 1..80: mol_type = other DNA
gggcccgagcagtccgcgccaagcttatcgcccaagggtggagagctaagatctgcggcatctacctcttcaactgggcg

SEQ ID NO: 135472 - DNA, 80 bp, synthetic construct
  source 1..80: mol_type = other DNA
aacatgcttatgcgctgtactgtgcatttgggagctcgtcgtggcatgttttctccgtaccagagtaacttttgccacac

SEQ ID NO: 135473 - DNA, 80 bp, synthetic construct
  source 1..80: mol_type = other DNA
tgcggagacgacctcgtcgttctctgcgagagcgcgggcccccggggggacgcggcaaccctacgagtcttcgcggaggc

SEQ ID NO: 135474 - DNA, 80 bp, synthetic construct
  source 1..80: mol_type = other DNA
ccgcgaaggtgggccgcaaacctgcccgtctcatcgtctatcctgatctggtggtgcgggtctgtgagaaacgcgcccta

SEQ ID NO: 135475 - DNA, 80 bp, synthetic construct
  source 1..80: mol_type = other DNA
gacacaactccattcggacagcagagagtgttcaaagaaaaggtggacaccaaggccccagaaccgccagcgggtgtgaa

SEQ ID NO: 135476 - DNA, 80 bp, synthetic construct
  source 1..80: mol_type = other DNA
gcgcgagagcattggctccgccaccaagttgggacacgatgtggaagtgcctggtccgcttgaagccgaccctgcatggc

SEQ ID NO: 135477 - DNA, 80 bp, synthetic construct
  source 1..80: mol_type = other DNA
tcctccttcttgtcgcgggagtggacgcaaccacctaccacaccggtgtgcaggcgggccaaaccatgtcgaggctgact

SEQ ID NO: 135478 - DNA, 80 bp, synthetic construct
  source 1..80: mol_type = other DNA
gaagcaggcgggtgagaaccttgcgtacctcgtcgcgtaccaggctacggtatgcgccagggccaaggcccccccgcctt

SEQ ID NO: 135479 - DNA, 80 bp, synthetic construct
  source 1..80: mol_type = other DNA
tggagaagaaggtcatcacgtggggagcggataccgcagcttgtggcgacattctggccggcctgcccgtgtcagcgcgg

SEQ ID NO: 135480 - DNA, 80 bp, synthetic construct
  source 1..80: mol_type = other DNA
ccaactcgttccgaactctcttaacgtttacttccataatgcacacctaaccgttgatggtgatgcattgctcacactac

SEQ ID NO: 135481 - DNA, 80 bp, synthetic construct
  source 1..80: mol_type = other DNA
atgggccaagaacatctggggagcggtggaaaaggtgaggaagatgataggtcctgaaaagttcaaggactatctctcct

SEQ ID NO: 135482 - DNA, 80 bp, synthetic construct
  source 1..80: mol_type = other DNA
gctaaggttttgattgtgatgctactttttgccggcgttgacggggaaactcacgtgacagggggagcgagcgcccgcac

SEQ ID NO: 135483 - DNA, 80 bp, synthetic construct
  source 1..80: mol_type = other DNA
ttactgatccggcgagcattgctgctaggggctatatttcgacgagagtggaactaggggaagcagcggcaatcttcatg

SEQ ID NO: 135484 - DNA, 80 bp, synthetic construct
  source 1..80: mol_type = other DNA
tgtcgaccttatggttggcgtcgctaccttttgctctgcaatgtacgtgggcgatctctgcggaggtgtctttctggcgg

SEQ ID NO: 135485 - DNA, 80 bp, synthetic construct
  source 1..80: mol_type = other DNA
acaggagaaataggagcagtctcccttgattttaagccaggaacatctggctctccaataataaacaaaaaaggaaaagt

SEQ ID NO: 135486 - DNA, 80 bp, synthetic construct
  source 1..80: mol_type = other DNA
catgaactcaatcgggtgtcgggaagcctcaggaagcttggggcgcctccattgagggcgtggagacatcgggccaggtt

SEQ ID NO: 135487 - DNA, 80 bp, synthetic construct
  source 1..80: mol_type = other DNA
caccccccgggtcagtgacaaccccccatcccgatatagaagaggtaggcctcgggcgtgagggtgagatccccttctat

SEQ ID NO: 135488 - DNA, 80 bp, synthetic construct
  source 1..80: mol_type = other DNA
ctcgctggggccgctgtaggcagcattgggctggggagagtcattgttgacattctagcaggatacggagcaggcgtgtc

SEQ ID NO: 135489 - DNA, 80 bp, synthetic construct
  source 1..80: mol_type = other DNA
atcccgcgttcacggccaacacccgagcctccgggaccggcgtcgctgtcgtcgggcggtaccgcgacgattatatcatc

SEQ ID NO: 135490 - DNA, 80 bp, synthetic construct
  source 1..80: mol_type = other DNA
gtgtttgtgggtatataagcaggtagaatggttttagtgttagtttattctgatggagttgtggagtgagttacaaagtt

SEQ ID NO: 135491 - DNA, 80 bp, synthetic construct
  source 1..80: mol_type = other DNA
acatgttgacgcgatcgtaacggcagctacggtctgctcggccctgtatgtgggagacatgtgcggggccgtgatgattg

SEQ ID NO: 135492 - DNA, 80 bp, synthetic construct
  source 1..80: mol_type = other DNA
tcattgatgtatggccaacattacccaggtttggatatacaaatcactttcttgattgtctgtggggtctttattctcgc

SEQ ID NO: 135493 - DNA, 80 bp, synthetic construct
  source 1..80: mol_type = other DNA
cacccctggtctccctgtctgccaagaccaccttgagttctgggagggagtattcacaggcctcacccacattgacgccc

SEQ ID NO: 135494 - DNA, 80 bp, synthetic construct
  source 1..80: mol_type = other DNA
tccgcaggcagtacttcatatttgctgaaaaaagtctggatcttcaaacacctgcagtaaattcagtagatttacattag

SEQ ID NO: 135495 - DNA, 80 bp, synthetic construct
  source 1..80: mol_type = other DNA
aggccccccagggtgtcaaagttcatctcccaggccacccttggcaccacctcgtcccgcagccgggcgctcaggtcggc

SEQ ID NO: 135496 - DNA, 80 bp, synthetic construct
  source 1..80: mol_type = other DNA
gttgaagttgaccgcttggcagcgaaacatgccagacgagaagggaacgtcaccggtggacatccagtttccagaggcac

SEQ ID NO: 135497 - DNA, 80 bp, synthetic construct
  source 1..80: mol_type = other DNA
cttcaagatccaaccagcttttctggtcatgaacatgcttagcgcgagatggacgaaccaagagaacgtggttctggtcc

SEQ ID NO: 135498 - DNA, 80 bp, synthetic construct
  source 1..80: mol_type = other DNA
gtcacacaggacgagctggctagcgtcaccgccgtctgcagcggaccccaggaggccacacacaccggccacccgggcag

SEQ ID NO: 135499 - DNA, 80 bp, synthetic construct
  source 1..80: mol_type = other DNA
tcccaccatgcgcgagggacaggcttaccccgccaatgttccctaccccctaataggcaaaaccgcggttgatagtatta

SEQ ID NO: 135500 - DNA, 80 bp, synthetic construct
  source 1..80: mol_type = other DNA
tagggaaagccttcacggccacagtgaaaggagcgcagagactagccgcgctgggagatacagcttgggactttggctca

SEQ ID NO: 135501 - DNA, 80 bp, synthetic construct
  source 1..80: mol_type = other DNA
cagacccccaagaaggcactcgtcaggttatgagcatggtctcttcctggttgtggaaagagctaggcaaacacaaacgg

SEQ ID NO: 135502 - DNA, 80 bp, synthetic construct
  source 1..80: mol_type = other DNA
accagtggccgcactcagcgaacccaactatttgggaggggaggacgacgtgctcctgaagcacatagcgcgacagagca

SEQ ID NO: 135503 - DNA, 80 bp, synthetic construct
  source 1..80: mol_type = other DNA
cgcgcagtcagggcgtccctcatctcccgtggagggaaagcggccgtttgcggccgatatctcttcaattgggcggtgaa

SEQ ID NO: 135504 - DNA, 80 bp, synthetic construct
  source 1..80: mol_type = other DNA
actatgcgtgtgtggttgtggaaaatcattttgtgttggacaatcctgaggtgccagggcaaggctgtaaatcctgtcaa

SEQ ID NO: 135505 - DNA, 80 bp, synthetic construct
  source 1..80: mol_type = other DNA
gccctggactttgaaatgtacggggctacttactcagtcactccgctggatcttccagccattattgaaagactccatgg

SEQ ID NO: 135506 - DNA, 80 bp, synthetic construct
  source 1..80: mol_type = other DNA
gtcctatttgatttacaattagggccccacttgaatccttttctttctcatttgtctagaatgtataatggatgggttgg

SEQ ID NO: 135507 - DNA, 80 bp, synthetic construct
  source 1..80: mol_type = other DNA
tgcatggtagattatccatacaggctctggcactatccctgcactatcaattacaccttgtttaaagtcaggatgttcgt

SEQ ID NO: 135508 - DNA, 80 bp, synthetic construct
  source 1..80: mol_type = other DNA
tggtcccaagtaataaaatgaatgtaacaaaatgaatgtataatatagggtgtacatatggagtcaggccagcgttagct

SEQ ID NO: 135509 - DNA, 80 bp, synthetic construct
  source 1..80: mol_type = other DNA
actccccaggcgaactcaatagagtggcgtcgtgcctcagaaaacttggggcgccaccattgagagcttggaggcatcgg

SEQ ID NO: 135510 - DNA, 80 bp, synthetic construct
  source 1..80: mol_type = other DNA
attgttggtgcaactctacgtccacatgggtaacttatgggacatgtaccaccacaggagaacacagaagagaaaaaaga

SEQ ID NO: 135511 - DNA, 80 bp, synthetic construct
  source 1..80: mol_type = other DNA
cgagcatatgcctataatggggaggaagcaggctctttgggagcactggtaattgtcatcattaccatcttcactctcac

SEQ ID NO: 135512 - DNA, 80 bp, synthetic construct
  source 1..80: mol_type = other DNA
agaggttatcaagaatggccatcagtggagatgattgtgttgtgaaacccttagatgacaggtttgcaagcgctttaaca

SEQ ID NO: 135513 - DNA, 80 bp, synthetic construct
  source 1..80: mol_type = other DNA
gccaagcacgcccgtccctacttacacctactcacgtgccttgtggcgcgtggcctcagacagttatgttgaggtgtgca

SEQ ID NO: 135514 - DNA, 80 bp, synthetic construct
  source 1..80: mol_type = other DNA
agggccaaaactccggcgctgcgcacgtcgttcggcgcggcgccgggcgcgccgagcggctcgctgggcggcttggcgtg

SEQ ID NO: 135515 - DNA, 80 bp, synthetic construct
  source 1..80: mol_type = other DNA
ttccaggccatgataacagcgtagcactccctcttgctcggtgcagccgtgaagccaaatcgcgcaaccagtgggctccc

SEQ ID NO: 135516 - DNA, 80 bp, synthetic construct
  source 1..80: mol_type = other DNA
gtccgtgcgtcgtgacgtaattctggtcgttctctcacatccaatcagcgttggctccgccccaaaaccgttaaaattca

SEQ ID NO: 135517 - DNA, 80 bp, synthetic construct
  source 1..80: mol_type = other DNA
gatagccgtgatgacaggtgggttcttcttgctcatgatgcaacgaaaggggatagggaaaatgggcctgggcgcccttg

SEQ ID NO: 135518 - DNA, 80 bp, synthetic construct
  source 1..80: mol_type = other DNA
tcaccatgttattcagcagcccataattcagggtgctccagccaaagctcatgttggggataatggaacccacgtgacca

SEQ ID NO: 135519 - DNA, 80 bp, synthetic construct
  source 1..80: mol_type = other DNA
ttgaagggaatggctattttaaagcataatatggtttgtggggtgtctgatcaaactatgcgacgttttgttacctgtgc

SEQ ID NO: 135520 - DNA, 80 bp, synthetic construct
  source 1..80: mol_type = other DNA
gcgatggcatcatatgggccgccaccatgttctgcccgggtgtagtatttgacataaccaagtggctcttggcgatgctt

SEQ ID NO: 135521 - DNA, 80 bp, synthetic construct
  source 1..80: mol_type = other DNA
gaggtgcccttggacgtcgccgcgctctcccaggcctacgaggcgaaccttttctcgccccgagtgcctccgaagagaca

SEQ ID NO: 135522 - DNA, 80 bp, synthetic construct
  source 1..80: mol_type = other DNA
tttacgacgataccgtctccggagcggccgccgcgttagccgagcgccccgcggaggagtggctggcgcgacccctgccc

SEQ ID NO: 135523 - DNA, 80 bp, synthetic construct
  source 1..80: mol_type = other DNA
ccatgctcgtgtgtggcgacgacttagtcgttatctgtgaaagtgcgggggtccaggaggacgcggcgagcctgagagcc

SEQ ID NO: 135524 - DNA, 80 bp, synthetic construct
  source 1..80: mol_type = other DNA
ccgccctcgcagcctactgtttgtcagtcggctgcgtcgtcattgtgggacacattgagttggggggcaagccagttctt

SEQ ID NO: 135525 - DNA, 80 bp, synthetic construct
  source 1..80: mol_type = other DNA
cttgcaataataccgacgttatggcctcctcaaaatcacccctggctgcgccggggggaggagcagagcttattgtactt

SEQ ID NO: 135526 - DNA, 80 bp, synthetic construct
  source 1..80: mol_type = other DNA
cgcccgccttcgaatactttatcaaaaagttcaactccgggggcgtcatggcgtcccaggagctcgtctccgtgacggtg

SEQ ID NO: 135527 - DNA, 80 bp, synthetic construct
  source 1..80: mol_type = other DNA
cttttaccatgcgtctcttatccccagtgagagttcccaattacaacatgattattatggatgaagcacattttaccgat

SEQ ID NO: 135528 - DNA, 80 bp, synthetic construct
  source 1..80: mol_type = other DNA
ctacacagtaacaagaaacgctggcttggtcaagagacgtgggggtggaacaggagagaccctgggagagaaatggaagg

SEQ ID NO: 135529 - DNA, 80 bp, synthetic construct
  source 1..80: mol_type = other DNA
tggcctctcctcctgctcctgctggcgttgcctcagcgggcatacgcactggacacggaggtggccgcgtcgtgtggcgg

SEQ ID NO: 135530 - DNA, 80 bp, synthetic construct
  source 1..80: mol_type = other DNA
tcgtcgctgttttatcagttttgttgaattttaggaaataaacccggttttgtttctgtggcctcccgacggatgcgcgt

SEQ ID NO: 135531 - DNA, 80 bp, synthetic construct
  source 1..80: mol_type = other DNA
cccgagaatggtgacaagcctgggttggaatttaatcaagtttagggctggaatgaatgtgtttaccatgcaaccacatc

SEQ ID NO: 135532 - DNA, 80 bp, synthetic construct
  source 1..80: mol_type = other DNA
ttaagcgctgcgtttgcaattgcatcggaagcgttgagtttgttaagtaacacatatgtcgatgggacagagattgactc

SEQ ID NO: 135533 - DNA, 80 bp, synthetic construct
  source 1..80: mol_type = other DNA
acggcggcgctgccggcgttgatggcgttcgagacggcgtgggctatgatcggggcgtgatcggcgaagaactgcaagag

SEQ ID NO: 135534 - DNA, 80 bp, synthetic construct
  source 1..80: mol_type = other DNA
ttgaccgaggacgcgtcctccgattcgcctacgtccgctccggagaagacgcccctccctgtgtcggccaccgccatggc

SEQ ID NO: 135535 - DNA, 80 bp, synthetic construct
  source 1..80: mol_type = other DNA
tggaaaaggccagattacgatccaccggtagtgtccggctgcgcgctccccccctcgaagatgcctcctgttccaccccc

SEQ ID NO: 135536 - DNA, 80 bp, synthetic construct
  source 1..80: mol_type = other DNA
gagaccgggggccggcacgttgggtaccaggaggcccgggtcctcgaccccacctccgggtttcacgtcgaccccgtggt

SEQ ID NO: 135537 - DNA, 80 bp, synthetic construct
  source 1..80: mol_type = other DNA
ggctatggggcaaaggatgtccgttgccatgccagaaaggccgtaaaccacatcaactccgtgtgggaagaccttctgga

SEQ ID NO: 135538 - DNA, 80 bp, synthetic construct
  source 1..80: mol_type = other DNA
gcgctgagtttggctctagcgatgaagatacagattgaggtactgaaatgtgtgggcgtggcttaagggtgggaaagaat

SEQ ID NO: 135539 - DNA, 80 bp, synthetic construct
  source 1..80: mol_type = other DNA
ggagatgacttggtggtcattgctgagagcgctggagtccaggaggatgcctctagcctgcgagctttcacggaagccat

SEQ ID NO: 135540 - DNA, 80 bp, synthetic construct
  source 1..80: mol_type = other DNA
ccggtgtgccccacccccgagcggtacttctacacctcccagtgccccgacatcaaccaccttcgctccctcagcatcct

SEQ ID NO: 135541 - DNA, 80 bp, synthetic construct
  source 1..80: mol_type = other DNA
gaggaagatgaagatgaagaagaggaagaagaagagcaaaacgctcgagatcaggctactaagaaaacacatgtctatgc

SEQ ID NO: 135542 - DNA, 80 bp, synthetic construct
  source 1..80: mol_type = other DNA
aatggatgaacaggcttatcgcctttgcgtccagaggaaaccacgtctccccgtcccactacgtagcggagtcggaagcc

SEQ ID NO: 135543 - DNA, 80 bp, synthetic construct
  source 1..80: mol_type = other DNA
gtttcagcacgattgggccatgaggtgctgctggggccggctgatgattacaagacaatggtgtggcacctattgtcccc

SEQ ID NO: 135544 - DNA, 80 bp, synthetic construct
  source 1..80: mol_type = other DNA
tgatggggacatgaggccgtactgctggcattaccctccgaggccttgcggtatcgtctcagccaggacggtttgcgggc

SEQ ID NO: 135545 - DNA, 80 bp, synthetic construct
  source 1..80: mol_type = other DNA
ctgtcgagctgcgaagctccaggactgcacaatgctcgtgtgcggagacgaccttgtcgttatctgtgaaagcgcgggaa

SEQ ID NO: 135546 - DNA, 80 bp, synthetic construct
  source 1..80: mol_type = other DNA
gtcccctgactaattcgaaagggcagaactgcggctatcgccggtgccgcgcgagcggcgtgctgacgaccagctgtggt

SEQ ID NO: 135547 - DNA, 80 bp, synthetic construct
  source 1..80: mol_type = other DNA
gcaggtcttgtcattatcatcggaggaatacgggggacccagatattatgtgttcgctttgctatatgaggacctgtggc

SEQ ID NO: 135548 - DNA, 80 bp, synthetic construct
  source 1..80: mol_type = other DNA
gcgaggttccctccacagaggacctggccaatctactgcctgccatcctttcgcccggagccctcgtagtcggtgtggtc

SEQ ID NO: 135549 - DNA, 80 bp, synthetic construct
  source 1..80: mol_type = other DNA
gaaacaggccatgtgacttggctagtagaaacagcagattacggtgtagcttctccaaacaactttatttttagtggaca

SEQ ID NO: 135550 - DNA, 80 bp, synthetic construct
  source 1..80: mol_type = other DNA
tcccgagaagggagtgcagtcgtggacgctgctcaccaccccggacgtcacctgcggcgcggagcaagtctactggtcgc

SEQ ID NO: 135551 - DNA, 80 bp, synthetic construct
  source 1..80: mol_type = other DNA
cgaaggcttttgcacttatgacctggtcctgactattttatgcagaaagagcatggaagacatcaattttacgtcgctgg

SEQ ID NO: 135552 - DNA, 80 bp, synthetic construct
  source 1..80: mol_type = other DNA
acacctcccttacatcgagcagggaatgcagctcgcagcagaattcaagcagaaggcgctcgggttgctgcaaacagcca

SEQ ID NO: 135553 - DNA, 80 bp, synthetic construct
  source 1..80: mol_type = other DNA
cagcccccggtgccgctaccgcctttgtcggcgccggcttagctggcgctgctatcggcagtgtcggactagggaaggtt

SEQ ID NO: 135554 - DNA, 80 bp, synthetic construct
  source 1..80: mol_type = other DNA
gacataacacgcaaactgccagaggcggttatgggggcagcctatgggttccagtactcgcccagccagagggtggaacg

SEQ ID NO: 135555 - DNA, 80 bp, synthetic construct
  source 1..80: mol_type = other DNA
gagactgatgcgtcacgggccgtgaccaacatactcagttcactcaccatcaccagcctactccgcaagctccatcattg

SEQ ID NO: 135556 - DNA, 80 bp, synthetic construct
  source 1..80: mol_type = other DNA
cgccgaggggcccggcgtgctgtgagaccgcgtcgaccccgcgagcgagggcgtcgagggcctcgcgcatctggcgatcc

SEQ ID NO: 135557 - DNA, 80 bp, synthetic construct
  source 1..80: mol_type = other DNA
cataacagctgagtctgctgcccgccgccttgcgcgcgggtctcccccatcccttgccagctcctccgcaagccagctct

SEQ ID NO: 135558 - DNA, 80 bp, synthetic construct
  source 1..80: mol_type = other DNA
gttgtgtgtgctaccgacgcccttatgactggttacacgggcgattttgactccgtgatagactgtaatgtttctgtaac

SEQ ID NO: 135559 - DNA, 80 bp, synthetic construct
  source 1..80: mol_type = other DNA
cctccattatgctttccgtcatggctacgttcgacaagcgtgtaaaatttctaatgtagagcttagcaacttggtttcct

SEQ ID NO: 135560 - DNA, 80 bp, synthetic construct
  source 1..80: mol_type = other DNA
tgacatcatcaacggcttgcccgtctctgcctgcagaggccgagagatactgctcggaccggccgacggaatggcctcca

SEQ ID NO: 135561 - DNA, 80 bp, synthetic construct
  source 1..80: mol_type = other DNA
ctccatgcggcgtcatgtggacttgatggtgggcgcggctacattgtgctctgccttgtatgtcggagacttatgtggtg

SEQ ID NO: 135562 - DNA, 80 bp, synthetic construct
  source 1..80: mol_type = other DNA
ggacgcgaggggagccctgctccttggaagacagggatagggctgagctcagccccctgctactatctaccacccagtgg

SEQ ID NO: 135563 - DNA, 80 bp, synthetic construct
  source 1..80: mol_type = other DNA
ccggttgatagccttcgcctcccgggggaaccacgtttctcccacgcactacgtgccggagagcgatgcggctactcgcg

SEQ ID NO: 135564 - DNA, 80 bp, synthetic construct
  source 1..80: mol_type = other DNA
ccaaaattaatcaaatcagtgtcaaaagaggtgaaaatgttacactagatggaacttatccaaatactacatggacaaga

SEQ ID NO: 135565 - DNA, 80 bp, synthetic construct
  source 1..80: mol_type = other DNA
cagtggccgtcatgggggacgcttacggcttccaatactcacccaagcagcgagtggaacgcttgctcaggatgtggcgc

SEQ ID NO: 135566 - DNA, 80 bp, synthetic construct
  source 1..80: mol_type = other DNA
cccacatacaactggggggagaatgagacggatgtgttcatgttggaaagccttcggcctcctactggaggatggtttgg

SEQ ID NO: 135567 - DNA, 80 bp, synthetic construct
  source 1..80: mol_type = other DNA
ggtgtcctatgttatgcccctctggccacgttgcggggattttccgcgcagctgtgtgcacgagggaggtggcaaagtcc

SEQ ID NO: 135568 - DNA, 80 bp, synthetic construct
  source 1..80: mol_type = other DNA
accttatcttttgtcactcaaagaagaagtgcgacgagttggccaagcagttgtcatctctcggcctcaacgctgtagcc

SEQ ID NO: 135569 - DNA, 80 bp, synthetic construct
  source 1..80: mol_type = other DNA
tttccttcttttccttttccttcactttattttcttttctggtggctccatcttagccctagtcacggctagctgtgaaa

SEQ ID NO: 135570 - DNA, 80 bp, synthetic construct
  source 1..80: mol_type = other DNA
tgggaaggtagctcagtccatttctagccttactagctggtttaatcctggtccccagcagaaccttaatttgatcaaca

SEQ ID NO: 135571 - DNA, 80 bp, synthetic construct
  source 1..80: mol_type = other DNA
agaggccgcactgggagagggaagctagggacataccggtttgtcaccccgggggagagaccgtctggtatctttgacac

SEQ ID NO: 135572 - DNA, 80 bp, synthetic construct
  source 1..80: mol_type = other DNA
ccgaacctgaacggcctcggggcccagggggggtggacgcggagccccctgcgaggccgcctcggcccgggctggcatta

SEQ ID NO: 135573 - DNA, 80 bp, synthetic construct
  source 1..80: mol_type = other DNA
gagaaggagttgacccaaccaaggattttgatatagacctggctttcttcgacattccacaaaatggtgttcaggacaac

SEQ ID NO: 135574 - DNA, 80 bp, synthetic construct
  source 1..80: mol_type = other DNA
aaaaatgaggtcttttgcgtgcagccagagaagggaggtcgaaagccagctcggcttatcgtattccctgatctgggcgt

SEQ ID NO: 135575 - DNA, 80 bp, synthetic construct
  source 1..80: mol_type = other DNA
gagttaagaaaacgcatttttcccactttatatgctatttttcagcagagtcgaggtcaagaacacgaactgaaaataaa

SEQ ID NO: 135576 - DNA, 80 bp, synthetic construct
  source 1..80: mol_type = other DNA
cccttgccgctaacgcaaacaacagcatattgacacctggaaagacaggagatcccctgctttttcaacaccagccacaa

SEQ ID NO: 135577 - DNA, 80 bp, synthetic construct
  source 1..80: mol_type = other DNA
ctacgtctcgcgagacggcgcgcatgacgcggccgtctggttcgaggatatgacccccgccgagctggaggttgtcttcc

SEQ ID NO: 135578 - DNA, 80 bp, synthetic construct
  source 1..80: mol_type = other DNA
catgggctgtgatattttgttagatgcaattcctatgtttgctccagtagtacgatgtcgcgatttgcttcaatatttag

SEQ ID NO: 135579 - DNA, 80 bp, synthetic construct
  source 1..80: mol_type = other DNA
cctacggtaagtttctcgcggatgggggttgctctgggggagcgtatgatgtgattatttgtgatgaatgccatgcccaa

SEQ ID NO: 135580 - DNA, 80 bp, synthetic construct
  source 1..80: mol_type = other DNA
tagttctctccttaggaatgatgtgcccatggctggaccactagtggccgggggcttgttgatagcgtgctatgtcataa

SEQ ID NO: 135581 - DNA, 80 bp, synthetic construct
  source 1..80: mol_type = other DNA
agttactgtgtatgatttatataaatcaaataaatccaagtctaaggtcaaaccttacactacaaagggcactacagtga

SEQ ID NO: 135582 - DNA, 80 bp, synthetic construct
  source 1..80: mol_type = other DNA
ttgagcctctgagggcctgtgatgatgaagacgagctctcagtagctgctgagtgtttcaagaaaccaccgaagtatcct

SEQ ID NO: 135583 - DNA, 80 bp, synthetic construct
  source 1..80: mol_type = other DNA
gacacgaggtggagcagccggagtacgactgcggccgtgacgagccggaccgggacttcccgtattacccgggcgaggcc

SEQ ID NO: 135584 - DNA, 80 bp, synthetic construct
  source 1..80: mol_type = other DNA
taacaccgtactggggaagtgtcaaggaagaccgcataacttatgggggtccatggagattcgaccgaaaatggaatgga

SEQ ID NO: 135585 - DNA, 80 bp, synthetic construct
  source 1..80: mol_type = other DNA
tgacgttgtccccttggtacaaacgctggttggcgcgaatattgtggtggttgcagtacttcatagccagggctgaggcc

SEQ ID NO: 135586 - DNA, 80 bp, synthetic construct
  source 1..80: mol_type = other DNA
tacaacatatcaaggggggtaggcatttgatattctgccattcaaaaaagaagtgtgacgagctagcggtccgacttaga

SEQ ID NO: 135587 - DNA, 80 bp, synthetic construct
  source 1..80: mol_type = other DNA
ccgtgtccggagtcgggtgctccagggcatctcggtactgccccagcagcccccacatgtccgcccgcagcgccgccgta

SEQ ID NO: 135588 - DNA, 80 bp, synthetic construct
  source 1..80: mol_type = other DNA
ttgacgcagcaaatagagccgatcccaaagctcggtaatatggtctatggcatctcgatccaacaaacttcttggttgcg

SEQ ID NO: 135589 - DNA, 80 bp, synthetic construct
  source 1..80: mol_type = other DNA
acgagaccgagcaccacatcctacacctcccagggtgtttaccctgcgtgagggttgggaatcagtcacgctgctgggtg

SEQ ID NO: 135590 - DNA, 80 bp, synthetic construct
  source 1..80: mol_type = other DNA
gacaccgagccagagcggtcagagccaaactcatcgcccagggggggaaagccgcgatatgtggtcggtacctctttaac

SEQ ID NO: 135591 - DNA, 80 bp, synthetic construct
  source 1..80: mol_type = other DNA
cctaccaaaacaaagtagtcagagtccaacgtcccaccccgaaaggcacagtgatggacatcatttcacgcagagaccaa

SEQ ID NO: 135592 - DNA, 80 bp, synthetic construct
  source 1..80: mol_type = other DNA
ccccgcccatgggtcccaattggccgtcccgttaccaagaccaacccagccagcgtatccacccccgcccgggtccccgc

SEQ ID NO: 135593 - DNA, 80 bp, synthetic construct
  source 1..80: mol_type = other DNA
tcaatggcgactggtctaccccatgcgctggcacatggctaagggacatctgggattgggtctgcacgatgttgtctgat

SEQ ID NO: 135594 - DNA, 80 bp, synthetic construct
  source 1..80: mol_type = other DNA
gggaaaggaatagggaaattgtcaatgggtctgatagccatagctgtggctagtggcttgctctgggtagcagaaattca

SEQ ID NO: 135595 - DNA, 80 bp, synthetic construct
  source 1..80: mol_type = other DNA
ctttccacctctacctcgcggtttccgcgatcagccatgtgcgtgcttccgtagccttgcagcggttgtaataaagctaa

SEQ ID NO: 135596 - DNA, 80 bp, synthetic construct
  source 1..80: mol_type = other DNA
ttctccgtggggttgcactcctacgtggtagggtcccaactaccctgtgagccagaacctgatgtgaccgtcttaacatc

SEQ ID NO: 135597 - DNA, 80 bp, synthetic construct
  source 1..80: mol_type = other DNA
gattcgtgcgccacgtccgcgagcgccagctggcggcggatggtcggcagaaagaccactcgaccctcgcaccgctgcag

SEQ ID NO: 135598 - DNA, 80 bp, synthetic construct
  source 1..80: mol_type = other DNA
agtgtcatcctctgcgaggcgtacgacacagggtgcgcgtggtatgaactgacaccagcggagaccaccgttcggctgcg

SEQ ID NO: 135599 - DNA, 80 bp, synthetic construct
  source 1..80: mol_type = other DNA
gtacggcccggagtgtgatcttagtaatctcgagattcatctcagcgcgacaagcgatgatgaaatctccgatgccaccg

SEQ ID NO: 135600 - DNA, 80 bp, synthetic construct
  source 1..80: mol_type = other DNA
tgctgtccactactcaatggcaggtcctcccctgcacatttacaccattgcccgccctgtcaactggcctgatacacctc

SEQ ID NO: 135601 - DNA, 80 bp, synthetic construct
  source 1..80: mol_type = other DNA
ggcatgtctctgttcacaatctggcggtaccatgggaagcgctggttgaacatgcacccgtaaatgactctcctgaacca

SEQ ID NO: 135602 - DNA, 80 bp, synthetic construct
  source 1..80: mol_type = other DNA
cgtgacagaaacatcaaccggaacagtatccgataaaccaactcctgtttttgcaaggcgtaaaattcgcacaccttcct

SEQ ID NO: 135603 - DNA, 80 bp, synthetic construct
  source 1..80: mol_type = other DNA
acgattcgggtccttgaaatggttgaggactggctgcaccgagggccaagggaattttgcgtgaaggtgctctgccccta

SEQ ID NO: 135604 - DNA, 80 bp, synthetic construct
  source 1..80: mol_type = other DNA
gcctggtggaggctgccgtgggcagcataggcctgggtaaggtgctggtggacatcctggcaggatatggtgcgggcatt

SEQ ID NO: 135605 - DNA, 80 bp, synthetic construct
  source 1..80: mol_type = other DNA
gtcccactgactgtttccggaaacatccaggagccacttatgggaagtgcggctctggtccctggatcacgcccaggtgc

SEQ ID NO: 135606 - DNA, 80 bp, synthetic construct
  source 1..80: mol_type = other DNA
cccaacagcagcatcgtgtacgaggcggacgatatcatcatgcatcttccaggatgcgttccctgcgtcaagtccggtaa

SEQ ID NO: 135607 - DNA, 80 bp, synthetic construct
  source 1..80: mol_type = other DNA
ctctcgaaaatcttgtcgtcctgaatgcgttgtcgttggcgggcacacatggcatccactggttcattgtggcgttctgc

SEQ ID NO: 135608 - DNA, 80 bp, synthetic construct
  source 1..80: mol_type = other DNA
agtgaaggtcgcaagaccttctcgcgatggaggctgcatcatggatgtcattacgagaagagaccagagaggctccggtc

SEQ ID NO: 135609 - DNA, 80 bp, synthetic construct
  source 1..80: mol_type = other DNA
gactgcgcgcatacctgaacactcctggcctccccgtatgccaggaccacttggagttctgggaggccgtattcactgga

SEQ ID NO: 135610 - DNA, 80 bp, synthetic construct
  source 1..80: mol_type = other DNA
gtgaactatgcaacagggaatcttcctggttgctccttttctatctttctcctcgcccttttctcctgcttgacttgccc

SEQ ID NO: 135611 - DNA, 80 bp, synthetic construct
  source 1..80: mol_type = other DNA
gcagctcttcccgctaaactgattattcccgcacccggcatcatgcacgcagcagcgcgcgtcatggctggtcagttgca

SEQ ID NO: 135612 - DNA, 80 bp, synthetic construct
  source 1..80: mol_type = other DNA
gttgtggacttccgcctacctacgcaaatttattcccgaagactatcacgcccaccaaattaaattttatgaagaccaat

SEQ ID NO: 135613 - DNA, 80 bp, synthetic construct
  source 1..80: mol_type = other DNA
ggcctaaacttgaacagttttgggccaagcacatgtggaacttcatcagcggcctccaatacctggccggcctcactacg

SEQ ID NO: 135614 - DNA, 80 bp, synthetic construct
  source 1..80: mol_type = other DNA
tcaagtccgtgtgggaggacctcttagaagaccaaatcacacccatacctactactatcatggccaaaaatgaggtgttc

SEQ ID NO: 135615 - DNA, 80 bp, synthetic construct
  source 1..80: mol_type = other DNA
ctcggagctcgctttctggagttcgaggctctgggttttctcaatgaagaccactggcttggaagaaagaactcaggagg

SEQ ID NO: 135616 - DNA, 80 bp, synthetic construct
  source 1..80: mol_type = other DNA
cgagaacatcagtggtccctcagaagacaggccatactgttggcactacgcacctagaccatgcagcgttgtgtctgcct

SEQ ID NO: 135617 - DNA, 80 bp, synthetic construct
  source 1..80: mol_type = other DNA
ctgaggaagaggtggacggccagattgactgttccggctattgtgggagctctactcgtgctgattcttgggggaatcac

SEQ ID NO: 135618 - DNA, 80 bp, synthetic construct
  source 1..80: mol_type = other DNA
tcgacgtcatgtcgacttgctcgtcggggcgcccgcgctctgctccgctatgtacgtggtggacctctgtggttccgtct

SEQ ID NO: 135619 - DNA, 80 bp, synthetic construct
  source 1..80: mol_type = other DNA
agaccgtgcaaaaggagagcctgtaagcgggcgctcttccgtggtctggtggataaattcgcaagggtatcatggcggac

SEQ ID NO: 135620 - DNA, 80 bp, synthetic construct
  source 1..80: mol_type = other DNA
gaaaatgcccatctagaaacaccagacactcatgtggtttataaggctggcaaagaagatgacagttccgaaatcaattt

SEQ ID NO: 135621 - DNA, 80 bp, synthetic construct
  source 1..80: mol_type = other DNA
cctcgccgacggcgggtgctctggtggggcttatgacatcattatctgtgatgaatgccattcgaccgatcctaccacga

SEQ ID NO: 135622 - DNA, 80 bp, synthetic construct
  source 1..80: mol_type = other DNA
acccggggctccctggggacacgtggtgccctgggaattcttgatggtcggacggcttcagatggcttcgggatcgagag

SEQ ID NO: 135623 - DNA, 80 bp, synthetic construct
  source 1..80: mol_type = other DNA
cgaatgctcctacaacaagtctctgggggcctgtcccatccgaacgcagccccgctggaactactatgacagcttcagcg

SEQ ID NO: 135624 - DNA, 80 bp, synthetic construct
  source 1..80: mol_type = other DNA
aactggcgccatgtaattcaaaaagtttgttaagagcaccctctactgtcatacgcaggcacaccttcatggttgaaaaa

SEQ ID NO: 135625 - DNA, 80 bp, synthetic construct
  source 1..80: mol_type = other DNA
cgccaggatttgggacttaccaacagaacgtctggacggaccccggttctgccgtcggacgatgaagcgggcctgcagcc

SEQ ID NO: 135626 - DNA, 80 bp, synthetic construct
  source 1..80: mol_type = other DNA
agagaaccctgccaaaacacgtgagtactgcctgcacgcaaagctatcggataccaaagtcgcggccagatgcccgacaa

SEQ ID NO: 135627 - DNA, 80 bp, synthetic construct
  source 1..80: mol_type = other DNA
cacgccggcctcagggatctcgctgtggctgtcgagcccgtcgtcttctcgcaaatggagacaaaaattatcatctgggg

SEQ ID NO: 135628 - DNA, 80 bp, synthetic construct
  source 1..80: mol_type = other DNA
cacacccgcggcttcacttccctcttcagacttggcccgtctcagaaactccatcttgtaaacaccaatggcaggtggca

SEQ ID NO: 135629 - DNA, 80 bp, synthetic construct
  source 1..80: mol_type = other DNA
aacggcttggcaggtccacagggactggttcaatgatctggctctgccatggaaacatgagggagcgcaaacctggaata

SEQ ID NO: 135630 - DNA, 80 bp, synthetic construct
  source 1..80: mol_type = other DNA
gggccgggtgtcgtgggttcggtggtgctaccgccggcatcttgggcctccaggtccccgtgggcctccgggccgtcgga

SEQ ID NO: 135631 - DNA, 80 bp, synthetic construct
  source 1..80: mol_type = other DNA
aggttgcgcatatttttttgtatatgccactctgttctggcaaaaatctaaagttggaacgctcgtcatgatccacatgg

SEQ ID NO: 135632 - DNA, 80 bp, synthetic construct
  source 1..80: mol_type = other DNA
gccagccaccccccagtgacgactccggtcattccacaggggcactcatcaccgacagtgccaaccagacaattccggaa

SEQ ID NO: 135633 - DNA, 80 bp, synthetic construct
  source 1..80: mol_type = other DNA
cttcctatctgggctaggccagactacaatcctcctctggtagaccgctggaaagcaccggattatgtaccaccaactgt

SEQ ID NO: 135634 - DNA, 80 bp, synthetic construct
  source 1..80: mol_type = other DNA
aagggtgggaggcacctcatcttctgtcactcgaagcgcaagtgcgatgagctcgcttcaaagctagtagctctcgggat

SEQ ID NO: 135635 - DNA, 80 bp, synthetic construct
  source 1..80: mol_type = other DNA
acatgatacttcagagcaccctgggcaatgatcttagagtggacggagccagcattcgctttgacaacattgccctgtat

SEQ ID NO: 135636 - DNA, 80 bp, synthetic construct
  source 1..80: mol_type = other DNA
aagtggtattgaggaagagacagggacccaagcaaatactggttgggggcatggtgcttctaggagccatgctagttgga

SEQ ID NO: 135637 - DNA, 80 bp, synthetic construct
  source 1..80: mol_type = other DNA
gccttcagtggggtttcatggactatgaaaatcctcataggagttgtcatcacatggataggaatgaattcacgtagcac

SEQ ID NO: 135638 - DNA, 80 bp, synthetic construct
  source 1..80: mol_type = other DNA
cctggaagagggagagaggctggcccggctgggagcgccgtccccagagagacaccctagggttcagctcgtgagggacg

SEQ ID NO: 135639 - DNA, 80 bp, synthetic construct
  source 1..80: mol_type = other DNA
aggttgttcagctggtgcctacgatgtcatcatatgcgatgagtgccattccgtggacgctactaccatccttggcattg

SEQ ID NO: 135640 - DNA, 80 bp, synthetic construct
  source 1..80: mol_type = other DNA
ccgcgtgggttctgccactgctaagctgtgaggcagtgcaggctgggacagccgccttccaggctgcgaaaacctggttt

SEQ ID NO: 135641 - DNA, 80 bp, synthetic construct
  source 1..80: mol_type = other DNA
cgccacccttggcgccgggatcttggtcctcttcggcttctttaccttgtcaccttggtacaagcactggattggccgcc

SEQ ID NO: 135642 - DNA, 80 bp, synthetic construct
  source 1..80: mol_type = other DNA
tgaccaggtattcagctcctcctggcgaccaaccgcaaccggcatacgacttagagctaataacatcctgctcctccaat

SEQ ID NO: 135643 - DNA, 80 bp, synthetic construct
  source 1..80: mol_type = other DNA
gtcacgtactctgtcactccgcttgatctgccctacatcatccagcggttacatggcatggccgctttttcactccatgg

SEQ ID NO: 135644 - DNA, 80 bp, synthetic construct
  source 1..80: mol_type = other DNA
atcacatggataggaatgaactcacgcagcacctcactgtctgtgtcactagtactggtgggaatcgtgacactgtattt

SEQ ID NO: 135645 - DNA, 80 bp, synthetic construct
  source 1..80: mol_type = other DNA
aagggaggtcgcaagcccgctcgcctaattgtctaccctgacctgggggtacgggtctgtgagaaacgtgccctgtatga

SEQ ID NO: 135646 - DNA, 80 bp, synthetic construct
  source 1..80: mol_type = other DNA
gccattatgtggtaggggccacatctgacaacttaaagtgcccgtgccaagtcccggctcctgaattcttcacagtggtg

SEQ ID NO: 135647 - DNA, 80 bp, synthetic construct
  source 1..80: mol_type = other DNA
gaatgcaacagatgacagtgctcacaaaattgctttgcagcaggaaaataatgggcaaacagaaaatgatcaagaatcaa

SEQ ID NO: 135648 - DNA, 80 bp, synthetic construct
  source 1..80: mol_type = other DNA
tattgccagaaaacgcggggcctgctcggcaccattgtcaccagccttactggtagggacaggaacgaggtcgagggaga

SEQ ID NO: 135649 - DNA, 80 bp, synthetic construct
  source 1..80: mol_type = other DNA
tcaaacaaaataaaacaaaaaacaaaacagattggaaacagacctggcccttcaagaggtgttcaaggatttattttctt

SEQ ID NO: 135650 - DNA, 80 bp, synthetic construct
  source 1..80: mol_type = other DNA
aacaccttcactaatctagcagttcagctggtcagaatgatggagggggagggggtcattggacctgacgatgttgaaaa

SEQ ID NO: 135651 - DNA, 80 bp, synthetic construct
  source 1..80: mol_type = other DNA
catcacaaaggactcaggtgattcagcctattgttggcactatgccccacagccgtgcggcgtggtgccagctcggaatg

SEQ ID NO: 135652 - DNA, 80 bp, synthetic construct
  source 1..80: mol_type = other DNA
agggcaaagcgcataacggccgcctgattaccgcgaacccggtggtgaccaaaaaagaagaaccggtgaacattgaaggc

SEQ ID NO: 135653 - DNA, 80 bp, synthetic construct
  source 1..80: mol_type = other DNA
tactacgtggtggagacgcagtggccgggggcacagacgggagtgcgcgtcgccctcgccctggtcgccgcctttgccct

SEQ ID NO: 135654 - DNA, 80 bp, synthetic construct
  source 1..80: mol_type = other DNA
gactgggctgccgatggcctacgcgacctagcggtggctgttgagcctattgtcttcagcccaatggaaaggaaggtcat

SEQ ID NO: 135655 - DNA, 80 bp, synthetic construct
  source 1..80: mol_type = other DNA
caaccaccatcctcggcatcgggacagtccttgaccaggctgagacggccggagctaggttgacagtcttagccacggcc

SEQ ID NO: 135656 - DNA, 80 bp, synthetic construct
  source 1..80: mol_type = other DNA
ggtggatggaaaggtggagatgactggaaccagaaagatcacgacagcatcggcagctcaacgccggggcagggtgtgaa

SEQ ID NO: 135657 - DNA, 80 bp, synthetic construct
  source 1..80: mol_type = other DNA
gggaacgctgtccgaaaggacgtggtacaattgctcaaccgggccgggtacaggtccaccgggtttccgcgccgggagtg

SEQ ID NO: 135658 - DNA, 80 bp, synthetic construct
  source 1..80: mol_type = other DNA
caaagctgaaagtgttactaattggtatttaagatggggaaattatagacatgaaattaacatttttaacataacagtaa

SEQ ID NO: 135659 - DNA, 80 bp, synthetic construct
  source 1..80: mol_type = other DNA
aagaaggtgacctttgacagagtccagcttgtggatcaacactactatgacacactaaaggagatcaagctccaagcgtc

SEQ ID NO: 135660 - DNA, 80 bp, synthetic construct
  source 1..80: mol_type = other DNA
ttctgtgggacgacgtgtccgatagcattttcacgccggccaatcgccgattccagaagaaggagggcggagacgagctc

SEQ ID NO: 135661 - DNA, 80 bp, synthetic construct
  source 1..80: mol_type = other DNA
gttctactgggtcaagtttatacgtacatctttcaggttgaactgctacgtcgatgtgatccaagggtggcgtgtcgctt

SEQ ID NO: 135662 - DNA, 80 bp, synthetic construct
  source 1..80: mol_type = other DNA
ggcgcactgacgaacaacaccaaccttgccccgcccgtgatgcccgtctacccaggtgaacagctccttttcttccgttc

SEQ ID NO: 135663 - DNA, 80 bp, synthetic construct
  source 1..80: mol_type = other DNA
tgtattatttgaaatggctacaggacagaactcgttatttgaacgagacggtttagatggcaattgtgacagtgagcgtc

SEQ ID NO: 135664 - DNA, 80 bp, synthetic construct
  source 1..80: mol_type = other DNA
tgattactttggtgtgtaccctcctttatattaaatttaaaagcagacgcagctttattgaagaaaagaaaatgccttag

SEQ ID NO: 135665 - DNA, 80 bp, synthetic construct
  source 1..80: mol_type = other DNA
acgcccacggccacagcctgcgcttgccgtattttgccaaaatcgcccccgacgggcctgcgtgcggaaggctgctgcca

SEQ ID NO: 135666 - DNA, 80 bp, synthetic construct
  source 1..80: mol_type = other DNA
ccaacgggagctggcacgtcaacaggacagcccttaactgtaatgacagcttgaacactgggttcttggccggcctcttc

SEQ ID NO: 135667 - DNA, 80 bp, synthetic construct
  source 1..80: mol_type = other DNA
aagcccctggacgatcgctttgccacctcgctccacttcctcaatgctatgtcaaaggttcgcaaagacatccaagagtg

SEQ ID NO: 135668 - DNA, 80 bp, synthetic construct
  source 1..80: mol_type = other DNA
aattcagttgactcccttgagcatgagatgtggagaagcagggcagatgagatcaatgccatttttgaggaaaacgaggt

SEQ ID NO: 135669 - DNA, 80 bp, synthetic construct
  source 1..80: mol_type = other DNA
gcggctcccgtccatcctggggcccaaatgacccccggcggaggtcccgcaatttgggtaaagtcatcgataccctaacg

SEQ ID NO: 135670 - DNA, 80 bp, synthetic construct
  source 1..80: mol_type = other DNA
cactacgaggaagacgtcaacttgggcagtgggactagggccgttggaaagcccctacttaattcagacactgggaaaat

SEQ ID NO: 135671 - DNA, 80 bp, synthetic construct
  source 1..80: mol_type = other DNA
acgccaccatcggagccggggtgctcttgctctttggattctttacactgtcaccatggtataaacactggattggtcgt

SEQ ID NO: 135672 - DNA, 80 bp, synthetic construct
  source 1..80: mol_type = other DNA
agactgttaatatacgtaaatgtgcctatgtgctggggaatggagctgtggtgcggtttcaaacatgtgaccgtgtagcc

SEQ ID NO: 135673 - DNA, 80 bp, synthetic construct
  source 1..80: mol_type = other DNA
tgatgcccaactacgtgttgcatccttccatcatcccgacgccgggctaccgcggcacccggtactacgccagccgcagg

SEQ ID NO: 135674 - DNA, 80 bp, synthetic construct
  source 1..80: mol_type = other DNA
aggaatgtggaaagattcggggcaaaagaaattatatctgttgctagtcccttcctggacgggagcaatccctccagggc

SEQ ID NO: 135675 - DNA, 80 bp, synthetic construct
  source 1..80: mol_type = other DNA
ggaaaaaccgattgaatgcattggggaagagtgaattccagatttacaagaaaagcggaatccaggaagtggatagaacc

SEQ ID NO: 135676 - DNA, 80 bp, synthetic construct
  source 1..80: mol_type = other DNA
cagtattttatagcacggattgaggctgtgctgcaagtgtgggtcccgagtatgtccgcgcggggcgtgcgggatgcagt

SEQ ID NO: 135677 - DNA, 80 bp, synthetic construct
  source 1..80: mol_type = other DNA
gggggtgcgggtgtgcgagaagagggccttatatgacgccgtcaaacaactttctctggccgtgatgggagactcctacg

SEQ ID NO: 135678 - DNA, 80 bp, synthetic construct
  source 1..80: mol_type = other DNA
ggcaaattcctcgcggatggaggctgctccggcggcgcctatgatgtcataatatgcgacgagtgccattcagtggattc

SEQ ID NO: 135679 - DNA, 80 bp, synthetic construct
  source 1..80: mol_type = other DNA
ttgagaaacaagaaagaggtaggtcattgctcttcaaaacaacagaaggcataaacaaatgcatgctaatagccatggat

SEQ ID NO: 135680 - DNA, 80 bp, synthetic construct
  source 1..80: mol_type = other DNA
gaaggcctatgccgttatgtggtggctgtcggcatcttgatgagcatggaacttggaccagagattgtggcactagtcct

SEQ ID NO: 135681 - DNA, 80 bp, synthetic construct
  source 1..80: mol_type = other DNA
ttcaatcaggggtgggggcccatcacctacaatgggtcccgcggatcggaccaacggccatattgctggcactacgcacc

SEQ ID NO: 135682 - DNA, 80 bp, synthetic construct
  source 1..80: mol_type = other DNA
aggcgggggggcggggggcggtggcatcggtgggcgccggagaactttgagggaacggcaagcgccggaagtcgtcgggg

SEQ ID NO: 135683 - DNA, 80 bp, synthetic construct
  source 1..80: mol_type = other DNA
ggaggggtgatggagtatgccacactacatgcacctgtggagccatgatcgtgggccatgtgaagaacgggtccatgcgt

SEQ ID NO: 135684 - DNA, 80 bp, synthetic construct
  source 1..80: mol_type = other DNA
ggagtggagccagatgacgtcgattgctggtgcaacacgacatcgacttgggttgtgtacggaacctgtcatcataaaaa

SEQ ID NO: 135685 - DNA, 80 bp, synthetic construct
  source 1..80: mol_type = other DNA
tggggtaatctatggcaagtattgccaaatggccatgctcaaaataggagctctgactggtacttacatctatgaccacc

SEQ ID NO: 135686 - DNA, 80 bp, synthetic construct
  source 1..80: mol_type = other DNA
tttggctatggggcgaaagatgtccgcagccatgctccaaaagccatccgccacatcaagtctgtgtggcaagacctgtt

SEQ ID NO: 135687 - DNA, 80 bp, synthetic construct
  source 1..80: mol_type = other DNA
ttgtggatgaaaatcatactcacttacaatcactaataggtacacttgttattttaactggcaagggaattggtacaggt

SEQ ID NO: 135688 - DNA, 80 bp, synthetic construct
  source 1..80: mol_type = other DNA
gcctccgctggagggcgagcctggggaccctgacctttcgtcagggtcgtggtcaactgtcagcgatgaggacagtgtgg

SEQ ID NO: 135689 - DNA, 80 bp, synthetic construct
  source 1..80: mol_type = other DNA
gggaaccatgtttcccccacgcactatgtgccggagagcgacgcagctgctcgcgtcactgccatacttagcagcctcac

SEQ ID NO: 135690 - DNA, 80 bp, synthetic construct
  source 1..80: mol_type = other DNA
acgcgcgccgaatcttgggattgcggaggtggcgccggatgccctctgggacgtcatacgccaggccgtgggtgttggtc

SEQ ID NO: 135691 - DNA, 80 bp, synthetic construct
  source 1..80: mol_type = other DNA
ctgctgacccactcccttctcgggctttggtcttttgtgctgctgctccttgcactgccccaccaagcttacgccctcga

SEQ ID NO: 135692 - DNA, 80 bp, synthetic construct
  source 1..80: mol_type = other DNA
acctgatgactcggagacagggtccgtctgctccatgccccctcttgagggtgagcctggagatcctgacttggagcccg

SEQ ID NO: 135693 - DNA, 80 bp, synthetic construct
  source 1..80: mol_type = other DNA
catggacagtcgtgtttttaatagagagttaattaacgcgattttagcgagtgagggttctatacgagcaggggaaaggc

SEQ ID NO: 135694 - DNA, 80 bp, synthetic construct
  source 1..80: mol_type = other DNA
attgttagagtcttggaagaacccggactacgtccctccggtggtacacgggtgcccattgccacctgtcaaggcccctc

SEQ ID NO: 135695 - DNA, 80 bp, synthetic construct
  source 1..80: mol_type = other DNA
tgttcagttcgactcttcatcctttaccttctcctacatcgcccaagaatgaaagaccaataaacgtgtttttcatttaa

SEQ ID NO: 135696 - DNA, 80 bp, synthetic construct
  source 1..80: mol_type = other DNA
attggaaataattattcaataaagatcacttacttaaaatctgaaagtatgtctttggtgtagttgtttagcagcacctc

SEQ ID NO: 135697 - DNA, 80 bp, synthetic construct
  source 1..80: mol_type = other DNA
acccagaccgtacaggggcccgactccgccgcctgcggactcttctgttgcatgttcttgcatgccttcgtgcactggcc

SEQ ID NO: 135698 - DNA, 80 bp, synthetic construct
  source 1..80: mol_type = other DNA
gacagaagatatgctgcgcatctggaacaaggtctggattttggacaatcctcacatggaagacaagcagacagtggatg

SEQ ID NO: 135699 - DNA, 80 bp, synthetic construct
  source 1..80: mol_type = other DNA
gttacaccgttttccatgagcaaactgaaacgttttcatcgctctggagtgaataccacgacgatttccggcagtttcta

SEQ ID NO: 135700 - DNA, 80 bp, synthetic construct
  source 1..80: mol_type = other DNA
gacatccaccacccggccggtggtggtgtgcagccgtgttccaaccacggtcacgcttcggtgcctctccccgattcggg

SEQ ID NO: 135701 - DNA, 80 bp, synthetic construct
  source 1..80: mol_type = other DNA
gagaccgatgtttttgtgctaaatagcacgagacccccgcacggagcttggttcggatgcacctggatgaatgggactgg

SEQ ID NO: 135702 - DNA, 80 bp, synthetic construct
  source 1..80: mol_type = other DNA
acgcgtactcctcgaagtacacgtagcccccaccgaaggtgaagtagcgccggtgtcccacggtgcacggctcgatcgca

SEQ ID NO: 135703 - DNA, 80 bp, synthetic construct
  source 1..80: mol_type = other DNA
cctgcccgggaaccccgcaatagcatcattaatggcatttacagcctctgtcaccagcccgctcaccacccaacacaccc

SEQ ID NO: 135704 - DNA, 80 bp, synthetic construct
  source 1..80: mol_type = other DNA
ctggcccttctgacacctggactaaaatgcctaaaccttgatgtgtacagaattttgctactcatggttggagttggaag

SEQ ID NO: 135705 - DNA, 80 bp, synthetic construct
  source 1..80: mol_type = other DNA
gtctaccatggagcgggtgcgaagaccctggcaggccccaaggggcccgtctgtcaaatgtacaccaatgtggaccaaga

SEQ ID NO: 135706 - DNA, 80 bp, synthetic construct
  source 1..80: mol_type = other DNA
agcccagatgttcattgtctcgccgcagcaccaccattttgtgcaggaatgcaattgctccatctaccctggtgctatca

SEQ ID NO: 135707 - DNA, 80 bp, synthetic construct
  source 1..80: mol_type = other DNA
tttgtcgacgaggccaactttattcgcccggatgcggtccagacgattatgggctttctcaaccaggccaactgcaagat

SEQ ID NO: 135708 - DNA, 80 bp, synthetic construct
  source 1..80: mol_type = other DNA
atacgaacagggcctggggctgctcgcccagcaggcacgcatcggcttggcgtcgaacgccaagcgattcgccacgttca

SEQ ID NO: 135709 - DNA, 80 bp, synthetic construct
  source 1..80: mol_type = other DNA
tcgccctgtcgccttacgtgaacaagactatcacggaggactgcctgcccatcctggacatggagacggggaacatcggg

SEQ ID NO: 135710 - DNA, 80 bp, synthetic construct
  source 1..80: mol_type = other DNA
tctgactgggctagcaacggcctacgtgacctagccgttgcagtagagcccgtcgttttctctcccatggagaggaaagt

SEQ ID NO: 135711 - DNA, 80 bp, synthetic construct
  source 1..80: mol_type = other DNA
tctgaccatgcagactctgctcatactgctattcctcctatcccctgccctcgctgatgattactctaagtgcaaattcg

SEQ ID NO: 135712 - DNA, 80 bp, synthetic construct
  source 1..80: mol_type = other DNA
tttccacagcatcatgaatacagtgatccgtatcgtgctgctctctcttttagttgttaatgtggattcagcagatccta

SEQ ID NO: 135713 - DNA, 80 bp, synthetic construct
  source 1..80: mol_type = other DNA
aacgtgttaaagctcgtattctcggcgacgttatctccgtttctaattgtccagaactgggatcagatacacgcattata

SEQ ID NO: 135714 - DNA, 80 bp, synthetic construct
  source 1..80: mol_type = other DNA
gtgggccggtgtggtggatgacgtgacgtgtggatgaggaaccggagtcgccggtgcgccgtgctgttggtgttctgttg

SEQ ID NO: 135715 - DNA, 80 bp, synthetic construct
  source 1..80: mol_type = other DNA
ggacctcatttagctgcgaatccccaaacagatcgagatggccacgttctatccagtcagtctacgggttcatcaaacac

SEQ ID NO: 135716 - DNA, 80 bp, synthetic construct
  source 1..80: mol_type = other DNA
tttgtgctgcgcctggtacatcaaggggcgtgcagtgcccgcattcacttatggcttactccaattatggcccctcctgc

SEQ ID NO: 135717 - DNA, 80 bp, synthetic construct
  source 1..80: mol_type = other DNA
atgaggagagtgtcaccaatgatgcagacatgagaccgtactgctggcattatcctcctagaccttgtggcatagttcct

SEQ ID NO: 135718 - DNA, 80 bp, synthetic construct
  source 1..80: mol_type = other DNA
gaaaattggagttggacttcaactattgtgaaggaacaacagttgtcatcacagaaaactgtgggacaagaggcccatca

SEQ ID NO: 135719 - DNA, 80 bp, synthetic construct
  source 1..80: mol_type = other DNA
gtcctcgcagccctggccgcatattgcttgacaacaggcagcgtggtcattgtgggcaggatcaacttgtccgggagacc

SEQ ID NO: 135720 - DNA, 80 bp, synthetic construct
  source 1..80: mol_type = other DNA
aaacagaaaccaccatccttgatgtggacttgagaccagcttcagcatggacgctctatgcggtagccaccactatcttg

SEQ ID NO: 135721 - DNA, 80 bp, synthetic construct
  source 1..80: mol_type = other DNA
tatgccagccagggctacaaagtgctcgtgcttaatccatcagtcgcggccacccttgggtttggtgcctacatgtccaa

SEQ ID NO: 135722 - DNA, 80 bp, synthetic construct
  source 1..80: mol_type = other DNA
tgctagtacgagcccgtcgcgaactctggacgtcttttgacgagcgtacggttgcccgccagctggcaaacctcattttt

SEQ ID NO: 135723 - DNA, 80 bp, synthetic construct
  source 1..80: mol_type = other DNA
ttgactggctgtggggctcgggtggctgagtgtcggagcttgacggacttcgaccaggggtgtggccctatcacctatgc

SEQ ID NO: 135724 - DNA, 80 bp, synthetic construct
  source 1..80: mol_type = other DNA
gtcgcgtgcttatgggatcgaccccaatatccgcactgggacccgcaccattacaactggtgccaaactgacctattcca

SEQ ID NO: 135725 - DNA, 80 bp, synthetic construct
  source 1..80: mol_type = other DNA
gcacgtggatgaacgccaccgggtttgtgaaaacgtgtggggctcccccctgctcggtgccctcccacaacgggtcttgg

SEQ ID NO: 135726 - DNA, 80 bp, synthetic construct
  source 1..80: mol_type = other DNA
cgagcactactggctgtaaaaggacagaccacatcatggttctgtgttcattaggttgttctgtccattgctgacataat

SEQ ID NO: 135727 - DNA, 80 bp, synthetic construct
  source 1..80: mol_type = other DNA
cgtgcgggtactggcccttgggcgcgcggacgcaatggggcaggaagacgggaaccgcggagagaggcggccggccgtga

SEQ ID NO: 135728 - DNA, 80 bp, synthetic construct
  source 1..80: mol_type = other DNA
ggaacatatcccactacagaacatgcaacagccaatagctataatagattatgacaatgagccacagccctcgctgcttc

SEQ ID NO: 135729 - DNA, 80 bp, synthetic construct
  source 1..80: mol_type = other DNA
aaagaaggtgaccttcgaccgggtccagctgctggaccaacactacaatgatgtccttaaggagattaaggctcgagctt

SEQ ID NO: 135730 - DNA, 80 bp, synthetic construct
  source 1..80: mol_type = other DNA
aagggtaatcttatcctccttggacccgctgatgacatgaagagtctgggctggcgtttgctagccccgattactgcata

SEQ ID NO: 135731 - DNA, 80 bp, synthetic construct
  source 1..80: mol_type = other DNA
ttgaccgcggagcggcgggcgcggccagccgcacgcgggccgccgggtacctggatgtgcttcttaccgttcgtctcgct

SEQ ID NO: 135732 - DNA, 80 bp, synthetic construct
  source 1..80: mol_type = other DNA
aggttagcggggggcggcggttttcgcccccgagcaaaacggtaccggttgcgaccgggggcggaacgggatcgatcgtg

SEQ ID NO: 135733 - DNA, 80 bp, synthetic construct
  source 1..80: mol_type = other DNA
gcgtggtacgtatacgtgaagactggaaaaaggagtggtgctctatgggatgtgcctgctcccaaggaagtaaaaaaggg

SEQ ID NO: 135734 - DNA, 80 bp, synthetic construct
  source 1..80: mol_type = other DNA
gagcatggctacctgggaggagaggaggatgtgctgctcaaacacctgcagcgccagtccctcatcctccgggacgccct

SEQ ID NO: 135735 - DNA, 80 bp, synthetic construct
  source 1..80: mol_type = other DNA
ggtggagattttactatgttctgtaatggaagtaaaactcacttgcaaaacataagacacacttgtaatgaacagaacct

SEQ ID NO: 135736 - DNA, 80 bp, synthetic construct
  source 1..80: mol_type = other DNA
aggcatccggctgccgccgaggccacgccgggccaggctcgcgggtggaggacgaccctggcccccaccgcgggccaggc

SEQ ID NO: 135737 - DNA, 80 bp, synthetic construct
  source 1..80: mol_type = other DNA
gacggcgagacccacgtaactggtgatgaggcaggccgtgccgccagcggacttgccagtctgttcactgcagggtccag

SEQ ID NO: 135738 - DNA, 80 bp, synthetic construct
  source 1..80: mol_type = other DNA
gccacctgcacgacccatggtcgatctccagacgctgagctcatagaggccaacttgttatggcggcaggagatgggagg

SEQ ID NO: 135739 - DNA, 80 bp, synthetic construct
  source 1..80: mol_type = other DNA
cccgtcgcccctctccaaggttccgttcggaacatgccagcatttcctcgtggcgaatcgatatctcgagacccggtcga

SEQ ID NO: 135740 - DNA, 80 bp, synthetic construct
  source 1..80: mol_type = other DNA
gtgccggtggatgtcgtttatggtgagggcaaagcgtgcgaaggagccgaccagggtcgccttcttggtgcgcagaaagt

SEQ ID NO: 135741 - DNA, 80 bp, synthetic construct
  source 1..80: mol_type = other DNA
agagggaagtgtccgtcccggcggagatcctgagaaaatccaggaaatttccccgagcaatacccatatgggcacggccg

SEQ ID NO: 135742 - DNA, 80 bp, synthetic construct
  source 1..80: mol_type = other DNA
accaaactggccaaagctttaatcacacttatccttttaatgagctctgtgattaccccacatcccaatctcaacacagt

SEQ ID NO: 135743 - DNA, 80 bp, synthetic construct
  source 1..80: mol_type = other DNA
tgacatcacacgagtcgagtctaaaaacaaagtaatcatcctcgactcgttcgaccccatcgtgcctgaatatgatgacc

SEQ ID NO: 135744 - DNA, 80 bp, synthetic construct
  source 1..80: mol_type = other DNA
ggtcataaggtgggagtatgtggtccttgctttcctgctgctggcggatgcgcgcatttgctcgtgcttgtggctcatga

SEQ ID NO: 135745 - DNA, 80 bp, synthetic construct
  source 1..80: mol_type = other DNA
gaacacccgggtgtacgtgtaccccatcagcgtgtagttgtccgtctgcagggccacggacatcagccccccgcgcggcg

SEQ ID NO: 135746 - DNA, 80 bp, synthetic construct
  source 1..80: mol_type = other DNA
gtcaccaaagccaacgtcgccatctggagtactacacccagtacattgcataacctgtccatttgcattttcagttgcgc

SEQ ID NO: 135747 - DNA, 80 bp, synthetic construct
  source 1..80: mol_type = other DNA
taaacgttcaaacagcaggttaaagccaactccaaccaagcaatacaaaggccttgatcccgactcactggaggtggagg

SEQ ID NO: 135748 - DNA, 80 bp, synthetic construct
  source 1..80: mol_type = other DNA
agtcatgcatgagggtgtgttccacacgctgtggcacacaactagaggagctgccataatgagtggtgaaggaagattga

SEQ ID NO: 135749 - DNA, 80 bp, synthetic construct
  source 1..80: mol_type = other DNA
tagggagacaactactgagaccactactcaaactacacagctagacacaacagtgcagaatagcactgtgttggttaggt

SEQ ID NO: 135750 - DNA, 80 bp, synthetic construct
  source 1..80: mol_type = other DNA
taatgcaggtcaggggcttacatttaataatggccaacttagggttaagttgggagctggacttatttttgattcaaaca

SEQ ID NO: 135751 - DNA, 80 bp, synthetic construct
  source 1..80: mol_type = other DNA
caacaccccgggtctccctgtatgccaagaccacctcgagttttgggagggagtgttcaccggtatgactcatatcgatg

SEQ ID NO: 135752 - DNA, 80 bp, synthetic construct
  source 1..80: mol_type = other DNA
cccaacagcagcattgtttatgaggcagagacagccatacttcacttaccagggtgcgtgccgtgtgtcaaagtggccaa

SEQ ID NO: 135753 - DNA, 80 bp, synthetic construct
  source 1..80: mol_type = other DNA
atccgtacggaggaggcaatctaccagtgttgtgacttggaccctcaagcccgtgtggctatcaagtccctcaccgagag

SEQ ID NO: 135754 - DNA, 80 bp, synthetic construct
  source 1..80: mol_type = other DNA
aaatatgaggaggatgtgaatctcggctctggcacgcgggctgtggtaagctgcgctgaagctcccaacatgaagatcat

SEQ ID NO: 135755 - DNA, 80 bp, synthetic construct
  source 1..80: mol_type = other DNA
ccgtccggttacgggcataccttaacacgcctgggctccccgtatgccaggatcatcttgagttctgggaggcagtgttc

SEQ ID NO: 135756 - DNA, 80 bp, synthetic construct
  source 1..80: mol_type = other DNA
cgggcccccgaacgtgtagcaatgtgtggcatggaactttccccatcaatgctactacgaccggccctagcgtacccata

SEQ ID NO: 135757 - DNA, 80 bp, synthetic construct
  source 1..80: mol_type = other DNA
cacccgcttggaaaagaccggctgggtgtggggcggaagacgcgagtaggccgaactgacaaaaaaatcagacgtgccgt

SEQ ID NO: 135758 - DNA, 80 bp, synthetic construct
  source 1..80: mol_type = other DNA
ccacgggatgccccgatcgcttaagctggtgcaggtcactgcgctcgtttgaccagggctggggtcccatcacatatgcc

SEQ ID NO: 135759 - DNA, 80 bp, synthetic construct
  source 1..80: mol_type = other DNA
cacactacatcgtcaggtgggagtgggtagtgctcctcttcttgctcttggcagacgctagggtctgcgcctgcttgtgg

SEQ ID NO: 135760 - DNA, 80 bp, synthetic construct
  source 1..80: mol_type = other DNA
acccctttggctgagaataccaacagtgtaaccaacatagaattagaacccccctttggggacagctacatagtgatagg

SEQ ID NO: 135761 - DNA, 80 bp, synthetic construct
  source 1..80: mol_type = other DNA
actgcaacgtggctgtagaacagtacgttgattttagtctggaccctactttttccattgagacacgcactgccccccag

SEQ ID NO: 135762 - DNA, 80 bp, synthetic construct
  source 1..80: mol_type = other DNA
cacggcccttcttcggagagccgttgactacttagcaggaggggctgccttctgctccgcgttatacgtcggagacgcgt

SEQ ID NO: 135763 - DNA, 80 bp, synthetic construct
  source 1..80: mol_type = other DNA
tacacttggggtgagaatgagactgatgtcttcctgttagagtccgcgcgtcctccgcgtggaggttggtacggctgcac

SEQ ID NO: 135764 - DNA, 80 bp, synthetic construct
  source 1..80: mol_type = other DNA
caagagagagaagaaacttggtgaattcggtgtcgccaaggggagccgcgccatctggtatatgtggttggggagccggt

SEQ ID NO: 135765 - DNA, 80 bp, synthetic construct
  source 1..80: mol_type = other DNA
taaagcctcagccgccatcagggcggcgggcctaagggattgcaccatgctggtttgcggtgatgacctggtcgttatcg

SEQ ID NO: 135766 - DNA, 80 bp, synthetic construct
  source 1..80: mol_type = other DNA
gcctatggagaagaaagtcatcacttggggggcggacacggctgcgtgtggcgacatactggccggcctgcccgtctctg

SEQ ID NO: 135767 - DNA, 80 bp, synthetic construct
  source 1..80: mol_type = other DNA
ccccctgggcccgtccagactacaaccctcctgtgatcgagacatggaagaggccgggctatgagccgcccaccgtcttg

SEQ ID NO: 135768 - DNA, 80 bp, synthetic construct
  source 1..80: mol_type = other DNA
ccagttccttcaatctggaccagctcaaaacctccagcttgtcaataccaatgggagttggcatatcaacaggactgcct

SEQ ID NO: 135769 - DNA, 80 bp, synthetic construct
  source 1..80: mol_type = other DNA
cggcgcgtagactaaaccgggggtctcccccctctctggctagctcctccgccagccagttgtccgcaccgtccctgaaa

SEQ ID NO: 135770 - DNA, 80 bp, synthetic construct
  source 1..80: mol_type = other DNA
gatgaagagcgcgaaattccagaacgctcttggaactcaggtcatgagtggataacagactttgaagggaaaacagtgtg

SEQ ID NO: 135771 - DNA, 80 bp, synthetic construct
  source 1..80: mol_type = other DNA
tacccttggcccctgtatgggaatgagggcctcggttgggcagggtggctcctgtccccccggggctcacgcccgtcatg

SEQ ID NO: 135772 - DNA, 80 bp, synthetic construct
  source 1..80: mol_type = other DNA
acaacatgatgggcaagagagagaagaaacttggagagtttggcaaagcaaaaggcagtagagctatatggtacatgtgg

SEQ ID NO: 135773 - DNA, 80 bp, synthetic construct
  source 1..80: mol_type = other DNA
gacgacagtatcgccttgtgtgtgtgctggtaatttatacaccgatccgtaaacgcgcgccgaatcttgggattgcggag

SEQ ID NO: 135774 - DNA, 80 bp, synthetic construct
  source 1..80: mol_type = other DNA
ctggtcgagcggaggctgcaatcggccctgaagtatgaggagttttacctaaagcgcttcggcgggcactacatggagtc

SEQ ID NO: 135775 - DNA, 80 bp, synthetic construct
  source 1..80: mol_type = other DNA
tcggggccatgcccaagaagaagaggaaggtgtccaatttactgaccgtacaccaaaatttgcctgcattaccggtcgat

SEQ ID NO: 135776 - DNA, 80 bp, synthetic construct
  source 1..80: mol_type = other DNA
atccgcgctgagaagcggtgaagggagacttgatccatactggggagatgtcaagcaggatctggtgtcatactgtggtc

SEQ ID NO: 135777 - DNA, 80 bp, synthetic construct
  source 1..80: mol_type = other DNA
tttcacaaccttgccagccttgaccaccggcctcatccacctccaccagaacattgtggacgtgcaatacctgtacgggg

SEQ ID NO: 135778 - DNA, 80 bp, synthetic construct
  source 1..80: mol_type = other DNA
ttcgacgagatggaagagtgctccaggcacctcccatatctcgcagaagggcaacagctcgcagagcagttcaaacagaa

SEQ ID NO: 135779 - DNA, 80 bp, synthetic construct
  source 1..80: mol_type = other DNA
ggtctgggttaggaagggccacctgacacagaggctcggtgaggaccgttagacaccgaaagatcttgagccgctcgtcc

SEQ ID NO: 135780 - DNA, 80 bp, synthetic construct
  source 1..80: mol_type = other DNA
cagaccccggacaccgcgtgtgtgcacggcgagctgctcgcccgcaagcgggaaagattcgcggcggtcattaaccggtt

SEQ ID NO: 135781 - DNA, 80 bp, synthetic construct
  source 1..80: mol_type = other DNA
cctccgggaacacgcgcacgtctgccggctgcgcaataccgcgtccgtcaaggtgctgctggggcgcaagagcgacagcg

SEQ ID NO: 135782 - DNA, 80 bp, synthetic construct
  source 1..80: mol_type = other DNA
catggcaactttcccccccccccggggtaaaggccaatgtcgatgcagttacccgtataatggcaacagatcgtcttgcg

SEQ ID NO: 135783 - DNA, 80 bp, synthetic construct
  source 1..80: mol_type = other DNA
atggctatgctcaagcttggagcggtgtgtggcacgtatgtatacgaccacctcacgccgatgtcgaactgggccgccga

SEQ ID NO: 135784 - DNA, 80 bp, synthetic construct
  source 1..80: mol_type = other DNA
ggtttagctcccgcagccggcgggcctcgattggcactccccggacggtgagcgctccgttgacgaacatgaagggctgg

SEQ ID NO: 135785 - DNA, 80 bp, synthetic construct
  source 1..80: mol_type = other DNA
ggaaaaaggatgttcggagccattcccgcaaggccattaaccacatcagctccgtgtggaaggacttgctggacgacaac

SEQ ID NO: 135786 - DNA, 80 bp, synthetic construct
  source 1..80: mol_type = other DNA
aggccgcagctcaccaaggtccttaacgcgaccggggccgatagtgccacgcccaccacgttcgagctcggggttaacgg

SEQ ID NO: 135787 - DNA, 80 bp, synthetic construct
  source 1..80: mol_type = other DNA
ccaggaagggcacgctctgaggcttgtggttacactcgcagtgcacgggcatcagcatcatccccgcgccgcgctgcata

SEQ ID NO: 135788 - DNA, 80 bp, synthetic construct
  source 1..80: mol_type = other DNA
acctacatggatgtcatctccagagaagaccaaaggggcagtggacaggtggtcacatatgccctgaacaccttcaccaa

SEQ ID NO: 135789 - DNA, 80 bp, synthetic construct
  source 1..80: mol_type = other DNA
gtccaggaggacagggttttgtaaataagtgtttagggttttgcaatttaattaaatatgcaatgtaatttagttgtaaa

SEQ ID NO: 135790 - DNA, 80 bp, synthetic construct
  source 1..80: mol_type = other DNA
gagcctggaggcatcgggcccgagcggtcagagctaagctcatcgctcagggagggaaagccgctatctgcggtaagtac

SEQ ID NO: 135791 - DNA, 80 bp, synthetic construct
  source 1..80: mol_type = other DNA
ttttattgactgggcgtttcgtttgtataacgctgttgttgctagtattttcataacctcctaggtttttggagctacac

SEQ ID NO: 135792 - DNA, 80 bp, synthetic construct
  source 1..80: mol_type = other DNA
ccgggtatggcgctggggtctccggcgccctagtggccttcaaaatcatgggaggagagctccctaccacagaggacatg

SEQ ID NO: 135793 - DNA, 80 bp, synthetic construct
  source 1..80: mol_type = other DNA
gcggggccgccgacgagctgctcaacgtggtcacctatatatgcgacgaccacatgccgcgggtggtgacgcacaccaac

SEQ ID NO: 135794 - DNA, 80 bp, synthetic construct
  source 1..80: mol_type = other DNA
taccacatcacgcagcgccagcctccgccagaagaaggtcacatttgacagagtgcaagtgttcgaccaacattatcagg

SEQ ID NO: 135795 - DNA, 80 bp, synthetic construct
  source 1..80: mol_type = other DNA
gcatctcgctgactctactggctgttggagggattcttatctttctggcaaccagcgtgcaagccgattcgggatgtgca

SEQ ID NO: 135796 - DNA, 80 bp, synthetic construct
  source 1..80: mol_type = other DNA
tcgtgtgtacgcaggcgtggcgcgtgtcgaaggtgcacaggttacagggcacgtcggtctggttggagtccgcgacgtat

SEQ ID NO: 135797 - DNA, 80 bp, synthetic construct
  source 1..80: mol_type = other DNA
cagtggttctaacagcacatacaaaggtgttaaagctggaactggaaacaattgggatgacgatgaaaatgttgcaagac

SEQ ID NO: 135798 - DNA, 80 bp, synthetic construct
  source 1..80: mol_type = other DNA
accgggtccaagtgcttgactcacattatgagacagtcctacaggacgttaagcaagcggcatccaaggtcagcgccaac

SEQ ID NO: 135799 - DNA, 80 bp, synthetic construct
  source 1..80: mol_type = other DNA
taaatcagtagctcccccttgcggagggtgcgcacccgtcccagggactggtacacggacaccatgtccggtccgtagtt

SEQ ID NO: 135800 - DNA, 80 bp, synthetic construct
  source 1..80: mol_type = other DNA
ctgagacagacgacagggagatatccgtggccgccgagtgccacagaccgcccagaccaaaatttccaccagccctgccc

SEQ ID NO: 135801 - DNA, 80 bp, synthetic construct
  source 1..80: mol_type = other DNA
ctgcaatgttgccgtaacacaggtagtggactttagtcttgaccctactttctctatagacaccacaaccgtcccgcagg

SEQ ID NO: 135802 - DNA, 80 bp, synthetic construct
  source 1..80: mol_type = other DNA
agtcatcacacaagatgacatgcataacccaaaagggttgaaagaaaaggttgagaaatggcttaaagagtgtggtgtcg

SEQ ID NO: 135803 - DNA, 80 bp, synthetic construct
  source 1..80: mol_type = other DNA
attggctctggcattgattacaatgaaaacggtgccatgattactaaacttggagcgggtttaagctttgacaactcagg

SEQ ID NO: 135804 - DNA, 80 bp, synthetic construct
  source 1..80: mol_type = other DNA
ttgctgggctcttcaatccgggccccagccagaaactgcagctgatcaacaccaatggctcgtggcacatcaaccgtact

SEQ ID NO: 135805 - DNA, 80 bp, synthetic construct
  source 1..80: mol_type = other DNA
attggggccccaacgacccccggcggaggtcccgcaacttgggtaaggtcatcgatacccttacttgcggcttcgccgac

SEQ ID NO: 135806 - DNA, 80 bp, synthetic construct
  source 1..80: mol_type = other DNA
gaagaacactggtggttccatgtcgaggacaggacgaattggtaggcagagcccgcatatctccaggggccggatggaac

SEQ ID NO: 135807 - DNA, 80 bp, synthetic construct
  source 1..80: mol_type = other DNA
gtggggtttcttctcggtgtttgtgttgtatcgtgtttggcgggaacgcccaaaacgtcctggagacgggtgagtgtcgg

SEQ ID NO: 135808 - DNA, 80 bp, synthetic construct
  source 1..80: mol_type = other DNA
ctcagaattctttaattatgaaacggagtgtcatttttgttttgctgattttttgcgccctacctgtgctttgctcccaa

SEQ ID NO: 135809 - DNA, 80 bp, synthetic construct
  source 1..80: mol_type = other DNA
cgagcctccagtcgtgtctggatgcgccgtcgccccacctaagccggcaccaattcccccgccgaggcggaagaggctag

SEQ ID NO: 135810 - DNA, 80 bp, synthetic construct
  source 1..80: mol_type = other DNA
gggtgggacactagaattaccagaactgatttagaaaatgaagctaaggtactggagctcctagacggtgaacaccgcat

SEQ ID NO: 135811 - DNA, 80 bp, synthetic construct
  source 1..80: mol_type = other DNA
gccagttatccgctctatctttgaggcccacgtgcactacgggtggggtacatcccgacgccgagttgattgaggccaat

SEQ ID NO: 135812 - DNA, 80 bp, synthetic construct
  source 1..80: mol_type = other DNA
atcaaaaacaagtttccctccgtactttttgatgcgtttcttaccttgcgactccataaggcggcgtcctttctctgtga

SEQ ID NO: 135813 - DNA, 80 bp, synthetic construct
  source 1..80: mol_type = other DNA
gcatataaataggacagccctcaattgcaatgatagcctaaatactgggttcttggctgccttgttctacaccaacaggt

SEQ ID NO: 135814 - DNA, 80 bp, synthetic construct
  source 1..80: mol_type = other DNA
agcccaagctccccccccatcgtgggaccagatgtggaagtgcttgatccgcctcaagcccacccttcatgggccaacac

SEQ ID NO: 135815 - DNA, 80 bp, synthetic construct
  source 1..80: mol_type = other DNA
ttgtgcagaacgtagcagggggaaagtacgttcaagcggcaatcttgagagctggatcttggacgggcacctacatctat

SEQ ID NO: 135816 - DNA, 80 bp, synthetic construct
  source 1..80: mol_type = other DNA
gcgggtcgacgtgacgttcctggacatcctggcgacccccccggccctcaccgagccgatttccctgcggcagttcccgc

SEQ ID NO: 135817 - DNA, 80 bp, synthetic construct
  source 1..80: mol_type = other DNA
tagcaagaccatcagcggcccgaagggacctgtcaatcaaatgtataccaatgttgaccaagacctggtgggatggccag

SEQ ID NO: 135818 - DNA, 80 bp, synthetic construct
  source 1..80: mol_type = other DNA
tcgagcttcactggtggatatagcgctgtcgtcatattacattaacggtgctccaccagacacgctctcgctgttagagg

SEQ ID NO: 135819 - DNA, 80 bp, synthetic construct
  source 1..80: mol_type = other DNA
cgtgtacgattactggaacaatgggacacttcatcctggcccgatgtccaaaaggggaaactctgacggtgggattcact

SEQ ID NO: 135820 - DNA, 80 bp, synthetic construct
  source 1..80: mol_type = other DNA
ctcttcaggtcatgctgtggggctcttccgcgccgcggtatgcacgaggggagtggcaaaagctcttgactttgtccccg

SEQ ID NO: 135821 - DNA, 80 bp, synthetic construct
  source 1..80: mol_type = other DNA
tactttaatgctccaaagctagcacccaaaaactgcacgctggaataagctctctttgtgtcaccggtgattccttccaa

SEQ ID NO: 135822 - DNA, 80 bp, synthetic construct
  source 1..80: mol_type = other DNA
tgatctgtttgaacagcaaaacctttgaaaaggactattccagagtgagggatgagaagcctgactttgtggtgacgact

SEQ ID NO: 135823 - DNA, 80 bp, synthetic construct
  source 1..80: mol_type = other DNA
agctgccgccgccacccacggacgaggaggaatactgggacagtcaggcagaggaggttttggacgaggaggaggaggac

SEQ ID NO: 135824 - DNA, 80 bp, synthetic construct
  source 1..80: mol_type = other DNA
cggcaagggcggcaccggccgcgggtcggcgccccaggacccgggagcgcgaccgcagcagcttcgccaggcgtttcaga

SEQ ID NO: 135825 - DNA, 80 bp, synthetic construct
  source 1..80: mol_type = other DNA
gcgcgggcggcaagcgcgcgctcgtatgggttgagtggaggaccccatggcatggcgtgggtgagcgcggaggcgtacat

SEQ ID NO: 135826 - DNA, 80 bp, synthetic construct
  source 1..80: mol_type = other DNA
caatctcctgtggaggcaggagatgggtggaaccatcaccagggtggagtcagagaacaaaattgtggtgctcgattcct

SEQ ID NO: 135827 - DNA, 80 bp, synthetic construct
  source 1..80: mol_type = other DNA
gaggggtgttccacacaatgtggcatgtcacaagaggagctttccttgtcaggaatggcaagaagttgattccatcttgg

SEQ ID NO: 135828 - DNA, 80 bp, synthetic construct
  source 1..80: mol_type = other DNA
tttactctatgtgggatatgctccaggcgggcaagattatacccacaaccttcaaatcaaactttcctggacgttagcgc

SEQ ID NO: 135829 - DNA, 80 bp, synthetic construct
  source 1..80: mol_type = other DNA
caacaaatcgcggtgttggataccggtcacacctaacatcgccgtgagggagcgcggggcgctcactaagggcctgcgga

SEQ ID NO: 135830 - DNA, 80 bp, synthetic construct
  source 1..80: mol_type = other DNA
aatagacaccaccattatggcgaagaatgaagtcttctgtgtgaagcctgaaaaggggggtcgcaagccagctcgactca

SEQ ID NO: 135831 - DNA, 80 bp, synthetic construct
  source 1..80: mol_type = other DNA
cggacgtcaagcccgacattaagcctcgcgtgctcaagcgggttaaaaagcgagaaaaaaaagaggaaaaggaggaagca

SEQ ID NO: 135832 - DNA, 80 bp, synthetic construct
  source 1..80: mol_type = other DNA
ctgctccgtagattacatcagtgggtcaatgaagacacggccaccccttgcgctacctcatggttacgcgacgtgtggga

SEQ ID NO: 135833 - DNA, 80 bp, synthetic construct
  source 1..80: mol_type = other DNA
cacagttagactgagagcttacttatccacaccggggttacctgtttgccaagaccatctggagttttgggaaggcgtct

SEQ ID NO: 135834 - DNA, 80 bp, synthetic construct
  source 1..80: mol_type = other DNA
aaatgagccctctcctatattctaccaccgaactagcaatccttccctgctccttcaccaccatgcctgcattatccacc

SEQ ID NO: 135835 - DNA, 80 bp, synthetic construct
  source 1..80: mol_type = other DNA
agggaggagtgttcagtccatatctgacatctcgtcttccttcctgggcaggagttcgtcagaatgtagtgggctccacc

SEQ ID NO: 135836 - DNA, 80 bp, synthetic construct
  source 1..80: mol_type = other DNA
accagtggatgaataggctcatagcttttgcttcacgaggaaatcacgtgtctcctacgcactacgtgccggaaacagac

SEQ ID NO: 135837 - DNA, 80 bp, synthetic construct
  source 1..80: mol_type = other DNA
cagcagtcagtagaaactgagggctgtctgcactttccctgccagggtccagaggacctttgcacccttattaaaacttt

SEQ ID NO: 135838 - DNA, 80 bp, synthetic construct
  source 1..80: mol_type = other DNA
tgctcatagcccaagcggaggcggccctggaaaacctcatagttctcaatgctgcttccgccgccagccatcagggttgg

SEQ ID NO: 135839 - DNA, 80 bp, synthetic construct
  source 1..80: mol_type = other DNA
actatatatacagggaccgggggcgccatgttaggtggcgcggaaccccctgaccctatatatacagggaccgtggtcgc

SEQ ID NO: 135840 - DNA, 80 bp, synthetic construct
  source 1..80: mol_type = other DNA
aacagggctgggtgcagcacgcagcgataggcgagcagggccagggcgaagtccggcgacagctggttgttgaaatactg

SEQ ID NO: 135841 - DNA, 80 bp, synthetic construct
  source 1..80: mol_type = other DNA
gcgctgccgttttttcagatggctcttacttgccgaatgcgcatacccattccaggatacagaggacgaccccgccggag

SEQ ID NO: 135842 - DNA, 80 bp, synthetic construct
  source 1..80: mol_type = other DNA
tctcccattggtcccatccaagttctaaggcaagttgtaatgcgtgcgctacaaggctactgtccccagacagtttcatt

SEQ ID NO: 135843 - DNA, 80 bp, synthetic construct
  source 1..80: mol_type = other DNA
gacatgatgctaaattggtcaccaactcttaccatgatcctcgcctacgctgctcgtgttcctgagctggttcttgaagt

SEQ ID NO: 135844 - DNA, 80 bp, synthetic construct
  source 1..80: mol_type = other DNA
gggccgtagaccacatccactccgtgtggaaggacctcctggaagaccagcaaacacctatagacaccaccatcatggca

SEQ ID NO: 135845 - DNA, 80 bp, synthetic construct
  source 1..80: mol_type = other DNA
aacccgaggtcgagaagcctcagaagaaaccggtgatcaaacccctgacagaggacagcaagaaacgcagttacaaccta

SEQ ID NO: 135846 - DNA, 80 bp, synthetic construct
  source 1..80: mol_type = other DNA
gcaggtcgccagcggcaccgcgcctttcggcggtgaaattatcgatgagcgtggtggttatgccgatcgcgtcacactac

SEQ ID NO: 135847 - DNA, 80 bp, synthetic construct
  source 1..80: mol_type = other DNA
gtggcaggataactttgactggcaagcctgctgttgtccctgatcgcgagatcttgtaccagcaatttgacgagatggaa

SEQ ID NO: 135848 - DNA, 80 bp, synthetic construct
  source 1..80: mol_type = other DNA
caggacacagaatggcttgggacatgatgatgaattggagccccaccgcgacgctggtcctcgcccaactcatgaggatc

SEQ ID NO: 135849 - DNA, 80 bp, synthetic construct
  source 1..80: mol_type = other DNA
tatggggcaaaagatgtccggagtcatactagcaaggccattaaccacatcagctccgtgtgggaggacttgttagaaga

SEQ ID NO: 135850 - DNA, 80 bp, synthetic construct
  source 1..80: mol_type = other DNA
atgtgaatgaaaatgaaaatgagctggtgctggactgtccagagaaccctgggcgaggttgtcgggcttgtgatttccat

SEQ ID NO: 135851 - DNA, 80 bp, synthetic construct
  source 1..80: mol_type = other DNA
acagcgggggagacatttatcacagcgtgtctcgtgcccggccccgctggttctggttttgcctactcctgctcgctgcg

SEQ ID NO: 135852 - DNA, 80 bp, synthetic construct
  source 1..80: mol_type = other DNA
aattccccttgagtacatcaaagggggcagacacctcatcttctgtcattccaaaaagaagtgcgatgagctggccaaac

SEQ ID NO: 135853 - DNA, 80 bp, synthetic construct
  source 1..80: mol_type = other DNA
attaataaactccccgggcagctcgcttaagttcatgtcgctgtccagctgctgtccaacttgcggttgctcaacgggcg

SEQ ID NO: 135854 - DNA, 80 bp, synthetic construct
  source 1..80: mol_type = other DNA
tcggctcgtcttgggaaggaggtgctactaggccctgcggataattaccgctccatggggtggaggttgctggcgccgat

SEQ ID NO: 135855 - DNA, 80 bp, synthetic construct
  source 1..80: mol_type = other DNA
tcagtctagacatgaagccagccacggcctgggcactgtacgcggctgcgacaatggtcatgacaccattaataaaacac

SEQ ID NO: 135856 - DNA, 80 bp, synthetic construct
  source 1..80: mol_type = other DNA
gcctccgggaccggcgtcgctgtcgtcgggcggtaccgcgacgattatatcatcttcgccttggagcacttttttctccg

SEQ ID NO: 135857 - DNA, 80 bp, synthetic construct
  source 1..80: mol_type = other DNA
cagcttgggaaaccgctaggcgttcgcccgtcaactcttggctcggtaacatcattgcatatgctcccactctatgggtg

SEQ ID NO: 135858 - DNA, 80 bp, synthetic construct
  source 1..80: mol_type = other DNA
ctaccattaccagttggtctggtgtcaaaaataataataaccgggcaggggggatccgaggtaacccttgttccgcttcc

SEQ ID NO: 135859 - DNA, 80 bp, synthetic construct
  source 1..80: mol_type = other DNA
atggatgggaaaacctgttatccaaagcaaaaattgacgctgcggaaagaaaacgagtatatcttgaacatctgtctaag

SEQ ID NO: 135860 - DNA, 80 bp, synthetic construct
  source 1..80: mol_type = other DNA
ctcactcctcttgctgactgggcctgcaacggacttcgagatcttgctgttgcggtggaacctgttgtcttctctccgat

SEQ ID NO: 135861 - DNA, 80 bp, synthetic construct
  source 1..80: mol_type = other DNA
gagtggttcgagttcactttgccagagggcaacttttcggtcactatgactattgacttgatgaacaatgccatcataga

SEQ ID NO: 135862 - DNA, 80 bp, synthetic construct
  source 1..80: mol_type = other DNA
cctagaaccaactgaacaggggcaaattggtatggtcttactggccattatatccatcctcacactcagcccgacttaca

SEQ ID NO: 135863 - DNA, 80 bp, synthetic construct
  source 1..80: mol_type = other DNA
ctgcggacctgttgtgccccactgactgctttaggaaacatcctgaggccacttacaccaaatgtggggccgggccatgg

SEQ ID NO: 135864 - DNA, 80 bp, synthetic construct
  source 1..80: mol_type = other DNA
tgtcaaacctcggaatcaacgctgtagcgtattaccggggtctcgatgtgtccgtcataccaactggcggggacgtcgtt

SEQ ID NO: 135865 - DNA, 80 bp, synthetic construct
  source 1..80: mol_type = other DNA
gttcaccgtaggcctcaatttctttgtggtcggctcccagctcccttgtgaccctgagccggacaccgaggcgctagcct

SEQ ID NO: 135866 - DNA, 80 bp, synthetic construct
  source 1..80: mol_type = other DNA
cagcggcccgcgtcaccgcgatcctgagcagcctcaccatcactcaacttctgaagagactccaccaatgggtgaacacc

SEQ ID NO: 135867 - DNA, 80 bp, synthetic construct
  source 1..80: mol_type = other DNA
agctgcccctggcggtaatgggaccagcttatggtttccagtactcgcctaagcagcgcgtagaacgtctcctccaaatg

SEQ ID NO: 135868 - DNA, 80 bp, synthetic construct
  source 1..80: mol_type = other DNA
ggtccagaggacctctgcactcttattaaaaccatgtgtggtattagagatcttattccattcaactaacataaacacac

SEQ ID NO: 135869 - DNA, 80 bp, synthetic construct
  source 1..80: mol_type = other DNA
agaatcttaaggctcatctgaccatgcagactctgctcatactgctattcctcctctcccctgccctcgctgatgatgat

SEQ ID NO: 135870 - DNA, 80 bp, synthetic construct
  source 1..80: mol_type = other DNA
ccaggacgtgcttaaggaggttaaggcggcggcgtcaaaggtgaaggctaacttgctatccgtagaggaagcttgcagcc

SEQ ID NO: 135871 - DNA, 80 bp, synthetic construct
  source 1..80: mol_type = other DNA
gcttcccggtttaatccccggtaacacagaaaaaagcctgactttttggggtgtatttaccaatcgggtatccctttcat

SEQ ID NO: 135872 - DNA, 80 bp, synthetic construct
  source 1..80: mol_type = other DNA
tgggaaggccatccccctagagtacatcaaggggggaagacacctcattttttgtcattctaagaagaaatgcgacgagc

SEQ ID NO: 135873 - DNA, 80 bp, synthetic construct
  source 1..80: mol_type = other DNA
gcctcctatactaaatttcccccaggaaactgggggggcggttcttgttctccctgagccaccgccatccaggcacagat

SEQ ID NO: 135874 - DNA, 80 bp, synthetic construct
  source 1..80: mol_type = other DNA
cctcggcgacctggacaccatcaaggggcggctcggcctggatgcccggccgatgatggccagcatgtggatcagctgct

SEQ ID NO: 135875 - DNA, 80 bp, synthetic construct
  source 1..80: mol_type = other DNA
tgcgcgtcgtagaggagactcaacggcgagtttgctcagtcccagaccactgtcctgcctcaaaggctcctctggaggtc

SEQ ID NO: 135876 - DNA, 80 bp, synthetic construct
  source 1..80: mol_type = other DNA
agcgggcctgtcctccagatgtacacatcagttgatgaggacttggttggttggcctgctcccccaggttccaagtcgct

SEQ ID NO: 135877 - DNA, 80 bp, synthetic construct
  source 1..80: mol_type = other DNA
acctgggtacccctggcccctgtatgcgaacgagggctgcgggtgcgcgggatggctcctgtctccccgcggttctcgtc

SEQ ID NO: 135878 - DNA, 80 bp, synthetic construct
  source 1..80: mol_type = other DNA
atcaatcagctgtttcgggtcctgcgggtcgcccgggacccccacggcagtgccaaccgcctgcgccacctgatacgcga

SEQ ID NO: 135879 - DNA, 80 bp, synthetic construct
  source 1..80: mol_type = other DNA
ggaggtgttgcaaatcagcctgacattattatgtatgctgaaaacgtgaatctggaaacaccagatactcacgttgttta

SEQ ID NO: 135880 - DNA, 80 bp, synthetic construct
  source 1..80: mol_type = other DNA
gtccacgacggaatggcagatcctaccctgctccttcaccaccttgccagctctgtcgaccggcctaatccatctccacc

SEQ ID NO: 135881 - DNA, 80 bp, synthetic construct
  source 1..80: mol_type = other DNA
ggacatgaggccctattgttggcattatccacccaaacaatgtggcatcgttcctgctcagaccgtgtgtggcccagtat

SEQ ID NO: 135882 - DNA, 80 bp, synthetic construct
  source 1..80: mol_type = other DNA
ttgtcccccgcgtaaacgcccccggcggcgcgtccccggtggttgcagggccggcggaagtagttgacgtcggtcgacac

SEQ ID NO: 135883 - DNA, 80 bp, synthetic construct
  source 1..80: mol_type = other DNA
gaagtatcgcacgctgggcttcgggatcgaccggataaatgcccggaacgcctccggggaccggtgtgccatcaagtcct

SEQ ID NO: 135884 - DNA, 80 bp, synthetic construct
  source 1..80: mol_type = other DNA
cccgccaacaccgcatctgcgtcagccgcccccatggcgcccccgctgacggcctggtgaaccagggcgccctggcggag

SEQ ID NO: 135885 - DNA, 80 bp, synthetic construct
  source 1..80: mol_type = other DNA
accggagcacgcccgccatgcgcgccgcccgggctctgctgcgccgtgccagacgcactggccgccgggccatgttgcaa

SEQ ID NO: 135886 - DNA, 80 bp, synthetic construct
  source 1..80: mol_type = other DNA
ccaggggacaaatacatcctctggctctttgagaacacttccttcgcagtctccaacacctgtgccaacgacggtattga

SEQ ID NO: 135887 - DNA, 80 bp, synthetic construct
  source 1..80: mol_type = other DNA
cttaccaacgactgtgcaaaccgcagtattgtgtatgaggccgatgacgttattctgcacacacctggctgtataccttg

SEQ ID NO: 135888 - DNA, 80 bp, synthetic construct
  source 1..80: mol_type = other DNA
ctttaaaacgtggctcaaagccaagctgttgcctcgcatgccgggcgtccccttcctctcctgccagaggaggtacaagg

SEQ ID NO: 135889 - DNA, 80 bp, synthetic construct
  source 1..80: mol_type = other DNA
agaccaatcccgcccgcctaatgcggagcttaccgcctgcgtcattacccagggccatattcttggccaattgcaagcca

SEQ ID NO: 135890 - DNA, 80 bp, synthetic construct
  source 1..80: mol_type = other DNA
tggggacgacttagtcgtcatagctgaaagcgatggcgttcctgaggacgaagctgctctgcgagcattcacggatgcta

SEQ ID NO: 135891 - DNA, 80 bp, synthetic construct
  source 1..80: mol_type = other DNA
gttgtggcgccaggagatgggaggtaacatcactcgggtggagtcggagaacaaagtggtcatcctcgactcgtttgatc

SEQ ID NO: 135892 - DNA, 80 bp, synthetic construct
  source 1..80: mol_type = other DNA
acacccacagattcaacagctctgggtgtcctgagcgaacagctagctgcaagcgtctctccgacatgtggcagggctgg

SEQ ID NO: 135893 - DNA, 80 bp, synthetic construct
  source 1..80: mol_type = other DNA
acccgaactcgtgaaagatggtgttgatgggtcgactcagaaacgcccccgagagcttaacgtacatgttctgcgccgcg

SEQ ID NO: 135894 - DNA, 80 bp, synthetic construct
  source 1..80: mol_type = other DNA
gattcataccacacggcccgtgtggggaccccgtgggttaatggagacgttcaaaccagcaccctctaccctctaatatc

SEQ ID NO: 135895 - DNA, 80 bp, synthetic construct
  source 1..80: mol_type = other DNA
tgatgctgctggtttcgcaagtcgaggcggcgatggctaatttgatcaacatcaacgctgcggcggccgccggctgccac

SEQ ID NO: 135896 - DNA, 80 bp, synthetic construct
  source 1..80: mol_type = other DNA
tctgcgaaagtctcggagatttgccccggccctgcccatttgggcacggccggactacaaccccccgttgctggagacgt

SEQ ID NO: 135897 - DNA, 80 bp, synthetic construct
  source 1..80: mol_type = other DNA
tgtccgtctgcagggcgacggacatcagccccccgcgcggcgagccggtcagcatctcgcagccccggaagataacgttg

SEQ ID NO: 135898 - DNA, 80 bp, synthetic construct
  source 1..80: mol_type = other DNA
gacgacgacgacggcgccggcggtggtggcggcggccggcgcgcggaggcaggccgcgtggccgtggagtgcctggccgc

SEQ ID NO: 135899 - DNA, 80 bp, synthetic construct
  source 1..80: mol_type = other DNA
aaggcgcttgagtttgtgccttgtgaggccatggaatcgaccacgcggtcccccaccttcactgacaactccacaccacc

SEQ ID NO: 135900 - DNA, 80 bp, synthetic construct
  source 1..80: mol_type = other DNA
tcaggtcaccgcatggcttgggatatgatgatgaactggtcacctacaacagccctagtggtgtcgcagttgctccggat

SEQ ID NO: 135901 - DNA, 80 bp, synthetic construct
  source 1..80: mol_type = other DNA
ggggggggagggccgccgtctgtggcaagtacctcttcaactgggcagtaaaaactaagctaaaactcactccaaatccg

SEQ ID NO: 135902 - DNA, 80 bp, synthetic construct
  source 1..80: mol_type = other DNA
agcatctgcgggtcggcctcttggccgggtggtgcggacgcccgggcgcgggcgtctagggcgcgaagatccacgagcag

SEQ ID NO: 135903 - DNA, 80 bp, synthetic construct
  source 1..80: mol_type = other DNA
gcacagcttcgtacttctgttttaagaaacgaacacgctgccaacaaatgttcgcaaaccgacggtttcgttgtcgcgct

SEQ ID NO: 135904 - DNA, 80 bp, synthetic construct
  source 1..80: mol_type = other DNA
aaggctatcccccttgaggtaatcaaggggggcaggcacctcatcttctgccactcgaagaagaagtgcgacgagctcgc

SEQ ID NO: 135905 - DNA, 80 bp, synthetic construct
  source 1..80: mol_type = other DNA
gtgagtgctctcgtttcaggcaacgtgagtggcgctttgttggtatttccttggtgggaaagttttgaagcgttaacgtg

SEQ ID NO: 135906 - DNA, 80 bp, synthetic construct
  source 1..80: mol_type = other DNA
tggttaatttactccctgccatcctctctcccggtgccctggtcgtcggggtcgtgtgcgcagcaatactgcgtcgacat

SEQ ID NO: 135907 - DNA, 80 bp, synthetic construct
  source 1..80: mol_type = other DNA
ccgcagagatcctgcggaagtctcggaggttcgctccggccctgcccatctgggcacggccggactacaaccccccgttg

SEQ ID NO: 135908 - DNA, 80 bp, synthetic construct
  source 1..80: mol_type = other DNA
ttgacgactcagtcgtatcacaagcgctggccgagcttgcccagaagagcttccccaccaacttggacaactcatccacc

SEQ ID NO: 135909 - DNA, 80 bp, synthetic construct
  source 1..80: mol_type = other DNA
ctgggcagccaggaaggcgcgatggaaacccataccgcgctgaccggcgcgaccgaaattcagaacagcggcggcaccag

SEQ ID NO: 135910 - DNA, 80 bp, synthetic construct
  source 1..80: mol_type = other DNA
tcctgacaagcgcgccatacttcgtcagggcgcaagctctgttgaggatatgtgccgccgtaagacatctctcgggtggc

SEQ ID NO: 135911 - DNA, 80 bp, synthetic construct
  source 1..80: mol_type = other DNA
tatgatcacctctccccaatgtcaggttgggctgctagtgggctacgcgacctcgcggttgctgtagaacccattgtttt

SEQ ID NO: 135912 - DNA, 80 bp, synthetic construct
  source 1..80: mol_type = other DNA
acctgtcgcggtcgtttaaaactttatggatgttttccaagacccggtacaggtgggcttggatgttcaaatacataggc

SEQ ID NO: 135913 - DNA, 80 bp, synthetic construct
  source 1..80: mol_type = other DNA
gttcataattttgtccagtccccaccaggtgagttatcaatttcccgtaagaagaatccaggtgatattttgttatgttt

SEQ ID NO: 135914 - DNA, 80 bp, synthetic construct
  source 1..80: mol_type = other DNA
cagcgcagatactacctgactagagacccgaccactccacttgcccgggctgcctgggaaacagcgagacactcccccat

SEQ ID NO: 135915 - DNA, 80 bp, synthetic construct
  source 1..80: mol_type = other DNA
ggcaaaaaataaaattgtaagcaatgtgtatcttggaggtaaaattgatcaaccatgtgttattataatttcttttaatg

SEQ ID NO: 135916 - DNA, 80 bp, synthetic construct
  source 1..80: mol_type = other DNA
tcataacccacgatcgcagttgcctgcgcgtgtccgaccgtgaattcattacgtacatctacctggcccattttgagtgt

SEQ ID NO: 135917 - DNA, 80 bp, synthetic construct
  source 1..80: mol_type = other DNA
taggtagtataggtctaggcaagatactggtggacgtcctggccgggtacggtgcaggtatctcgggagccctcgtcgcc

SEQ ID NO: 135918 - DNA, 80 bp, synthetic construct
  source 1..80: mol_type = other DNA
caccagttggcatggtataaatcaccggttcgcaccccaaaccatgtccggcagggggatggggtggcgaatgcggaggt

SEQ ID NO: 135919 - DNA, 80 bp, synthetic construct
  source 1..80: mol_type = other DNA
ccgggtgatgggttggcgcctgttggccccaatcaccgcatatgcccaacaaactagaggcctttttgggactattgtga

SEQ ID NO: 135920 - DNA, 80 bp, synthetic construct
  source 1..80: mol_type = other DNA
ggagaagaaaatcatcacgtggggggcggacactgccgcctgtggggacatcctctctggactgcctgtgtcagccagga

SEQ ID NO: 135921 - DNA, 80 bp, synthetic construct
  source 1..80: mol_type = other DNA
catgaggatcgttgggcctaaaacctgtagcaacacgtggtacgggacattccccgtcaacgcgtacaccacgggcccct

SEQ ID NO: 135922 - DNA, 80 bp, synthetic construct
  source 1..80: mol_type = other DNA
ccatcgccgcgttcaactttaatttttcggccccgggcatgctcatctgcctgaccgtgctgttcgccattctcgtcgta

SEQ ID NO: 135923 - DNA, 80 bp, synthetic construct
  source 1..80: mol_type = other DNA
tgtcatctgaccagagtgcgctgtctgaatttattaagtttgctgaaggtaggaggggagctgctgaagtgctagttgtg

SEQ ID NO: 135924 - DNA, 80 bp, synthetic construct
  source 1..80: mol_type = other DNA
tggagatgtgattggattgtatgggaacggcgtcatcatgcctaatggttcatacataagcgccattgtgcaaggagaga

SEQ ID NO: 135925 - DNA, 80 bp, synthetic construct
  source 1..80: mol_type = other DNA
gttttgggtgcgcaccagccgcttggactcgatatcccgggtggagccttcgcatgtcgcggtgaggtaggttaggaaca

SEQ ID NO: 135926 - DNA, 80 bp, synthetic construct
  source 1..80: mol_type = other DNA
aaggtatttgtggagggtagtagtgatccaggacctagttcagactcgggactatcaataaccagtcctgatccacctgc

SEQ ID NO: 135927 - DNA, 80 bp, synthetic construct
  source 1..80: mol_type = other DNA
atgctgtttttcacatgtatattgagtgtgagttttgtgcttcttattataggtcctgtgtctgatgctgatgaatcacc

SEQ ID NO: 135928 - DNA, 80 bp, synthetic construct
  source 1..80: mol_type = other DNA
ccctggctcacgccacggtgcttgatcgactacccatatcggctgtggcactacccttgcactgtcaacttttccatctt

SEQ ID NO: 135929 - DNA, 80 bp, synthetic construct
  source 1..80: mol_type = other DNA
tcctgggcatagggactgtgttggaccaggcagggacagccggggtaaggctcacagtgcttgctacggcaactccccct

SEQ ID NO: 135930 - DNA, 80 bp, synthetic construct
  source 1..80: mol_type = other DNA
tcgcgcgtcagccgcagctcgttgttctcccccagctgcccctcgaccaacgggccctggtcttcgtaccgaaagctgac

SEQ ID NO: 135931 - DNA, 80 bp, synthetic construct
  source 1..80: mol_type = other DNA
aaaacatgtataataaaaagtcactataaacgtattctctacaatactttattcgcgaataatacacactacctttgggt

SEQ ID NO: 135932 - DNA, 80 bp, synthetic construct
  source 1..80: mol_type = other DNA
aggagacttagattagacaatggtatatgggaaagcaacctcttatcgttgtccacccccggaattcatattgaggcgct

SEQ ID NO: 135933 - DNA, 80 bp, synthetic construct
  source 1..80: mol_type = other DNA
aaaagtgattcatgtggtttcccatcagcgccgcccctggcctgtttttgagcataacatgcttatgcgttgtaccatgc

SEQ ID NO: 135934 - DNA, 80 bp, synthetic construct
  source 1..80: mol_type = other DNA
cctcgcacctgcagcaatgtgtggcacggtacttttcccatcaacgccacgacgaccggaccgagcgtacctatccccgc

SEQ ID NO: 135935 - DNA, 80 bp, synthetic construct
  source 1..80: mol_type = other DNA
tgcaagagacatagtttatggaactatatatcttggtggaaaacctgatcagccagcagtcattaaaactacctttaacc

SEQ ID NO: 135936 - DNA, 80 bp, synthetic construct
  source 1..80: mol_type = other DNA
tgtgaaaatggggaatgagattgccctttgtctacaacgtgccggcaaaaaagtagtccaactgaacagaaagtcgtatg

SEQ ID NO: 135937 - DNA, 80 bp, synthetic construct
  source 1..80: mol_type = other DNA
gcgagaccaacgcgggcctggcgacccagttgcaggagcgcgaccgcgagctccggcgcgcaacatcgggtgccctggag

SEQ ID NO: 135938 - DNA, 80 bp, synthetic construct
  source 1..80: mol_type = other DNA
cgggttcggctggttcgaccccgggggcttgccgttgggaaagatgaccgcgtggaactgcttcagcaggaagcccagcg

SEQ ID NO: 135939 - DNA, 80 bp, synthetic construct
  source 1..80: mol_type = other DNA
gcagggtctgcggacgcacatcgatatggttgtgatgtccgccaccttctgctctgctctctacgtgggggacctctgtg

SEQ ID NO: 135940 - DNA, 80 bp, synthetic construct
  source 1..80: mol_type = other DNA
gtaggatagcacctgccgccacgaatgctggcgcgaacgtagtcatatagctcatgtgaaggcgccaggatgttgggccc

SEQ ID NO: 135941 - DNA, 80 bp, synthetic construct
  source 1..80: mol_type = other DNA
cagtgggatcggtaagctttttagtgtgggccccaaacagaaattgcagctaatcaacaccaatggctcgtggcacatca

SEQ ID NO: 135942 - DNA, 80 bp, synthetic construct
  source 1..80: mol_type = other DNA
ggcgcccgcgtcccccgagaaaaactccgcgtatgcccgcgacaggaactgggcgtagttcgtgccctcctccgggtagc

SEQ ID NO: 135943 - DNA, 80 bp, synthetic construct
  source 1..80: mol_type = other DNA
gaggtccgcgggttcatggccaggcagctctgggtgacggtccgccagcggtcgatccactccacggcacactggcggac

SEQ ID NO: 135944 - DNA, 80 bp, synthetic construct
  source 1..80: mol_type = other DNA
gcatcgatcccaacatcaggaccggagtcaggaccatcacaacaggaggcccgattacctactctacctatggcaaattt

SEQ ID NO: 135945 - DNA, 80 bp, synthetic construct
  source 1..80: mol_type = other DNA
ccggataatgctgtcagttcatggctcccagcacagtgggatgatcgttaatgacacaggacatgaaactgatgagaata

SEQ ID NO: 135946 - DNA, 80 bp, synthetic construct
  source 1..80: mol_type = other DNA
atgatgatgcgtcaaaacgcgtcatggggatactcagctcccttaccatcaccagcctcataaaacgagtactggcctgg

SEQ ID NO: 135947 - DNA, 80 bp, synthetic construct
  source 1..80: mol_type = other DNA
agcgatgggtcctggtccaccgtgagcagtgacggcgggacagaagacgtggtgtgttgctcgatgtcctacacctggac

SEQ ID NO: 135948 - DNA, 80 bp, synthetic construct
  source 1..80: mol_type = other DNA
tatgtcggtggtcctatgtacaactcaaagggccaatgttgtggataccgtcgatgcagggccagcggggtccttccaac

SEQ ID NO: 135949 - DNA, 80 bp, synthetic construct
  source 1..80: mol_type = other DNA
ggggtaggcatctacctgctccccaaccgatagacggggacctaaacactccggcccactaggccatcctgtttttttcc

SEQ ID NO: 135950 - DNA, 80 bp, synthetic construct
  source 1..80: mol_type = other DNA
ccggtagtcaaaatgagacgtgcggtgggagtgccgccggtgatggcgtacgccgagggtcctcctccttcttacgaaag

SEQ ID NO: 135951 - DNA, 80 bp, synthetic construct
  source 1..80: mol_type = other DNA
ctttgacatctatggagtgacctattccgtctctccacttgatctcccagcaatcattcaacgactccatggcatggcag

SEQ ID NO: 135952 - DNA, 80 bp, synthetic construct
  source 1..80: mol_type = other DNA
gtgatctattaacaggacctgtgcaagacgatctcccgtttttatacgtatgtcatcacccgtgagattatatacgtaga

SEQ ID NO: 135953 - DNA, 80 bp, synthetic construct
  source 1..80: mol_type = other DNA
gagcttcccaccactgaggacatggtcaacctattacccgccatactgtctccgggcgctctcgtcgtcggtgtgatatg

SEQ ID NO: 135954 - DNA, 80 bp, synthetic construct
  source 1..80: mol_type = other DNA
ggcatgcttggcaaaagcaaacccaaagatccggcgttctatgggatgtacccagtcctccagagacacagaaagcagaa

SEQ ID NO: 135955 - DNA, 80 bp, synthetic construct
  source 1..80: mol_type = other DNA
gggggccccatgttcaactcccggggccaatcctgtggctaccgcaggtgccgagctagcggtgttctcaccactagtct

SEQ ID NO: 135956 - DNA, 80 bp, synthetic construct
  source 1..80: mol_type = other DNA
gactctggagcgtaagcatctgcaccgcagttagcacaaacagtttcgcattccaccgaccaggtcagctcaggataaga

SEQ ID NO: 135957 - DNA, 80 bp, synthetic construct
  source 1..80: mol_type = other DNA
actccttatgaaaatgcagttccgtttatgccaaatctaaaagcttatccaaaaccaactaaaactgcttcagataaagc

SEQ ID NO: 135958 - DNA, 80 bp, synthetic construct
  source 1..80: mol_type = other DNA
acggagggaattgaaacgatctcatgttcccgtcccaccatgaccccgttctctccaaatagtagatcgtcaggctgact

SEQ ID NO: 135959 - DNA, 80 bp, synthetic construct
  source 1..80: mol_type = other DNA
tggcccggagccactgggtgtggaccagccgcgcgtggcggcccaacatggcccctgtagccggtggcgtgggatcgcgc

SEQ ID NO: 135960 - DNA, 80 bp, synthetic construct
  source 1..80: mol_type = other DNA
gacgcaggtcctggccctgcatcccggggcgtttcgcggcgtccgtgtggcggtcgagggaaatagcagccaggactcgg

SEQ ID NO: 135961 - DNA, 80 bp, synthetic construct
  source 1..80: mol_type = other DNA
gggatcaattatgcgacagggaatcttcccggttgctctttctctatcttcttcttggcacttctttcgtgcctgactgt

SEQ ID NO: 135962 - DNA, 80 bp, synthetic construct
  source 1..80: mol_type = other DNA
ctagtcacgcaatggtgttgccgctcctgcacaatgacccccttaaggttcttaggagaagatgggtgctggtatgggat

SEQ ID NO: 135963 - DNA, 80 bp, synthetic construct
  source 1..80: mol_type = other DNA
gtccttttgggtttcactgaaactggcccgcgccccacccctgcgcgatgtggataaaaagccagcgcgggtggtttagg

SEQ ID NO: 135964 - DNA, 80 bp, synthetic construct
  source 1..80: mol_type = other DNA
ctgggggccgagccggtttatatattcagctacgacgcatacacgcacgatggccgtgccgacgggcccacggagcaaga

SEQ ID NO: 135965 - DNA, 80 bp, synthetic construct
  source 1..80: mol_type = other DNA
acaaaacccacgttttacgtctgcccaccgccaacaggctccacaatcgtacgattagaaccacctcggacatgtccgga

SEQ ID NO: 135966 - DNA, 80 bp, synthetic construct
  source 1..80: mol_type = other DNA
gcagcggctggctccggattcaacggacccggcgttttcataacctccgttacgggggtgtggttatgctttttatgcat

SEQ ID NO: 135967 - DNA, 80 bp, synthetic construct
  source 1..80: mol_type = other DNA
agccatcaaggtgttggctgaccttgcacgtacatctttcccatcggatatggcagcccagagcgaggagtcgggaaaag

SEQ ID NO: 135968 - DNA, 80 bp, synthetic construct
  source 1..80: mol_type = other DNA
tgatggcgtctaatgacgccacctcaagcgcaactggcgccaccggcgccgggcagttggtccccgagggcaatgctcca

SEQ ID NO: 135969 - DNA, 80 bp, synthetic construct
  source 1..80: mol_type = other DNA
atctatgaccatttggctcctcttcagacttgggctagtgacgggctccgcgacctcgcggttgctgtagagccgatcat

SEQ ID NO: 135970 - DNA, 80 bp, synthetic construct
  source 1..80: mol_type = other DNA
cctttggggcagctgccatgcccggtgttactgggaaaaagatagaagctgatgggctgcctattagaatagattcaact

SEQ ID NO: 135971 - DNA, 80 bp, synthetic construct
  source 1..80: mol_type = other DNA
ggcggtcccatgtacaacagcaaaggtgatctctgcgggcagcggcgatgccgcgctagcggagtgtacaccacgagctt

SEQ ID NO: 135972 - DNA, 80 bp, synthetic construct
  source 1..80: mol_type = other DNA
ttctgggtatagggactgtgctggaccaggcggaaacggctggggtcagacttactgtgcttgctacagcaactccccct

SEQ ID NO: 135973 - DNA, 80 bp, synthetic construct
  source 1..80: mol_type = other DNA
gaccaaaggccctattgctggcactacgcaccacgtgcgtgcggagtcgtgcctgcaaaggaggtatgtgggccagtata

SEQ ID NO: 135974 - DNA, 80 bp, synthetic construct
  source 1..80: mol_type = other DNA
gcaaaggcgccccccccctcgtgggacaccatgtggaaatgcctcatacggctcaagcctatgcttacgggcccaacacc

SEQ ID NO: 135975 - DNA, 80 bp, synthetic construct
  source 1..80: mol_type = other DNA
agctaaatgcttccatacttataacttaactagaggggaaaatattacattatcaggtgctggtttaaacacaacatggg

SEQ ID NO: 135976 - DNA, 80 bp, synthetic construct
  source 1..80: mol_type = other DNA
tgacttgtggaaacggaagcttaatggctgtaccaaggaggagttcttcgcctataggcgcactggcatcctggagacgg

SEQ ID NO: 135977 - DNA, 80 bp, synthetic construct
  source 1..80: mol_type = other DNA
gaatgccaaatcacttctgggaaaagacagttgccgctgcagacacactgtatctcctaggaaccagtgaggcaaacagt

SEQ ID NO: 135978 - DNA, 80 bp, synthetic construct
  source 1..80: mol_type = other DNA
cttccgagcagctgtgtgctctcggggcgtggccaaatccatcgatttcatccccgttgagacactcgacgttgttacaa

SEQ ID NO: 135979 - DNA, 80 bp, synthetic construct
  source 1..80: mol_type = other DNA
aacactgtcacatgcttcctgaaggcaaccgccgcttgtcgggcagccggcttcacagattatgacatgttggtctgcgg

SEQ ID NO: 135980 - DNA, 80 bp, synthetic construct
  source 1..80: mol_type = other DNA
accctggagttggccggatcttgacctgaagccaggagctgcctggacagtgtacgttggcattgttacaatgctctctc

SEQ ID NO: 135981 - DNA, 80 bp, synthetic construct
  source 1..80: mol_type = other DNA
catacccatcgttggagcccccgttgggggcgttgccagggccctggcgcatggcgtcagagtcctggaagatgggataa

SEQ ID NO: 135982 - DNA, 80 bp, synthetic construct
  source 1..80: mol_type = other DNA
tgacttcaagaactggttgtccaccaaactgtttccaaaaatgcccggcctccccttcatctcctgtcaaaaggggtaca

SEQ ID NO: 135983 - DNA, 80 bp, synthetic construct
  source 1..80: mol_type = other DNA
aggggcggcgcccgcggcggagcggccggttccggtggagggccgtggaaggtggcgcgcggtgctgccctgccgcccgc

SEQ ID NO: 135984 - DNA, 80 bp, synthetic construct
  source 1..80: mol_type = other DNA
ggcacatcaacaggacctccctcaactgcaatgacagcctcaacacagggttcctggctggcttgttatacgcccacaag

SEQ ID NO: 135985 - DNA, 80 bp, synthetic construct
  source 1..80: mol_type = other DNA
ggagtgaccaccgtcccccgtttcttcttggcgggcggaagcggtttggcttccatggttaaaagcggcggcgaggacgc

SEQ ID NO: 135986 - DNA, 80 bp, synthetic construct
  source 1..80: mol_type = other DNA
atgacagggagatatccgtgtccgccgattgcttcaggaggtgccccaagtttcctccggccctccctatatgggcgagg

SEQ ID NO: 135987 - DNA, 80 bp, synthetic construct
  source 1..80: mol_type = other DNA
ggacagtcacagtcccccattctaacatacaggagatagccctctctaccacgggagaggtccccttctacgggaaggcc

SEQ ID NO: 135988 - DNA, 80 bp, synthetic construct
  source 1..80: mol_type = other DNA
gacgtagtcatctgtgccacagatgctctcatgacagggtatacaggcgacttcgacagcgtgatcgactgcaatgtcgc

SEQ ID NO: 135989 - DNA, 80 bp, synthetic construct
  source 1..80: mol_type = other DNA
caggcggtgctgctgccgagccgcggggtcaagcgcgagggcgagagcatgtacccgaccatgcagatcatggtgcccaa

SEQ ID NO: 135990 - DNA, 80 bp, synthetic construct
  source 1..80: mol_type = other DNA
caacagtgactgagcgcgacatactcacagaggagtctatataccaatgctgccaactggaccccgtggcccgcaaggcc

SEQ ID NO: 135991 - DNA, 80 bp, synthetic construct
  source 1..80: mol_type = other DNA
gcgcgtcgacccgagggaaggtcctgggcacaaccaggatatccatggcctctttacggtaatgagggttgtgggtgtgc

SEQ ID NO: 135992 - DNA, 80 bp, synthetic construct
  source 1..80: mol_type = other DNA
gaggccccatgtacaacagtcagggccaaaagtgtgggactcgcagatgccgcgcaagcggcgtgcttaccacgagtctg

SEQ ID NO: 135993 - DNA, 80 bp, synthetic construct
  source 1..80: mol_type = other DNA
agttcaaacagaaggcgctcgggttgctgcagacggccaccaagcaagcggaggctgctgcccccgtggtggagtccaag

SEQ ID NO: 135994 - DNA, 80 bp, synthetic construct
  source 1..80: mol_type = other DNA
tgcacgtcaaccagcgagtcgtcgttgcgccggataaggaggtcctgtatgaggcttttgatgagatggaggaatgcgcc

SEQ ID NO: 135995 - DNA, 80 bp, synthetic construct
  source 1..80: mol_type = other DNA
tgattctgcagctcgcaccacgcgatggcaacgcggcccaacatatcgttgacatggcgctgtatgtggttgtacgtaaa

SEQ ID NO: 135996 - DNA, 80 bp, synthetic construct
  source 1..80: mol_type = other DNA
aactaatagggagagccagaatctcgcaaggggctggatggagtttaagagaaacagcctgtctgggcaaagcttacgcc

SEQ ID NO: 135997 - DNA, 80 bp, synthetic construct
  source 1..80: mol_type = other DNA
ctgccatcggcagtgtggggttggggaaagtcctcgtcgacatcctcgctggctacggcgctggcgtagccggcgctgtg

SEQ ID NO: 135998 - DNA, 80 bp, synthetic construct
  source 1..80: mol_type = other DNA
ggaggtggaggacaggcagagggaagcatggggtctacaggtacgtctcccagggagaacggccgtccggtatattcgac

SEQ ID NO: 135999 - DNA, 80 bp, synthetic construct
  source 1..80: mol_type = other DNA
gaggggcgacggcgtgtgccacacaaaatgcccatgcggagctgaaatcacaggacatgtcaaaaatgggtccatgaaga

SEQ ID NO: 136000 - DNA, 80 bp, synthetic construct
  source 1..80: mol_type = other DNA
actcttctgggtgccctgagcgcttgagcccctgcaaaccgctcaccgcgttcaagcaagggtggtggcctctttcttat

SEQ ID NO: 136001 - DNA, 80 bp, synthetic construct
  source 1..80: mol_type = other DNA
gcggagagtcctttttgccggccgagtggggtcgctagacttgaaagcggccgaaaaccctgccgggtagtggctcgcgc

SEQ ID NO: 136002 - DNA, 80 bp, synthetic construct
  source 1..80: mol_type = other DNA
agtcatgactacccggtgcccatgtggagcaaacatctcgggccatgtccgcatgggcaccatgaaaataacaggcccta

SEQ ID NO: 136003 - DNA, 80 bp, synthetic construct
  source 1..80: mol_type = other DNA
aacagaaagcgctcggcctgttgcaggtggcttctaaacaagcagaagccgccaccccggttgtcatgaccaactggcag

SEQ ID NO: 136004 - DNA, 80 bp, synthetic construct
  source 1..80: mol_type = other DNA
aaccgcgtgcggccgaccaggctgttgaggccgcgcatgagcgcgaccacctcggccggcgcgacgtccggccggaggta

SEQ ID NO: 136005 - DNA, 80 bp, synthetic construct
  source 1..80: mol_type = other DNA
cggcgcgggcccgggtccggacccaagcttcagggatggtgtgcggaggccaaaatcaaacaagcaccgcgcaggttcta

SEQ ID NO: 136006 - DNA, 80 bp, synthetic construct
  source 1..80: mol_type = other DNA
acgagccttggatggaacctcataaagttcaggagtgggatggacgtcttttcaatgccagccacaagagtagatacaat

SEQ ID NO: 136007 - DNA, 80 bp, synthetic construct
  source 1..80: mol_type = other DNA
ttcgcgttcagtgcactggtgctcccatacacagcaaccagttggctcccaggcattttgttgaacaccggcataggctt

SEQ ID NO: 136008 - DNA, 80 bp, synthetic construct
  source 1..80: mol_type = other DNA
acaggaaaggtgaattagtagcttggaacagaaaagatgacaggcgaaccctttggacaacacctgatccatcgcccaat

SEQ ID NO: 136009 - DNA, 80 bp, synthetic construct
  source 1..80: mol_type = other DNA
ctccaacagcacgtgcagcatctggtcggccgtgccgcgctcaaacgcccccaggacggcctggacgttgcgcgcgagct

SEQ ID NO: 136010 - DNA, 80 bp, synthetic construct
  source 1..80: mol_type = other DNA
ggacggcgtcgtctcgccgcggcagctggccctgctggcctcgatggtggacgaggccgttcgcacgatcccgtcgcccc

SEQ ID NO: 136011 - DNA, 80 bp, synthetic construct
  source 1..80: mol_type = other DNA
gctgtacgcggactggagttcggacagcgagggggagcgcgacgggtccctgtggcaggaccctccggagagacccgact

SEQ ID NO: 136012 - DNA, 80 bp, synthetic construct
  source 1..80: mol_type = other DNA
aaacaatgctgaaaacttgagccggagacgtgaacagagactcgtcttcacagggcgggttcaaacgaggaggccctatg

SEQ ID NO: 136013 - DNA, 80 bp, synthetic construct
  source 1..80: mol_type = other DNA
ttctccatcagaactcaaaggacacttccatgcagaagaccatacccctggtggccctcacactgacatcctacctggga

SEQ ID NO: 136014 - DNA, 80 bp, synthetic construct
  source 1..80: mol_type = other DNA
cgaagataattcacaatgcccacaaagaaggagtctgtggcgtaaggtcggtctctagactagagcaccaaatgtgggaa

SEQ ID NO: 136015 - DNA, 80 bp, synthetic construct
  source 1..80: mol_type = other DNA
tgcgtggttttaagtgactatattccgagggtcgcctgtaatatggggacagttaataaacctgtggtggtggtattgat

SEQ ID NO: 136016 - DNA, 80 bp, synthetic construct
  source 1..80: mol_type = other DNA
cgcccgccgagaccacagttaggctacgagcatactttgacaccccgggactccccgtgtgccaagaccatcttgaattt

SEQ ID NO: 136017 - DNA, 80 bp, synthetic construct
  source 1..80: mol_type = other DNA
ggcccgccgaccggcaagccggtggtcggcggcgcgtgcgtttctgttctattcccagacaccgcggagaggaatcacgg

SEQ ID NO: 136018 - DNA, 80 bp, synthetic construct
  source 1..80: mol_type = other DNA
ggaatactaaaaggcgaatcggaatattttctatgcttcgatgtttcgaagattttgaaagagttggttattcatcagag

SEQ ID NO: 136019 - DNA, 80 bp, synthetic construct
  source 1..80: mol_type = other DNA
ctcccgccacgacccgccgccctgcagataccgcaccgtattggcaagcagcccataaacgcggcgaatcgcggccagca

SEQ ID NO: 136020 - DNA, 80 bp, synthetic construct
  source 1..80: mol_type = other DNA
ctgttgggggcggcgtgcgtgacattcaaggccctgtttgggaataacgccaagatcaccgagagtctgttaaaaaggtt

SEQ ID NO: 136021 - DNA, 80 bp, synthetic construct
  source 1..80: mol_type = other DNA
gcgcccacctacagttggggggaaaatgagactgatgtctttttgctaaatagcacaaggcccccgcgaggatcctggtt

SEQ ID NO: 136022 - DNA, 80 bp, synthetic construct
  source 1..80: mol_type = other DNA
ggccttccgcgacccatcggacccgcccgtgggccaggcgctgcccccaggcgttcaaaaacagctgctgcatgtctgcg

SEQ ID NO: 136023 - DNA, 80 bp, synthetic construct
  source 1..80: mol_type = other DNA
cccgcgtattcccactagtgggagtgaagagggtagtcatgggcttgttggatggaagaggaccagtgcgattcgtgctg

SEQ ID NO: 136024 - DNA, 80 bp, synthetic construct
  source 1..80: mol_type = other DNA
aatggaagagcctcctccggtaggatttgagcctgacatgttgaggaagaagcagatatcagttcttgatctgcatccag

SEQ ID NO: 136025 - DNA, 80 bp, synthetic construct
  source 1..80: mol_type = other DNA
tctcgccaggagctctcgttgtaggcgtggtgtgcgcagcaatactacgccggcacgtgggccctggcgagggcgcggtg

SEQ ID NO: 136026 - DNA, 80 bp, synthetic construct
  source 1..80: mol_type = other DNA
gggagccgggtggtccttgtgggaaacagcttgtttggggaagtcttatgcccaaatgtggagcctaatgtacttccaca

SEQ ID NO: 136027 - DNA, 80 bp, synthetic construct
  source 1..80: mol_type = other DNA
cttaaaaaatgaagaaatggtgactaaccacatggaaggagaacacaagaaacttgctgaggccatcttcaaattaactt

SEQ ID NO: 136028 - DNA, 80 bp, synthetic construct
  source 1..80: mol_type = other DNA
tttctgttacaaatcctctcactatttcaggaaatgcgctcactgtagccactggcaatggtcttcaagtatcggggtct

SEQ ID NO: 136029 - DNA, 80 bp, synthetic construct
  source 1..80: mol_type = other DNA
ctgcacctccaccaaaacatcgtggatgtgcaatacctctatggacttactccggccatcacaaaatacatcgtgaagtg

SEQ ID NO: 136030 - DNA, 80 bp, synthetic construct
  source 1..80: mol_type = other DNA
cggggacgggctgggccggccccaggcggtttcccgccacgaccgcgttccgcaggtacacggctgccgcgttgtccagg

SEQ ID NO: 136031 - DNA, 80 bp, synthetic construct
  source 1..80: mol_type = other DNA
taattgctataagacatacccaaaccggatgatttttgccgctggaaaaacagcttctaattttcccgtctcaactcggc

SEQ ID NO: 136032 - DNA, 80 bp, synthetic construct
  source 1..80: mol_type = other DNA
acgccctgcacacgaccaaaacggaccccgcgtgcctggccgcgcggagttatttagtccgcgcctcctgctcgaccagc

SEQ ID NO: 136033 - DNA, 80 bp, synthetic construct
  source 1..80: mol_type = other DNA
tttttgggacccccggccgggcgggggggcggtggcgaagcgccgtccgcgtccatgtcggcaaacagctcgtcgaccaa

SEQ ID NO: 136034 - DNA, 80 bp, synthetic construct
  source 1..80: mol_type = other DNA
tcctctgcaacaggcacctcgggactcgcgggtgccggaacaggtcgtcggcggcgacgcctaatgggcagccgatcgac

SEQ ID NO: 136035 - DNA, 80 bp, synthetic construct
  source 1..80: mol_type = other DNA
caggtctttaggcctgaatgccgtcgctttctaccgtggcatagacgtctctgtcattcccacctcaggcgacgtagttg

SEQ ID NO: 136036 - DNA, 80 bp, synthetic construct
  source 1..80: mol_type = other DNA
tacttttaaattgctcgtgctctaactcacttatttcgtggttcgctaacaacaccttctgcaaagctttttttcaagga

SEQ ID NO: 136037 - DNA, 80 bp, synthetic construct
  source 1..80: mol_type = other DNA
atatcatgacctgcatgtcagctgacctagaggtgatcaccagtacgtgggtaatcgcggggtggattcttgccgcattg

SEQ ID NO: 136038 - DNA, 80 bp, synthetic construct
  source 1..80: mol_type = other DNA
cggatgtatgtaggaggggtggagcatcgattctccgcagcatgcaacttcacgcgcggagatcgctgcagactggaaga

SEQ ID NO: 136039 - DNA, 80 bp, synthetic construct
  source 1..80: mol_type = other DNA
gcgtggtcatagtgggcagggtagtcctttccaacaaacccgcggtcatacctgacagagaagtcctctaccaggagttt

SEQ ID NO: 136040 - DNA, 80 bp, synthetic construct
  source 1..80: mol_type = other DNA
gctcgtgcaaaggcgagcccgccatcttgggatgagatgtggaaatgtctcatacgcctgaagccgactctgcaaggccc

SEQ ID NO: 136041 - DNA, 80 bp, synthetic construct
  source 1..80: mol_type = other DNA
accctgagccggacacggaggtgttggcatccatgttgaccgatccttcccacattacggcagaggcggcagcgaggcgc

SEQ ID NO: 136042 - DNA, 80 bp, synthetic construct
  source 1..80: mol_type = other DNA
acaataagcggcccgtctgatgacaggccctattgttggcattatccacctaggccctgtagtgttgtcccagcccgaga

SEQ ID NO: 136043 - DNA, 80 bp, synthetic construct
  source 1..80: mol_type = other DNA
actgtgagtggttcggaggacgtcgtgtgctgctcaatgtcatactcttggacgggggcacttgtaacaccatgtgcggc

SEQ ID NO: 136044 - DNA, 80 bp, synthetic construct
  source 1..80: mol_type = other DNA
atataggttatatggtacacaaatatcatatcccgcgtcttcttggcgttttggattgatgatatgtttgtaggttaagg

SEQ ID NO: 136045 - DNA, 80 bp, synthetic construct
  source 1..80: mol_type = other DNA
ctggttgactatccataccgcttgtggcattacccctgcactgtcaactacaccatctttaaggtcaggatgtacgtcgg

SEQ ID NO: 136046 - DNA, 80 bp, synthetic construct
  source 1..80: mol_type = other DNA
acggcaaggctatacccctagagcacatcaaggggggtaggcatctcatcttttgtcattcaaagaagaagtgtgacgag

SEQ ID NO: 136047 - DNA, 80 bp, synthetic construct
  source 1..80: mol_type = other DNA
cgatttgtcagaagcctggttatacgccatcatctctgtcatggttttttgcagtaccatttttgccctagccatatatc

SEQ ID NO: 136048 - DNA, 80 bp, synthetic construct
  source 1..80: mol_type = other DNA
tacgcagcctgcgggctgtggccctgttttctcctgcttctgatgctgcctgagagggcttatgcatacgaccaggaagt

SEQ ID NO: 136049 - DNA, 80 bp, synthetic construct
  source 1..80: mol_type = other DNA
gcacccgtggagtggccaaggcggtggactttatccctgtagagagcttagagacaaccacgaggtccccggtgttcact

SEQ ID NO: 136050 - DNA, 80 bp, synthetic construct
  source 1..80: mol_type = other DNA
cgctccaaacacggacagtctgtgtaacagaccccaataaacgtatgtcgctaccacacccttgtgtgtcaatggacgcc

SEQ ID NO: 136051 - DNA, 80 bp, synthetic construct
  source 1..80: mol_type = other DNA
agtgacgctgttcttcctatcaggaaggggcctagggaaaacatctatcggcctactctgcgtgatggcttcaagcgtac

SEQ ID NO: 136052 - DNA, 80 bp, synthetic construct
  source 1..80: mol_type = other DNA
gttgaaatgggagttcgttatcctcgtttttctcctcctagcagatgcccgcgtatgcgtcgccctttggctgatgttga

SEQ ID NO: 136053 - DNA, 80 bp, synthetic construct
  source 1..80: mol_type = other DNA
cccgtgggcactgatttttattcgggatcgcttgaggaggcccgggcaacggcccgggcaacggtgaggcaactcgtagc

SEQ ID NO: 136054 - DNA, 80 bp, synthetic construct
  source 1..80: mol_type = other DNA
agtgtaaatcctaacctgctgtccgtcgtaaatagccttggttaaagtaattctagctagccttgcaaccgcggataact

SEQ ID NO: 136055 - DNA, 80 bp, synthetic construct
  source 1..80: mol_type = other DNA
ctgggaaacagcccgtcacactccagtcaattcatggttgggcaacatcattatgtacgcccctaccatatgggttcgca

SEQ ID NO: 136056 - DNA, 80 bp, synthetic construct
  source 1..80: mol_type = other DNA
gcgcggctccgggccacagggttcggggcggtgggtgccggcgctacggcggaggaaactcgtcgaatgttgcatagagc

SEQ ID NO: 136057 - DNA, 80 bp, synthetic construct
  source 1..80: mol_type = other DNA
gttatctgtgccacagatgctttaatgactggctacacaggcaacttcgacagtgtgatagactgcaatgtgtctgtcac

SEQ ID NO: 136058 - DNA, 80 bp, synthetic construct
  source 1..80: mol_type = other DNA
acagacttgaaatggctatgtggaggagttcggcgacagaactgaacttggctttggcggagggagacgcaaatctcaca

SEQ ID NO: 136059 - DNA, 80 bp, synthetic construct
  source 1..80: mol_type = other DNA
accattaccatgccactgctggcgttgctggctccgggcatgagggctctctacttggacacatacaggatcattctcct

SEQ ID NO: 136060 - DNA, 80 bp, synthetic construct
  source 1..80: mol_type = other DNA
atggtctgctcatgcactttctttgccattatgatctacccctgttttaatcttggctggaactctgttgaggcattcac

SEQ ID NO: 136061 - DNA, 80 bp, synthetic construct
  source 1..80: mol_type = other DNA
aagcagacagcacatcctccggggtcagtactcagaccgccagtgggcctggcgagttactccagccggacggggagtct

SEQ ID NO: 136062 - DNA, 80 bp, synthetic construct
  source 1..80: mol_type = other DNA
cctgttccaggccagtctgctgcgcgtaccatactacgtgcgcgcgcatgctctgttgcgggcctgcctgcttgtgcgcc

SEQ ID NO: 136063 - DNA, 80 bp, synthetic construct
  source 1..80: mol_type = other DNA
gcaggagatcatcgggggccaggccagggagaccggcgacgaccggcccgttctgaccaagtctgcggtggagcggtttc

SEQ ID NO: 136064 - DNA, 80 bp, synthetic construct
  source 1..80: mol_type = other DNA
gtgggagtacgtggtcctcgcgtttctgatgttggcggacgcccgcatttgcacagctctttggataatgctccttgtgg

SEQ ID NO: 136065 - DNA, 80 bp, synthetic construct
  source 1..80: mol_type = other DNA
ggacccggctacctcttcagagctgctgtgatgcgcacgccatacttcgttagggcaaatgctcttctgaggatgtgtgc

SEQ ID NO: 136066 - DNA, 80 bp, synthetic construct
  source 1..80: mol_type = other DNA
gcgccccggcgaccctgatcccccgcgcggctgccaaacagctggccgccgtcgcacgcgtccagtcggcaagatcctcg

SEQ ID NO: 136067 - DNA, 80 bp, synthetic construct
  source 1..80: mol_type = other DNA
gctggcgtccaggaggacactgcgtcactgcgagcattcacggatgctatgaccaggtactcagctccccctggagacgc

SEQ ID NO: 136068 - DNA, 80 bp, synthetic construct
  source 1..80: mol_type = other DNA
tgaacctcctgcctgccatcttgtctcctggcgctttggtagtgggagtcatctgtgcagcaatcttgcgccgccacgtc

SEQ ID NO: 136069 - DNA, 80 bp, synthetic construct
  source 1..80: mol_type = other DNA
gtaattatatctatcttcacgcttaccccagcgtacaaatcttttctcagccgcctcgtgtggtggctgtgttacatgct

SEQ ID NO: 136070 - DNA, 80 bp, synthetic construct
  source 1..80: mol_type = other DNA
caggggcccgttgacgagctcgaagaagcgatgggtgatgctggcgagcagggccgggtccacctggtggcgcagcagcg

SEQ ID NO: 136071 - DNA, 80 bp, synthetic construct
  source 1..80: mol_type = other DNA
gaattaaaagggaagccatggatgaattgcagcctacaatgcaactgatggtgcctaagcggcaaaagttagaggacgta

SEQ ID NO: 136072 - DNA, 80 bp, synthetic construct
  source 1..80: mol_type = other DNA
gtgcggctttgccgacctcatggggtacatccctgtcgtgggcgccccgctcggcggcgtcgccagagctctcgcgcatg

SEQ ID NO: 136073 - DNA, 80 bp, synthetic construct
  source 1..80: mol_type = other DNA
actatcttgcctcactacgcctgcctcagcactacactatgccaacaagtctggtatctatcatttgactaatgattgct

SEQ ID NO: 136074 - DNA, 80 bp, synthetic construct
  source 1..80: mol_type = other DNA
tttgaaactcgctgacggcccaatcagcgcccgaaccccccgcgcccatgatgaagcgggcgagttcctccttgaggtgc

SEQ ID NO: 136075 - DNA, 80 bp, synthetic construct
  source 1..80: mol_type = other DNA
atgaccatctatcccccatgtcagactgggcagccgacggcctgcgcgacctagcggtggctgtcgagcctatcgtcttc

SEQ ID NO: 136076 - DNA, 80 bp, synthetic construct
  source 1..80: mol_type = other DNA
ttggggcatcttgttcatttgctgcgcatggtactacaagggcagagtggtaccggcatgcacgtacgctcttcttggcg

SEQ ID NO: 136077 - DNA, 80 bp, synthetic construct
  source 1..80: mol_type = other DNA
catgatctgtggacactgaggaaaccagcaaaagtcacccgctggctgggtaacaatggatggcacaagctcaaacggat

SEQ ID NO: 136078 - DNA, 80 bp, synthetic construct
  source 1..80: mol_type = other DNA
ctaacacccagatgcctcgtgcattacccctaccggttgtggcactatccgtgcacggtcaactacaccatcttcaagat

SEQ ID NO: 136079 - DNA, 80 bp, synthetic construct
  source 1..80: mol_type = other DNA
tccaccgatatgcacctcagtgcaaacctctactcagggacgaggtttctttttcggtgggtcttaacagctacgcaatc

SEQ ID NO: 136080 - DNA, 80 bp, synthetic construct
  source 1..80: mol_type = other DNA
gttggccaactcttcaccttctcgcctaggcgccactggaccacccaggagtgcaactgttcaatctacccgggccatat

SEQ ID NO: 136081 - DNA, 80 bp, synthetic construct
  source 1..80: mol_type = other DNA
ttgcgtagtgaaaccaatcgatgacaggttcgctaacgccctgcttgctctgaacgatatgggaaaggtccggaaagaca

SEQ ID NO: 136082 - DNA, 80 bp, synthetic construct
  source 1..80: mol_type = other DNA
gtgatacagaagttgtcaatcgcaacgatggggcctgcttacgggttccagtactcgcccaaacagcgagtagaacgtct

SEQ ID NO: 136083 - DNA, 80 bp, synthetic construct
  source 1..80: mol_type = other DNA
gttcttttgacatcaaggaaggcgtgtaccgcatatacgcccctgggctcttctggggttatcgccagataggtgtggga

SEQ ID NO: 136084 - DNA, 80 bp, synthetic construct
  source 1..80: mol_type = other DNA
ttgtcgcatttaagatcatgagcggcgaggttccttccacagaggacttggtcaatctactgcccgccatcctctcgcct

SEQ ID NO: 136085 - DNA, 80 bp, synthetic construct
  source 1..80: mol_type = other DNA
tgttggaaatgtttatttagcaggtttggcttaccaaccaattgtcataacagttagttttaatcaggagaaggatgcaa

SEQ ID NO: 136086 - DNA, 80 bp, synthetic construct
  source 1..80: mol_type = other DNA
gatatgatgatgaactggtcccctacaacagcgctggtagtagcgcagctgctccggatcccacaagccatcgtggacat

SEQ ID NO: 136087 - DNA, 80 bp, synthetic construct
  source 1..80: mol_type = other DNA
gacgacgcgtggcggcccctgatggagcctgagctggcgaaccccttaaccgcccacctcctggccgaatataatcgtcg

SEQ ID NO: 136088 - DNA, 80 bp, synthetic construct
  source 1..80: mol_type = other DNA
ggggcctcggcggcgacgggggccttcttcttgggcgcagacttcttcttggccttggcgggcgtagccttgggtgcggg

SEQ ID NO: 136089 - DNA, 80 bp, synthetic construct
  source 1..80: mol_type = other DNA
gaaaactgtttacgtcagttttattataggcgagtaatatttaccgagggcaaagtgaactttgagccactacgtggtgg

SEQ ID NO: 136090 - DNA, 80 bp, synthetic construct
  source 1..80: mol_type = other DNA
attgaatcacattctagcagaaaatgaggtgaagttaactatcatgacaggagacattaaaggaatcatgcaggcaggaa

SEQ ID NO: 136091 - DNA, 80 bp, synthetic construct
  source 1..80: mol_type = other DNA
tgggaaaatgttccatacctagggaagagagaagaccaatggtgcggatcacttattggtctcacttccagagcaacctg

SEQ ID NO: 136092 - DNA, 80 bp, synthetic construct
  source 1..80: mol_type = other DNA
ttgtgggggtcacggcagacaatatcaaatgcccttgccaggtacctgcccccgagttcttcacagagctggatggcgta

SEQ ID NO: 136093 - DNA, 80 bp, synthetic construct
  source 1..80: mol_type = other DNA
attacatcacgggggtgacacaggacaatctgaagtgtccctgtcaggtaccatctccagagttcttcacggagctggac

SEQ ID NO: 136094 - DNA, 80 bp, synthetic construct
  source 1..80: mol_type = other DNA
gtgaggatgtgcgagggggacgagggtggtgcggttaacgccgcctgggatctgcgcaggtgcgtgcggttcagtttggc

SEQ ID NO: 136095 - DNA, 80 bp, synthetic construct
  source 1..80: mol_type = other DNA
ccacccttacagaacctggaattatcatgggagttatgaggtcaagccaactggctcagcaagttccctcgtgaacggag

SEQ ID NO: 136096 - DNA, 80 bp, synthetic construct
  source 1..80: mol_type = other DNA
tctaaaaggagtaagtgaagtgagaggcttcacaaaagggggtccaggacacgaggaacccatacccatggccacatatg

SEQ ID NO: 136097 - DNA, 80 bp, synthetic construct
  source 1..80: mol_type = other DNA
ataccgaacttggacctatcacggaagctacgaagtgaaggccactggctcagcaagttctctcgtcaatggggtggtaa

SEQ ID NO: 136098 - DNA, 80 bp, synthetic construct
  source 1..80: mol_type = other DNA
cctaccaccgtcctgggtataggcacagtcttggaccaagcggaaactgcagacgcccggctcaccgtcctggccactgc

SEQ ID NO: 136099 - DNA, 80 bp, synthetic construct
  source 1..80: mol_type = other DNA
acccggccactctcttccgacacgcgccccctcggaggacacccgccatcccagccccggcgacctacaacatggctacc

SEQ ID NO: 136100 - DNA, 80 bp, synthetic construct
  source 1..80: mol_type = other DNA
cccgaatattcgggcgaaggagcatcccagtgaatgaagcgcttgcagctgctggtctcgtgggagtcttggcagggcta

SEQ ID NO: 136101 - DNA, 80 bp, synthetic construct
  source 1..80: mol_type = other DNA
cgcacgacgggacggggaaacgggtgtactacctcacccgtgaccccgagatccctctggcgcgagctgcttgggaaact

SEQ ID NO: 136102 - DNA, 80 bp, synthetic construct
  source 1..80: mol_type = other DNA
ccaggcatgctgacgtcgttcccctccgcaggagaggagacaaggtcgcagcccttttgtccccgaggcctatctcgtac

SEQ ID NO: 136103 - DNA, 80 bp, synthetic construct
  source 1..80: mol_type = other DNA
gataactgaggactgccccatcccatgcgccgggagctggctccgggaggtgtgggactgggtttgcatggtcctatccg

SEQ ID NO: 136104 - DNA, 80 bp, synthetic construct
  source 1..80: mol_type = other DNA
tggtagtggccacttttttcctttggatgtcagacgtttctggcaccaaaatagctggtgtgttgctgcttgcgctgctt

SEQ ID NO: 136105 - DNA, 80 bp, synthetic construct
  source 1..80: mol_type = other DNA
gccttcgcctcccggggcaatcatgtgtctcccacgcactacgtgccggagagtgacgccgcggcgcgggtaactgccat

SEQ ID NO: 136106 - DNA, 80 bp, synthetic construct
  source 1..80: mol_type = other DNA
gtgaggactaagctcaaactcactccactgcgtgacgcagcctatctagacctttctggatggtttacgtcaggcggaag

SEQ ID NO: 136107 - DNA, 80 bp, synthetic construct
  source 1..80: mol_type = other DNA
acagcaaaggagtgcttctaccaacttcaaatctttccaaagaatattggaactatagaagttatgataacaacatagga

SEQ ID NO: 136108 - DNA, 80 bp, synthetic construct
  source 1..80: mol_type = other DNA
aggttgtgcactgcctcctccgggacgaccacctgtccctcctcccaggagaaagaggatggtccagctcgacagctcaa

SEQ ID NO: 136109 - DNA, 80 bp, synthetic construct
  source 1..80: mol_type = other DNA
gaagctgctaagttggccttggaatgcacgggaggatgtcaccagaatggccatgacagacacaacggcttttggacagc

SEQ ID NO: 136110 - DNA, 80 bp, synthetic construct
  source 1..80: mol_type = other DNA
tgatgaactggtcgccaacggctaccatgattctcggttacctgctgcgcgtgcccgaagtggccctggagatcatcgcc

SEQ ID NO: 136111 - DNA, 80 bp, synthetic construct
  source 1..80: mol_type = other DNA
cagcacgctgtggttgcttggcctggacggcacagacgcgccccctggggcgctgacccccaacgacgataccgaacagg

SEQ ID NO: 136112 - DNA, 80 bp, synthetic construct
  source 1..80: mol_type = other DNA
ggcgttccatttaaccacacgcaatggagaaccacacatgatcgtcagtagacaagagaaagggaaaagtcttctgttta

SEQ ID NO: 136113 - DNA, 80 bp, synthetic construct
  source 1..80: mol_type = other DNA
tctattgggtctaacttaactttagttggtccagatggaaaagtcacttggtatgatggtgatttaaaaagaccatgtga

SEQ ID NO: 136114 - DNA, 80 bp, synthetic construct
  source 1..80: mol_type = other DNA
cctatgctgtcgggtcccagcttccctgtgaacctgagcccgacgcagacgtattgaggtccatgctaacagatccgccc

SEQ ID NO: 136115 - DNA, 80 bp, synthetic construct
  source 1..80: mol_type = other DNA
ccacaatgctggtatgcggcgatgacctagtagtcatctcagaaagccaggggactgaggaggacgagcggaacctgaga

SEQ ID NO: 136116 - DNA, 80 bp, synthetic construct
  source 1..80: mol_type = other DNA
atgtcttaagtttaataattcaaaacagataaaaatgtgttcatctatggtacacacaagtttgtatgtaaaatataagc

SEQ ID NO: 136117 - DNA, 80 bp, synthetic construct
  source 1..80: mol_type = other DNA
gtccccgggcgctcttgtggtaggagtcatctgcgcagccatacttcgcaggcatgtggggcaggtggaaggtgcggtcc

SEQ ID NO: 136118 - DNA, 80 bp, synthetic construct
  source 1..80: mol_type = other DNA
tttagcccctctttctgactgggcctgtgacggcttgcgagacctcgctgttgccgttgagcccgtcatattttctccca

SEQ ID NO: 136119 - DNA, 80 bp, synthetic construct
  source 1..80: mol_type = other DNA
gcaaggaaagaagttacaatctcctagagggagacaaaaataacactgcctaccgcagctggtttttggcctacaactac

SEQ ID NO: 136120 - DNA, 80 bp, synthetic construct
  source 1..80: mol_type = other DNA
aggcgtatccggtgcacttgtcgcatttaagatcatgagcggcgaggcccctgctttagaggacatggttaatctcctac

SEQ ID NO: 136121 - DNA, 80 bp, synthetic construct
  source 1..80: mol_type = other DNA
catgatgacacagggaagagatactactacctcacacgggacccaaccacgccaatagcgcgggctgcttgggagacggc

SEQ ID NO: 136122 - DNA, 80 bp, synthetic construct
  source 1..80: mol_type = other DNA
ggttgccgtggccacgacggcggtgtagcccacgcccaggtccacgttcccgcgcggctgggtgagcgtgaagtttaccc

SEQ ID NO: 136123 - DNA, 80 bp, synthetic construct
  source 1..80: mol_type = other DNA
tcctgttgactgccggggtagaggcgaacactcacaccaccggagggactgctgcacgccaagcatacacccttgccggt

SEQ ID NO: 136124 - DNA, 80 bp, synthetic construct
  source 1..80: mol_type = other DNA
acaggagccgctagtggaagagatggaagaagaatgggacagccagcagaagaagacgaatgggaagaagagacagaaga

SEQ ID NO: 136125 - DNA, 80 bp, synthetic construct
  source 1..80: mol_type = other DNA
ttcacctcgccggtatgagacggtacaggactgcaattgctcactctatcccggccacgtatcaggtcaccgcatggctt

SEQ ID NO: 136126 - DNA, 80 bp, synthetic construct
  source 1..80: mol_type = other DNA
gtcagagctcacgctctactgaggttgtgcaccgtagtgaggcacctcgcagggggtaggtacgtccagatggcgctatt

SEQ ID NO: 136127 - DNA, 80 bp, synthetic construct
  source 1..80: mol_type = other DNA
agctgtgcctcaggcctaccaagttggctacctccatgctcctacgggtagtgggaaaagcacgaaggtccccgtagcct

SEQ ID NO: 136128 - DNA, 80 bp, synthetic construct
  source 1..80: mol_type = other DNA
tgtggtcgggtctcagctcccatgtgagccagagccggacgtgaccgtcctgacctccatgctaaccgatccatcacaca

SEQ ID NO: 136129 - DNA, 80 bp, synthetic construct
  source 1..80: mol_type = other DNA
ggacgatttggtggtgatatctgaaagctgtggcgtcgaggaggacagatcggctctgcgagccttcacggaggctatga

SEQ ID NO: 136130 - DNA, 80 bp, synthetic construct
  source 1..80: mol_type = other DNA
ctcgtcttgaacccatccgtcgccgccaccttaggttttggggcgtatatgtctaaggcacatggtatcgaccccaacat

SEQ ID NO: 136131 - DNA, 80 bp, synthetic construct
  source 1..80: mol_type = other DNA
atatcactgcagaggcagcggccaggcgcctcgctagaggctcccttccatctttagccagctcctctgctagccaattg

SEQ ID NO: 136132 - DNA, 80 bp, synthetic construct
  source 1..80: mol_type = other DNA
cttgttatggcggcaagagatgggcagcaacatcacacgggtggagtctgaaacaaaagttgtgattcttgattcattcg

SEQ ID NO: 136133 - DNA, 80 bp, synthetic construct
  source 1..80: mol_type = other DNA
acatggaaacctgcaccctgattgcgatggaaaccgatctgggcgaaatggaaacctgcgatgataccgtgacctataaa

SEQ ID NO: 136134 - DNA, 80 bp, synthetic construct
  source 1..80: mol_type = other DNA
atgggggacacggcctctcatacggcgaaaggcttcgcttcgctctttagcccgggcgcccagcagagcctccagcttat

SEQ ID NO: 136135 - DNA, 80 bp, synthetic construct
  source 1..80: mol_type = other DNA
gagatcactggctccagcgagaggattgacgtgcgtttggatgatgatggaaactaccaactcatgaatgacccgggagc

SEQ ID NO: 136136 - DNA, 80 bp, synthetic construct
  source 1..80: mol_type = other DNA
ggggataggcacggtcttagaccaagcagagaccgctggagcgcgccttgtcgtgctcgcgactgctacgccaccagggt

SEQ ID NO: 136137 - DNA, 80 bp, synthetic construct
  source 1..80: mol_type = other DNA
acacgcccggcgccgagcggttgtcgatgaccgtgcccgcgcccgccgtcagggcgcagaagcgcgcgcgcgccgcaaag

SEQ ID NO: 136138 - DNA, 80 bp, synthetic construct
  source 1..80: mol_type = other DNA
ctcaggacatcgtatggcttgggatatgatgatgaactggtcccccgcaatcgggctagtgatatcacacttgatgcggt

SEQ ID NO: 136139 - DNA, 80 bp, synthetic construct
  source 1..80: mol_type = other DNA
atggatgaatacattgttcgcctgtccagacggttgacaatacctgatcacatagacagaaaaattgcccatgtattttt

SEQ ID NO: 136140 - DNA, 80 bp, synthetic construct
  source 1..80: mol_type = other DNA
cgccgccatcggcagtgttggactggggaaggtcctcgtggacatccttgcagggtatggcgcgggcgtggcgagggctc

SEQ ID NO: 136141 - DNA, 80 bp, synthetic construct
  source 1..80: mol_type = other DNA
cgcagcaacgcacaccgcgcggctgacaggggtgacctccctggtgctagcggtgggtgacgtggaccgtctttccgcgt

SEQ ID NO: 136142 - DNA, 80 bp, synthetic construct
  source 1..80: mol_type = other DNA
tttggctttcctataaagtggcttcagccggagtccaatacaatgatagaaaatggtgctttgacggacctagatctaac

SEQ ID NO: 136143 - DNA, 80 bp, synthetic construct
  source 1..80: mol_type = other DNA
catggatggagagtaccgactcagaggcgaagaacgcaagacattcctcgagctcataaaaacagccgatttgccggtgt

SEQ ID NO: 136144 - DNA, 80 bp, synthetic construct
  source 1..80: mol_type = other DNA
gaagacgaggcggccaacgacttcctcgtacgcatgggccgccaacagtcggtattaaggcgtcgacgcagacgcacccg

SEQ ID NO: 136145 - DNA, 80 bp, synthetic construct
  source 1..80: mol_type = other DNA
gtcacggtgaacggatgcgcccctggttgggcgctggccagcgtgcgctttaagctggtgcggctggtgctgaagtgtgt

SEQ ID NO: 136146 - DNA, 80 bp, synthetic construct
  source 1..80: mol_type = other DNA
accgcgtcccgccaggcagaggccatcactcctgctgtccagaccaactggcaaaaactcgagaccttctgggcgaagca

SEQ ID NO: 136147 - DNA, 80 bp, synthetic construct
  source 1..80: mol_type = other DNA
caaccccggaccggtcgctagcgccgcctccaccgtggattccgtgatcgacagcgtggtggccggcgctcgggcctatg

SEQ ID NO: 136148 - DNA, 80 bp, synthetic construct
  source 1..80: mol_type = other DNA
atgtgcatgtggtggtcacaatacttcatagctagagtggaggctgcgctgcatgtctatgttccatcattcgagccgcg

SEQ ID NO: 136149 - DNA, 80 bp, synthetic construct
  source 1..80: mol_type = other DNA
ccactttttatgaatcactagacgccaaagtgtggctagttttagtaaaatgcaacggcatggttaacgggaccatatcc

SEQ ID NO: 136150 - DNA, 80 bp, synthetic construct
  source 1..80: mol_type = other DNA
ttaccagcactcgcaccacccgcccgcgcctgctgggcgaggaggagtacctaaacaactcgctgctgcagccggagcgc

SEQ ID NO: 136151 - DNA, 80 bp, synthetic construct
  source 1..80: mol_type = other DNA
cacatataccaccggaggcgcccaagctcgtaacacccaagcatttactaaccttttcgcaacaggcgccaaacagaacc

SEQ ID NO: 136152 - DNA, 80 bp, synthetic construct
  source 1..80: mol_type = other DNA
ttctctcgtgcctcaccacacctgcctccgcattaaattatgccaacaagtctgggctgtatcatctaaccaatgactgc

SEQ ID NO: 136153 - DNA, 80 bp, synthetic construct
  source 1..80: mol_type = other DNA
tcctcaaacggaattgtaactgaacctgaccccgaagagggtactagcagtgggcaaaggggggagaaaaggaagttaga

SEQ ID NO: 136154 - DNA, 80 bp, synthetic construct
  source 1..80: mol_type = other DNA
ttcaaatggcttaccatgacgctcgccaaattctgctttgggagatccctgatgtgttgaattcattggcagtagcttgg

SEQ ID NO: 136155 - DNA, 80 bp, synthetic construct
  source 1..80: mol_type = other DNA
gcatcgacgttcaccaaacgggttttgggtgcatgggattttaaaaacgcacactcgatttcaacggcttccgaaaacag

SEQ ID NO: 136156 - DNA, 80 bp, synthetic construct
  source 1..80: mol_type = other DNA
gaggccgactccagggtgtccgtcggaagcgggaggcgaatgcatgccgcctcgggacacatcagcagcgcgccgagctt

SEQ ID NO: 136157 - DNA, 80 bp, synthetic construct
  source 1..80: mol_type = other DNA
ggtctccgcgcgattaggccgtgaggtattgttgggacctgctgatgattatcgggaaatgggttggcgtctgttggctc

SEQ ID NO: 136158 - DNA, 80 bp, synthetic construct
  source 1..80: mol_type = other DNA
cgggcatgactactgacaatcttaaatgcccatgccaggtcccatcgcccgaatttttcacagaactggacggggtgcgc

SEQ ID NO: 136159 - DNA, 80 bp, synthetic construct
  source 1..80: mol_type = other DNA
cgctggcgaactttggatggcgcgcccggaggcgcatgagcgtcgtgtgtacgcaggcgtggcgcgtgtcgaaggtgcat

SEQ ID NO: 136160 - DNA, 80 bp, synthetic construct
  source 1..80: mol_type = other DNA
tatcttaccggctatgagctgcgccctaccctccgatttcgttccactctgctaccgcgaatgcccgccgcctctctgga

SEQ ID NO: 136161 - DNA, 80 bp, synthetic construct
  source 1..80: mol_type = other DNA
ctggaagacgacgtcacaccaattccaacaaccatcatggccaagaatgaggtcttttgcgtcgatccatcaaaaggtgg

SEQ ID NO: 136162 - DNA, 80 bp, synthetic construct
  source 1..80: mol_type = other DNA
gcgggcccctgacatcccctctttatgcccgtcgcccgcccgcccgccccgccggtgtgccgtgattcgcggagtcggtg

SEQ ID NO: 136163 - DNA, 80 bp, synthetic construct
  source 1..80: mol_type = other DNA
ttgctgcacagagcgcgtctggccttgtcaaccttttcagccccgggtctcggcagaacatcatgctgatcaacaccaat

SEQ ID NO: 136164 - DNA, 80 bp, synthetic construct
  source 1..80: mol_type = other DNA
atcacggtgtggaagatgaacttccaaactattgcttcccattgaatggcactggcaccaattcaacatatcttggcgta

SEQ ID NO: 136165 - DNA, 80 bp, synthetic construct
  source 1..80: mol_type = other DNA
tcttcttcatagcagcatggtacttaaagggcagggtggtccccgtggccacgtactctgttcttggcctgtggtctttt

SEQ ID NO: 136166 - DNA, 80 bp, synthetic construct
  source 1..80: mol_type = other DNA
cctagttggtcaggcggaggctgctttggaaaacttggttgtcctcaatgcagcttccgccgccagctgtcaaggcataa

SEQ ID NO: 136167 - DNA, 80 bp, synthetic construct
  source 1..80: mol_type = other DNA
gccggcgcggctcaagactattctagcaaaatgaattggttaagcgccggaccccacatgatttccagggtgaatggggt

SEQ ID NO: 136168 - DNA, 80 bp, synthetic construct
  source 1..80: mol_type = other DNA
gtccacctccctgcggcatcgtgccagcgcggaatgtctgtgggccggtgttttgtttcacccccagccctgtggtggtg

SEQ ID NO: 136169 - DNA, 80 bp, synthetic construct
  source 1..80: mol_type = other DNA
cggcgcgcgcccgccccgacgactgccacagcacggctgccacaggtaacaccaacagcagcaccaaccaaccaactctc

SEQ ID NO: 136170 - DNA, 80 bp, synthetic construct
  source 1..80: mol_type = other DNA
ccgtgcgtccgccctcccccgcgggctgatgacgtggcggttagtcagtgggaaggcaggtggaaagatgggttggagga

SEQ ID NO: 136171 - DNA, 80 bp, synthetic construct
  source 1..80: mol_type = other DNA
tctgtggtcctggcagccctgagtaaccggttgtgcctgccgagcactcatgcctgggccgggaactggaccggcccgcc

SEQ ID NO: 136172 - DNA, 80 bp, synthetic construct
  source 1..80: mol_type = other DNA
tatgaggaaaatgttaccaatgatgacaacatgaggccctattgctggcattatccacccagaccatgtggcattgttcc

SEQ ID NO: 136173 - DNA, 80 bp, synthetic construct
  source 1..80: mol_type = other DNA
agaagatggctctgtacgacgtgatcagcaagctccctgttgccgtgatgggaagctcctacggattccaatactcacca

SEQ ID NO: 136174 - DNA, 80 bp, synthetic construct
  source 1..80: mol_type = other DNA
tggatggctccaatgtgtccgcggcgctagctgcgctagcagaaaagtcattcccgtcctcaaagccgcaggaagagaat

SEQ ID NO: 136175 - DNA, 80 bp, synthetic construct
  source 1..80: mol_type = other DNA
actggtgatcgtagctatcaccttgtttaccctgacccctgcctataggcagctgcttatccagctgttgtggtggaacc

SEQ ID NO: 136176 - DNA, 80 bp, synthetic construct
  source 1..80: mol_type = other DNA
cgtgcggcttgcaactggacccacggtgcccgttgcgagctggatgatcgggacaggatcgagatgcaccctctcctgtt

SEQ ID NO: 136177 - DNA, 80 bp, synthetic construct
  source 1..80: mol_type = other DNA
aggccatgaaatcttcctggggccagccgatgacatcagagaggcgggctggcgacttctcgctcccatcactgcttatg

SEQ ID NO: 136178 - DNA, 80 bp, synthetic construct
  source 1..80: mol_type = other DNA
taactccaaccatgagatgtactgggtcagtggagcctcggggaacatcgtgcacgcggtgaacatgaccagtcaggtgc

SEQ ID NO: 136179 - DNA, 80 bp, synthetic construct
  source 1..80: mol_type = other DNA
tgaccaggtactcggctcctccgggggatgaaccgcacccagaatacgacctggagctgataacatcatgctcttcaaac

SEQ ID NO: 136180 - DNA, 80 bp, synthetic construct
  source 1..80: mol_type = other DNA
tggcagcaagttcccttctgttctaaccattttcaggagattgtgatgaaagatggaaggagtatagttgtcccgtgcag

SEQ ID NO: 136181 - DNA, 80 bp, synthetic construct
  source 1..80: mol_type = other DNA
attcctgagcccaattatacccgggctctgtggagggtctctgctgaggactatgttgaggttaaaagggtggtggacag

SEQ ID NO: 136182 - DNA, 80 bp, synthetic construct
  source 1..80: mol_type = other DNA
agagcgtttttggccctgccgggaagatcccacgcaccagacccgattgaggatgacagcccagtggagaaaaagccaaa

SEQ ID NO: 136183 - DNA, 80 bp, synthetic construct
  source 1..80: mol_type = other DNA
agaagaaggttatcacctggggagcggatacagccgcatgtggcgacatccttgctggcctcccagtctctgcccggaga

SEQ ID NO: 136184 - DNA, 80 bp, synthetic construct
  source 1..80: mol_type = other DNA
caaaagaaggtgacctttgatcgagtccagcttgtggaccaacactattatgacacattgaaggagattaagctccgggc

SEQ ID NO: 136185 - DNA, 80 bp, synthetic construct
  source 1..80: mol_type = other DNA
cagacctacctttgcagtggggttgcttttaagaaaactcacttcaaaggaattgttgatggcaaccatcggagtcgttc

SEQ ID NO: 136186 - DNA, 80 bp, synthetic construct
  source 1..80: mol_type = other DNA
ccaatgttagtggcccctcggctgagaaaccctactgttggcactacgctcctaggccatgtaagaccatttcagccggg

SEQ ID NO: 136187 - DNA, 80 bp, synthetic construct
  source 1..80: mol_type = other DNA
aatctggcgaggcgacggcattaacaacaccacatgcccctgtggggcagccctggcaggtcatgtcaggaatggaacta

SEQ ID NO: 136188 - DNA, 80 bp, synthetic construct
  source 1..80: mol_type = other DNA
ggaacctcccttcggagactcttatatcgtggttggaagaggggacaagcagattaaccatcactggcacaaagctggaa

SEQ ID NO: 136189 - DNA, 80 bp, synthetic construct
  source 1..80: mol_type = other DNA
gatagctgagcagttcaaacaaaaggttctcggcttaattcaggctacaacaaagcaggccgaggagctcaagccggcgg

SEQ ID NO: 136190 - DNA, 80 bp, synthetic construct
  source 1..80: mol_type = other DNA
aagatggccgaccccaatcgctttcgcggcaaagaccttccggtcccggaccgactgaccgaccctccgtgggtccggcg

SEQ ID NO: 136191 - DNA, 80 bp, synthetic construct
  source 1..80: mol_type = other DNA
gttcccgagagcgatgctgccgcgaaggtgacggcattattgagctccttgactgtcacgcgactattacgccggttaca

SEQ ID NO: 136192 - DNA, 80 bp, synthetic construct
  source 1..80: mol_type = other DNA
ccccgggcagtcccacggagtcttggatgaactgggcgtaggattcccggagcttgtccaccagggctgcggttaccagc

SEQ ID NO: 136193 - DNA, 80 bp, synthetic construct
  source 1..80: mol_type = other DNA
acgtgcggcttcgccgacctcatgggatacatcccggtcgtgggcgcccccattggtggcgtcgccagggccctggctca

SEQ ID NO: 136194 - DNA, 80 bp, synthetic construct
  source 1..80: mol_type = other DNA
tgttaatgacctgtgcggccagaacaatttcatcaaatccattaatgttgtgtcctacaatgtataattctacgaacctt

SEQ ID NO: 136195 - DNA, 80 bp, synthetic construct
  source 1..80: mol_type = other DNA
agaaccaatatcctatgacccaaaatttgaaaagcagctggggcaagtcatgctactagttctgtgcgctgggcagctac

SEQ ID NO: 136196 - DNA, 80 bp, synthetic construct
  source 1..80: mol_type = other DNA
taactgctcgctgtacccaggccaccttacaggacatcgaatggcttgggatatgatgatgaactggtcccccgcagctg

SEQ ID NO: 136197 - DNA, 80 bp, synthetic construct
  source 1..80: mol_type = other DNA
cttcctctcccagaccaagcaagcgggggacaatttcgcgtacctggtagcctaccaggccacagtgtccgctagagcca

SEQ ID NO: 136198 - DNA, 80 bp, synthetic construct
  source 1..80: mol_type = other DNA
tgcgcccaattatcgcagggcgctgtggagggttagtgctgaggagtatgttgaggtcacgcggcaccacgacttccact

SEQ ID NO: 136199 - DNA, 80 bp, synthetic construct
  source 1..80: mol_type = other DNA
tctcaattcattggcggtggcttggatggtgcttcgagctataagctttacttctacttctaacgtggtggttcccgcac

SEQ ID NO: 136200 - DNA, 80 bp, synthetic construct
  source 1..80: mol_type = other DNA
acaggccccccccccgtcctgggatgtgatgtggaagtgcttagtccgcctcaagccgacgttgcatgggccaaccccat

SEQ ID NO: 136201 - DNA, 80 bp, synthetic construct
  source 1..80: mol_type = other DNA
gcggaatgtccggggttcctgagcttctgcgccacaggtgtgttagtgccatggatgtcttctacacactgatgcatgag

SEQ ID NO: 136202 - DNA, 80 bp, synthetic construct
  source 1..80: mol_type = other DNA
ctatgtcgtgggggcaacagctgacaacctgaagtgtccctgccaagtaccagccccagaatttttcaccgaggtggacg

SEQ ID NO: 136203 - DNA, 80 bp, synthetic construct
  source 1..80: mol_type = other DNA
tccccgcaaccgcagaccctgctagagttgcaacagcgcgagcaggcagaggcggtgctgcgaaaggaaagtttccgcag

SEQ ID NO: 136204 - DNA, 80 bp, synthetic construct
  source 1..80: mol_type = other DNA
gggcggatgtcaggaaagacctaatatcgtatggaggaggctggaagctagaaggagaatggaaggaaggagaagaagtc

SEQ ID NO: 136205 - DNA, 80 bp, synthetic construct
  source 1..80: mol_type = other DNA
agccccttcagagccagatcctgagcaagatgaacagaaactgaggttttgtaaacgccacctttatgggcagcaacccc

SEQ ID NO: 136206 - DNA, 80 bp, synthetic construct
  source 1..80: mol_type = other DNA
ctacggagtctccacgaatgtcacctcgtgggtagtgaagtgggagtacattgtcctgatgttcctggttctggcagatg

SEQ ID NO: 136207 - DNA, 80 bp, synthetic construct
  source 1..80: mol_type = other DNA
tacctcgcaggattgtcaacactgccagggaaccccgcggtggcttccatgatggcattcagtgccgccctcaccagtcc

SEQ ID NO: 136208 - DNA, 80 bp, synthetic construct
  source 1..80: mol_type = other DNA
gccgtccagaccggcccgacggccgccggagggtcgagtagttggatggtggtggccgtggggtgccaccgcgccaccgc

SEQ ID NO: 136209 - DNA, 80 bp, synthetic construct
  source 1..80: mol_type = other DNA
aggactcgtaaccatggatcatcatgctcgtcatgatatcaatgttggcacaacacaggcacacgtgcatacacttcctc

SEQ ID NO: 136210 - DNA, 80 bp, synthetic construct
  source 1..80: mol_type = other DNA
ctggacttatggcagtgtcgtatgtggtgtcaggaaaagcaacagacatgtggttggaacgcgcagccgacattagttgg

SEQ ID NO: 136211 - DNA, 80 bp, synthetic construct
  source 1..80: mol_type = other DNA
ggcggttccgaacgcctcggcgcccttcaccggattccgcagacatgtggatctgatggtgggtgccgccgcgttctgct

SEQ ID NO: 136212 - DNA, 80 bp, synthetic construct
  source 1..80: mol_type = other DNA
gttaatgttgcttatcagcaccgtcgaagcggccgtggagaggcttgtcattcttaacgcagctagcgctgctggtaccg

SEQ ID NO: 136213 - DNA, 80 bp, synthetic construct
  source 1..80: mol_type = other DNA
cgattggtctactccttgcagcgggtcatggctacgggagatctgggactgggtgtgcactgtactctctgacttcaaga

SEQ ID NO: 136214 - DNA, 80 bp, synthetic construct
  source 1..80: mol_type = other DNA
cgaacgtggccctgtacctgcccgactcctacaagtacacgccggccaacgtcacgctgcccgccaacaccaacacctac

SEQ ID NO: 136215 - DNA, 80 bp, synthetic construct
  source 1..80: mol_type = other DNA
cgagcccatctatgacaccgttggggggtacgaccccgagcccgccgaggaccccgtgtacagcaccgtccgccgttggt

SEQ ID NO: 136216 - DNA, 80 bp, synthetic construct
  source 1..80: mol_type = other DNA
tcccttcaaccactttaagcgcagcatgtatcgcgccggccgctttcactgggagcgctttccggacgcccggccgcggt

SEQ ID NO: 136217 - DNA, 80 bp, synthetic construct
  source 1..80: mol_type = other DNA
ctgatcagagagaagaggagtgctgcagcgaaaaagaaaggagctagcctcatctgtttggcattagcctccactgggtc

SEQ ID NO: 136218 - DNA, 80 bp, synthetic construct
  source 1..80: mol_type = other DNA
cggaattgcatccgtggccttgcaggcgcagagacactgattaaaaacaagttgcatgtggaaaatcaaaataaaaagtc

SEQ ID NO: 136219 - DNA, 80 bp, synthetic construct
  source 1..80: mol_type = other DNA
gggaggtctcgtagaccgtgcatcatgagcacactacctaaacctcaaagaaaaaccataagaaacaccaaccgtcgccc

SEQ ID NO: 136220 - DNA, 80 bp, synthetic construct
  source 1..80: mol_type = other DNA
aggtggatggcgtgaggctacacaggtacgccccagaatgcaagcctatccttagggatgaggtaactttcagtgtgggg

SEQ ID NO: 136221 - DNA, 80 bp, synthetic construct
  source 1..80: mol_type = other DNA
aacaatttttttaccgaggtacccgatgatggggatgatttttatactccttctctttatgaactgtatgatattgatgt

SEQ ID NO: 136222 - DNA, 80 bp, synthetic construct
  source 1..80: mol_type = other DNA
cggggcaatgtgtcccggtgttggataccggtcacgcctaacgtggccattagccagcccggcgccctcacaaggaggct

SEQ ID NO: 136223 - DNA, 80 bp, synthetic construct
  source 1..80: mol_type = other DNA
ctttatggaagcgtacgtgcagaatccggcaagcaaaccgctgacggcacagctgtttttgattgtacaacacagccgcg

SEQ ID NO: 136224 - DNA, 80 bp, synthetic construct
  source 1..80: mol_type = other DNA
aatcctgccatagcctctctcatgtcattcactgccgcagtcacgagccccctaaccactcagcaaaccctcctcttcaa

SEQ ID NO: 136225 - DNA, 80 bp, synthetic construct
  source 1..80: mol_type = other DNA
ggaacagctttcttgtggaggatcatgggttcggggtatttcacactagtgtctggctcaaggttagagaagattattca

SEQ ID NO: 136226 - DNA, 80 bp, synthetic construct
  source 1..80: mol_type = other DNA
gggaagagagactcagccgcatggctgtcagcggagatgactgtgtggtaaagcctctggatgatcgctttgccacttcg

SEQ ID NO: 136227 - DNA, 80 bp, synthetic construct
  source 1..80: mol_type = other DNA
cacccccctcgcgcgggctgcgtgggagacagctagacacactccagtcaactcctggctaggcaacatcattatgtatg

SEQ ID NO: 136228 - DNA, 80 bp, synthetic construct
  source 1..80: mol_type = other DNA
agaagttcccgccagccttgccgatctgggcgaggccagactacaacccacctttaatcgaggtgtggaagcagcctgaa

SEQ ID NO: 136229 - DNA, 80 bp, synthetic construct
  source 1..80: mol_type = other DNA
gcgcaactgcgtgaggccccccgactacccgacgccccccgcgtcggagtggaacagcctctggatgaccccggtgggca

SEQ ID NO: 136230 - DNA, 80 bp, synthetic construct
  source 1..80: mol_type = other DNA
gaggctgaattgactcagagagcgcacagagcgttcttttcggccatggtgaggaatccaatggtggatggagaggtcat

SEQ ID NO: 136231 - DNA, 80 bp, synthetic construct
  source 1..80: mol_type = other DNA
cgtggagcttggccatgtacgcgctcacctctttgtgggaggagaacagccgcgtccagccggggaggttggcgtggttg

SEQ ID NO: 136232 - DNA, 80 bp, synthetic construct
  source 1..80: mol_type = other DNA
attaccccacaggaacgtctggatctcccatagtcgacaagaatggagacgttattggtctgtacggcaatggcgtcatc

SEQ ID NO: 136233 - DNA, 80 bp, synthetic construct
  source 1..80: mol_type = other DNA
atgcatgtctgcagacctcgaggtggtaaccagtacgtgggtcttggtgggaggcattgtggctgctctggctgcctact

SEQ ID NO: 136234 - DNA, 80 bp, synthetic construct
  source 1..80: mol_type = other DNA
acaagtcaatgcattcaatggggagatgattgatccttttcagttgggccttctggtgatctttctggccacccaggagg

SEQ ID NO: 136235 - DNA, 80 bp, synthetic construct
  source 1..80: mol_type = other DNA
tgggctggtaccttaaagggttgtcaacactggaaggaggccttttttacgcagatgacacagccggctgggataccaag

SEQ ID NO: 136236 - DNA, 80 bp, synthetic construct
  source 1..80: mol_type = other DNA
tccaccggagcggacaccggaggagacagcttccagcagctcttcgacgagactgccgcttcagaagcgggatcactgtc

SEQ ID NO: 136237 - DNA, 80 bp, synthetic construct
  source 1..80: mol_type = other DNA
ctgaccggctgtactgcggtggccccatgtttaactctaaaggtcaggcatgtgggtaccgcaggtgcagggccagtggc

SEQ ID NO: 136238 - DNA, 80 bp, synthetic construct
  source 1..80: mol_type = other DNA
gattggtgctgccgtagctgtaccctgccaccattgcgctaccggactgaatcgggttgttggtatgggatggagatacg

SEQ ID NO: 136239 - DNA, 80 bp, synthetic construct
  source 1..80: mol_type = other DNA
caccaagccctgtcgtggtaggcaccacgaatcggcagggcacacctacatacacttgggggggatgtgggactgatgtg

SEQ ID NO: 136240 - DNA, 80 bp, synthetic construct
  source 1..80: mol_type = other DNA
tgcgagagagtggggaatacgtcacggtgttgggtgccagtctcgccaaacatggctgtgcggcagcccggtgccctcac

SEQ ID NO: 136241 - DNA, 80 bp, synthetic construct
  source 1..80: mol_type = other DNA
cagttcaagcagaaagcccttggcgttctgaacatcgctggcaagcaggcacaagaggctgcaccagcggtcaaaacaaa

SEQ ID NO: 136242 - DNA, 80 bp, synthetic construct
  source 1..80: mol_type = other DNA
accgggatcgctcagagatacagcccctactacactctaccactgagctcgccattctaccttgctccttcacgcccatg

SEQ ID NO: 136243 - DNA, 80 bp, synthetic construct
  source 1..80: mol_type = other DNA
gttaaaaatggacaagatggggatcaagagagcgaatgggaaaaagacaccaatgtggcagatcgaaaccaaatatgcaa

SEQ ID NO: 136244 - DNA, 80 bp, synthetic construct
  source 1..80: mol_type = other DNA
gaggaatacgtggaagtgaggcaggagggggacttccactacgtgacgggcatgactgctgacaatctcaagtgcccatg

SEQ ID NO: 136245 - DNA, 80 bp, synthetic construct
  source 1..80: mol_type = other DNA
agtgtcagatggaaagctagccctgcaaacatcagcccccctctctggcagtgacagcgacacccttactgtaactgcaa

SEQ ID NO: 136246 - DNA, 80 bp, synthetic construct
  source 1..80: mol_type = other DNA
tatccgccctcacagaaaggctctacaagggcggccccatgtataacagcaaggaggacctatgcgggtatcggaggtgc

SEQ ID NO: 136247 - DNA, 80 bp, synthetic construct
  source 1..80: mol_type = other DNA
tttccgctgagcctcatgtccaccgacaaacacaccaattttttcgagtgtcgcagcacctcctacgccggggcggtcgt

SEQ ID NO: 136248 - DNA, 80 bp, synthetic construct
  source 1..80: mol_type = other DNA
tacctatatgggcgcggcctgattacaacccacctttacttgagacttggaaaaaaccggactacgacccaccactggtc

SEQ ID NO: 136249 - DNA, 80 bp, synthetic construct
  source 1..80: mol_type = other DNA
ccgagcaacccagtcattgcttccctcatggcattcaccgccgcggtcactagccccctaacgtcccaacagactctcct

SEQ ID NO: 136250 - DNA, 80 bp, synthetic construct
  source 1..80: mol_type = other DNA
acagctcgagggtcgctcaggagctagcccgcctcgccgacaaaaccttcggagaggccggcagttcgagcgaagcacca

SEQ ID NO: 136251 - DNA, 80 bp, synthetic construct
  source 1..80: mol_type = other DNA
tgggggcctagagcacaggcttagtgcagcgtgcaactggactcgcggtgagcggtgcaacctcgaagacagagatagag

SEQ ID NO: 136252 - DNA, 80 bp, synthetic construct
  source 1..80: mol_type = other DNA
ttgaaggtgtagatgagggcacgcaacgctatgcagacacgcccctcgaactcgttcccgcaggccagcttggccttgtg

SEQ ID NO: 136253 - DNA, 80 bp, synthetic construct
  source 1..80: mol_type = other DNA
tgcttccagaggaaaccacgtcgcccctactcactacgtgacggagtcggatgcgtcgcagcgtgtgacccaactacttg

SEQ ID NO: 136254 - DNA, 80 bp, synthetic construct
  source 1..80: mol_type = other DNA
gcggttaaaaaacggaagcgggtaggtaaaattctccccgatcgatcggtggttggcgttgaacggctctgcgatgacac

SEQ ID NO: 136255 - DNA, 80 bp, synthetic construct
  source 1..80: mol_type = other DNA
gaagaaggacctgagctatcgcgacatccccgcctactacgccgccgggcccgcgcaacgcggggtgatcggcgagtact

SEQ ID NO: 136256 - DNA, 80 bp, synthetic construct
  source 1..80: mol_type = other DNA
ctaggagacaccgcatgggactttggttctataggaggagtgttcacgtctgttggaaaactagtacaccagatttttgg

SEQ ID NO: 136257 - DNA, 80 bp, synthetic construct
  source 1..80: mol_type = other DNA
gcactcgcatgttcctgaggattcgggaaacgaacacaactgaatgcgactcgaagatcataggaaccgccgtcaagaac

SEQ ID NO: 136258 - DNA, 80 bp, synthetic construct
  source 1..80: mol_type = other DNA
ctgggccacgaggtattgctcggacctgccgacgattacaggtccatggggtggaggcttctatcgcccataacagcata

SEQ ID NO: 136259 - DNA, 80 bp, synthetic construct
  source 1..80: mol_type = other DNA
ctcatcctcgcggtccgtttcatatgttgagtcattttcatagacgtagccgtagccttgtgatgggtaatttgtgcggc

SEQ ID NO: 136260 - DNA, 80 bp, synthetic construct
  source 1..80: mol_type = other DNA
ggcaacaccttaacgtgctacattaaggccgaggccgcatgccgtgcagccaaactcaagaattatgacatgttggtctg

SEQ ID NO: 136261 - DNA, 80 bp, synthetic construct
  source 1..80: mol_type = other DNA
gcacccggggtcagggaagacacatcgagtcctcccggagctcgtgaggcagtgtgcaaaccgagggatgagaactctag

SEQ ID NO: 136262 - DNA, 80 bp, synthetic construct
  source 1..80: mol_type = other DNA
gctaaggtgttgattgtgatgctactctttgccggcgttgacgaggaaacccacgtggcagggggggcggcaggttacac

SEQ ID NO: 136263 - DNA, 80 bp, synthetic construct
  source 1..80: mol_type = other DNA
ctaccatgatcttggcgtacgcgatgcgtgtccccgaggtcattatagacatcattagcggggctcattggggcgtcatg

SEQ ID NO: 136264 - DNA, 80 bp, synthetic construct
  source 1..80: mol_type = other DNA
ttcccactgccatcatgggatctgcctatggcttccaatattcacctaaggagagagttgaatacctccttaaggtctgg

SEQ ID NO: 136265 - DNA, 80 bp, synthetic construct
  source 1..80: mol_type = other DNA
cagcagcgttgtctgctgctccatgtcatattcatggacgggagcactcatcacaccgtgtgctgcggaagaggagaagt

SEQ ID NO: 136266 - DNA, 80 bp, synthetic construct
  source 1..80: mol_type = other DNA
tgcctggggtatatacaaacgaagccttccatccagacatcattttgctgccaggatgcggggtggacttcacccacagc

SEQ ID NO: 136267 - DNA, 80 bp, synthetic construct
  source 1..80: mol_type = other DNA
caataacattgctgtgtttgattcccactgtaatggcgtttcacttgacaacgagagatggtgaacccctcatgatagtg

SEQ ID NO: 136268 - DNA, 80 bp, synthetic construct
  source 1..80: mol_type = other DNA
ttgatacttgttttttctgacatggtaagctcttgaccaccgttccctatcattaagaacacggtgaatgtgttccagta

SEQ ID NO: 136269 - DNA, 80 bp, synthetic construct
  source 1..80: mol_type = other DNA
aataaacattaaactaaagaagcttggcgaacggtgggatatatgacacgctccagcagcaggcaagcaaccggctgtcc

SEQ ID NO: 136270 - DNA, 80 bp, synthetic construct
  source 1..80: mol_type = other DNA
tcatttcgtggtgggcgctactgaggataacctaaagtgcccatgccaagtgccagctccagagttcttcactgaggttg

SEQ ID NO: 136271 - DNA, 80 bp, synthetic construct
  source 1..80: mol_type = other DNA
aactctagtgggtgttctgatatgatgtctagctgccgagcgctggatactttcccgcaagggtggggcgccttaaaaga

SEQ ID NO: 136272 - DNA, 80 bp, synthetic construct
  source 1..80: mol_type = other DNA
cagctttgtcaaccggccttattcatttacatcagaacattgtggacgtgcaatacctctacggagtgtcctcgagcgta

SEQ ID NO: 136273 - DNA, 80 bp, synthetic construct
  source 1..80: mol_type = other DNA
ggccacagaatggcgtgggatatgatgatgaactggtctccaacagcaaccttggtcctgtcatacgctatgcgagtacc

SEQ ID NO: 136274 - DNA, 80 bp, synthetic construct
  source 1..80: mol_type = other DNA
accagtactttattgcgagggcagaagctgtgttgcaggtttgggtccccccactccaggtgcggtgggctcgagactca

SEQ ID NO: 136275 - DNA, 80 bp, synthetic construct
  source 1..80: mol_type = other DNA
ctatcccgaccgccttactgccgcctgttttgaccgctgggatctgccattgtcagacatgtataccccgtacgtcttcc

SEQ ID NO: 136276 - DNA, 80 bp, synthetic construct
  source 1..80: mol_type = other DNA
aggtaccgccgcagctcgttggcgtccagccgcacctgcgcctgctgggtgacgtggttacagatacggtccgccaggcg

SEQ ID NO: 136277 - DNA, 80 bp, synthetic construct
  source 1..80: mol_type = other DNA
cctggggtgcggacaccgcagcatgcggggacatcattctgggcttacccgtctccgcccggaggtggagagagatactt

SEQ ID NO: 136278 - DNA, 80 bp, synthetic construct
  source 1..80: mol_type = other DNA
cgtgggccaaggtcgtcgtcatccttctattgactgcaggagtggacgcccagacgcacactatatctggtcatgcggct

SEQ ID NO: 136279 - DNA, 80 bp, synthetic construct
  source 1..80: mol_type = other DNA
atgggcaggggctaaagggggtaaagagggagcgggaggcttctgaggctacagaggaggctaggaatctaacttttagc

SEQ ID NO: 136280 - DNA, 80 bp, synthetic construct
  source 1..80: mol_type = other DNA
gagggcaaagcgtgcgaaggagccgaccagggtcgccttcttggtgcgcagaaagtggcggtccatgacgtacacaaact

SEQ ID NO: 136281 - DNA, 80 bp, synthetic construct
  source 1..80: mol_type = other DNA
aactcattgatggaatatcactaggactaattttgctaaaaatagtaacacagtttgacaacacccaagtgggcacctta

SEQ ID NO: 136282 - DNA, 80 bp, synthetic construct
  source 1..80: mol_type = other DNA
agcaccgcccctaatacaactaccagtacaattacaacgaacagggcatatgtcacgttagctacgggtagagcaagttt

SEQ ID NO: 136283 - DNA, 80 bp, synthetic construct
  source 1..80: mol_type = other DNA
gttggccggggccgcggtcggcagcatcgggctgcgtagggtcctcattgacatcttggctggatatggagcaggagtgg

SEQ ID NO: 136284 - DNA, 80 bp, synthetic construct
  source 1..80: mol_type = other DNA
gtaactcgctgctgcgccaccacaatttggtgtattccaccacctctcgcagcgctggccagaggcagaaaaaagtcaca

SEQ ID NO: 136285 - DNA, 80 bp, synthetic construct
  source 1..80: mol_type = other DNA
tcaaacctgcggttacagacgttgccgcgccagcggggtgctaaccactagcatgggtaacaccatcacatgctatgtga

SEQ ID NO: 136286 - DNA, 80 bp, synthetic construct
  source 1..80: mol_type = other DNA
agaaggaagagtcattctcagtaatccatcgcccatcaccagtgcgagcgcagctcagcggagaggcagagtgggcagaa

SEQ ID NO: 136287 - DNA, 80 bp, synthetic construct
  source 1..80: mol_type = other DNA
attgcggaggccccatgtttaattctcgtaatcaatcatgtggttatcgcaggtgccgggccagtggtgtcctcaccact

SEQ ID NO: 136288 - DNA, 80 bp, synthetic construct
  source 1..80: mol_type = other DNA
ctgttgacttcagcctggaccctaccttctctatagagactaccactgtaccccaggatgcggtatctcgcagccagcgg

SEQ ID NO: 136289 - DNA, 80 bp, synthetic construct
  source 1..80: mol_type = other DNA
cccaacccatgcccagggagagttgacggggaggggacgcaaatggttagaaggagactcactgcggacacacctcacga

SEQ ID NO: 136290 - DNA, 80 bp, synthetic construct
  source 1..80: mol_type = other DNA
tacttcagtgggtttcccatttgccaccttcaacgagggttaagatgacaattgaacccatagggttaatcacactgttt

SEQ ID NO: 136291 - DNA, 80 bp, synthetic construct
  source 1..80: mol_type = other DNA
gcgggtcgatttcctcctacaggcgtggagggaaaagaaaacccctatgggtttctcttatgacacccgctgttttgact

SEQ ID NO: 136292 - DNA, 80 bp, synthetic construct
  source 1..80: mol_type = other DNA
ccggacctggggtcagcctggctacccctggcccctgtatgggaatgagggctgcgggtgtgcaggctggcttatgtctc

SEQ ID NO: 136293 - DNA, 80 bp, synthetic construct
  source 1..80: mol_type = other DNA
ggggggacatatttcacagcgtgtcccgggcccgaccccgcactttcctcctgttcctactcctactatcagtagtggta

SEQ ID NO: 136294 - DNA, 80 bp, synthetic construct
  source 1..80: mol_type = other DNA
actttcacaagagggacatgaggctactttcattcgctgtctcctccgctgttccaacggcctgggtgcccagtggaagg

SEQ ID NO: 136295 - DNA, 80 bp, synthetic construct
  source 1..80: mol_type = other DNA
gctgggagtgcttcctgctcttcatctgctgggcgtggtatgtgcggggtcgcgttgtccccgctgccacgtatggcttc

SEQ ID NO: 136296 - DNA, 80 bp, synthetic construct
  source 1..80: mol_type = other DNA
tgcccacctacacctggggggagaatgagaccgacgtctttctgctaaatagcacaagacctccgcgaggatcttggttt

SEQ ID NO: 136297 - DNA, 80 bp, synthetic construct
  source 1..80: mol_type = other DNA
ctaattctagcattgtttatgaggcgggtgatatcattctacaccttcctgggtgtgttccatgcgtcaccactggaaac

SEQ ID NO: 136298 - DNA, 80 bp, synthetic construct
  source 1..80: mol_type = other DNA
gaccatctcactccgctctcaggctgggctgctgacggccttaaggacctagcgacggcgcttgaaccagtcatcttcac

SEQ ID NO: 136299 - DNA, 80 bp, synthetic construct
  source 1..80: mol_type = other DNA
caacgtgactggctccttaactgagaggccatactgctggcactatgctccgcgtccgtgtggcacggtcccagcttcca

SEQ ID NO: 136300 - DNA, 80 bp, synthetic construct
  source 1..80: mol_type = other DNA
ctacgccatcatctttttctgctttgcatggtacatcaaaggcagatttccagcagcatgcacgtacgcgatctgcggga

SEQ ID NO: 136301 - DNA, 80 bp, synthetic construct
  source 1..80: mol_type = other DNA
gaagacctgctttgccccactgactgcttcagaaaacatcctgacgcgacttacattaagtgtggggccgggccctggtt

SEQ ID NO: 136302 - DNA, 80 bp, synthetic construct
  source 1..80: mol_type = other DNA
tcagggtctcctatcataaacagagagggaaaggtagtgggactatatggcaatggagtggttacaaagaatggcggcta

SEQ ID NO: 136303 - DNA, 80 bp, synthetic construct
  source 1..80: mol_type = other DNA
ctccgggtggcctttttcgcgtcgcgtgccggcgagcgggcccggacggggcccggaccgccgcggtcgggtgcccctca

SEQ ID NO: 136304 - DNA, 80 bp, synthetic construct
  source 1..80: mol_type = other DNA
cccggctcgcgccgtgctgacaaacgccttgctgttgggcgtcttcctgtgcacggccgacgccgcggtatccctgaata

SEQ ID NO: 136305 - DNA, 80 bp, synthetic construct
  source 1..80: mol_type = other DNA
gtttcgcatatgccctggtgttggcggtttttttttgttgtctgtctgcccggcgctcggttgtccgttctgtcgtcgct

SEQ ID NO: 136306 - DNA, 80 bp, synthetic construct
  source 1..80: mol_type = other DNA
ctgtcatccagaccattgacttcagcctcgaccccactttttccatagagaccacaacagtgccccaggatgcggtatcc

SEQ ID NO: 136307 - DNA, 80 bp, synthetic construct
  source 1..80: mol_type = other DNA
ggtaggcctcctgaaacaggccacacgggtcctccacgagttcgcggcaccccggggggcgcttaaactgtacgtcgctg

SEQ ID NO: 136308 - DNA, 80 bp, synthetic construct
  source 1..80: mol_type = other DNA
gccctcatgacaggatttactggagacttcgactctgtaatcgactgcaacgtggcggtcactcaagtcgtggacttcag

SEQ ID NO: 136309 - DNA, 80 bp, synthetic construct
  source 1..80: mol_type = other DNA
cgcctcatcgtgtaccccgatctgggagttcgggtgtgcgagaagagggcgcttcatgacgtcgtcaaaaacctctctga

SEQ ID NO: 136310 - DNA, 80 bp, synthetic construct
  source 1..80: mol_type = other DNA
aatcggaatcctcctcaaccgagtcgtccgaggatgaggcgggagacctacgcggcgggcgccgtcgctccccgcgtgag

SEQ ID NO: 136311 - DNA, 80 bp, synthetic construct
  source 1..80: mol_type = other DNA
caggtcaagaatcccatcgcccgtgatataccaggccaacgcctcgccctgctgcagggtttggcggaaaaacaccgcgg

SEQ ID NO: 136312 - DNA, 80 bp, synthetic construct
  source 1..80: mol_type = other DNA
gtgtacctgattttcacatttgtgactgctacctgcgtctgcagtattattactctgctaatcacctcgctccaattttt

SEQ ID NO: 136313 - DNA, 80 bp, synthetic construct
  source 1..80: mol_type = other DNA
atgactggcttcactggcgatttcgactcggtgatagactgcaatacgtgtgtcacccaaacagtcgactttagcctcga

SEQ ID NO: 136314 - DNA, 80 bp, synthetic construct
  source 1..80: mol_type = other DNA
gctccacaccttggtctcgcagctgacatcttaatgccagttgtataaaatcatacaaatcagaagccagcagcaaagaa

SEQ ID NO: 136315 - DNA, 80 bp, synthetic construct
  source 1..80: mol_type = other DNA
gggttggcattaacacaaggaatatgacaatgtccatgagcatgatcctagttggagtcatcatgatgttcctgtcccta

SEQ ID NO: 136316 - DNA, 80 bp, synthetic construct
  source 1..80: mol_type = other DNA
tgtaaaactcggagaattgtggtggccggaattattcgtgttaactcatcagggtggtataaaaagaaaagggtacttcc

SEQ ID NO: 136317 - DNA, 80 bp, synthetic construct
  source 1..80: mol_type = other DNA
ggatcctttggcatgccatgacaggcacggccaggaccccagtgttgaaaatgttctggaaaacggtaccattacgccaa

SEQ ID NO: 136318 - DNA, 80 bp, synthetic construct
  source 1..80: mol_type = other DNA
ccaccctcacctgatctttgacatctctaaacaactcatagccttcttgggtcccctatggctcttgcaatcttgcctca

SEQ ID NO: 136319 - DNA, 80 bp, synthetic construct
  source 1..80: mol_type = other DNA
gctaagcttgcaattttgatgggtgccaccttcgcggaaatgaacactggaggagatgtagctcatctggcgctgatagc

SEQ ID NO: 136320 - DNA, 80 bp, synthetic construct
  source 1..80: mol_type = other DNA
ccatgaggataaccggacctaaaacttgcatgaatacctggcaggggacctttcccatcaactgctatacagaaggtcag

SEQ ID NO: 136321 - DNA, 80 bp, synthetic construct
  source 1..80: mol_type = other DNA
gtccggaatattggtcacaatgggggcttggacagtttatgagctcttctcatccacgcggagaactgacctggtttttt

SEQ ID NO: 136322 - DNA, 80 bp, synthetic construct
  source 1..80: mol_type = other DNA
tacatgacccgagaccctgaaactcccctggccagagccgcgtgggagacagccagacacactccagttaactcctggtt

SEQ ID NO: 136323 - DNA, 80 bp, synthetic construct
  source 1..80: mol_type = other DNA
ggagggagcggtgcagtggatgaacaggctcatagcgttcgcatcacggggcaaccacgtgtcaccagcacactatgtcc

SEQ ID NO: 136324 - DNA, 80 bp, synthetic construct
  source 1..80: mol_type = other DNA
cacatataccactggtggcgctgcaggccgcagtgcgtttagtctcgctggccttttcagcccaggagctagccagaaat

SEQ ID NO: 136325 - DNA, 80 bp, synthetic construct
  source 1..80: mol_type = other DNA
caagtgcgcacctttaatactgaaaaatagtgacgtagatggccaaagttcgcctacacaacacaaaaaaaaaccccaaa

SEQ ID NO: 136326 - DNA, 80 bp, synthetic construct
  source 1..80: mol_type = other DNA
ttggacatgatcgctggtgcccactggggagtcctagcgggcatagcgtatttctccatggcgtggaactgggcgaaggt

SEQ ID NO: 136327 - DNA, 80 bp, synthetic construct
  source 1..80: mol_type = other DNA
ccccgcggattgtccttgataggactgaagagggctatgctgagtctgattgacgggaaaggcccaatacgtttcgtgtt

SEQ ID NO: 136328 - DNA, 80 bp, synthetic construct
  source 1..80: mol_type = other DNA
ggagtcacttactctatcactccattggacctaccagccatcattcaacggctgcatggtatggccgccttttcactcca

SEQ ID NO: 136329 - DNA, 80 bp, synthetic construct
  source 1..80: mol_type = other DNA
cccgctcattgcctcttccaaaagggtgtggcctaacgagctggtggtgtatttaatcaggctagcgcggcgggcctgcc

SEQ ID NO: 136330 - DNA, 80 bp, synthetic construct
  source 1..80: mol_type = other DNA
acgggcaggggaaagttgggcatatacaggtatgttgcctccggtgagagggcgtcggtgatgtttgactccgtggtgct

SEQ ID NO: 136331 - DNA, 80 bp, synthetic construct
  source 1..80: mol_type = other DNA
aaacgtatccgtagcctttgaccatactggacagagatactactacctcacaagagacccaaccacaccaatagcgcggg

SEQ ID NO: 136332 - DNA, 80 bp, synthetic construct
  source 1..80: mol_type = other DNA
agaacattgagagtcttgaagatggtggagccatggctctcttcaaaacctgagttctgcatcaaagtcctcaaccccta

SEQ ID NO: 136333 - DNA, 80 bp, synthetic construct
  source 1..80: mol_type = other DNA
tcggtgacagtcccacacccgaacatcacagaaacagctctgtccacgacgggggagattcccttttatgggaaggccat

SEQ ID NO: 136334 - DNA, 80 bp, synthetic construct
  source 1..80: mol_type = other DNA
ccaccggctacgtcactctcctgtcggccgccggcggtccataagcccggccggccgggccgacgcgaataaaccgggcc

SEQ ID NO: 136335 - DNA, 80 bp, synthetic construct
  source 1..80: mol_type = other DNA
gccaacttgttatggtggcaagagatgggcggcaacatcacacgggtagaatctgacacaaaggttgtaatccttgattc

SEQ ID NO: 136336 - DNA, 80 bp, synthetic construct
  source 1..80: mol_type = other DNA
gagtgttcgtgcagcctccatgagtgtcgtgcagcctccatgagtgtcgtacagcctccatttgcaattgtggctctgtg

SEQ ID NO: 136337 - DNA, 80 bp, synthetic construct
  source 1..80: mol_type = other DNA
gcatatggggtagagcctaacatcagaactggtgtcaggactataacaacaggaggtcctattacctactctacctatgg

SEQ ID NO: 136338 - DNA, 80 bp, synthetic construct
  source 1..80: mol_type = other DNA
tggatgagagacaaaactcccgtcgccagttggaccgacgttccttacgtcgggaaaagggaagacatctggtgtggcag

SEQ ID NO: 136339 - DNA, 80 bp, synthetic construct
  source 1..80: mol_type = other DNA
aaccgcgacccccagtccctggagcagcggcgtaagctcatgctggccgtggtcctggtcaccctcgagttggaatgtat

SEQ ID NO: 136340 - DNA, 80 bp, synthetic construct
  source 1..80: mol_type = other DNA
gcgcgcccgctcgcagagccgcgtcaggttggtggcctgggtgctggtggccaggtggcggccgccgtgaaagacgtaga

SEQ ID NO: 136341 - DNA, 80 bp, synthetic construct
  source 1..80: mol_type = other DNA
ccagggggggaaagccgccatttgcggcaagtacctcttcaactgggcagtaaaaaccaagcttaaactcactccactgg

SEQ ID NO: 136342 - DNA, 80 bp, synthetic construct
  source 1..80: mol_type = other DNA
gcgctccaacactatagccgcgtgcccatcatacagcaggcgaatatatataaaatgcctacctctgacaaacacgctcc

SEQ ID NO: 136343 - DNA, 80 bp, synthetic construct
  source 1..80: mol_type = other DNA
tggtctgcggcacagcctgctagtccccgtcctgccgcgcgggcgcgggcgcgggaaaaaagccgcgcgggcgctggcgc

SEQ ID NO: 136344 - DNA, 80 bp, synthetic construct
  source 1..80: mol_type = other DNA
ggcgcttatggaattgccacattgttcaccaccgggcccaagcagaacatccagcttgtgaattccaacggcagctggca

SEQ ID NO: 136345 - DNA, 80 bp, synthetic construct
  source 1..80: mol_type = other DNA
cgtctcacaagtagaggccgcgctggagaacttgatcgtcctcaacgccgcctccgcagccagcggccacggatggctct

SEQ ID NO: 136346 - DNA, 80 bp, synthetic construct
  source 1..80: mol_type = other DNA
caacggcaaacatttccctgacagccattgcaaatcaggcagctatactgatgggacttgacaagggatggccaatatcg

SEQ ID NO: 136347 - DNA, 80 bp, synthetic construct
  source 1..80: mol_type = other DNA
gccgtggcacctaggcaagttggaactggattttgatttgtgtgagggtaccacagttgttgtggatgaacattgtggaa

SEQ ID NO: 136348 - DNA, 80 bp, synthetic construct
  source 1..80: mol_type = other DNA
gcagctcccgcctgtgcatacggtctgcttcagatatggccgctcctactgctggtcctagtcttgcctcgacgggctta

SEQ ID NO: 136349 - DNA, 80 bp, synthetic construct
  source 1..80: mol_type = other DNA
catccccgggtgcgtgccttgcgtccgggagtgcggctcctcccgccgctgggtggcgctcactcccacgctcgcggcca

SEQ ID NO: 136350 - DNA, 80 bp, synthetic construct
  source 1..80: mol_type = other DNA
ctgacatccatggccaggggagttaagagggagaggagcgatggaggtaataccgggatgatgaccgagctgacggccag

SEQ ID NO: 136351 - DNA, 80 bp, synthetic construct
  source 1..80: mol_type = other DNA
tttgccagtggaagaaagagcataactcttgacatcctaacagagattgccactttgccaacttacctttcctctaaggc

SEQ ID NO: 136352 - DNA, 80 bp, synthetic construct
  source 1..80: mol_type = other DNA
ccctgggcgcggcctgactacaatccgccgctcctggagagctggaagaggccggactacaacccaccaacggtggccgg

SEQ ID NO: 136353 - DNA, 80 bp, synthetic construct
  source 1..80: mol_type = other DNA
aaattatgcaacagggaacctgcccggttgctctttttctatcttcctactagctctcttgtcttgtatatctgtaccag

SEQ ID NO: 136354 - DNA, 80 bp, synthetic construct
  source 1..80: mol_type = other DNA
ggtatggcgcaaaggaagtccggagtcatgccagtagggccatttcccatatcaactccgtatgggaggacctattggaa

SEQ ID NO: 136355 - DNA, 80 bp, synthetic construct
  source 1..80: mol_type = other DNA
aaagaacgtggccccccgggcgtccggagaggcgtccggagacgggccgctcggcggcccgggcgagcgcagggcagcct

SEQ ID NO: 136356 - DNA, 80 bp, synthetic construct
  source 1..80: mol_type = other DNA
ccggacaccggatggcgtgggacatgatgatgaactggtcgcctacggctaccctggtcctttccagcctcctgaggacg

SEQ ID NO: 136357 - DNA, 80 bp, synthetic construct
  source 1..80: mol_type = other DNA
acccagtctttcctaggcacaaccatctcaggggtcctctggaccgtcttccatggggctggaaacaagacgctagccgg

SEQ ID NO: 136358 - DNA, 80 bp, synthetic construct
  source 1..80: mol_type = other DNA
ctgttcaactcgggtccgaggcagaaactgcagttggtgaattctaacgggtcatggcacatcaacagcactgccctgaa

SEQ ID NO: 136359 - DNA, 80 bp, synthetic construct
  source 1..80: mol_type = other DNA
aactggatggtatgactggcagcaggttccattctgctcgaaccatttcactgaattaatcatgaaagatggaagaacac

SEQ ID NO: 136360 - DNA, 80 bp, synthetic construct
  source 1..80: mol_type = other DNA
cccgttggtgctaagtctccaacaccttgcacttgtggcgccagtgatctcttcttggtgaccaggaacgctgatgttat

SEQ ID NO: 136361 - DNA, 80 bp, synthetic construct
  source 1..80: mol_type = other DNA
aaagattcaaagcttactcttaccctaacaaaatgtggaagccaaattctaggaagtgtatctttattagcggtcagtgg

SEQ ID NO: 136362 - DNA, 80 bp, synthetic construct
  source 1..80: mol_type = other DNA
ctctgtatgtgggtgatttctgtggaggggcgtttttagtggggcagatgttcacctttgcgccccagcaccatatgact

SEQ ID NO: 136363 - DNA, 80 bp, synthetic construct
  source 1..80: mol_type = other DNA
ccgaggaggacgataccaccgtgtgctgctccatgtcatactcctggaccggggctctaataactccctgtagccccgaa

SEQ ID NO: 136364 - DNA, 80 bp, synthetic construct
  source 1..80: mol_type = other DNA
agtcgtcatcgccgccatcaccgttttcacgctgaccccatattataagcagctgctcttgcacttcctgtggtggaacc

SEQ ID NO: 136365 - DNA, 80 bp, synthetic construct
  source 1..80: mol_type = other DNA
acagttggagattgcacttgctaagccatttgaggaaaaggatggcaaacttgctttaaaaattggccatggattagccg

SEQ ID NO: 136366 - DNA, 80 bp, synthetic construct
  source 1..80: mol_type = other DNA
tgtatgcgcgcggtaaaggcgacctcggcggcgatgtcaaagggcggcaggacgaggcgcgggtggcgcaggagcacctc

SEQ ID NO: 136367 - DNA, 80 bp, synthetic construct
  source 1..80: mol_type = other DNA
aacaccaatatcgtcctgggccgcaggcggcctcaaggatctcgcagtagcccttgagccagtcatattcacacccatgg

SEQ ID NO: 136368 - DNA, 80 bp, synthetic construct
  source 1..80: mol_type = other DNA
gaagctgcctgcaactggacgcggggtgatccttgcgctctagaggacagagacagatcggagctgagcccgctcctgct

SEQ ID NO: 136369 - DNA, 80 bp, synthetic construct
  source 1..80: mol_type = other DNA
ccaacagacaaccaggactccgcgtcggacgcggtcagccacggcgatccggaagacctcgatggcgctgcccggtcggg

SEQ ID NO: 136370 - DNA, 80 bp, synthetic construct
  source 1..80: mol_type = other DNA
aacaccacctgcccctgcggagcacagataacgggacatgtcaaaaacgggacaatgaaactcgttggcccgaagacctg

SEQ ID NO: 136371 - DNA, 80 bp, synthetic construct
  source 1..80: mol_type = other DNA
taagaccatctgcggcccaaaaggccctgtttctcaaatgtataccaatgttgaccaagacctagtggggtggccggccc

SEQ ID NO: 136372 - DNA, 80 bp, synthetic construct
  source 1..80: mol_type = other DNA
tccatgacggggtggcggtccctcgcaacgttctctactattaccgtcatctctacagcccctacgaaacgctcggagaa

SEQ ID NO: 136373 - DNA, 80 bp, synthetic construct
  source 1..80: mol_type = other DNA
ggcctcaattccctcgtggtcggttctcagctcccttgcgaccctgagccggacaccgaggtattggcctccatgttgac

SEQ ID NO: 136374 - DNA, 80 bp, synthetic construct
  source 1..80: mol_type = other DNA
tcggtgatacaaacaaatccttcgcccgcacagtctcttaaactgcattccattttatcctacaaaaggtaacaacagtc

SEQ ID NO: 136375 - DNA, 80 bp, synthetic construct
  source 1..80: mol_type = other DNA
cgtgttccccgacctgggcgtgcgcgtgtgcgagaagatggccctgtacgacgtggttagcaagctccccctggccgtga

SEQ ID NO: 136376 - DNA, 80 bp, synthetic construct
  source 1..80: mol_type = other DNA
cttttgagtttcaaaaaggaactaggaaccttgaccagtgccatcaatcggaggagcacaaaacagaagaaaagaggagg

SEQ ID NO: 136377 - DNA, 80 bp, synthetic construct
  source 1..80: mol_type = other DNA
gagccgctcgtccgcccgaacgacgcgccatacaaagacggagttgacaatgcgcgcgatagagtcgacgtccgtcccca

SEQ ID NO: 136378 - DNA, 80 bp, synthetic construct
  source 1..80: mol_type = other DNA
cgtggaccccaacatcaggaccggagttaggactgtcatcaccggagctgctatcacatactctacttacggcaagttcc

SEQ ID NO: 136379 - DNA, 80 bp, synthetic construct
  source 1..80: mol_type = other DNA
gggctgctagaggacttcgggacctagcggtcgctgtagagcccattgtcttcagcccgatggagaagaaagtcatcact

SEQ ID NO: 136380 - DNA, 80 bp, synthetic construct
  source 1..80: mol_type = other DNA
ccgcaggagaggcatggcaggcagcggcctgaaccgccgccggcggcgggccatgcgcaggcgcctgagtggcggctttc

SEQ ID NO: 136381 - DNA, 80 bp, synthetic construct
  source 1..80: mol_type = other DNA
ggcaaactacctagcccaccactccgacctcatggaaaattccagcggcgaaggattgctagaatgccactgccgctgca

SEQ ID NO: 136382 - DNA, 80 bp, synthetic construct
  source 1..80: mol_type = other DNA
aacgtatccgtagcccatgataacaatggacagagatactactacctcactagagatccagccacgccactgtcgagagc

SEQ ID NO: 136383 - DNA, 80 bp, synthetic construct
  source 1..80: mol_type = other DNA
aggtccatggtgacagcaggatcaaccgatcatatggatcacttctctcttggagtgcttgtgattctactcatggtgca

SEQ ID NO: 136384 - DNA, 80 bp, synthetic construct
  source 1..80: mol_type = other DNA
ggaggccgccggggcccctctcgcccacggccaccacgtgtactgccagcgagtcaatggcgtgatggtgctttccgaca

SEQ ID NO: 136385 - DNA, 80 bp, synthetic construct
  source 1..80: mol_type = other DNA
cactatagccgcatgattccataactctccacccaaatgacatgcgcctccaacctatagccgcatgcccaaggaagtgt

SEQ ID NO: 136386 - DNA, 80 bp, synthetic construct
  source 1..80: mol_type = other DNA
cgtactgacggtgggagaatgttaatccatattggcagaacgaaaacgctggttagcaccgcaggtgtagagaaggcact

SEQ ID NO: 136387 - DNA, 80 bp, synthetic construct
  source 1..80: mol_type = other DNA
ccacgtcgacttgctcgttgggacggctgctttctgctccgctatgtacgtgggggatctctgcggatctattttcctcg

SEQ ID NO: 136388 - DNA, 80 bp, synthetic construct
  source 1..80: mol_type = other DNA
aaagtgagggaaatcaacaccacagaatgtgattccaaaattattggcacggctgtaaaaaacaaccaagccgtgcacag

SEQ ID NO: 136389 - DNA, 80 bp, synthetic construct
  source 1..80: mol_type = other DNA
tatactttagtggggccttcgccaccagtgagctggcatactacaaaaaatggcttaacagaactctgtaatggaaaccc

SEQ ID NO: 136390 - DNA, 80 bp, synthetic construct
  source 1..80: mol_type = other DNA
tgcgactgtagggcacaagacgatgggcgtccagcgcaaccagcgtcatgtccttccagggtctcagggtccgcgtgagg

SEQ ID NO: 136391 - DNA, 80 bp, synthetic construct
  source 1..80: mol_type = other DNA
ctgccccaccgactgtttccggaaacatccggaggcgacttacggtaagtgcgggtcagggccttggctcaccccgcgct

SEQ ID NO: 136392 - DNA, 80 bp, synthetic construct
  source 1..80: mol_type = other DNA
aacagacttactagccttttctcagtgggcgcccaacagaacctgcagctggtcaacagcaatggctcgtggcacatcaa

SEQ ID NO: 136393 - DNA, 80 bp, synthetic construct
  source 1..80: mol_type = other DNA
ctgataaggaggtgctgtatcaacaatacgatgaaatggaggaatgtgctcaagccactccatacatcgagcaagcccaa

SEQ ID NO: 136394 - DNA, 80 bp, synthetic construct
  source 1..80: mol_type = other DNA
tgaggcccacttcacagatccctcaagtatagcagcaagaggatacatttcaacaagggttgagatgggcgaggcggctg

SEQ ID NO: 136395 - DNA, 80 bp, synthetic construct
  source 1..80: mol_type = other DNA
gggaatgaatccctacccttcaccgacaaccccccgggtaatcacggagtgccgatgaaccccggcggccggcaacgcgg

SEQ ID NO: 136396 - DNA, 80 bp, synthetic construct
  source 1..80: mol_type = other DNA
tgcggtctcgccgacctcatggggtacatcccagtcctaggagcgccacttggtggtgttgcggctgccctagcgcatgg

SEQ ID NO: 136397 - DNA, 80 bp, synthetic construct
  source 1..80: mol_type = other DNA
agcccaccacggacgaggatgacgacgacctggacgacggtgaggcgggtggcggcaaggaccctgggagaggagaagga

SEQ ID NO: 136398 - DNA, 80 bp, synthetic construct
  source 1..80: mol_type = other DNA
tatcaaaacaacgttttccttgcactatgcatggaagacaatggccatggtactgtcaattgtatctctcttccccttat

SEQ ID NO: 136399 - DNA, 80 bp, synthetic construct
  source 1..80: mol_type = other DNA
gccaagctgtcagagaccaaggttgctgctagatgtccaacgatgggaccagctgtcctgactgaagaacaccagattgg

SEQ ID NO: 136400 - DNA, 80 bp, synthetic construct
  source 1..80: mol_type = other DNA
ccacctcggctttgtttatataaaaatattgacagatgccgtatacatgaactgccaccctttttccacatcgggacatg

SEQ ID NO: 136401 - DNA, 80 bp, synthetic construct
  source 1..80: mol_type = other DNA
ggatgggaacgacgtacctagctctgatggccacttttaaaatgagaccaatgtttgctgtagggctactattccgcaga

SEQ ID NO: 136402 - DNA, 80 bp, synthetic construct
  source 1..80: mol_type = other DNA
atcaggacaggggtccgcacggtgacaaccggggaccccatcacctactccacgtatggcaaatttctcgcagatcggtg

SEQ ID NO: 136403 - DNA, 80 bp, synthetic construct
  source 1..80: mol_type = other DNA
agcacgcgccccaccggggcgtgcgtgtacctggaaccctggcacagcgacgttcgggccgtgctcagaatgaagggcgt

SEQ ID NO: 136404 - DNA, 80 bp, synthetic construct
  source 1..80: mol_type = other DNA
agtctaccctgacttgggtgtgcgggtttgcgagaagcgcgccctttatgatgtcactcagaagctcccagtcgccatca

SEQ ID NO: 136405 - DNA, 80 bp, synthetic construct
  source 1..80: mol_type = other DNA
ttgggaaaggtcctagtcgacattctcgccggctacggcgcaggcgtggcaggcgctgtggtcaccttcaagatcatgag

SEQ ID NO: 136406 - DNA, 80 bp, synthetic construct
  source 1..80: mol_type = other DNA
agacagtgtgtggcccagtctattgctttacacccagtccggtcgtggtcggcaccactgaccagaggggcctccccaca

SEQ ID NO: 136407 - DNA, 80 bp, synthetic construct
  source 1..80: mol_type = other DNA
gcgagcgttcacggacgctatgaccaggtactcagctcctcctggagacgagccgcatccggaatacgaccttgagcaca

SEQ ID NO: 136408 - DNA, 80 bp, synthetic construct
  source 1..80: mol_type = other DNA
tggcgtgcgactacatcgatatgcgcctccctgcaaaccccttttaagggatgagatctccttttccgtagggctcaact

SEQ ID NO: 136409 - DNA, 80 bp, synthetic construct
  source 1..80: mol_type = other DNA
cctaacaatacccccggagacatattgtttgatctgcaattaggccctcatttaaacccattcttatcgcacctggctca

SEQ ID NO: 136410 - DNA, 80 bp, synthetic construct
  source 1..80: mol_type = other DNA
atactcccggactccccgtctgccaagaccatctcgaattttgggagggagtctttactggtttgactaacatagacgca

SEQ ID NO: 136411 - DNA, 80 bp, synthetic construct
  source 1..80: mol_type = other DNA
agctattcgccttttccccccgccggcacttgacagtccaggactgcaactgctctatttacccaggccacataacaggt

SEQ ID NO: 136412 - DNA, 80 bp, synthetic construct
  source 1..80: mol_type = other DNA
tgcatggaccggcacgaactgcactgggagctcaaagtggagagctcaataatctaaccacagacagccatagagcaaaa

SEQ ID NO: 136413 - DNA, 80 bp, synthetic construct
  source 1..80: mol_type = other DNA
gtgatgtcgttgtctgtgccaccgatgctctcatgacagggtacacgggtgattttgacagcgtgatagactgcaacgtt

SEQ ID NO: 136414 - DNA, 80 bp, synthetic construct
  source 1..80: mol_type = other DNA
gcaggaacaaatataacaaagaaaggattgttgcttggaacagatgaaactgccgaggctggtaaaaaagatatctatgc

SEQ ID NO: 136415 - DNA, 80 bp, synthetic construct
  source 1..80: mol_type = other DNA
actactgaacagacagaggctacctcaagtgccttcagcagcactgcaaatttaacttcgcttgcttcggtaaatgagac

SEQ ID NO: 136416 - DNA, 80 bp, synthetic construct
  source 1..80: mol_type = other DNA
atgccccccctcgagtgggagcctggggatcccgatctcagctcggggtcgtggtccacagtcagcgaggaggatgatag

SEQ ID NO: 136417 - DNA, 80 bp, synthetic construct
  source 1..80: mol_type = other DNA
gccttgtgcactacccatacaggttgtggcattacccatgtaccgtcaattttaccattcacaaggtgcgcatgtacgtg

SEQ ID NO: 136418 - DNA, 80 bp, synthetic construct
  source 1..80: mol_type = other DNA
tatactaagcctaacagctcggatcagaggccttattgctggcattacgcgcctcgaccgtgtggtgtcgtacccgcgtc

SEQ ID NO: 136419 - DNA, 80 bp, synthetic construct
  source 1..80: mol_type = other DNA
ggttcccccattgtggataaaaatggagatgtgattggattgtatgggaacggcgtcatcatgcctaatggttcatacat

SEQ ID NO: 136420 - DNA, 80 bp, synthetic construct
  source 1..80: mol_type = other DNA
ctagaatgccactgccgctgcaacctctgcacaccccaccgctctttggtctgcaataccgagctgctcagcgaaaccca

SEQ ID NO: 136421 - DNA, 80 bp, synthetic construct
  source 1..80: mol_type = other DNA
ggggcgggaatggcggcgcgctgcgcgatgtcccgcgtgtgctggtcgaagacaggcagggactcgagcagctggaccac

SEQ ID NO: 136422 - DNA, 80 bp, synthetic construct
  source 1..80: mol_type = other DNA
gttgaattcactggcggtagcttggatgatactgagagccataacattcacaactacatcaaacgtggttgttccgctgc

SEQ ID NO: 136423 - DNA, 80 bp, synthetic construct
  source 1..80: mol_type = other DNA
gaccatctggagttctgggagagcgtcttcacaggcctcacccatatagatgcccacttcctgtcccagaccaagcaggc

SEQ ID NO: 136424 - DNA, 80 bp, synthetic construct
  source 1..80: mol_type = other DNA
ccccacttagcctttgacattactaaacacctcctggctgtgttaggttcactttacctgctccaaagctcgcttttgcg

SEQ ID NO: 136425 - DNA, 80 bp, synthetic construct
  source 1..80: mol_type = other DNA
agtgcccaaggactcacgagcctgtttgcttcgggggctaagcagaacatccaactgattaacactaatgggagctggca

SEQ ID NO: 136426 - DNA, 80 bp, synthetic construct
  source 1..80: mol_type = other DNA
gtcccgcccgcggcgtggtctgcggcgctggcggtggcgcgtgcggcgtcgtcgtcgtcgtcagacgaggaggcggatgc

SEQ ID NO: 136427 - DNA, 80 bp, synthetic construct
  source 1..80: mol_type = other DNA
aagattcttggactgctacaaaccacggccaagcaggctgaagaaataaaacctgcagttcaaacagcctggcccaagct

SEQ ID NO: 136428 - DNA, 80 bp, synthetic construct
  source 1..80: mol_type = other DNA
tccgcgaggaggggaaacctcatcttcctaggtcccgcggacgatgtcaaaggtaaggcgtggtcacttcttgcacccat

SEQ ID NO: 136429 - DNA, 80 bp, synthetic construct
  source 1..80: mol_type = other DNA
gggagaagacggctgttggtatggcatggaaatcagacccatcagtgagaaagaagagaacatggtaaagtctttagtct

SEQ ID NO: 136430 - DNA, 80 bp, synthetic construct
  source 1..80: mol_type = other DNA
ttgctataccatgatggagtggcgattccaaggaatgtcctccattactaccgtcatctctacagcccctttgaagagct

SEQ ID NO: 136431 - DNA, 80 bp, synthetic construct
  source 1..80: mol_type = other DNA
tactgggctctttagtcagggcgcccaacagaatttgcagctggtcaacaccaatggctcgtggcatatcaacaggactg

SEQ ID NO: 136432 - DNA, 80 bp, synthetic construct
  source 1..80: mol_type = other DNA
tgtgccacgaagtcggccccacggcggaacctcgcgaaacggattcgcccgtgtgttcctgcaccgacaagatcggactg

SEQ ID NO: 136433 - DNA, 80 bp, synthetic construct
  source 1..80: mol_type = other DNA
aggaggtggaggacgaggacgaacgcgaggagtgcgagggcgagcgggagccggagcgcgcgcgggagaccgccggcccg

SEQ ID NO: 136434 - DNA, 80 bp, synthetic construct
  source 1..80: mol_type = other DNA
gatgctactacccataccccagcccaacctgtaacccaataaagaaaaaacttaaattgagatggtgttatgaatcttta

SEQ ID NO: 136435 - DNA, 80 bp, synthetic construct
  source 1..80: mol_type = other DNA
ccactggaatggacaccggagaagacagcgtccagcagccctctgacgagactgccgcttcagaagcgggatcactgtcc

SEQ ID NO: 136436 - DNA, 80 bp, synthetic construct
  source 1..80: mol_type = other DNA
aggaccttggtatggctgtgtgtggatgaactccacgggctacaccaaagcgtgcggggctcccccgtgcgtcatcggta

SEQ ID NO: 136437 - DNA, 80 bp, synthetic construct
  source 1..80: mol_type = other DNA
ggaatttattgttcctcggcccagccgatgatgtcaaggggaaggggtggagacttcttgctccgatcactgcatatgct

SEQ ID NO: 136438 - DNA, 80 bp, synthetic construct
  source 1..80: mol_type = other DNA
gaagcctgcaacctcacgccatcacactcagcacggtccaagtatgggtatggtgcgcaggacgttagaagccatgctag

SEQ ID NO: 136439 - DNA, 80 bp, synthetic construct
  source 1..80: mol_type = other DNA
actacttacaacccccgcggcttccgaaaaatccatacgcatgtaaagttatttctccgggagtgtggtggtcagacgaa

SEQ ID NO: 136440 - DNA, 80 bp, synthetic construct
  source 1..80: mol_type = other DNA
aacattagaactggagtcagaaccatcaccaccggaggtgccattacatactccacctatggcaagttcttggctgacgg

SEQ ID NO: 136441 - DNA, 80 bp, synthetic construct
  source 1..80: mol_type = other DNA
cgctctttataatttcgatggcccaactccacgcggattggtgcagcaccctgcatgcgccggtgcgggccaaccttccc

SEQ ID NO: 136442 - DNA, 80 bp, synthetic construct
  source 1..80: mol_type = other DNA
cctcctgctactgtaaagccacaaccagatccagaaaatgtctttgtttatatgggagataatgtaactttagttggacc

SEQ ID NO: 136443 - DNA, 80 bp, synthetic construct
  source 1..80: mol_type = other DNA
aagtggagacctgggctctgagacacccaggattcacggtgatagccctttttctagcacatgccataggaacatccatc

SEQ ID NO: 136444 - DNA, 80 bp, synthetic construct
  source 1..80: mol_type = other DNA
ggcttacaaaaactgggatacatcctgcgagaagttggaaggaaatctggcggtagaatgtacgcagatgacactgctgg

SEQ ID NO: 136445 - DNA, 80 bp, synthetic construct
  source 1..80: mol_type = other DNA
tggatgaactccacaggatacaccaagacatgtggtgctccaccatgccacattgggccacccgatcagttctgccccac

SEQ ID NO: 136446 - DNA, 80 bp, synthetic construct
  source 1..80: mol_type = other DNA
ggttgcacttggatgaactcttctgtatttaccaaagtgtgcggagcgcctccttgtgtcatcggaggggtgggcaacaa

SEQ ID NO: 136447 - DNA, 80 bp, synthetic construct
  source 1..80: mol_type = other DNA
gggctgcggtgtgtacccgtggagtggctaaagcggtggactttatccccgtggagagcctagagacaaccatgagatcc

SEQ ID NO: 136448 - DNA, 80 bp, synthetic construct
  source 1..80: mol_type = other DNA
aaccccggcccggcacgagctcccgggcggaccccggccccgagcggccgccgcggcagacccccggcacggtgagagtg

SEQ ID NO: 136449 - DNA, 80 bp, synthetic construct
  source 1..80: mol_type = other DNA
ttctccacagaggatggacaagggaaagcccacaatggtagactgattacagccaacccagtggtgactaagaaggagga

SEQ ID NO: 136450 - DNA, 80 bp, synthetic construct
  source 1..80: mol_type = other DNA
tcaactgggcgatcaagtgggagtacgtcgtcctcatgtttctggtgttggcagatgcccgtgtctgcgcggccttgtgg

SEQ ID NO: 136451 - DNA, 80 bp, synthetic construct
  source 1..80: mol_type = other DNA
ataaaaaacaactgctgacgccgctgcgcgatcagttcacccgtgcaccgctggataacgacattggcgtaagtgaagcg

SEQ ID NO: 136452 - DNA, 80 bp, synthetic construct
  source 1..80: mol_type = other DNA
tttgatattcacgtgccccgcggcgatgcttttgatggtggaagggtccatctgatcagaaaacacgatctttttattgt

SEQ ID NO: 136453 - DNA, 80 bp, synthetic construct
  source 1..80: mol_type = other DNA
aagtggggtgtttatacacaatgacgttgaggcatgggtggatcgttaccgctaccatcctgaaaccccccaaggtttgg

SEQ ID NO: 136454 - DNA, 80 bp, synthetic construct
  source 1..80: mol_type = other DNA
cggccatactatcgccggaggctctggtagtggaggtggtgtgcgcggcgattctgcggcgccacgtgaggccgggtgaa

SEQ ID NO: 136455 - DNA, 80 bp, synthetic construct
  source 1..80: mol_type = other DNA
aaacatcacccgcgtggagtcagagaacaagatagtaattttggactctttcgacccgctacgagcggaggaggatgagg

SEQ ID NO: 136456 - DNA, 80 bp, synthetic construct
  source 1..80: mol_type = other DNA
cactcggatgttcttgagggtcagagaaagcaacacgactgaatgtgactcaaagatcatcgggacagccgtcaagaata

SEQ ID NO: 136457 - DNA, 80 bp, synthetic construct
  source 1..80: mol_type = other DNA
gctctatgtcttactcctggacggggattccagtcactccatgcgccgctgaagaggagaagttgcctatcagtccgctg

SEQ ID NO: 136458 - DNA, 80 bp, synthetic construct
  source 1..80: mol_type = other DNA
aagacaccagaaggagaaattggggcagttacgctagactatcccactggaacgtcaggttcccccattgtggataaaaa

SEQ ID NO: 136459 - DNA, 80 bp, synthetic construct
  source 1..80: mol_type = other DNA
catagttgactatccatacaggctctggcactacccctgcactgtcaacttcaccatcttcaaggttaggatgtatgtgg

SEQ ID NO: 136460 - DNA, 80 bp, synthetic construct
  source 1..80: mol_type = other DNA
tcataggcaaggcggaggccgcattagagaatctgatcaccctcaatgctgctgccgcagctagcatgcaggagtggtgg

SEQ ID NO: 136461 - DNA, 80 bp, synthetic construct
  source 1..80: mol_type = other DNA
gagagttggaggtaaggcttacattgttcgctgcgggcgtgcgtccggaggcagtggtggattggggttcgcctggagag

SEQ ID NO: 136462 - DNA, 80 bp, synthetic construct
  source 1..80: mol_type = other DNA
cacccaacgtttcacgtccttctttgaccttgggccgtctcagaaaatccagcttgtaaacaccaacggcagtttgcaca

SEQ ID NO: 136463 - DNA, 80 bp, synthetic construct
  source 1..80: mol_type = other DNA
caatttgagtcacactaagatattgcttgagcccgaaagcatgtccaaggtgaacctgaacggggtgtttgacatgacca

SEQ ID NO: 136464 - DNA, 80 bp, synthetic construct
  source 1..80: mol_type = other DNA
caagaaggatccttgaagactgctctcactggtgcaatgcgagtcacaaaagacacaaacaacagcaagctgtataagct

SEQ ID NO: 136465 - DNA, 80 bp, synthetic construct
  source 1..80: mol_type = other DNA
ttgcggctggcagaaagtcgatcgcccttgatcttgtgacagaaataggaagagtgccgtcacacctagctcacagaacg

SEQ ID NO: 136466 - DNA, 80 bp, synthetic construct
  source 1..80: mol_type = other DNA
accaatgaggcagtcacaagtacatccagggcacaatagtttaatgtttccccgataagattgtaatttttttctccttt

SEQ ID NO: 136467 - DNA, 80 bp, synthetic construct
  source 1..80: mol_type = other DNA
acaagagggagctctgcatcaagctttggctggagccattcctgtggaattttcaagcaacactgtcaagttgacgtcgg

SEQ ID NO: 136468 - DNA, 80 bp, synthetic construct
  source 1..80: mol_type = other DNA
ttgacatggaatgatctgatcagattatgcatcatggttggagccaacgcttccgacaggatggggatgggaacgacgta

SEQ ID NO: 136469 - DNA, 80 bp, synthetic construct
  source 1..80: mol_type = other DNA
ggttacgcgggtggtggatttccactacgtgacgggcatgaccactgataacgtaaagtgcccatgccaggttccggccc

SEQ ID NO: 136470 - DNA, 80 bp, synthetic construct
  source 1..80: mol_type = other DNA
acgggctattctaattcaggtttctctagaatcggggttggggttattctctgtcttgtgattctctttattcttatact

SEQ ID NO: 136471 - DNA, 80 bp, synthetic construct
  source 1..80: mol_type = other DNA
tatgtggcgacgacctagtcgttatctgtgagagccagggggtccaggaggatgcagcgagcctgagagccttcacggag

SEQ ID NO: 136472 - DNA, 80 bp, synthetic construct
  source 1..80: mol_type = other DNA
cgataggtgcggctgctttttgctcagctatgtacgtgggggacttgtgcggaggcgtgttcttggtcggacagctcttc

SEQ ID NO: 136473 - DNA, 80 bp, synthetic construct
  source 1..80: mol_type = other DNA
ccaactaccggccgtgggagccgcttatggcttccaatactccccagcgcagcgggtggaatttctttcttcttggaagt

SEQ ID NO: 136474 - DNA, 80 bp, synthetic construct
  source 1..80: mol_type = other DNA
aacacctggtggggcacattccctatcaattcctacaccaccggcccctgcacccctgcgccgtctcactgttaccgaac

SEQ ID NO: 136475 - DNA, 80 bp, synthetic construct
  source 1..80: mol_type = other DNA
tcatcaaatgtgtccgtggcccacgacgccgaaggtcgcaggtactactacctcacaagagacccagtcacaccgctgtc

SEQ ID NO: 136476 - DNA, 80 bp, synthetic construct
  source 1..80: mol_type = other DNA
cgcatggcatgtggccgcaaataccgcctgtgtgacggaccggaaatggacctgggaaggtcccgatgagaatgctatcg

SEQ ID NO: 136477 - DNA, 80 bp, synthetic construct
  source 1..80: mol_type = other DNA
ctgcctgcgaccaaccccaggaggactgggttaacaaagctgaactccaatcgttggaaagcctcctgataccgtctcgg

SEQ ID NO: 136478 - DNA, 80 bp, synthetic construct
  source 1..80: mol_type = other DNA
caacacaaaaacagcatattgacgctgggaaagaccagagatcctgctgtctctacagcatcaatccaggcacagagcgc

SEQ ID NO: 136479 - DNA, 80 bp, synthetic construct
  source 1..80: mol_type = other DNA
agccggggcagcagagaaccattcaggacaatcaagtggcttatcttattattggcatcctgacgctgatttctgtggtg

SEQ ID NO: 136480 - DNA, 80 bp, synthetic construct
  source 1..80: mol_type = other DNA
ttccgcaagcatccgggagcgtcctacaccaagtgtggctccggcccctggctcacccccaggtgcctggtggactatcc

SEQ ID NO: 136481 - DNA, 80 bp, synthetic construct
  source 1..80: mol_type = other DNA
tggggagcataggcctcggcaaaatcctggtggacattttggctggatatggtgcaggcatttcaggggctctcgtcgct

SEQ ID NO: 136482 - DNA, 80 bp, synthetic construct
  source 1..80: mol_type = other DNA
atgtggcccctcctcttgctggtattggttttgccgcagagggcgttcgccttccaaggagaggaggcagcctccttggg

SEQ ID NO: 136483 - DNA, 80 bp, synthetic construct
  source 1..80: mol_type = other DNA
tacctcgggtgatgtcgtcgtctgtgccactgatgcccttatgacggggtacacaggcgacttcgatagcgtgattgact

SEQ ID NO: 136484 - DNA, 80 bp, synthetic construct
  source 1..80: mol_type = other DNA
actgaatgctcacaaagatggagtttgcggaatccggtcaacaacgagacttgaaaacctgatgtggaaacaagtttcaa

SEQ ID NO: 136485 - DNA, 80 bp, synthetic construct
  source 1..80: mol_type = other DNA
gaactcaatccgaagggtgaagacagagactacttttgtactgtcggatttcccggatggaccactcttcggacacaaac

SEQ ID NO: 136486 - DNA, 80 bp, synthetic construct
  source 1..80: mol_type = other DNA
actgactttacaacgccatgtgccacctcgtggctcagggacatctgggattgggtctgcacggtgcttgcggacttcag

SEQ ID NO: 136487 - DNA, 80 bp, synthetic construct
  source 1..80: mol_type = other DNA
gcgtgcaactggagcgcgtcctcgagacggccgccagcgctgcgattttcgagcgccgcgggccgccgctctcccgggag

SEQ ID NO: 136488 - DNA, 80 bp, synthetic construct
  source 1..80: mol_type = other DNA
aggaaaaagatcatccgtcttgacgaagcggctgcattggaggcactcgggcggatgcgggagacacccttcgcggcacc

SEQ ID NO: 136489 - DNA, 80 bp, synthetic construct
  source 1..80: mol_type = other DNA
caaaaagcctgtgacaaattcccccggggcggtcatataattcggcgcggatgcatttattatcgggcgacaatccaata

SEQ ID NO: 136490 - DNA, 80 bp, synthetic construct
  source 1..80: mol_type = other DNA
cccctacgagcgtggagacatcgggcacgagcagtacgcgccaaactcattgcccaaggaggaaaggccagaatatgcgg

SEQ ID NO: 136491 - DNA, 80 bp, synthetic construct
  source 1..80: mol_type = other DNA
catggaaaccctgaacattatggaaaccaaccgcattaaaattagcgtgaccatggaaaccctgctgatggaaaccctgc

SEQ ID NO: 136492 - DNA, 80 bp, synthetic construct
  source 1..80: mol_type = other DNA
acctacatttatgaccatcttgcccccatgaaggattgggcagcgtctgggctccgcgaattaacggtggccacagaacc

SEQ ID NO: 136493 - DNA, 80 bp, synthetic construct
  source 1..80: mol_type = other DNA
ggaccggagtaaggactgtgacaactggagaccctatcacctactccacatatggcaaattcctcgcagacggaggctgc

SEQ ID NO: 136494 - DNA, 80 bp, synthetic construct
  source 1..80: mol_type = other DNA
ctccgggactgcaccatgctcgtgtgtggcgacgacttagtcgttatctgtgaaagtcagggagtccaggaggacgcagc

SEQ ID NO: 136495 - DNA, 80 bp, synthetic construct
  source 1..80: mol_type = other DNA
gcttttcgccagcagccccaagctaaccgcttttcggccattttggaagcagtagtgccgtctcgtactaaccctactca

SEQ ID NO: 136496 - DNA, 80 bp, synthetic construct
  source 1..80: mol_type = other DNA
ggccagagcgcgtttgtgacggggttgacgactgacaacttgaaagtcccctgccagataccggctccagagtttttctc

SEQ ID NO: 136497 - DNA, 80 bp, synthetic construct
  source 1..80: mol_type = other DNA
cgtcttaaactggggcagggacccctgtatattaatgcatctcataacttggacataaactataacagaggcctatacct

SEQ ID NO: 136498 - DNA, 80 bp, synthetic construct
  source 1..80: mol_type = other DNA
gggcgtctcctcctcctcggccctgccgacgatatgagggacatgggctggagacttctcgctcctattaccgcgtattg

SEQ ID NO: 136499 - DNA, 80 bp, synthetic construct
  source 1..80: mol_type = other DNA
cctcctacccgctcgataagctggtaggttaacactccaatcctgttttttttctttttcccttttctttaactttcctc

SEQ ID NO: 136500 - DNA, 80 bp, synthetic construct
  source 1..80: mol_type = other DNA
gtggatttttcgggaagggaagcattgacacatgtgcaaaattctcctgcaccagtaaagcgattgggagaacaatccag

SEQ ID NO: 136501 - DNA, 80 bp, synthetic construct
  source 1..80: mol_type = other DNA
ccggcggggcatggaccccccacgcccgcgtctgctacgccaatatcatcgaaggtcgggccgtgtccctcccggccatc

SEQ ID NO: 136502 - DNA, 80 bp, synthetic construct
  source 1..80: mol_type = other DNA
ggggtactggatagaaagtgaaaagaatgaaacctggaagctggcgagagcctccttcatagaagtcaagacatgcacct

SEQ ID NO: 136503 - DNA, 80 bp, synthetic construct
  source 1..80: mol_type = other DNA
acctccccggcgttgccgagttggctgactagggcctcggcctcgtgcgccacctccagggccgcgtccgtcgaccactc

SEQ ID NO: 136504 - DNA, 80 bp, synthetic construct
  source 1..80: mol_type = other DNA
atgccaaatatggcaaagattcgatccgatgacaattctctagaaacttttacatctcccaccacacctgacgaaaaaaa

SEQ ID NO: 136505 - DNA, 80 bp, synthetic construct
  source 1..80: mol_type = other DNA
ccagcagcccccacccacacgttgaatttgggagattacggagaagtcacctttgattgtgaacccaggtcaggcgttga

SEQ ID NO: 136506 - DNA, 80 bp, synthetic construct
  source 1..80: mol_type = other DNA
acgctgatgttcttccagcccgccgtaggggagactctacggcaagcctacttagtcccagacccctctcatgcctcaag

SEQ ID NO: 136507 - DNA, 80 bp, synthetic construct
  source 1..80: mol_type = other DNA
aggctcggggaagacccacagagtcctcccggagctcactcgccaatgcattgacaggcgcctgagaacgttggtgttgg

SEQ ID NO: 136508 - DNA, 80 bp, synthetic construct
  source 1..80: mol_type = other DNA
gccgagcgccagggcgccagcgggtcggtttcggacagcttgccccggcgccagtcggccagccgcgtgccgaacaggag

SEQ ID NO: 136509 - DNA, 80 bp, synthetic construct
  source 1..80: mol_type = other DNA
ctgctgctattcgccagcgttgacgcggaaacccacgtcaccggaggacgcgctggtcacaccgtagcgggactcacaag

SEQ ID NO: 136510 - DNA, 80 bp, synthetic construct
  source 1..80: mol_type = other DNA
gctgacggaggctgttcagggggagcctatgacatcatcatctgtgacgagtgccattccacagaccctactacagtgtt

SEQ ID NO: 136511 - DNA, 80 bp, synthetic construct
  source 1..80: mol_type = other DNA
attctgctcacatgcctcttgcaccccgcccttggatttgacatctccaaagtgctcttagccattataggacctctcta

SEQ ID NO: 136512 - DNA, 80 bp, synthetic construct
  source 1..80: mol_type = other DNA
ggcccgggtccgggggccaacttggcccctcggtgcgttccggcaacagcgccgccggtccgcggacgaccacgtaccga

SEQ ID NO: 136513 - DNA, 80 bp, synthetic construct
  source 1..80: mol_type = other DNA
accacaggacccagcacccccgccccagcacacaactactcccgcgcactgtggcgagtagcttccgacagctatgttga

SEQ ID NO: 136514 - DNA, 80 bp, synthetic construct
  source 1..80: mol_type = other DNA
ccgtcttccacggtgccggaaacaaaacgctagcgggctctcgtggccctgttacgcagatgtactccagcgccgagagg

SEQ ID NO: 136515 - DNA, 80 bp, synthetic construct
  source 1..80: mol_type = other DNA
gtgctcgaccccgcatgttactcctgtgcctactcctacttagcgtaggggtaggcatctttctactccccgctcggtag

SEQ ID NO: 136516 - DNA, 80 bp, synthetic construct
  source 1..80: mol_type = other DNA
gcgcaccggccccagggccgccgtggtgcgcagcccggcggcctccagcgcgtgggtcgtgtcggagccggtgatcgcca

SEQ ID NO: 136517 - DNA, 80 bp, synthetic construct
  source 1..80: mol_type = other DNA
tggcgcggggtcgaagaccctggcgggccctaaggggcccgtctgccagatgtacaccaatgtagaccaggatatggttg

SEQ ID NO: 136518 - DNA, 80 bp, synthetic construct
  source 1..80: mol_type = other DNA
tcggagccaacgccgagggcgcaccggcagggggaagccggtggtgtataggtacgtctcgcaaggagaacgaccgtcgg

SEQ ID NO: 136519 - DNA, 80 bp, synthetic construct
  source 1..80: mol_type = other DNA
cagcttttgttccctttagtgagggttaattaagaattcgtcgacagcgacacacttgcatcggatgcagcccggttaac

SEQ ID NO: 136520 - DNA, 80 bp, synthetic construct
  source 1..80: mol_type = other DNA
ctctaccagcagttcgacgagatggaggaatgctccaaacatcttccgctagtcgagcaaggactgcagatggctgagca

SEQ ID NO: 136521 - DNA, 80 bp, synthetic construct
  source 1..80: mol_type = other DNA
tgggtacgcattgtactgctaacccattttttctcaattctccaatcccaggagcagttagggaaagctctcgacttcga

SEQ ID NO: 136522 - DNA, 80 bp, synthetic construct
  source 1..80: mol_type = other DNA
atattcgacacctcagtgctctgcgagtgctacgatgccgggtgtgcttggtacgaactgacacctgctgagacaactac

SEQ ID NO: 136523 - DNA, 80 bp, synthetic construct
  source 1..80: mol_type = other DNA
ggggcgacccgtaaatggttgcagtgatgtaaatggtgtccgcggtccagaccacggtcaaaatgccggccgtggcgctc

SEQ ID NO: 136524 - DNA, 80 bp, synthetic construct
  source 1..80: mol_type = other DNA
aagccgaggctcaaattacaaaagagggcttaccaataggtttagagatttcagctgaaaacgaatctaaacccatctat

SEQ ID NO: 136525 - DNA, 80 bp, synthetic construct
  source 1..80: mol_type = other DNA
gatagcagttcttgcaaggaagcaaagtttttcaacggtttgaggccgtccgccgtaggcatgcttttgagcgtttgacc

SEQ ID NO: 136526 - DNA, 80 bp, synthetic construct
  source 1..80: mol_type = other DNA
tcgagcctctgagggcttgcgatgacggagacgagctctcagtggctgctgagtgtttcaagaagccaccaaagtatccc

SEQ ID NO: 136527 - DNA, 80 bp, synthetic construct
  source 1..80: mol_type = other DNA
gtccccctcttcggggcggccttccgcgggcccgccgaccggcaagccggtggtcggcggcgcgtgcgtttctgttctat

SEQ ID NO: 136528 - DNA, 80 bp, synthetic construct
  source 1..80: mol_type = other DNA
tggaagatggcaattcaagcacgatgtagtatcacacggttggtgttaactcgaagttaaatttggataattaggtactt

SEQ ID NO: 136529 - DNA, 80 bp, synthetic construct
  source 1..80: mol_type = other DNA
actcatagcgcgtaatatttgtctagggccgcggggactttgaccgtttacgtggagactcgcccaggtgtttttctcag

SEQ ID NO: 136530 - DNA, 80 bp, synthetic construct
  source 1..80: mol_type = other DNA
gaatctgaagaggcgcacgccacaaaacagtccgttgttgctcttgggtcacaggaaggaggcctccatcaggcgttggc

SEQ ID NO: 136531 - DNA, 80 bp, synthetic construct
  source 1..80: mol_type = other DNA
cgcatgttcgtgggtggtgttgaacacagattcactgccgcttgcaattggaccaggggcgagcggtgcgagctgtatga

SEQ ID NO: 136532 - DNA, 80 bp, synthetic construct
  source 1..80: mol_type = other DNA
gccttgtgtcagttttctcgccaggcgctaagcagaacatccagctgattaatacaaatgggagttggcatatcaacagg

SEQ ID NO: 136533 - DNA, 80 bp, synthetic construct
  source 1..80: mol_type = other DNA
ctttaaatctttctgttgctgctcctctcagtgtttcacagaacgcactcactgtttcaaccggtaacggtcttcaagta

SEQ ID NO: 136534 - DNA, 80 bp, synthetic construct
  source 1..80: mol_type = other DNA
gccattgatttgagtgttgtcgtggaaaaacagaaaggcatgtacagagcagcacccaataggctgagactcactgtgga

SEQ ID NO: 136535 - DNA, 80 bp, synthetic construct
  source 1..80: mol_type = other DNA
atcagtgatattaataaactccccgggcagctcgcttaagttcatgtcgctgtccagctgctgagccacaggctgctgtc

SEQ ID NO: 136536 - DNA, 80 bp, synthetic construct
  source 1..80: mol_type = other DNA
aggacgcacggacctctatgtgtattctgggcagtgtgatgatgatgacagctccttggtgcagtggaaagaagcgcaga

SEQ ID NO: 136537 - DNA, 80 bp, synthetic construct
  source 1..80: mol_type = other DNA
agccacaaagggtataaagtggcatgaggtgtgggcgcggtgtttcaaaatgagcgggacgacggacggcaacgcgtttg

SEQ ID NO: 136538 - DNA, 80 bp, synthetic construct
  source 1..80: mol_type = other DNA
ggtatcgttgcatcggcaacaacaaagccaggggcggcgccttttccagcagcacgtgcagcatctggtcggccgtgccg

SEQ ID NO: 136539 - DNA, 80 bp, synthetic construct
  source 1..80: mol_type = other DNA
ataaatgtgtattatatgtcacatattataaactgtttaaatagtaccacgtggtattatgaacagtttataatcagttg

SEQ ID NO: 136540 - DNA, 80 bp, synthetic construct
  source 1..80: mol_type = other DNA
aaggaaaatttagtaacataaacaataatgctaatccaactgataaaaaaatcacagtaaagctactttttaatgaaaag

SEQ ID NO: 136541 - DNA, 80 bp, synthetic construct
  source 1..80: mol_type = other DNA
ggagaatgaggcgcccgacaggcaaggtgactcttgaagccgatgtcatcctcccaattggaacacgcagtgtggaaaca

SEQ ID NO: 136542 - DNA, 80 bp, synthetic construct
  source 1..80: mol_type = other DNA
tcctccttaatatcctgggaggttgggtagcgtcacagctcgcgccacccacggcatctacagcatttgttgtgagtggc

SEQ ID NO: 136543 - DNA, 80 bp, synthetic construct
  source 1..80: mol_type = other DNA
gaggtcctggccggggatccgtataccacgaccgtcgacatttggagcgccggtctggtgatcttcgagactgccgtcca

SEQ ID NO: 136544 - DNA, 80 bp, synthetic construct
  source 1..80: mol_type = other DNA
tgaaatgagcccgctcctgttttccaccaccgagctttcgatcttaccgtgctcattttccactatgccagccctatcga

SEQ ID NO: 136545 - DNA, 80 bp, synthetic construct
  source 1..80: mol_type = other DNA
cctcagcctgaaatacactgatccacttacaaccaaaaacggggctttaaccttaaaattgggcacgggactaaacattg

SEQ ID NO: 136546 - DNA, 80 bp, synthetic construct
  source 1..80: mol_type = other DNA
cgcaaacgtctccgtagcccatgaccaaaatggacgtaggtactactacctcacacgagacccagttacacctttagccc

SEQ ID NO: 136547 - DNA, 80 bp, synthetic construct
  source 1..80: mol_type = other DNA
cccagactaaacaggcaggggagaactttccatacttggtggcataccaggcaactgtgtgtgccagagcgcaagctccg

SEQ ID NO: 136548 - DNA, 80 bp, synthetic construct
  source 1..80: mol_type = other DNA
gccagtaggcccgcaccagcaacagattgcacagcaggcattccccgccggtgcgcccgcggccccggccgtgcttcagc

SEQ ID NO: 136549 - DNA, 80 bp, synthetic construct
  source 1..80: mol_type = other DNA
gcgtgggccaaagtcattgccatcctcctccttgtcgcgggagtggatgcaagcaccacctatagcgtcgtcgggcaatc

SEQ ID NO: 136550 - DNA, 80 bp, synthetic construct
  source 1..80: mol_type = other DNA
cccccccatgcaagcccttgctgcgggatgaggtctcattcagagtaggactccacgactacccggtggggtcgcaattg

SEQ ID NO: 136551 - DNA, 80 bp, synthetic construct
  source 1..80: mol_type = other DNA
acctgctcatggagggcggtgtggctcagacagagcctgagtccagggtgcccgttctggactttctcgagccaatggcc

SEQ ID NO: 136552 - DNA, 80 bp, synthetic construct
  source 1..80: mol_type = other DNA
actaaaaaaccaggagggcccggaaaaaaccgggccatcaatatgctgaaacgcggattaccccgcgtattcccactagt

SEQ ID NO: 136553 - DNA, 80 bp, synthetic construct
  source 1..80: mol_type = other DNA
cagctcgtctgatcgtttatccggatctaggggtccgggtgtgtgagaagagagcccttttcgacatcactcagaagtta

SEQ ID NO: 136554 - DNA, 80 bp, synthetic construct
  source 1..80: mol_type = other DNA
ttcatgaatgaagatcactggttcagcagagagaattcactcagtggagtggaaggagaaggactccacaaacttggata

SEQ ID NO: 136555 - DNA, 80 bp, synthetic construct
  source 1..80: mol_type = other DNA
tatcgcaggtgccgcgctagcggggtgctgactactagctgtggaaacaccctcacttgctacctcaaagccaaagcagc

SEQ ID NO: 136556 - DNA, 80 bp, synthetic construct
  source 1..80: mol_type = other DNA
ggagccgtagaaatcccgcagctccgtcgcggtgacggagacctccgcaaagcgcgcgcgaccctcccctgcggcgttgc

SEQ ID NO: 136557 - DNA, 80 bp, synthetic construct
  source 1..80: mol_type = other DNA
tcctgtccccccgcggttctcgaccttcttggggccccactgacccccggcatcgctccaggaatcttggtaaagtcatc

SEQ ID NO: 136558 - DNA, 80 bp, synthetic construct
  source 1..80: mol_type = other DNA
acccccttgtctgattgggctagcgacggcttgcgcgaccttgccgtcgcagttgagcccatcaccttctcccctatgga

SEQ ID NO: 136559 - DNA, 80 bp, synthetic construct
  source 1..80: mol_type = other DNA
acagtccaagacctcgttgattgtctgcacgcacgtgctctttccggagccagcgttgccggtgataagatacaccgcga

SEQ ID NO: 136560 - DNA, 80 bp, synthetic construct
  source 1..80: mol_type = other DNA
gactcagaaaaaatttctttgcgatcgtaccatgtggcgcattcccttttccagcaactttatgtctatgggggccctga

SEQ ID NO: 136561 - DNA, 80 bp, synthetic construct
  source 1..80: mol_type = other DNA
atggttcttaaaatagtgaggagcatggaaaaataccagctagcagtgaccgtcatggctatgctatgtattccaaatgt

SEQ ID NO: 136562 - DNA, 80 bp, synthetic construct
  source 1..80: mol_type = other DNA
catgccgacagttatagaagagctggagaaactgcagagaagacatggtggaagcctcgtcagatgcccgctatccagga

SEQ ID NO: 136563 - DNA, 80 bp, synthetic construct
  source 1..80: mol_type = other DNA
ccaccacctcacgcagcgctggcctacggcagaagaaagtcacatttgacagactgcaggttctggacagccattaccag

SEQ ID NO: 136564 - DNA, 80 bp, synthetic construct
  source 1..80: mol_type = other DNA
ccgtattccttgttggtcagctattcactttttcacctcggcgccattggacaacacagagctgcaattgttccatctac

SEQ ID NO: 136565 - DNA, 80 bp, synthetic construct
  source 1..80: mol_type = other DNA
ccaagggtggggacccctctcttatgctaatattagcggctcctcaatcgagaagccctactgctggcattacccaccaa

SEQ ID NO: 136566 - DNA, 80 bp, synthetic construct
  source 1..80: mol_type = other DNA
atgcctcaggaagcttggggttccacccttgcgagtctggagacaccgggccagagctgtccgcgctagcctgctgtccc

SEQ ID NO: 136567 - DNA, 80 bp, synthetic construct
  source 1..80: mol_type = other DNA
tccgtgagaacacaaaattcaccccaatcggcgtcctccactctagtggtgaacaccgagctgaacccgatcaatggaga

SEQ ID NO: 136568 - DNA, 80 bp, synthetic construct
  source 1..80: mol_type = other DNA
attctaccgctgtagactctggagctgcatccagtcccgaccaggacgacgtggaatctaacgctgactcttacagctca

SEQ ID NO: 136569 - DNA, 80 bp, synthetic construct
  source 1..80: mol_type = other DNA
tggaaataggctggaaagcctgggggaagagcattctgttcgcaccagaactggccaacaacacttttgtgattgatggt

SEQ ID NO: 136570 - DNA, 80 bp, synthetic construct
  source 1..80: mol_type = other DNA
cttatccttcttgggcctgctgacgatgcaaagagcaagggctgggcattgcttgcgcccataacagcctacgcacagca

SEQ ID NO: 136571 - DNA, 80 bp, synthetic construct
  source 1..80: mol_type = other DNA
gcgcacctgcacgccccaacggggagcgggaaaagcactaaggtgccagccgcatacgcggcccaggggtacaaagtact

SEQ ID NO: 136572 - DNA, 80 bp, synthetic construct
  source 1..80: mol_type = other DNA
ccgttcatcgcgtccgagccaccgtcaccttggttccaatggccaaccgccctgccgcatccgccctcgccggagcgcgg

SEQ ID NO: 136573 - DNA, 80 bp, synthetic construct
  source 1..80: mol_type = other DNA
gcgtgagagtcctggaggacggggttaattatgcaacagggaacctacccggtttccccttttctatcttcttgctggcc

SEQ ID NO: 136574 - DNA, 80 bp, synthetic construct
  source 1..80: mol_type = other DNA
aggagagtggatgaccacggaagacatgctgcaggtctggaacagagtttggattgaagaaaatgaatggatgatggaca

SEQ ID NO: 136575 - DNA, 80 bp, synthetic construct
  source 1..80: mol_type = other DNA
gtaaatgtggaccaacgtcaatacggtgacgtgtttaaaggagatcttaatccaaaaccccaaggccaaagactcattga

SEQ ID NO: 136576 - DNA, 80 bp, synthetic construct
  source 1..80: mol_type = other DNA
caccgtctcacaggcgttggcagaactggcaaagaaaaccttctctcgtgactcagacacccccgacagcggtcctgact

SEQ ID NO: 136577 - DNA, 80 bp, synthetic construct
  source 1..80: mol_type = other DNA
cttctctcgtgcttgacaacacctgcatctgcggtgcactacaggaacgcctcaggcgtctatcacatcaccaatgactg

SEQ ID NO: 136578 - DNA, 80 bp, synthetic construct
  source 1..80: mol_type = other DNA
ggcctttccccacctaccttctttttgccctgctcacctgcacctgcgtctgcagcattgtctgcctggttattaccttc

SEQ ID NO: 136579 - DNA, 80 bp, synthetic construct
  source 1..80: mol_type = other DNA
aaataaggagccgtataaaattatgttatccgaccgacacccaatcgcctcaactatatgttttcccttgtccagatact

SEQ ID NO: 136580 - DNA, 80 bp, synthetic construct
  source 1..80: mol_type = other DNA
gaaagggacgacttatggcgtttgcgcgaaggcctttaggtttgtgaacaatccagcagatactggacacgggaccgtag

SEQ ID NO: 136581 - DNA, 80 bp, synthetic construct
  source 1..80: mol_type = other DNA
tggtcttagccctgcctcaacaggcatacgcttttgatgcggcagagcagggtcaattgggactggccttgctagtgttg

SEQ ID NO: 136582 - DNA, 80 bp, synthetic construct
  source 1..80: mol_type = other DNA
aagtgttgcgagacaaaatcaaatttgcaagggcaacatctatgccatggagatcaacctccaggccaacctgtggaaga

SEQ ID NO: 136583 - DNA, 80 bp, synthetic construct
  source 1..80: mol_type = other DNA
ttctaacatcgaggaagttgcactgtccaccgacggggaagtaccattttatggtaaggccatccctctaaattacatca

SEQ ID NO: 136584 - DNA, 80 bp, synthetic construct
  source 1..80: mol_type = other DNA
aatgggatgaagctgctactgctcttgaaatgaacctagaagaagaggacgatgacaacgaagacgaagtagacgagcaa

SEQ ID NO: 136585 - DNA, 80 bp, synthetic construct
  source 1..80: mol_type = other DNA
cgctgcgcctcggggcggtgctgggtgcggccctgttgctggccgccctcgggctgtccgcgtgggcgtgcatgacctgc

SEQ ID NO: 136586 - DNA, 80 bp, synthetic construct
  source 1..80: mol_type = other DNA
ttctgcaggggtaggcatctttttgctccccaaccggtaggtggtgagcttaacactccagccacttaggcctttcccca

SEQ ID NO: 136587 - DNA, 80 bp, synthetic construct
  source 1..80: mol_type = other DNA
gatgctagcgtggaagttagcgcccctatcactaaaaccaacaaaatcgtaggtttaaattacactaagcctctcgctct

SEQ ID NO: 136588 - DNA, 80 bp, synthetic construct
  source 1..80: mol_type = other DNA
tgttatcaccaggtgcactggtagtgggcgtcgtgtgtgcgggcatactaaggcgtcacgctggccctgctgaggtggcc

SEQ ID NO: 136589 - DNA, 80 bp, synthetic construct
  source 1..80: mol_type = other DNA
cccttctacggcagggctatacccatagccctgctcaagggagggagacacctgattttttgccattctaagaataaatg

SEQ ID NO: 136590 - DNA, 80 bp, synthetic construct
  source 1..80: mol_type = other DNA
ctgcacgtcgctggcagcggtggccgtggataccgccgatcccgtttccacgataagacgctccaggcagcgatgtttgg

SEQ ID NO: 136591 - DNA, 80 bp, synthetic construct
  source 1..80: mol_type = other DNA
tgggacaatggagccagtgcagtctggaattctaccaccgctacggggctctgccatgtcatgcgaggcagctacctagc

SEQ ID NO: 136592 - DNA, 80 bp, synthetic construct
  source 1..80: mol_type = other DNA
gcgacagtcgcggtccagcagcgcgcgcaccccgggccagtacagcagggaccccagcgagctgcggaacaccgcggcgt

SEQ ID NO: 136593 - DNA, 80 bp, synthetic construct
  source 1..80: mol_type = other DNA
cgacaaggcgtcgccactatggcagacatccccccggacccgcccgcgctcaacacgacgcctgcgaatcatgctccccc

SEQ ID NO: 136594 - DNA, 80 bp, synthetic construct
  source 1..80: mol_type = other DNA
tctcttgcctgaccgtgcccgcatcggcctaccaagtacgcaactcctcgggcatttaccatgtcaccaatgattgccct

SEQ ID NO: 136595 - DNA, 80 bp, synthetic construct
  source 1..80: mol_type = other DNA
agggagacctgtgtgggtatcggagatgccgtgcaagcggcgtctacaccaccagcttcggaaacacactgacgtgctat

SEQ ID NO: 136596 - DNA, 80 bp, synthetic construct
  source 1..80: mol_type = other DNA
aaattgatcatacagaaattaatcacacttgcaatgctcaaaaccttactttgctatttgtgaatgaaacacatgaaaga

SEQ ID NO: 136597 - DNA, 80 bp, synthetic construct
  source 1..80: mol_type = other DNA
caaccgggaatcttcccggttgctccttctctatcttcctcttggctttgttatcttgccttacggtcccagcttctgct

SEQ ID NO: 136598 - DNA, 80 bp, synthetic construct
  source 1..80: mol_type = other DNA
gcactcttggcctttttcaagttcacagcaattgctccgactcgggcattgttggacagatggagaggcgtcaataaaca

SEQ ID NO: 136599 - DNA, 80 bp, synthetic construct
  source 1..80: mol_type = other DNA
attgcatgctattaagcaagcgcgcgaagagtttttacttaaaaaaggacacggagtgtaccttgatccccaaaccggcg

SEQ ID NO: 136600 - DNA, 80 bp, synthetic construct
  source 1..80: mol_type = other DNA
ccaaagtcaccggctaggatttttcgaaacaacatactttgcgtggttgggtgtattaacatccagccatcttcctccgg

SEQ ID NO: 136601 - DNA, 80 bp, synthetic construct
  source 1..80: mol_type = other DNA
gagctcgccgcaaaactggtcgcgttgggcattcatgccgtggcttactaccgcggtcttgacgtgtccgtcatcccgac

SEQ ID NO: 136602 - DNA, 80 bp, synthetic construct
  source 1..80: mol_type = other DNA
tggctcccagcttctaccgccaccgcctctacatctacggttgccacggctaccgagcctcccaggaggcgaagatgggg

SEQ ID NO: 136603 - DNA, 80 bp, synthetic construct
  source 1..80: mol_type = other DNA
cgcaccgccgtgcaacacccagccatcgggcaccggcaacaacactttgacgtgtcccactgactgcttccgaaaacacc

SEQ ID NO: 136604 - DNA, 80 bp, synthetic construct
  source 1..80: mol_type = other DNA
tgggctaagaacatctggggctcagtggagaaggtcaggaagctcattggaccagaaaactacagagactacttggcaag

SEQ ID NO: 136605 - DNA, 80 bp, synthetic construct
  source 1..80: mol_type = other DNA
tacggcagcagctgttaccctctgggagaacggagcaagctctgtgtggaacgcaacaaccgccataggactttgtcaca

SEQ ID NO: 136606 - DNA, 80 bp, synthetic construct
  source 1..80: mol_type = other DNA
accgcgtataaagccacgaaaaagtcgagctaaaatccacccaacagcctatagctatatatacactccgcccaatgacg

SEQ ID NO: 136607 - DNA, 80 bp, synthetic construct
  source 1..80: mol_type = other DNA
tcgttccatgtatttgtacccccccacacaaccccctctaaccaaatagttggcacgttataacctccgaaccgttccat

SEQ ID NO: 136608 - DNA, 80 bp, synthetic construct
  source 1..80: mol_type = other DNA
tcgtccacctcctgccacttggtcatggtgcagaccgacgggcgctttggcacccagtcccaggccacggtgaacttggg

SEQ ID NO: 136609 - DNA, 80 bp, synthetic construct
  source 1..80: mol_type = other DNA
ttcaacaactttgaagggagctcaaagactggcagcgttgggcgacacagcctgggactttggctctattggagtggtct

SEQ ID NO: 136610 - DNA, 80 bp, synthetic construct
  source 1..80: mol_type = other DNA
tatccccctggagtacatcaaagggggaagacacctcatattttgccactctaagaagaagtgcgacgagcttgccaagc

SEQ ID NO: 136611 - DNA, 80 bp, synthetic construct
  source 1..80: mol_type = other DNA
tactgatgatgaggactacatgggctttgtgtgaggctctaaccttagcaactgggcccatttccacactgtgggaagga

SEQ ID NO: 136612 - DNA, 80 bp, synthetic construct
  source 1..80: mol_type = other DNA
cggcagggctaccgatcatggagggcccacaaagccgcgattattgcctgcttgcaagactgcggtgggaacatcgcttt

SEQ ID NO: 136613 - DNA, 80 bp, synthetic construct
  source 1..80: mol_type = other DNA
aggactccttagcttggctggacttgtgacggctaacgaaatgggcatgctggataaaacaaaagctgaccttgcagggc

SEQ ID NO: 136614 - DNA, 80 bp, synthetic construct
  source 1..80: mol_type = other DNA
caacacccaggaaacagaaacgcgcttggccctttataaagagatacgccaggcgctggacagtcgcaagcaggccgcca

SEQ ID NO: 136615 - DNA, 80 bp, synthetic construct
  source 1..80: mol_type = other DNA
gggcgcgtatggtgcttatgacccactttttcgggatactccaatcccaggaacagttggagaaagcactcgacttcgac

SEQ ID NO: 136616 - DNA, 80 bp, synthetic construct
  source 1..80: mol_type = other DNA
cactaccagtttggggaacaccctcacttgttatcttaaggcacaggcggcgtgtagggcagccaacatcaaaaattttg

SEQ ID NO: 136617 - DNA, 80 bp, synthetic construct
  source 1..80: mol_type = other DNA
cgggtggcctgctcctcctggggctaagtctctcgagccatgtacttgtgggtccacagatttgtatctgatcacccgtg

SEQ ID NO: 136618 - DNA, 80 bp, synthetic construct
  source 1..80: mol_type = other DNA
tttcggggtcgcggtggtgtagtaacatctggcatggcaccttccccatcaacgcgacaacgactggtcctagcgtgccc

SEQ ID NO: 136619 - DNA, 80 bp, synthetic construct
  source 1..80: mol_type = other DNA
cacccggtttatcctggacaacccggggtttgtcaccttcggctggtaccgcctcaagcccggccgcgggaacgcgccgg

SEQ ID NO: 136620 - DNA, 80 bp, synthetic construct
  source 1..80: mol_type = other DNA
tgcttatctgcccggtaagcaacaacagcgagtgggagattgcacatccctttgtggcaaataataaccgaatcgtcggt

SEQ ID NO: 136621 - DNA, 80 bp, synthetic construct
  source 1..80: mol_type = other DNA
atcctcgaaagcgagaacggagagggtgacggtgcccctcgagctgcatgtccagatttcagcacgagaggggcggaaac

SEQ ID NO: 136622 - DNA, 80 bp, synthetic construct
  source 1..80: mol_type = other DNA
accacagacaacctgaaggtaccttgccaagtgcctatgccagagttcttttcttgggtggatggggtgcaaattcaccg

SEQ ID NO: 136623 - DNA, 80 bp, synthetic construct
  source 1..80: mol_type = other DNA
cgaggttgaccatgcaggcgtggtatgtgcgggccagggcgcgcgccttcacgaggcgccgggtgtcgtccagcgactct

SEQ ID NO: 136624 - DNA, 80 bp, synthetic construct
  source 1..80: mol_type = other DNA
ccttgtttactttaagctgcccgaggagcaccctaacggccctgcacacggagtgcggatcaccgtagagggcaccacca

SEQ ID NO: 136625 - DNA, 80 bp, synthetic construct
  source 1..80: mol_type = other DNA
gcattgacccgaacatacggacgggcgtcaggactatcactactggcgcaccgatcacgtattccacctatgggaagttc

SEQ ID NO: 136626 - DNA, 80 bp, synthetic construct
  source 1..80: mol_type = other DNA
aagctgcccataagtcctttgagcaactctctcgtacgccaccacaatctggtgtactccacctcatcacgcagtgcagg

SEQ ID NO: 136627 - DNA, 80 bp, synthetic construct
  source 1..80: mol_type = other DNA
tacatcttgcgagcctcactcctgaacatcccctatttcgtgagggcccacgctcttattaggatctgtggtttagtgcg

SEQ ID NO: 136628 - DNA, 80 bp, synthetic construct
  source 1..80: mol_type = other DNA
gcctcttgcaaacagcgtctcagcaagcagcggacatcactcctgctgtccagtccaactggcagaagctggagacgttt

SEQ ID NO: 136629 - DNA, 80 bp, synthetic construct
  source 1..80: mol_type = other DNA
aagaagctgttgaactgcttcatttggtggaatcagtatttcctcgcccgagctgaggccatggtacacgagtgggtgcc

SEQ ID NO: 136630 - DNA, 80 bp, synthetic construct
  source 1..80: mol_type = other DNA
ttacggtaaggctatccctttatcttccatcaagggaggcagacacctgattttttgtcattcaaagaagaagtgcgatg

SEQ ID NO: 136631 - DNA, 80 bp, synthetic construct
  source 1..80: mol_type = other DNA
tttggcagagctggccgcgaagaccttcggccagtcagagctgggctcggactccggcgcagacctcgccaccccaactg

SEQ ID NO: 136632 - DNA, 80 bp, synthetic construct
  source 1..80: mol_type = other DNA
gaaaagaaccccaggttgtgcacaaaggaggagtttatagcaaaagttcgcagtcatgcagccatcggagctttcctgga

SEQ ID NO: 136633 - DNA, 80 bp, synthetic construct
  source 1..80: mol_type = other DNA
acgttggtcgggccgtcgttggtcagggcgttggctcgatggcgggcgaggacgggcgagaggctcaacggcgtgtgcgg

SEQ ID NO: 136634 - DNA, 80 bp, synthetic construct
  source 1..80: mol_type = other DNA
ttagaatcctaattgggttcttagtgttgtggattggcacgaactcaaggaacacttcaatggccatgacgtgcatagct

SEQ ID NO: 136635 - DNA, 80 bp, synthetic construct
  source 1..80: mol_type = other DNA
tcgcgttgcccgaacgggcttacgcgtttgaccgggaaacatcagctgccctcggcggaagcgttgtgctgttactgatc

SEQ ID NO: 136636 - DNA, 80 bp, synthetic construct
  source 1..80: mol_type = other DNA
gtagaagggcagagcacagcgggagccgttgttgacgttatgtgccatgccacgtacgtccacagaaggctgctgcctca

SEQ ID NO: 136637 - DNA, 80 bp, synthetic construct
  source 1..80: mol_type = other DNA
ggaccgctcaaagctggcaacgtcacaccatctgacgacaggccttactgctggcactatccaccccgcccgtgcggggt

SEQ ID NO: 136638 - DNA, 80 bp, synthetic construct
  source 1..80: mol_type = other DNA
ctggtttgatacatctccatcagaacatagtggatgtccagtacttgtacgggatctccccagcctacatttcttgggtc

SEQ ID NO: 136639 - DNA, 80 bp, synthetic construct
  source 1..80: mol_type = other DNA
accagcgcggctaatcgtgttcccggacttgggagtccgggtgtgcgaaaagaaggcccttttcgatgtcactcgcaagc

SEQ ID NO: 136640 - DNA, 80 bp, synthetic construct
  source 1..80: mol_type = other DNA
gaggcacaacacagattatggaggtgacagccaagtggttatggggtttcctttccagaaacaaaaaacctagaatctgc

SEQ ID NO: 136641 - DNA, 80 bp, synthetic construct
  source 1..80: mol_type = other DNA
atcccccgaggtattttagatgcatataatactttaatgttggcagcaagtcctctttacgctcaccaaactttaacatc

SEQ ID NO: 136642 - DNA, 80 bp, synthetic construct
  source 1..80: mol_type = other DNA
tggaggcaggagatgggtaacaacataactcgagtggagtctgagagcaaagtcatcattctcgactcttttgaccccct

SEQ ID NO: 136643 - DNA, 80 bp, synthetic construct
  source 1..80: mol_type = other DNA
cttatccgtaatgcggcggtgcagactcccctgcccgtctaccggatatccatggtccccacgggacaggcatttgccgc

SEQ ID NO: 136644 - DNA, 80 bp, synthetic construct
  source 1..80: mol_type = other DNA
ccaaggtgagcgccaggcttctctccacggaggaagcttgtgacctcacgcccgcgcattccgctcgatctaagtttgga

SEQ ID NO: 136645 - DNA, 80 bp, synthetic construct
  source 1..80: mol_type = other DNA
ccagggcggttatgggatcatcgtatgggttccaatactcgccgaaacaacgggtggattacctcctgggtgtgtggcgc

SEQ ID NO: 136646 - DNA, 80 bp, synthetic construct
  source 1..80: mol_type = other DNA
gagcccgcgcggtcagagcaaaactcattgcccagggaggtgctgcagcaatatgcggcaagtacctctttaactgggcg

SEQ ID NO: 136647 - DNA, 80 bp, synthetic construct
  source 1..80: mol_type = other DNA
gccctctttccaccaatcaaactatgttcttcaacatactcgggggctgggtagccacccacttggcgagccccgcagca

SEQ ID NO: 136648 - DNA, 80 bp, synthetic construct
  source 1..80: mol_type = other DNA
ttctcggtattgggaccgtgcttgaccaggcagagaccgctggcgcgcgccttacagtgcttgccacggctacacctccc

SEQ ID NO: 136649 - DNA, 80 bp, synthetic construct
  source 1..80: mol_type = other DNA
ggtgggggatttccattacgtcacaggggccacagaagatggactcaaatgtccatgccaagtgccggcccctgagttct

SEQ ID NO: 136650 - DNA, 80 bp, synthetic construct
  source 1..80: mol_type = other DNA
tcaggaagcttggggtcccacccttgagagtctggagacaccgggccaggagtgtccgcgccaggctgctgtccagtgga

SEQ ID NO: 136651 - DNA, 80 bp, synthetic construct
  source 1..80: mol_type = other DNA
ggcctcgtggtagtcgataaacccgtcgttcgcctgggcccgctccagcagcccccccgccagccgcagaagccgcgcca

SEQ ID NO: 136652 - DNA, 80 bp, synthetic construct
  source 1..80: mol_type = other DNA
gataaaaaaggcgacttagtagcttggaataagcatgatgacagacgcactttatggacaactccagacccatctccaaa

SEQ ID NO: 136653 - DNA, 80 bp, synthetic construct
  source 1..80: mol_type = other DNA
tttaactaccggcctcatccacctccaccagaacatcgtggacgtgcaatacttgtacggggtggggtcgagcattgtgt

SEQ ID NO: 136654 - DNA, 80 bp, synthetic construct
  source 1..80: mol_type = other DNA
ggccagatgcagaggaaactctagtcacgcacaccatagagcccccttcttatgaggaagcagttaaacaaggagcagct

SEQ ID NO: 136655 - DNA, 80 bp, synthetic construct
  source 1..80: mol_type = other DNA
ccccccatatcagtgcagagacagcagcacgacgccttgcgaggggatcccctccgtctctagccagctcgtcagcgagc

SEQ ID NO: 136656 - DNA, 80 bp, synthetic construct
  source 1..80: mol_type = other DNA
cctgagaggatggctagttgccggcctctcaccgccttcgcccaagggtgtggacccatcacttacgaggggaatgctag

SEQ ID NO: 136657 - DNA, 80 bp, synthetic construct
  source 1..80: mol_type = other DNA
ttcccgacgtcgactccccccacaactaactcagactctggtcaccctacaaccagcaagagctcagaccaagccgacga

SEQ ID NO: 136658 - DNA, 80 bp, synthetic construct
  source 1..80: mol_type = other DNA
gctggagcaggtcccgcagcaggatggcctggtggctggtggcgaggtgtggcgcggtggggagcgcggcgcgctgagcg

SEQ ID NO: 136659 - DNA, 80 bp, synthetic construct
  source 1..80: mol_type = other DNA
ggcctcttctgtgcccctccggccatgctgttgggctcttccgagctgctgtctgcactcgaggcgtcgccaaagcgctg

SEQ ID NO: 136660 - DNA, 80 bp, synthetic construct
  source 1..80: mol_type = other DNA
ttggtcaactgtttaccttctctcccaggcgccactggacgacgcaagactgcaattgttctatctatcccggccatata

SEQ ID NO: 136661 - DNA, 80 bp, synthetic construct
  source 1..80: mol_type = other DNA
ctaccatgcagtcctaaaggagattaagcaacgggcatccggagtgaaggtgcgcaccctctccacggaggaagcttgcg

SEQ ID NO: 136662 - DNA, 80 bp, synthetic construct
  source 1..80: mol_type = other DNA
aggagaacattaagtatgaggtggctatctttgtgcatggaccaactaccgtggaatcgcatgggaactacttcacgcaa

SEQ ID NO: 136663 - DNA, 80 bp, synthetic construct
  source 1..80: mol_type = other DNA
acagatctgctggatgttcccaactcgcctgtgacttcgcctccgtcgcttcatgatcttttcgatgtggaagtggatcc

SEQ ID NO: 136664 - DNA, 80 bp, synthetic construct
  source 1..80: mol_type = other DNA
ccgggtgcgctctgcccccgcacaagccaccaccagtggccccccccaggacgaagaaacttattcgccttgatgaggag

SEQ ID NO: 136665 - DNA, 80 bp, synthetic construct
  source 1..80: mol_type = other DNA
acaaatgttcgcaaatcgacggtttcgttgtcgcgctctttcagttttcagggcaacgttcagccactcctgcagtccac

SEQ ID NO: 136666 - DNA, 80 bp, synthetic construct
  source 1..80: mol_type = other DNA
acccgaacacggggacgggctgggccggccccaggcggtttcccgccacgaccgcgttccgcaggtacacggctgccgcg

SEQ ID NO: 136667 - DNA, 80 bp, synthetic construct
  source 1..80: mol_type = other DNA
gacccagcgaagggaggtcggaagcctgctcgtctcgtgtatccggatctcggggttcgggtttgcgagaagaaagcact

SEQ ID NO: 136668 - DNA, 80 bp, synthetic construct
  source 1..80: mol_type = other DNA
tcgccgagccggatgacagggagatatctgtggctgctgagtgtcatagaccaccaaggccaaagtttccacctgcattg

SEQ ID NO: 136669 - DNA, 80 bp, synthetic construct
  source 1..80: mol_type = other DNA
tgcaacgttgcagtcactcagattgttgactttagcctggaccccaccttctccattgagactcgcactgctccccaaga

SEQ ID NO: 136670 - DNA, 80 bp, synthetic construct
  source 1..80: mol_type = other DNA
acaacagtgggaggggttatgtggactgtctaccatggtgcaggttcaaggacgcttgcgggtgtcaaacatcctgcgct

SEQ ID NO: 136671 - DNA, 80 bp, synthetic construct
  source 1..80: mol_type = other DNA
tcctggttgggaaacatcatagtctacgcgcccaccatatgggtgcgcatgatattgatgacccatttcttttcagtact

SEQ ID NO: 136672 - DNA, 80 bp, synthetic construct
  source 1..80: mol_type = other DNA
gaatcactcccctgagaggaaccactgtcctcacgcagaaagcgtctagccatgacgttagtatgagtgtcgtacagcct

SEQ ID NO: 136673 - DNA, 80 bp, synthetic construct
  source 1..80: mol_type = other DNA
atggtactgatgacccacttcttcgggatcttgcaatcccaggaaacactccacaaggcgctcgatttcgatatgtacgg

SEQ ID NO: 136674 - DNA, 80 bp, synthetic construct
  source 1..80: mol_type = other DNA
gctccgtccctcaaggccatgtgtaccacacactgggagcacccggacgaggagcttctggaagcaaaccttctgtggag

SEQ ID NO: 136675 - DNA, 80 bp, synthetic construct
  source 1..80: mol_type = other DNA
tggtactgtgcacccatttcttccaaatactgcaagcgcaggagcagctccacaaagcacttgacttcgacatgtacgga

SEQ ID NO: 136676 - DNA, 80 bp, synthetic construct
  source 1..80: mol_type = other DNA
tggatgaacagactcatagcgtttgcatctcggggcaaccatgtatcaccaacacactatgtccctgaaagcgacgctgc

SEQ ID NO: 136677 - DNA, 80 bp, synthetic construct
  source 1..80: mol_type = other DNA
agaaacggccggagataacgtccaccaacaatcaaccgatgatgacaagtcagacgcggactccttgtcttccatgcctc

SEQ ID NO: 136678 - DNA, 80 bp, synthetic construct
  source 1..80: mol_type = other DNA
ctctttaaactaaaaagccagaattgagctcaatctggaaggctcacaaaatatattccagaaaagctgaaaacagtcaa

SEQ ID NO: 136679 - DNA, 80 bp, synthetic construct
  source 1..80: mol_type = other DNA
ggcaatccccctagagtatatcaaggggggtagacatctcatattttgccactcgaaaaagaaatgcgacgagcttgccg

SEQ ID NO: 136680 - DNA, 80 bp, synthetic construct
  source 1..80: mol_type = other DNA
gacctggacatgaggaacctatcccaatggcgacctatggatggaacctagtaaagctacactctggaaaggatgtattt

SEQ ID NO: 136681 - DNA, 80 bp, synthetic construct
  source 1..80: mol_type = other DNA
cgctgccgtccgccgcgccctcgaagccggccctgcgtctggcgcatctgttctgtattcgcgttctccgggccctggtg

SEQ ID NO: 136682 - DNA, 80 bp, synthetic construct
  source 1..80: mol_type = other DNA
ctgtccacccaacaaaccctccttttcaacatcttgggagggtgggtggcctcccagatcgctacccccacggcttctac

SEQ ID NO: 136683 - DNA, 80 bp, synthetic construct
  source 1..80: mol_type = other DNA
atttttgttactaggtccggtgtcagaggatgagtcatcgccctcagaagacgaccacccgtctccccccgatctcacag

SEQ ID NO: 136684 - DNA, 80 bp, synthetic construct
  source 1..80: mol_type = other DNA
gctgccttttcctccgcagttgccactgggtcctaaacacactcatgttcatggtgcacgtaaaaccgttcgacgacgag

SEQ ID NO: 136685 - DNA, 80 bp, synthetic construct
  source 1..80: mol_type = other DNA
gaacctgttgacgtggactgcttctgccgaggtgttgatagggttaagttagagtatgggcgttgtggaaggcaagccgg

SEQ ID NO: 136686 - DNA, 80 bp, synthetic construct
  source 1..80: mol_type = other DNA
cacgggcggaatctttttattcttgatgagcggaaaaggtatagggaaaatgactctgggaatgtgctgcataatcacgc

SEQ ID NO: 136687 - DNA, 80 bp, synthetic construct
  source 1..80: mol_type = other DNA
ggtcgggtgaagacagcgctactctcggcgctggggtcttggtcctctttggcttctttaccttgtcaccttggtataaa

SEQ ID NO: 136688 - DNA, 80 bp, synthetic construct
  source 1..80: mol_type = other DNA
aaatcgcagcaacagggggcccgaaaccggaatgaagctgtaattccggtggaaggactagaggttagaggagacccccc

SEQ ID NO: 136689 - DNA, 80 bp, synthetic construct
  source 1..80: mol_type = other DNA
tcggccccgcctccactggactacccaggagtgcaattgttccatctattcgggtcacatcacaggccataggatggcgt

SEQ ID NO: 136690 - DNA, 80 bp, synthetic construct
  source 1..80: mol_type = other DNA
atcaggcggagacggctggagcgcgactcgtcgtgctcgccactgctaccccgcctggttctattacagtaccccacccg

SEQ ID NO: 136691 - DNA, 80 bp, synthetic construct
  source 1..80: mol_type = other DNA
aaagagcttcttgtgacattcaaaaacgcgcacgcaaaaaaacaagaagtagtaggccttggatgcgaagagggagcaat

SEQ ID NO: 136692 - DNA, 80 bp, synthetic construct
  source 1..80: mol_type = other DNA
tcgtcgagcgtgccgacgggcggcacacctatcacgtgactggccgtcaggagctcggcgcagagagcctcgttaagagc

SEQ ID NO: 136693 - DNA, 80 bp, synthetic construct
  source 1..80: mol_type = other DNA
ggcgctgcaggagtgggcgcagctgcccgctgtccagggagtcgagggcggccgcgctgaggtcgacgggaagcgtttgc

SEQ ID NO: 136694 - DNA, 80 bp, synthetic construct
  source 1..80: mol_type = other DNA
tgctaacactacaccccccgccttacattgaagagacccaggtttaatacagtgacagtggatagtccagcgttcaaaac

SEQ ID NO: 136695 - DNA, 80 bp, synthetic construct
  source 1..80: mol_type = other DNA
gaaaggactactcctctgatgcaaaagaaagtcggacaggtgctcctcataggggtaagcgtggcagcgttcctcgtcaa

SEQ ID NO: 136696 - DNA, 80 bp, synthetic construct
  source 1..80: mol_type = other DNA
ggaaatcaacaatggggccatactgcatatgcccatgggactttgggagagagcatgtgatagaataggcaacggtactc

SEQ ID NO: 136697 - DNA, 80 bp, synthetic construct
  source 1..80: mol_type = other DNA
ctgtttcaccccaagccctgtagtggtgggcacaactgacaggctaggcacgcccacctacacctggggtgaaaatgaaa

SEQ ID NO: 136698 - DNA, 80 bp, synthetic construct
  source 1..80: mol_type = other DNA
caacaccaccaagtgtccctgcggggcaatgatctccggccacgtgaaaaacggaaccatgaggatcgtgggacccaagc

SEQ ID NO: 136699 - DNA, 80 bp, synthetic construct
  source 1..80: mol_type = other DNA
gttgtggtgggaaccactgacaggcggggcaaccccacatatacctggagggacaatgagacagatgtattcatgctgga

SEQ ID NO: 136700 - DNA, 80 bp, synthetic construct
  source 1..80: mol_type = other DNA
agctatgtgtgctttgtgttatatgcgtttaactggacactgtatctacagtaagtaaaaaagtttttatttgtttggtg

SEQ ID NO: 136701 - DNA, 80 bp, synthetic construct
  source 1..80: mol_type = other DNA
gcacgacatctacatgtgctgcaaactagaccctgcagcgcgcaaagccattacatcactcaccgagcggctgtattgtg

SEQ ID NO: 136702 - DNA, 80 bp, synthetic construct
  source 1..80: mol_type = other DNA
aaacttaacacaccaaataatcgagcgcgtctagcccagtaacatgcgcacgtgatgtaggctggtcagcacggcgtcgc

SEQ ID NO: 136703 - DNA, 80 bp, synthetic construct
  source 1..80: mol_type = other DNA
ctaccaccctcctccttaacatccttggggggtgggttgcgtcccagttggcgccgcccacggcttccacggccttcgtc

SEQ ID NO: 136704 - DNA, 80 bp, synthetic construct
  source 1..80: mol_type = other DNA
cgttggcaggagccatcgtggtggagtactcaagctcagtgaagttaacatcaggccacctgaaatgtaggctgaaaatg

SEQ ID NO: 136705 - DNA, 80 bp, synthetic construct
  source 1..80: mol_type = other DNA
tccacaacctcgaggagtgcctctctgagggcaaagaaggtgacttttgacagggtgcaggtgctggacgcacactatga

SEQ ID NO: 136706 - DNA, 80 bp, synthetic construct
  source 1..80: mol_type = other DNA
acaaaaaaatggatggctgccggtatgttcatggaacgacggtcgctacgtctgcaaaggagatagcaatactatcacta

SEQ ID NO: 136707 - DNA, 80 bp, synthetic construct
  source 1..80: mol_type = other DNA
cctatgtataacagcaaggggcaacaatgcggttatcgcagatgccgcgccagcggcgtcttcaccactagtatgggcaa

SEQ ID NO: 136708 - DNA, 80 bp, synthetic construct
  source 1..80: mol_type = other DNA
gttgttccggacccgggggcatggctggtagtggcacgtcggcgccgcgcacgggcaggttctggtactgcgctctgaga

SEQ ID NO: 136709 - DNA, 80 bp, synthetic construct
  source 1..80: mol_type = other DNA
cagaatttgatgcttatcaagaccaacggaagctggcatttgaacagcacagctctcaattgcaatgactcgctccacac

SEQ ID NO: 136710 - DNA, 80 bp, synthetic construct
  source 1..80: mol_type = other DNA
gcctcctctatgccccccctcgagggggagcctggagatccggacctggagtctgatcaggtagagcttcaacctcgccc

SEQ ID NO: 136711 - DNA, 80 bp, synthetic construct
  source 1..80: mol_type = other DNA
gctacaagagaggctcaaaaaaggacagctgctgggatcatgaagaaccccacggtggacgggataacagttatagatct

SEQ ID NO: 136712 - DNA, 80 bp, synthetic construct
  source 1..80: mol_type = other DNA
acaagacatatatttgtcttgccagctggacccagaggcccagcaagtcatcaagtctctcactgagaggctttatgttg

SEQ ID NO: 136713 - DNA, 80 bp, synthetic construct
  source 1..80: mol_type = other DNA
cacgaccacggccacgttggcctcaaagccgctctccacggtcaggcccacgaccaggggcgccacggcgacgtcggcat

SEQ ID NO: 136714 - DNA, 80 bp, synthetic construct
  source 1..80: mol_type = other DNA
ggccatcaagtgggaatggatcgtgcttgcgttcctgcttctggcagacgcacgcatttgtgcctgcctttggatgatgc

SEQ ID NO: 136715 - DNA, 80 bp, synthetic construct
  source 1..80: mol_type = other DNA
cagaagctctgttcaataaatactgctccctctcgcttaaagagtaaaaaaagcccgcgcgcggactttcaacaggcggg

SEQ ID NO: 136716 - DNA, 80 bp, synthetic construct
  source 1..80: mol_type = other DNA
caggggtataaggtgctggtgctcaacccgtctgtcgcagcgacgctcgggttcggagcatacatgtcaaaagcatatgg

SEQ ID NO: 136717 - DNA, 80 bp, synthetic construct
  source 1..80: mol_type = other DNA
ggatccggatctcagcgacgggtcatggtcgacggtcagtagtagggctgacgcggaggatatcgtgtgctgctcaatgt

SEQ ID NO: 136718 - DNA, 80 bp, synthetic construct
  source 1..80: mol_type = other DNA
actgagtccctttccctggaacccgttgctggggcccaattggctgcccccgtagcgggacaaaccaacataattgaccc

SEQ ID NO: 136719 - DNA, 80 bp, synthetic construct
  source 1..80: mol_type = other DNA
cggtccagcagcgcgcgcaccccgggccagtacagcagggaccccagcgagctgcggaacaccgcggcgtcggagccgga

SEQ ID NO: 136720 - DNA, 80 bp, synthetic construct
  source 1..80: mol_type = other DNA
gaaggtagaagaggggctgctgagatgcttgtgatcctcacggagttgcccgacttcctggcaaagaagggtgtggaagc

SEQ ID NO: 136721 - DNA, 80 bp, synthetic construct
  source 1..80: mol_type = other DNA
gccatggaagatatggacgcttagaatggtatgtttggcagttagtgcgtatacaccttgggccattcttccatcaatag

SEQ ID NO: 136722 - DNA, 80 bp, synthetic construct
  source 1..80: mol_type = other DNA
cgctgtccccgtactacaaacggtggttagcgtggggggtgtggtgggtgcaatattttattgccagaacggaggccatc

SEQ ID NO: 136723 - DNA, 80 bp, synthetic construct
  source 1..80: mol_type = other DNA
ctcaagcagaatacgacctagagcgaataacatcatgctcttccaatgtgtcggtcgcccacgatgctactggcaaaagg

SEQ ID NO: 136724 - DNA, 80 bp, synthetic construct
  source 1..80: mol_type = other DNA
ctcaaagatccccataaactgggagtagcggtggccgaaccacacctgcgaaacggtgacgtctttgtagtacatggtgg

SEQ ID NO: 136725 - DNA, 80 bp, synthetic construct
  source 1..80: mol_type = other DNA
aggtaacattccaggtttgctagacgtgccggcgtatgaagagagtgttgagagtgttaaacaggcggaggcgcagggac

SEQ ID NO: 136726 - DNA, 80 bp, synthetic construct
  source 1..80: mol_type = other DNA
gtctcggtcgcgcacgacgcgacgggcaagagggtatactacctgacccgggaccccgagacccccctagcccgtgccgc

SEQ ID NO: 136727 - DNA, 80 bp, synthetic construct
  source 1..80: mol_type = other DNA
agccactgcaagtggaagggggtctaaggaatcttctcttctctttttcagtatggtgatcagccatgattcctaggttc

SEQ ID NO: 136728 - DNA, 80 bp, synthetic construct
  source 1..80: mol_type = other DNA
gacagtaggaagattagtcattcatgtacgcacccatttcaccacgaccctcctgtgataggtcgggaaaaattccattc

SEQ ID NO: 136729 - DNA, 80 bp, synthetic construct
  source 1..80: mol_type = other DNA
acaaacagacttactagttttttcagccccgggtccaagcaaaatgtccagctgattaagactaatggtagttggcatat

SEQ ID NO: 136730 - DNA, 80 bp, synthetic construct
  source 1..80: mol_type = other DNA
gaaagagacgtctaaggctaaaaaaatcaggacaggtcacgaagtattcatccctcatcttatcatatgggatgaatcta

SEQ ID NO: 136731 - DNA, 80 bp, synthetic construct
  source 1..80: mol_type = other DNA
gccataaaaaggaaactgcgcacgttaatcttggctcccacaagagttgtcgcttctgaaatggcagaggcactcaaggg

SEQ ID NO: 136732 - DNA, 80 bp, synthetic construct
  source 1..80: mol_type = other DNA
tactgtgacacttgccttggcacaattggccgagaagacttttccagcgtcttcgccgccctcgactgaccaggattctg

SEQ ID NO: 136733 - DNA, 80 bp, synthetic construct
  source 1..80: mol_type = other DNA
gagcgggtgccagcacgcccgcgcctccgccgggccgaccgccgcgcccgacaacagaaacgccgccgtggcggcgcgca

SEQ ID NO: 136734 - DNA, 80 bp, synthetic construct
  source 1..80: mol_type = other DNA
cagcaaactccctccggccgtgatgggaagctcctacgggttccaatactcaccaggacagcgggttgaattcctcgtgc

SEQ ID NO: 136735 - DNA, 80 bp, synthetic construct
  source 1..80: mol_type = other DNA
ggctgtcaaaactaagcttaaactcactccattgcctggtgcgggccggctcgatttatcgagctggtttagcttcagtg

SEQ ID NO: 136736 - DNA, 80 bp, synthetic construct
  source 1..80: mol_type = other DNA
tactgtcccctggagcactggtagtgggcgtggtatgtgcggctatcttaagacgtcatgccgggcccacagaaggggca

SEQ ID NO: 136737 - DNA, 80 bp, synthetic construct
  source 1..80: mol_type = other DNA
taacaataatggacctgcacccaggatcaggaaaaacaagaagatatcttccagccatagtccgtgaggccataaaaagg

SEQ ID NO: 136738 - DNA, 80 bp, synthetic construct
  source 1..80: mol_type = other DNA
ccaatgttagtggcccttctgaggacaggccctattgctggcattatgcgcccagaccctgctctgttattccggcccgg

SEQ ID NO: 136739 - DNA, 80 bp, synthetic construct
  source 1..80: mol_type = other DNA
gggaatatctcattcgcaaggagatatttgctattccatgatggagtagcaattccaaggaatgtcctgcattactaccg

SEQ ID NO: 136740 - DNA, 80 bp, synthetic construct
  source 1..80: mol_type = other DNA
ctccaagcctcactcctgcgcgtcccttacttcgtgagagcgcacgcgctagtcaaactgtgcagcctagcccgtggggt

SEQ ID NO: 136741 - DNA, 80 bp, synthetic construct
  source 1..80: mol_type = other DNA
tgcgagtggggaacaaccattacgttgtaggggtcacttctgataacatcaagtgcccttgccaagtgcctgctccagag

SEQ ID NO: 136742 - DNA, 80 bp, synthetic construct
  source 1..80: mol_type = other DNA
tcatcatggttatgtgtttcaggggtcgatgccagcacacgtatcaccggtggcagtgtagcccgtgatacctttgggtt

SEQ ID NO: 136743 - DNA, 80 bp, synthetic construct
  source 1..80: mol_type = other DNA
gttccgcccgaccgcaccctgtttgcgcacgtggccctgtgcgccatcgggcggcgccttggaaccatcgtcacctacga

SEQ ID NO: 136744 - DNA, 80 bp, synthetic construct
  source 1..80: mol_type = other DNA
cttgatgtcagtggtcatgaacagaacggtgccttccatcactgaggcttctgctgtgggactggcggcagcgggacaac

SEQ ID NO: 136745 - DNA, 80 bp, synthetic construct
  source 1..80: mol_type = other DNA
ggaggaaaggcgtaaaggtggcgttgggaggcaaaaagaaagaaaacacccagacgtaggcccgaggaccggccggcgtc

SEQ ID NO: 136746 - DNA, 80 bp, synthetic construct
  source 1..80: mol_type = other DNA
tctcgtggaaaactggaagaagtcagactaccaggcgcccaccgtcatggggtgcgcccttccaccatccgaccgagttc

SEQ ID NO: 136747 - DNA, 80 bp, synthetic construct
  source 1..80: mol_type = other DNA
gaacagttctggaacaagcacttatggaatttcgtaagtgggatccagtacttggctggcctgtccactcttcctggcaa

SEQ ID NO: 136748 - DNA, 80 bp, synthetic construct
  source 1..80: mol_type = other DNA
gcagatggccatagacatgtttgccggtgggcattggggcgtgttggctggcctcctctactacagtatggtagccaatt

SEQ ID NO: 136749 - DNA, 80 bp, synthetic construct
  source 1..80: mol_type = other DNA
gcggcatttttcacagcgtgtcgcgcgcccgaccccgctcattactcttcggcctactcctacttttcgtaggggtaggc

SEQ ID NO: 136750 - DNA, 80 bp, synthetic construct
  source 1..80: mol_type = other DNA
agttgggcagatgttcactttccagccgcgtcgccactggaccacccaggactgcaactgctccatctatgtcggccaca

SEQ ID NO: 136751 - DNA, 80 bp, synthetic construct
  source 1..80: mol_type = other DNA
caccagctgcatgtagcggtcgtagtgggaggtcagtaggtccagcacgtcatcggggccgaaggtcctcccagatcccc

SEQ ID NO: 136752 - DNA, 80 bp, synthetic construct
  source 1..80: mol_type = other DNA
gcggctctcgccctaattggggccccaatgacccccggcgacgatcgcgcaatttgggtaaagtcatcgataccataact

SEQ ID NO: 136753 - DNA, 80 bp, synthetic construct
  source 1..80: mol_type = other DNA
ctggtcgccttggcagcacaactttggcgcggccgggcggggcgcaggcgatacgcgcacccgagcgtgcgttacgtatg

SEQ ID NO: 136754 - DNA, 80 bp, synthetic construct
  source 1..80: mol_type = other DNA
ccacttcctctcccaaaccaagcaagcaggagagaactttccatacctagtggcctatcaggccacggtttgtgcacgtg

SEQ ID NO: 136755 - DNA, 80 bp, synthetic construct
  source 1..80: mol_type = other DNA
tacctggggacaacccgggtacccctggcccctgtatggaaacgagggttgcggttgggcaagctggcttgtgtcccccc

SEQ ID NO: 136756 - DNA, 80 bp, synthetic construct
  source 1..80: mol_type = other DNA
acagtgaagggatgcgctccgggctgggcgcttgccagggttctcttcaggctcatcctgctggtgtgaaagcgcgcgtc

SEQ ID NO: 136757 - DNA, 80 bp, synthetic construct
  source 1..80: mol_type = other DNA
ggaaacgtctgcgtgcttttggccatctgcacgccaaacagttcgccccagattatcttgaacagcgccaccgcgtggtc

SEQ ID NO: 136758 - DNA, 80 bp, synthetic construct
  source 1..80: mol_type = other DNA
acctgcgctccctcagcatccttaaccgctggctggaaaccgagcttgttttcgtgggggacgaggaggacgtctccaag

SEQ ID NO: 136759 - DNA, 80 bp, synthetic construct
  source 1..80: mol_type = other DNA
aggacgcagaccttggagcaggaacgagaagtgtctccaccgaaatagaaaaaccagacatgacaatcatcgggagaaga

SEQ ID NO: 136760 - DNA, 80 bp, synthetic construct
  source 1..80: mol_type = other DNA
caagcaggaaagaggaaaatcacttttgtttaagacctctgcaggtgtcaacatgtgcacccttattgcaatggatttgg

SEQ ID NO: 136761 - DNA, 80 bp, synthetic construct
  source 1..80: mol_type = other DNA
ggagcccccttctttggtgtggcaggacatgtcattactctcggagtggtgtccctggttggggccacccccacctcact

SEQ ID NO: 136762 - DNA, 80 bp, synthetic construct
  source 1..80: mol_type = other DNA
gacacttgacttcattccagtggaggccatggagactaccatgcggtcaccttccttttctgacaactcgacaccaccgg

SEQ ID NO: 136763 - DNA, 80 bp, synthetic construct
  source 1..80: mol_type = other DNA
gttcaggctacttggcccaaactggaacaattctgggccaagcacatgtggaatttcattagtggtatccagtatttggc

SEQ ID NO: 136764 - DNA, 80 bp, synthetic construct
  source 1..80: mol_type = other DNA
accagttaatgaaggagaacaacctaaagatctggatatagattttgcttactttgacgtccctggcggaagtcctccag

SEQ ID NO: 136765 - DNA, 80 bp, synthetic construct
  source 1..80: mol_type = other DNA
tcgtggaggaggccagattaccaaccgcccaccgttgctggttgtgctctccccccccccaagaaggccccgacgcctcc

SEQ ID NO: 136766 - DNA, 80 bp, synthetic construct
  source 1..80: mol_type = other DNA
gcgggagtggaggccaatacagttgtcaccggtgggtccgctgcgcggagcgtagctagccttaccagccttttcacccc

SEQ ID NO: 136767 - DNA, 80 bp, synthetic construct
  source 1..80: mol_type = other DNA
gcctactcctactatccgtaggggtaggcatctttttgctgcctgctcgctaggcagcttaacacaaagaccctagggtc

SEQ ID NO: 136768 - DNA, 80 bp, synthetic construct
  source 1..80: mol_type = other DNA
agattcatatgtagacactcactagtggatagaggctggggcaatggatgtggtttatttggaaagggtgggatagtgac

SEQ ID NO: 136769 - DNA, 80 bp, synthetic construct
  source 1..80: mol_type = other DNA
actcctctacagccacttcactgtgtaacatttttaggggaagttacttggctggagcttctctaatctacacagtaaca

SEQ ID NO: 136770 - DNA, 80 bp, synthetic construct
  source 1..80: mol_type = other DNA
tggcagctacggtctgctcggctttgtatgtgggggtcgtgtgcggggccgtgatgattgtgtcgcaggctctcataata

SEQ ID NO: 136771 - DNA, 80 bp, synthetic construct
  source 1..80: mol_type = other DNA
tgtggcgtgtttccgccgacgactacgctgaagtcgtacggcatggggatgcacactacatcgtgggtgtcaccacagac

SEQ ID NO: 136772 - DNA, 80 bp, synthetic construct
  source 1..80: mol_type = other DNA
ccctttggggatagttacatcatagttgggacaggggattcacgcctgacttaccagtggcacaaggaaggcagctcaat

SEQ ID NO: 136773 - DNA, 80 bp, synthetic construct
  source 1..80: mol_type = other DNA
tttcatagtgggtgtaaccaaccaggaccttaaatgcccatgtcaagtaccggctccagagttcttcacggaggttgacg

SEQ ID NO: 136774 - DNA, 80 bp, synthetic construct
  source 1..80: mol_type = other DNA
cgggcttacctaaatacccctggtctccctgtatgtcaggaccatctggagttttgggagggcgtctttactggactgac

SEQ ID NO: 136775 - DNA, 80 bp, synthetic construct
  source 1..80: mol_type = other DNA
tacttaggttacagacatgacagtaagggaaaagtagactataaggttacagtcataccacctccttcaaccactcgcaa

SEQ ID NO: 136776 - DNA, 80 bp, synthetic construct
  source 1..80: mol_type = other DNA
ttttagcccttatttgacaacccgcctgccgggatgggccggagttcgtcagaatgtgatgggatcaacggtggacgggc

SEQ ID NO: 136777 - DNA, 80 bp, synthetic construct
  source 1..80: mol_type = other DNA
atcctgacatgctggtctgcggagatgatttggtgatcatatccgagagtctgggggtttcggaggatgcgagtgcactg

SEQ ID NO: 136778 - DNA, 80 bp, synthetic construct
  source 1..80: mol_type = other DNA
tacctgaacgcagtgtccctttgcatcctgacaataaacgctgttgcctccagaaaagcatcaaatgtcatcctgccctt

SEQ ID NO: 136779 - DNA, 80 bp, synthetic construct
  source 1..80: mol_type = other DNA
gcatcgtggcttgtgccaagtttacatgtgccaaatctatgagtctctttgaggtggatcagaccaaaatccaatatgtc

SEQ ID NO: 136780 - DNA, 80 bp, synthetic construct
  source 1..80: mol_type = other DNA
ttgtggccactcctgctattgctcctagtgttgcctcagcgggcgtacgctatggacaatgagcaagcagcgtctctcgg

SEQ ID NO: 136781 - DNA, 80 bp, synthetic construct
  source 1..80: mol_type = other DNA
cacggggagggcataggcctgggcggccttgcgcagggaggtgtgcgtgagggcgaaggtgtccctgaccatgaccttta

SEQ ID NO: 136782 - DNA, 80 bp, synthetic construct
  source 1..80: mol_type = other DNA
gcaacggacatgggagaatggtgtgaagattcaataacctactcctgtgttactattgaccaggaagaagaacctgttga

SEQ ID NO: 136783 - DNA, 80 bp, synthetic construct
  source 1..80: mol_type = other DNA
gcggcgcccaccccgtgtgccgcgcctggcgtctcctctgggggcgacccgtaaatggttgcagtgatgtaaatggtgtc

SEQ ID NO: 136784 - DNA, 80 bp, synthetic construct
  source 1..80: mol_type = other DNA
aaggaggtccgggcccactcgcccaaggccctcaatcacatcaaggctgtttgggaagacatccaagctgaccacgaaac

SEQ ID NO: 136785 - DNA, 80 bp, synthetic construct
  source 1..80: mol_type = other DNA
gctaaggttttgattgtgatgctactctttgccggcgttgacgtggcaacctacacgacgggggggtcggtgagccgtat

SEQ ID NO: 136786 - DNA, 80 bp, synthetic construct
  source 1..80: mol_type = other DNA
tggaagcggtggtaccgtcgcgcaccaacccgacgcacgagaaagtcctgactatcgtaaacgccctggtagacagcaaa

SEQ ID NO: 136787 - DNA, 80 bp, synthetic construct
  source 1..80: mol_type = other DNA
accctcctgctcaacatcttaggagggtgggttgcgtcacaattggcaaacccaactgcttctacagccttcgtggtaag

SEQ ID NO: 136788 - DNA, 80 bp, synthetic construct
  source 1..80: mol_type = other DNA
cccagaatttggccaggacgtccttgtagaacgcgggtggtggggcctgggtccgcaactgctccagaaacctgtcggcg

SEQ ID NO: 136789 - DNA, 80 bp, synthetic construct
  source 1..80: mol_type = other DNA
tggaacctacgttagtgccattgcccaagctaaagcatcacaggaagggcctttaccagagattgaggacgaggtgttta

SEQ ID NO: 136790 - DNA, 80 bp, synthetic construct
  source 1..80: mol_type = other DNA
cgcacggcttggacgcgaggtcttgttgggcccagccgacaagtatgtctcaaaagggtggaagctcctcgcgccaatta

SEQ ID NO: 136791 - DNA, 80 bp, synthetic construct
  source 1..80: mol_type = other DNA
accaagtatatcatgacatgcatgtcggctgacttggaggtcgtcacgagtacctgggtgctcgtcggcggcgttctggc

SEQ ID NO: 136792 - DNA, 80 bp, synthetic construct
  source 1..80: mol_type = other DNA
tcccatcattgacaaaacgcagcaaaaaagggggcccgaagccaggaggaagctgtactcctggtggaaggactagaggt

SEQ ID NO: 136793 - DNA, 80 bp, synthetic construct
  source 1..80: mol_type = other DNA
ctgcaggaagcggcggcggaagtcaggcatacgctggtaactttgaggcagctggtaacgctctatgatccagtcgattt

SEQ ID NO: 136794 - DNA, 80 bp, synthetic construct
  source 1..80: mol_type = other DNA
gcgtaaattggaaggggcgcagggtgcagcgcgtgttgcggcccggcacggcggtggtgttcacgcccggcgagcggtcc

SEQ ID NO: 136795 - DNA, 80 bp, synthetic construct
  source 1..80: mol_type = other DNA
ggcgccggcgcgggccgcgggtgtttcctggccctcaagcaggggccacgtggtgatgtcggtgtgcggctcgtcaaaga

SEQ ID NO: 136796 - DNA, 80 bp, synthetic construct
  source 1..80: mol_type = other DNA
gcaggccgtgaaagacatctgcgcgacctacgcgatcccccacgacccacaccccgacaccctcagtgccgcgtccttga

SEQ ID NO: 136797 - DNA, 80 bp, synthetic construct
  source 1..80: mol_type = other DNA
tgggatgaccaacagagccacttgggcatctcacatccacttggtaatacaccgcatccggacactgattgggaaagaga

SEQ ID NO: 136798 - DNA, 80 bp, synthetic construct
  source 1..80: mol_type = other DNA
ttgggcgcgccctgattacaacccgcctctactcgcatcatggaagaggcgagactacgaccccccggtcgtacatgggt

SEQ ID NO: 136799 - DNA, 80 bp, synthetic construct
  source 1..80: mol_type = other DNA
agccagggcaacaaaggtccatccaagacaaccaagtggcatacctcattattggcatcctgacgctggtttcagcggtg

SEQ ID NO: 136800 - DNA, 80 bp, synthetic construct
  source 1..80: mol_type = other DNA
gacaccgtcgttctatgtgaggcatacgacactggttgcgcatggtatgagctctctccatcagagaccactgtgagact

SEQ ID NO: 136801 - DNA, 80 bp, synthetic construct
  source 1..80: mol_type = other DNA
tggccttgttgacgccaggcttgaaatgcctgaacctggatgtgtacagaatcttactgctcatgattggaattggcagt

SEQ ID NO: 136802 - DNA, 80 bp, synthetic construct
  source 1..80: mol_type = other DNA
cctctcgtgcctaactgtaccagcctcagcggtcaattatgccaataagagcggcatttaccaccttaccaatgactgcc

SEQ ID NO: 136803 - DNA, 80 bp, synthetic construct
  source 1..80: mol_type = other DNA
gaactaataggaagagcaagaatctctcaaggagcgggatggagccttagagaaactgcatgtctggggaaagcctacgc

SEQ ID NO: 136804 - DNA, 80 bp, synthetic construct
  source 1..80: mol_type = other DNA
tctctatgcagggagcgtgggcgaaggtcattgtcatccttctgctggccgctggggtggacgcgggcaccaccaccgtt

SEQ ID NO: 136805 - DNA, 80 bp, synthetic construct
  source 1..80: mol_type = other DNA
atcttggaagagctggggccattcgatgatctggagcgtccccgaggctccccgtcgattcatggtgtggacagagggaa

SEQ ID NO: 136806 - DNA, 80 bp, synthetic construct
  source 1..80: mol_type = other DNA
gtaggggtaggcatcttcctgcttcctgctcggtaagcaggaggccttaagcaacactccattgtctttttttttttttt

SEQ ID NO: 136807 - DNA, 80 bp, synthetic construct
  source 1..80: mol_type = other DNA
accccagaaccccgcgggtccctcgctgtgcgtctggaggatgagtttggggagtttggctggaccccccaggatggctc

SEQ ID NO: 136808 - DNA, 80 bp, synthetic construct
  source 1..80: mol_type = other DNA
gagatggtgggacgttgaaacacattgaagtgtgcctgctgaagacccaccgactgattaacaaactgggcgtaggaact

SEQ ID NO: 136809 - DNA, 80 bp, synthetic construct
  source 1..80: mol_type = other DNA
aaactcggccgtggtgaccaacacgaaacaaaagcgctcggcgtaccaccgaagcatgggcacggatgccgtagtcaggt

SEQ ID NO: 136810 - DNA, 80 bp, synthetic construct
  source 1..80: mol_type = other DNA
gtcgccaacatcagcggcccgtccgatgacaaaccctactgctggcactacgcgcctcggtcgtgcgggatcgtgccagc

SEQ ID NO: 136811 - DNA, 80 bp, synthetic construct
  source 1..80: mol_type = other DNA
ccctaggattcttgaatgaagatcactggttctccagagggaactccctgagtggagtggaaggagaagggctgcacaag

SEQ ID NO: 136812 - DNA, 80 bp, synthetic construct
  source 1..80: mol_type = other DNA
ccaacctacacctggagggaaaatgagacggacgtgttcttgttgaacagcacgcgacctccacggggagcttggtttgg

SEQ ID NO: 136813 - DNA, 80 bp, synthetic construct
  source 1..80: mol_type = other DNA
ccagatattctgcccctcccggggacgctccacaacccacctatgatttggagctgattacatcttgctcctcaaatgtc

SEQ ID NO: 136814 - DNA, 80 bp, synthetic construct
  source 1..80: mol_type = other DNA
gccaacaatccgccccccgtcctctcggccctgttttgcgccaccccgcagagctctgcgttgcagttgcccgggcccgt

SEQ ID NO: 136815 - DNA, 80 bp, synthetic construct
  source 1..80: mol_type = other DNA
tctgactaagtgttggttgtcggcctctccgacactggcggtgcggaatgcgtcggtgcccatcagggggatccgcgaac

SEQ ID NO: 136816 - DNA, 80 bp, synthetic construct
  source 1..80: mol_type = other DNA
ccaggtcgtgtccacagccacgcagtccttccttgccacgactgtcaatggggtcctctggacggtttaccatggtgcgg

SEQ ID NO: 136817 - DNA, 80 bp, synthetic construct
  source 1..80: mol_type = other DNA
gggaggtgatgtaccaacaatacgatgagatggaggagtgctcgcggcatctcccatatctcgtcgagggccaacagatg

SEQ ID NO: 136818 - DNA, 80 bp, synthetic construct
  source 1..80: mol_type = other DNA
gcgtgcagaccgtggacattcaaatccccaccgacatggatgtcgacaaaaaaccctcgaccagcatcgaggtgcagacc

SEQ ID NO: 136819 - DNA, 80 bp, synthetic construct
  source 1..80: mol_type = other DNA
actccccacagcaacatagaggaggtggcccttggtcacgagggcgagatccccttttatggcaaggctattcccctagc

SEQ ID NO: 136820 - DNA, 80 bp, synthetic construct
  source 1..80: mol_type = other DNA
gaaataccagatcccgacgaagcgtgccagttgagttgcgtgccaatagaacaataacaaccacctcatcggtggaattt

SEQ ID NO: 136821 - DNA, 80 bp, synthetic construct
  source 1..80: mol_type = other DNA
ttagctccgccacagtttctcgcacttcgcgttcaaaggcgcccggcgcttcctcgatttcttcttccatgagttcttcc

SEQ ID NO: 136822 - DNA, 80 bp, synthetic construct
  source 1..80: mol_type = other DNA
atcgttacgtataagagctatccaacagatggctcgtaatttacgcaccgttttggactcatttgaacgaggcactgccg

SEQ ID NO: 136823 - DNA, 80 bp, synthetic construct
  source 1..80: mol_type = other DNA
gtggggggtcggcgtcgatggtaaaaatgccaggcagcagggtgcgattgaaataatcaatggaggtaccaacttgcaaa

SEQ ID NO: 136824 - DNA, 80 bp, synthetic construct
  source 1..80: mol_type = other DNA
ctacaaccgcggataaggaagtgttggagttatataaagcccaactggctgcacaaaacagatttgaaggtcgtgtatgt

SEQ ID NO: 136825 - DNA, 80 bp, synthetic construct
  source 1..80: mol_type = other DNA
aaagcgcccccccccagctgggacacaatgtggaagtgcatgctccgtcttaagccgaccctgactggccccacccgcct

SEQ ID NO: 136826 - DNA, 80 bp, synthetic construct
  source 1..80: mol_type = other DNA
ttcaccggaacctacctgtatgaccacctgacccccctgcaagactgggcccatggtgctctgcgagacctcacggtagc

SEQ ID NO: 136827 - DNA, 80 bp, synthetic construct
  source 1..80: mol_type = other DNA
gggtcccctcccttgaagtgcggggcggccgcgatgccatcatcctcctcgcgtgcttggtccaccctggtcttatgttt

SEQ ID NO: 136828 - DNA, 80 bp, synthetic construct
  source 1..80: mol_type = other DNA
cgcctatgggatcgaccccaatgtccgcaccgggaaccgcaccgttacaactggtgctaaactgacctattccacctacg

SEQ ID NO: 136829 - DNA, 80 bp, synthetic construct
  source 1..80: mol_type = other DNA
tatcgcctggcgctttggtcgtgggcgtcgtgtgtgctgccgtgctgcgccgccatattggtccctctgagggagcaacc

SEQ ID NO: 136830 - DNA, 80 bp, synthetic construct
  source 1..80: mol_type = other DNA
cgaaaaggtcacactctggggcgcgcgacccgcccgagccagcggcccgccagttaccacccgccgaccaaacccccgcc

SEQ ID NO: 136831 - DNA, 80 bp, synthetic construct
  source 1..80: mol_type = other DNA
atcacggcttccactaaggctggcacacgcacttcaagaaacacaaacatagcaaaagcattttcctcaaaatcttcaaa

SEQ ID NO: 136832 - DNA, 80 bp, synthetic construct
  source 1..80: mol_type = other DNA
tactgcagttctctgtgagtgttatgacaccggttgttcttggtacgagctaacacctgccgaaacgacagctaggctgc

SEQ ID NO: 136833 - DNA, 80 bp, synthetic construct
  source 1..80: mol_type = other DNA
ctgctgctcagaccttcctggcaacctgcattaacggggtgtgctggactgtctaccacggagccgggacaaggaccatc

SEQ ID NO: 136834 - DNA, 80 bp, synthetic construct
  source 1..80: mol_type = other DNA
gtccctcaccgagaggctttatgttggtggccctcttaccaattcaaggggggagaactgcggctatcgcaggtgccgcg

SEQ ID NO: 136835 - DNA, 80 bp, synthetic construct
  source 1..80: mol_type = other DNA
taatgacaaagatgaaggcaaaaggtacagagtgaaagtaaatactacaaattctcaagctgtaaaaattcagccatata

SEQ ID NO: 136836 - DNA, 80 bp, synthetic construct
  source 1..80: mol_type = other DNA
gggtggtttgccagtcagctggccccgccgtctgcggctacgactttcgtggtctcaggattggcgggtgcggctatagg

SEQ ID NO: 136837 - DNA, 80 bp, synthetic construct
  source 1..80: mol_type = other DNA
tccagatcatataacagcagaggcagcgggtcggcgcctcaagagaggctctcccccctcactggcaagctcgtccgcta

SEQ ID NO: 136838 - DNA, 80 bp, synthetic construct
  source 1..80: mol_type = other DNA
atcaatatttcatcgcacgcgcggaggcctcactccacgagtgggtatcgccccttcgggtcaggggtggccgtgatgca

SEQ ID NO: 136839 - DNA, 80 bp, synthetic construct
  source 1..80: mol_type = other DNA
cctcctgtatcgcttgggtgccgtgaccaacgaggttaccctgacacaccccgtgacgaaatatatcgccacgtgcatgc

SEQ ID NO: 136840 - DNA, 80 bp, synthetic construct
  source 1..80: mol_type = other DNA
tcagtccgagggcaggtcctgggcgcagcccgggtacccttggcccctttacggcaacgagggctgcgggtgtgcaggat

SEQ ID NO: 136841 - DNA, 80 bp, synthetic construct
  source 1..80: mol_type = other DNA
gtttatgtctaccaacaagtttaaagctcggctaatggtagccaaaaaaaacaaggaaactggtttaccgcgctacgagt

SEQ ID NO: 136842 - DNA, 80 bp, synthetic construct
  source 1..80: mol_type = other DNA
gtcgcggcctggatcagggaggcatgctctccctccggttggttggcggcccggcgcacctggacgacaaggtcggcggc

SEQ ID NO: 136843 - DNA, 80 bp, synthetic construct
  source 1..80: mol_type = other DNA
accacccacagcaacacctatgacgtggacatggtcgatgccaacctgctcatggagggcggtgtggctcagacagagcc

SEQ ID NO: 136844 - DNA, 80 bp, synthetic construct
  source 1..80: mol_type = other DNA
ctcactagttgttaagcttgggaacggtcttcgctttgatagctggggaagcatagctgtctcgcctactaccactaccc

SEQ ID NO: 136845 - DNA, 80 bp, synthetic construct
  source 1..80: mol_type = other DNA
cgccagcctccgccagaagaaggtcacatttgacagagtgcaagtgttcgaccaacattaccaggaaatactaaaggaga

SEQ ID NO: 136846 - DNA, 80 bp, synthetic construct
  source 1..80: mol_type = other DNA
gtggcctgttctgcgatgtacgtgggggacctttgcggagctcttttcctcgtgggtcaactgtttaccttctctccccg

SEQ ID NO: 136847 - DNA, 80 bp, synthetic construct
  source 1..80: mol_type = other DNA
cctggatcactgaagattgcccggtcccgtgctcggggtcgtggctccgagacatttgggattgggtttgttccatcctc

SEQ ID NO: 136848 - DNA, 80 bp, synthetic construct
  source 1..80: mol_type = other DNA
aacaccctgactttcacgaggttttttacacctgggccatcccagaacctccagcttgtaaacaccaatggcaggtggca

SEQ ID NO: 136849 - DNA, 80 bp, synthetic construct
  source 1..80: mol_type = other DNA
gggttcccccccttcaggtacgtgggggccgtgacgcaataattttgctcacgtgtttgctccatccatctttgtggttt

SEQ ID NO: 136850 - DNA, 80 bp, synthetic construct
  source 1..80: mol_type = other DNA
aaaacaacttggagatgacttctccaccctagctgtctcatctggacacttgaagtttatatcatcttcaaatgtagatg

SEQ ID NO: 136851 - DNA, 80 bp, synthetic construct
  source 1..80: mol_type = other DNA
atggccggcgccacctggcaccaagtcattggacccatgcacatgcgggtcttccgacctgtacttggtcacacgggatg

SEQ ID NO: 136852 - DNA, 80 bp, synthetic construct
  source 1..80: mol_type = other DNA
gagccctcgttgtcggggtcgtctgcgcaggaatactgcgcaggcacgtcggcagttcagagggtgccacccagtggatg

SEQ ID NO: 136853 - DNA, 80 bp, synthetic construct
  source 1..80: mol_type = other DNA
agtgaaaaagaggctgactgtcaggccaccttaagccacagtacggaagaagctgtgctgcctgtgagccccgtccaagg

SEQ ID NO: 136854 - DNA, 80 bp, synthetic construct
  source 1..80: mol_type = other DNA
gccgtacaaaatgaaataataacaacccatccaataaccaaatacatcatgacctgcatgtctgcggacttggaggttat

SEQ ID NO: 136855 - DNA, 80 bp, synthetic construct
  source 1..80: mol_type = other DNA
ctggttctcgtggcccggtcacgcagatgtattccagcgccgagggagacctcgtagggtggcctagcccccccggcacc

SEQ ID NO: 136856 - DNA, 80 bp, synthetic construct
  source 1..80: mol_type = other DNA
gtgtttgtggatgatgctgttagtgtcccaagcagaagcggccttggagaaccttgtagtccttaatgccgcgtcccttg

SEQ ID NO: 136857 - DNA, 80 bp, synthetic construct
  source 1..80: mol_type = other DNA
gtggtggacgtgctacatgctggtcctggcggaagccctgattcaagattggataccaccgctgcaggcgcggtgcggcc

SEQ ID NO: 136858 - DNA, 80 bp, synthetic construct
  source 1..80: mol_type = other DNA
cataatttatgagtccaacaaccacatactgcaccttccggggtgtgtaccgtgtgtgagaagtgggaacacatcgaggt

SEQ ID NO: 136859 - DNA, 80 bp, synthetic construct
  source 1..80: mol_type = other DNA
cctccaacgggtatagttaccaagaccgttcatggtgtttcacaggccaaacgaacaatacaatcctggaagataacaac

SEQ ID NO: 136860 - DNA, 80 bp, synthetic construct
  source 1..80: mol_type = other DNA
cttgattcaattaacgtggatcgttctgcatgtcgtacctaccgccagttgtataacctgcttatgagccatcgccattc

SEQ ID NO: 136861 - DNA, 80 bp, synthetic construct
  source 1..80: mol_type = other DNA
cgcatgttccgccccccgtctctgaccctccagccccacgcggtgatggagggtcagccgttcaaggcgacgtgcacggc

SEQ ID NO: 136862 - DNA, 80 bp, synthetic construct
  source 1..80: mol_type = other DNA
agactggctgtgggacttcgttgcccgggaaaagaaaccaagaatctgcaccccggaagaattcaaagcaaaggtgaaca

SEQ ID NO: 136863 - DNA, 80 bp, synthetic construct
  source 1..80: mol_type = other DNA
gcgatgttcagttctacgtgtcgcgcaaagacggcgtagttgcgtagacgctggaagaggtagttaagcgtggtggcaat

SEQ ID NO: 136864 - DNA, 80 bp, synthetic construct
  source 1..80: mol_type = other DNA
atcacgttgatttgcttgttgggtccgccgcgctctgctctgccatgtacgtgggggatgtctgcggtgccgttttcctt

SEQ ID NO: 136865 - DNA, 80 bp, synthetic construct
  source 1..80: mol_type = other DNA
caacgtcaccagtgtcgtcccgggcgcgcattaccacctgggccacgttaagctcaacgtgacgggcaaacacggcgtag

SEQ ID NO: 136866 - DNA, 80 bp, synthetic construct
  source 1..80: mol_type = other DNA
cacacaactagaggagcagccattgtgagtggagaaggaaaattgacgccatactggggtagtgtgaaagaagaccgcat

SEQ ID NO: 136867 - DNA, 80 bp, synthetic construct
  source 1..80: mol_type = other DNA
gtcaggccttgcgaacctctttactcgggggtccagccagaacgtccagcttatcaacaccaatggtagttggcatgtca

SEQ ID NO: 136868 - DNA, 80 bp, synthetic construct
  source 1..80: mol_type = other DNA
aacccttttgtttcagtggccacggccaatgccaaggtcctgattgaattggaaccaccttttggagactcatacatagt

SEQ ID NO: 136869 - DNA, 80 bp, synthetic construct
  source 1..80: mol_type = other DNA
ctgggtttcacagtccatgcagacatgggttgcgcggtgtcatggagtgggaaagagttgaagtgtggaagcggaatttt

SEQ ID NO: 136870 - DNA, 80 bp, synthetic construct
  source 1..80: mol_type = other DNA
tccactgctgcattccactactgagtgggcggtgctcccatgctccttctctgacctaccagcactatccactggcctat

SEQ ID NO: 136871 - DNA, 80 bp, synthetic construct
  source 1..80: mol_type = other DNA
attgtgaccagccttaccggccgtgacaagaatcaggcagaaggagaagtgcagattgtttctactgccactcagacttt

SEQ ID NO: 136872 - DNA, 80 bp, synthetic construct
  source 1..80: mol_type = other DNA
aaagagggaagctcaataggaaagttgttcactcagaccatgaaaggcgtggaacgcctggccgtcatgggagacaccgc

SEQ ID NO: 136873 - DNA, 80 bp, synthetic construct
  source 1..80: mol_type = other DNA
actaccacgggagctacgaggtaaaacccacaggttcggccagctcattggtgaacggcgttgtgcgcctgttgtcgaag

SEQ ID NO: 136874 - DNA, 80 bp, synthetic construct
  source 1..80: mol_type = other DNA
tccccttttatggcaaggccatccctattgcacaactgaagggggggagacacctagtgttttgccattcaaagaagaag

SEQ ID NO: 136875 - DNA, 80 bp, synthetic construct
  source 1..80: mol_type = other DNA
cgctccatctctgaaggccactcacgccgcccatgactccccaggcaacgatctcctagaagccaaccttctgtggggtg

SEQ ID NO: 136876 - DNA, 80 bp, synthetic construct
  source 1..80: mol_type = other DNA
ccacgacatcgagaagtgctgctcttagggcgaagaaggtgaccttcgacagggtacagctattggacatgcactatgat

SEQ ID NO: 136877 - DNA, 80 bp, synthetic construct
  source 1..80: mol_type = other DNA
cagacccatcacacatcacagcggagacagcagcgcgtcgcttggcacggggttctcccccgtccgaagctagctcctcg

SEQ ID NO: 136878 - DNA, 80 bp, synthetic construct
  source 1..80: mol_type = other DNA
aacagagagacgttaatggagtttgaggaaccacacgccacaaagcagtctgtgatagcattgggctcacaagagggagc

SEQ ID NO: 136879 - DNA, 80 bp, synthetic construct
  source 1..80: mol_type = other DNA
atggtgccggttcgaagaccctcgcgggtccaaagggtcctgtctgtcagatgtacaccaatgtggacaacgacctagtg

SEQ ID NO: 136880 - DNA, 80 bp, synthetic construct
  source 1..80: mol_type = other DNA
catagcgcgggttccttccggtattgtctccttccgtgtttcagttagcctcccccatctcccgggcaaacgtgcgcgcc

SEQ ID NO: 136881 - DNA, 80 bp, synthetic construct
  source 1..80: mol_type = other DNA
aaggcggctgaaaaagagctggttattgaacccatcgagcaagatgaaagcaagaggagctataatgtgatcaaggggac

SEQ ID NO: 136882 - DNA, 80 bp, synthetic construct
  source 1..80: mol_type = other DNA
aacaggaggtgagctcaactcccggaactcaggtcaaaaaagcattttgcggggtgctgggattttttaattaagtatat

SEQ ID NO: 136883 - DNA, 80 bp, synthetic construct
  source 1..80: mol_type = other DNA
cagctcaaaagaacataacttctggagtattgaaagccgatgggtttcatgtaaattcatatggatatgaaaatcaaaaa

SEQ ID NO: 136884 - DNA, 80 bp, synthetic construct
  source 1..80: mol_type = other DNA
tttgcttctcatgatagtccttattcctgaaccggagaagcagcgttcacagaccgacaaccaactcgcagtctttttga

SEQ ID NO: 136885 - DNA, 80 bp, synthetic construct
  source 1..80: mol_type = other DNA
ctgattggtctactccatgctctgggtcatggttacgagacatctgggactgggtgtgtactgtcctctctgacttcaaa

SEQ ID NO: 136886 - DNA, 80 bp, synthetic construct
  source 1..80: mol_type = other DNA
ggtgggagggggactaactgtggaacaagatagtggaaacctaagtgtaaaccctaaggctccattgcaagttggaacag

SEQ ID NO: 136887 - DNA, 80 bp, synthetic construct
  source 1..80: mol_type = other DNA
tcattgacaaaattgctggtttggaaggtttggcaggtacgcttgtagttttgactggaaaaggaataggtactgaaaat

SEQ ID NO: 136888 - DNA, 80 bp, synthetic construct
  source 1..80: mol_type = other DNA
ttcaatatgctgaaacgcgcgagaaaccgcgtgtcaactgtgcaacagctgacaaagagattctcacttggaatgctgca

SEQ ID NO: 136889 - DNA, 80 bp, synthetic construct
  source 1..80: mol_type = other DNA
gactttaaaaattggctctccaccaaactgcttccaaaaatgcccggcctccccttcatctcctgtcaaagggggcataa

SEQ ID NO: 136890 - DNA, 80 bp, synthetic construct
  source 1..80: mol_type = other DNA
tcttcaattctttatgccggtgttgggcgcgttatttatcggagttgcagttgcgcccgcgaacgacatttataatgaac

SEQ ID NO: 136891 - DNA, 80 bp, synthetic construct
  source 1..80: mol_type = other DNA
gaccagctgatcgaagaggtactggctgataatcttccacctcctagccattttgaaccacctacccttcacgaactgta

SEQ ID NO: 136892 - DNA, 80 bp, synthetic construct
  source 1..80: mol_type = other DNA
tgaccaggtattcagctcccccaggagacgaaccacgcccggaatacgacttggagctaataacatcatgctcatcaaac

SEQ ID NO: 136893 - DNA, 80 bp, synthetic construct
  source 1..80: mol_type = other DNA
gttattttccaccatattgccgtcttttggcaatgtgagggcccggaaacctggccctgtcttcttgacgagcattccta

SEQ ID NO: 136894 - DNA, 80 bp, synthetic construct
  source 1..80: mol_type = other DNA
gtcacctattctgtcactccgttggatttaccgctgattatccagcggttgcacggtatggccgccttctcactccatgg

SEQ ID NO: 136895 - DNA, 80 bp, synthetic construct
  source 1..80: mol_type = other DNA
gataaaggcccgggcgtcgactgtgagcgcaaagctactcagtgttgaggaagcgtgcgacctcacacctgcccactctg

SEQ ID NO: 136896 - DNA, 80 bp, synthetic construct
  source 1..80: mol_type = other DNA
gatagccgagatgctaaaatccaaaatacagggcctaatgcaacaagcctccaagcaggcacagggagtacaacctgccg

SEQ ID NO: 136897 - DNA, 80 bp, synthetic construct
  source 1..80: mol_type = other DNA
actgcggtcttgaatgaaaatgaaagtttgccgggtttctatgtgatgtcacaaacgctaatatatcaatacactgctca

SEQ ID NO: 136898 - DNA, 80 bp, synthetic construct
  source 1..80: mol_type = other DNA
tattgtctcacagtaggttcggtagtcgtgtgtggcaggattgtgacatctggcaaacccgcggttgtgccggaccgaga

SEQ ID NO: 136899 - DNA, 80 bp, synthetic construct
  source 1..80: mol_type = other DNA
taccggggtgctgaaacccgagagtagtaagcccgcgaccttggacttgcctcctccgcccactccccgcccctccacag

SEQ ID NO: 136900 - DNA, 80 bp, synthetic construct
  source 1..80: mol_type = other DNA
ccccgggggtaaagtctttgacgccgtgcacctgcggcgcttcagacctcttcctggtcacccggcacgcagatgtgatc

SEQ ID NO: 136901 - DNA, 80 bp, synthetic construct
  source 1..80: mol_type = other DNA
gcggcctgtcgagctgcaaagctccagaattgcactatgcttgtgtgtggcgacgaccttgtcgttatctgcgagagtga

SEQ ID NO: 136902 - DNA, 80 bp, synthetic construct
  source 1..80: mol_type = other DNA
cactttgcctaccctgctcttaaccttccccccaaagttatgcgttcagtcatggatcatctccttatcaagcgggtcga

SEQ ID NO: 136903 - DNA, 80 bp, synthetic construct
  source 1..80: mol_type = other DNA
tacgagctcactcccgccgagaccacagttaggctacgatcatacatgaacaccccggggcttcccgtgtgccaagacca

SEQ ID NO: 136904 - DNA, 80 bp, synthetic construct
  source 1..80: mol_type = other DNA
tggtccatggctgtccgcttccacctccaaagtcccctcctgtgcctccgcctcggaagaagcggacggtggtcctcact

SEQ ID NO: 136905 - DNA, 80 bp, synthetic construct
  source 1..80: mol_type = other DNA
tccaggctacaagcctctcctcatcagctctctttggtggaatcaatattccactgcgcgtgcagaggctctcatacatg

SEQ ID NO: 136906 - DNA, 80 bp, synthetic construct
  source 1..80: mol_type = other DNA
gcaagagcagcggcagacatgcagggcaccctccccttctcctaccgcgtcaggaggggcaacatccgcggctgacgcgg

SEQ ID NO: 136907 - DNA, 80 bp, synthetic construct
  source 1..80: mol_type = other DNA
acgcatggcatcgcaagcctattttcaccaggagcccatcagcgcttgcagctcattaatagcaatggcagctggcatat

SEQ ID NO: 136908 - DNA, 80 bp, synthetic construct
  source 1..80: mol_type = other DNA
acggtaagcaccagcggcagggctaccgatcatggagggcccacaaagccgcgatcattgcctgcttgcaagactgcggg

SEQ ID NO: 136909 - DNA, 80 bp, synthetic construct
  source 1..80: mol_type = other DNA
gggtccatgcggcttgcggggccgcgtatgtgtgctaacatgtggcacggtactttccccatcaatgagtacaccaccgg

SEQ ID NO: 136910 - DNA, 80 bp, synthetic construct
  source 1..80: mol_type = other DNA
tctcaagggtggcagcaactctcagaaaacttggagcgcctcccctcagagcgtggaagagtcgggcgcgtgctgtgagg

SEQ ID NO: 136911 - DNA, 80 bp, synthetic construct
  source 1..80: mol_type = other DNA
tcctctcaaaaccatgggacaccatcacgaacgttaccaccatggccatgactgacactactcccttcggacagcagcgg

SEQ ID NO: 136912 - DNA, 80 bp, synthetic construct
  source 1..80: mol_type = other DNA
acattgtctcttcagtcaacatggtgtctagattgctactgaacaggttcacgatgacacacaggagacccaccatagag

SEQ ID NO: 136913 - DNA, 80 bp, synthetic construct
  source 1..80: mol_type = other DNA
caagctctggctggagccataccagtcgagttttcgagcagcacacttaaactcacttcaggacaccttaagtgtcgcgt

SEQ ID NO: 136914 - DNA, 80 bp, synthetic construct
  source 1..80: mol_type = other DNA
tgggtccagatcacccccacactgtcagccccgagcctcggagcggtcacggctcctcttcggagggccgttgactactt

SEQ ID NO: 136915 - DNA, 80 bp, synthetic construct
  source 1..80: mol_type = other DNA
gcgagcacgaagcccagctggtgatcctggcccaggctttggaccattacgactgtctgatccacagcacaccgcacacg

SEQ ID NO: 136916 - DNA, 80 bp, synthetic construct
  source 1..80: mol_type = other DNA
caaaccagcggcttcacgagccttttcaattctggcccgtctcagaagctccagcttgtaaacaccaatggcaggtggca

SEQ ID NO: 136917 - DNA, 80 bp, synthetic construct
  source 1..80: mol_type = other DNA
gagtggagatgagcccccttctgttttccacgacgcagttggccatcctaccctgctctttcacgaccatgccagcgcta

SEQ ID NO: 136918 - DNA, 80 bp, synthetic construct
  source 1..80: mol_type = other DNA
gcatcgctgtgggcaagagccagctgttcgggtgagtacgcgcgctggaaggcgggcataacttcagcactcaaggtgtc

SEQ ID NO: 136919 - DNA, 80 bp, synthetic construct
  source 1..80: mol_type = other DNA
tctgtcacagtcccccatccgaacatctcagaagtagcattacccactactggggagattcccttctatgggagtgcgat

SEQ ID NO: 136920 - DNA, 80 bp, synthetic construct
  source 1..80: mol_type = other DNA
aaagagcattgagacctagatggtgtgacgagagagtttcctcagaccagagtgccttggctgacttcattaagtttgca

SEQ ID NO: 136921 - DNA, 80 bp, synthetic construct
  source 1..80: mol_type = other DNA
cgatgatgttcagctcatcatagtggctcccggaaaggcagccataaacatccaaaccaaaccaggcatcttcaaaacgc

SEQ ID NO: 136922 - DNA, 80 bp, synthetic construct
  source 1..80: mol_type = other DNA
agtgtaaagcataatatgatttgtggcggtggtcactctcagctgctaacctgtgcagatggaaactgtcaggctctgag

SEQ ID NO: 136923 - DNA, 80 bp, synthetic construct
  source 1..80: mol_type = other DNA
acctctatctggtcacgagggaggccgacgtcatccccgcaaggcgcaggggtgacagccgtgctgccctcctctctcct

SEQ ID NO: 136924 - DNA, 80 bp, synthetic construct
  source 1..80: mol_type = other DNA
tacattcaccaatatagcggtacagcttattagattgatggaagctgaaggggtgattggacctgaagacctagaaaatt

SEQ ID NO: 136925 - DNA, 80 bp, synthetic construct
  source 1..80: mol_type = other DNA
gaaaagaagctaggtgagtttggagtggcaaaaggcagtagggctatttggtacatgtggcttggaagccgctttcttga

SEQ ID NO: 136926 - DNA, 80 bp, synthetic construct
  source 1..80: mol_type = other DNA
acgtggatcacagcacgcccagagcccatcctcgcccattactcctgtgcctactcctacttgccgtaggggtaggcatt

SEQ ID NO: 136927 - DNA, 80 bp, synthetic construct
  source 1..80: mol_type = other DNA
agaacagttctggagtaagcatctctggaatttcgtcagtggaatacaatacctagcagggttgtcaacgctaccgggca

SEQ ID NO: 136928 - DNA, 80 bp, synthetic construct
  source 1..80: mol_type = other DNA
actgctatgccccctcggtcacgtcgccggcatcttccgagccgcggtgtgtaccaggggtgtggctaaagcagtggatt

SEQ ID NO: 136929 - DNA, 80 bp, synthetic construct
  source 1..80: mol_type = other DNA
ttggttcgtgtcatcaatagccaaaggaggcgctatagcacgaacactgaggcagaaagggaaaagtgtgatttgtttga

SEQ ID NO: 136930 - DNA, 80 bp, synthetic construct
  source 1..80: mol_type = other DNA
agagcaacacagatagctcatgtcttctcccggcaaaaatcacatcggactgggttagtattcccctggcatggtagtca

SEQ ID NO: 136931 - DNA, 80 bp, synthetic construct
  source 1..80: mol_type = other DNA
taggagttatcatcacatggataggaatgaattcacgtagcacctcactgtctgtgtcactagtattggtgggagtcgtg

SEQ ID NO: 136932 - DNA, 80 bp, synthetic construct
  source 1..80: mol_type = other DNA
tcccgggagggggggtcttggaggctgcacgacactccgccatgattcactcccttgtgaggaactactgtcttcacgca

SEQ ID NO: 136933 - DNA, 80 bp, synthetic construct
  source 1..80: mol_type = other DNA
tgtatgatgttacacgcaaattacctcaggctgtcatgggagccgcctacggcttccaatactcacctaaggacagggta

SEQ ID NO: 136934 - DNA, 80 bp, synthetic construct
  source 1..80: mol_type = other DNA
attgggccaaggtcatcgcggtgctctttctgttcgcaggggttgacgcccaaacgcgtatagcctctgcggtttcccag

SEQ ID NO: 136935 - DNA, 80 bp, synthetic construct
  source 1..80: mol_type = other DNA
ctggaggacgggataaattatgcaacagggaatttgcccggttgctccttttctatctttctcttagccctcttatcctg

SEQ ID NO: 136936 - DNA, 80 bp, synthetic construct
  source 1..80: mol_type = other DNA
ccatcatggccaagaatgaggtcttctccgtaaaaccggagaagggtggccggaagccggctcgcttaatcgtgtacccg

SEQ ID NO: 136937 - DNA, 80 bp, synthetic construct
  source 1..80: mol_type = other DNA
aacgaggtcaccctcacacatcccgtgacgaagtacatcgccacttgtatgcatgctgaccttgaagtcatgaccagcac

SEQ ID NO: 136938 - DNA, 80 bp, synthetic construct
  source 1..80: mol_type = other DNA
atcatgtacgcgcctaccatatgggtgcgcatggtactgatgacacacttcttttcaatactccaatcccaagaacaact

SEQ ID NO: 136939 - DNA, 80 bp, synthetic construct
  source 1..80: mol_type = other DNA
agcggataaccggggccatgtcgccggattgcacaacggcggcgccgtcgaacgtacacacccgaaccgccggagccagg

SEQ ID NO: 136940 - DNA, 80 bp, synthetic construct
  source 1..80: mol_type = other DNA
taccggctgcaactggtagttaagagagctgcagctgccgtcatccctaagcaagggtgccacttcgttaagcatgtccc

SEQ ID NO: 136941 - DNA, 80 bp, synthetic construct
  source 1..80: mol_type = other DNA
cggccgacgggaaaactgtgatggatgtcatctccagagaggatcagagaggaagcgggcaggtagtgacttacgccctg

SEQ ID NO: 136942 - DNA, 80 bp, synthetic construct
  source 1..80: mol_type = other DNA
atggtgatacaccaccagcatgtccaggactgtgacgacacggctttgaccaagcttgaagcatggctcgctgagcatgg

SEQ ID NO: 136943 - DNA, 80 bp, synthetic construct
  source 1..80: mol_type = other DNA
aataaagcttggctggtgcataggcaatggtttctagacctgccattaccgtggctgcccggagcggataaacaagagtc

SEQ ID NO: 136944 - DNA, 80 bp, synthetic construct
  source 1..80: mol_type = other DNA
tcctcaaccaagaggggctgagtttcatatgtggaattaccactcgcatgtattttcagttggtgatacgtttagcttgg

SEQ ID NO: 136945 - DNA, 80 bp, synthetic construct
  source 1..80: mol_type = other DNA
tccacacgtggatcggtgaagactattccacgccctgtgatggtacatggcttagggccatttgggactgggtctgcacg

SEQ ID NO: 136946 - DNA, 80 bp, synthetic construct
  source 1..80: mol_type = other DNA
cagactgcgcgcatacctcaaccaacccgggctacccgtttgccaagatcacttagagttttgggaggtggtttttaccg

SEQ ID NO: 136947 - DNA, 80 bp, synthetic construct
  source 1..80: mol_type = other DNA
ccgtggtgtgctgctccatgtcgtattcatggacgggtgcattggtgacaccatgcggccctgaggaggagaaactacct

SEQ ID NO: 136948 - DNA, 80 bp, synthetic construct
  source 1..80: mol_type = other DNA
cgggggtggctggcgcccttgtggcttttaagatcatgagcggcgaatgccccacaactgaagacatggtaaatttgcta

SEQ ID NO: 136949 - DNA, 80 bp, synthetic construct
  source 1..80: mol_type = other DNA
cgggccagagcggtcagagctaaactcattgcccaggggtggaaagccgcaatatgcggcaagtacctcttcaattgggc

SEQ ID NO: 136950 - DNA, 80 bp, synthetic construct
  source 1..80: mol_type = other DNA
gatttctgaatcgacaaattcaagattccctgtacaagagcatcaaatgcacactagatggagagagggagtcgtgctcc

SEQ ID NO: 136951 - DNA, 80 bp, synthetic construct
  source 1..80: mol_type = other DNA
tccctgttcaaccccagggacctcctggactttgagcttgcctgtctgctgatgtacctggagaactgcccccgaagcca

SEQ ID NO: 136952 - DNA, 80 bp, synthetic construct
  source 1..80: mol_type = other DNA
gacacctggctgaagggaaagtggacaccggagtggccgtctcgagagggaccgcaaaattgagatggttccatgaacgt

SEQ ID NO: 136953 - DNA, 80 bp, synthetic construct
  source 1..80: mol_type = other DNA
ggccgatgggggatgctcagggggtgcttatgacatcatcatatgtgacgagtgccattctacggaccctaccacggtcc

SEQ ID NO: 136954 - DNA, 80 bp, synthetic construct
  source 1..80: mol_type = other DNA
acgtcatccgtggcaattggttggctggagcctctatagcttggactctgataaagaatgctgacaaaccggcctgcaaa

SEQ ID NO: 136955 - DNA, 80 bp, synthetic construct
  source 1..80: mol_type = other DNA
ccaacagacccgtggcctgctcggtacgatcgtcaccagtctgactgggcgggataagaatgaggtcgagggtgaggtcc

SEQ ID NO: 136956 - DNA, 80 bp, synthetic construct
  source 1..80: mol_type = other DNA
atgtcctcctgccgccccatcgaggagtttaggatagggtggggcaggctagagtatgaggagaatgtcaccaacgacga

SEQ ID NO: 136957 - DNA, 80 bp, synthetic construct
  source 1..80: mol_type = other DNA
aggggatctggcgcggagacggcgttatgacaacacgctgtccctgcggggtaacgatctcaggccatgtgaaaaacgtg

SEQ ID NO: 136958 - DNA, 80 bp, synthetic construct
  source 1..80: mol_type = other DNA
cacgtcggaaatacagctgacagactacggagctctaacattggattgttcacctagaacagggctagactttaatgaga

SEQ ID NO: 136959 - DNA, 80 bp, synthetic construct
  source 1..80: mol_type = other DNA
agctcaggtgatgctacacaacaaatcatctctagcgtaggagctaaagacgttaaggtaaagccacaataagcagcttg

SEQ ID NO: 136960 - DNA, 80 bp, synthetic construct
  source 1..80: mol_type = other DNA
accaccaggtgcccgtgcggagctaacatctcagggaatgtccggatgggtaccatgaaaatcacaggccccaagacttg

SEQ ID NO: 136961 - DNA, 80 bp, synthetic construct
  source 1..80: mol_type = other DNA
tgttgtaccgcccctcgaccaccaccaacagcggcctcatggcccccgatttgtacgtgtacgtggatcccgcgttcacg

SEQ ID NO: 136962 - DNA, 80 bp, synthetic construct
  source 1..80: mol_type = other DNA
gaaattgcccataagtccgttgagcaactcgctcatcagacatcacaacctggtatactccacaacatcgcgcagcgcag

SEQ ID NO: 136963 - DNA, 80 bp, synthetic construct
  source 1..80: mol_type = other DNA
ctccccgcggcgacggcgcatggtctcggtgacggcgcggccgttctcgcgggggcgcagttggaagacgccgcccgtca

SEQ ID NO: 136964 - DNA, 80 bp, synthetic construct
  source 1..80: mol_type = other DNA
aactctacaccaattcctactaccatcatggccaagaatgaagtcttttgtgtggatgttcagaggggcggtcgaaaacc

SEQ ID NO: 136965 - DNA, 80 bp, synthetic construct
  source 1..80: mol_type = other DNA
aacacgctgacgtgctatctcaaagccacggccgccatcagggcggcggcgctgagagactgcactatgttggtttgcgg

SEQ ID NO: 136966 - DNA, 80 bp, synthetic construct
  source 1..80: mol_type = other DNA
cgccgcggcatcgtggcgcgagatacccgaggggatcgcgatgtctgcttcgaaacaatccgtgatcatggcgccgggcc

SEQ ID NO: 136967 - DNA, 80 bp, synthetic construct
  source 1..80: mol_type = other DNA
agtttgaggctctcggattcctaaatgaagatcactggatgagccgtgagaattcctatggaggagttgaggggaaagga

SEQ ID NO: 136968 - DNA, 80 bp, synthetic construct
  source 1..80: mol_type = other DNA
tcaggttgttgatttcagccttgacccaacttttaccatagagaccaccactatgccccaggacgctgtttcgcgaagtc

SEQ ID NO: 136969 - DNA, 80 bp, synthetic construct
  source 1..80: mol_type = other DNA
tgacgtcaatcaacgtccaagccagtgctctattcacactagcgcggggtttccctttcgttgatgtggggatatctgcc

SEQ ID NO: 136970 - DNA, 80 bp, synthetic construct
  source 1..80: mol_type = other DNA
tcgagtccaaccctgggccaatgaagaatcccaaaaaaaagagcggcggctttagaatcgtgaacatgttgaaaagagga

SEQ ID NO: 136971 - DNA, 80 bp, synthetic construct
  source 1..80: mol_type = other DNA
tgtttcaggaagcacccagagaccacctacactaagtgcggctcagggccttggctcacgccgaggtgcctagtccacta

SEQ ID NO: 136972 - DNA, 80 bp, synthetic construct
  source 1..80: mol_type = other DNA
ctggtccgaagacctgtagcaatgtctggcatggcaggtttcccatcaacgctaccacgaccggccccagcgtacccatc

SEQ ID NO: 136973 - DNA, 80 bp, synthetic construct
  source 1..80: mol_type = other DNA
ttggtagcatcgggatcgggaaaatgcttgtggacatcctcgccggttatggcgcgggggtggcaggagctctcgtagcc

SEQ ID NO: 136974 - DNA, 80 bp, synthetic construct
  source 1..80: mol_type = other DNA
cgccgacgcgtgtgtgcgcgtggctgaggctggtcggcgtgggagcggccgtggccctgtggagcctcggtgaggccggc

SEQ ID NO: 136975 - DNA, 80 bp, synthetic construct
  source 1..80: mol_type = other DNA
gcagaaaagggtaagaaattctcggaatttcacccccggggggggcaagtgcagtaacccagttcctcagtgtttgggaa

SEQ ID NO: 136976 - DNA, 80 bp, synthetic construct
  source 1..80: mol_type = other DNA
cagaatatactaacaccttgtttaaaaacaatcaagttacaatcgatgtaaacctcgcatttgataatactggccaaatt

SEQ ID NO: 136977 - DNA, 80 bp, synthetic construct
  source 1..80: mol_type = other DNA
agaaagcatcagaagtcaaagccgacttgctctccgtagaggaagcttgtgggcttaccccgccccactcggccaggtcg

SEQ ID NO: 136978 - DNA, 80 bp, synthetic construct
  source 1..80: mol_type = other DNA
ctagccggggctgccatcggcagcataggcttagggaaggtcattgttgacattctggctggatacggggcaggcgtgtc

SEQ ID NO: 136979 - DNA, 80 bp, synthetic construct
  source 1..80: mol_type = other DNA
cgctcaaacgccccgaggacggcctggacgttgcgagcgagctgttggatggcgcgcaactggcgatgcgcgccgatacc

SEQ ID NO: 136980 - DNA, 80 bp, synthetic construct
  source 1..80: mol_type = other DNA
aaagcccacgggatcaaccccaacatcagaactggagtacggactgtgaccaccggggattctatcacctactccactta

SEQ ID NO: 136981 - DNA, 80 bp, synthetic construct
  source 1..80: mol_type = other DNA
aagttattatttgatgaaaagggtgttttattaaaagactctagtcttgataaagaatattggaactatagaagcaataa

SEQ ID NO: 136982 - DNA, 80 bp, synthetic construct
  source 1..80: mol_type = other DNA
atgatggagaaactcgacgtctccgatgcgttatatacgttggttcaccgggaaaatatatatttgagggaaactctccg

SEQ ID NO: 136983 - DNA, 80 bp, synthetic construct
  source 1..80: mol_type = other DNA
acgcgctcccccgctgccatggattccgcagccccagccctctcccccgctctgacggcccatacgggccatagcgcgac

SEQ ID NO: 136984 - DNA, 80 bp, synthetic construct
  source 1..80: mol_type = other DNA
gcgtgacatccggacagaggagtccatataccagtgctgccagttagaccccatggcccggaaggccatctcatcactca

SEQ ID NO: 136985 - DNA, 80 bp, synthetic construct
  source 1..80: mol_type = other DNA
tcggtggcatagaacaccggatggatgcggcatgcaactggaccagaggggaagtctgtggtctggagcatagagatcgt

SEQ ID NO: 136986 - DNA, 80 bp, synthetic construct
  source 1..80: mol_type = other DNA
agatggttgaaccatggctgaaaaacaaccagttttgcattaaagtattgaacccttacatgccagctgtgattgagcac

SEQ ID NO: 136987 - DNA, 80 bp, synthetic construct
  source 1..80: mol_type = other DNA
gcattgaagtgggagtatgtagtccttgctttcctggttctggctgactcgcgcttgtgtgcgtgtttgtggttgatgtt

SEQ ID NO: 136988 - DNA, 80 bp, synthetic construct
  source 1..80: mol_type = other DNA
atcaatgaggactacccaagtccttgcagcggcgattggctgcataccatctgggactgggtttgctcagtgctgtccga

SEQ ID NO: 136989 - DNA, 80 bp, synthetic construct
  source 1..80: mol_type = other DNA
acagctgacgccccatgcgcggcaggccatcttgcttgtttaaacattcacaacgaactggcatcaggaaccgcttctgc

SEQ ID NO: 136990 - DNA, 80 bp, synthetic construct
  source 1..80: mol_type = other DNA
tggagaagaaggtcatcacctggggcgccgaaactgtggcctgcggggacatactccatggcctaccagtgtcggctaga

SEQ ID NO: 136991 - DNA, 80 bp, synthetic construct
  source 1..80: mol_type = other DNA
ccgcgaggctaggtagggaggttctgctcggccctgccgacggctacacctccaaggggtggaagctcctagctcccatc

SEQ ID NO: 136992 - DNA, 80 bp, synthetic construct
  source 1..80: mol_type = other DNA
ggtattagttgaagcactagttcaagagtgggtcccccctctagaagcacggggggggcgtgatgggatcatctgtgccg

SEQ ID NO: 136993 - DNA, 80 bp, synthetic construct
  source 1..80: mol_type = other DNA
tctcgcctggagcccttgtagtcggtgtggtctgcgcagcaatactgcgccggcacgttggcccgggcgaggtggcagtg

SEQ ID NO: 136994 - DNA, 80 bp, synthetic construct
  source 1..80: mol_type = other DNA
gagtcggatgcgtcgcagcgtgtgacccaactacttggctctcttactataaccagcctactcagaagactccacaattg

SEQ ID NO: 136995 - DNA, 80 bp, synthetic construct
  source 1..80: mol_type = other DNA
tataaattccaaccagaatccccttcaaagctggcttcagctatccagaaggctcatgaagaaggcatttgtggaatccg

SEQ ID NO: 136996 - DNA, 80 bp, synthetic construct
  source 1..80: mol_type = other DNA
atactgggtatcggcactgtcttggaccaggccgagacagctggtgcccggttggtggttctcgccaccgctacccctcc

SEQ ID NO: 136997 - DNA, 80 bp, synthetic construct
  source 1..80: mol_type = other DNA
actgccacctccactgaagtgcaaacggatccatggatgcccatgcctattacaactgacgccgccggtcccactcgaag

SEQ ID NO: 136998 - DNA, 80 bp, synthetic construct
  source 1..80: mol_type = other DNA
gggttataaaaggaattactcctttaaattttacttaatgtacccacaatatcaagtggtcgtttgtatttaacgattat

SEQ ID NO: 136999 - DNA, 80 bp, synthetic construct
  source 1..80: mol_type = other DNA
tccgagagtggtccacttagccggaagatgctcttaaagaggttatcaagaggttttgatgtataaatcagttttattgc

SEQ ID NO: 137000 - DNA, 80 bp, synthetic construct
  source 1..80: mol_type = other DNA
cccggggccgccgcgtcacccccccattccagctgggcccagcgacacccaaactcgcgcgtgagagtggtcgcgacgag

SEQ ID NO: 137001 - DNA, 80 bp, synthetic construct
  source 1..80: mol_type = other DNA
tcccagctccgaactacaaattcgcgctgtggagggtgtccgccgaggaatacgtggaagtgaggagggtaggtgactct

SEQ ID NO: 137002 - DNA, 80 bp, synthetic construct
  source 1..80: mol_type = other DNA
acaacttggtcatgttgcacaattccgaacaaggaggaaaagcctacagacatgctatggaggaactaccagacaccata

SEQ ID NO: 137003 - DNA, 80 bp, synthetic construct
  source 1..80: mol_type = other DNA
gcctcctgcagacagcatccaagcaggcagaaagcgtcaccccaactgttctgaccggctggcaaaagctcgaagcattt

SEQ ID NO: 137004 - DNA, 80 bp, synthetic construct
  source 1..80: mol_type = other DNA
cacggcgaccgcccttcctgacctggcctccgacgacggtgacaaaggatccgacgttgagtcgtactcctccatgcccc

SEQ ID NO: 137005 - DNA, 80 bp, synthetic construct
  source 1..80: mol_type = other DNA
ggcccgctccccttgttaacccaagggccctcccgcccgtggcaccaggccctgcggggtcttaagcacctacggattgg

SEQ ID NO: 137006 - DNA, 80 bp, synthetic construct
  source 1..80: mol_type = other DNA
ccggaactcctcattgatgtcatcttcggaggtcactggggtgtgctttttggtctggcctatttttccatgcaaggggc

SEQ ID NO: 137007 - DNA, 80 bp, synthetic construct
  source 1..80: mol_type = other DNA
agaatgagaccgatgtcttcattctgaacaacacaaggcctcctcgcgggaattggtttggctgcacctggatgaactcc

SEQ ID NO: 137008 - DNA, 80 bp, synthetic construct
  source 1..80: mol_type = other DNA
cgtgatgcagtaatactgcttacttgcctactgcacccatctcttggcttcgagattacaaaaatcttgttggcgatgtt

SEQ ID NO: 137009 - DNA, 80 bp, synthetic construct
  source 1..80: mol_type = other DNA
ccctatggaccaccgcggacccgtctcctaacgccactttttatgaatcactagacgccaaagtgtggctagttttagta

SEQ ID NO: 137010 - DNA, 80 bp, synthetic construct
  source 1..80: mol_type = other DNA
cttgtcgaatttgaacctccgcatgccgccactatcagagtactggccctgggaaaccaggaaggctccttgaaaacagc

SEQ ID NO: 137011 - DNA, 80 bp, synthetic construct
  source 1..80: mol_type = other DNA
ccatggggttttcatatgacacccgctgttttgactccacggttaccgaaagagacatcagggtcgaggaggagatctac

SEQ ID NO: 137012 - DNA, 80 bp, synthetic construct
  source 1..80: mol_type = other DNA
tgttacaatgctctctccaatgttgcaccactggatcaaagtcgaatatggcaacctgtctctgtctggaatagcccagt

SEQ ID NO: 137013 - DNA, 80 bp, synthetic construct
  source 1..80: mol_type = other DNA
tccaactgaagtacatccattcccaaaggttgtgaagaagttcctttgtatctaatgaaacaaaaagcccgtccatgcgg

SEQ ID NO: 137014 - DNA, 80 bp, synthetic construct
  source 1..80: mol_type = other DNA
gtgacgacgacggtgttttaatcccaaacaacctcaccagtggacttactttctctaccaacaaaacaaagctcatcctt

SEQ ID NO: 137015 - DNA, 80 bp, synthetic construct
  source 1..80: mol_type = other DNA
ctgcaggtcggacgaaccaacggacacctccgcgaagcgcgcgcgcgcctcccccgcggcgtcgcgacagaccagataca

SEQ ID NO: 137016 - DNA, 80 bp, synthetic construct
  source 1..80: mol_type = other DNA
gccctttttttagcacatgctataggaacatccatcactcagaaagggattattttcatcttgctgatgctggtgacacc

SEQ ID NO: 137017 - DNA, 80 bp, synthetic construct
  source 1..80: mol_type = other DNA
gaagaaatgctcaggacccgagtaggaacgaaacatgcaatactgctagttgcagtatcttttgtgacattgattactgg

SEQ ID NO: 137018 - DNA, 80 bp, synthetic construct
  source 1..80: mol_type = other DNA
ggcactcattgctgtattcaaggtacagcccgcttttcttgttgccagcttgacacgcagtagatggactaatcaagaga

SEQ ID NO: 137019 - DNA, 80 bp, synthetic construct
  source 1..80: mol_type = other DNA
tttccatcctggagctgggaaaacaagacgttttcttcctcagatcctggctgaatgcgcacgaagacggttgcgcacac

SEQ ID NO: 137020 - DNA, 80 bp, synthetic construct
  source 1..80: mol_type = other DNA
tgcgcgcaacgaggaagacctccgagcggtcccagcccagaggtaggcgtcagcccataccaaaggcacgccagccaacg

SEQ ID NO: 137021 - DNA, 80 bp, synthetic construct
  source 1..80: mol_type = other DNA
acggaaactccctgaggggcaggcctgcggtggactctaaggccgccacgtcccggaaccactgcagacggggcacttgc

SEQ ID NO: 137022 - DNA, 80 bp, synthetic construct
  source 1..80: mol_type = other DNA
cgtgacgcagttgctgagttcactcacaatcaccagcttacttagaagaatacacacccggatcactgaagattgcccag

SEQ ID NO: 137023 - DNA, 80 bp, synthetic construct
  source 1..80: mol_type = other DNA
agaagaaggtcatcacttggggagcagacactgcagcttgcggtgatatactgcaaggcttgccggtttcagcacggctt

SEQ ID NO: 137024 - DNA, 80 bp, synthetic construct
  source 1..80: mol_type = other DNA
ttttcaggatgccctgaacggctcgccgcatgtaagcctatcacatactttgaccaaggatggggtcccatctcgtacgc

SEQ ID NO: 137025 - DNA, 80 bp, synthetic construct
  source 1..80: mol_type = other DNA
ccccaacagcaggaattttggctagatggagctcattcaagaagaatggagcgatcaaagtgttacggggtttcaaaaaa

SEQ ID NO: 137026 - DNA, 80 bp, synthetic construct
  source 1..80: mol_type = other DNA
tcccacaatggatcttctcacgggcgtacctaacagcatgcttcaaagcccccaggtcgaacccaccctgcgtcggaatc

SEQ ID NO: 137027 - DNA, 80 bp, synthetic construct
  source 1..80: mol_type = other DNA
gtgtatcaaggggggtaggcatcttatcttttgccattcaaaaaagaaatgtgacgagcttgccaaacaactctccacgc

SEQ ID NO: 137028 - DNA, 80 bp, synthetic construct
  source 1..80: mol_type = other DNA
tgggcggtcaagtgggagtacgtcgtcctcttgtttctggtccttgctgatgcacgcatctgcgcatgcatgtggcttat

SEQ ID NO: 137029 - DNA, 80 bp, synthetic construct
  source 1..80: mol_type = other DNA
ggtggaccggagggccgcgctgctctccccaagacccctgtccactcttaagggctcgtcgggaggacctgtcctctgcc

SEQ ID NO: 137030 - DNA, 80 bp, synthetic construct
  source 1..80: mol_type = other DNA
acatattatggagttagtggtgattggaaacagcgaaatgagtatgatgtcactgttatcaaaacacaaaaccataaaaa

SEQ ID NO: 137031 - DNA, 80 bp, synthetic construct
  source 1..80: mol_type = other DNA
aggagtggttccacgacattccattaccttggcacgctggggcagacaccggaactccacactggaacaacaaagaagca

SEQ ID NO: 137032 - DNA, 80 bp, synthetic construct
  source 1..80: mol_type = other DNA
caatgtggacttggacttagtaggatggccatctcccccgggagcaaggtcgctcaccccatgtaattgtggctctagtg

SEQ ID NO: 137033 - DNA, 80 bp, synthetic construct
  source 1..80: mol_type = other DNA
tgatattcacgcccatggagaagaaggttatagtctggggcgcggatactgctgcatgcggcgatatcatcaatggcctc

SEQ ID NO: 137034 - DNA, 80 bp, synthetic construct
  source 1..80: mol_type = other DNA
aaagagtgtggtggcgataatcagctcgcgaatatatcgccaggcggcgcgctgagtgggcgttattccggaaatgccgt

SEQ ID NO: 137035 - DNA, 80 bp, synthetic construct
  source 1..80: mol_type = other DNA
ttaacccgaacatcgggactggtgttaggacaatcaccacaggagacgccatcacatactcaacctatggcaaattcctt

SEQ ID NO: 137036 - DNA, 80 bp, synthetic construct
  source 1..80: mol_type = other DNA
cggaccagagaccttattgttggcactacgcgcctcaacggtgtggcattgtacccgcggcgcaggtgtgcggtccggtc

SEQ ID NO: 137037 - DNA, 80 bp, synthetic construct
  source 1..80: mol_type = other DNA
gagcccggcggccagaatggcgcgcgtggccgccgcgtcgtcccggcgccggtgcgcgtccccgcacgcccgggcgtact

SEQ ID NO: 137038 - DNA, 80 bp, synthetic construct
  source 1..80: mol_type = other DNA
gcctcctacggggggttggttcgggtgcacatggatgaacgctacgggatttacaaaaacctgtggcgcaccaccatgtc

SEQ ID NO: 137039 - DNA, 80 bp, synthetic construct
  source 1..80: mol_type = other DNA
tacatatacatgggggaacctctcgaaaatgatgaagactgtgcacattggaaagaagctaagatgctcctagacaacat

SEQ ID NO: 137040 - DNA, 80 bp, synthetic construct
  source 1..80: mol_type = other DNA
tcgtggttcgttgacccggacgtccgccaaataaagccactgaaacccgaaacgcgagtgttgtaacgtcctttgggcgg

SEQ ID NO: 137041 - DNA, 80 bp, synthetic construct
  source 1..80: mol_type = other DNA
ctaggagcgccctctcctgagcgacacccaagggtgcagctgaagcgtgacacgcgcgaggcgtacgtgccgcggcagaa

SEQ ID NO: 137042 - DNA, 80 bp, synthetic construct
  source 1..80: mol_type = other DNA
taactcgtcagggtgtccagggcgcctgtccgcctgccgcaacatcgaggctttccggatagggtgtggcaccctacagt

SEQ ID NO: 137043 - DNA, 80 bp, synthetic construct
  source 1..80: mol_type = other DNA
ttttatttacaccctacgacttcttgaagcgtttccagattgtcccgtgtgggacaaggtctgtcccttacccccctggg

SEQ ID NO: 137044 - DNA, 80 bp, synthetic construct
  source 1..80: mol_type = other DNA
ttccaactaccatcatggcgaagaacgaggtctttgccgtgagaccagaaaagggaggccggaagccagctcgcttaatc

SEQ ID NO: 137045 - DNA, 80 bp, synthetic construct
  source 1..80: mol_type = other DNA
acgtgggagtgcatactacatgtacttggacaggagcgatgctggtaaggccatttcttttgccaccacattgggggtga

SEQ ID NO: 137046 - DNA, 80 bp, synthetic construct
  source 1..80: mol_type = other DNA
tagccagctatccgctccatctctcaaggcaacttgcaccgctaaccatgactcccctgatgctgagctcatagaggcca

SEQ ID NO: 137047 - DNA, 80 bp, synthetic construct
  source 1..80: mol_type = other DNA
ggttcggtcacggtccctcaccccaacataacagaagaggccctaccttccaccggtgagatccccttttatgggaaggc

SEQ ID NO: 137048 - DNA, 80 bp, synthetic construct
  source 1..80: mol_type = other DNA
gtggccaggctgaaggcggcgttcagggcccggcggtcgatgaccttcgtcatgtaattatgcacgggctgctcgacggg

SEQ ID NO: 137049 - DNA, 80 bp, synthetic construct
  source 1..80: mol_type = other DNA
aaatgttcgggggggccgggacgccgtcatcattcttacatgtgcagcctacccggagctgatatttgacatcaccaagc

SEQ ID NO: 137050 - DNA, 80 bp, synthetic construct
  source 1..80: mol_type = other DNA
agtgaccctggtacgcagaaacagatggttacttctgaatgttacctctgaggaccttgggaaaaccttctccgttggca

SEQ ID NO: 137051 - DNA, 80 bp, synthetic construct
  source 1..80: mol_type = other DNA
aagcagctgccatctttatgacggcaactccaccaggaacaaatgacccttttccagattcaaattctcccatactggat

SEQ ID NO: 137052 - DNA, 80 bp, synthetic construct
  source 1..80: mol_type = other DNA
ctggtgaaggtgagagggaggccgcgatgctcctcgttaagccacgtttggcaaattttgcgataaacgttgctttgttc

SEQ ID NO: 137053 - DNA, 80 bp, synthetic construct
  source 1..80: mol_type = other DNA
aagcggactatgaagttgaggaagacatatttagaaagaagagattaacgataatggacttgcatccaggatctggaaag

SEQ ID NO: 137054 - DNA, 80 bp, synthetic construct
  source 1..80: mol_type = other DNA
gcttcggcttttgtgggcgccggcatcgccggtgcagctgtcggcagcataggccttgggagggtgcttgtggacatctt

SEQ ID NO: 137055 - DNA, 80 bp, synthetic construct
  source 1..80: mol_type = other DNA
aattctgggcaaaacacatgtggaacttcatcagcggcattcagtacctggccggactaacaaccctgccggggaaccct

SEQ ID NO: 137056 - DNA, 80 bp, synthetic construct
  source 1..80: mol_type = other DNA
cccagcagaacatacggctcatccataccgatgggagttggcatatcaacagtactgctctcaattgtaatgactcctta

SEQ ID NO: 137057 - DNA, 80 bp, synthetic construct
  source 1..80: mol_type = other DNA
aagaggcgttcaaggatttgtttttttctttttgttcaacgttttgactggaaagaagattactgctcatctgaagaaac

SEQ ID NO: 137058 - DNA, 80 bp, synthetic construct
  source 1..80: mol_type = other DNA
ggaggggccctcgccggccccgacgtccttcatggtcattctttgaaactccacggtgccgtccgcgcggcgtactctgc

SEQ ID NO: 137059 - DNA, 80 bp, synthetic construct
  source 1..80: mol_type = other DNA
acaaaaacagggtgggcagaaacagaaggggcaaaaagagacaagtcaaaagaaagctagtgacaaacagaaggcgacac

SEQ ID NO: 137060 - DNA, 80 bp, synthetic construct
  source 1..80: mol_type = other DNA
tcgtgagtcactgcgaccgcaacttcccacccggagctttcttccggcctcgatgacgtcccggctctccgatcccaact

SEQ ID NO: 137061 - DNA, 80 bp, synthetic construct
  source 1..80: mol_type = other DNA
gacagaccgtcagacgctcgccgcgccgggacgccgatacgcggacgaagcgcgggagcgggatcggccgtccctgtcct

SEQ ID NO: 137062 - DNA, 80 bp, synthetic construct
  source 1..80: mol_type = other DNA
acggcaaagccatacccttaggtgtgatcaagggcggtaggcatctcatcttctgccattcaaagaaaaagtgtgatgaa

SEQ ID NO: 137063 - DNA, 80 bp, synthetic construct
  source 1..80: mol_type = other DNA
gttcttctaatgataagccgtactgttggcactatgctcctaggccttgtggaattgttccagcacggaatgtctgcggt

SEQ ID NO: 137064 - DNA, 80 bp, synthetic construct
  source 1..80: mol_type = other DNA
tactctccaggagaactcaatcgggtggcatcaagcctcaggaaacttggggcgcccccattgagagcttggagacacag

SEQ ID NO: 137065 - DNA, 80 bp, synthetic construct
  source 1..80: mol_type = other DNA
tgaagagtcgatatatcgagcatgtaagttagaccccactgccaggaaagccataacacacctcaccgaacggctgtact

SEQ ID NO: 137066 - DNA, 80 bp, synthetic construct
  source 1..80: mol_type = other DNA
ctcgccgtcccaatgagatgagaaaaataatagtcaatgtttaaagacagcccgtgtgatgttacgtgaatgggatcttc

SEQ ID NO: 137067 - DNA, 80 bp, synthetic construct
  source 1..80: mol_type = other DNA
tgtaaaagcgtgcgcagtgttcgcatcgttgcacgggctgtatctgttgaatgaggtgtacctggcggcctcgcaccaga

SEQ ID NO: 137068 - DNA, 80 bp, synthetic construct
  source 1..80: mol_type = other DNA
accccccccccgccccacccccgttagaacgcgacgggtgcattcaagatggccctggtccaaaagcgtgccaggaagaa

SEQ ID NO: 137069 - DNA, 80 bp, synthetic construct
  source 1..80: mol_type = other DNA
ggcaaagaatgaggtcttctgtgtgaagcccgaaaagggaggccgcaagcccgctcgcctcatcgtgtaccccgacctgg

SEQ ID NO: 137070 - DNA, 80 bp, synthetic construct
  source 1..80: mol_type = other DNA
gagtctaattggaacgcgtccgcgctcaacatgggctgagaacatctatgcggcaatcaatcaggttaggtcaataattg

SEQ ID NO: 137071 - DNA, 80 bp, synthetic construct
  source 1..80: mol_type = other DNA
acggatccggtagtatgttttgaccggaaatttggtgtattgggcgggtttttgcaacttttggccattttggcgcgaaa

SEQ ID NO: 137072 - DNA, 80 bp, synthetic construct
  source 1..80: mol_type = other DNA
ttcggtgcctacatgtctaaggctcacgggatagatccaaacatcaggacgggggtaaggactatcaccacaggcgcgcc

SEQ ID NO: 137073 - DNA, 80 bp, synthetic construct
  source 1..80: mol_type = other DNA
gggcacaggatggcgtgggacatgatgcagaactggtctcccaccatggcctatgctatgtcttcactactgagaatacc

SEQ ID NO: 137074 - DNA, 80 bp, synthetic construct
  source 1..80: mol_type = other DNA
tgcttaacaacaggcagcgtggtcattgtgggcaggatcatcttgtccgggaagccagccatcattcctgacagggaagt

SEQ ID NO: 137075 - DNA, 80 bp, synthetic construct
  source 1..80: mol_type = other DNA
accaagcagctagattcaccataagcccgcaagcaccgtctttcacggctaacatgggcgagtatgggacagtcaccatt

SEQ ID NO: 137076 - DNA, 80 bp, synthetic construct
  source 1..80: mol_type = other DNA
tcttaacgctgcctcagctgctggctcgcacgggttaggatggtgtcttatcttcctgtgctgtgcttggtatgtcaagg

SEQ ID NO: 137077 - DNA, 80 bp, synthetic construct
  source 1..80: mol_type = other DNA
ggcgaacatgccatcaaagtgcaggggatcgaagctgaggcccacggttacgaccgtcgtgtatataaccacgcggtatt

SEQ ID NO: 137078 - DNA, 80 bp, synthetic construct
  source 1..80: mol_type = other DNA
cactgcagtgatgcaagtgaaggtgccaaaaggagcaccctgcaggattccagtaatggtcgccgatgatctcacagcgg

SEQ ID NO: 137079 - DNA, 80 bp, synthetic construct
  source 1..80: mol_type = other DNA
gccgtattgttggcattacgcgcccgctccgtgcggcatcgtgccggctcaggaagtctgcggccccgtgtactgtttta

SEQ ID NO: 137080 - DNA, 80 bp, synthetic construct
  source 1..80: mol_type = other DNA
ttcccacagcgtgaagtcggtgcgctttttctgcctgggattggggagggcgaaggtgacgtcgttaaagaggattttcc

SEQ ID NO: 137081 - DNA, 80 bp, synthetic construct
  source 1..80: mol_type = other DNA
atcccgctgtggcatccctcatgtccttcactgcggcattaaccagcccgctgcgaactgagactaccctcctccttaac

SEQ ID NO: 137082 - DNA, 80 bp, synthetic construct
  source 1..80: mol_type = other DNA
tctgatcgcatggcagcctgcaagaacatcagggattttaaacagggatggggtcctctaacctacgccaacatatctgg

SEQ ID NO: 137083 - DNA, 80 bp, synthetic construct
  source 1..80: mol_type = other DNA
gaacgggtcgattttctcctcaaagcttggggaagtaagaaggacccaatgggtttttcgtatgacacccgctgcttcga

SEQ ID NO: 137084 - DNA, 80 bp, synthetic construct
  source 1..80: mol_type = other DNA
atggtgggcgtcaaccccatagtcatcacccagcagtcgggcgagaccagcggctgcatccactgctcctgcgaaagccc

SEQ ID NO: 137085 - DNA, 80 bp, synthetic construct
  source 1..80: mol_type = other DNA
ttgatatatcccaatggcatcgtaaagaacattttgaggcatttcagtcagttgctcaatgtacctataaccagaccgtt

SEQ ID NO: 137086 - DNA, 80 bp, synthetic construct
  source 1..80: mol_type = other DNA
tcctgccgtggccactttgatgtctttcaccgccgcggtaacctccccccttacaactcaacagaccctcctctttaata

SEQ ID NO: 137087 - DNA, 80 bp, synthetic construct
  source 1..80: mol_type = other DNA
tgctctaacagcagtattgtgtatgagatggacggcatgatcctccacctgccggggtgcgtgccctgcgttcgggaagg

SEQ ID NO: 137088 - DNA, 80 bp, synthetic construct
  source 1..80: mol_type = other DNA
atgacactcgctgctttgactcaacagtcactgaggctgacatccgaacagaggagtccatataccaatgttgtgacctg

SEQ ID NO: 137089 - DNA, 80 bp, synthetic construct
  source 1..80: mol_type = other DNA
agaaatcccatgttatgcttgtataaatattgaaataaaaactaaaaacgtttctggtgtatgtttttattttgtatata

SEQ ID NO: 137090 - DNA, 80 bp, synthetic construct
  source 1..80: mol_type = other DNA
gaagccagcggcgcgggcgtacgggtagagggaagccaggaacatatagatacgtttcacaaggagagcgaccatctggg

SEQ ID NO: 137091 - DNA, 80 bp, synthetic construct
  source 1..80: mol_type = other DNA
atgtcaaattcatcactggacaaacagtattggaactttagaaacggggactccactaacggtgaaccatacacttatgc

SEQ ID NO: 137092 - DNA, 80 bp, synthetic construct
  source 1..80: mol_type = other DNA
tgctggcatctcgggggccctcgtcgcttttaagatcatgtccggcgagaagccttccgtggaagatgtcgttaatctgc

SEQ ID NO: 137093 - DNA, 80 bp, synthetic construct
  source 1..80: mol_type = other DNA
ggcgaagatcccgcaacttgggtaaagtcatcgataccctcacttgcggcttcgccgacctcatggggtacatcccagtc

SEQ ID NO: 137094 - DNA, 80 bp, synthetic construct
  source 1..80: mol_type = other DNA
atcgcacaccgctccccttgttattgctgataactctttagcattgcaagtttcagagcctatttttataaatgacaagg

SEQ ID NO: 137095 - DNA, 80 bp, synthetic construct
  source 1..80: mol_type = other DNA
agtcaacagtggcctcggagttagcccgcctagctactaccgtgctctcagagcagggtggtactgagaaacttccatca

SEQ ID NO: 137096 - DNA, 80 bp, synthetic construct
  source 1..80: mol_type = other DNA
cgagcgcctcggcctcggaatccgagaggaacaacgaggtggcgtcggagtcttcgtcgtcagagacatacagggtctga

SEQ ID NO: 137097 - DNA, 80 bp, synthetic construct
  source 1..80: mol_type = other DNA
gcctcaggcaacagagtttactacctcacgcgcgacccccaagtaccgcttgcgagggccgcgtgggagactgctaaaca

SEQ ID NO: 137098 - DNA, 80 bp, synthetic construct
  source 1..80: mol_type = other DNA
tcaccgaatcaactgtgtctactgccttggccgagcttgccaccaagagctttggcagctcctcaacctccggcattacg

SEQ ID NO: 137099 - DNA, 80 bp, synthetic construct
  source 1..80: mol_type = other DNA
gacccaaagccctcagagacaacgcgacaggccagtatggaccgtgatacttttatttattaactcacaggggcgcttac

SEQ ID NO: 137100 - DNA, 80 bp, synthetic construct
  source 1..80: mol_type = other DNA
gcggcgaaatccaagtgctttccactgccacccagaccttccttggcactgggataaatggcgtcatgtggactgtgtac

SEQ ID NO: 137101 - DNA, 80 bp, synthetic construct
  source 1..80: mol_type = other DNA
gtatgccaatatatcagggtcttcccctgataggccctactgttggcattacgcccccaggccttgcaaagttgttcagg

SEQ ID NO: 137102 - DNA, 80 bp, synthetic construct
  source 1..80: mol_type = other DNA
ccgtgagagcatgctgctagccctggcttcgtgcctcctgcagactgcgatctctgctcttgaaggcgagctgatggtcc

SEQ ID NO: 137103 - DNA, 80 bp, synthetic construct
  source 1..80: mol_type = other DNA
gctcatagaggccaacctcctgtggaggcaggcgatgggcggcaacatcaccagggttgagtcagagaacaaagtggtga

SEQ ID NO: 137104 - DNA, 80 bp, synthetic construct
  source 1..80: mol_type = other DNA
tggatcaacgaggactgctccactccgtgtgactcctcatggctaagggaggtttgggactgggtttgctctgtgctgtc

SEQ ID NO: 137105 - DNA, 80 bp, synthetic construct
  source 1..80: mol_type = other DNA
gtggactgaacactgaagcgttttacgtcatgaccgtggggtcaaagtcatttctggtccatagggagtggtttcatgac

SEQ ID NO: 137106 - DNA, 80 bp, synthetic construct
  source 1..80: mol_type = other DNA
ctgaagatgtggcgcgctaagaaagttccaatgggattttcctatgacaccagatgttttgactcaacagtcacggagcg

SEQ ID NO: 137107 - DNA, 80 bp, synthetic construct
  source 1..80: mol_type = other DNA
caccatcggttgaagtgaaactaccagattatggtgagctcttgatggattgtgaaccaaggtcagggattgacttctca

SEQ ID NO: 137108 - DNA, 80 bp, synthetic construct
  source 1..80: mol_type = other DNA
tggcgcactcgtggcctttaaggtcatgagcggcgaaacaccctccgccgaggacctgctcaacttactccctgccatcc

SEQ ID NO: 137109 - DNA, 80 bp, synthetic construct
  source 1..80: mol_type = other DNA
cggaaacatgcaggtccaaagagcggccagcgcggtgcttgggagacacatgcgcccgaggacgctcaccgccgccagcg

SEQ ID NO: 137110 - DNA, 80 bp, synthetic construct
  source 1..80: mol_type = other DNA
attgttggaggaaaatacgtccaagcactgttcctaaaagtgggggcgtggaccggcacctacatctatgaccatctggc

SEQ ID NO: 137111 - DNA, 80 bp, synthetic construct
  source 1..80: mol_type = other DNA
ttacgctgatcccatggctctgaaggatttcaaggagtttgccagtggaagaaaaagtataacccttgacatcttaacag

SEQ ID NO: 137112 - DNA, 80 bp, synthetic construct
  source 1..80: mol_type = other DNA
ttgccatcttagggccaatgtacttagtacaggctgcccttactgggaccccttactttgtgcgcgcccacgctttgatt

SEQ ID NO: 137113 - DNA, 80 bp, synthetic construct
  source 1..80: mol_type = other DNA
ggtgaggccgccggggccgtcgcggcgcgggcggccgcgacggccccggcggccgagacgtcggtggagccgtagaagtc

SEQ ID NO: 137114 - DNA, 80 bp, synthetic construct
  source 1..80: mol_type = other DNA
cagggcggctggcgccgccagccgccggggcccagccacacgccggcgccctcggccgccgccctggaggcctactgcgc

SEQ ID NO: 137115 - DNA, 80 bp, synthetic construct
  source 1..80: mol_type = other DNA
tcagctgctgaagaggcttcaccagtggataaatgaggactgctccacgccatgctccggctcgtggctaaaggatgttt

SEQ ID NO: 137116 - DNA, 80 bp, synthetic construct
  source 1..80: mol_type = other DNA
caatctctttatggggggtgatgtgacacgggtggaatctgagtccaaagtgctcatcctcgattctcttgaccctatgg

SEQ ID NO: 137117 - DNA, 80 bp, synthetic construct
  source 1..80: mol_type = other DNA
ctgactccacaacgatccttggcataggcacagtcctggaccaagcggagaccgctggagtgcgcctcaccgtgctcgcg

SEQ ID NO: 137118 - DNA, 80 bp, synthetic construct
  source 1..80: mol_type = other DNA
attttctccccacagctggcgcacaagttgcagggcgcccataacatcaggagcagaaatcttgaagtcgcaattagggc

SEQ ID NO: 137119 - DNA, 80 bp, synthetic construct
  source 1..80: mol_type = other DNA
cagcgtggtcattgtaggcaggatcatcttgtccgggaagccggccattattcctgatagggaggccctctaccgagagt

SEQ ID NO: 137120 - DNA, 80 bp, synthetic construct
  source 1..80: mol_type = other DNA
gtgccaccctcggcgctggggtcttggccctctttggcttcttcaccctgtcaccttggtataagcattggattggtcgc

SEQ ID NO: 137121 - DNA, 80 bp, synthetic construct
  source 1..80: mol_type = other DNA
taacttgcgggttaccaattgaagttggatttatttgaatgttgttcatacgattaataacaattgaacggggggttact

SEQ ID NO: 137122 - DNA, 80 bp, synthetic construct
  source 1..80: mol_type = other DNA
cgatgatgccgcagtggtcttacatgcacatcgccggtcaggacgcctcggagtacctgagtcccggtctggtgcaattc

SEQ ID NO: 137123 - DNA, 80 bp, synthetic construct
  source 1..80: mol_type = other DNA
tggggtgtggcagagggggctggtcatactacgcagcaaccatgaagaacgtccaggaagtgagaggatacacgaaaggt

SEQ ID NO: 137124 - DNA, 80 bp, synthetic construct
  source 1..80: mol_type = other DNA
aagagttaatgggagatatggctgaacgaacgacggccattttagtatcaagcgcccccgatgcgggagccgccacggca

SEQ ID NO: 137125 - DNA, 80 bp, synthetic construct
  source 1..80: mol_type = other DNA
gagcttacttgtccacgccggggttacctgtctgccaggaccatctagacttttgggagagtgtcttcactggactgact

SEQ ID NO: 137126 - DNA, 80 bp, synthetic construct
  source 1..80: mol_type = other DNA
ataccctgtttgtgggcgacataaaggacccggctcgccaagtggcctcggtggtcctggtggtgcaaccggccccagtt

SEQ ID NO: 137127 - DNA, 80 bp, synthetic construct
  source 1..80: mol_type = other DNA
gatggcctagtccccctggtaccagatccctggaaccttgcacttgcggggcagttgacctctaccttgtcactcggaac

SEQ ID NO: 137128 - DNA, 80 bp, synthetic construct
  source 1..80: mol_type = other DNA
ggaacctccgggtggacgcggtggtcgagtgtaggcgaggtcgggtgagggacggaggctcgttgtcgcgccgcgcccgc

SEQ ID NO: 137129 - DNA, 80 bp, synthetic construct
  source 1..80: mol_type = other DNA
agttggaagctggaaaaagcatccctcatagaggtgaaaacctgcacatggccaaaatcacataccctttggagtaatgg

SEQ ID NO: 137130 - DNA, 80 bp, synthetic construct
  source 1..80: mol_type = other DNA
ggcccggaacgggaggccacagcgccgtctttctccccaacgcgcgcggatgacggcccgccctgtaccgacgggcccta

SEQ ID NO: 137131 - DNA, 80 bp, synthetic construct
  source 1..80: mol_type = other DNA
cgtcagaggtaaccgcgaggctcctcaccacggaggaggcctgtgatctcacaccacctcactcggctcgatccaagtac

SEQ ID NO: 137132 - DNA, 80 bp, synthetic construct
  source 1..80: mol_type = other DNA
ctcatctggtggaaccaatatgccatctgcaggagcgaggccgccttgcaagtgtgggtcccttctctgattgttcgagg

SEQ ID NO: 137133 - DNA, 80 bp, synthetic construct
  source 1..80: mol_type = other DNA
tttgggtaaggtcatcgataccctcacgtgcggcttcgccgacctcatggggtacattccgctcgtcggcgcccctcttg

SEQ ID NO: 137134 - DNA, 80 bp, synthetic construct
  source 1..80: mol_type = other DNA
caagttcggttacggtgctaaagatgtccgcagccattctagcaaggccattaaccacatcaactccgtgtgggaggact

SEQ ID NO: 137135 - DNA, 80 bp, synthetic construct
  source 1..80: mol_type = other DNA
tggggctgctggtcctggccggcctggtcgcggccttcttcgccttccgctacgtcctgcaactgcaacgcaatcccatg

SEQ ID NO: 137136 - DNA, 80 bp, synthetic construct
  source 1..80: mol_type = other DNA
agcgaccccaggtcgctgtccatggcccagcagtagatctggccgctggggaggtgccaccaggcccccgggcccaaggc

SEQ ID NO: 137137 - DNA, 80 bp, synthetic construct
  source 1..80: mol_type = other DNA
gttatgtaccaacagtatgacgagatggaagagtgctctcgtcacctcccatacctggtcgaaggacagcacatagccga

SEQ ID NO: 137138 - DNA, 80 bp, synthetic construct
  source 1..80: mol_type = other DNA
gtccgccccgtctctcaaagccacgtgcactgctcgccatgactcccccggtactgatctcctcgaggctaacctcttgt

SEQ ID NO: 137139 - DNA, 80 bp, synthetic construct
  source 1..80: mol_type = other DNA
gctctgcggccggataaagtttacactattcgccgcactgttaatataaaaaagagtgtttatgttattggtcatggagc

SEQ ID NO: 137140 - DNA, 80 bp, synthetic construct
  source 1..80: mol_type = other DNA
catggcggccgtccgccagggccacagcggcgaggactccctgttggcccgaagccattgggtatgaaccagctgcgcct

SEQ ID NO: 137141 - DNA, 80 bp, synthetic construct
  source 1..80: mol_type = other DNA
gagacaccaattgacaccaccatcatggcaaaaaacgaggtcttctgcgtccagccagagaagggaggccgcaaggcagc

SEQ ID NO: 137142 - DNA, 80 bp, synthetic construct
  source 1..80: mol_type = other DNA
cctggcgggccttgcttactattccatggcgtggaaatgggctaagggtttgattgtgatgctactcttcgccggcgttg

SEQ ID NO: 137143 - DNA, 80 bp, synthetic construct
  source 1..80: mol_type = other DNA
gggcggcgccggcggcagggcccccgggccgtcgtcgtcgccgcgcagcaccagcggagtggcgtcgtcgtcgtgctcca

SEQ ID NO: 137144 - DNA, 80 bp, synthetic construct
  source 1..80: mol_type = other DNA
gacgcgctcatgactgggttcaccggcgactttgacagcgtaatagattgcaataccgctgttacgcaagtagtggattt

SEQ ID NO: 137145 - DNA, 80 bp, synthetic construct
  source 1..80: mol_type = other DNA
cacgggcatcgtcggcctggcctgcgagcactattacaccaacggctactacgttgtggagacgcagtggccggtggctc

SEQ ID NO: 137146 - DNA, 80 bp, synthetic construct
  source 1..80: mol_type = other DNA
gaggactaccgccagggctggggaaagcttggggttgctgacatcaacgacacatctgcagacaggccctactgctggaa

SEQ ID NO: 137147 - DNA, 80 bp, synthetic construct
  source 1..80: mol_type = other DNA
gggagaggcagcagccatcttcatgaccgcaacccctcccggagcgacagatccctttccccagagcaacagcccaatag

SEQ ID NO: 137148 - DNA, 80 bp, synthetic construct
  source 1..80: mol_type = other DNA
gcgggtgcagaaaccgcggaatatacggccgcgaaagcgctcaccgcgttgggcgagggtggtgtagattggaagcgacg

SEQ ID NO: 137149 - DNA, 80 bp, synthetic construct
  source 1..80: mol_type = other DNA
ctccagcaactggccatcaagacctttggccagcccccctcgagcggtgatgcaggctcgtccacgggtgcgggcgccgc

SEQ ID NO: 137150 - DNA, 80 bp, synthetic construct
  source 1..80: mol_type = other DNA
cttcactctcaccccaacctataagaagatgctcacgcattttctgtggtggaaccagtacttcatagcgatggcagagg

SEQ ID NO: 137151 - DNA, 80 bp, synthetic construct
  source 1..80: mol_type = other DNA
ttcgcccccgggcaaaaccgtgccggttgcgaccgggtgcggaacgggatcgatagggagagcgggagaagcctggccgg

SEQ ID NO: 137152 - DNA, 80 bp, synthetic construct
  source 1..80: mol_type = other DNA
tgtacgaaaccagcaatcacatcttgctgccactgcgtgctccgctttttacatcggggacttgtgtggggctatgttct

SEQ ID NO: 137153 - DNA, 80 bp, synthetic construct
  source 1..80: mol_type = other DNA
ggaacaaagtcgtttttggtacacagagagtggttcatggatctgaacctcccttggagcagttctgcttggcactaatt

SEQ ID NO: 137154 - DNA, 80 bp, synthetic construct
  source 1..80: mol_type = other DNA
tagggctatccctctagcactggttaaagggggcagacatctcatcttctgccactcaaagaagaagtgtgatgagttgg

SEQ ID NO: 137155 - DNA, 80 bp, synthetic construct
  source 1..80: mol_type = other DNA
cctagccgcatactgcttgtcagtgggcggcgtggtgatcaccggaagggtccttctgtcgggacaacccgccatcattc

SEQ ID NO: 137156 - DNA, 80 bp, synthetic construct
  source 1..80: mol_type = other DNA
tggacaagatatcataaagatggatggaaaaatatctgtgaatggaatgttacagcctataaatgcttcagtaatggaag

SEQ ID NO: 137157 - DNA, 80 bp, synthetic construct
  source 1..80: mol_type = other DNA
acataaaggggcgggccccagccgcagctgcgtatgctgcttgtggaatgtggcctttgctcttcctgctcctcgcgttg

SEQ ID NO: 137158 - DNA, 80 bp, synthetic construct
  source 1..80: mol_type = other DNA
acatcacatgcaagctgcccgtggcggtaatgggagccgcttacggctttcaatactcaccaaagcagcgcgtggaccac

SEQ ID NO: 137159 - DNA, 80 bp, synthetic construct
  source 1..80: mol_type = other DNA
tcaaagcaagtcacccagatactcagttctcttacaattaccagcttgctcaagagactgcacgcttgggtgtctgagga

SEQ ID NO: 137160 - DNA, 80 bp, synthetic construct
  source 1..80: mol_type = other DNA
cggggtcccgcggaaactcggccgtggtgaccaatacaaaacaaaagcgctcctcgtaccagcgaagaaggggcagagat

SEQ ID NO: 137161 - DNA, 80 bp, synthetic construct
  source 1..80: mol_type = other DNA
attacatagtaggggcaacagctgacaatctaaagtgcccctgccaggtcccggccccagagttcttcactgaggtggac

SEQ ID NO: 137162 - DNA, 80 bp, synthetic construct
  source 1..80: mol_type = other DNA
caaatgggagtacgtcgtgcttgcattcctcctgctcgcagacgctagagtttgtgtgtgtctttggatgatgctgttgg

SEQ ID NO: 137163 - DNA, 80 bp, synthetic construct
  source 1..80: mol_type = other DNA
ccgtctatataaacccgcagcagcgtgggcagctccggatccccgcgggcttcggaggccccctggcgatggctaggacg

SEQ ID NO: 137164 - DNA, 80 bp, synthetic construct
  source 1..80: mol_type = other DNA
ctgccagcgcggatacaaaggcgtctggcgggtggacgggattatgaacggccggtgcccctgtggtgcccagatcatgg

SEQ ID NO: 137165 - DNA, 80 bp, synthetic construct
  source 1..80: mol_type = other DNA
cgggggcgtggccgcgtccatcaggcccgcctcgaacatctccgtgtccgtgctgcccgcctcggaggtggagtcgcggt

SEQ ID NO: 137166 - DNA, 80 bp, synthetic construct
  source 1..80: mol_type = other DNA
cgcccggagctccgggcccggcacgcgtccctccagaacctccaccttgggcgtggaacgggccccgccgccgtcctccg

SEQ ID NO: 137167 - DNA, 80 bp, synthetic construct
  source 1..80: mol_type = other DNA
acgtttgtggacagaggctggggcaatggatgtgggctcttcggaaagggaagcctaataacgtgtgctaagttcaagtg

SEQ ID NO: 137168 - DNA, 80 bp, synthetic construct
  source 1..80: mol_type = other DNA
aacccccctgctgtacaggcttggacctgtcaacaatgagatcacgaccacccatccgatcaccaaatacatcatgacct

SEQ ID NO: 137169 - DNA, 80 bp, synthetic construct
  source 1..80: mol_type = other DNA
agaacataatggaaatgagattgttgatgtcatgtgtcatgctaccctcacccacaggctgatgtctcctcacagggtgc

SEQ ID NO: 137170 - DNA, 80 bp, synthetic construct
  source 1..80: mol_type = other DNA
agcattaagccagtgtcattgtgtattttacggacagcaagttgaggggcggaactttcgtaaccaattccaacctgttt

SEQ ID NO: 137171 - DNA, 80 bp, synthetic construct
  source 1..80: mol_type = other DNA
tgagaacaaagatgattatgaaacagtaaattcatgcttttatgttgtaaaagttgttgagcttccaaccactaaagcgc

SEQ ID NO: 137172 - DNA, 80 bp, synthetic construct
  source 1..80: mol_type = other DNA
gctaaaatgctcttagataacatcaacacacctgaaggaatcattcctagtatgttcgaaccagagcgtgaaaaggtgga

SEQ ID NO: 137173 - DNA, 80 bp, synthetic construct
  source 1..80: mol_type = other DNA
gtcaaggaggttaaggcagcggcgtcaaaagtgaaggctaatttgctatccgtagaggaagcttgcagcctgacgccccc

SEQ ID NO: 137174 - DNA, 80 bp, synthetic construct
  source 1..80: mol_type = other DNA
gtgacatgttggtgtgcggagatgacttagtggtcatttgtgagagtgctggcgtccaggaggacactgagtcactgcga

SEQ ID NO: 137175 - DNA, 80 bp, synthetic construct
  source 1..80: mol_type = other DNA
gggcgtgtcgagattgactttgactattgcccaggaacaacagtaactataagtgatagttgcggacaccgtggacctgc

SEQ ID NO: 137176 - DNA, 80 bp, synthetic construct
  source 1..80: mol_type = other DNA
ggtggatatagccaaccaggccttgcaaaaccaaatcaatcagcggctggaaaatagccgccagcctccggtggctctgc

SEQ ID NO: 137177 - DNA, 80 bp, synthetic construct
  source 1..80: mol_type = other DNA
cacggtgtcgcctgttaaggggggggaagggggtgttggcgagaagcgtgggaacacggaggattctctcacgacccgca

SEQ ID NO: 137178 - DNA, 80 bp, synthetic construct
  source 1..80: mol_type = other DNA
agactgtcgatttcagcctggaccccaccttcaccatagagaccacaaccctgcctcaggacgcggtatctcgcagccaa

SEQ ID NO: 137179 - DNA, 80 bp, synthetic construct
  source 1..80: mol_type = other DNA
ccaggatccctcagagctgcaagagcggcgaaaaatgatgatggcagcagttttggttacagtggaattggaatgcctgc

SEQ ID NO: 137180 - DNA, 80 bp, synthetic construct
  source 1..80: mol_type = other DNA
tcgtcagctcttacagtatacctctaaaaacacttcaggtttttggagatatctgtttgggtctactttatgcaaagtgg

SEQ ID NO: 137181 - DNA, 80 bp, synthetic construct
  source 1..80: mol_type = other DNA
cttgaacagttttgggccaaacacatgtggaactttatcagtggcatacagtacctggcgggactctccaccctaccggg

SEQ ID NO: 137182 - DNA, 80 bp, synthetic construct
  source 1..80: mol_type = other DNA
gtcgatgcggacacccacattacgggtggtattgcggctaggcacactttcgggcttgccaatattttcacacccggcgc

SEQ ID NO: 137183 - DNA, 80 bp, synthetic construct
  source 1..80: mol_type = other DNA
ttccaccacgcagtggcagattctcccctgctctttcaccccattgccagccctatccacaggcttggttcatctccacc

SEQ ID NO: 137184 - DNA, 80 bp, synthetic construct
  source 1..80: mol_type = other DNA
cctgatcccccgcgcggctgccaaacagctggccgccgtcgcacgcgtccagtcggcaagatcctcgggctactggtgtg

SEQ ID NO: 137185 - DNA, 80 bp, synthetic construct
  source 1..80: mol_type = other DNA
cgcttgggagacggctcgccacactccagtgaattcctggttggggaacatcatcatgtacgcgcccaccatatgggcac

SEQ ID NO: 137186 - DNA, 80 bp, synthetic construct
  source 1..80: mol_type = other DNA
cacctcctcctgctactgtaaagccacagtcaggtccagagtatgtatatgttaatatgggagagaacaaaaccttagtt

SEQ ID NO: 137187 - DNA, 80 bp, synthetic construct
  source 1..80: mol_type = other DNA
ccccaacgctagtatagtctatgaaacagacaacgccatcctacacgagcctgggtgcgtgccttgcgttcgcgagggta

SEQ ID NO: 137188 - DNA, 80 bp, synthetic construct
  source 1..80: mol_type = other DNA
ccgaactacacgcgtgcgctgtggagggtatccgccgaggagtacgtggaggttaggagtgtgggagacttccactatgt

SEQ ID NO: 137189 - DNA, 80 bp, synthetic construct
  source 1..80: mol_type = other DNA
gggtgacttacggaacgtgcaatcaagctggggagcatagacgcgacaagagatcagtggcgttagctccccatgtcggc

SEQ ID NO: 137190 - DNA, 80 bp, synthetic construct
  source 1..80: mol_type = other DNA
gtgtgagaaaaatgagacacctgcgtctcctgcctggaactgtgcccttggacatggccgcattattgctggatgacttt

SEQ ID NO: 137191 - DNA, 80 bp, synthetic construct
  source 1..80: mol_type = other DNA
atgtatgaggatctagaagggggcaacatccccgcactccttgatgtggccaagtacttggaaagcaagaaggaacttga

SEQ ID NO: 137192 - DNA, 80 bp, synthetic construct
  source 1..80: mol_type = other DNA
ctgtgcggctctctctttctggcgggacaactattcgccttccagccccgccgtcattggaccgtgcaagactgcaactg

SEQ ID NO: 137193 - DNA, 80 bp, synthetic construct
  source 1..80: mol_type = other DNA
acgcctcgggatcccggcaccgcagctcccgtagatcgcgctgggccctgagggcgtcgaaatgtacgccccgcaaaaac

SEQ ID NO: 137194 - DNA, 80 bp, synthetic construct
  source 1..80: mol_type = other DNA
agtacgttgacttcagcctggaccccaccttttccattgagactcgcactgctccccaagacgcggtttcccgcagccaa

SEQ ID NO: 137195 - DNA, 80 bp, synthetic construct
  source 1..80: mol_type = other DNA
cccccggggtcaagtctctcgcaccgtgcacctgcggggcatcagatttgttcctggttaccaggcacgcagacgtggtg

SEQ ID NO: 137196 - DNA, 80 bp, synthetic construct
  source 1..80: mol_type = other DNA
cacacgcgtgtacatggacgcagtctttgaatacaccatagactgcgatggatctatcttgggtgcagcggtgaacggaa

SEQ ID NO: 137197 - DNA, 80 bp, synthetic construct
  source 1..80: mol_type = other DNA
gcaaacttgcaaaccacgcctacggtcaattaactattcactccgcccacttcattttaatattggctcaagtccagtgt

SEQ ID NO: 137198 - DNA, 80 bp, synthetic construct
  source 1..80: mol_type = other DNA
tacaatctgggtccggatggtcataatgacccacttcttttccatactattggcccaggatactctgaaccaaaatctca

SEQ ID NO: 137199 - DNA, 80 bp, synthetic construct
  source 1..80: mol_type = other DNA
tacacgctgtgcgaccgctacggcctgtatgtggtggatgaagccaatattgaaacccacggcatggtgccaatgaatcg

SEQ ID NO: 137200 - DNA, 80 bp, synthetic construct
  source 1..80: mol_type = other DNA
agccccgatgtaagcttgttgcatgggcggcgatataaaatgcaaggtgctgctcaaaaaatcaggcaaagccttgcgca

SEQ ID NO: 137201 - DNA, 80 bp, synthetic construct
  source 1..80: mol_type = other DNA
aacatcgacgcccacatgctgtcacagactaaacagggtggggagaacttcccataccttgtagcgtaccaagcaacagt

SEQ ID NO: 137202 - DNA, 80 bp, synthetic construct
  source 1..80: mol_type = other DNA
gcacatgcggtttaacacccgtggtttttatttacaacaaaccccccatcacaggtcgtcctcgtcggcgtcaccgtctt

SEQ ID NO: 137203 - DNA, 80 bp, synthetic construct
  source 1..80: mol_type = other DNA
caaactgtaaacctaacacaggcgtttaaaaacttgcaaggaatgtggggcgtgcgagcccccgtgggggaccgagccac

SEQ ID NO: 137204 - DNA, 80 bp, synthetic construct
  source 1..80: mol_type = other DNA
gcaatcccctttgggttggtgagcatgatgatagccatggaagtggtattgaggaagagacagggacccaagcaaatact

SEQ ID NO: 137205 - DNA, 80 bp, synthetic construct
  source 1..80: mol_type = other DNA
tcgcggcctactgcttatcggtgggctgtgttgtcatctgtggcagggtaactttgactggcaagcctgctgttgtccct

SEQ ID NO: 137206 - DNA, 80 bp, synthetic construct
  source 1..80: mol_type = other DNA
cgccgacgatgcttttgaatagctaacgtgtcgtatgtgtgtcatgtatgcgtccatgtcgccgccagaggagctgctga

SEQ ID NO: 137207 - DNA, 80 bp, synthetic construct
  source 1..80: mol_type = other DNA
accggatttcatccttgccaccgatatcgctgagatgggagcaaacttgtgtgtggagagagtcttggactgcagaactg

SEQ ID NO: 137208 - DNA, 80 bp, synthetic construct
  source 1..80: mol_type = other DNA
ggggataggaactgtgctggaccaggcggagacggctggtgttcgcctcacggtattagctaccgctactccgcctgggt

SEQ ID NO: 137209 - DNA, 80 bp, synthetic construct
  source 1..80: mol_type = other DNA
gctgtgccatcgctccccttcatcccacccccatcttgtccccaaataaaacaaggtctggtagttaggacaacgaccgc

SEQ ID NO: 137210 - DNA, 80 bp, synthetic construct
  source 1..80: mol_type = other DNA
aggccgatccacaggggtggataccaccggcaccagcggtcaggaaccggtggatgattcctccggttcggaaacaggct

SEQ ID NO: 137211 - DNA, 80 bp, synthetic construct
  source 1..80: mol_type = other DNA
atccataaaggtaattggtttgtaagtgtaggtcacgtggtcattgggcttgtgcgtgggtgtataaaagggggcgtgtc

SEQ ID NO: 137212 - DNA, 80 bp, synthetic construct
  source 1..80: mol_type = other DNA
tccatcgtcctctgcgaggcgtatgacactggctgtgcctggtatgagttaacaccttcagagaccactgtcaggctacg

SEQ ID NO: 137213 - DNA, 80 bp, synthetic construct
  source 1..80: mol_type = other DNA
tggcgggcctctccacgctgccaggtaaccccgccgtggcttccctcatggcctttactgcctctgtaaccagccctctc

SEQ ID NO: 137214 - DNA, 80 bp, synthetic construct
  source 1..80: mol_type = other DNA
gtgcacgtggatgaacagcacggggtatgtcaagacctgcggcgcgccaccatgtaacattgtgccagaccccaacacga

SEQ ID NO: 137215 - DNA, 80 bp, synthetic construct
  source 1..80: mol_type = other DNA
atgagggcggtgacatccccctccttgtccaccgcgtaaacgcccccggcggcgcgtccccggtggttgcagggccggcg

SEQ ID NO: 137216 - DNA, 80 bp, synthetic construct
  source 1..80: mol_type = other DNA
caacggcctctttcaccggactgttcaatgttggcgccagacaaaacatccagctcattaacaccaacgggagctggcat

SEQ ID NO: 137217 - DNA, 80 bp, synthetic construct
  source 1..80: mol_type = other DNA
ccacattaaatggcccaacacctttgctatatcgcttggggccggttagcaatgaagtcaccttcacacatcctgtgacc

SEQ ID NO: 137218 - DNA, 80 bp, synthetic construct
  source 1..80: mol_type = other DNA
tccggggtggcccccaaaccccgtatggttttggattcccctgacggggcgtggccttggcggccgcccaactctcgcac

SEQ ID NO: 137219 - DNA, 80 bp, synthetic construct
  source 1..80: mol_type = other DNA
ttcaactcatctgggtgtgtgcagagaatggctagctgtcgaccccttactgactttgatcaagggtgaggcccaatcac

SEQ ID NO: 137220 - DNA, 80 bp, synthetic construct
  source 1..80: mol_type = other DNA
aggcatataaaggtgggttggcgctgcctagcatgagatactgaagaatggagctagaagctgtgttgcaaagttttcag

SEQ ID NO: 137221 - DNA, 80 bp, synthetic construct
  source 1..80: mol_type = other DNA
gcaatctggtgtattccacaacgtcccgcagcgcgggccagagacagaaaaaagtcacctttgacaggctgcaggtcctg

SEQ ID NO: 137222 - DNA, 80 bp, synthetic construct
  source 1..80: mol_type = other DNA
aggcgcagcggcggcgcgtcggggtacaggcgcgcgtgcgcggcctccacgcgcgcgaagacccccgggccgaacacgcg

SEQ ID NO: 137223 - DNA, 80 bp, synthetic construct
  source 1..80: mol_type = other DNA
gctccggtggctggttatacccgtgacccaccaggatgtgaaagttggctgtggttagggcggtgggcatgccaaacatc

SEQ ID NO: 137224 - DNA, 80 bp, synthetic construct
  source 1..80: mol_type = other DNA
acagcctcgcccaggtgctggcgctgcaccccggggcgtttcgcagcgttcgcgtggcggtcgagggcaacagcagccag

SEQ ID NO: 137225 - DNA, 80 bp, synthetic construct
  source 1..80: mol_type = other DNA
tagtggtaggtgtgatttgtgcggccattctgcgccgccacgtggggcaaggggaaggcgcggtccaatggatgaatagg

SEQ ID NO: 137226 - DNA, 80 bp, synthetic construct
  source 1..80: mol_type = other DNA
gggacgcaacagaagccgaccgggccaacccagcgccatacgtactatagcgaatgcgatgaatttcgattcatcgcccc

SEQ ID NO: 137227 - DNA, 80 bp, synthetic construct
  source 1..80: mol_type = other DNA
aagggcttgcgggcgcatatagacttgatcgtagtgtccgctacgctttgctccgccctttacgtggtggatgtttgtgg

SEQ ID NO: 137228 - DNA, 80 bp, synthetic construct
  source 1..80: mol_type = other DNA
tccaccttccgggctgtgtaccctgtgtcatgactggcaatcagtctagatgctgggtgtcagcctcacctacgctggca

SEQ ID NO: 137229 - DNA, 80 bp, synthetic construct
  source 1..80: mol_type = other DNA
gacaccataggaggacgcgtcgcttccaccaccagtaggcttgtagggctcttcgcccccggtcccaagcagaacctcca

SEQ ID NO: 137230 - DNA, 80 bp, synthetic construct
  source 1..80: mol_type = other DNA
gcgtggtggtggactatggatagaacctcgacggtcgagacgatggcgtccacgatcccgtacgtgccgccgctgcgctt

SEQ ID NO: 137231 - DNA, 80 bp, synthetic construct
  source 1..80: mol_type = other DNA
gcttatctcaacacacccggtctccctgtctgccaggaccaccttgagttttgggaaagcgtttttacggggttgaccca

SEQ ID NO: 137232 - DNA, 80 bp, synthetic construct
  source 1..80: mol_type = other DNA
tcctttttaggaacggcggtgaacggcgtaatgtggactgtgtaccatggagcaggcagcaaaaccctaagcggccccaa

SEQ ID NO: 137233 - DNA, 80 bp, synthetic construct
  source 1..80: mol_type = other DNA
tccccgatgggacgccgggcccccaggggatcccccgaggccgcgccgggcgccgacgtcgcgcccgtggcgcgtgcggc

SEQ ID NO: 137234 - DNA, 80 bp, synthetic construct
  source 1..80: mol_type = other DNA
tcacctggagggctgacacagcagcatgcggagacatactggctggcctgcccgtttctgcccgacgtggtaagcttgta

SEQ ID NO: 137235 - DNA, 80 bp, synthetic construct
  source 1..80: mol_type = other DNA
cgatcgacattcgggtacagtgcgagagatgtccgctccttatccggcaaggccattaaccagatcaactccgtctggga

SEQ ID NO: 137236 - DNA, 80 bp, synthetic construct
  source 1..80: mol_type = other DNA
acatccttatattcaaaagtagctgggtatcccccatcgggtaaaataaatcctcgagacgaagccagtcctaataaaca

SEQ ID NO: 137237 - DNA, 80 bp, synthetic construct
  source 1..80: mol_type = other DNA
attaattctgatactataagatatacaactgacaatgtactaaatgtagacatggccacggacaccgatgaccacagtcc

SEQ ID NO: 137238 - DNA, 80 bp, synthetic construct
  source 1..80: mol_type = other DNA
aacgttgcatcggcaacttttaacatctgggacagttctgccgcttgacccatatacgtatttaatggtgcaggggttcc

SEQ ID NO: 137239 - DNA, 80 bp, synthetic construct
  source 1..80: mol_type = other DNA
tctcccgaggaaggcccgcttcagcagcgcaaactgggtgtgaacggcggcggtggtctccggttccccggtggtgtagt

SEQ ID NO: 137240 - DNA, 80 bp, synthetic construct
  source 1..80: mol_type = other DNA
cagccgtgttctgctcagccatgtacattggggacctttgtgggggcgtcttcctcgttgggcaattgttcaccttcacg

SEQ ID NO: 137241 - DNA, 80 bp, synthetic construct
  source 1..80: mol_type = other DNA
tacgctgctgcgcaaaaggaagtgagtggggtcaaaggatttactcttggaagagacggccatgagaaacccatgaatgt

SEQ ID NO: 137242 - DNA, 80 bp, synthetic construct
  source 1..80: mol_type = other DNA
tgcaggaagggattgacttactcacttttccgccggcgcccggttctccggagccgcctcacctttcccggcagcccgag

SEQ ID NO: 137243 - DNA, 80 bp, synthetic construct
  source 1..80: mol_type = other DNA
gtgtcccgaagtcagcgcaggggccgcacgggccggggtaggcaaggtacataccggttcgtcactccaggagagcggcc

SEQ ID NO: 137244 - DNA, 80 bp, synthetic construct
  source 1..80: mol_type = other DNA
ggtggacgcggtggtcgagtgtaggcgaggtcgggtgaggggcgagggctcgttgtcgcgccgcgcccgctgaatctttt

SEQ ID NO: 137245 - DNA, 80 bp, synthetic construct
  source 1..80: mol_type = other DNA
gcgacgatacttttgcaacccgcccccaagatctggtaatcgaaccagtggcaaaagatagcaaaaatcgcagctacaat

SEQ ID NO: 137246 - DNA, 80 bp, synthetic construct
  source 1..80: mol_type = other DNA
aattgcaatgactccctgcacacggggttcttgacctccttgttttaccgcgttaaattcaactcttctggttgtcctga

SEQ ID NO: 137247 - DNA, 80 bp, synthetic construct
  source 1..80: mol_type = other DNA
ccccccctcccggggtccgccgggcgcccagaaaccggagagggttattttcggtgagggtccgaccagcccgcccgtcg

SEQ ID NO: 137248 - DNA, 80 bp, synthetic construct
  source 1..80: mol_type = other DNA
agcctcaagtgggccaaacacagtggaacagtgaagttggtgccactgacaaggtagcgggtagggtattgaaagatacc

SEQ ID NO: 137249 - DNA, 80 bp, synthetic construct
  source 1..80: mol_type = other DNA
gcccggaagaactgcgcgaggcgcgccggaccagggcgtgggcatcgggcaccgggatggccgccgcgacggccgacgat

SEQ ID NO: 137250 - DNA, 80 bp, synthetic construct
  source 1..80: mol_type = other DNA
gacgacaatcagaccacaacaacaaacgtaggtttaaacttttttaccactgccactgaaaccgctaatttttcaccaaa

SEQ ID NO: 137251 - DNA, 80 bp, synthetic construct
  source 1..80: mol_type = other DNA
tgcttgactttgggcagtgttgtggtctgcggcagggttataacatcagggaagcccgtgccgttgcccgatagggaagt

SEQ ID NO: 137252 - DNA, 80 bp, synthetic construct
  source 1..80: mol_type = other DNA
gttcttccgccagccaattgtctgccccgtctttgaaggccacttgtacgacccatggtcggtctccagacgctgagctc

SEQ ID NO: 137253 - DNA, 80 bp, synthetic construct
  source 1..80: mol_type = other DNA
cacgacctcgacgacgcccggcgggacgcgagggcccccgcggcgggcaccgacgccggcgaggacgccggtgacgccgt

SEQ ID NO: 137254 - DNA, 80 bp, synthetic construct
  source 1..80: mol_type = other DNA
acctctcctgtacaggctggggcccgtccagaatgaggtgacattgacacacccaataaccaagtacatcatgacatgca

SEQ ID NO: 137255 - DNA, 80 bp, synthetic construct
  source 1..80: mol_type = other DNA
cacggccaccccgcgtcatcaattaaaccctccctcttggccagctgccctggtataccaggaaaatcccccgcctacta

SEQ ID NO: 137256 - DNA, 80 bp, synthetic construct
  source 1..80: mol_type = other DNA
gcggccgtccggcatgtttgactcggtggtgctatgtgagtgctatgacgcaggttgttcctggtatgacctacaacctg

SEQ ID NO: 137257 - DNA, 80 bp, synthetic construct
  source 1..80: mol_type = other DNA
tgctccacccgcacttggtgtttgacattactaagtatctattggccgtcctcggacccgcttggatcttacaggccagc

SEQ ID NO: 137258 - DNA, 80 bp, synthetic construct
  source 1..80: mol_type = other DNA
tgttgaggatgaagatttttggaaacttgtggacagagaacgtgaactccacaaattgggtaagtgtggaagctgtgttt

SEQ ID NO: 137259 - DNA, 80 bp, synthetic construct
  source 1..80: mol_type = other DNA
accgcaggacggcgcctggccagagggtcccccccctcgcttgctagttcatcggcgagccaactgtcggccccgtcgtt

SEQ ID NO: 137260 - DNA, 80 bp, synthetic construct
  source 1..80: mol_type = other DNA
gccctcgggtatgttcgacaccgtcgtcctgtgtgaggcttatgacacgggatgtgcgtggtacgaactaaccccttctg

SEQ ID NO: 137261 - DNA, 80 bp, synthetic construct
  source 1..80: mol_type = other DNA
tataacaattaaaggtcttaaaggagcactgcgggaaatgaacaataacgctttatctgtaaaacttccctttgacaatc

SEQ ID NO: 137262 - DNA, 80 bp, synthetic construct
  source 1..80: mol_type = other DNA
ctgtctgccccatccctgaaggcgacgtgtaccacgggtggggtgcacccggatgccgagctgatcgaggccaatctctt

SEQ ID NO: 137263 - DNA, 80 bp, synthetic construct
  source 1..80: mol_type = other DNA
tccatcaaggatgagctcaacaccctgctcaaagaaaacggaattgatctaagcattgttgtggagaagcagagtggcct

SEQ ID NO: 137264 - DNA, 80 bp, synthetic construct
  source 1..80: mol_type = other DNA
gtctgcgccaccgatgccctcatgactggctatacaggtgactttgactctgttatagactgcaacgtcgcagtcactca

SEQ ID NO: 137265 - DNA, 80 bp, synthetic construct
  source 1..80: mol_type = other DNA
tttaaaatttttaagaggttttaaaccatcagccataggcatgtgatctagggtttgcttcagcagctgcagccggtccc

SEQ ID NO: 137266 - DNA, 80 bp, synthetic construct
  source 1..80: mol_type = other DNA
tcatcgcgtcgtcggcccggctcgagccgtgctgacaaacgccttgctgttgggcgtcttcctgtgcacggccgacgccg

SEQ ID NO: 137267 - DNA, 80 bp, synthetic construct
  source 1..80: mol_type = other DNA
ttacaattaactgcactaactctgattaccccaataaggttgtgtttaataatgtcagtcgatggtactacggatacggt

SEQ ID NO: 137268 - DNA, 80 bp, synthetic construct
  source 1..80: mol_type = other DNA
cccgagttcccccgggacttctggatgttgcccgtgttcaacatcccccgggagacggcggcggagcgtgcggcagtgct

SEQ ID NO: 137269 - DNA, 80 bp, synthetic construct
  source 1..80: mol_type = other DNA
gtgagaaaggcggcggcctgagcctccagccccggccgcaggtgccgccgcagcacgcgcacctggagcgcgttgagctt

SEQ ID NO: 137270 - DNA, 80 bp, synthetic construct
  source 1..80: mol_type = other DNA
ggcgacggggtaatgcataccacctgctcttgcggcgctgaaatagcaggccacatcaaaaacggctcaatgaggatcgt

SEQ ID NO: 137271 - DNA, 80 bp, synthetic construct
  source 1..80: mol_type = other DNA
ccgcggccagggcggccccgaaccaagccttgatgctcaactccatccgggcccagctgggtgcggtcatcgtgtggaac

SEQ ID NO: 137272 - DNA, 80 bp, synthetic construct
  source 1..80: mol_type = other DNA
tgagacagctgctcggcgcttggcaaggggatctccaccttcccttgccagctcgtcagcaagccagctctcggctcctt

SEQ ID NO: 137273 - DNA, 80 bp, synthetic construct
  source 1..80: mol_type = other DNA
tcgcgcgcccgaccccgctcattactcttcggcctactcctacttttcgtaggggtaggcctcttcctactccccgctcg

SEQ ID NO: 137274 - DNA, 80 bp, synthetic construct
  source 1..80: mol_type = other DNA
acttggcagcttaaggccgcggtcctccacgtccctgggtgtgtcccatgcgagaaaatgggaaacacatctcggtgctg

SEQ ID NO: 137275 - DNA, 80 bp, synthetic construct
  source 1..80: mol_type = other DNA
gtttgctacagtgcagtcctaacccatgtgaagatcaatgacaaatgcccgagcactggtgaggcccaccttgcagagga

SEQ ID NO: 137276 - DNA, 80 bp, synthetic construct
  source 1..80: mol_type = other DNA
gcattgctgtattcccttgcccgcttccacccccccttcccgttttgtttgtttgtgcgggtgcccatggcgtcggcgga

SEQ ID NO: 137277 - DNA, 80 bp, synthetic construct
  source 1..80: mol_type = other DNA
tatgatgtaacccaacagggacacgagctgtcatatactttaaacaagcaaagacagagctttatgactatggtgggggt

SEQ ID NO: 137278 - DNA, 80 bp, synthetic construct
  source 1..80: mol_type = other DNA
gagcctcgctcgggaatagacaccagcgcttactatgtgatgactgtcggtgccaagtcgtttttggtgcacagagagtg

SEQ ID NO: 137279 - DNA, 80 bp, synthetic construct
  source 1..80: mol_type = other DNA
agcaatccatcatgcttttatactatcaatgtaattgagcttccaaccaccagatcgccaactaccaccacggtcagtac

SEQ ID NO: 137280 - DNA, 80 bp, synthetic construct
  source 1..80: mol_type = other DNA
cgctcgcgctctctcctcagtgcaaagtgcaaccactcttgtaatccacacagatccctctcggcctccggggcgatgca

SEQ ID NO: 137281 - DNA, 80 bp, synthetic construct
  source 1..80: mol_type = other DNA
cccaggacgctaccaccatccttgggataggcacagtccttgaccaggcagagacggctggagctaggctcgttgtcttg

SEQ ID NO: 137282 - DNA, 80 bp, synthetic construct
  source 1..80: mol_type = other DNA
tttgagtccacatacagaggtgcaaaacgcatggccatcctaggtgaaacagcttgggattttggttccgttggtggact

SEQ ID NO: 137283 - DNA, 80 bp, synthetic construct
  source 1..80: mol_type = other DNA
aagcatccagaaacgacctacaccaagtgtggttcaggtccctggctcacgccgcggtgcctggtccactacccatatcg

SEQ ID NO: 137284 - DNA, 80 bp, synthetic construct
  source 1..80: mol_type = other DNA
aacacaaacggacgatctatgcgatgtgctatatgacgttagtgctcaagacaagaatggctgaaacccagcaagggacc

SEQ ID NO: 137285 - DNA, 80 bp, synthetic construct
  source 1..80: mol_type = other DNA
atcaggaactgttcaaccttcaagccctacaccaatgcaaaaagggtcttttttgtctggttaaacaagctgaactttgt

SEQ ID NO: 137286 - DNA, 80 bp, synthetic construct
  source 1..80: mol_type = other DNA
actcccaggcctccgattcgtccgtcttctggtaaggcgccccatcccgaggccccacgtcggtcgccaaactgggcgac

SEQ ID NO: 137287 - DNA, 80 bp, synthetic construct
  source 1..80: mol_type = other DNA
ctgcaactccccctgggagcgttaccgtgccgcactccaacattgaagaagtggccttaactaatgatggagaaatcccc

SEQ ID NO: 137288 - DNA, 80 bp, synthetic construct
  source 1..80: mol_type = other DNA
tgtgctggaccgtctaccacggtgctggcaacaggtccttggccggttcaaagggccccattctacagatgtacaccaat

SEQ ID NO: 137289 - DNA, 80 bp, synthetic construct
  source 1..80: mol_type = other DNA
acaccacccagctgtgcaattgctcattatacccggggcagattactggacatcgtatggcctgggatatgatgatgaat

SEQ ID NO: 137290 - DNA, 80 bp, synthetic construct
  source 1..80: mol_type = other DNA
tcgaccggtacaaatttatgcctgaaacaccaaaacagctggcaaaggtcatcgagcaagcccacgcgaaaggaatatgt

SEQ ID NO: 137291 - DNA, 80 bp, synthetic construct
  source 1..80: mol_type = other DNA
cacttggcagtacatcaagtgtatcatatgccaagtacgccccctattgacgtcaatgacggtaaatggcccgcctggca

SEQ ID NO: 137292 - DNA, 80 bp, synthetic construct
  source 1..80: mol_type = other DNA
tccccacggccttcctcgacatggttgcgggaggccactggggcgtcctcgcgggcctggcattcttcagcatgcagggc

SEQ ID NO: 137293 - DNA, 80 bp, synthetic construct
  source 1..80: mol_type = other DNA
acaatgaggagcagaacgtagtctgctgctccatgtcgtactcttggaccggcgccttgataacaccatgtagtgctgag

SEQ ID NO: 137294 - DNA, 80 bp, synthetic construct
  source 1..80: mol_type = other DNA
tcagtcctatggagattaaggttatcacttggggagctgacacgacagcatgcggggacatactctgtgggttgccggtg

SEQ ID NO: 137295 - DNA, 80 bp, synthetic construct
  source 1..80: mol_type = other DNA
gaaggatatccaggagtggaagccatctcaaggatggtacgactggcagcaggttcctttttgttcaaatcactttctgg

SEQ ID NO: 137296 - DNA, 80 bp, synthetic construct
  source 1..80: mol_type = other DNA
tgtgtgtggatgaacgccacgaggtttgtgaaaacgtgtggggctcccccttgtgacatctacgggtggacaccagagga

SEQ ID NO: 137297 - DNA, 80 bp, synthetic construct
  source 1..80: mol_type = other DNA
gccaaggcgcgggatgctccgcaacgacagccaccgggccgtgtccccggaggacggccagggacgggtcgacgacggac

SEQ ID NO: 137298 - DNA, 80 bp, synthetic construct
  source 1..80: mol_type = other DNA
acgttaaaagaagaagtcaggccccaaagccacggtttgagcaaaccgtgctgcctgtagctccgtcgtggggacgtaaa

SEQ ID NO: 137299 - DNA, 80 bp, synthetic construct
  source 1..80: mol_type = other DNA
gtggagtcagaggactttcttctttgctcagtccgggccccaagcagaaactggagctgatcaacaccaacggatcgtgg

SEQ ID NO: 137300 - DNA, 80 bp, synthetic construct
  source 1..80: mol_type = other DNA
gattctgctcatctttgctggagtcgacgctgatacgcacgtcactggcggtgccgctgcccgcagtactgccggcctta

SEQ ID NO: 137301 - DNA, 80 bp, synthetic construct
  source 1..80: mol_type = other DNA
ccatcaaaagctttggctgccccccccctagcggtgactcaggccactctacggtggaaggtgacactggtgggaccagc

SEQ ID NO: 137302 - DNA, 80 bp, synthetic construct
  source 1..80: mol_type = other DNA
gacaacatagaacttaagttctttgattcagctgacaatccaacaaacaatcctcaagttgtgttttataccgaagatgt

SEQ ID NO: 137303 - DNA, 80 bp, synthetic construct
  source 1..80: mol_type = other DNA
ccagcggagtttttaccactagcatgggcaacaccataacgtgctacctaaaagcccaagctgcctgtagggcagcaggg

SEQ ID NO: 137304 - DNA, 80 bp, synthetic construct
  source 1..80: mol_type = other DNA
ctggggcccgaggcccgtgcccgggccctggcccgcggagccggcccggcgaactcggtctaacgttacacccgaggctg

SEQ ID NO: 137305 - DNA, 80 bp, synthetic construct
  source 1..80: mol_type = other DNA
tgaccaggtactcagcacctcctggtgacgaaccgcgcccggaatatgacttggagctgataacatcgtgctcctctaac

SEQ ID NO: 137306 - DNA, 80 bp, synthetic construct
  source 1..80: mol_type = other DNA
gaccccgccggaggagagggctggccggtaacggtcgatttcggcggcgtagcatgcgcagacgcatgaagggcgtggtt

SEQ ID NO: 137307 - DNA, 80 bp, synthetic construct
  source 1..80: mol_type = other DNA
cccctacccatcttcggcggactacgtcctgctacatcggcaggaattgcacgagggcaagcctctgtgtgtgagtttgt

SEQ ID NO: 137308 - DNA, 80 bp, synthetic construct
  source 1..80: mol_type = other DNA
tcgtgctccagtaggcgatcgttcaactctgtccagtttactaacaccaaactcgcgcctattgctgttgctaattgccc

SEQ ID NO: 137309 - DNA, 80 bp, synthetic construct
  source 1..80: mol_type = other DNA
ctacgtgccgcctctggaagtcagagggggccgggactccctgatcatcctcgcagccatcctccatcccaagcttgttt

SEQ ID NO: 137310 - DNA, 80 bp, synthetic construct
  source 1..80: mol_type = other DNA
tcaagcgactgtgtgcgctcgcgcgcaagcgctcccaccgagctgggatgagatgtggaagtgccttgtgagactcaaac

SEQ ID NO: 137311 - DNA, 80 bp, synthetic construct
  source 1..80: mol_type = other DNA
acctactggtgggcatggccacaatgtgctccgcgctctacgtgggtgacatgtgtggggctgtctttctcgtgggacaa

SEQ ID NO: 137312 - DNA, 80 bp, synthetic construct
  source 1..80: mol_type = other DNA
accagaacctcaagtaggtgaagaaaactggcaagagtctgaagccttctatggaggcagagctcttaagaaagacacaa

SEQ ID NO: 137313 - DNA, 80 bp, synthetic construct
  source 1..80: mol_type = other DNA
cctggagctgggtctggcgcggcagccgcttctgcgggttcgaacggcaacgcgcgactatgccggtctgtatgtcctgc

SEQ ID NO: 137314 - DNA, 80 bp, synthetic construct
  source 1..80: mol_type = other DNA
ataggacaaaaaatcaccaatcagggcgtgcaagtgggctcagactccaacaatcgcgatgtgtttgccgataaaacgta

SEQ ID NO: 137315 - DNA, 80 bp, synthetic construct
  source 1..80: mol_type = other DNA
gtggtgaggagcccctttcctagcttagggagtttgcatagcttgccgggctcggtgaacagcggcagggtgagccggcc

SEQ ID NO: 137316 - DNA, 80 bp, synthetic construct
  source 1..80: mol_type = other DNA
gcctgattataatcctccacttttggagaactggaagaggccggagtactcagcacctgtggtacacgggtgcccattgc

SEQ ID NO: 137317 - DNA, 80 bp, synthetic construct
  source 1..80: mol_type = other DNA
actttgctggcagtctcaggagtgtacccaatgtcaataccagcaactctttttgtgtggtacttttggcagaaaaagaa

SEQ ID NO: 137318 - DNA, 80 bp, synthetic construct
  source 1..80: mol_type = other DNA
acatgttcagagaattgaaacctggatcttgagacatccaggctttaccataatggcagcaatcctggcatacaccatag

SEQ ID NO: 137319 - DNA, 80 bp, synthetic construct
  source 1..80: mol_type = other DNA
ttaaaaacccacaaatcaagcatagctgtaatcaacaaaatctaactttacttaatgctgacaagtctcatgaaaggact

SEQ ID NO: 137320 - DNA, 80 bp, synthetic construct
  source 1..80: mol_type = other DNA
aaatcaatagggtggcagcatgcctcagaaagcttggggttccacctctgagagcttggagacatcgggcccgagctgtt

SEQ ID NO: 137321 - DNA, 80 bp, synthetic construct
  source 1..80: mol_type = other DNA
gggaattacctcatcgccagcaccatgagcaaggagattcccacgccttacatgtggagctatcagcctcagatgggcct

SEQ ID NO: 137322 - DNA, 80 bp, synthetic construct
  source 1..80: mol_type = other DNA
ccgccgcgtccgacgagcgcagcaccgcacagaaagctcatccaagtttttacaataggtacagcccaacaccaccatat

SEQ ID NO: 137323 - DNA, 80 bp, synthetic construct
  source 1..80: mol_type = other DNA
tttgctgcggttgaaacccaccctccacggaccgacgcccctcctgtacaggctgggcgccgtccagaacgaggtgacac

SEQ ID NO: 137324 - DNA, 80 bp, synthetic construct
  source 1..80: mol_type = other DNA
gaaagggcgcacccggcccatgtttgtgtgccgcttcgagcgagcggacgacgtcgccgtgctccaagacgccctgggcc

SEQ ID NO: 137325 - DNA, 80 bp, synthetic construct
  source 1..80: mol_type = other DNA
gtccctagagaccaccatgaggtcccccgtgttcaccgacaattctagccctccatcagtgccccaaagctaccaggtgg

SEQ ID NO: 137326 - DNA, 80 bp, synthetic construct
  source 1..80: mol_type = other DNA
gctaaatatgagccgcgacaggaacctgtaggcaaactccaccgaagtctccccctgagtctttacaaagctgtcgtcac

SEQ ID NO: 137327 - DNA, 80 bp, synthetic construct
  source 1..80: mol_type = other DNA
cgacatcctggaccaggcggcggagcgggcgggcgagttcgcctacgggaagcggtcgcgcgaagaggagctgatctcgc

SEQ ID NO: 137328 - DNA, 80 bp, synthetic construct
  source 1..80: mol_type = other DNA
tctcgtggccttcaagatcatgagtggcgaggtaccatctacagaggacctcatcaatttactgcctgctgttctatcgc

SEQ ID NO: 137329 - DNA, 80 bp, synthetic construct
  source 1..80: mol_type = other DNA
atggtgtacgctaccacctcccgcagcgcgtctcaaagacagaaaaaagtcacctttgacaggatgcagattcttgacga

SEQ ID NO: 137330 - DNA, 80 bp, synthetic construct
  source 1..80: mol_type = other DNA
gggtggggtgctgtggaacacgctgacgatttcaccaacgttgcagacatgaggccctactgttggcactacccgcctag

SEQ ID NO: 137331 - DNA, 80 bp, synthetic construct
  source 1..80: mol_type = other DNA
cgtctcagtagcacacgacggtctcgggaaaaggtattattacttgactcgggacccagtgaccccgttggcccgggctg

SEQ ID NO: 137332 - DNA, 80 bp, synthetic construct
  source 1..80: mol_type = other DNA
gatggcgggacggcagggtccctaggttgtggtgccctgctattgataaccatcttaacattgtccccttggtacaaacg

SEQ ID NO: 137333 - DNA, 80 bp, synthetic construct
  source 1..80: mol_type = other DNA
ctgttgttgtttgccggcgtcgatgcgagtacctacaccaccggggggagtgctgctcggaccacggctgcactcgccgg

SEQ ID NO: 137334 - DNA, 80 bp, synthetic construct
  source 1..80: mol_type = other DNA
cgggttggtgtttcggttttccgaggttgtcgtgtatgcggcgctagggggtgccgtgtggatttcgttggcgcaggtgc

SEQ ID NO: 137335 - DNA, 80 bp, synthetic construct
  source 1..80: mol_type = other DNA
ctgcgacaggcttaagaggatggcagtgagtggagatgactgtgttgtccgacccattgatgacaggtttggcctggctc

SEQ ID NO: 137336 - DNA, 80 bp, synthetic construct
  source 1..80: mol_type = other DNA
gacagacaatggttgttggtatggcatggagattaggccacagagacatgatgaaaaaactcttgtgcagtcacaggtga

SEQ ID NO: 137337 - DNA, 80 bp, synthetic construct
  source 1..80: mol_type = other DNA
gtgctcaatgcggcatcactggctgggacggatggtgtagttgccttcctcgcattcttctgtgcggcttggtacataaa

SEQ ID NO: 137338 - DNA, 80 bp, synthetic construct
  source 1..80: mol_type = other DNA
gcagaaggtgactggccttttttccccggggtctcagcagcgcattcagctcattcgtaccaacggcagttggcacgtca

SEQ ID NO: 137339 - DNA, 80 bp, synthetic construct
  source 1..80: mol_type = other DNA
cggtcagtgtggcctcatcggagccacttgacgaggaggcagtagacactgacgcagattcctgcagttctatgcccccc

SEQ ID NO: 137340 - DNA, 80 bp, synthetic construct
  source 1..80: mol_type = other DNA
cccacattgatgcccattttctctcacagacaaaacaatcaggagagaattttgcgtaccttgttgcctatcaggccacg

SEQ ID NO: 137341 - DNA, 80 bp, synthetic construct
  source 1..80: mol_type = other DNA
atggtagtcattcaaggccataaatctgccctgatatccagtaggaaccagcacactcactctgaggtgaagcaatatca

SEQ ID NO: 137342 - DNA, 80 bp, synthetic construct
  source 1..80: mol_type = other DNA
tcaaagtgccgtatttcgtgcgtgcgcacgctctcctccgtgcttgcatgtttgtgcgtaggatggcgtggggccagtac

SEQ ID NO: 137343 - DNA, 80 bp, synthetic construct
  source 1..80: mol_type = other DNA
cggaccgttgggagctttgctggcctctttaagcttggtgcccaacagaacgtccaattaatcaataccaacggcagctg

SEQ ID NO: 137344 - DNA, 80 bp, synthetic construct
  source 1..80: mol_type = other DNA
tgttcagtccatatctgacatctcgtcttccttcctgggcaggagttcgtcagaatgtagtgggctccaccgtggacgga

SEQ ID NO: 137345 - DNA, 80 bp, synthetic construct
  source 1..80: mol_type = other DNA
tttggagaactgtttcaagacaaccatttgacatcccatgctgttttttctcttacattacggaagaataaaacaacttt

SEQ ID NO: 137346 - DNA, 80 bp, synthetic construct
  source 1..80: mol_type = other DNA
cgtaagaagttaccagatttgatgtaatgtttgtcataaaaaatatgtacatcattatatacgtctgtaattaacacaag

SEQ ID NO: 137347 - DNA, 80 bp, synthetic construct
  source 1..80: mol_type = other DNA
accatactgttggcattatgcgcctagaccctgtgatgtcatttcagcacaacgcgtctgtggcccggtgtattgcttta

SEQ ID NO: 137348 - DNA, 80 bp, synthetic construct
  source 1..80: mol_type = other DNA
aatcttctttggaggcaggagatgggggggaacatcactcgtgtggagtcagagaacaaagtggtcgtactcgattcttt

SEQ ID NO: 137349 - DNA, 80 bp, synthetic construct
  source 1..80: mol_type = other DNA
agaggacgatgtcatctgctgttctatgtcctattcctggacgggggccttaatcacaccctgcgctgccgaggaggaaa

SEQ ID NO: 137350 - DNA, 80 bp, synthetic construct
  source 1..80: mol_type = other DNA
taatcgaaaaactggagatttacaggggggcatgggtaatgaacctatgtacgcacaagttcgtaagccaaaaagtcgaa

SEQ ID NO: 137351 - DNA, 80 bp, synthetic construct
  source 1..80: mol_type = other DNA
gtgactggtgaggtgcaagtactatccacaaccactcagactttcctaggtacaactgtggggggggtcatgtggactgt

SEQ ID NO: 137352 - DNA, 80 bp, synthetic construct
  source 1..80: mol_type = other DNA
ggcggccatctcgcggcgccgatctgtaccgcggccggagtatgcggtggacgctaccctgcgtctggctgagccccggg

SEQ ID NO: 137353 - DNA, 80 bp, synthetic construct
  source 1..80: mol_type = other DNA
cttcgcgtacctcgtggcataccaggctacagtgtgcgccagggccaaagcccccccgccttcttgggatatgatgtgga

SEQ ID NO: 137354 - DNA, 80 bp, synthetic construct
  source 1..80: mol_type = other DNA
ctgcaactccgccgtcactcagacggtggacttcagtctggatcccaccttcaccattgagactactacagtgccccagg

SEQ ID NO: 137355 - DNA, 80 bp, synthetic construct
  source 1..80: mol_type = other DNA
ttcgtggtgggatcacaactcccatgcgagccagagccggacgtggccgtgctaacatccatgctgacagacccatccca

SEQ ID NO: 137356 - DNA, 80 bp, synthetic construct
  source 1..80: mol_type = other DNA
ccaggcatttccaggtggggaaaatggtggtgcgctcgtcagatagcaagcgtaagcgccacccgcgattatgcagtgta

SEQ ID NO: 137357 - DNA, 80 bp, synthetic construct
  source 1..80: mol_type = other DNA
tccaagacaccctggaccagaacctcaactttgagatgtatggatcagtatactccgtgaatcctttggaccttccagcc

SEQ ID NO: 137358 - DNA, 80 bp, synthetic construct
  source 1..80: mol_type = other DNA
tgatgaactggtctcccacggtcaccatgatcgtggcctacgctatgcgtgtccccgaggtgatcatcgacatcatcgcc

SEQ ID NO: 137359 - DNA, 80 bp, synthetic construct
  source 1..80: mol_type = other DNA
gtcagactgcgggcatatttcaacacgcccggcttgcccgtgtgccaggaccatctggaattctgggaggcggtttttac

SEQ ID NO: 137360 - DNA, 80 bp, synthetic construct
  source 1..80: mol_type = other DNA
atgggattattggaaaccacaaagaaagacctgggaattggctatgcagccgccgaaaaccaccaacatgctacgatgct

SEQ ID NO: 137361 - DNA, 80 bp, synthetic construct
  source 1..80: mol_type = other DNA
gggccccgcggcccgaagcaggctcacaaaccggcccccgtccccgggctgcgtctcggggtcagcctcgagctggtcga

SEQ ID NO: 137362 - DNA, 80 bp, synthetic construct
  source 1..80: mol_type = other DNA
tcatactcctgtcgatggtgggtatggcagcggggatgtgcatgtgtgcacgacgcagatgcatcacaccgtatgaactg

SEQ ID NO: 137363 - DNA, 80 bp, synthetic construct
  source 1..80: mol_type = other DNA
gagtgccaatgttacatgataacgttaccgaatcgttgcgtcgtataacagcatcggggggtcgcttaaatcccaccgaa

SEQ ID NO: 137364 - DNA, 80 bp, synthetic construct
  source 1..80: mol_type = other DNA
ggtggagatgagcccgcttttgttttcaacaacacaacttgccatcttgccctgctccttcacaaccatgccagctttgt

SEQ ID NO: 137365 - DNA, 80 bp, synthetic construct
  source 1..80: mol_type = other DNA
tcatgctggtgctagggacaaggaagatgcagttggtggctgaatggagtggctgtgtggagtggcacccagaattgatg

SEQ ID NO: 137366 - DNA, 80 bp, synthetic construct
  source 1..80: mol_type = other DNA
tcagtcccctgagcaactctctcatccgtcaccacaatctggtatactctacaacatcccgcagcgcagcaattcgccag

SEQ ID NO: 137367 - DNA, 80 bp, synthetic construct
  source 1..80: mol_type = other DNA
tcggccaaccccagggtccgttccagggcggccagggcgcgaaactcgttccgcgactcctcgcccccggaggcggccag

SEQ ID NO: 137368 - DNA, 80 bp, synthetic construct
  source 1..80: mol_type = other DNA
actcctcggccagtcagctctcagccccctctctcaaggccacctgcactatacaaggccaccacccagatgcagacctc

SEQ ID NO: 137369 - DNA, 80 bp, synthetic construct
  source 1..80: mol_type = other DNA
tttattaacacccccgaggacatttgcctgggggactttggcgccgcgtgcttcgtgcagggttcccgatcaagcccctt

SEQ ID NO: 137370 - DNA, 80 bp, synthetic construct
  source 1..80: mol_type = other DNA
gcatgcaagccaactgggcaaaagttcttctggtcctgtttctttttgccggagttgacgctcaaacctacaccactggg

SEQ ID NO: 137371 - DNA, 80 bp, synthetic construct
  source 1..80: mol_type = other DNA
gctctttggttgatgttgctcgtgggccaagctgaggcagcgttagagaacctggtaggcctcaacgctgcctcggctgt

SEQ ID NO: 137372 - DNA, 80 bp, synthetic construct
  source 1..80: mol_type = other DNA
aggcgcgcgccctgtcgcgtcaggaggcccgggccgtcgctgctggccgcgcttagcgggtgcgtctcaaaggtacgctg

SEQ ID NO: 137373 - DNA, 80 bp, synthetic construct
  source 1..80: mol_type = other DNA
gtggctacaacatttgtcacaccaatgttgagacatagcattgaaaattcctcagtgaatgtctccctaacagccattgc

SEQ ID NO: 137374 - DNA, 80 bp, synthetic construct
  source 1..80: mol_type = other DNA
aacaacaacaacattcttttcattttcgtcgctgttttgagcggaagccttcaaaacgtgtacctgcctggtttccattt

SEQ ID NO: 137375 - DNA, 80 bp, synthetic construct
  source 1..80: mol_type = other DNA
tgacacctttagctttgtaagcctattcgctccaggctcaaagcaaaacctgcaattgatcaacaccaatggctcgtggc

SEQ ID NO: 137376 - DNA, 80 bp, synthetic construct
  source 1..80: mol_type = other DNA
ccaagccaccgtctgctcacgagcgaaagctccccccccgtcctgggaccaaatgtggaaatgtctcatcagactcaagc

SEQ ID NO: 137377 - DNA, 80 bp, synthetic construct
  source 1..80: mol_type = other DNA
gttacgaccgtcgtgtatataaccacgcggtattggccccacgtggtcacgtccccgaggggggtgagcgagtgaagcaa

SEQ ID NO: 137378 - DNA, 80 bp, synthetic construct
  source 1..80: mol_type = other DNA
tgacacacatagacgcccactttctgtcccagaccaaacaatcaggggagaatttcccttacctcgtggcttaccaagct

SEQ ID NO: 137379 - DNA, 80 bp, synthetic construct
  source 1..80: mol_type = other DNA
ggtggctacctctccgcgtaggcgctcgttggtccagcagaggcggccgcccttgcgcgagcagaatggcggtaggtggt

SEQ ID NO: 137380 - DNA, 80 bp, synthetic construct
  source 1..80: mol_type = other DNA
tatctagattacatgacatcaatgaagagattcaagaatgagagtgatcctgaaggagcactctggtaagtcaacacact

SEQ ID NO: 137381 - DNA, 80 bp, synthetic construct
  source 1..80: mol_type = other DNA
tctaggattcgaacgacgacaagccatacgaatgtcgggacaataccttggggcctctttaggaggtgcgtttctggcgg

SEQ ID NO: 137382 - DNA, 80 bp, synthetic construct
  source 1..80: mol_type = other DNA
tacaacgctctagctcccaagggtgcccccaactcatgcgagtgggatgaagatgatactcaggtacaggtagcggctga

SEQ ID NO: 137383 - DNA, 80 bp, synthetic construct
  source 1..80: mol_type = other DNA
cggcgaagccaaaccaatttatgcagataaactataccaaccagaacctcaggtgggagatgaaacttggactgacacag

SEQ ID NO: 137384 - DNA, 80 bp, synthetic construct
  source 1..80: mol_type = other DNA
ccgacaaggaggtcctatatgaggcgtttgatgagatggaggagtgcgcctctagggctgccctcgtagaggaggggcaa

SEQ ID NO: 137385 - DNA, 80 bp, synthetic construct
  source 1..80: mol_type = other DNA
ctaggcaggtctgtggccccgtgtactgcttcacgcccagccctgtggtcgtcggcacaaccgacgcgcttggggtaccc

SEQ ID NO: 137386 - DNA, 80 bp, synthetic construct
  source 1..80: mol_type = other DNA
gaaggtagtcccccttaaacaggcgatggcagcactccggaagataaagaaggcggtcagcaccctgatgattggcttgc

SEQ ID NO: 137387 - DNA, 80 bp, synthetic construct
  source 1..80: mol_type = other DNA
cgtagaccccgacgcctatccctgttattttttcaaaagcgcctgtcggccccgcgcgccgcccgtctgtgcgggcgacg

SEQ ID NO: 137388 - DNA, 80 bp, synthetic construct
  source 1..80: mol_type = other DNA
tgacgaggtattcggctccccccggagacgccccgcagccagcatatgatctggagcacatcacatcatgctcatccaac

SEQ ID NO: 137389 - DNA, 80 bp, synthetic construct
  source 1..80: mol_type = other DNA
ggatgctgacctgcaactgggtgagcttatctgaaacaccatctaacaggaataaccgggatacaaaccacgggtggaga

SEQ ID NO: 137390 - DNA, 80 bp, synthetic construct
  source 1..80: mol_type = other DNA
ccccgcgcggcgtaggggcgacacccgcgccagcctcttgagtcctaggccgatcagcactcttaagggatcgtctggtg

SEQ ID NO: 137391 - DNA, 80 bp, synthetic construct
  source 1..80: mol_type = other DNA
ttatggcacttctttcgtgcctaactgtaccagcctcagcggtcaattatgccaacaggagcggcatctaccatctcacc

SEQ ID NO: 137392 - DNA, 80 bp, synthetic construct
  source 1..80: mol_type = other DNA
cactccattcttactctccacatgagctcaaccgagtagcggaggccctcaggaagcttggggcgccccccctacgagct

SEQ ID NO: 137393 - DNA, 80 bp, synthetic construct
  source 1..80: mol_type = other DNA
accagttaatgaaggagaacagcctaaagaactggatatagattttgcttactttgacactccaggtggcaatataacac

SEQ ID NO: 137394 - DNA, 80 bp, synthetic construct
  source 1..80: mol_type = other DNA
caagaccatctagagttttgggagagcgtcttcactggactgactcacatagatgcccactttctgtcacagactaagca

SEQ ID NO: 137395 - DNA, 80 bp, synthetic construct
  source 1..80: mol_type = other DNA
cacggcgaggttggaccgccgcgcgaggagctgcagcagggggcacggcccgcaggtgtacgggtccagcgacagcgaca

SEQ ID NO: 137396 - DNA, 80 bp, synthetic construct
  source 1..80: mol_type = other DNA
attgataaaaatggtcttcagattggaacagatgaaactaaacccgataacaaggaaatttatgcagacaaaacattcca

SEQ ID NO: 137397 - DNA, 80 bp, synthetic construct
  source 1..80: mol_type = other DNA
gcgtggcaggagcgctcgtcgcctttaagatcatgagcggcgagactccctcttgtgaggacatggtcaacctacttccg

SEQ ID NO: 137398 - DNA, 80 bp, synthetic construct
  source 1..80: mol_type = other DNA
ttttaaaagaatcaaaccttgatggaacatattggaactttagaagtggcagcaataatgttccaaagccatatgaaaat

SEQ ID NO: 137399 - DNA, 80 bp, synthetic construct
  source 1..80: mol_type = other DNA
tcttacagttgtagctaatgcaaatttaacaagcagaaaatttaaatcatatagttataacaataatgatggatatgaaa

SEQ ID NO: 137400 - DNA, 80 bp, synthetic construct
  source 1..80: mol_type = other DNA
cgcatcgagcgccgccgggcccgcgcggcggtggccggccgcgacgccacgggccgcttcacggccgggcagccccggcg

SEQ ID NO: 137401 - DNA, 80 bp, synthetic construct
  source 1..80: mol_type = other DNA
tatttcacagcgtgtcccgggcccgaccccgcatctacctcttttgcctactcctgctcgtagcaggggtaggcatcttc

SEQ ID NO: 137402 - DNA, 80 bp, synthetic construct
  source 1..80: mol_type = other DNA
ttttttctcctttttttttccatagttcttggtttaggaggtattcctgtttatccttccaatactcctctacagggaaa

SEQ ID NO: 137403 - DNA, 80 bp, synthetic construct
  source 1..80: mol_type = other DNA
aagggctcctctggaggtcccatcatgtgcccctcgggacacgtggtgaggatcttcagggcggctgtgtgcaccagagg

SEQ ID NO: 137404 - DNA, 80 bp, synthetic construct
  source 1..80: mol_type = other DNA
aggcatgtttgacacctcagtgctctgtgagtgctatgacgccggctgcgcatggtacgagctgacaccagctgagacat

SEQ ID NO: 137405 - DNA, 80 bp, synthetic construct
  source 1..80: mol_type = other DNA
ccaaagttctctctagtcgcaccttctaaacatgtccatcctcatctctcccgataacaacaccggctggggactgggct

SEQ ID NO: 137406 - DNA, 80 bp, synthetic construct
  source 1..80: mol_type = other DNA
cacagatggtagatttcagcctggatcctaccttttccatcgagaccacgactgtgccccaggatgctgtagccagaagt

SEQ ID NO: 137407 - DNA, 80 bp, synthetic construct
  source 1..80: mol_type = other DNA
gcaaaagttgccgtggtgctcatgctcttcgcgggggtggacgccaggacctacatcaccggtgatacagcagcccatgc

SEQ ID NO: 137408 - DNA, 80 bp, synthetic construct
  source 1..80: mol_type = other DNA
cctaccccgccctcaacttgccacccaaagttatgaaatcggtcatggatcagctgctcatcaagagagctgagcccctg

SEQ ID NO: 137409 - DNA, 80 bp, synthetic construct
  source 1..80: mol_type = other DNA
gggagactgccattacgtagtggggctcaccgctgacgggctaaagtgcccctgccaggttcctgcaccggagttcttca

SEQ ID NO: 137410 - DNA, 80 bp, synthetic construct
  source 1..80: mol_type = other DNA
gccagggcggcatcgcgcgccgcgagccggaccgccgtggcggccacattggggtggacctcgaacagctgcgccaggtc

SEQ ID NO: 137411 - DNA, 80 bp, synthetic construct
  source 1..80: mol_type = other DNA
acgccgccatgcaggcggccgagctccccgtcgatatcgagcgccggttacgcccgatcgaacggaacgtgcacgagatc

SEQ ID NO: 137412 - DNA, 80 bp, synthetic construct
  source 1..80: mol_type = other DNA
aactcactgctgcgtcaccataacatggtgtacgccacaacctctcgctctgccgtcactcggcagaagaaggtgacctt

SEQ ID NO: 137413 - DNA, 80 bp, synthetic construct
  source 1..80: mol_type = other DNA
actggtctgatccacctgcaccagaacatcgttgatgtccaatacctgtatggcgtcgggtcagcggtggtgtcatgggc

SEQ ID NO: 137414 - DNA, 80 bp, synthetic construct
  source 1..80: mol_type = other DNA
cgcaacctcgctccattttctaaatgccatgtcaaaggtacggaaggatatccaggagtggaaaccttctactggctggt

SEQ ID NO: 137415 - DNA, 80 bp, synthetic construct
  source 1..80: mol_type = other DNA
gacgacgggcgcgcccaggagcactgccgccagcaccaggtccatggccgtaacgcgcgccgcgggtgtgcggtgtgtgg

SEQ ID NO: 137416 - DNA, 80 bp, synthetic construct
  source 1..80: mol_type = other DNA
gggatgatgctcgccgagcaattcaaacagaaagcgcttggcatcctgcaaacagcaaccaagcaggctgaggtgctcac

SEQ ID NO: 137417 - DNA, 80 bp, synthetic construct
  source 1..80: mol_type = other DNA
ttctagttagtgtagattggggaaaaaatctaaaattagagggacctaaagaaacaccagttgaatggtggtgtgggaga

SEQ ID NO: 137418 - DNA, 80 bp, synthetic construct
  source 1..80: mol_type = other DNA
atagacactaccatcatggccaagaacgaggttttctgcgttcagcctgagaaggggggtcgtaagccagctcgtctcat

SEQ ID NO: 137419 - DNA, 80 bp, synthetic construct
  source 1..80: mol_type = other DNA
ccgtagtctggagaagcattgccagggttacgtcgcggcagaacccggttcgcagacggccgcggcgagcgagccccctt

SEQ ID NO: 137420 - DNA, 80 bp, synthetic construct
  source 1..80: mol_type = other DNA
agggtggttgctctccccccgaagctctcggcctaattggggccccaatgacccccggcggaaatcccccaatttgggta

SEQ ID NO: 137421 - DNA, 80 bp, synthetic construct
  source 1..80: mol_type = other DNA
gatttgtgggatctcctccgtttcgagaatggaaaacatcatgtggaaatcagtggaaggggagcttaatgcaatcctag

SEQ ID NO: 137422 - DNA, 80 bp, synthetic construct
  source 1..80: mol_type = other DNA
ggtacctgcgaaccaaatcctcggctgaacttttacccggtttttgcgataccagaagctctggcaacataccacatttt

SEQ ID NO: 137423 - DNA, 80 bp, synthetic construct
  source 1..80: mol_type = other DNA
tccgcccaccgaccgttcattaaccgtttgatggactacttccatcgcgcggccgccatggacggggagtattttaccaa

SEQ ID NO: 137424 - DNA, 80 bp, synthetic construct
  source 1..80: mol_type = other DNA
atcatcatgatcatgttttcaggagtcgatgccagtacacgtaccatcgcgggcagtgtagctcatagtaccctcaactt

SEQ ID NO: 137425 - DNA, 80 bp, synthetic construct
  source 1..80: mol_type = other DNA
aaggagacaccactacaggagtctaccgaattatggctagagggattcttggcacttaccaagccggcgtcggagtcatg

SEQ ID NO: 137426 - DNA, 80 bp, synthetic construct
  source 1..80: mol_type = other DNA
tgaggagaatgaatggatggaagaaaaaacaccagttgagaggtggagtgatgtcccatactctgggaagagagaggaca

SEQ ID NO: 137427 - DNA, 80 bp, synthetic construct
  source 1..80: mol_type = other DNA
ccagcagcgtctggcccagggcgtacaggtcaaccgctagcccgacgtcgtgcttcaggcggtggttggtaaattcggcc

SEQ ID NO: 137428 - DNA, 80 bp, synthetic construct
  source 1..80: mol_type = other DNA
aatttttacgaagaccaatccaaacccccaaaagcgccactaacggcttgcgtcattacgcagggaaaaattctagccca

SEQ ID NO: 137429 - DNA, 80 bp, synthetic construct
  source 1..80: mol_type = other DNA
gaggacggctgggtaaaggttcaccccacccccggtacgatgctgttccgcgagattctccacgggcagctggggtatac

SEQ ID NO: 137430 - DNA, 80 bp, synthetic construct
  source 1..80: mol_type = other DNA
tctgtggtcgtcgacgattgcagcatgcgggcggtgctccggcgactgcaggtcggcgagggcaccctcaagttcttcct

SEQ ID NO: 137431 - DNA, 80 bp, synthetic construct
  source 1..80: mol_type = other DNA
ctttggcgccaaaaggcgctcctaatgcttcacaatggtcagatactaataaggcaaatacctttgctcaggcaccgtat

SEQ ID NO: 137432 - DNA, 80 bp, synthetic construct
  source 1..80: mol_type = other DNA
tccctcggcggagccgtcatctgtttattaaccatcttgacgctgtccccgtggtacaagcgatggctggcttggatgat

SEQ ID NO: 137433 - DNA, 80 bp, synthetic construct
  source 1..80: mol_type = other DNA
gcacgataggggggtcggtcgctcgctgcaccggcggcattacgtccctatttacagccggaccagctcagagaatccag

SEQ ID NO: 137434 - DNA, 80 bp, synthetic construct
  source 1..80: mol_type = other DNA
tttgacataatagccggagcccattggggcatcctggcgggcttggcctattactccatgcagggcaattgggccaaggt

SEQ ID NO: 137435 - DNA, 80 bp, synthetic construct
  source 1..80: mol_type = other DNA
gcgctgtgactaacatactcagttccctcaccatcaccagcctcttgcggaagctccatcagtggatcactgaggactac

SEQ ID NO: 137436 - DNA, 80 bp, synthetic construct
  source 1..80: mol_type = other DNA
atgaagaaatggtaacaaaccacatgaaaggagaacacaagaaactagccgaggccatattcaaattgacgtaccaaaac

SEQ ID NO: 137437 - DNA, 80 bp, synthetic construct
  source 1..80: mol_type = other DNA
ggcaaattcctcgcggatggaggctgctcaggcggggcctatgacatcattatatgcgatgaatgccactctgtggactc

SEQ ID NO: 137438 - DNA, 80 bp, synthetic construct
  source 1..80: mol_type = other DNA
catgaacacttggcagggaaccttccccatcaactgttacacagagggccagtgtgtgccaaaaccggcgcctaacttca

SEQ ID NO: 137439 - DNA, 80 bp, synthetic construct
  source 1..80: mol_type = other DNA
cctagcacaggggtggggttagggccgggtccccacacccaaacgcaccaaacagatgcaggcagtgggtcgagtacagc

SEQ ID NO: 137440 - DNA, 80 bp, synthetic construct
  source 1..80: mol_type = other DNA
tggatatactggtgggcgcagccacgttgtgctcagcactatacgtcggggacctctgcgtggccgtgttccttgtggga

SEQ ID NO: 137441 - DNA, 80 bp, synthetic construct
  source 1..80: mol_type = other DNA
agctgagagggttatagaccccagacgttgcatgaaaccagttatactaacagatggcgaagagcgggtgatcttggcag

SEQ ID NO: 137442 - DNA, 80 bp, synthetic construct
  source 1..80: mol_type = other DNA
gaagcgttaacgtgttgaggaaaagacagcttaggagaacaagagctggggatggccaaaggagccgtccttaaaggaaa

SEQ ID NO: 137443 - DNA, 80 bp, synthetic construct
  source 1..80: mol_type = other DNA
gacggccaagcgcaggctagatcgagggtctccgccctctctagctagctcctcggccagccaactctcggccccctccc

SEQ ID NO: 137444 - DNA, 80 bp, synthetic construct
  source 1..80: mol_type = other DNA
aacacagatttgaagcggcgtgcaacttctcccgaggtgatcgctgcgccctagaagacagggacagaagccaacaaagc

SEQ ID NO: 137445 - DNA, 80 bp, synthetic construct
  source 1..80: mol_type = other DNA
gagcatgccgttgatactgttgaccaccgatgttttaaacgcactttgaacgtttgttgttccggacattgcccccccgt

SEQ ID NO: 137446 - DNA, 80 bp, synthetic construct
  source 1..80: mol_type = other DNA
tctgttcacaatctgccggtaccatgggaagcgctggttgaacatgcacccgtaaatgactctcctgaaccacacggcca

SEQ ID NO: 137447 - DNA, 80 bp, synthetic construct
  source 1..80: mol_type = other DNA
gcctatttctcgggcggcctgggaaaccgcccgacacactccggtgaattcctggttgggcaatatcatcatgtacgctc

SEQ ID NO: 137448 - DNA, 80 bp, synthetic construct
  source 1..80: mol_type = other DNA
cccccgtagtcgtgggcaccacagataaaacggggctccccacttacacctggggagagaacgagaccgatgtgttcctg

SEQ ID NO: 137449 - DNA, 80 bp, synthetic construct
  source 1..80: mol_type = other DNA
tgctacgcatctggaacaaggtctggattttggacaaccctcacatggaaaacaaacaaatggtggatgaatggagagat

SEQ ID NO: 137450 - DNA, 80 bp, synthetic construct
  source 1..80: mol_type = other DNA
ggttcgcatgttcattgggggcgttgagcacaggttcgatgccgcctgtaattggacgcgtggcgaccgttgcgacttgt

SEQ ID NO: 137451 - DNA, 80 bp, synthetic construct
  source 1..80: mol_type = other DNA
ttcactgaaactggcccgcgccccacccctgcgcgatgtggataaaaagccagcgcgggtggtttagggtaccacaggtg

SEQ ID NO: 137452 - DNA, 80 bp, synthetic construct
  source 1..80: mol_type = other DNA
atgtggatctgatggtgggtgccgccgcgttctgctccgctatgtacataggtgatctgtgcggaggtgctttcttggtt

SEQ ID NO: 137453 - DNA, 80 bp, synthetic construct
  source 1..80: mol_type = other DNA
ccagttgctcctagaggttatcatggggccacattggggcgttttggaggcgttagtatactacagcatggtggcgaact

SEQ ID NO: 137454 - DNA, 80 bp, synthetic construct
  source 1..80: mol_type = other DNA
caagttgtggatttcagcctcgaccctacattttcaattgagacaaccaccgttcctcaggatgcagtgtcacgcagcca

SEQ ID NO: 137455 - DNA, 80 bp, synthetic construct
  source 1..80: mol_type = other DNA
cagttcatcggtggcagaggttcttgccaagctggctgaaaaatcattcccgcctaccccacaactgtcggagcagaact

SEQ ID NO: 137456 - DNA, 80 bp, synthetic construct
  source 1..80: mol_type = other DNA
agctttgtcaactggcctgctgcatctccaccaaaacatcgtggacgtgcagtatttatacggcctatcaccagccatca

SEQ ID NO: 137457 - DNA, 80 bp, synthetic construct
  source 1..80: mol_type = other DNA
acgatttcttccaatgttgcctatgccatacaatttgaatggaatctaaatgcaaaagaatctccagaaagcaacatagc

SEQ ID NO: 137458 - DNA, 80 bp, synthetic construct
  source 1..80: mol_type = other DNA
ctctaggtgggattcaactcaacaaagaagcatcctgtccgccgctatggaagtgatggtgcggttctctgcagaaccag

SEQ ID NO: 137459 - DNA, 80 bp, synthetic construct
  source 1..80: mol_type = other DNA
agtgtcgcagctagaggatacatttcaaccagggtggaaatgggagaggcagcagctatcttcatgactgcaacccctcc

SEQ ID NO: 137460 - DNA, 80 bp, synthetic construct
  source 1..80: mol_type = other DNA
cttaattgcaatgacagcttggagacaggcttcatcgccggcctgttctacagccataagttcaacagctctgggtgtcc

SEQ ID NO: 137461 - DNA, 80 bp, synthetic construct
  source 1..80: mol_type = other DNA
tcaatctaaatgctgggtatcggctacgcctacactggcggttccgaacgcctcggcgcccttcaccggattccgcagac

SEQ ID NO: 137462 - DNA, 80 bp, synthetic construct
  source 1..80: mol_type = other DNA
tcctttagctcaatgccccccctggagggggagcccggggacccggacttgagtacaggttcctggtccactgttagcga

SEQ ID NO: 137463 - DNA, 80 bp, synthetic construct
  source 1..80: mol_type = other DNA
cgttgtctgctgctccatgtcctactcgtggacgggggctctcatcacgccttgcgctgcggaggaggagaaactgccca

SEQ ID NO: 137464 - DNA, 80 bp, synthetic construct
  source 1..80: mol_type = other DNA
atagcagtagctccgggaaaaccagccatcaatgtccagacaacaccaggagtgttcaagaccccgtttgggaccattgg

SEQ ID NO: 137465 - DNA, 80 bp, synthetic construct
  source 1..80: mol_type = other DNA
tcagcacgggtggccttaaatagggaaatgttctgattagtgcgggaactggacttggggtctataatccacacagtttc

SEQ ID NO: 137466 - DNA, 80 bp, synthetic construct
  source 1..80: mol_type = other DNA
ttttgcagttttgtggtttaaagaattttgtattgtgattttttttaaaaggtcctgtgtctgaacctgagcctgagccc

SEQ ID NO: 137467 - DNA, 80 bp, synthetic construct
  source 1..80: mol_type = other DNA
ttgtctactattaatctttgacatcactaagtggttgctggtgctgatgtgtcccttgtatctcctcaggtatagcatgc

SEQ ID NO: 137468 - DNA, 80 bp, synthetic construct
  source 1..80: mol_type = other DNA
cgttctcagggaagtggggacgaagcctggaggaaagatgtacgctgacgacacggcaggctgggataccagaatcacta

SEQ ID NO: 137469 - DNA, 80 bp, synthetic construct
  source 1..80: mol_type = other DNA
tttgccactgctaagctgtgaggcagtgcaggctgggacagccgacctccaggttgcgaaaaacctggtttctgggacct

SEQ ID NO: 137470 - DNA, 80 bp, synthetic construct
  source 1..80: mol_type = other DNA
tgtggacctaatggtgggcgctgctgctttctgctccgccatgtatgtgggcgatctgtgcggcggtgttttcctgctcg

SEQ ID NO: 137471 - DNA, 80 bp, synthetic construct
  source 1..80: mol_type = other DNA
tggatcaccgaagactgcccagtcccatgcgcgggctcttggctgcgcgacatatgggactggatctgtaccatcttgac

SEQ ID NO: 137472 - DNA, 80 bp, synthetic construct
  source 1..80: mol_type = other DNA
cgcaaaatctattgactttatacctgttgagtcgctcgatatcatcattagatcccccaactttactgacaacagctcac

SEQ ID NO: 137473 - DNA, 80 bp, synthetic construct
  source 1..80: mol_type = other DNA
tatgaggatcacagggcctaaaacctgcatgaacacctggcaggggacctttcctatcaattgctacacggagggccagt

SEQ ID NO: 137474 - DNA, 80 bp, synthetic construct
  source 1..80: mol_type = other DNA
cgctgagcgacgatctgggggtttaccgcaacgaccgcattcataaggccgtgagtgccagccgccgccgcgaactgagc

SEQ ID NO: 137475 - DNA, 80 bp, synthetic construct
  source 1..80: mol_type = other DNA
cgtctcgacccctactggggtagtgtgaaagaggaccgcctatgttatggagggccatggaagcttgggcatcggtggaa

SEQ ID NO: 137476 - DNA, 80 bp, synthetic construct
  source 1..80: mol_type = other DNA
gtttcgattaccgcggaggtttcgattaccgtgttttttacctaaatttccgcgtaccgtgtgaaagtcttctgttttta

SEQ ID NO: 137477 - DNA, 80 bp, synthetic construct
  source 1..80: mol_type = other DNA
acgtgttccgatgagggtgattccgtcatctgctgctctatgtcatactcctggactggggccttgataaccccttgcag

SEQ ID NO: 137478 - DNA, 80 bp, synthetic construct
  source 1..80: mol_type = other DNA
taccgttagccctgctcaaaggggggaggcatcttatcttttgccattccaagaaaaagtgtgatgagatagcaaccaaa

SEQ ID NO: 137479 - DNA, 80 bp, synthetic construct
  source 1..80: mol_type = other DNA
ggtataaggggatttggcggagggacggcgtcatgaacaccgtatgcccctgtggagctcaaattgccggacatgtcaag

SEQ ID NO: 137480 - DNA, 80 bp, synthetic construct
  source 1..80: mol_type = other DNA
aggggtacaagggagtatggcgaggtgatggggtgatgacaacgcgttgcccttgtggagaagactttacaggacacgta

SEQ ID NO: 137481 - DNA, 80 bp, synthetic construct
  source 1..80: mol_type = other DNA
gcttaggacgacgctgctggactttgcccacgggttggtcgcctgctttgcgccgggcggcccgagcggcccgtcaagct

SEQ ID NO: 137482 - DNA, 80 bp, synthetic construct
  source 1..80: mol_type = other DNA
acacacctggattgcccgtgtgccaagaccacctggagttctgggaggccgtgttcactggcctcacgcatattgatgcc

SEQ ID NO: 137483 - DNA, 80 bp, synthetic construct
  source 1..80: mol_type = other DNA
accgtccgtgggttcacgagcctcttttcatctgggtcgcagcagaagctccagctcattaacaccaatggcaggtggca

SEQ ID NO: 137484 - DNA, 80 bp, synthetic construct
  source 1..80: mol_type = other DNA
acaatcagaaagaattcgacattgacttggctttctttgatccaaatgaaatcaacactccagatgttgtgctttacact

SEQ ID NO: 137485 - DNA, 80 bp, synthetic construct
  source 1..80: mol_type = other DNA
atgaccggtttcactggcgactttgactcagtgatagactgcaatgtatgtgtcactcagacaattgacttcagccttga

SEQ ID NO: 137486 - DNA, 80 bp, synthetic construct
  source 1..80: mol_type = other DNA
ttcaagacatggctcaaagctaaactactgccccgcatgcctggagtaccctttctctcctgccaaaggggatacagagg

SEQ ID NO: 137487 - DNA, 80 bp, synthetic construct
  source 1..80: mol_type = other DNA
cccccctggcagactgggctgccgacggtctcagtgatttggcggtagctcttgagccagttgtgttcacaccaatggag

SEQ ID NO: 137488 - DNA, 80 bp, synthetic construct
  source 1..80: mol_type = other DNA
tcaccaacccgcaggacatgagaccttattgctggcactacccgccttcccagtgcgggatagtgccggccgcctctgtc

SEQ ID NO: 137489 - DNA, 80 bp, synthetic construct
  source 1..80: mol_type = other DNA
cgagcccagagcagtcctccaccggcccagactcaggccatggtacctccgacgcggcactcgtgtcgtcagccgagagg

SEQ ID NO: 137490 - DNA, 80 bp, synthetic construct
  source 1..80: mol_type = other DNA
accttacactgccccactgactgtttccgcaagcatccggaagccacatactcacggtgtggctctggtccctggatcac

SEQ ID NO: 137491 - DNA, 80 bp, synthetic construct
  source 1..80: mol_type = other DNA
acctgggcccagcccgggtacccatggcctctttatgggaatgagggctgtggttgggcaggttggctcctgtccccccg

SEQ ID NO: 137492 - DNA, 80 bp, synthetic construct
  source 1..80: mol_type = other DNA
tgaagcttcccaacactttcaccgccttggccagcagccgccgcgtccgacgagcgcagcaccgcacagaaagctcatcc

SEQ ID NO: 137493 - DNA, 80 bp, synthetic construct
  source 1..80: mol_type = other DNA
acatgtgtaccctcatggccatggaccttggtgaactatgtgaagacacaatcacttataactgtcctcttctcaggcag

SEQ ID NO: 137494 - DNA, 80 bp, synthetic construct
  source 1..80: mol_type = other DNA
acactgcccggcaatcctgccgtagcagctctgatgtcattctcggcttccttaaccagcccacttaaatcatcccagac

SEQ ID NO: 137495 - DNA, 80 bp, synthetic construct
  source 1..80: mol_type = other DNA
gcagctcctgtgcatctgatgaaataaaagtcccgtcgatgcggattccccttaaaacatcagccaggacattgtaggcc

SEQ ID NO: 137496 - DNA, 80 bp, synthetic construct
  source 1..80: mol_type = other DNA
cgtgcgacgcgtcgcagcgccctttgaaccggcggcacaacaggttcgtcacctgggaaaactgtgccggccactgcccg

SEQ ID NO: 137497 - DNA, 80 bp, synthetic construct
  source 1..80: mol_type = other DNA
gatggggtaatgcacacaacatgtccgtgcggcgcagagctagccggccacgtcaaaaacggctcgatgaggatcgtcgg

SEQ ID NO: 137498 - DNA, 80 bp, synthetic construct
  source 1..80: mol_type = other DNA
gaccctgcaaagggtggaaagaaatcagcccgcctcatagtattccctgacctcagtgttagggtatgcgagaagatggc

SEQ ID NO: 137499 - DNA, 80 bp, synthetic construct
  source 1..80: mol_type = other DNA
aatgggtacgttcatttttctcatgaacaggaaaggagttggtaaaatgggactgggagcatttgtgatgactcttgcaa

SEQ ID NO: 137500 - DNA, 80 bp, synthetic construct
  source 1..80: mol_type = other DNA
aagcgacctctacttggtaacgaggtccggtgatgtcattcctgcacgccgccggggtgatagccgagcggggcttatta

SEQ ID NO: 137501 - DNA, 80 bp, synthetic construct
  source 1..80: mol_type = other DNA
gcgcctatccctgcgtacgcgcagcagaacccgaggatgctaggcaccataatcacaagcctcaccggcagagacaccaa

SEQ ID NO: 137502 - DNA, 80 bp, synthetic construct
  source 1..80: mol_type = other DNA
ccgcttacgctcaacagacacgaggtctcttgggtactatagtggtgagcatgacggggcgcgataagacagaacaggcc

SEQ ID NO: 137503 - DNA, 80 bp, synthetic construct
  source 1..80: mol_type = other DNA
ggggaaggttctcgtggacatccttgcaggatatggtgcgggcgtggcgggagctctcgtggcatttaagatcatgagcg

SEQ ID NO: 137504 - DNA, 80 bp, synthetic construct
  source 1..80: mol_type = other DNA
caatgaccctatggtacatgtggcaggtgaaaacacaaaggtcaggagccctgtgggacgtcccttcacctgctgccgct

SEQ ID NO: 137505 - DNA, 80 bp, synthetic construct
  source 1..80: mol_type = other DNA
agctgtcaaactttcagggcaaggtgctgatgacaatcaataacaccgacgtggctgatgtgatcaccattcccacctcg

SEQ ID NO: 137506 - DNA, 80 bp, synthetic construct
  source 1..80: mol_type = other DNA
gacttttgaaggacattattatggttacagcaatgacaacacttatatggagcattatcatgtcgttgtattaaattccg

SEQ ID NO: 137507 - DNA, 80 bp, synthetic construct
  source 1..80: mol_type = other DNA
atcatccttgtcggagcggcttttgctgaagccaactcggggggggacgtggttcacttgccccgtatggcaacattcaa

SEQ ID NO: 137508 - DNA, 80 bp, synthetic construct
  source 1..80: mol_type = other DNA
gctcctctacaggctgggggcagtgcaaaatgagatcaccaccacacacccgattaccaaatacatcatgacttgcatgt

SEQ ID NO: 137509 - DNA, 80 bp, synthetic construct
  source 1..80: mol_type = other DNA
tccggattacaacccgcctctaatagagacgtggaagaaaccggattatgatcctccggccgtccacggatgtgctctgc

SEQ ID NO: 137510 - DNA, 80 bp, synthetic construct
  source 1..80: mol_type = other DNA
ttaaccacccccaactctgaggtcggcgccgtcgagctagtgaaacatgaggaggaaaatgagcaagtggagcaagatcc

SEQ ID NO: 137511 - DNA, 80 bp, synthetic construct
  source 1..80: mol_type = other DNA
gcaaagggaacatctggtagccctattctcaacgctcagggagcggttgttgggctatatggaaatggtctaaaaaccaa

SEQ ID NO: 137512 - DNA, 80 bp, synthetic construct
  source 1..80: mol_type = other DNA
ccttctgctaatgattgttctgatacctgaaccagaaaagcagcgatctcaaacagacaaccagctggcggtgttcctaa

SEQ ID NO: 137513 - DNA, 80 bp, synthetic construct
  source 1..80: mol_type = other DNA
cactgcttacactcagcagacacggggtgttttgggtgccatagtggtgagcctgacaggacgtgacaagacagaccagg

SEQ ID NO: 137514 - DNA, 80 bp, synthetic construct
  source 1..80: mol_type = other DNA
cagcagacgagaggcctcctagggtgtataatcaccagcctgactggccgggacaaaaaccaagtggagggtgaggtcca

SEQ ID NO: 137515 - DNA, 80 bp, synthetic construct
  source 1..80: mol_type = other DNA
aggaaaaattacccatcaatcccttaagcaacaccttattacgccaccacaatcttgtgtactccacctcctctcggagt

SEQ ID NO: 137516 - DNA, 80 bp, synthetic construct
  source 1..80: mol_type = other DNA
cacgtatataatctgcaatcaaactctgcgtcaatatactaacatctcacataactgggcaatctttattaataacaaac

SEQ ID NO: 137517 - DNA, 80 bp, synthetic construct
  source 1..80: mol_type = other DNA
ctatatgggctacgccaggttacaatccacctgtactcgagacttggaaatcgccgacctatgaaccaccagtggttcat

SEQ ID NO: 137518 - DNA, 80 bp, synthetic construct
  source 1..80: mol_type = other DNA
gggcttgaaatgtatgtcccagggtggcaggccatgttccgctggatgcgcttccatgatgtggacaggagatcgcaatc

SEQ ID NO: 137519 - DNA, 80 bp, synthetic construct
  source 1..80: mol_type = other DNA
tacatagggtaaaagaagactacaggaaggaatttgaaaacatactggccggctgtccagggcttttggcatctttagat

SEQ ID NO: 137520 - DNA, 80 bp, synthetic construct
  source 1..80: mol_type = other DNA
tgtgagtggggatgattgtgttgtgagaccggtggatgacagatttggcctggccctttcccatcttaatgcaatgtcca

SEQ ID NO: 137521 - DNA, 80 bp, synthetic construct
  source 1..80: mol_type = other DNA
tgtagttaagctgtcatcagggcacttgaaatgtagggttaagatggaaaagctgaagttgaaaggcacgacttacggag

SEQ ID NO: 137522 - DNA, 80 bp, synthetic construct
  source 1..80: mol_type = other DNA
cttctttcgtgcttgaccgtgccggcatctgcggtcaattatgccaatgagagcggcctgtattacctcaccaatgactg

SEQ ID NO: 137523 - DNA, 80 bp, synthetic construct
  source 1..80: mol_type = other DNA
tgatttcgacatttacggaatcacgtacagtatcactccacttgatctacctcagatcatccaacgcctacacggcatgg

SEQ ID NO: 137524 - DNA, 80 bp, synthetic construct
  source 1..80: mol_type = other DNA
ggaccgctttacgtgctgcaggcctccctcctacgcattccctactttgtgcgggctcacgctctcataaagatttgtgg

SEQ ID NO: 137525 - DNA, 80 bp, synthetic construct
  source 1..80: mol_type = other DNA
atggagattaatctggcggctaacttgtggagaagcttcttgtactcaaatgtagccctgtacttgcctgactcttacaa

SEQ ID NO: 137526 - DNA, 80 bp, synthetic construct
  source 1..80: mol_type = other DNA
gcccgccgcggccgccctggccgcggcggtgttggcgtgcccggtggcgaccaccgccagggactgcttttccagggctt

SEQ ID NO: 137527 - DNA, 80 bp, synthetic construct
  source 1..80: mol_type = other DNA
gggcaatgagatcttgctcgggccagctgattcggaaacatcgaaggggtggagactccttgcccccattacggcgtacg

SEQ ID NO: 137528 - DNA, 80 bp, synthetic construct
  source 1..80: mol_type = other DNA
acgccaacatgtggtcactgatgtactttcacaagagggacatgaggctgctttcactggccgtttcttctgctgttccc

SEQ ID NO: 137529 - DNA, 80 bp, synthetic construct
  source 1..80: mol_type = other DNA
caaccgcacagcgctcaactgcaatgattctctgcaaacgggattccttgctgggttgttctacgcctggaagttcaatt

SEQ ID NO: 137530 - DNA, 80 bp, synthetic construct
  source 1..80: mol_type = other DNA
gttgatttccaccgctattgctactactgctacaaaaggtacagaagaaatcatatacttttcaaactttacaactaatt

SEQ ID NO: 137531 - DNA, 80 bp, synthetic construct
  source 1..80: mol_type = other DNA
ctgctactattcgccggcgtcgatgcgagagccatcgtcagtgggggagtcgctgcccgcggcgcggctggtcttgtcgg

SEQ ID NO: 137532 - DNA, 80 bp, synthetic construct
  source 1..80: mol_type = other DNA
aaactgaaacttagtgctcggggaacctttacttttacccggaataaaattcttgaatatgatgaactacctcagaagta

SEQ ID NO: 137533 - DNA, 80 bp, synthetic construct
  source 1..80: mol_type = other DNA
cgcctggtctaggagtacaaactgtagacattaagattcccactgaaagtatggaagtgcaaactgaacccgcaaagcct

SEQ ID NO: 137534 - DNA, 80 bp, synthetic construct
  source 1..80: mol_type = other DNA
gtcgtcatcgccgagagcgagggtgtagaagaggacgcgcgagccctccgagccttcacggaggccatgacgaggtactc

SEQ ID NO: 137535 - DNA, 80 bp, synthetic construct
  source 1..80: mol_type = other DNA
attcccaacacatgcaagttactccgccctaaaacctacgtcacccgccccgttcccacgccccgccacacgtcacaaac

SEQ ID NO: 137536 - DNA, 80 bp, synthetic construct
  source 1..80: mol_type = other DNA
cattacgtggtgggcgtcaccactgagggcctcaaatgcccctgccaagttccatctccagaattcttcactgagataga

SEQ ID NO: 137537 - DNA, 80 bp, synthetic construct
  source 1..80: mol_type = other DNA
cttgtatgctgccgcttgcaaaaacaattacaacgttagtatagtatattacattttacttcatgcacccattagctccg

SEQ ID NO: 137538 - DNA, 80 bp, synthetic construct
  source 1..80: mol_type = other DNA
gagtgcctacacacctagctcatagaacgagaaacgctctggacaatctggtgatgctgcatacgtcagaacatggcggt

SEQ ID NO: 137539 - DNA, 80 bp, synthetic construct
  source 1..80: mol_type = other DNA
tgggttccaatactctcccgggcagcgagtcgaattccttctacgagcgtggagggaaaagagagaccccatgggtttct

SEQ ID NO: 137540 - DNA, 80 bp, synthetic construct
  source 1..80: mol_type = other DNA
gtgggcttcgccctcatacaaccctcccctactggaggtgtggaagagaccgggctacgaaccacccgtagtgcatggct

SEQ ID NO: 137541 - DNA, 80 bp, synthetic construct
  source 1..80: mol_type = other DNA
gcattagattacaaggagtgtgagtggccactgacacatacgattggaacatcagttgaagagagtgaaatgttcatgcc

SEQ ID NO: 137542 - DNA, 80 bp, synthetic construct
  source 1..80: mol_type = other DNA
gctgggggagtggtccccggccgtcccttcggcgtgcaacaggcccccgaacctgccctcgtggcccgcgaggctttccc

SEQ ID NO: 137543 - DNA, 80 bp, synthetic construct
  source 1..80: mol_type = other DNA
ctcgtatgacacccgctgctttgactccaccgtcacggagagagacataagaacagaagaatccatatatcaggcttgtt

SEQ ID NO: 137544 - DNA, 80 bp, synthetic construct
  source 1..80: mol_type = other DNA
gaagaacctgaagaaaatgacgacttcaaccccgtttacccttttgacccatatgacacagcgcatgtgccctttgttac

SEQ ID NO: 137545 - DNA, 80 bp, synthetic construct
  source 1..80: mol_type = other DNA
ctacagtcagactgagagcttacttgtccacgccgggtttacctgtctgtcaagaccatcttgacttttgggagagcgtc

SEQ ID NO: 137546 - DNA, 80 bp, synthetic construct
  source 1..80: mol_type = other DNA
atgcttctgacatgctggttttccctgaccaggtcttgcaagagacgttcaccacccagggaaagaagctcttccaagtt

SEQ ID NO: 137547 - DNA, 80 bp, synthetic construct
  source 1..80: mol_type = other DNA
aggaatgggtccatgaggatagcaggatcaggcctctgcgctaacatgtggcatggcaccttccccatcaatgaatacac

SEQ ID NO: 137548 - DNA, 80 bp, synthetic construct
  source 1..80: mol_type = other DNA
aagggccatcaaaatactaaaaggattcaagagggaaattggacgaatgctcaacattctgaacagacggaagaaatctg

SEQ ID NO: 137549 - DNA, 80 bp, synthetic construct
  source 1..80: mol_type = other DNA
tccgcggcctgcaactggacgcggggggagcggtgcaacctagaagacagggacagatctgagctcagtccgctgctgtt

SEQ ID NO: 137550 - DNA, 80 bp, synthetic construct
  source 1..80: mol_type = other DNA
ccgttgatggccagccgcacgacggcatccgccaaaaagctcatcgcctgggcggggctggtttttgttcgacgatccgt

SEQ ID NO: 137551 - DNA, 80 bp, synthetic construct
  source 1..80: mol_type = other DNA
atattgtggggcgctgatgcggctgcgtgcggtgacattatcaggggcctcccagtctctgctaggcgtggcaatgagat

SEQ ID NO: 137552 - DNA, 80 bp, synthetic construct
  source 1..80: mol_type = other DNA
catgtggacctgatggtgggcagcgccactctttgctctgccctttacatcggggacgtgtgtggtggtgcgtttttggt

SEQ ID NO: 137553 - DNA, 80 bp, synthetic construct
  source 1..80: mol_type = other DNA
gcggtccgggtccaggccgaggcgctcacacagcgcctcccccgtcgtctcgtgtttgaggtcgccgggccgggtggtgt

SEQ ID NO: 137554 - DNA, 80 bp, synthetic construct
  source 1..80: mol_type = other DNA
tggttacactggcgattttgactcggtgatagattgcaacacctctgtcatccaaactgtcgatttcagccttgacccca

SEQ ID NO: 137555 - DNA, 80 bp, synthetic construct
  source 1..80: mol_type = other DNA
agggacggctaagctagcatggctagaagaacggggctatgcgaccttgaaaggtgaggttgttgatctaggctgtggca

SEQ ID NO: 137556 - DNA, 80 bp, synthetic construct
  source 1..80: mol_type = other DNA
gtgtgggaggacttgctagaagacaatgtcacacctatccctactacaatcatggcaaagaatgaggtattttgcgtgga

SEQ ID NO: 137557 - DNA, 80 bp, synthetic construct
  source 1..80: mol_type = other DNA
agggcgcggtccaatggatgaacaggcttattgcctttgcttccagaggaagccacgtcgcccctactcactacgtgacg

SEQ ID NO: 137558 - DNA, 80 bp, synthetic construct
  source 1..80: mol_type = other DNA
cactgagtgtgacaccaaaatcattggaacggccgtcaaaaataacatggcagttcacagtgatctctcctactggattg

SEQ ID NO: 137559 - DNA, 80 bp, synthetic construct
  source 1..80: mol_type = other DNA
atctcaaatttttgtaatttagggcggagcgcttacgacagcacatgcgtactgttagactgttatgtttattgtatttg

SEQ ID NO: 137560 - DNA, 80 bp, synthetic construct
  source 1..80: mol_type = other DNA
ggcgccgtggtcacattcaagatcatgagcggtgaggcgcccacgacggaggatttggtcaacctgctcccggccatact

SEQ ID NO: 137561 - DNA, 80 bp, synthetic construct
  source 1..80: mol_type = other DNA
gcgaaggccccacccccatgctgggacactatgtggaagtgccttatccgactcaagcccactctcacaggtcctacccc

SEQ ID NO: 137562 - DNA, 80 bp, synthetic construct
  source 1..80: mol_type = other DNA
ctcgaaatgctccaggtgaaattcttctgaacctggagttgggcccacatctcaacccctttcttcagcatttggctcaa

SEQ ID NO: 137563 - DNA, 80 bp, synthetic construct
  source 1..80: mol_type = other DNA
aacaacttgccgagcaattcaagcagaaggtcctaggtctgctgcagaacaccgctaaacaagcagaggaacttaagcca

SEQ ID NO: 137564 - DNA, 80 bp, synthetic construct
  source 1..80: mol_type = other DNA
aatgagaatccaggtagcagagcaatgcgcatggctgagagagatgcgccagaggcatttctgactattgttgaggtggc

SEQ ID NO: 137565 - DNA, 80 bp, synthetic construct
  source 1..80: mol_type = other DNA
cctcgtgggctggcccgctccccaaggcgcccgctcattgacaccttgcacttgcggctcctcggacctttatctggtca

SEQ ID NO: 137566 - DNA, 80 bp, synthetic construct
  source 1..80: mol_type = other DNA
ccagtctggctggcttacaaggttgcttctgcaggcatctcttaccacgatcggaagtggtgttttgatggtccaaggac

SEQ ID NO: 137567 - DNA, 80 bp, synthetic construct
  source 1..80: mol_type = other DNA
ccgcgtatccccacttgtgggggtgaagagggtaataatgaacttgctggacggcagagggccaatacgattcgttttgg

SEQ ID NO: 137568 - DNA, 80 bp, synthetic construct
  source 1..80: mol_type = other DNA
cggtggggtcggtgcagggcagtggcgcccatacgctcacgtccctcttctcatccgggtcgtcccagaacatccagctt

SEQ ID NO: 137569 - DNA, 80 bp, synthetic construct
  source 1..80: mol_type = other DNA
ggccctatgtacaactctcgaggccaagcatgcgggacgcggagatgcagggccagtggtgttcttaccactagcctggg

SEQ ID NO: 137570 - DNA, 80 bp, synthetic construct
  source 1..80: mol_type = other DNA
agatatttggaggaccaatatctcagcacaactacagaccagggtatttcacacaaacagcagggccatggcacctaggt

SEQ ID NO: 137571 - DNA, 80 bp, synthetic construct
  source 1..80: mol_type = other DNA
tttcaccggcgactttgactcagtgatagactgcaacacgtccgtcgtacaaacagtggatttcagtctggaccctacct

SEQ ID NO: 137572 - DNA, 80 bp, synthetic construct
  source 1..80: mol_type = other DNA
cggtcaggtccgccggcgccacggcccccgggccggagggcacaaaaaacaccatggcgcccgcccaccgcaccttggtg

SEQ ID NO: 137573 - DNA, 80 bp, synthetic construct
  source 1..80: mol_type = other DNA
agcaaaaatcaaaattgatccatacaccacaaagggaacaaccactgaaaattatcacgagtttgaattacaacagggaa

SEQ ID NO: 137574 - DNA, 80 bp, synthetic construct
  source 1..80: mol_type = other DNA
cgtgtggttttgccgtcctcatggggtacattcctgtcgttggcgccccagtcggaggcgtcgccagagccctggcacat

SEQ ID NO: 137575 - DNA, 80 bp, synthetic construct
  source 1..80: mol_type = other DNA
ccctaatgtcaccactgtgagagaagcaggggtgttggtgacggcggctacgcttactttgtgggacaatggagccagtg

SEQ ID NO: 137576 - DNA, 80 bp, synthetic construct
  source 1..80: mol_type = other DNA
catgaacaagcgagtggtggctcccgggctagtggactgctacattaaccttggagcacgctggtcccttgactatatgg

SEQ ID NO: 137577 - DNA, 80 bp, synthetic construct
  source 1..80: mol_type = other DNA
cattgtttggtggaatgtcctggatcactcaggggcttatgggagccctcctcgtgtggatggggataaacgccagagac

SEQ ID NO: 137578 - DNA, 80 bp, synthetic construct
  source 1..80: mol_type = other DNA
gttttgtttgatttaattttaggccctcatcttaatcccttcttgctacttttgtcacaaatgtataagggttgggttgg

SEQ ID NO: 137579 - DNA, 80 bp, synthetic construct
  source 1..80: mol_type = other DNA
ggcgcggggccgccggagtcgtcagacgcgagctcctccaggccgtgaatccatgcccacatgcgaggttggacgggctc

SEQ ID NO: 137580 - DNA, 80 bp, synthetic construct
  source 1..80: mol_type = other DNA
ctcgagagggaccgcaaaattgagatggttccatgaacgtggctatgtcaagttggaaggaagagtgactgacctgggat

SEQ ID NO: 137581 - DNA, 80 bp, synthetic construct
  source 1..80: mol_type = other DNA
ctgagacttcccacctcagagtaaaaccaaatggagcctccgctaccacccccccacgtggtggtagaaagatggggtct

SEQ ID NO: 137582 - DNA, 80 bp, synthetic construct
  source 1..80: mol_type = other DNA
agatcaaaaagaccgaggctctgcacaagagaagaattcgtcgcaaaagtgagatccaatgctgcaataggtgctatctt

SEQ ID NO: 137583 - DNA, 80 bp, synthetic construct
  source 1..80: mol_type = other DNA
ccaagactcctcccgtaccaccaccgagacggaggaagcaggtcatcctaacagagtccactgtgtccgcagctcttgct

SEQ ID NO: 137584 - DNA, 80 bp, synthetic construct
  source 1..80: mol_type = other DNA
gggaatttgtgattctgatttttctgctgccggcggatgcgcgtgtgtgcgtggcgctgtggctgatgctgatgattacc

SEQ ID NO: 137585 - DNA, 80 bp, synthetic construct
  source 1..80: mol_type = other DNA
ctggtctgtgcttgcctttggatgctcatcatactggggcaaggtcatatccgtgtcctgaatctgctgcattccaccac

SEQ ID NO: 137586 - DNA, 80 bp, synthetic construct
  source 1..80: mol_type = other DNA
cctcccggggatgccccacaaccagcatacctggagcacacatcatgctcatccaacgtttctgtcgcccacgggaacgg

SEQ ID NO: 137587 - DNA, 80 bp, synthetic construct
  source 1..80: mol_type = other DNA
gcagcgggggggacatatttcacagcatgtccgaggcccgacctcgctggttcatgttgtgcctactcctactttccgta

SEQ ID NO: 137588 - DNA, 80 bp, synthetic construct
  source 1..80: mol_type = other DNA
ctgagctgccaattacaaccagaagccagggatgccatcacgtccctgaccgaaaggctatactgcggtggccccatgtt

SEQ ID NO: 137589 - DNA, 80 bp, synthetic construct
  source 1..80: mol_type = other DNA
gtgactattagataaacagccaaacgaacgtattactgaccattggtttttctcaagtatgtttataacttccagtcgtt

SEQ ID NO: 137590 - DNA, 80 bp, synthetic construct
  source 1..80: mol_type = other DNA
cgcgcgggccccaagacccgcgtccccctgtcgccccgtgaataccggcagtacgtgctgccgggttttgacggttgcaa

SEQ ID NO: 137591 - DNA, 80 bp, synthetic construct
  source 1..80: mol_type = other DNA
cgcacggcaagatcgcgagcaagggcgaccagcttggggtccccggagaattttatgaccagcatgaaggggacgagctg

SEQ ID NO: 137592 - DNA, 80 bp, synthetic construct
  source 1..80: mol_type = other DNA
tatctttgtccatggaccaaccactgtggagtcgcatggaaactaccccacacagattggggccactcaggcagggagat

SEQ ID NO: 137593 - DNA, 80 bp, synthetic construct
  source 1..80: mol_type = other DNA
cctcaccgccctggaactcatcaaccgcacccgcacaaaccccacccctgtgggggaggttatccacgcccacgacgccc

SEQ ID NO: 137594 - DNA, 80 bp, synthetic construct
  source 1..80: mol_type = other DNA
gctgcgtattgcttgtcagtaggcagcgtggtgattgtcgggagggtcatcctgtcgggccagccggctgtcatcccaga

SEQ ID NO: 137595 - DNA, 80 bp, synthetic construct
  source 1..80: mol_type = other DNA
tctgcctactagttttggcaatactgtcacctgttacatcaaagccatggcggcgtccagggccgcgaacctccggaacc

SEQ ID NO: 137596 - DNA, 80 bp, synthetic construct
  source 1..80: mol_type = other DNA
ctttgacagcattccagcaaggatggggcaaaatcaagcatgctgatgtaagaggtccgtcggaggacaggccttattgc

SEQ ID NO: 137597 - DNA, 80 bp, synthetic construct
  source 1..80: mol_type = other DNA
gcctttgtcacagcctcactatgttactgtgactatgaaccataacatgactttagtgggtcccttaaacctgccagtta

SEQ ID NO: 137598 - DNA, 80 bp, synthetic construct
  source 1..80: mol_type = other DNA
gctctcgccctagttggggcccaaacgacccccggcgtagatctcgcaacctgggtaaggtcatcgataccctaacgtgc

SEQ ID NO: 137599 - DNA, 80 bp, synthetic construct
  source 1..80: mol_type = other DNA
gtgggcaaaggtcgtcgtcatcctcttgttgaccgctggggtggaggcatccacctacaccaccggagcggttgtcggaa

SEQ ID NO: 137600 - DNA, 80 bp, synthetic construct
  source 1..80: mol_type = other DNA
gcttggtagactacccatacaggctctggcactacccctgtacagtcaattacaccattttcaagatcaggatgtttgtg

SEQ ID NO: 137601 - DNA, 80 bp, synthetic construct
  source 1..80: mol_type = other DNA
tcacaaggtggtagatggtacttgctgtacggcgccagtctgcaaccataccgtctgtcgcgctgcatcgtaaaccacag

SEQ ID NO: 137602 - DNA, 80 bp, synthetic construct
  source 1..80: mol_type = other DNA
aataatcaattttggaagtaagattttcaagtgccacctgccactgccgtacggctaatgctcgttcgtaagggttaaga

SEQ ID NO: 137603 - DNA, 80 bp, synthetic construct
  source 1..80: mol_type = other DNA
tccgtggcgcgggccataagtttaatggtgcgagatggatcttccggtcccataaaacgaaaggataactgaacatatgg

SEQ ID NO: 137604 - DNA, 80 bp, synthetic construct
  source 1..80: mol_type = other DNA
tatgacgtgatacagaagttgtcaattgcaacgatggggcctgcctacgggttccaatactcgcccaaacagcgagtgga

SEQ ID NO: 137605 - DNA, 80 bp, synthetic construct
  source 1..80: mol_type = other DNA
ggcggaggaggatgatcgggagatttctgtcccagctgagattctgctgaagtctaagaagtttccccccgccatgccta

SEQ ID NO: 137606 - DNA, 80 bp, synthetic construct
  source 1..80: mol_type = other DNA
actgtcaggtctcggtctcaacgcggtggcttactacagaggcttggatgtcgcagtgataccaactgaaggggacgtgg

SEQ ID NO: 137607 - DNA, 80 bp, synthetic construct
  source 1..80: mol_type = other DNA
tatggggttctcctatgacacccgctgctttgactccaccgtgaccgaaaaagacatcagggttgaggaggaggtctatc

SEQ ID NO: 137608 - DNA, 80 bp, synthetic construct
  source 1..80: mol_type = other DNA
gtagggtttgattcttgtccttatctgcgcgttcctttgcagcgatattaagttgcacatattcacgtgccaggcacttc

SEQ ID NO: 137609 - DNA, 80 bp, synthetic construct
  source 1..80: mol_type = other DNA
agaggaaacagatttcttttttggaggataacaacttaacttgactgcgaacagttttttagcagggaaacacccaatgt

SEQ ID NO: 137610 - DNA, 80 bp, synthetic construct
  source 1..80: mol_type = other DNA
acccgactgtcttgggccattccccacctaccttctctttgccctgctcacctgcacctgcgtctgcagcattgtctgcc

SEQ ID NO: 137611 - DNA, 80 bp, synthetic construct
  source 1..80: mol_type = other DNA
tgccatagatataagtcggcaagagttgaggtgtggcagcggagtatttatacacaatgatgtggaagcttggatggacc

SEQ ID NO: 137612 - DNA, 80 bp, synthetic construct
  source 1..80: mol_type = other DNA
ggcgggaccccgcgatgatggccgtgagggtgttgatgaagtacgtcgagtgatcgcagtatcgcagaatctggtttgcc

SEQ ID NO: 137613 - DNA, 80 bp, synthetic construct
  source 1..80: mol_type = other DNA
ccggagagccgcggcacccggacgcgcccggaaagtctttcgcaccacccgcgatcggcacggccgcgcccccgctttta

SEQ ID NO: 137614 - DNA, 80 bp, synthetic construct
  source 1..80: mol_type = other DNA
tggtgcttgtagccatcaccgtgctcactctgaccccactgtataaacagttgcttgtccagctgctgtggtggtcccag

SEQ ID NO: 137615 - DNA, 80 bp, synthetic construct
  source 1..80: mol_type = other DNA
aaccggacttttctccgggaaaggacccttacggatggtgctagcattcatcacgtttttgcgggttctttccatcccac

SEQ ID NO: 137616 - DNA, 80 bp, synthetic construct
  source 1..80: mol_type = other DNA
tgagcaccttcacagccaagccagggtgaggatgtgcaccagagatgaattcatagcaaaggtgagatccaacgcagctc

SEQ ID NO: 137617 - DNA, 80 bp, synthetic construct
  source 1..80: mol_type = other DNA
cctccatgcccccacagggagcggcaagagcactaaggtgccggcctcatacgcagcccaagggtacaaggtactcgtac

SEQ ID NO: 137618 - DNA, 80 bp, synthetic construct
  source 1..80: mol_type = other DNA
agtcactgtggactgtgagccccgctcgggcatagacacaaacgcgtactatgtgatgacagttgggaagaagacgtttc

SEQ ID NO: 137619 - DNA, 80 bp, synthetic construct
  source 1..80: mol_type = other DNA
gcgcgcatacctcaacaccccaggccttcccgtctgccaggaccatctcgagttctgggagggagtgtttactggactga

SEQ ID NO: 137620 - DNA, 80 bp, synthetic construct
  source 1..80: mol_type = other DNA
gtgggatccaatacctagcaggcctctctaccttgcctggcaaccctgctgtggcgtctcttatggcgttcactgcttca

SEQ ID NO: 137621 - DNA, 80 bp, synthetic construct
  source 1..80: mol_type = other DNA
gtggacgcagagacctatgtcacgggtgccgctgcgggccgcgccgcccacggtttggccagcttcctctcacccggtgc

SEQ ID NO: 137622 - DNA, 80 bp, synthetic construct
  source 1..80: mol_type = other DNA
tctcgcggatggaggttgctctgggggggcatatgatatcatcatttgtgacgagtgccattcaacagaccccaccacag

SEQ ID NO: 137623 - DNA, 80 bp, synthetic construct
  source 1..80: mol_type = other DNA
acccccaggcgccagatcgctgactccatgctcctgtggcgccagcgatctctatttggtcaccaggaatgcggacgtca

SEQ ID NO: 137624 - DNA, 80 bp, synthetic construct
  source 1..80: mol_type = other DNA
tcggggccgccacgttctgttcggctatgtatgtaggggacctatgcggctccatcttcctcgttggccagattttcacc

SEQ ID NO: 137625 - DNA, 80 bp, synthetic construct
  source 1..80: mol_type = other DNA
ctgcctgaggaggcccgcagggccatacattcactgactgagagactctacgtgggttggcccatgctcaacagcaaggg

SEQ ID NO: 137626 - DNA, 80 bp, synthetic construct
  source 1..80: mol_type = other DNA
catggctgcgccttgccccccccggacaaaccccccgtccctcctccacgaaggaggaaggtggtccaacttgatgcgtc

SEQ ID NO: 137627 - DNA, 80 bp, synthetic construct
  source 1..80: mol_type = other DNA
atagaggccaacttgctatggcggcaagagatgggaggtgacattactcgagttgagtctaagaacaaagtagtcatcct

SEQ ID NO: 137628 - DNA, 80 bp, synthetic construct
  source 1..80: mol_type = other DNA
actcccgccgtgacggcgggcttttttcccgcgcccgcccccgcggcaggctgtgccacggcaggccccctcctcactcg

SEQ ID NO: 137629 - DNA, 80 bp, synthetic construct
  source 1..80: mol_type = other DNA
aatcataatggatgaagcccactttacagatcccgccagcatagctgctagaggctacatagcaaccagagtggaaatgg

SEQ ID NO: 137630 - DNA, 80 bp, synthetic construct
  source 1..80: mol_type = other DNA
aaacgctgatgtcatcccggctcggaggaaaggcgaccggcgaggtgcgctactctcaccgaggcctctttcaaccctca

SEQ ID NO: 137631 - DNA, 80 bp, synthetic construct
  source 1..80: mol_type = other DNA
ggcccgcaaacatggcggcgttggcgtcggcgtggatgaccgtgtcgatgtcggcgaagcgcaggtcgtgcagctggttg

SEQ ID NO: 137632 - DNA, 80 bp, synthetic construct
  source 1..80: mol_type = other DNA
aaggagacatagctgtgcacagtgacctctcctactggattgaaagccacaagaacacgacatggaggctcgagagggct

SEQ ID NO: 137633 - DNA, 80 bp, synthetic construct
  source 1..80: mol_type = other DNA
ggatcacggaagacaccacccaaccatgtgctacatcctggttatgggacatctggaattgggtatgcaccgtcttgtcc

SEQ ID NO: 137634 - DNA, 80 bp, synthetic construct
  source 1..80: mol_type = other DNA
cagtgttgggaatagggaccgtccttgatcaggcggagactagtggggttaggctgacggtactggcaaccgctacacca

SEQ ID NO: 137635 - DNA, 80 bp, synthetic construct
  source 1..80: mol_type = other DNA
cgggcacagcaccgcattctaatttcgctcatgttttcacagtaagtgcagcacataatcattatgttattcagcagccc

SEQ ID NO: 137636 - DNA, 80 bp, synthetic construct
  source 1..80: mol_type = other DNA
ccaccctacccgggaacccggcagtggcttccctcatgtccttttccgccgccttgaccagccccctgacgacttccacg

SEQ ID NO: 137637 - DNA, 80 bp, synthetic construct
  source 1..80: mol_type = other DNA
ctgtcaccggaggctctagtcgtgggtgtcgtgtgtgcggccattctacggcggcacattggcccgtcggaggtggctaa

SEQ ID NO: 137638 - DNA, 80 bp, synthetic construct
  source 1..80: mol_type = other DNA
tatgcctgccagtcattttttcttcttcgacttttgccgcagtcagtgaccttgatcccgagtgtttagctccctttgcg

SEQ ID NO: 137639 - DNA, 80 bp, synthetic construct
  source 1..80: mol_type = other DNA
ccgacggccttaaggacttagcagtagctcttgagccagtgatattcacgcccatggagaagaaggttatagtctggggc

SEQ ID NO: 137640 - DNA, 80 bp, synthetic construct
  source 1..80: mol_type = other DNA
aaactccccattagtccactcagcaactcgttgctgaggcaccacaaccttgtctactccacgtcatcacgtagcgctgc

SEQ ID NO: 137641 - DNA, 80 bp, synthetic construct
  source 1..80: mol_type = other DNA
atagcgctgtatttgcccgacaagctaaagtacagtccttccaacgtaaaaatttctgataacccaaacacctacgacta

SEQ ID NO: 137642 - DNA, 80 bp, synthetic construct
  source 1..80: mol_type = other DNA
gcagggcgcgggcgcaaaagtccctccgcggcccgcgccaccgggccgggccggcgcgcaccgcctcgcgccccagcgcc

SEQ ID NO: 137643 - DNA, 80 bp, synthetic construct
  source 1..80: mol_type = other DNA
tctggtacggcttacaactctctagctcctaaaggcgctccaaatgcatctcaatggattgcaaaaggcgtaccaactgc

SEQ ID NO: 137644 - DNA, 80 bp, synthetic construct
  source 1..80: mol_type = other DNA
gctgctcagaatggatgggaaaaagatccaaatgttgctgctcagaaccaaatttgcaagggcaacatctatgccatgga

SEQ ID NO: 137645 - DNA, 80 bp, synthetic construct
  source 1..80: mol_type = other DNA
gacaagcggggcaaccccacatacacctgggaggagaatgagacggatgtattcatgctggaaagtcttcggccccctac

SEQ ID NO: 137646 - DNA, 80 bp, synthetic construct
  source 1..80: mol_type = other DNA
gtcctcgtagacgcccatcggcgcatcaccgacccggagagggacatccaggactttgtcctcaccgccgaactgagcag

SEQ ID NO: 137647 - DNA, 80 bp, synthetic construct
  source 1..80: mol_type = other DNA
tcgctgtttacgagcgccagctgttggggtaagtacacgcgctcaaaagcaggcattacatctgtactcaaggtgtcagt

SEQ ID NO: 137648 - DNA, 80 bp, synthetic construct
  source 1..80: mol_type = other DNA
tcttccgggtgccctcttctttgtagtgctggccacgcggtgggattgttccgcgcagctgtggtaacgcgggtggtcgc

SEQ ID NO: 137649 - DNA, 80 bp, synthetic construct
  source 1..80: mol_type = other DNA
aagggcccccggttgggtgtgcgcgcgacgaggaagacttctgagcgatcccagcccagaggcaggcgccaacctatacc

SEQ ID NO: 137650 - DNA, 80 bp, synthetic construct
  source 1..80: mol_type = other DNA
tgttaacttagaaggtcccgatacgcacttggtgtttaaacccactgtgacagagggaacgacaagtgccgaagctttgc

SEQ ID NO: 137651 - DNA, 80 bp, synthetic construct
  source 1..80: mol_type = other DNA
atccctgtcagaaggcggggtgacactcgcggcgccctattgagccccagacctctctcaaccctcaaaggctcctcggg

SEQ ID NO: 137652 - DNA, 80 bp, synthetic construct
  source 1..80: mol_type = other DNA
cacccattcgctccaaagctgtcgctgtataacttttttagttatttgcaaaggctgcaaatcccaatgcagtagcgcgc

SEQ ID NO: 137653 - DNA, 80 bp, synthetic construct
  source 1..80: mol_type = other DNA
ccaggatgactccgccgatgacaatagcgttctggacttggggggaactggtgcttcttccaaccccttcgcccacctac

SEQ ID NO: 137654 - DNA, 80 bp, synthetic construct
  source 1..80: mol_type = other DNA
ggtgcccaaacaatgacaatggctctgaggagatcgccggggatgctgatcgtctctccgaagcagagtcctacagttcc

SEQ ID NO: 137655 - DNA, 80 bp, synthetic construct
  source 1..80: mol_type = other DNA
agaggtcaaatcttgcacttggccagagacacacaccctttggggagatgatgttgaggaaagtgaactcatcattccgc

SEQ ID NO: 137656 - DNA, 80 bp, synthetic construct
  source 1..80: mol_type = other DNA
tccctgacagacaagtgctgtatcaacaatatgatgaaatggaagaatgctcccagtctgctccttacatcgagcaggca

SEQ ID NO: 137657 - DNA, 80 bp, synthetic construct
  source 1..80: mol_type = other DNA
tgagaaaccagggcgtgcagcttggcgctgtccatggtatcgccaagagagaaaagcaagtctgcggggacagctttcaa

SEQ ID NO: 137658 - DNA, 80 bp, synthetic construct
  source 1..80: mol_type = other DNA
tttcataatcaggcagaccttcatattagaaacagatcctgctgctccaccacctgcagcgtgttcaaaacaacaagatt

SEQ ID NO: 137659 - DNA, 80 bp, synthetic construct
  source 1..80: mol_type = other DNA
atcttggtgcgaaacatcactggcggtaaatatgcacaaatggtacttctgacactggcccggtggctcaatacttatct

SEQ ID NO: 137660 - DNA, 80 bp, synthetic construct
  source 1..80: mol_type = other DNA
gtgagtgaagaaagacccattcccgatggggagtggagagatggctttgattggataacggaatttgaaggccggacggc

SEQ ID NO: 137661 - DNA, 80 bp, synthetic construct
  source 1..80: mol_type = other DNA
cattccatacaatgtggcacgttacacgtggtgctgttctgatgcatagagggaagaggattgaaccatcatgggcagat

SEQ ID NO: 137662 - DNA, 80 bp, synthetic construct
  source 1..80: mol_type = other DNA
tttgggttcgttccgggcaataaaaaacgtttgtatcgcatctttcctgtgtgtagttgtttatgttggatgcctgtggg

SEQ ID NO: 137663 - DNA, 80 bp, synthetic construct
  source 1..80: mol_type = other DNA
ggggagtttgggccggcactggaatcatgacgaccaagtgcccctgcggagctgctatctctggcaacgttcgcttgggc

SEQ ID NO: 137664 - DNA, 80 bp, synthetic construct
  source 1..80: mol_type = other DNA
cattgctaagggaccccagtcacatcactgcagaaacagcagctcgccgacttaaaagggggtccccaccatcattggcg

SEQ ID NO: 137665 - DNA, 80 bp, synthetic construct
  source 1..80: mol_type = other DNA
tgggtgcgcatggtggttatgacccattttttctccatactgcaagcccaggagcagttagagaaagccctcgactttga

SEQ ID NO: 137666 - DNA, 80 bp, synthetic construct
  source 1..80: mol_type = other DNA
gcctctcgccgtgtcggcccctcacagcgttccaacaggggtggggcaccatccagtatgcgaatgtgagcggcccctcg

SEQ ID NO: 137667 - DNA, 80 bp, synthetic construct
  source 1..80: mol_type = other DNA
tactgagggtgtgcgcggccgtaaggcacctggtgggtggaaaatatgtccagatgctgctgctaaccattggtagatgg

SEQ ID NO: 137668 - DNA, 80 bp, synthetic construct
  source 1..80: mol_type = other DNA
ccaagtggggtacctccatgctccaactggtagcgggaagagcacaaaggtcccggcagcgtatgcctcccaaggttaca

SEQ ID NO: 137669 - DNA, 80 bp, synthetic construct
  source 1..80: mol_type = other DNA
tgtccatggcaaacatcttcaggggaagttatctagcaggagcaggtctggctttttcattaatgaaatctttaggagga

SEQ ID NO: 137670 - DNA, 80 bp, synthetic construct
  source 1..80: mol_type = other DNA
accggtaccaatgccacataccaaggtgtggaaccagataatgctcaaggtcaaaatgataaatggaaaaaggacgagaa

SEQ ID NO: 137671 - DNA, 80 bp, synthetic construct
  source 1..80: mol_type = other DNA
ccgacaattaatgtggccatgctcataacccccaacccaaccattgaaacaagtggaggaggatttatagagatgcagtt

SEQ ID NO: 137672 - DNA, 80 bp, synthetic construct
  source 1..80: mol_type = other DNA
ctttgccaccactcgatttttcaagagaaagtggtcaaatctttggatttttcatctgcagggcgaacggttgcttctat

SEQ ID NO: 137673 - DNA, 80 bp, synthetic construct
  source 1..80: mol_type = other DNA
cgacgtccatcccctttttctcctcgccccgcggcccctgtttgtcggcaccctggtggttgtcgtcggcgggctgacga

SEQ ID NO: 137674 - DNA, 80 bp, synthetic construct
  source 1..80: mol_type = other DNA
cagaaggccctcggcctcctgcagactgcctcccaccaggcggaggtgatcacccctactgtccagaccaattggcaaaa

SEQ ID NO: 137675 - DNA, 80 bp, synthetic construct
  source 1..80: mol_type = other DNA
ggcacgcatgggttctgctacgccatcctctttatctgtgtggtgtggtacataaagggacgaggcccagctgcagccgc

SEQ ID NO: 137676 - DNA, 80 bp, synthetic construct
  source 1..80: mol_type = other DNA
gaccaaggcgctttcaggccgatggaaagcagtggaaaagagtgtggcaatgaaacatcttactagtttcaaacgagaac

SEQ ID NO: 137677 - DNA, 80 bp, synthetic construct
  source 1..80: mol_type = other DNA
ttcgaccgcatgcaggtggtagacagtcactacaatgatgtactcaaggagattaaggcacgagcatccaccgtgaaggc

SEQ ID NO: 137678 - DNA, 80 bp, synthetic construct
  source 1..80: mol_type = other DNA
ggcaaatgccatctgttcagccgtcccagtcaactgggttcccactggacgcactacatggtcaattcatggaaagggtg

SEQ ID NO: 137679 - DNA, 80 bp, synthetic construct
  source 1..80: mol_type = other DNA
ctgttctcgttcctcactgcctcccccgccctggacaccctcttcgtcgtcagcaccgtcatccacaccttatcgttttt

SEQ ID NO: 137680 - DNA, 80 bp, synthetic construct
  source 1..80: mol_type = other DNA
ggcgagtatccgccgaggactacgttgaggtgcggaggttgggcgactgccactatgtggtaggagccactgctgaaggg

SEQ ID NO: 137681 - DNA, 80 bp, synthetic construct
  source 1..80: mol_type = other DNA
atacttatgttaacatcggagctcgttggtcgccagatgttatggataacataaatccttttaaccaccaccgaaacgca

SEQ ID NO: 137682 - DNA, 80 bp, synthetic construct
  source 1..80: mol_type = other DNA
gtccgcagcggatggctagctgtaggcccctcgccgcattcgaccagggctggggaactatcagctatgccgccgtgtcg

SEQ ID NO: 137683 - DNA, 80 bp, synthetic construct
  source 1..80: mol_type = other DNA
cgcagtagtccagcgtttcgcggatgatgtcataacccgcctctcctttcttctcccacagctcgcggttgagggcgtac

SEQ ID NO: 137684 - DNA, 80 bp, synthetic construct
  source 1..80: mol_type = other DNA
tgtcttaggcttgccgcctgctgcgcacacgtttgcatttactgtcagcttattaaacgctggggacgccacccaagatg

SEQ ID NO: 137685 - DNA, 80 bp, synthetic construct
  source 1..80: mol_type = other DNA
gcgcccaggagcactgccgccagcaccaggtccatggccgtaacgcgcgccgcggaggtgcggtgggtggcgacggccgg

SEQ ID NO: 137686 - DNA, 80 bp, synthetic construct
  source 1..80: mol_type = other DNA
gctgcaaaaagtcacttaagtcctgggccactacagctgacaattcagagccagggctaagcgtgggactggcaagcgta

SEQ ID NO: 137687 - DNA, 80 bp, synthetic construct
  source 1..80: mol_type = other DNA
catggataccatcagtgtgttcctacattctgaagagggttcaagagcgtacagaaatgccctgtcaatgatgccagaag

SEQ ID NO: 137688 - DNA, 80 bp, synthetic construct
  source 1..80: mol_type = other DNA
gttttataaaagttttttcacactccaactttataggaggacaaaacagagccgttgaaattatatgtgccattttctcg

SEQ ID NO: 137689 - DNA, 80 bp, synthetic construct
  source 1..80: mol_type = other DNA
gccgccaggtcctcggtggcgtccagcgtctggccccgctgtatcagatcccgcaacaggatggccgtggggctggtcgc

SEQ ID NO: 137690 - DNA, 80 bp, synthetic construct
  source 1..80: mol_type = other DNA
ttttaggttggctatgttcccagccatatccctccggggattcatgttgtgcagaaccaccagcacagtgtatccggtgc

SEQ ID NO: 137691 - DNA, 80 bp, synthetic construct
  source 1..80: mol_type = other DNA
cctggaagtcgtcaccagtacctgggtattggtaggcggcgtcctggccgctctggccgcgtattgcctggcgacgggct

SEQ ID NO: 137692 - DNA, 80 bp, synthetic construct
  source 1..80: mol_type = other DNA
tctattcttcagtgggctcgcgattatggatccggaaccgtgcccaatgcagatggatatcgcacaaaactatctgctct

SEQ ID NO: 137693 - DNA, 80 bp, synthetic construct
  source 1..80: mol_type = other DNA
cccttaagtgggagtacgtggtgctcgcgttcctacttctcgcggacgcgagagtctctgcttgcctatggatgatgttc

SEQ ID NO: 137694 - DNA, 80 bp, synthetic construct
  source 1..80: mol_type = other DNA
tctcggtgggactcaacacaacatagagccgtattagcagcagccctagaaatcatggttaaattctccccagaaccaca

SEQ ID NO: 137695 - DNA, 80 bp, synthetic construct
  source 1..80: mol_type = other DNA
gcgtcgacgtcgcgcctgggtgccggttgcggttcgttctggacgggagtcccgaggacgcctatgtgacgtcggaggat

SEQ ID NO: 137696 - DNA, 80 bp, synthetic construct
  source 1..80: mol_type = other DNA
aagctcaaactcactccactgcgcggcgcagccaaccttgacctgtcgtggtggtttgtgtcgggcggtagcgtggtgga

SEQ ID NO: 137697 - DNA, 80 bp, synthetic construct
  source 1..80: mol_type = other DNA
ggatgtagaagcctatgagaacagtaagaaagaacaagaagccaaaacagaagccgctaaagctgctgctattgctaaag

SEQ ID NO: 137698 - DNA, 80 bp, synthetic construct
  source 1..80: mol_type = other DNA
actcagccatcactgcaagcgccatcacacctcgcccccagcagcgacgaggaggagagcttaaccaccccaccacccag

SEQ ID NO: 137699 - DNA, 80 bp, synthetic construct
  source 1..80: mol_type = other DNA
aattggcaaagtttatgggcggtgtcgttggttccaactggcttctcagtccatttaggggcttttattgcttttctggg

SEQ ID NO: 137700 - DNA, 80 bp, synthetic construct
  source 1..80: mol_type = other DNA
agggtcagcaaaattaagatggataacagaaagaggattcgtcaaacccatgggaaaggttgttgacttaggctgtggac

SEQ ID NO: 137701 - DNA, 80 bp, synthetic construct
  source 1..80: mol_type = other DNA
gtcagtggggatccggtgcgatccttgtccagccggacagcttgggtcggtggtacgatggcgactggcacacggccgtc

SEQ ID NO: 137702 - DNA, 80 bp, synthetic construct
  source 1..80: mol_type = other DNA
gggaaaacgctgggcgttaatcaaagaggcgaactgtgtgtgagaggtcctatgattatgtccggttatgtaaacaatcc

SEQ ID NO: 137703 - DNA, 80 bp, synthetic construct
  source 1..80: mol_type = other DNA
gggattttggatccctgggaggagtgttcacatctataggaaaggccctccaccaagtctttggagcaatctatggggct

SEQ ID NO: 137704 - DNA, 80 bp, synthetic construct
  source 1..80: mol_type = other DNA
gagtcgctgacgcgtatcccttactatgtgagggctcatgcgttgctcaggatctgcggccttgtacgtgggctggcgca

SEQ ID NO: 137705 - DNA, 80 bp, synthetic construct
  source 1..80: mol_type = other DNA
tggagaggtgcgcacactgcgtgtacaacatgatgggcaagagagaaaagaaactgggagaattcggagtggcgaagggc

SEQ ID NO: 137706 - DNA, 80 bp, synthetic construct
  source 1..80: mol_type = other DNA
tccctttttgtcgggaggcccctccccaaacgggtcatccccgtggaacgcccgtttgcggccggcaaatgccggtcccg

SEQ ID NO: 137707 - DNA, 80 bp, synthetic construct
  source 1..80: mol_type = other DNA
caggacaccgaatggcttgggatatgatgatgaattggtcccccgctgtgggtatggtggtggcgcacatcctgcggttg

SEQ ID NO: 137708 - DNA, 80 bp, synthetic construct
  source 1..80: mol_type = other DNA
ggatgctgatctgcagcccggtgagctcatttgagacaccgttccaagaacaatcaagaactagactttgtacatagaac

SEQ ID NO: 137709 - DNA, 80 bp, synthetic construct
  source 1..80: mol_type = other DNA
cagggtgtgtaccctgtgtgcggtctgggaacgcgtcgcgctgttgggtggccttaactcccacggtggcggcaccgtac

SEQ ID NO: 137710 - DNA, 80 bp, synthetic construct
  source 1..80: mol_type = other DNA
gggcaaaggtcttggcaatcctcctcctgttcgcaggggtggatgcgacgacccacctcaccgggtcggccactggtagg

SEQ ID NO: 137711 - DNA, 80 bp, synthetic construct
  source 1..80: mol_type = other DNA
catttccaacgaccccattcaccaccacagaccctgactcaagtcacccgactggtggtagttcttctgaagggtgcact

SEQ ID NO: 137712 - DNA, 80 bp, synthetic construct
  source 1..80: mol_type = other DNA
actttcatgcctcaccgtgccggcttcatcattaaattatgccaacacatcaggcatataccatgttaccaacgactgtc

SEQ ID NO: 137713 - DNA, 80 bp, synthetic construct
  source 1..80: mol_type = other DNA
ccaggtattcagcgacccccggagatgagcccagccctacatacgacctagagctgataacatcatgctcatccaatgtt

SEQ ID NO: 137714 - DNA, 80 bp, synthetic construct
  source 1..80: mol_type = other DNA
ccttgtgggctcggatagtgctgatgacgcactttttcagcgttctacagagccaggaacagctggaaaaaaccctagca

SEQ ID NO: 137715 - DNA, 80 bp, synthetic construct
  source 1..80: mol_type = other DNA
tggctatatggacattctttgagatgctgagctcggggcgaaggtctgaacttgtcttctctggacaggggacccggacc

SEQ ID NO: 137716 - DNA, 80 bp, synthetic construct
  source 1..80: mol_type = other DNA
gctgccgggcgaggacctggccgcgggccgcgccgggtgcgggccccccccggagtggtccgccgagcgcggcgtgctgt

SEQ ID NO: 137717 - DNA, 80 bp, synthetic construct
  source 1..80: mol_type = other DNA
tgcagcagggtgaccgtatccacgggatggccaaagagaagcggacacaggctagcatccccctggaccgccagggtaca

SEQ ID NO: 137718 - DNA, 80 bp, synthetic construct
  source 1..80: mol_type = other DNA
ccttggggtcagggtgtgcgaaaagatggccctctatgacattgcacaaaagcttcccaaggcaaataatgggaccatcc

SEQ ID NO: 137719 - DNA, 80 bp, synthetic construct
  source 1..80: mol_type = other DNA
tactcctggacaggggcgctcatcaccccctgcagtcgtgaagaggaaaagttaccaataaaccctctgagcaattcgct

SEQ ID NO: 137720 - DNA, 80 bp, synthetic construct
  source 1..80: mol_type = other DNA
agagtgtttaccggactgactcatatagatgcccacttcttgtcacaggcaaaacagcagggcctaaactttgcatactt

SEQ ID NO: 137721 - DNA, 80 bp, synthetic construct
  source 1..80: mol_type = other DNA
gggcggttggctcgcatcccaaattgctccccctgcgggtgccactggctttgtggtcagtggcttggtggtggcagctg

SEQ ID NO: 137722 - DNA, 80 bp, synthetic construct
  source 1..80: mol_type = other DNA
atcgttgggagaggtggtggtgtatacgcttgttgattgagcgaacgtaatgacgacggagagggacccaaacacaccgt

SEQ ID NO: 137723 - DNA, 80 bp, synthetic construct
  source 1..80: mol_type = other DNA
cgtgggccgggccgaagcggcgctagagaacttaatcgtcctaaacgctgcatcggccgcaagccttcagggatggtggt

SEQ ID NO: 137724 - DNA, 80 bp, synthetic construct
  source 1..80: mol_type = other DNA
gcggggacggtgtgatgcacacggtgtgcccctgtggggcaagcttggccggacatgtcaaaaacggctcgatgaggatc

SEQ ID NO: 137725 - DNA, 80 bp, synthetic construct
  source 1..80: mol_type = other DNA
tacttcctagcacgagcagaggccatgctgcaagtgtggattcccagtttccatgttcgggggggtcgagatgccgtgat

SEQ ID NO: 137726 - DNA, 80 bp, synthetic construct
  source 1..80: mol_type = other DNA
ggcagcagcacccgtgccgtgactcgttgtgggtgcccgcgtggccgcaggcccacctcgcacacctcgaccaggtcccc

SEQ ID NO: 137727 - DNA, 80 bp, synthetic construct
  source 1..80: mol_type = other DNA
ataagggggtctggcgaggagatggcattatgcacactcgctgccactgtggagctgagattaccggacatgtcaagaac

SEQ ID NO: 137728 - DNA, 80 bp, synthetic construct
  source 1..80: mol_type = other DNA
cggcggggttcaaccccaccgtcaccgtctttcacgtgtacgacatcctggagaacgtggagcacgcgtacggcatgcgc

SEQ ID NO: 137729 - DNA, 80 bp, synthetic construct
  source 1..80: mol_type = other DNA
tgaatcttttcccgacaggtcccaccccccgcgcgatgcccccccgggccgctggccatgtcgtccggtggaggccccgc

SEQ ID NO: 137730 - DNA, 80 bp, synthetic construct
  source 1..80: mol_type = other DNA
ctacctgcaccactcaccccaagacctatgacgtagctgcgatggatacttccttggccccaaacccatatttggatctt

SEQ ID NO: 137731 - DNA, 80 bp, synthetic construct
  source 1..80: mol_type = other DNA
cccagcaacaaacacctttagacgtggaggtaattacaccaaaggcctacatacgtcggaaatataagtctacgttttcc

SEQ ID NO: 137732 - DNA, 80 bp, synthetic construct
  source 1..80: mol_type = other DNA
ttcgcccagggatggggtcccgtcacctacaccttgcctaccagctcggaccacaggccctattgctggcactacgcgca

SEQ ID NO: 137733 - DNA, 80 bp, synthetic construct
  source 1..80: mol_type = other DNA
gagagagggatggtaaaaccaaaagggaaagttgtagatcttggctgtgggagaggaggatggtcttattacatggcgac

SEQ ID NO: 137734 - DNA, 80 bp, synthetic construct
  source 1..80: mol_type = other DNA
ctggggcctgctcgtcatctgcttcgcctggcacttcaagggcaggttggtccctggggccacctacctttgcttgggca

SEQ ID NO: 137735 - DNA, 80 bp, synthetic construct
  source 1..80: mol_type = other DNA
catatcagcggcactcctgactctctgggacaacggagccattgcagtatggaattccaccaccgcgaccggactttgtc

SEQ ID NO: 137736 - DNA, 80 bp, synthetic construct
  source 1..80: mol_type = other DNA
gcgcatggcgaaaagtggtccggaagccaaaagagggttttctggtggtcggcccgggccagcgcggtccggaggtcggc

SEQ ID NO: 137737 - DNA, 80 bp, synthetic construct
  source 1..80: mol_type = other DNA
ctacaggtctcatacatctccatcagaacatagtggacgtacagttcctctacgggttgtcctcgaacatagtttcttgg

SEQ ID NO: 137738 - DNA, 80 bp, synthetic construct
  source 1..80: mol_type = other DNA
ggagattaggcccttgagtgaaaaagaagagaacatggttaaatcacaggtgacggccggacagggcacatcggaaacgt

SEQ ID NO: 137739 - DNA, 80 bp, synthetic construct
  source 1..80: mol_type = other DNA
aatttgatcaaacccagcttcagcttgcctgctccagagatgaccggctcaaccatcgcgcccacaacggactatcgcaa

SEQ ID NO: 137740 - DNA, 80 bp, synthetic construct
  source 1..80: mol_type = other DNA
aaaactatgccagtttacttccagaactatggtgtggccttatgccaatctagattttaactgcgctaattatgacctcc

SEQ ID NO: 137741 - DNA, 80 bp, synthetic construct
  source 1..80: mol_type = other DNA
tgtcattcctgctcgccgcaggggtgatactcgagccgccttactcagcccaagaccgatatccaccttgaaaggctcct

SEQ ID NO: 137742 - DNA, 80 bp, synthetic construct
  source 1..80: mol_type = other DNA
cattgtatcttctgcttgcccttagcttggcctctgttgccatgtgtagaacacccttctcactggctgaaggcattgtg

SEQ ID NO: 137743 - DNA, 80 bp, synthetic construct
  source 1..80: mol_type = other DNA
actattaactttgatgaacgatcgcggtggggcggtcagctaaagaccatcatgcatactaatatgccaaacgtgaacga

SEQ ID NO: 137744 - DNA, 80 bp, synthetic construct
  source 1..80: mol_type = other DNA
ctcacgcgctgtgaccaccatactcagctctctcaccataaccagtctcctccgcagactccatgagtggatcagtggag

SEQ ID NO: 137745 - DNA, 80 bp, synthetic construct
  source 1..80: mol_type = other DNA
aggcgtagccaaggccgtgcagttcgtccccgtagagaacctttctgtagtccagcggtcgcctagcttcactgacaaca

SEQ ID NO: 137746 - DNA, 80 bp, synthetic construct
  source 1..80: mol_type = other DNA
agtaccggaacgcggtggtggaacagcccctcccccagcgcggcgcggatttggccgagcccacccacccgcacgtcggg

SEQ ID NO: 137747 - DNA, 80 bp, synthetic construct
  source 1..80: mol_type = other DNA
aaagagtctagctggtcctatttcgcaacacaactacaggcccgggtaccacacccaaacggcaggaccctggcacttag

SEQ ID NO: 137748 - DNA, 80 bp, synthetic construct
  source 1..80: mol_type = other DNA
tcctctgtagtttctttacaactgtatgcgcgccttaattttagttggaataagtatactgatgatcttcccgaatatcc

SEQ ID NO: 137749 - DNA, 80 bp, synthetic construct
  source 1..80: mol_type = other DNA
cccctagctgcagcaggccggtgacggccggacggaagatggccagcgccgacgcactcagaaacggcacgtcggggtcg

SEQ ID NO: 137750 - DNA, 80 bp, synthetic construct
  source 1..80: mol_type = other DNA
gctaggatggaggctgcgctacaggtgtgggtaccgagccttgcagtccgtgggggccgtgatgctgtcatactccttac

SEQ ID NO: 137751 - DNA, 80 bp, synthetic construct
  source 1..80: mol_type = other DNA
tctcttcaattgggcggtgaagaccaagctcaaactcactccattgccggaggcgcgcctactggacttatccagttggt

SEQ ID NO: 137752 - DNA, 80 bp, synthetic construct
  source 1..80: mol_type = other DNA
ggaggacgcgatcctgcatttgccggggtgcgtgccctgcgttcgcgagggcaacacctcccgatgttggatggcgctct

SEQ ID NO: 137753 - DNA, 80 bp, synthetic construct
  source 1..80: mol_type = other DNA
acacgcgacaccgcgcacattccgccctcaagcgcgtacgcagttccatgcgcggatcgcgagacggccgccacaggccc

SEQ ID NO: 137754 - DNA, 80 bp, synthetic construct
  source 1..80: mol_type = other DNA
attatgcaacagggaaccttcctggttgctccttttctatcttcctgcttgctcttttgtcatgcatttcggtgccagtc

SEQ ID NO: 137755 - DNA, 80 bp, synthetic construct
  source 1..80: mol_type = other DNA
cgctccacatgcgccggctcatctgcagggcgcccagcatgtccggggcggagatcttgaaatcgcagttggtgccggtg

SEQ ID NO: 137756 - DNA, 80 bp, synthetic construct
  source 1..80: mol_type = other DNA
cagtgggaacaagctaaagctaccaatgccggtcaaaaggaaactcacacatttggagtagccgctatgggcggagaaga

SEQ ID NO: 137757 - DNA, 80 bp, synthetic construct
  source 1..80: mol_type = other DNA
ggatttccagataggatggggtaccttggaatacgagtataatgtcaccaatgaggaggatatgaggccgtactgttggc

SEQ ID NO: 137758 - DNA, 80 bp, synthetic construct
  source 1..80: mol_type = other DNA
tggtccacaccatgtaacaccacatggttgagggaggtttgggactgggtttgcacggtgttgtctgatttcaaggtgtg

SEQ ID NO: 137759 - DNA, 80 bp, synthetic construct
  source 1..80: mol_type = other DNA
cgccagcggcattgcctcgttgttcgatcagggggctaagcagcccatcaatgtcatccagacaaacggtagctggcatg

SEQ ID NO: 137760 - DNA, 80 bp, synthetic construct
  source 1..80: mol_type = other DNA
tcagagcaatggatgtgggatacatgtgtgatgacactatcacttatgaatgcccagtgctgtcggccggtaatgatcca

SEQ ID NO: 137761 - DNA, 80 bp, synthetic construct
  source 1..80: mol_type = other DNA
gaatgtatgtaggggtggttgagcacaggctcacggccgcatgcaacttcactcgtggggatcgctgcggcttggaggac

SEQ ID NO: 137762 - DNA, 80 bp, synthetic construct
  source 1..80: mol_type = other DNA
ggctcaaccaatacgtggttggatcacaactcccatgcgagcccgaaccggatgtagtaacgctcacttccatgctcacc

SEQ ID NO: 137763 - DNA, 80 bp, synthetic construct
  source 1..80: mol_type = other DNA
ctctggtgaatccagtatttcatagcacggctagaagctgagctgcatatgtgggctccgaccctgacagtccgggggtg

SEQ ID NO: 137764 - DNA, 80 bp, synthetic construct
  source 1..80: mol_type = other DNA
cggttctcgtcctcactggggccccaatgacccccggcgaaggtcccgcaatcttggtaaagtcatcgataccataacct

SEQ ID NO: 137765 - DNA, 80 bp, synthetic construct
  source 1..80: mol_type = other DNA
aaggggggaaagctgccatatgcggcaagtacctctttaattgggctgtcaaaaccaagctaaaactcactccaatacca

SEQ ID NO: 137766 - DNA, 80 bp, synthetic construct
  source 1..80: mol_type = other DNA
atggttttgatgactcacttcttcggcatactgcaagcacgagaagagctggagaaggctatggactttgacatgtacgg

SEQ ID NO: 137767 - DNA, 80 bp, synthetic construct
  source 1..80: mol_type = other DNA
ggcacccccagggcggacgtcgccatggccggtcgagcggggcgcacgcgtccgcgaacgttacgggacgcgatccccga

SEQ ID NO: 137768 - DNA, 80 bp, synthetic construct
  source 1..80: mol_type = other DNA
cccaagaccaagtttccaccagccctgccggtctgggcacggcctgattacaatccaccgcttgtggaatcatggaagaa

SEQ ID NO: 137769 - DNA, 80 bp, synthetic construct
  source 1..80: mol_type = other DNA
gcccttgcggcgccaacatctctggcaatgtccgcctgggctctatgaggatcacagggcctaaaacctgcatgaacacc

SEQ ID NO: 137770 - DNA, 80 bp, synthetic construct
  source 1..80: mol_type = other DNA
gcttgtggatgaagggagaaaggtggcaataaaagggccactccggatttcagcttcctccgctgcccaaaggaggtggc

SEQ ID NO: 137771 - DNA, 80 bp, synthetic construct
  source 1..80: mol_type = other DNA
caggcagatgctaccttaagtgcctttagcagcactgcaaatttaactttgcttgcttggactaataaaaccggagtatc

SEQ ID NO: 137772 - DNA, 80 bp, synthetic construct
  source 1..80: mol_type = other DNA
gccagtcaattgtcagccccgtcgaggaaagctacgtgcactacgcacggacggcatccagacgctgagcttatcactgc

SEQ ID NO: 137773 - DNA, 80 bp, synthetic construct
  source 1..80: mol_type = other DNA
ggaggagctccaagagatcccgacaatgctaaagaaaggaatgacaactgtccttgattttcatcctggagctgggaaga

SEQ ID NO: 137774 - DNA, 80 bp, synthetic construct
  source 1..80: mol_type = other DNA
gggcagttgttcacgttcagacccaggatgtacgagattgcccaggactgcaactgttccatctacgcgggccacatcac

SEQ ID NO: 137775 - DNA, 80 bp, synthetic construct
  source 1..80: mol_type = other DNA
gtactggaggctgaagttcagatgtgcggcgagttgcgtgactacctacgggtaacagtttctttatggcagggtgaaac

SEQ ID NO: 137776 - DNA, 80 bp, synthetic construct
  source 1..80: mol_type = other DNA
agaccgctatttggcgcgtatcggcgacagattacgctgaggtgacacggcacggctcctcctcgtatgtgacaggactg

SEQ ID NO: 137777 - DNA, 80 bp, synthetic construct
  source 1..80: mol_type = other DNA
gtggggtgaccgtgcgtatggagactccggaagctatcctgttttcccccggggaggcgttcagcacgaacgtctccatc

SEQ ID NO: 137778 - DNA, 80 bp, synthetic construct
  source 1..80: mol_type = other DNA
aaacaattcgtccgccagcatcccacctttacaagacgttctattgtttaccccagcttcgacagaaccccaaagtctta

SEQ ID NO: 137779 - DNA, 80 bp, synthetic construct
  source 1..80: mol_type = other DNA
gccggaggaaaaacagtgatggatgtgatatcaagagaggaccagaggggtagtggtcaagtggtaacatatgcgctaaa

SEQ ID NO: 137780 - DNA, 80 bp, synthetic construct
  source 1..80: mol_type = other DNA
gcgtcggtgtcggacgaccccgacgacacgtccgactggtcttgtgacgacattcccccacgacccaagcgggcccgggt

SEQ ID NO: 137781 - DNA, 80 bp, synthetic construct
  source 1..80: mol_type = other DNA
cgtgttactcatgcctttgccaggttcttcgacctcggtcccaatcagaaactccaattgattaacaccaatggcagctg

SEQ ID NO: 137782 - DNA, 80 bp, synthetic construct
  source 1..80: mol_type = other DNA
ggatgatgctactcgtggcgcaggttgaggctgctatggccaacttgatcaccatcaatgccatgtcggccgccagcact

SEQ ID NO: 137783 - DNA, 80 bp, synthetic construct
  source 1..80: mol_type = other DNA
cccaccatatgggtgcggatggtgttgatgacgcatttctttggaatactccaatcccaagaacaactccacaaagcgct

SEQ ID NO: 137784 - DNA, 80 bp, synthetic construct
  source 1..80: mol_type = other DNA
atgggagacagctagacacactccagtgaactcctggttggggaatataatcatgtatgcccctacgatctgggtacgca

SEQ ID NO: 137785 - DNA, 80 bp, synthetic construct
  source 1..80: mol_type = other DNA
ttcgagaaacggcacacacagatccgccgcgcctaccacccacaagtggtagaggcgagggaggctgggttggtctcggt

SEQ ID NO: 137786 - DNA, 80 bp, synthetic construct
  source 1..80: mol_type = other DNA
gagtctttgctcaaggtgccatacttcgtcagggcccatgctttgctgagaatttgtgccgtagtaaggaacattgcggg

SEQ ID NO: 137787 - DNA, 80 bp, synthetic construct
  source 1..80: mol_type = other DNA
aataagaaaagttcggctaaaaaaactattgttggcaatgtctacctagaaggtaatgcgggtcaaccagtagccgttgc

SEQ ID NO: 137788 - DNA, 80 bp, synthetic construct
  source 1..80: mol_type = other DNA
ttcccatagagtacatcaagggcggcaggcacttgatcttttgtcattctaagaagaagtgcactgagctcgccaaccag

SEQ ID NO: 137789 - DNA, 80 bp, synthetic construct
  source 1..80: mol_type = other DNA
cgtagtctggacaagcatcactagggttaagttacagcagaacccggttcgcggacggccgcggcaagcgggacttagtt

SEQ ID NO: 137790 - DNA, 80 bp, synthetic construct
  source 1..80: mol_type = other DNA
tacccgctctgctgtcacctggcgcccttgtggtgggagtcgtatgcgctgccatcctgaggcgtcatgttgggccctca

SEQ ID NO: 137791 - DNA, 80 bp, synthetic construct
  source 1..80: mol_type = other DNA
tggactgatccccatagtatagcagctagaggccacttgtataccctggcaaaggaaaacaaatgcgcccttgtcttgat

SEQ ID NO: 137792 - DNA, 80 bp, synthetic construct
  source 1..80: mol_type = other DNA
catggagcagtggatacgaatggatcacagaatatgcgggtaaaaccgtgtggtttgtggcgagcgtaaaaatggggaat

SEQ ID NO: 137793 - DNA, 80 bp, synthetic construct
  source 1..80: mol_type = other DNA
gaaggcgggccaggcggccgccaacgccaagacggtctacggggaaaacacacaccgcacattctcggtggtcgtcgacg

SEQ ID NO: 137794 - DNA, 80 bp, synthetic construct
  source 1..80: mol_type = other DNA
aagaagaaaatctggttaactccttggtcacagccggacatgggcaggttgacaatttttcactgggagtcctgggaatg

SEQ ID NO: 137795 - DNA, 80 bp, synthetic construct
  source 1..80: mol_type = other DNA
accggacggccctcaactgcaatgacacgctcaacacggggtttatttctgccctgttttattccaggacccaactcaac

SEQ ID NO: 137796 - DNA, 80 bp, synthetic construct
  source 1..80: mol_type = other DNA
gaagcccatgaatcaccctcttgtattgtggcatatcggactaccagtttttcaattgtttcatctaaatggcgtaccga

SEQ ID NO: 137797 - DNA, 80 bp, synthetic construct
  source 1..80: mol_type = other DNA
ttgtctggtgggcagagacagcagcgtgtggggacatcatacacgggctccccgtctccgcccggttgggtcgagagatc

SEQ ID NO: 137798 - DNA, 80 bp, synthetic construct
  source 1..80: mol_type = other DNA
acttggcggtgcatagcgacctgtcttattggattgaaagtggtcttgatgaaacctggaaacttgaacgcgcagtgctt

SEQ ID NO: 137799 - DNA, 80 bp, synthetic construct
  source 1..80: mol_type = other DNA
gtccggactgaaggtctcgtgggcggcggcgaacaaggcacacagggccgtgcctcccaaaaacacggacatcccccaaa

SEQ ID NO: 137800 - DNA, 80 bp, synthetic construct
  source 1..80: mol_type = other DNA
ctgctgtaagacatctctcgggtggcaagtacgtccagatgatgctactaacccttggtaaatggactggcacatacatc

SEQ ID NO: 137801 - DNA, 80 bp, synthetic construct
  source 1..80: mol_type = other DNA
gtataaaagtgttgtgcccatacaccagcactatgatggctgtctcttataccgtctctggagcgaaaagcaacaccata

SEQ ID NO: 137802 - DNA, 80 bp, synthetic construct
  source 1..80: mol_type = other DNA
tgaaatgggcgaggcggctgctatcttcatgactgctacaccaccaggaacccgcgatgcgtttccggattccaactcac

SEQ ID NO: 137803 - DNA, 80 bp, synthetic construct
  source 1..80: mol_type = other DNA
cattttcactccacggatactctccagttgagctcaatagggtaggggcttgcctcaggaaacttggggtgcctcccttg

SEQ ID NO: 137804 - DNA, 80 bp, synthetic construct
  source 1..80: mol_type = other DNA
gcaccgtcttggatcaggcagaaacagctggtgtacgcctcaccgtcctagcgacagcaacgcctccggggtcagtgaca

SEQ ID NO: 137805 - DNA, 80 bp, synthetic construct
  source 1..80: mol_type = other DNA
agccagtcccgccctttggccggcccttttagccgttggcgccggcgagaagacgaccaggatgactccgccgatgacaa

SEQ ID NO: 137806 - DNA, 80 bp, synthetic construct
  source 1..80: mol_type = other DNA
ccgcagccagcgcatacaatcgcgctcccgtccgtttgtcccgggcagtaccacgccgtactggtattcgtaccggctga

SEQ ID NO: 137807 - DNA, 80 bp, synthetic construct
  source 1..80: mol_type = other DNA
acggcctattcccaacagacgcggggcctacttggctgcatcatcactagcctcacaggccgggacaggaaccaggtcga

SEQ ID NO: 137808 - DNA, 80 bp, synthetic construct
  source 1..80: mol_type = other DNA
cgtgtaccccgacctgggagtgcgcgtatgcgagaagagggctttgtatgacgtagtcaaacagctccccattgccgtga

SEQ ID NO: 137809 - DNA, 80 bp, synthetic construct
  source 1..80: mol_type = other DNA
tgggtgtgcgcgcgacgaggaagacttccgagcggtcgcaacctcgtggaagacgccaacctatccccaaggcgcgtcga

SEQ ID NO: 137810 - DNA, 80 bp, synthetic construct
  source 1..80: mol_type = other DNA
ccgcaggtcggttccgactcgggccatggcactcaaggcgcagcatccacgtcaccggatgaggaggacaatgcctcaga

SEQ ID NO: 137811 - DNA, 80 bp, synthetic construct
  source 1..80: mol_type = other DNA
ttctgggaaatggtggagcaagaaagagaagcgcacctgcgcggagaatgccacacctgcatctacaacatgatgggcaa

SEQ ID NO: 137812 - DNA, 80 bp, synthetic construct
  source 1..80: mol_type = other DNA
gggactggcaagcgtaagggaaaactttaatgctccaaagctagcacccaaaaactgcatgctggaataagctctctttg

SEQ ID NO: 137813 - DNA, 80 bp, synthetic construct
  source 1..80: mol_type = other DNA
catgatgatagtgttgattcctgaacctgagaagcaacgatcccagacggacaaccagctagctgtgtttctgatctgtg

SEQ ID NO: 137814 - DNA, 80 bp, synthetic construct
  source 1..80: mol_type = other DNA
tttcaacaccatcttgttcattttcgtatattgcccaagaataaaaaaaacacaaatttgcataccgtgatcatttatta

SEQ ID NO: 137815 - DNA, 80 bp, synthetic construct
  source 1..80: mol_type = other DNA
cacaatgacaattgacccccaagtggagaaaaagatgggacaggtgctactcatagcagtagccgtctccagcgccatac

SEQ ID NO: 137816 - DNA, 80 bp, synthetic construct
  source 1..80: mol_type = other DNA
tgcgtgcaactggacacgcggcgagcgttgtgacctggaggacagagacaggagcgagcttagtccgctgctactttcca

SEQ ID NO: 137817 - DNA, 80 bp, synthetic construct
  source 1..80: mol_type = other DNA
aaggaacaaggcgatgagcatccaagtgcaccagggttttgtccttccatggacgtaaggtgcgcgtcagggttgtttcg

SEQ ID NO: 137818 - DNA, 80 bp, synthetic construct
  source 1..80: mol_type = other DNA
cagatcgcgggcgaggacgactacgaagaagacccccccctccagcccccggacgtcgccggtgggccgcgcgacggcgc

SEQ ID NO: 137819 - DNA, 80 bp, synthetic construct
  source 1..80: mol_type = other DNA
cgcgcgcgttgtggcgggtgtctgcagaggaatacgtggaagtgaggcgagtgggcgatttccactacgtgacgggcatg

SEQ ID NO: 137820 - DNA, 80 bp, synthetic construct
  source 1..80: mol_type = other DNA
aagaggccttatggggtgcatagttaccagcctgaccggccgggacagaaaccaagtggagggtgaggttcaaattgtgt

SEQ ID NO: 137821 - DNA, 80 bp, synthetic construct
  source 1..80: mol_type = other DNA
ttacacagccctgtttagcggagtctcatggataatgaaaattggaataggtgtcctcttaacctggatagggttgaatt

SEQ ID NO: 137822 - DNA, 80 bp, synthetic construct
  source 1..80: mol_type = other DNA
gaccccgacctggagtttgaacctgcgggatccgctcccccttccgagggggagtgtgaagtcattgattcggactctaa

SEQ ID NO: 137823 - DNA, 80 bp, synthetic construct
  source 1..80: mol_type = other DNA
ctcggggcacgctgctggtatcttccgagcggcagtgtgcacccggggtgtggccaaagctgtggactttgtgccggtcg

SEQ ID NO: 137824 - DNA, 80 bp, synthetic construct
  source 1..80: mol_type = other DNA
gtccgggctatcgaagacgggattaattatgcgacagggaatcttcccggttgctctttctctatcttcctcttggcact

SEQ ID NO: 137825 - DNA, 80 bp, synthetic construct
  source 1..80: mol_type = other DNA
ggctattctacgacgccacgtaggaccgggggaaggcgcggtccaatggatgaataggctcatcgcctttgcttccaggg

SEQ ID NO: 137826 - DNA, 80 bp, synthetic construct
  source 1..80: mol_type = other DNA
acgggccgctatggttcttcatcttcttcatggcggcctggtactttaagggcagggtggtccccatggccacgtactcc

SEQ ID NO: 137827 - DNA, 80 bp, synthetic construct
  source 1..80: mol_type = other DNA
gtcgaccctaacatcagaactggggtaaggaccatcaccacgggcgcccctatcacgtactccacctacggcaagttcct

SEQ ID NO: 137828 - DNA, 80 bp, synthetic construct
  source 1..80: mol_type = other DNA
tgcataactagcataaacgggaccagttgcttaccaaaggctcccatccacgtgtaggtctcaacgtcgtaggtgacgaa

SEQ ID NO: 137829 - DNA, 80 bp, synthetic construct
  source 1..80: mol_type = other DNA
ttgcccccctctcagactgggcagccagcggccttcgcgatctggccgtggcggtagaaccagttatcttctctccaatg

SEQ ID NO: 137830 - DNA, 80 bp, synthetic construct
  source 1..80: mol_type = other DNA
ccttgagatgtcgggtgaggccacaagcctggtttccggaagaaacaggggggttgccaataacccgccagggccaaaac

SEQ ID NO: 137831 - DNA, 80 bp, synthetic construct
  source 1..80: mol_type = other DNA
aacatcggctggaagcagcgtgtaactggaccaggggggagccctgcggcctggagcatagagatcgtgtcgacctctcg

SEQ ID NO: 137832 - DNA, 80 bp, synthetic construct
  source 1..80: mol_type = other DNA
cggctctgaattgtaacgattcccttaacaccgggttcgtcgccgccctcttctacgcgaagtcgaagctcaacttgact

SEQ ID NO: 137833 - DNA, 80 bp, synthetic construct
  source 1..80: mol_type = other DNA
cgaggtgaccacccgggccctgtgttcggcggccgcggcggccgcgtccaacaggtccattaactccaaagtatcaggcg

SEQ ID NO: 137834 - DNA, 80 bp, synthetic construct
  source 1..80: mol_type = other DNA
caacaaaccttgctcttcaacatcttgggagggtgggtggccacccagttggcttcccccacggcgtccacagctttcgt

SEQ ID NO: 137835 - DNA, 80 bp, synthetic construct
  source 1..80: mol_type = other DNA
tgccactcaatcattccttggcacgagtgtcaatggcgtgatgtggactgtcttccacggggccgggtccaaaaccctgg

SEQ ID NO: 137836 - DNA, 80 bp, synthetic construct
  source 1..80: mol_type = other DNA
cgtaaagccgccggaagatggcgctgctatgggcggccatggggacgcgaagacaggcctccagcagcaccaggtagatg

SEQ ID NO: 137837 - DNA, 80 bp, synthetic construct
  source 1..80: mol_type = other DNA
ctagtgcaacatttgtattcatactaacaatgctttccatttttcttttatttctcttttctttaccttctggcttgtat

SEQ ID NO: 137838 - DNA, 80 bp, synthetic construct
  source 1..80: mol_type = other DNA
ccccacattccgttgtaaacccgtttgttaaatagaactaattatcccggattttatattaaataaactatatgcgtttt

SEQ ID NO: 137839 - DNA, 80 bp, synthetic construct
  source 1..80: mol_type = other DNA
agtggatcgcttcccgcagccagcggatcagcgcggtagtttttcccgaccccattggcgcgcggaccacagtcacgcac

SEQ ID NO: 137840 - DNA, 80 bp, synthetic construct
  source 1..80: mol_type = other DNA
gcaggggttagggagttgttcggtcataagcttcagcgcgaacgaccaactaccccgatcatcagttatccttaaggtct

SEQ ID NO: 137841 - DNA, 80 bp, synthetic construct
  source 1..80: mol_type = other DNA
gaggctgcgcagcgtaggctggccaggggatcacccccctcgctagcaagctcttccgctagccagctttctgcgccatc

SEQ ID NO: 137842 - DNA, 80 bp, synthetic construct
  source 1..80: mol_type = other DNA
caactggggagcaaacgcctcagatgtgttcctgctgcaggggaccaggcccccccaagggccgtggtttggctgcacct

SEQ ID NO: 137843 - DNA, 80 bp, synthetic construct
  source 1..80: mol_type = other DNA
agccagctctctgctccctctttgcgggcaacctgccacacccatggcgggttgcctgactcggagctagtagatgccaa

SEQ ID NO: 137844 - DNA, 80 bp, synthetic construct
  source 1..80: mol_type = other DNA
gggggcgggtccgccggtaagagccggggggaacatcggcaccgccatcccacctcgagctgttggttgggcgtgtggtg

SEQ ID NO: 137845 - DNA, 80 bp, synthetic construct
  source 1..80: mol_type = other DNA
cggtagaaaccgaaggctgcattcactcaccttgtcaaggacctgaggatctctgtacccttattaagaccctgtgcggt

SEQ ID NO: 137846 - DNA, 80 bp, synthetic construct
  source 1..80: mol_type = other DNA
tgtagcttttaagatcatgagcggcgaggcccccgctgtggaggacatggtcaaccttctgcctgctcttctctcacctg

SEQ ID NO: 137847 - DNA, 80 bp, synthetic construct
  source 1..80: mol_type = other DNA
ctccgtctcggccgcattagcacaactggcggtgaaatctttccccccggaaactacatcgtccggagaggcagattcgg

SEQ ID NO: 137848 - DNA, 80 bp, synthetic construct
  source 1..80: mol_type = other DNA
tggctctgaaaggcacaacctatggcatgtgcacagaaaaattctcgttcgcgaaaaatccggcggacactggtcacgga

SEQ ID NO: 137849 - DNA, 80 bp, synthetic construct
  source 1..80: mol_type = other DNA
atccccacgcctgattacaacaaggcattgtggcgcgtctcagcggaggagtacgtggagatacggaggataggcgacag

SEQ ID NO: 137850 - DNA, 80 bp, synthetic construct
  source 1..80: mol_type = other DNA
ccaaaggccgaagttacaacttgcttcccgacaaaaaaaatactaagtaccgtagctggtatttggcatacaactatgga

SEQ ID NO: 137851 - DNA, 80 bp, synthetic construct
  source 1..80: mol_type = other DNA
gggatacctccatgcccccactggcagcgggaagagtaccaaggtccccgcagcgtatgccgctcaggggtataaggtgc

SEQ ID NO: 137852 - DNA, 80 bp, synthetic construct
  source 1..80: mol_type = other DNA
aatgtggaagtctaaaaaggtcccactgggattttcatatgacacccgctgttttgactccaccgtcactgagcaggaca

SEQ ID NO: 137853 - DNA, 80 bp, synthetic construct
  source 1..80: mol_type = other DNA
agcggggctcctctactaccacaaattcgactcctcaggctgccccgagaggatggccagctgtagaccccttgccgatt

SEQ ID NO: 137854 - DNA, 80 bp, synthetic construct
  source 1..80: mol_type = other DNA
tactcttggcgttgcctcagcaggcttacgcccttgacgcagctgaacagggccagctcggtctcgcgctgctggtgatc

SEQ ID NO: 137855 - DNA, 80 bp, synthetic construct
  source 1..80: mol_type = other DNA
gttacctccatgctcccactggcagtggtaagagcacgaaggtccctgcagcttacgcgtcgcagggctacacggtcctc

SEQ ID NO: 137856 - DNA, 80 bp, synthetic construct
  source 1..80: mol_type = other DNA
cagggcgcgcccgcgccggccggcgacgcccccgcgggccacggggagtaggtggagctaacactcggcttgctgcccga

SEQ ID NO: 137857 - DNA, 80 bp, synthetic construct
  source 1..80: mol_type = other DNA
cctagttacctctaaaggagtgctttgctgagtgtaccatacttcgtcaggctcatgctctgctgaggcatgcgctatgg

SEQ ID NO: 137858 - DNA, 80 bp, synthetic construct
  source 1..80: mol_type = other DNA
tgccggaattaaaaatccatcattccttgtctgcggagatgacttggtcgtgattgctgagagtgcagggatcgatgagg

SEQ ID NO: 137859 - DNA, 80 bp, synthetic construct
  source 1..80: mol_type = other DNA
gggcctagcacacataagccatactgctggcactaccccccaagaccgtgtggtgtcgttcccgcgaggagtgtttgcgg

SEQ ID NO: 137860 - DNA, 80 bp, synthetic construct
  source 1..80: mol_type = other DNA
gaagcggcagaagcgcgggaggaggcgggggggcgggggcggtagcatcggggggcgccggggaagtttagagggaccgc

SEQ ID NO: 137861 - DNA, 80 bp, synthetic construct
  source 1..80: mol_type = other DNA
ccactcccctcctatataggctggggggtgttcaaaatgaagtgacactaactcatccagtcaccaagtacatcatggcc

SEQ ID NO: 137862 - DNA, 80 bp, synthetic construct
  source 1..80: mol_type = other DNA
atcacccccacgtacaagaagttgttgacctgcttcatttggtggaatcagtatttcctcgcccgagctgaggccatggt

SEQ ID NO: 137863 - DNA, 80 bp, synthetic construct
  source 1..80: mol_type = other DNA
aggcgtgtccggagccctcgtagcttttaagatcatgagtggcgagtgcccgtctgcagaggacatggtcaacctcctac

SEQ ID NO: 137864 - DNA, 80 bp, synthetic construct
  source 1..80: mol_type = other DNA
acagagactacatggttgcccaaaacagatttggtagggaagaaactcatgtggtaggaggagtgctgtagattgaaatg

SEQ ID NO: 137865 - DNA, 80 bp, synthetic construct
  source 1..80: mol_type = other DNA
tcttgagatcatgacgagcacatgggtcctcgcagggggagtgctggcagctgtcgcggcctatttccttgcaacaggct

SEQ ID NO: 137866 - DNA, 80 bp, synthetic construct
  source 1..80: mol_type = other DNA
gtggtgacgacctagtcgtcatcgctgaaagcgacggcgtggacgaggacgccagagccctccgagctttcacggaagct

SEQ ID NO: 137867 - DNA, 80 bp, synthetic construct
  source 1..80: mol_type = other DNA
acggagatgtcatcaacccatttggagatggggaagtgaaacctgctctgtatgaaaggaagatgagcttgatattggcg

SEQ ID NO: 137868 - DNA, 80 bp, synthetic construct
  source 1..80: mol_type = other DNA
gaaatggccatggtaccactcctgttactgggtttgttggctctatcaggaggagtgaccctcgtcagaaagaacagatg

SEQ ID NO: 137869 - DNA, 80 bp, synthetic construct
  source 1..80: mol_type = other DNA
aatcatggccaaaaatgaagtcttctgcgtgaagccagagaagggcgggcgaaagccagcgcgtctaatcgtatatccgg

SEQ ID NO: 137870 - DNA, 80 bp, synthetic construct
  source 1..80: mol_type = other DNA
cttgtggctctagtgacctctatctggtcacgagggaggccgatgttatccccgcaaggcgcaggggtgacaatcgtgct

SEQ ID NO: 137871 - DNA, 80 bp, synthetic construct
  source 1..80: mol_type = other DNA
catgggctcgacgccttttccctgcacacatactccccccacgaactcacacgggtagcagctgctctcagaaaacttgg

SEQ ID NO: 137872 - DNA, 80 bp, synthetic construct
  source 1..80: mol_type = other DNA
aacattgccaggtaacccggcaatagcttccctcatgtccttctcagcctctctcaccagcccgttatccacttccacga

SEQ ID NO: 137873 - DNA, 80 bp, synthetic construct
  source 1..80: mol_type = other DNA
atccatctcatttgacagcggagacggcccgccggaggttggctagggggtccccaccctctctggctagttcctcggca

SEQ ID NO: 137874 - DNA, 80 bp, synthetic construct
  source 1..80: mol_type = other DNA
tctccgccttggaaggcgacctgatggttcccatcaatggttttgctttggcctggttggcaatacgagcgatggttgtt

SEQ ID NO: 137875 - DNA, 80 bp, synthetic construct
  source 1..80: mol_type = other DNA
gccccggaacaacagttacaattcaggagaattgtgaccatagaggcccatctttgaggaccaccactgcatctggaaaa

SEQ ID NO: 137876 - DNA, 80 bp, synthetic construct
  source 1..80: mol_type = other DNA
tcaaaaatggttccatgaggatcgtcgggcctagaacctgcagcaacacgtggtgcggaacattccccatcaacgcatac

SEQ ID NO: 137877 - DNA, 80 bp, synthetic construct
  source 1..80: mol_type = other DNA
ccataaacgctttaagcaattccctcattcgtcaccacaatttggtatattccaccacaaccaagagtgcagccgctcgt

SEQ ID NO: 137878 - DNA, 80 bp, synthetic construct
  source 1..80: mol_type = other DNA
gctggtacgcctgaatgactcaaacgtctcacaggtgttggccgaacttgctgcaacatctttcccggcgacaacaactc

SEQ ID NO: 137879 - DNA, 80 bp, synthetic construct
  source 1..80: mol_type = other DNA
tccattcatgccaaacctgacagcttatccaaaaccaagcgctcaaaatgcaaaaaactattcaagaactaaaatcataa

SEQ ID NO: 137880 - DNA, 80 bp, synthetic construct
  source 1..80: mol_type = other DNA
cccattcatgatttgcaggacgaaatccctgacagagcatggagcagtgggtatgaatggataactgagtatgtgggcaa

SEQ ID NO: 137881 - DNA, 80 bp, synthetic construct
  source 1..80: mol_type = other DNA
ccccaccagcagtgccccagagcttccaggtggcccatctacacgctcccaccggcagcggcaagagcaccaaggtcccg

SEQ ID NO: 137882 - DNA, 80 bp, synthetic construct
  source 1..80: mol_type = other DNA
cgccggggaaaacccacacaacatggccaggtgctcgccggcaaattcctgggttccgccgacgaggtgcgcggtgtgcc

SEQ ID NO: 137883 - DNA, 80 bp, synthetic construct
  source 1..80: mol_type = other DNA
ccctcctcctcaacatcttgggggggtgggtcgcatcccaactagccccgccctccgcttcaacggcatttgtcgtgagt

SEQ ID NO: 137884 - DNA, 80 bp, synthetic construct
  source 1..80: mol_type = other DNA
ttttatttcctttgtcatgtatttctacagcgacggaacatggagaaaaacctatcccgtgtttgacaacgaagggatac

SEQ ID NO: 137885 - DNA, 80 bp, synthetic construct
  source 1..80: mol_type = other DNA
tactgttgcagagagatggctctcacttgccgcctgcgcattcccgtcccgaattaccgaggaagatcccgccgcaggag

SEQ ID NO: 137886 - DNA, 80 bp, synthetic construct
  source 1..80: mol_type = other DNA
ggggctcgttggtccagcagagtctgccgcccttgcgcgagcagaacggaggtagcacatcaagcagatgctcgtcaggg

SEQ ID NO: 137887 - DNA, 80 bp, synthetic construct
  source 1..80: mol_type = other DNA
gagtagtgacaacaagtggaacctacgtcagtgccatagctcaagccaaagcatcacaagaagggcctctaccagagatt

SEQ ID NO: 137888 - DNA, 80 bp, synthetic construct
  source 1..80: mol_type = other DNA
gtcaagatatcatactgatggatggaaatcaatttgcgagtggtctgatccctcatacacatgtcataagaaaaacggaa

SEQ ID NO: 137889 - DNA, 80 bp, synthetic construct
  source 1..80: mol_type = other DNA
cgcgggggacagccgcttagggcgtcggcgacgcgcttgacggcttcctccgagagcagaagtccgtcggttacgttaca

SEQ ID NO: 137890 - DNA, 80 bp, synthetic construct
  source 1..80: mol_type = other DNA
cgtagacctccttgtgggggccgcagcattttgctcggctatgtacatcggagatctctgtggtagcgtattcttggtgg

SEQ ID NO: 137891 - DNA, 80 bp, synthetic construct
  source 1..80: mol_type = other DNA
cccaaattggagctaaccaagcagtcaggttcaccatttcaccaaacgctccagccatcacagcaaagatgggcgactat

SEQ ID NO: 137892 - DNA, 80 bp, synthetic construct
  source 1..80: mol_type = other DNA
caagcttgtgccctccctacctggaattcctctgctctcttgccagcggggtttcagggtggtgtggcgaggcgatggca

SEQ ID NO: 137893 - DNA, 80 bp, synthetic construct
  source 1..80: mol_type = other DNA
ttctctcgtgtctcactactcctgcctcggcggcgcactatgccaataagaccaacagctaccatctgactaatgactgt

SEQ ID NO: 137894 - DNA, 80 bp, synthetic construct
  source 1..80: mol_type = other DNA
acccaaacttcgccaataaaaacagtagcggacgctagcatgcagacagatccttattacctacctaggctttccaaaaa

SEQ ID NO: 137895 - DNA, 80 bp, synthetic construct
  source 1..80: mol_type = other DNA
aagatgacctatccatgtgtatctcaattgttatatacggtttacgggtaaacagacctgacgatcagaccacaccaaca

SEQ ID NO: 137896 - DNA, 80 bp, synthetic construct
  source 1..80: mol_type = other DNA
cgggccacaggatggcatgggacatgatgatgaactggagccccacgaccaccttgattctcgcccagctcatgagggtc

SEQ ID NO: 137897 - DNA, 80 bp, synthetic construct
  source 1..80: mol_type = other DNA
ttcatggacaagggcatcccgtttatgaagatgaacatctcggtcataattctactggtcagtggctggaattcaataac

SEQ ID NO: 137898 - DNA, 80 bp, synthetic construct
  source 1..80: mol_type = other DNA
ctactcgaatcatggaagaggcaagactacgaccccccggtagtgcacgggtgcgccctacctcccagcaagctacctcc

SEQ ID NO: 137899 - DNA, 80 bp, synthetic construct
  source 1..80: mol_type = other DNA
aggcagcgcccaacagaccgaactacattggctttagggataacttcatcggcctgatgtactacaactccacaggcaat

SEQ ID NO: 137900 - DNA, 80 bp, synthetic construct
  source 1..80: mol_type = other DNA
gttgctcataccagaaccagaaaagcagagaaccccccaagacaaccaactcgcatatgtcgtgataggcatacttacat

SEQ ID NO: 137901 - DNA, 80 bp, synthetic construct
  source 1..80: mol_type = other DNA
ctcacgcagcacctcactgtctgtgtcactagtactggtgggaattgtgacactgtatttgggagtcatggtgcaggccg

SEQ ID NO: 137902 - DNA, 80 bp, synthetic construct
  source 1..80: mol_type = other DNA
ggagtacctttggtattaccagcttgttctccacaggccccagccagagactccagctcgtgaataccaacgggagctgg

SEQ ID NO: 137903 - DNA, 80 bp, synthetic construct
  source 1..80: mol_type = other DNA
gtcgagatggaaccccccttcggagactcctacatcgtagttggaaggggagacaagcagatcaaccaccattggcacaa

SEQ ID NO: 137904 - DNA, 80 bp, synthetic construct
  source 1..80: mol_type = other DNA
ccgagctgcatgggagacagctcgtcacactccagtgaattcctggttggggaacatcatcatgtacgctcccaccatat

SEQ ID NO: 137905 - DNA, 80 bp, synthetic construct
  source 1..80: mol_type = other DNA
gaagaaggtgaccttcgaccgtgtccaggtagtagaccagcactaccatgatgtcctaaaggagataaaagctcgagcct

SEQ ID NO: 137906 - DNA, 80 bp, synthetic construct
  source 1..80: mol_type = other DNA
cattggcccagtacggctcgcgggtgcagatccgatgccggtttcggaattccacccgcatggagttccgcctccagata

SEQ ID NO: 137907 - DNA, 80 bp, synthetic construct
  source 1..80: mol_type = other DNA
caaaatacatcatgacctgcatgtcagctgacctagaggtgatcaccagtacttgggtgctcgctgggggcattcttgcc

SEQ ID NO: 137908 - DNA, 80 bp, synthetic construct
  source 1..80: mol_type = other DNA
gttcaacagcaagggtcaaacctgcggttacagacgttgccgcgccagcggggtgctaaccactagcatgggtaacacca

SEQ ID NO: 137909 - DNA, 80 bp, synthetic construct
  source 1..80: mol_type = other DNA
agtacctcttcaactgggccgtgaaaactaagctcaaactcactccattgcgcgacgctcaccgcctcgacttatctggg

SEQ ID NO: 137910 - DNA, 80 bp, synthetic construct
  source 1..80: mol_type = other DNA
cacggtcttcatctgcctagcggtgctcactctatcgccatattacaaacagtacatggcccgcggcatctggtggctgc

SEQ ID NO: 137911 - DNA, 80 bp, synthetic construct
  source 1..80: mol_type = other DNA
cacccgaccaccgcgggggtcatggttcggttgcacgtggatgaactccactggtttcaccaaaacctgcggcgcgccac

SEQ ID NO: 137912 - DNA, 80 bp, synthetic construct
  source 1..80: mol_type = other DNA
ggcgtccgcggctcgggcctgggtgttgtgcagcagctggccgtcgttgcggttgaagtccgcggtcgccacgttacacg

SEQ ID NO: 137913 - DNA, 80 bp, synthetic construct
  source 1..80: mol_type = other DNA
actcctacttaccgtaggggtaggcatctttttgctccccgcccgataaagggcggcactaagcaacactccatttccct

SEQ ID NO: 137914 - DNA, 80 bp, synthetic construct
  source 1..80: mol_type = other DNA
ggatgctgccaaggaagctgcaaagcaacagggagatggcgctgtcactagaggcgatacccacctcactgtagctcaag

SEQ ID NO: 137915 - DNA, 80 bp, synthetic construct
  source 1..80: mol_type = other DNA
gctgatgtcattcccgctcggcgcaggggggactccacagcgagcttgctcagtcctaggcctctcgcccgtcttaaagg

SEQ ID NO: 137916 - DNA, 80 bp, synthetic construct
  source 1..80: mol_type = other DNA
cggggcccgtaacctggatcccgcggtctcggcggccatgcaaagtcagccttctggagttacggcttcagatgactgga

SEQ ID NO: 137917 - DNA, 80 bp, synthetic construct
  source 1..80: mol_type = other DNA
tcgggcggagaaacggccgaagccacgcccactttattcgcgtctccaaaaaaacgggacacttgtccggagaaccttta

SEQ ID NO: 137918 - DNA, 80 bp, synthetic construct
  source 1..80: mol_type = other DNA
gggcgcggcggtgcctctgcgtggtggcgcgtggcgtccggcgggtgcgggcgagacgtagtctgctgcaagagacaacg

SEQ ID NO: 137919 - DNA, 80 bp, synthetic construct
  source 1..80: mol_type = other DNA
agtcgctgggggccattatgtccaaatggttttcatgaaactggccgcactaacaggcacgtacgtttatgaccacctta

SEQ ID NO: 137920 - DNA, 80 bp, synthetic construct
  source 1..80: mol_type = other DNA
atttttggtactaggtccggtgtcagaggatgagtcatcacctttagaagaagaccacccgtctccccctgattttacaa

SEQ ID NO: 137921 - DNA, 80 bp, synthetic construct
  source 1..80: mol_type = other DNA
caggaacgcatcaggaatttaccatctcaccaatgactgtcccaatgctagcattgtgtacgaggcggatactatgatct

SEQ ID NO: 137922 - DNA, 80 bp, synthetic construct
  source 1..80: mol_type = other DNA
ggccggtcctgtgtcctgcaggtcacgccgttggtctcttccgagctgccgtctgcacgcgaggtgtcgccaaggcgatt

SEQ ID NO: 137923 - DNA, 80 bp, synthetic construct
  source 1..80: mol_type = other DNA
ttagaagaccatcttgccggattaccacgagaagccgtacccgacgtactccaagtgacacagttggttttgccaaatcg

SEQ ID NO: 137924 - DNA, 80 bp, synthetic construct
  source 1..80: mol_type = other DNA
ttgttactagcagttgggtgttggggtcaggtgactttgactgtagccgtcacgacggctgctctgttgttctgtcacta

SEQ ID NO: 137925 - DNA, 80 bp, synthetic construct
  source 1..80: mol_type = other DNA
tctgtcccagactaagcaggcgggggacaactatccatacctggtagcttatcaggccacagtttgcgcgagggcgcttg

SEQ ID NO: 137926 - DNA, 80 bp, synthetic construct
  source 1..80: mol_type = other DNA
ggtccttatgacccacttcttctgggtactacagtcccaggagcagttggagaaagcactcgacttcgatatatacggag

SEQ ID NO: 137927 - DNA, 80 bp, synthetic construct
  source 1..80: mol_type = other DNA
ggaaggagatatttttgggaccggctgatagtctcgaagggcaagggtggcgactccttgctcccatcactgcttatgcc

SEQ ID NO: 137928 - DNA, 80 bp, synthetic construct
  source 1..80: mol_type = other DNA
gtcctgtgtattttttccaggacgtggtaaaggtgactctggatgttcagatacatgggcataagcccgtctctggggtg

SEQ ID NO: 137929 - DNA, 80 bp, synthetic construct
  source 1..80: mol_type = other DNA
agcttttgatttcaaatgtctaaaaaaccaggaggacccgggaagccccgggtcgtcaatatgctaaaacgcggcatacc

SEQ ID NO: 137930 - DNA, 80 bp, synthetic construct
  source 1..80: mol_type = other DNA
gggtgcggaaggcaggcgcacgagcagctttgccggcctcttctcccccggggcgtcccaaagggtgcagctcataaact

SEQ ID NO: 137931 - DNA, 80 bp, synthetic construct
  source 1..80: mol_type = other DNA
tgacagggaaatatctgtgtctgctgattgtttccgtaggggaccgaaatttcccccggcgctgcccatatgggctcggc

SEQ ID NO: 137932 - DNA, 80 bp, synthetic construct
  source 1..80: mol_type = other DNA
aggagtggcagcaccattggaaaagcatttgaagccactgtgagaggtgccaagagaatggcagtcttgggagacacagc

SEQ ID NO: 137933 - DNA, 80 bp, synthetic construct
  source 1..80: mol_type = other DNA
gccgcttactgcctgacagtgggcagtgttgtcatctgcggcaggatcataacatcagggaaacctgctatagtgccgga

SEQ ID NO: 137934 - DNA, 80 bp, synthetic construct
  source 1..80: mol_type = other DNA
accccggaaggttggccgggttggtgatgtaactttccgggacgacaaagcggtccacaaactgcatgtgctcctcggtg

SEQ ID NO: 137935 - DNA, 80 bp, synthetic construct
  source 1..80: mol_type = other DNA
aagacctaaaaaatgaagaaatggtaacaaaccacatggaaggagaacacaagaaattagccgaggctattttcaaacta

SEQ ID NO: 137936 - DNA, 80 bp, synthetic construct
  source 1..80: mol_type = other DNA
ggggacgtagtggtcgtcgccacagatgccctaatgactggatacaccggtgactttgactctgtcatcgactgcaacgt

SEQ ID NO: 137937 - DNA, 80 bp, synthetic construct
  source 1..80: mol_type = other DNA
cccacagacacggggcgacgcagggacaggactccgttacgacggaggagagccacagtgcgttggcggaatcgatgtgg

SEQ ID NO: 137938 - DNA, 80 bp, synthetic construct
  source 1..80: mol_type = other DNA
tctcccagctgttcaccttctcgcctcgccggcatgagacagtgcaggactgcaactgctcaatctatcccggccatgta

SEQ ID NO: 137939 - DNA, 80 bp, synthetic construct
  source 1..80: mol_type = other DNA
gcggggctcttccaatattcctgatgaccttgatgaaggaaaaaacgaggaggtcatggcccctcaatgagggcatcatg

SEQ ID NO: 137940 - DNA, 80 bp, synthetic construct
  source 1..80: mol_type = other DNA
tgtgattcaaccgccctcgcccccgccccactttcccccctgtctatcaaagttccctggcccctggcttcgcgccggtg

SEQ ID NO: 137941 - DNA, 80 bp, synthetic construct
  source 1..80: mol_type = other DNA
tgggccaaagtcctgcttgtactctgcctctttgcaggagtggacgcaagcacgcgcaccgtcggtggcagtgctgcccg

SEQ ID NO: 137942 - DNA, 80 bp, synthetic construct
  source 1..80: mol_type = other DNA
tggcccccaagcgcctacgtctcccccacatccgggatgacgacgcgcccccctcgcaccagccattgttttactagagg

SEQ ID NO: 137943 - DNA, 80 bp, synthetic construct
  source 1..80: mol_type = other DNA
cggagcaaaggatgtccggagccacgccagcaaggccatacgccacatcaactccgtgtgggaagacttgctggaagacc

SEQ ID NO: 137944 - DNA, 80 bp, synthetic construct
  source 1..80: mol_type = other DNA
aggactattcccagtatcaatcccaatcacagccgcggcctggtacttatgggagacaaaaaagcagagggccggagtgc

SEQ ID NO: 137945 - DNA, 80 bp, synthetic construct
  source 1..80: mol_type = other DNA
gcacaacagctcccagacaggagttacgttcagggtggggggcagggccacgagctccagctctccggtgacgttgatcg

SEQ ID NO: 137946 - DNA, 80 bp, synthetic construct
  source 1..80: mol_type = other DNA
caaggtcaaaatcaagggaacgacatatggcatgtgtgattctgccttcaccttcagcaagaacccaactgacacagggc

SEQ ID NO: 137947 - DNA, 80 bp, synthetic construct
  source 1..80: mol_type = other DNA
accggcctcacgcacattgacgctcacttcctctctcagacgaagcaatcaggggagaactttgcatacttgacggccta

SEQ ID NO: 137948 - DNA, 80 bp, synthetic construct
  source 1..80: mol_type = other DNA
aagcctcgcgcaaaaaagcaagcacatcgtagtcatgctcatgcagataaaggcaggtaagttccggaaccaccacagaa

SEQ ID NO: 137949 - DNA, 80 bp, synthetic construct
  source 1..80: mol_type = other DNA
tccaaaaagacaccagttggcttctcatacgacactaggtgttttgactcgactgtcacggaaagagacatccgtacaga

SEQ ID NO: 137950 - DNA, 80 bp, synthetic construct
  source 1..80: mol_type = other DNA
atgatttgtaaagcttttatcattaataaacgggtgcgacgagcacagcagcgcacacgtatctcacttaaatccttaca

SEQ ID NO: 137951 - DNA, 80 bp, synthetic construct
  source 1..80: mol_type = other DNA
atgccatcttgaacccgcactggctaccgccccctggtttctacaccgggggattcgaggtgcccgagggtaacgatgga

SEQ ID NO: 137952 - DNA, 80 bp, synthetic construct
  source 1..80: mol_type = other DNA
atgcgggcgaacgtgagggtgcacaggagcggggtcaggtggtgcgtcacgctccggaggtggacgatcgcgcagtagcg

SEQ ID NO: 137953 - DNA, 80 bp, synthetic construct
  source 1..80: mol_type = other DNA
agtcaaacagcgtgaggcacagctccagctccgactcgcgggaaaaggccgtggtgttgcggagcgccacgacgacgggc

SEQ ID NO: 137954 - DNA, 80 bp, synthetic construct
  source 1..80: mol_type = other DNA
ttgggaatcggtaccgtcttggaccaggcagagacagccggagtgcgtcttacggttctagcaaccgccactcctcccgg

SEQ ID NO: 137955 - DNA, 80 bp, synthetic construct
  source 1..80: mol_type = other DNA
caaccgtcgcccagaagacgttaagttcccgggcggcggccagatcgttggcggagtatacttgttgccgcgcaggtgcc

SEQ ID NO: 137956 - DNA, 80 bp, synthetic construct
  source 1..80: mol_type = other DNA
ttacatgccaagtgtggtagaaactctggagcaaatgcaaagaaaacatggagggatgctagtgcgaaacccactctcaa

SEQ ID NO: 137957 - DNA, 80 bp, synthetic construct
  source 1..80: mol_type = other DNA
catccgtcatacagactgtggactttagccttgaccccaccttctccatagagaccactaccgtaccccaggacgcagtg

SEQ ID NO: 137958 - DNA, 80 bp, synthetic construct
  source 1..80: mol_type = other DNA
tcgggttcggtaaactgcgcaaagcgcggagccacgtcgcgcgtgcgtgccccgcgatgcgcttcccaggactggcggac

SEQ ID NO: 137959 - DNA, 80 bp, synthetic construct
  source 1..80: mol_type = other DNA
acttctaccgccgccacggctaccgagcctcccaggaggcgaagatggggcgccgccagccggctgatgcccaactacgt

SEQ ID NO: 137960 - DNA, 80 bp, synthetic construct
  source 1..80: mol_type = other DNA
agagctcaatcgggtggcatcctgcctcaggaagcttggggcgcccccattgagagcctggaggcatagggcccgagcag

SEQ ID NO: 137961 - DNA, 80 bp, synthetic construct
  source 1..80: mol_type = other DNA
agagggtctactacctgactcgtgaccctaccactcctctcgcgcgcgctgcgtgggaaacagctagacacactcctgtt

SEQ ID NO: 137962 - DNA, 80 bp, synthetic construct
  source 1..80: mol_type = other DNA
cgccggcgaggtggacgtcggagacgagctaatcgcgatttccgacaaacgcggacccccccgtcatgaccgcccacacc

SEQ ID NO: 137963 - DNA, 80 bp, synthetic construct
  source 1..80: mol_type = other DNA
gcaactgacgcgctaatgactggctacaccggggatttcgactcggtgatagactgcaacgtgtgcgtcgtccaaaccgt

SEQ ID NO: 137964 - DNA, 80 bp, synthetic construct
  source 1..80: mol_type = other DNA
gcgcgcctacctaaacaccccagggcttcctgtgtgccaggaccaccttgagttctgggagggagtattcactggactga

SEQ ID NO: 137965 - DNA, 80 bp, synthetic construct
  source 1..80: mol_type = other DNA
taggactagtctacttcagcatacaaaccaattgggccaaagtcatcttagtcttattcctctttgcaggggttgacgct

SEQ ID NO: 137966 - DNA, 80 bp, synthetic construct
  source 1..80: mol_type = other DNA
ctggagggtggcggcctcggagtacgcggaggtgacgcagcatgggtcgtactcctatgtaacaggactgaccactgaca

SEQ ID NO: 137967 - DNA, 80 bp, synthetic construct
  source 1..80: mol_type = other DNA
ggcgaataccgtctcagaggtgaagaaaagaaaaacttcttagagctgcttaggacggctgacctcccggtgtggctggc

SEQ ID NO: 137968 - DNA, 80 bp, synthetic construct
  source 1..80: mol_type = other DNA
ggagacggcggctaggcgactggcccgggggtctcccccttcacaggccagctcttctgcgagccagctctccgccccgt

SEQ ID NO: 137969 - DNA, 80 bp, synthetic construct
  source 1..80: mol_type = other DNA
gcccggattgcccgtgtgccaagaccacctagaattctgggaggccgtattcaccggcctgacacatattgatgcccatt

SEQ ID NO: 137970 - DNA, 80 bp, synthetic construct
  source 1..80: mol_type = other DNA
agtcattcttgtgttactcctatttgcgggcgtcgacgcgactacgcatattggctctggcatcacccgtaatacccaca

SEQ ID NO: 137971 - DNA, 80 bp, synthetic construct
  source 1..80: mol_type = other DNA
acgccccgcgccacgtcacaaactccaccccctcattatcatattggcttcaatccaaaataaggtatattattgatgat

SEQ ID NO: 137972 - DNA, 80 bp, synthetic construct
  source 1..80: mol_type = other DNA
tgcctccccgagcatacgctatggacaatgagcaggcggcatccctcggagctgttggcctattgattatcaccatcttc

SEQ ID NO: 137973 - DNA, 80 bp, synthetic construct
  source 1..80: mol_type = other DNA
caggattgacccacatagacgcccacttcttgtctcagacaaagcaggggggtgaaaactttgcgtacctcgttgcttat

SEQ ID NO: 137974 - DNA, 80 bp, synthetic construct
  source 1..80: mol_type = other DNA
gccgacgaccccattcccggcgcatctaatgatgcctcgacggaaaaccgtccgggtttggtgggcgaaccggccgcctg

SEQ ID NO: 137975 - DNA, 80 bp, synthetic construct
  source 1..80: mol_type = other DNA
catctgggctcgacctgattacaacccgccaataatcgaaaactggaaggcaccggattatgaccccccagtcgtatccg

SEQ ID NO: 137976 - DNA, 80 bp, synthetic construct
  source 1..80: mol_type = other DNA
atgcttggtggactatccttatagactgtggcattacccttgcactgtcaatttcacaattcacaaggtccgtatgttcg

SEQ ID NO: 137977 - DNA, 80 bp, synthetic construct
  source 1..80: mol_type = other DNA
agctgaccaacacaacaacagcatctcggtgcccaacacaaggggaacccagcctaaatgaagagcaggacaaaaggttc

SEQ ID NO: 137978 - DNA, 80 bp, synthetic construct
  source 1..80: mol_type = other DNA
gtctctccacgggagtggaaacggctgaagactgcacccagacaacccatcatcatagacgacagtcggacaccggatcc

SEQ ID NO: 137979 - DNA, 80 bp, synthetic construct
  source 1..80: mol_type = other DNA
gaagactatggctttggggtgttcaccaccaacatatggctgaagttgaaagaaaggcaggatgtgttttgtgactcaaa

SEQ ID NO: 137980 - DNA, 80 bp, synthetic construct
  source 1..80: mol_type = other DNA
gatgcaattgcgcaacacctgcccgctgtgcaacgccaagctggtgtacctgatagtgggcgtgacgcccagcgggtcgt

SEQ ID NO: 137981 - DNA, 80 bp, synthetic construct
  source 1..80: mol_type = other DNA
gaatcttgtgaaaccagaagggaaagtcatagacctcggttgtggaagaggtggctggtcatactattgcgccgggctga

SEQ ID NO: 137982 - DNA, 80 bp, synthetic construct
  source 1..80: mol_type = other DNA
gtagcaggcgccggcgctagccagccacagccacagacagagatggacttggaagagggcgaagggctggcgagactggg

SEQ ID NO: 137983 - DNA, 80 bp, synthetic construct
  source 1..80: mol_type = other DNA
gccagccaattgtcagctccgtcaaggaaagctacgtgtaccacacacggacagcatccagatgctgagcttcttgaagc

SEQ ID NO: 137984 - DNA, 80 bp, synthetic construct
  source 1..80: mol_type = other DNA
gcgctgcttctgggccgcggtggccgaggaagtgtgcccggaagacgcgccacgcggagacttccggggccgcccccgcg

SEQ ID NO: 137985 - DNA, 80 bp, synthetic construct
  source 1..80: mol_type = other DNA
agcaagggtgagaaacggccgcgtcccgagctggaggaaaccctggttgtggaatcccgcgagccccactcgtacgagca

SEQ ID NO: 137986 - DNA, 80 bp, synthetic construct
  source 1..80: mol_type = other DNA
catggctacccggagcggacacacaaggatcaaattggatacagaaagagacattggtcactttcaaaaatccccacgcg

SEQ ID NO: 137987 - DNA, 80 bp, synthetic construct
  source 1..80: mol_type = other DNA
ctggaagacaattctacacctattccaacaaccatcatggcaaagaatgaggtattttgcgtagaccctcaaaagggtgg

SEQ ID NO: 137988 - DNA, 80 bp, synthetic construct
  source 1..80: mol_type = other DNA
tctggaaattatgaacatcaaaaaataactttctatcagctaacaattattcaactacctactactaaggtaccaaccac

SEQ ID NO: 137989 - DNA, 80 bp, synthetic construct
  source 1..80: mol_type = other DNA
aaaacggggctaaacaaagtaaggttgaacaaggtaatactgctcaaagtggtggtaaaaaaaccaaaacagaacataca

SEQ ID NO: 137990 - DNA, 80 bp, synthetic construct
  source 1..80: mol_type = other DNA
ggtgtgtggcaagtattgtcagatggccctattgaagctgggggcgctgaccggaacatacatctacaaccacctcactc

SEQ ID NO: 137991 - DNA, 80 bp, synthetic construct
  source 1..80: mol_type = other DNA
gttcttttaacagaacactctacactaaaaaaatactggggctacaagcaaggagatagcatagatggcactccatacac

SEQ ID NO: 137992 - DNA, 80 bp, synthetic construct
  source 1..80: mol_type = other DNA
gatggtactacgccattctcttcatctgtgttgcttggcatattaaaggcaggcttccagccgctaccgcttacgcggct

SEQ ID NO: 137993 - DNA, 80 bp, synthetic construct
  source 1..80: mol_type = other DNA
aggtgaagcacgacgatccagaagagccgtgacgcttccttctcactccacgaggaagctgcaaacgcgatcgcagactt

SEQ ID NO: 137994 - DNA, 80 bp, synthetic construct
  source 1..80: mol_type = other DNA
atagagagatcttagtggagttcgaagaaccccatgccactaagcaatccgtggtcgctttggggtcgcaggagggagca

SEQ ID NO: 137995 - DNA, 80 bp, synthetic construct
  source 1..80: mol_type = other DNA
tacctgtgctgtgcctggtacatcaaaggccggctcgtaccagccgtcacctatggagtcttgcagctatggccgctcct

SEQ ID NO: 137996 - DNA, 80 bp, synthetic construct
  source 1..80: mol_type = other DNA
atggcgccagtggcgctggccagctggtaccggaggtcaatgcctccgaccctcttgcaatggatcctgtagcaggttct

SEQ ID NO: 137997 - DNA, 80 bp, synthetic construct
  source 1..80: mol_type = other DNA
tatttacctccaagatggcctcatagcctcgctctatcgacctgaggccgacaaagtagcagccattgagggagagttca

SEQ ID NO: 137998 - DNA, 80 bp, synthetic construct
  source 1..80: mol_type = other DNA
tctattgcctttttggcaaccgtgttggataaatggagcgagaggtcccacctgagctgggattacatgctggattacat

SEQ ID NO: 137999 - DNA, 80 bp, synthetic construct
  source 1..80: mol_type = other DNA
gctcctctccatcgaggaggcatgtgcattgaccccgccccattccgctagatcaaagtacggatttggggcgaaggagg

SEQ ID NO: 138000 - DNA, 80 bp, synthetic construct
  source 1..80: mol_type = other DNA
tgtgcctgccgtccgaacgcgggtagggtatggggcgggggatgtggagagcccacatgcggaaagcaagaacaataaag

SEQ ID NO: 138001 - DNA, 80 bp, synthetic construct
  source 1..80: mol_type = other DNA
gagagaatggaagtgttacaacgccgctttggtggaggccttgttcgaaaccctctttcgcgcaactcgacgcatgagat

SEQ ID NO: 138002 - DNA, 80 bp, synthetic construct
  source 1..80: mol_type = other DNA
agttcacggtggcatctgagaaggtgatcttaaatctaggagactatggagatgtgtcattgacatgtaaggtggcaagt

SEQ ID NO: 138003 - DNA, 80 bp, synthetic construct
  source 1..80: mol_type = other DNA
cacatacacctggggggaaaatgatacagacgtgtttctgttgaacagcactagaccgccacagggcgcatggtttggtt

SEQ ID NO: 138004 - DNA, 80 bp, synthetic construct
  source 1..80: mol_type = other DNA
gcctactcctactcacggtaggggtaggcattttcctgctgcctgctcgataggcagcataacactccgaccctagggtc

SEQ ID NO: 138005 - DNA, 80 bp, synthetic construct
  source 1..80: mol_type = other DNA
agagtttacagtatcccctagaaacgctccaggcgaaatactatggagcgcgacccttggcgtccgctgaatgctgagat

SEQ ID NO: 138006 - DNA, 80 bp, synthetic construct
  source 1..80: mol_type = other DNA
acattagtgggtccagcaaacattccagttacttggctcagtgaatttggcaccttgtgtgagggtaaaaaaattttgca

SEQ ID NO: 138007 - DNA, 80 bp, synthetic construct
  source 1..80: mol_type = other DNA
aaccaccaaaaatatacgctcttctgatattccgaatctcgtaaaggtccatttaacaatcccgggggcacttgcaccac

SEQ ID NO: 138008 - DNA, 80 bp, synthetic construct
  source 1..80: mol_type = other DNA
actggcagtggtaagagcacaaaggtcccggccgcctacgtagcacaaggatataacgtcctcgtgttgaatccatcggt

SEQ ID NO: 138009 - DNA, 80 bp, synthetic construct
  source 1..80: mol_type = other DNA
tacccgaccatgcagatcatggtgcccaagcgccggcgcgtggaggacgtgctggacaccgtgaaaatggatgtggagcc

SEQ ID NO: 138010 - DNA, 80 bp, synthetic construct
  source 1..80: mol_type = other DNA
gtttaggcgcgagaaaaacggactctggggcaaaggcatccgctccgcagtggacgcagacggtctcgcactcaacaagc

SEQ ID NO: 138011 - DNA, 80 bp, synthetic construct
  source 1..80: mol_type = other DNA
gtgcttcaggcttctctcctacgcatcccctactttgttagggcgcacgcgttagttaagatctgcagcctggcacgtgg

SEQ ID NO: 138012 - DNA, 80 bp, synthetic construct
  source 1..80: mol_type = other DNA
actgggttcccacaagtagaacgacatggtctattcatgctcaccatcagtggatgactacagaagacatgcttactgtt

SEQ ID NO: 138013 - DNA, 80 bp, synthetic construct
  source 1..80: mol_type = other DNA
cgccgcggcgacccccgtcagccggccccagtcctcccgccacctcccgccgcgctgcaggtaccgcaccgtgttggcga

SEQ ID NO: 138014 - DNA, 80 bp, synthetic construct
  source 1..80: mol_type = other DNA
ccatgcaatacaattagcttgagtttcaaccaaaggagggggaggaagacatggaagaaccataattaattttttatgcc

SEQ ID NO: 138015 - DNA, 80 bp, synthetic construct
  source 1..80: mol_type = other DNA
ttgtgctgtacagtgaggacgtaaacctggaagcccctgacacgcacattgtttttaagccagctgtagcagcagacact

SEQ ID NO: 138016 - DNA, 80 bp, synthetic construct
  source 1..80: mol_type = other DNA
tcggtcagatgtttactttccgaccacggcgccactggaccacccaggaatgcaattgttccatctatacagggcacatc

SEQ ID NO: 138017 - DNA, 80 bp, synthetic construct
  source 1..80: mol_type = other DNA
gcgccaaaactacgtcatctccagcggccacacccggcgccagcacctgttgtcagcgccattatgagcaaggaaattcc

SEQ ID NO: 138018 - DNA, 80 bp, synthetic construct
  source 1..80: mol_type = other DNA
cggcgctcttataacaccctgcgccgcggaggaaagcaagctgcccatcaatgcgttgagcaactcactgctacgccacc

SEQ ID NO: 138019 - DNA, 80 bp, synthetic construct
  source 1..80: mol_type = other DNA
cccactgacagctccgggccggagcccgaaatcatcgacgacaagtcagacaacgagtctttctcgtcgatgcccccgct

SEQ ID NO: 138020 - DNA, 80 bp, synthetic construct
  source 1..80: mol_type = other DNA
tctgctgctcttggcgttgccccagcaagcttacgctctcgatgcggtcgagcaaggccagatcggcctagcgctgctga

SEQ ID NO: 138021 - DNA, 80 bp, synthetic construct
  source 1..80: mol_type = other DNA
ggcccctcgtatggattccaatactcaccaagtcagcgggtcgaattcctggtgaagacctggaaacagaagaaagttcc

SEQ ID NO: 138022 - DNA, 80 bp, synthetic construct
  source 1..80: mol_type = other DNA
tatccccgtttacagggcggcttcgtctgggactgggtggatcagtcgctgattaaatatgatgaaaacggcaacccgtg

SEQ ID NO: 138023 - DNA, 80 bp, synthetic construct
  source 1..80: mol_type = other DNA
cccgtgtgtggctgaaaattagagaggagagcactgacgagtgtgatggagcgatcataggcacggctgtcaaaggacat

SEQ ID NO: 138024 - DNA, 80 bp, synthetic construct
  source 1..80: mol_type = other DNA
cacagcatggccgaagcttgagaaattctggcaggaccacatgtggaactttgtcagtggtatccagtatcttgccggat

SEQ ID NO: 138025 - DNA, 80 bp, synthetic construct
  source 1..80: mol_type = other DNA
catcgactgctggtgcacaaagtcagcagtctacgtcaggtatggaagatgtaccaagacacgccactcaagacgcagtc

SEQ ID NO: 138026 - DNA, 80 bp, synthetic construct
  source 1..80: mol_type = other DNA
gcaccacctgggtgtcgttcacttactccgtgctcctgtggctcaagtgacctctaccttgtgacaaggaacgccgacgt

SEQ ID NO: 138027 - DNA, 80 bp, synthetic construct
  source 1..80: mol_type = other DNA
cacaggcaggaggataggtgcagtgccaattgatttggcaaaggggacatctggcagtcccatcctcaactcccagggag

SEQ ID NO: 138028 - DNA, 80 bp, synthetic construct
  source 1..80: mol_type = other DNA
ctaggaatattcccggagatcgcctgttacaattgcagttgtcacctgttttgaacccctttttaaatcatttgtcccaa

SEQ ID NO: 138029 - DNA, 80 bp, synthetic construct
  source 1..80: mol_type = other DNA
gacactcgaaaaaggcggagagcgtgcgcatgtgcagccgcagcagcacgatggcgtcctccagttggcgaatcagggtg

SEQ ID NO: 138030 - DNA, 80 bp, synthetic construct
  source 1..80: mol_type = other DNA
agcctcattgatggcgtttacagctgccgtcaccagtccttttaccacccagcagaccctcctgtttaacatcctggtgg

SEQ ID NO: 138031 - DNA, 80 bp, synthetic construct
  source 1..80: mol_type = other DNA
agatgaaaaaacagagagcggtcacggactttcctccgtagcctggaggacagaccgccagggtgcagtggcaaacaacc

SEQ ID NO: 138032 - DNA, 80 bp, synthetic construct
  source 1..80: mol_type = other DNA
cgaccgggatccccccggccttttttccgatcacgcgcacgtcttgagtctttcttgccgtttcttttgtttctctttct

SEQ ID NO: 138033 - DNA, 80 bp, synthetic construct
  source 1..80: mol_type = other DNA
cgtgcggcttcgccgacctcatggggtacataccgctcgtcggcgcccctcttggaggcgctgccagggccctggcgcat

SEQ ID NO: 138034 - DNA, 80 bp, synthetic construct
  source 1..80: mol_type = other DNA
gaggtatgcaaatatctccggcccctccgaggatagaccgtattgctggcactacccccctaggccttgtaacgccgtcc

SEQ ID NO: 138035 - DNA, 80 bp, synthetic construct
  source 1..80: mol_type = other DNA
tttattaactcattgattcacaaactggtttttattaaaaatcaaacggttcttcgcgaaagtcgccatgattagtaggt

SEQ ID NO: 138036 - DNA, 80 bp, synthetic construct
  source 1..80: mol_type = other DNA
ccttaggtcctggttgaaggctaaactgctacctagccttcccggagtcccgtacttgtcatgccaagtgggcttcaggg

SEQ ID NO: 138037 - DNA, 80 bp, synthetic construct
  source 1..80: mol_type = other DNA
atctgctccatcactcaaagccacctgcaccgcccaccatgcctcccctgacgctgacctcattgaagctaatctcttgt

SEQ ID NO: 138038 - DNA, 80 bp, synthetic construct
  source 1..80: mol_type = other DNA
cgccggggcagatgcagaaaacacacaatggaatgctaaagaaagaatggtgacctttaaagtaccgcatgccaagagac

SEQ ID NO: 138039 - DNA, 80 bp, synthetic construct
  source 1..80: mol_type = other DNA
agtgctaggaattcttgcgggcgggcttgtgattattctttgctacctatacacaccttgcttcactttcctagtggtgt

SEQ ID NO: 138040 - DNA, 80 bp, synthetic construct
  source 1..80: mol_type = other DNA
ggatgaaccgcttgatcgcgttcgcgtcaaggggcaaccatgtggctcccacgcactacgtccccgagtccgatgcagcg

SEQ ID NO: 138041 - DNA, 80 bp, synthetic construct
  source 1..80: mol_type = other DNA
atctaaagaatattgttcatatgttttttgttgctgcttaaaggccgcctgttgtccggtcgttagacgcatgtaacaag

SEQ ID NO: 138042 - DNA, 80 bp, synthetic construct
  source 1..80: mol_type = other DNA
tcctgagctagtccttgaaatcgtcttcggcggccattggggtgtggtttttggcttggcctatttctccatgcagggag

SEQ ID NO: 138043 - DNA, 80 bp, synthetic construct
  source 1..80: mol_type = other DNA
acctctcatacaagcatggcaaatgcctggatacgagcctccagtcgtgtctggttgtgccgtcgccccacctaaaccgg

SEQ ID NO: 138044 - DNA, 80 bp, synthetic construct
  source 1..80: mol_type = other DNA
cgcttatgtttgtctgccttattattatgtggctttcctgctgcctaaagcgcaaacacgcccgaccacccatttataag

SEQ ID NO: 138045 - DNA, 80 bp, synthetic construct
  source 1..80: mol_type = other DNA
actggaccgtctgctccgccatcaccgccagcacatccagcacgcgccccaggaaggcggcctcccgcgtcaaaacgcac

SEQ ID NO: 138046 - DNA, 80 bp, synthetic construct
  source 1..80: mol_type = other DNA
ccggaataatgaaaaacccaaccgtagacgggattgttgcaatagacttggatcctgtggtttatgatgcaaaatttgaa

SEQ ID NO: 138047 - DNA, 80 bp, synthetic construct
  source 1..80: mol_type = other DNA
ccgcaagtgttcgcctttaatactgaaaaatagtgacgtaaatgaccaaagttcacctacacaacacaaaaaacccccaa

SEQ ID NO: 138048 - DNA, 80 bp, synthetic construct
  source 1..80: mol_type = other DNA
aagatgagaaaccaaggtctggccatgataagcagaaatcaaaaacagaagaaaggcatgggcatagagatgttgttaaa

SEQ ID NO: 138049 - DNA, 80 bp, synthetic construct
  source 1..80: mol_type = other DNA
ggcctgggcgtcgctgagggccagctgaagccggttgatgacggtgaggacgtacatggccgtgacggtcgaggccgact

SEQ ID NO: 138050 - DNA, 80 bp, synthetic construct
  source 1..80: mol_type = other DNA
cccgcgtgttgtccttgattggactgaagagggctatgttgagcctgatcgacggcaaggggccaatacgatttgtgttg

SEQ ID NO: 138051 - DNA, 80 bp, synthetic construct
  source 1..80: mol_type = other DNA
caagcagcgaatcatgattgcaaaaattcaggttcctcacagacctgtataagattcaaaagcggaacattaacaaaaat

SEQ ID NO: 138052 - DNA, 80 bp, synthetic construct
  source 1..80: mol_type = other DNA
cgtataccctgacctaggggtccgggtgtgcgagaagagagcgctatatgacgtcgtccaacagcttccagaagccgtga

SEQ ID NO: 138053 - DNA, 80 bp, synthetic construct
  source 1..80: mol_type = other DNA
gttctggctccctgtcttggtgggtgtgcgggctggcgggtaaaaaaagagtgtgtccgtgttgacagggagtggtgccc

SEQ ID NO: 138054 - DNA, 80 bp, synthetic construct
  source 1..80: mol_type = other DNA
tctggccacggcccgcgcgaccgcggggcagctcgttgcaaacaggcggctggtatacgatgacagaacgcagaggcgcc

SEQ ID NO: 138055 - DNA, 80 bp, synthetic construct
  source 1..80: mol_type = other DNA
ccgcagatcttgctcgacattttcatcggtggtcactggggcatcattggtgccgtgctgtactacagcatggcagccaa

SEQ ID NO: 138056 - DNA, 80 bp, synthetic construct
  source 1..80: mol_type = other DNA
aaggcgcggcgtgttatacggcgcgttatgtcccggcattccgttcgtgggttcgggcccgggtgctgtcgggtgtgagt

SEQ ID NO: 138057 - DNA, 80 bp, synthetic construct
  source 1..80: mol_type = other DNA
aaaaaccaaaattagactcactccattgcccgctgcatcccagctggatttatccagctggtttacggtgggtgccggcg

SEQ ID NO: 138058 - DNA, 80 bp, synthetic construct
  source 1..80: mol_type = other DNA
ggccccaacccactgagctgaagtactcatggaaaacatggggaaaggcgaaaatgctctccacagagtctcacaatcag

SEQ ID NO: 138059 - DNA, 80 bp, synthetic construct
  source 1..80: mol_type = other DNA
ccccggatgcccggcatcccctttttctcttgtcaaaagggatataagggagaatggcggagggacgtggtcatgcatac

SEQ ID NO: 138060 - DNA, 80 bp, synthetic construct
  source 1..80: mol_type = other DNA
atttgccggcgtcgacgcgacaacccacgtcagcgggggaagcgccgcctatgccacacttggacttactaaattcctca

SEQ ID NO: 138061 - DNA, 80 bp, synthetic construct
  source 1..80: mol_type = other DNA
gaaaaaggggtggcaaacaggccaggggtgaagaacgcccccagagtgcaccacggcagcacgccagtgagagtggcgac

SEQ ID NO: 138062 - DNA, 80 bp, synthetic construct
  source 1..80: mol_type = other DNA
acagaccctacgacggtgttgggcattggcacggttctcgaccaggctgagactgccggggtccgccttactgtgctcgc

SEQ ID NO: 138063 - DNA, 80 bp, synthetic construct
  source 1..80: mol_type = other DNA
cgtttctcgcagttggaggaattctgctcttcctctccgtgaacgtgcacgctttcactaggtaccgcaaagaggccatc

SEQ ID NO: 138064 - DNA, 80 bp, synthetic construct
  source 1..80: mol_type = other DNA
cacgggtcataggatggcttgggacatgatgatgaactggagccccaccgcgacgctaatcctcgcccagatcatgagga

SEQ ID NO: 138065 - DNA, 80 bp, synthetic construct
  source 1..80: mol_type = other DNA
attggataggatcgacataagcccccagccagccaaaaaaattgcccgtgtgggaggtctacagcacccttttgtaaaaa

SEQ ID NO: 138066 - DNA, 80 bp, synthetic construct
  source 1..80: mol_type = other DNA
ggacttgttggaagacaatactaccccaatctccaccaccattatggcgaagaacgaggtgtttagcgtgaacccagcaa

SEQ ID NO: 138067 - DNA, 80 bp, synthetic construct
  source 1..80: mol_type = other DNA
acagcttcgagtacgaggccatgctgcgccgaagcgccctggcctcctcgcccgaccgctgtctcagcctcgagcagtcc

SEQ ID NO: 138068 - DNA, 80 bp, synthetic construct
  source 1..80: mol_type = other DNA
tcgcggccggcggggcggcggcgccaagcagagcgacgtagcggcacaaatgccgacagacgcgcatgatgcgcgtgctg

SEQ ID NO: 138069 - DNA, 80 bp, synthetic construct
  source 1..80: mol_type = other DNA
cggcgattaacaacaccaaacaatcgagcgcgtctaacccagtaacatgcgcacgtgatgtaggctggtcagcacggcgt

SEQ ID NO: 138070 - DNA, 80 bp, synthetic construct
  source 1..80: mol_type = other DNA
cataacccaggtcaggaacctgatcgggaaagaggagtatgtggattacatgccagtcatgaaaagatacagcgctcatt

SEQ ID NO: 138071 - DNA, 80 bp, synthetic construct
  source 1..80: mol_type = other DNA
gtggcttcgccgacctcatggggtacattcccgtcgtggaggcgccgcttggcggtgtcgcggctgccttagcacacggt

SEQ ID NO: 138072 - DNA, 80 bp, synthetic construct
  source 1..80: mol_type = other DNA
attcctgctcttagcggacgccagggtttgcgcctgcttatggatgctcatcttgttgggccaggccgaagcagcactag

SEQ ID NO: 138073 - DNA, 80 bp, synthetic construct
  source 1..80: mol_type = other DNA
ggtggttccatgagcgtggctatgtcaagctggaaggtagggtgattgacctggggtgtggccgcggaggctggtgttac

SEQ ID NO: 138074 - DNA, 80 bp, synthetic construct
  source 1..80: mol_type = other DNA
gggcggcctctccggcctgtttgagcagaaggacattctccactactacgtggagcaggaatgcatcgaagtcgtacact

SEQ ID NO: 138075 - DNA, 80 bp, synthetic construct
  source 1..80: mol_type = other DNA
gcatccagtcaccaagtacatcatgacatgcatgtcagctgacctggaggtcgtcacgagtacctgggtgctcgttggcg

SEQ ID NO: 138076 - DNA, 80 bp, synthetic construct
  source 1..80: mol_type = other DNA
gcctcggcctcaacgccgtggcttactatcgcggcctcgacgtctccgtgattccatccagcggagatgttgtcgttgtg

SEQ ID NO: 138077 - DNA, 80 bp, synthetic construct
  source 1..80: mol_type = other DNA
accccttcaatcaccaccgtaacgccggtctgcgctatcggtccatgctcttgggcaacgggcgttacgtacccttccac

SEQ ID NO: 138078 - DNA, 80 bp, synthetic construct
  source 1..80: mol_type = other DNA
ggcgtgcatgtctgctgacttggaggtggttactagtacctgggttttagtggggggcgtgctagcggccctagctgctt

SEQ ID NO: 138079 - DNA, 80 bp, synthetic construct
  source 1..80: mol_type = other DNA
ttcgcgacagtcgccgtggttggtgggcagggatatgtttctgtactgcaaacgctgatgccacttgaattctggaataa

SEQ ID NO: 138080 - DNA, 80 bp, synthetic construct
  source 1..80: mol_type = other DNA
ggaaaatgagtcggacgtcttcatcctggagagcgctcggccccccactggcggttggttcggctgcacgtggatgaatt

SEQ ID NO: 138081 - DNA, 80 bp, synthetic construct
  source 1..80: mol_type = other DNA
cggtggtcggccccgtcaagcgtccccgcccccgagcccaccgcccgcgaccacccccaacccgcagccgggtggtccgg

SEQ ID NO: 138082 - DNA, 80 bp, synthetic construct
  source 1..80: mol_type = other DNA
ccggagcctaactaccgcaaagcattgtggagggtggctgccgaagagtacgttgaggtcttgcacatcaatgaccacca

SEQ ID NO: 138083 - DNA, 80 bp, synthetic construct
  source 1..80: mol_type = other DNA
tgggagggaaatccaggaaggttctggaacactaccattgcggtgtcaatggctaacatctttagagggagttacctggc

SEQ ID NO: 138084 - DNA, 80 bp, synthetic construct
  source 1..80: mol_type = other DNA
ggcggaccttgagatcatgacgagctcatgggttttagcgggaggggtcctggccgctgtcgctgcctactgcctagcaa

SEQ ID NO: 138085 - DNA, 80 bp, synthetic construct
  source 1..80: mol_type = other DNA
ctgaaagggcaatttgtcacaacaccttctctagaaccagcatggataaaggcctacaaggcgctctaaaaaagaagatc

SEQ ID NO: 138086 - DNA, 80 bp, synthetic construct
  source 1..80: mol_type = other DNA
cgcaggaccagcggcttcgcgtccatctttacacccggggcgtctcagaacatccagcttataaacaccaacggcagctg

SEQ ID NO: 138087 - DNA, 80 bp, synthetic construct
  source 1..80: mol_type = other DNA
cattggaacgttgctggtgtggttgggtctgaatacaaagaatggatctatttcccttatgtgcttggccttagggggag

SEQ ID NO: 138088 - DNA, 80 bp, synthetic construct
  source 1..80: mol_type = other DNA
ccgctggcaacaatgggagatgcttatggtttccaatactcacccaagcagcgagtcgatcgtctgctcaaaatgtggcg

SEQ ID NO: 138089 - DNA, 80 bp, synthetic construct
  source 1..80: mol_type = other DNA
ttctggtttgtagtcttcttctgcgccgcttggctcattaaaggtagactggtgccttgtgtcacctacgccatccacgg

SEQ ID NO: 138090 - DNA, 80 bp, synthetic construct
  source 1..80: mol_type = other DNA
ttgaagggacgactgtagctcaacatgcagctaagaccacgcagacatttgtcagcctgctttcccctggagcccggcag

SEQ ID NO: 138091 - DNA, 80 bp, synthetic construct
  source 1..80: mol_type = other DNA
gccaacgtaactggatcatcacaagacagaccgtactgctggcattatgcgccgcgaccatgtaccatcgtgcctgccaa

SEQ ID NO: 138092 - DNA, 80 bp, synthetic construct
  source 1..80: mol_type = other DNA
gagagtggatgacaacggaggacatgctggcagtctggaacagagtctggattgaggacaatgagtggatggaagacaag

SEQ ID NO: 138093 - DNA, 80 bp, synthetic construct
  source 1..80: mol_type = other DNA
cggtagtgtccggatgcccattgcccccgcagggatcggcccccgtcccacctcctaggaggaagaaaacggtggtgctc

SEQ ID NO: 138094 - DNA, 80 bp, synthetic construct
  source 1..80: mol_type = other DNA
caggccacgtgcaagtcctctccacctccacacagacattcctgggtacgacggtgtggggggtcatgtggacagtctac

SEQ ID NO: 138095 - DNA, 80 bp, synthetic construct
  source 1..80: mol_type = other DNA
atacacaaatagcaggaccatggcatctaggtaagcttgagatggactttgatttctgcgatggaaccacagtgatagtg

SEQ ID NO: 138096 - DNA, 80 bp, synthetic construct
  source 1..80: mol_type = other DNA
tcttggccaccagtcccttttccaggaaagggtacttcacagccttgatttttctagcccagggcgcactacagccgggg

SEQ ID NO: 138097 - DNA, 80 bp, synthetic construct
  source 1..80: mol_type = other DNA
agggtaccaattcccgtttcagagatcacggacaccattgataagtttggcaagtgttcttctaaagcaacgtacgtacg

SEQ ID NO: 138098 - DNA, 80 bp, synthetic construct
  source 1..80: mol_type = other DNA
ttctcgacaccgtcgccttccgcgacagaccaagactcgggccacccgaccaccagcaagagttcagaccaggcggacga

SEQ ID NO: 138099 - DNA, 80 bp, synthetic construct
  source 1..80: mol_type = other DNA
ctcggaccggccgatagctttgaagggcaagggtggcggctcctcgcgcctatcacggcctactcccaacagacgcggtg

SEQ ID NO: 138100 - DNA, 80 bp, synthetic construct
  source 1..80: mol_type = other DNA
atgccagtaaggccatacgccacatccgctccgtgtggcaagaccttctggaggacaatgtaacaccaattgacactacc

SEQ ID NO: 138101 - DNA, 80 bp, synthetic construct
  source 1..80: mol_type = other DNA
catcatcaataatataccttattttttttgtgtgagttaatatgcaaataaggcgtgaaaatttggggatggggcgcgct

SEQ ID NO: 138102 - DNA, 80 bp, synthetic construct
  source 1..80: mol_type = other DNA
ccttgccgggcaatcctgccgtggccactttgatgtctttcaccgccgcggtaacctccccccttacaactcagcagacc

SEQ ID NO: 138103 - DNA, 80 bp, synthetic construct
  source 1..80: mol_type = other DNA
gagacccttctcatatcactgctgaggctgcggcgcgtcgccttgccagaggttcgccgccctccttagccagttcatca

SEQ ID NO: 138104 - DNA, 80 bp, synthetic construct
  source 1..80: mol_type = other DNA
acggggaatacagactacggggtgaagcgaggaaaacgttcgtggagctcatgagaagaggagatctacctgtctggcta

SEQ ID NO: 138105 - DNA, 80 bp, synthetic construct
  source 1..80: mol_type = other DNA
ttggccagccccttcgggggccaagtctcttgaaccgtgcgcctgcgggtccgcagatttgtacttggtcacccgcgatg

SEQ ID NO: 138106 - DNA, 80 bp, synthetic construct
  source 1..80: mol_type = other DNA
gtatgtgcgcggtagggttgtccccgccgtcacatatggtctccttcaattgtggccgctactgttactggtcctgctgc

SEQ ID NO: 138107 - DNA, 80 bp, synthetic construct
  source 1..80: mol_type = other DNA
cggtgtacgagcaacccggggaggttctcggccaagagcgccgtctccggaagcccgtgggcccggtggagcgcgcacag

SEQ ID NO: 138108 - DNA, 80 bp, synthetic construct
  source 1..80: mol_type = other DNA
agactggaagtaggccctacaaagcagcggcagctcaactgccggagaccttagagactatcatgcttctgggcttattg

SEQ ID NO: 138109 - DNA, 80 bp, synthetic construct
  source 1..80: mol_type = other DNA
ccgaagagctgaaagttggcggcctgggcgtcgctgagggccagctgaagccggttgatgacggtgaggacgtacatggc

SEQ ID NO: 138110 - DNA, 80 bp, synthetic construct
  source 1..80: mol_type = other DNA
gtgcaaaaaaagctcccaatcatccaaaaaattattatcatggattctaaaacggattaccagggatttcagtcgatgta

SEQ ID NO: 138111 - DNA, 80 bp, synthetic construct
  source 1..80: mol_type = other DNA
ccggggtgagcgctaggctcctctccacggaggaagcgtgcagcctcacacccccacattcggcccgttctaagttcggg

SEQ ID NO: 138112 - DNA, 80 bp, synthetic construct
  source 1..80: mol_type = other DNA
tgaggagggtgacagcgtcgtgtgctgttcaatgtcctactcgtggacggggatacccatcaccccctgcgctgctgaag

SEQ ID NO: 138113 - DNA, 80 bp, synthetic construct
  source 1..80: mol_type = other DNA
tgggatggatgaagtccaaatgattgtggttgaacctgggaaaaatgtaaaaaatgtgcaaacaaagcctggtgtgttta

SEQ ID NO: 138114 - DNA, 80 bp, synthetic construct
  source 1..80: mol_type = other DNA
ctcatattctgtcactcaaagaagaagtgcgatgagctggctgggaaactaaagtcactcggcttaaacgccgtcgcatt

SEQ ID NO: 138115 - DNA, 80 bp, synthetic construct
  source 1..80: mol_type = other DNA
ggacaaattggcctgggtttgcttatgatcataacacttttcacattgaccccggcctacaaaaatctcatctgttactg

SEQ ID NO: 138116 - DNA, 80 bp, synthetic construct
  source 1..80: mol_type = other DNA
agtgcgtcagaatgtggtggggtccaacgttgatggtcgtcctgtcgcccctgccaactcgacaacccttacctacgcca

SEQ ID NO: 138117 - DNA, 80 bp, synthetic construct
  source 1..80: mol_type = other DNA
ttgtgttcttttgcgcggcatggtacataaagggcaagtgggtgcctggagcggcgtacgccctctacggggtgtggcca

SEQ ID NO: 138118 - DNA, 80 bp, synthetic construct
  source 1..80: mol_type = other DNA
gggaggaagagtatagagactatatggttgcccaaaacagatttggcagggaagaaactcatgtggtaggaggagcggtg

SEQ ID NO: 138119 - DNA, 80 bp, synthetic construct
  source 1..80: mol_type = other DNA
cttggtgggagaaccagtctgatgtctttctactgactggtaccaggcccccacgggggtcctggtttggatgcacgtgg

SEQ ID NO: 138120 - DNA, 80 bp, synthetic construct
  source 1..80: mol_type = other DNA
gcagcggcggctgctgctaatagagaacgtgaggagtttcagttagaccatccggagttgcctggacatgattgtaagtc

SEQ ID NO: 138121 - DNA, 80 bp, synthetic construct
  source 1..80: mol_type = other DNA
cacactcgctatcccaaatgctacagtgccggtgcaggggttccgctcccatgtggatctccttgttggctctgcagctt

SEQ ID NO: 138122 - DNA, 80 bp, synthetic construct
  source 1..80: mol_type = other DNA
tcactcccttctacaaaaaatttcttgtaaacctgttgtggtggaaccagtactacatcgcgcggttggaggccctcctt

SEQ ID NO: 138123 - DNA, 80 bp, synthetic construct
  source 1..80: mol_type = other DNA
acgtggacctcatggttggcgccgctgtcgtctgctcggctatgtacgtgggagacctgtgcggaggcgccttcttagtt

SEQ ID NO: 138124 - DNA, 80 bp, synthetic construct
  source 1..80: mol_type = other DNA
accaaagtgtgcggagcacccccttgtgtcatcgggggggtgggcaacaacaccatgcattgccccactgattgtttccg

SEQ ID NO: 138125 - DNA, 80 bp, synthetic construct
  source 1..80: mol_type = other DNA
ctcaaagccacctgtactacgggtggtattcacccagatgccgaattgatcgaggcaaaccttctgtggagacaggaggt

SEQ ID NO: 138126 - DNA, 80 bp, synthetic construct
  source 1..80: mol_type = other DNA
ggtgggctcgcaattaccttgtgagccagagccagatgagctggtggtgacatcattgctaaaggaccccgcccacatca

SEQ ID NO: 138127 - DNA, 80 bp, synthetic construct
  source 1..80: mol_type = other DNA
cgcctcggcggcgtggccggccccgcggcggcccccaccacctccacgccgccgcccgccgcggccagcaccgtccccgc

SEQ ID NO: 138128 - DNA, 80 bp, synthetic construct
  source 1..80: mol_type = other DNA
taagatcgacaaatacacatcccctgtacatagtgtaaaataaatgtaatttaagaacaagaatttgcagtcaggccggc

SEQ ID NO: 138129 - DNA, 80 bp, synthetic construct
  source 1..80: mol_type = other DNA
tgtctctacatggtggtcttggccgaggcccaggactgccaatcaatgggtccccttcgtggatctcaaacacggggcgt

SEQ ID NO: 138130 - DNA, 80 bp, synthetic construct
  source 1..80: mol_type = other DNA
atagggactgtgctggaccaggctgagacggctgggtgtcgcctcacggtcctagccactgctacgccccccgggacggt

SEQ ID NO: 138131 - DNA, 80 bp, synthetic construct
  source 1..80: mol_type = other DNA
ttcatgggccgttaagtgggaatacgttgtcttagccttcttgatgttggctgactcacgtatttgtctctgcttatggc

SEQ ID NO: 138132 - DNA, 80 bp, synthetic construct
  source 1..80: mol_type = other DNA
ctctgcaagtcagctgtcggctccgtcgctgaaggccacgtgcacgacgcacaggccacaccctgacgtagagctggtag

SEQ ID NO: 138133 - DNA, 80 bp, synthetic construct
  source 1..80: mol_type = other DNA
ctaaaccccaaagactaaccaaaagaaacaccaaccgtcgcccacagaacgtcaagttcccgggtggcggtcagatcgtt

SEQ ID NO: 138134 - DNA, 80 bp, synthetic construct
  source 1..80: mol_type = other DNA
aaggtgctgaggtacgatgagacccgcaccaggtgcagaccctgcgagtgtggcggtaaacatattaggaaccagcctgt

SEQ ID NO: 138135 - DNA, 80 bp, synthetic construct
  source 1..80: mol_type = other DNA
gaaacagcatgtctctcaaaggcctacggacagatgtggctgttaagctactttcacaggagggatctgagaacgcttgg

SEQ ID NO: 138136 - DNA, 80 bp, synthetic construct
  source 1..80: mol_type = other DNA
cggagaacactatctgtcgttgttgcagcgagaacccgaggggcgcgatgaagccgcggatgttgtgggtgcggccggcg

SEQ ID NO: 138137 - DNA, 80 bp, synthetic construct
  source 1..80: mol_type = other DNA
agaggaggcatgcgcattgaccccgccccattccgccagatccaaatatggatttggggcaaaggaggtccgcagcttat

SEQ ID NO: 138138 - DNA, 80 bp, synthetic construct
  source 1..80: mol_type = other DNA
aagcgggtaggtaaaattctccccaatcgatcggtggttggcgttgaacggctctgcgatgactcggctaaaatccggca

SEQ ID NO: 138139 - DNA, 80 bp, synthetic construct
  source 1..80: mol_type = other DNA
ggcatcatgaagaaccctgttgtggatggaagagtgccctacttggctggagcttctctaatctacacagtaacaagaaa

SEQ ID NO: 138140 - DNA, 80 bp, synthetic construct
  source 1..80: mol_type = other DNA
cgtggctcccgcccaaactggggcccaaacgacccccggcgcagatcccgcaatttaggtaaagtcatcgacaccttgac

SEQ ID NO: 138141 - DNA, 80 bp, synthetic construct
  source 1..80: mol_type = other DNA
ccaaagtcaggacctggctgtttgagaatggggaagaaagactcagccgcatggctgtcagcggagatgactgtgtggta

SEQ ID NO: 138142 - DNA, 80 bp, synthetic construct
  source 1..80: mol_type = other DNA
gttactcgccgggcgaactcaatcgggtggcagcagccctcagaaaacttggggctccaccgttgagagcttggcgacac

SEQ ID NO: 138143 - DNA, 80 bp, synthetic construct
  source 1..80: mol_type = other DNA
tccgccccatcactgaaggcgacctgtacaacggacgcccaacatcctgacgcggagctgctggaagctaatcttttgtg

SEQ ID NO: 138144 - DNA, 80 bp, synthetic construct
  source 1..80: mol_type = other DNA
actttcggtttcaaattcatttttgaagtcatgtgtgatatcacactacatgtggctagacttcatggcttgtggccccc

SEQ ID NO: 138145 - DNA, 80 bp, synthetic construct
  source 1..80: mol_type = other DNA
aacgacagcctccagaccggcttcatcgcgggcttgctctaccatcacaaattcaatagctctgggtgtcctgagaggtt

SEQ ID NO: 138146 - DNA, 80 bp, synthetic construct
  source 1..80: mol_type = other DNA
gcgttgagcaggacagggcggacctagatgccttctcacaggcaatgaccaggtattccgccccgcccggcgatatgccc

SEQ ID NO: 138147 - DNA, 80 bp, synthetic construct
  source 1..80: mol_type = other DNA
gtacttcatagccagggctgaggctcttctacacatgtatgtaccatctctccaggtgcgtggcccgcgagattctatca

SEQ ID NO: 138148 - DNA, 80 bp, synthetic construct
  source 1..80: mol_type = other DNA
cgtccccccctcgcgccggcagcggccaagagggcggcgacgcaccccccctccgactcagggccggtgaggcgcggcca

SEQ ID NO: 138149 - DNA, 80 bp, synthetic construct
  source 1..80: mol_type = other DNA
ggatgtcctcgcccccgggcccgtggggcgctggggccacaaagcggcccccgccgggaggctccagacccgccagcacc

SEQ ID NO: 138150 - DNA, 80 bp, synthetic construct
  source 1..80: mol_type = other DNA
agaattggacggggtgcgcctacataggtttgcgcccccctgcaagcccttgctgcgggaggaggtatcattcagagtag

SEQ ID NO: 138151 - DNA, 80 bp, synthetic construct
  source 1..80: mol_type = other DNA
ctgtgacggttatgctcttgaccattcattacacgttcatgatacctggatggcaagccgaggccatgagagcagcgcaa

SEQ ID NO: 138152 - DNA, 80 bp, synthetic construct
  source 1..80: mol_type = other DNA
taggcatgatggtccttaaaatagtaagaaacatggaaaagtatcaattagcagtgactatcatggctatcttgtgcgtc

SEQ ID NO: 138153 - DNA, 80 bp, synthetic construct
  source 1..80: mol_type = other DNA
gggaaaagctaaaatcataggagcagacatacaaaataccaccttcatcatcgacggcccagacaccccagaatgtcccg

SEQ ID NO: 138154 - DNA, 80 bp, synthetic construct
  source 1..80: mol_type = other DNA
gaagccgcgacggcgtcatcttgctgaccagtctcttgtatccctccctgatgtttgacatcaccaagttactaattgcc

SEQ ID NO: 138155 - DNA, 80 bp, synthetic construct
  source 1..80: mol_type = other DNA
gaggcaggagatggggggaaacatcactagggtggaatcagaaaacaaggttgtcatcttggactctttcgaccctcttg

SEQ ID NO: 138156 - DNA, 80 bp, synthetic construct
  source 1..80: mol_type = other DNA
gacttaccaagtagcccatttgcacgcgccaacgggaagtggcaagagcacaaaagtccctgccgcatatgcggctcaag

SEQ ID NO: 138157 - DNA, 80 bp, synthetic construct
  source 1..80: mol_type = other DNA
gtgcacttcctagcgactttgtgcccattaagtaccgcgaatgccctccgccgctttggggccactgctaccttctgcag

SEQ ID NO: 138158 - DNA, 80 bp, synthetic construct
  source 1..80: mol_type = other DNA
gtactgcagctcctctaggaacagcggcgacggcgccacccgcgaaccgccgacccgccccaaaatagcccgcgcgtcga

SEQ ID NO: 138159 - DNA, 80 bp, synthetic construct
  source 1..80: mol_type = other DNA
agccgatctatcattggagaaagcggctgaagtatcctgggaacaagaagcagaacactccggtgcctcacacaacatat

SEQ ID NO: 138160 - DNA, 80 bp, synthetic construct
  source 1..80: mol_type = other DNA
caacagaatctaactttacttaatgctgacaagtctcatgaaaggacttacctaggttacagacatgacagtaagggaaa

SEQ ID NO: 138161 - DNA, 80 bp, synthetic construct
  source 1..80: mol_type = other DNA
cgacagttcgagtttgaagcgaaagctagcaacagtatcaacaggttttattttggatttggaaacgagagtttctggtc

SEQ ID NO: 138162 - DNA, 80 bp, synthetic construct
  source 1..80: mol_type = other DNA
gccagggcggtcagagctaagctcattgctcaggtggggaaagccgctatttgcggcagatacctcttcaattgggccgt

SEQ ID NO: 138163 - DNA, 80 bp, synthetic construct
  source 1..80: mol_type = other DNA
tagccggtgccctagtcgcttacaagatcatgagcggcgagacaccgtccggagaagaccttgtcaatcttttgccgtcc

SEQ ID NO: 138164 - DNA, 80 bp, synthetic construct
  source 1..80: mol_type = other DNA
atgaggccccgattgcatcagaccgtccaagagtgcaattgttctatatattcaggccgcatcaccggacaccgtatggc

SEQ ID NO: 138165 - DNA, 80 bp, synthetic construct
  source 1..80: mol_type = other DNA
cctcccggctcggtgactgtcccccatccaaacattacagaagtagccctgcccacgacaggggagatccccttctatgg

SEQ ID NO: 138166 - DNA, 80 bp, synthetic construct
  source 1..80: mol_type = other DNA
acagaagagatctgaggctgatggcaaacgccatctgttcagcagtccccagcaattgggttcccactggcaggacttca

SEQ ID NO: 138167 - DNA, 80 bp, synthetic construct
  source 1..80: mol_type = other DNA
agatttttttgcacgtgagtgctctcgtttcagacaacgtgagtggcgctttgtttgtacttccttggtgggaaagtttt

SEQ ID NO: 138168 - DNA, 80 bp, synthetic construct
  source 1..80: mol_type = other DNA
attccacgcacgagatgtattgggtgagtcgggcttcaggcaatgtggtacattcagtgaatatgaccagccaggtgctc

SEQ ID NO: 138169 - DNA, 80 bp, synthetic construct
  source 1..80: mol_type = other DNA
agccagtaagcacgcaccagtaacaggttacacagcaggcattctccgccggtgcgcccgcgcccccggccgtgtttcag

SEQ ID NO: 138170 - DNA, 80 bp, synthetic construct
  source 1..80: mol_type = other DNA
ctccaaaaatgtgatgaccatactcagttccctgacaatcaccagcttacctcgtaagcttcacgagtggatcaattcgg

SEQ ID NO: 138171 - DNA, 80 bp, synthetic construct
  source 1..80: mol_type = other DNA
gttcaggggtcctggtgcagatccatattccatctttccgttaacatcaaccgatgccccgggttttgactcggacgagt

SEQ ID NO: 138172 - DNA, 80 bp, synthetic construct
  source 1..80: mol_type = other DNA
atgtggatcagctgctttgtgcgcatgccccgcgtgcagctcgcgtttcggttcatgggccccgaagatgccggacggac

SEQ ID NO: 138173 - DNA, 80 bp, synthetic construct
  source 1..80: mol_type = other DNA
tgtgggtcctccagatacaccagttgattggtatgatggttcaggacataaattgtgtaaaggaaaagaagtacactacc

SEQ ID NO: 138174 - DNA, 80 bp, synthetic construct
  source 1..80: mol_type = other DNA
gtggtcagtgatgagcagctaacccgatggctgggcaccgactctcccagggatttggaagagcgtcgcaagcttatgat

SEQ ID NO: 138175 - DNA, 80 bp, synthetic construct
  source 1..80: mol_type = other DNA
cgagaaggagggtggcctcggtcgacgaggcctggcgtttgggtgcggacgtgcgatgacgtgggtccggtgtagggtcc

SEQ ID NO: 138176 - DNA, 80 bp, synthetic construct
  source 1..80: mol_type = other DNA
cagtccaggtgctggacatcagctacgcccactcttgccatcccaaattcaactgtgcctgttagcgggttccgccagca

SEQ ID NO: 138177 - DNA, 80 bp, synthetic construct
  source 1..80: mol_type = other DNA
gccgcaaatgtcgtaaacgtagaggggctctctaagtattccaagatatgtagggtagcatcttccaccgcggatgctgg

SEQ ID NO: 138178 - DNA, 80 bp, synthetic construct
  source 1..80: mol_type = other DNA
cttgcaggatatggcgcgggcgtggcgggagccctcgtagcattcaagatcatgagcggcgaggtcccctccacagaaga

SEQ ID NO: 138179 - DNA, 80 bp, synthetic construct
  source 1..80: mol_type = other DNA
cgacagcagcttcgacgcccgggcgtgaatgccggacacgacggacagaaacccgtgaatttcgcgccggaccacggcca

SEQ ID NO: 138180 - DNA, 80 bp, synthetic construct
  source 1..80: mol_type = other DNA
acttttgcaaagttagctttacgccctgatcgcagctataaaattagtaaaacaataactattgcttcatatgcttacat

SEQ ID NO: 138181 - DNA, 80 bp, synthetic construct
  source 1..80: mol_type = other DNA
aatcctaaacccttacatgccaagtgtggtagaaactctggagcgaatgcaaagaaaacatggagggatgctagtgcgaa

SEQ ID NO: 138182 - DNA, 80 bp, synthetic construct
  source 1..80: mol_type = other DNA
attaccggcgctgtcatcggcagtgtgggcctagggaaggtcctagtggacattcttgctggctacggggctggtgtggc

SEQ ID NO: 138183 - DNA, 80 bp, synthetic construct
  source 1..80: mol_type = other DNA
tctgttgtagtctgccaacgtaaacgggcagtaccgttccattaagccccgcagtaatccctgtctccggggttccacca

SEQ ID NO: 138184 - DNA, 80 bp, synthetic construct
  source 1..80: mol_type = other DNA
ccacccgcgttcgagcttctggttgctgtcccggcctataaagcggtaggcacaaaattcggcgcgacagtcgataatca

SEQ ID NO: 138185 - DNA, 80 bp, synthetic construct
  source 1..80: mol_type = other DNA
cgaggtgtctgcggtccggtctattgttttacacctagcccggtggtcgtcggcaccacagaccgcaaggggaatcccac

SEQ ID NO: 138186 - DNA, 80 bp, synthetic construct
  source 1..80: mol_type = other DNA
atggtcgccccgtcctgcccgcaaactctactaccttgacctacgagaccgtgtctggaacgccgttggagactgcagcc

SEQ ID NO: 138187 - DNA, 80 bp, synthetic construct
  source 1..80: mol_type = other DNA
tcttggcaagaaacaaacgaccacgcatgtgcaccagagaggaattcattagcaaggtcaacagcaacgcggctctcgga

SEQ ID NO: 138188 - DNA, 80 bp, synthetic construct
  source 1..80: mol_type = other DNA
cgctccctcctgagcgtgtttcgcgccaaccagtacccggacctacgtcgggtggagttggcgatcacgggccaggcccc

SEQ ID NO: 138189 - DNA, 80 bp, synthetic construct
  source 1..80: mol_type = other DNA
tacgcagttggatcacaactcccgtgcgaaccggaaccagacgtcacggttgtaacgtccatgctcatcgacccctcaca

SEQ ID NO: 138190 - DNA, 80 bp, synthetic construct
  source 1..80: mol_type = other DNA
gaagcccataatgacaagcgggctgacccatcttttgtgtgcaaacaaggagtagtggatagaggttggggcaatgggtg

SEQ ID NO: 138191 - DNA, 80 bp, synthetic construct
  source 1..80: mol_type = other DNA
ggggtcgaccttttctagggtgtgaaggcaaaggtcatcttcttctgcatccataaaggtaattggtttgtaagtgtagg

SEQ ID NO: 138192 - DNA, 80 bp, synthetic construct
  source 1..80: mol_type = other DNA
ggtaaattagacattgctttggcaccaccatttgaagttaaagataataaactttctttactagttggaaatggactaaa

SEQ ID NO: 138193 - DNA, 80 bp, synthetic construct
  source 1..80: mol_type = other DNA
atcctgctcacgtgtctcctacaccctgctctcgggtttgacatctctaaagtgcttttagccatcatgggacctctcta

SEQ ID NO: 138194 - DNA, 80 bp, synthetic construct
  source 1..80: mol_type = other DNA
aaggctttcagccaaccttcccgccctactgactccggaaattccacgggagtgaatactgaaccagacagcactcaaca

SEQ ID NO: 138195 - DNA, 80 bp, synthetic construct
  source 1..80: mol_type = other DNA
tagcgcaggcggaggcagccatggagaacctggtcatgctcaacgctgcgtctgcagccagtaagcaggggtggatctgg

SEQ ID NO: 138196 - DNA, 80 bp, synthetic construct
  source 1..80: mol_type = other DNA
ggcaatggttgcggactctttggaaaaggaagcattgacacatgcgctaagtttgaatgcccccatcatgcgtcagggag

SEQ ID NO: 138197 - DNA, 80 bp, synthetic construct
  source 1..80: mol_type = other DNA
caaacaacagcatcgtctatgaggcagaaaccattgtcctacaccttcctggatgcgtcccgtgtgtgagggttggcaat

SEQ ID NO: 138198 - DNA, 80 bp, synthetic construct
  source 1..80: mol_type = other DNA
gtgtacgagacagagagcctgatcatacatctgcccgggtgcgtgccctgcatacgcgagggcaacacctcgaggtgctg

SEQ ID NO: 138199 - DNA, 80 bp, synthetic construct
  source 1..80: mol_type = other DNA
cgtggcaggagccctggtggcctttaagatcatgagtggcgaaacgccctccatggaggacatggccaatctgctgccgg

SEQ ID NO: 138200 - DNA, 80 bp, synthetic construct
  source 1..80: mol_type = other DNA
agttactttggccggtccaaagagcaatcacaacaagaggccaggctataagacacagaaccagggaccatgggatgaag

SEQ ID NO: 138201 - DNA, 80 bp, synthetic construct
  source 1..80: mol_type = other DNA
tccggtctattgttttacacctagcccggtggtcgtcggcaccacagaccgcaaggggaatcccacttacagttggtgcg

SEQ ID NO: 138202 - DNA, 80 bp, synthetic construct
  source 1..80: mol_type = other DNA
tctcccggcaaatatcacatcggactgggttagtatgcccctggcatggtagtcattcaatgccataaatctgccctgat

SEQ ID NO: 138203 - DNA, 80 bp, synthetic construct
  source 1..80: mol_type = other DNA
ccatcaccttggcaggacccagaagcaatcataacaggagaccagggtacaaaactcagaaccaaggtccatgggatgag

SEQ ID NO: 138204 - DNA, 80 bp, synthetic construct
  source 1..80: mol_type = other DNA
aggaagagacgtggcgctgacaccagcatcggaatcgtcggcctcctgctgaccacagccatggcagccgagatcactag

SEQ ID NO: 138205 - DNA, 80 bp, synthetic construct
  source 1..80: mol_type = other DNA
aaccgatgctcatgcagagctacggctggaacctggtctccctgaagagtggagtggacgtgttttacaaaccttcagag

SEQ ID NO: 138206 - DNA, 80 bp, synthetic construct
  source 1..80: mol_type = other DNA
gggccccgtacctgcagcaacatgtggcacggcacatttcccatcaacgcgaccacgaccggccccagcatgcccactcc

SEQ ID NO: 138207 - DNA, 80 bp, synthetic construct
  source 1..80: mol_type = other DNA
gagaggaaggtcatcacatggggggcggatacagcagcttgtggtgacattctggccgggctacccgtgtcagcaaggaa

SEQ ID NO: 138208 - DNA, 80 bp, synthetic construct
  source 1..80: mol_type = other DNA
tgcgtccagcaaggcgccgccgcggaaggcagtggggggcaaggggtcgctagcctcaaaggaggacacccgaacgctcc

SEQ ID NO: 138209 - DNA, 80 bp, synthetic construct
  source 1..80: mol_type = other DNA
gggtggcaggctgaggcaatgcgttcagcacaacggcggaccgctgcaggaatcatgaaaaacgcggttgttgacggcat

SEQ ID NO: 138210 - DNA, 80 bp, synthetic construct
  source 1..80: mol_type = other DNA
gatgtgtcaccatcatcggccgcttgcacatcaaccagcgagtcgtggtagcgccggacaaggaggtcctctacgaggct

SEQ ID NO: 138211 - DNA, 80 bp, synthetic construct
  source 1..80: mol_type = other DNA
cctccccaagtaccaggccgacctgtatacctatctgagtaggcgcctgaacccactgggacgcccgcagatcgcagcgg

SEQ ID NO: 138212 - DNA, 80 bp, synthetic construct
  source 1..80: mol_type = other DNA
accctgggaaacaagtttagaaaccccaccgtggctcccacccatgatgttaccaccgatcgctcgcagcgtctgacgct

SEQ ID NO: 138213 - DNA, 80 bp, synthetic construct
  source 1..80: mol_type = other DNA
gcgaagatcgtccgtattgctggcattatgcgccgaacccgtgcggcgtggtgccggcgctgaacgtgtgcggcccggtg

SEQ ID NO: 138214 - DNA, 80 bp, synthetic construct
  source 1..80: mol_type = other DNA
cccgcttcatagcgcgtccaggaactcacggcagacgcgtattcaccgaccccccctcgcaacatgacaacgacgcccct

SEQ ID NO: 138215 - DNA, 80 bp, synthetic construct
  source 1..80: mol_type = other DNA
tatgtctaaagcccacgggatagaccctaacatcaggaccggtgtgaggaccatcaccaccggtgccgctataacgtact

SEQ ID NO: 138216 - DNA, 80 bp, synthetic construct
  source 1..80: mol_type = other DNA
gactttgtgcccgttgaatccctagagaccaccatgaggtccccagtgtttaccgacaattccagccctccgacagtgcc

SEQ ID NO: 138217 - DNA, 80 bp, synthetic construct
  source 1..80: mol_type = other DNA
actgttctaatgacagcatcgtgtacgaggctgatgatgtgatcctacatatgcctggctgtgtgccttgcgtccgcaac

SEQ ID NO: 138218 - DNA, 80 bp, synthetic construct
  source 1..80: mol_type = other DNA
ctcggcggggcaaattggtgttggtaggtccagctgacaacatgcaagatcagggctggaggttgctcgcccccatcacc

SEQ ID NO: 138219 - DNA, 80 bp, synthetic construct
  source 1..80: mol_type = other DNA
cattgggcggcgagctatgatgcgtgcggccaggcgggctgcaacgcctgccggtcgagcgcggagacgggccgcggctg

SEQ ID NO: 138220 - DNA, 80 bp, synthetic construct
  source 1..80: mol_type = other DNA
gggcctgggcgcgccgctgcggcccgtctacgtggcgctggtgcgcgacgccgtgcgcggcggcccggcggagctgcgcg

SEQ ID NO: 138221 - DNA, 80 bp, synthetic construct
  source 1..80: mol_type = other DNA
agtttcaggtgtaaaggtcgctcctggccctaccccacttcaggtataaagcgactgctcatcagagggaaaggtataca

SEQ ID NO: 138222 - DNA, 80 bp, synthetic construct
  source 1..80: mol_type = other DNA
caatatagagctgaaagctacacttactggtataaatattatggtaatcataaacatgaaattcatatttttaacataac

SEQ ID NO: 138223 - DNA, 80 bp, synthetic construct
  source 1..80: mol_type = other DNA
ccttgggtgtcacgtcacttgtgggtgccactcccttgtctttgggtttgggggtggctctggctgccttccacttggcc

SEQ ID NO: 138224 - DNA, 80 bp, synthetic construct
  source 1..80: mol_type = other DNA
ctgccagaaaagaaaattacacaatggctggaaaccaaaggagtggagaggttaaaaagaatggccattagcggggatga

SEQ ID NO: 138225 - DNA, 80 bp, synthetic construct
  source 1..80: mol_type = other DNA
atgatgcagattactcccgctgggactccctcaacaaagagcagtcttggccgcagctttagaatgatgcagattactcc

SEQ ID NO: 138226 - DNA, 80 bp, synthetic construct
  source 1..80: mol_type = other DNA
gcacaggctccaagctgcttgcaacttcacccgcggggatcgctgtggcctagaggatagagacagaagtcagttgagcc

SEQ ID NO: 138227 - DNA, 80 bp, synthetic construct
  source 1..80: mol_type = other DNA
gtacatgtcaaaagcctatgggattgaccccaacatccgtacggggacacgcaccatcacaaccggtgccaaactcacct

SEQ ID NO: 138228 - DNA, 80 bp, synthetic construct
  source 1..80: mol_type = other DNA
tcatatcatgggtaacagacatattcttaggtgttatattccacacggtttcctgtcgagccaaacgctcatcagtgata

SEQ ID NO: 138229 - DNA, 80 bp, synthetic construct
  source 1..80: mol_type = other DNA
acgtgcctgaaactgacgcgtcaaagaatgtgactcagatactcacttctcttaccatcaccagtctactccgtagatta

SEQ ID NO: 138230 - DNA, 80 bp, synthetic construct
  source 1..80: mol_type = other DNA
cagacttacacgacgggggtggcgtcgggccgtactaccctcgggtttacgtccctttttacgtctggaccgtcccaaaa

SEQ ID NO: 138231 - DNA, 80 bp, synthetic construct
  source 1..80: mol_type = other DNA
gccgtagtcaggtttagttcgtccggcggcgccagaaatccgcgcggtggtttttgggggtcggtggtgtttggcagcca

SEQ ID NO: 138232 - DNA, 80 bp, synthetic construct
  source 1..80: mol_type = other DNA
ctttgcatggttactctccaactgagctcaatcgggttggagcaagcctcaggaagcttggggctcctcccttgcgagca

SEQ ID NO: 138233 - DNA, 80 bp, synthetic construct
  source 1..80: mol_type = other DNA
caagtgccttcagcagcactgcaaatttaacttcgcttgcttcggtaaatgaaacgatcgtgccaatgatgtatggccaa

SEQ ID NO: 138234 - DNA, 80 bp, synthetic construct
  source 1..80: mol_type = other DNA
aagctctctttgtgtctccggtgatgccttccaaaatgtgagtgataaagcgtggtagtttttctttaatcatttgcgta

SEQ ID NO: 138235 - DNA, 80 bp, synthetic construct
  source 1..80: mol_type = other DNA
ctgggccaaggtcgctattgtcatgattatgttttcaggggtcgatgctgaaacatatgtcaccggtggcagtgtagctc

SEQ ID NO: 138236 - DNA, 80 bp, synthetic construct
  source 1..80: mol_type = other DNA
atcatactcctcgcttgcctgctgcacccacagctcggatttgaggtcaccaaaatcttgttagccctgcttggccctct

SEQ ID NO: 138237 - DNA, 80 bp, synthetic construct
  source 1..80: mol_type = other DNA
ccactaaaaaaaatctcacttcctcattccgtaaaatcgtcacgtcctctttcccacgaaacgtcacttccggccatctt

SEQ ID NO: 138238 - DNA, 80 bp, synthetic construct
  source 1..80: mol_type = other DNA
ggtacactggagacttcgactctgtgattgactgcaacgtcgcagtcacccaggttgtcgacttcagtttagaccccact

SEQ ID NO: 138239 - DNA, 80 bp, synthetic construct
  source 1..80: mol_type = other DNA
aagtagtattacattaaatggaacttatcaaaacactacatggacaagatatcacttaaactcatggaaaaatttatgca

SEQ ID NO: 138240 - DNA, 80 bp, synthetic construct
  source 1..80: mol_type = other DNA
taacatggccatatcctttcaaagtatttataatcatgcattagaaggctactcattaaaatttacctggcgcgttcgaa

SEQ ID NO: 138241 - DNA, 80 bp, synthetic construct
  source 1..80: mol_type = other DNA
tgctacacatggtgtacgcgggccgcggggccgcgggttcgtcgggagtcgtctttggtacctggtaccgcacgatccag

SEQ ID NO: 138242 - DNA, 80 bp, synthetic construct
  source 1..80: mol_type = other DNA
gcgtcttgtataacgcacagactctgatggaattgttccaattaacgtatatgccgcatacatgcaggataattgtgtgg

SEQ ID NO: 138243 - DNA, 80 bp, synthetic construct
  source 1..80: mol_type = other DNA
ccactcaaagaagaagtgcgacgagctcgccgcaaaactggtcacgttgggcgtcaatgctgtggcctattaccgcggcc

SEQ ID NO: 138244 - DNA, 80 bp, synthetic construct
  source 1..80: mol_type = other DNA
gcaagcaggccgccagccacacacctgtgaaggctgggtgtgtgaactttgactattcgcgcacccgccgctgtgtaggg

SEQ ID NO: 138245 - DNA, 80 bp, synthetic construct
  source 1..80: mol_type = other DNA
acgggagcaggaacagaggacgagtcattctttgatatgggcgcagacctacggtggcagccaagcgctcgcgctttgga

SEQ ID NO: 138246 - DNA, 80 bp, synthetic construct
  source 1..80: mol_type = other DNA
agacttcaagcctggaacttcaggatctcctatcataaacagagagggaaaggtagtgggattgtatggcaatggagtgg

SEQ ID NO: 138247 - DNA, 80 bp, synthetic construct
  source 1..80: mol_type = other DNA
gacaaagagattctcacttggaatgctacagggacgaggaccattaaaactgttcatggccctggtggctttccttcgtt

SEQ ID NO: 138248 - DNA, 80 bp, synthetic construct
  source 1..80: mol_type = other DNA
atgcatctacgtgctggaccccagtgacacctacagtggcagtcaggtacgtcggagcaaccaccgcttcgatacgcagt

SEQ ID NO: 138249 - DNA, 80 bp, synthetic construct
  source 1..80: mol_type = other DNA
tcatcgctgaaagtgccggcacccaagaggacgctcaagccctccgagccttcacggaggctatgaccaggaattccgcc

SEQ ID NO: 138250 - DNA, 80 bp, synthetic construct
  source 1..80: mol_type = other DNA
tatcccaaggaggatacgacgccaggagtctaccgaataatggccagaggtatcctgggaaggtaccaagctggggtagg

SEQ ID NO: 138251 - DNA, 80 bp, synthetic construct
  source 1..80: mol_type = other DNA
ccaccagcctggttgtccgtggccccacggtcagtctggtatcaaactcatttgtggacgccggggccttggggcccgac

SEQ ID NO: 138252 - DNA, 80 bp, synthetic construct
  source 1..80: mol_type = other DNA
gccctggcacatggtgtcagagccctagaggacgggattaactatgcaacagggaatcttcctggttgctctttctctat

SEQ ID NO: 138253 - DNA, 80 bp, synthetic construct
  source 1..80: mol_type = other DNA
ttgtcagtggtctagtgggggccgctataggtagtgtaggcttagggaaggtattggtggacatcctggctgggtacggc

SEQ ID NO: 138254 - DNA, 80 bp, synthetic construct
  source 1..80: mol_type = other DNA
gatggagactcatactactattctgagcctacaagtgaaaataatgcccaccacgtctgctggttggaggcctcaatgct

SEQ ID NO: 138255 - DNA, 80 bp, synthetic construct
  source 1..80: mol_type = other DNA
ttgatacttttacagaattctaaccgttaatctccctccccccttccactttaccttatacacctccctttccccctgta

SEQ ID NO: 138256 - DNA, 80 bp, synthetic construct
  source 1..80: mol_type = other DNA
gtcgtttgtgccaccgatgcccttatgacaggttacaccggtgattttgacagcgtcatcgattgtaacgtggcagtaac

SEQ ID NO: 138257 - DNA, 80 bp, synthetic construct
  source 1..80: mol_type = other DNA
ggctatctacctacgtggtggggtcgcagcttccttgcgaacctgagccggacgagctagtggtaacatcattgttgaaa

SEQ ID NO: 138258 - DNA, 80 bp, synthetic construct
  source 1..80: mol_type = other DNA
cagccactatcaacggctcctccgatgacaggccctactgttggcactacgctccccgcccgtgcggggtggtgccagcg

SEQ ID NO: 138259 - DNA, 80 bp, synthetic construct
  source 1..80: mol_type = other DNA
atttaaagatatttgcaaatggagtgatccatcatatatatgtcatggggataacaccactattaccaatatcacagtta

SEQ ID NO: 138260 - DNA, 80 bp, synthetic construct
  source 1..80: mol_type = other DNA
cggggcgtggatgtggcagttattccaactgcaggcgatgttgtcgtctgcgccacggacgccctcatgaccgggtacac

SEQ ID NO: 138261 - DNA, 80 bp, synthetic construct
  source 1..80: mol_type = other DNA
ggatgagacgatgagcgtctaggtgggcgagagttttgtctttccagggtcgcaaggtgcgcttgagagttgtttccgtc

SEQ ID NO: 138262 - DNA, 80 bp, synthetic construct
  source 1..80: mol_type = other DNA
gggattcatgttgtgcagaaccaccagcacagtgtatccggtgcacttgggaaatttgtcatgtagcttagaaggaaatg

SEQ ID NO: 138263 - DNA, 80 bp, synthetic construct
  source 1..80: mol_type = other DNA
ggtgttggggatggaccggatgaacgcccggaacgcctccggcgatcgccgcgccatcaggtcctcgtacgcggaggccg

SEQ ID NO: 138264 - DNA, 80 bp, synthetic construct
  source 1..80: mol_type = other DNA
aaggtagaggaagcaattaagaaggccgctgaaaccaatggaacccctagaggagacagtgatgttgcaagagaggtgga

SEQ ID NO: 138265 - DNA, 80 bp, synthetic construct
  source 1..80: mol_type = other DNA
acatctggcacggaacattccccattaacgcctacaccactgggccctgcacgccttccccagcgccggactacaagttc

SEQ ID NO: 138266 - DNA, 80 bp, synthetic construct
  source 1..80: mol_type = other DNA
tgtcatccccgcaagacgcaggggggacaaccgtgcagctctcctcagccccagacccataagtactcttaaagggtcgt

SEQ ID NO: 138267 - DNA, 80 bp, synthetic construct
  source 1..80: mol_type = other DNA
aaggatgtatgtgggagtggttgagcacaggctcacggctgcatgcaatttcactcgtggggatcgttgcaacttggagg

SEQ ID NO: 138268 - DNA, 80 bp, synthetic construct
  source 1..80: mol_type = other DNA
gaggctatgaccaggtactctgctccacccggagacgctccacagcctacctacgacctcgagctcattacatcttgctc

SEQ ID NO: 138269 - DNA, 80 bp, synthetic construct
  source 1..80: mol_type = other DNA
tgtgccagagctatggcgccccctccaagttgggacaccatgtggaagtgcctaatccgcctcaagcctaccctgcacgg

SEQ ID NO: 138270 - DNA, 80 bp, synthetic construct
  source 1..80: mol_type = other DNA
acctattaaccccttgagcaactcgctgttgcgattccacaataaggtgtactgtactacatcaaagagtgctacactga

SEQ ID NO: 138271 - DNA, 80 bp, synthetic construct
  source 1..80: mol_type = other DNA
gttgtcgaccagtaccaccatccttctcaacatcatgggaggctggttagcgtcccagatcgcaccacccgcggaggcca

SEQ ID NO: 138272 - DNA, 80 bp, synthetic construct
  source 1..80: mol_type = other DNA
cctgggtggatggggtgcaaatccacaggttcgctcccacaccaaagccgttcattagggatgaggtctcgttcaccgtg

SEQ ID NO: 138273 - DNA, 80 bp, synthetic construct
  source 1..80: mol_type = other DNA
gggcatgaaactgaaatatgtccttaaggagcaggctaatggccaggggtagtcccttggtaaaagtattaacaaatcga

SEQ ID NO: 138274 - DNA, 80 bp, synthetic construct
  source 1..80: mol_type = other DNA
gaagatcacacctctccccaccgctgcgttggtgaaaaattacagccaagtcaaaaaagatgcgattttccaaattacca

SEQ ID NO: 138275 - DNA, 80 bp, synthetic construct
  source 1..80: mol_type = other DNA
ctcatgagttccaagtggggcacctccacgctcccaccgggagtgggaagagcacgaaggtgcccgccgcatatgcggcc

SEQ ID NO: 138276 - DNA, 80 bp, synthetic construct
  source 1..80: mol_type = other DNA
ccccaggccccggcccagtcttccggggatcgcgcagccgcaccgcggcgctctgctcgccaggcccagatgcggagcgg

SEQ ID NO: 138277 - DNA, 80 bp, synthetic construct
  source 1..80: mol_type = other DNA
gccgggtcagaaaaaatggtgttgccgcgccatctgccaccagccagctatcaactcgcgccctggaagggatttttgaa

SEQ ID NO: 138278 - DNA, 80 bp, synthetic construct
  source 1..80: mol_type = other DNA
ccgggctccgtcacggtgccgcacccaaatatatcagaggttggtcttacaaccaccggtgagatacccttttatggcaa

SEQ ID NO: 138279 - DNA, 80 bp, synthetic construct
  source 1..80: mol_type = other DNA
tctatgggcctgaatgctgttgccttctacagaggcgtggatgtctctgtcattcccacctcgggtgatgttgtcatctg

SEQ ID NO: 138280 - DNA, 80 bp, synthetic construct
  source 1..80: mol_type = other DNA
cacctgccagatgacgtggcaccgcgactccgtgacgttctcgcgacgcaatgccaccgggctggccctggtgctgccgc

SEQ ID NO: 138281 - DNA, 80 bp, synthetic construct
  source 1..80: mol_type = other DNA
accggcctcacacacatagatgcccactttctttctcagaccaaacaggcgggggaaaatttcccgtacctggtggcata

SEQ ID NO: 138282 - DNA, 80 bp, synthetic construct
  source 1..80: mol_type = other DNA
gtgacccaaccacgccacttgcacgggcggcctgggaaaccgctcgacacactccagtgaattcctggttgggtaacatc

SEQ ID NO: 138283 - DNA, 80 bp, synthetic construct
  source 1..80: mol_type = other DNA
ctgcggggggattttcctattaagccaactcgtcgtcatttcgccccgtctgcactggacagtccaagactgtaactgtt

SEQ ID NO: 138284 - DNA, 80 bp, synthetic construct
  source 1..80: mol_type = other DNA
gggatgaaggaagcgatgactcagctgacgacagtagtgtattagatttaggagggtcaggaaacccatttgctcatttg

SEQ ID NO: 138285 - DNA, 80 bp, synthetic construct
  source 1..80: mol_type = other DNA
gttggccgtccccgggccccccggtcccgcccgccggacgccgggaccaacgggacggcgtgcggcccaagggccgcccg

SEQ ID NO: 138286 - DNA, 80 bp, synthetic construct
  source 1..80: mol_type = other DNA
gtgctatcatcctgggaggcctcacatggatggacttgctacgagccctcatcatgttgggggacactatgtctggtaga

SEQ ID NO: 138287 - DNA, 80 bp, synthetic construct
  source 1..80: mol_type = other DNA
gcataaaaagggaagctatgaatgacttacagcccacaatgcaacttatggtgcccaagcggcaaaagttagaggacgta

SEQ ID NO: 138288 - DNA, 80 bp, synthetic construct
  source 1..80: mol_type = other DNA
tctcccaggccaccagatggcgcacctgcacgcgcggcgagaagcacacctgcgggcgtggagacacggtggtcaggtgg

SEQ ID NO: 138289 - DNA, 80 bp, synthetic construct
  source 1..80: mol_type = other DNA
agcgtcccggtacctccacccaactacaagagggcgctatggcgagtgtcagcagacgactacgccgaggtggtgcaagt

SEQ ID NO: 138290 - DNA, 80 bp, synthetic construct
  source 1..80: mol_type = other DNA
gtttacccttttgacccatttgacacatcagacgtgccctttgttacacccccttttacttcttccaatggtcttcaaga

SEQ ID NO: 138291 - DNA, 80 bp, synthetic construct
  source 1..80: mol_type = other DNA
acacgttatgtcagttttacgttgcaaacggtgaattatcctgccaagtataccagagatcgggggatatgggccttggg

SEQ ID NO: 138292 - DNA, 80 bp, synthetic construct
  source 1..80: mol_type = other DNA
aggcaagaggtcggtggaaacatcacgcgggttgagtctgagaacaaaatcatcgtgctcgactcttttgaccccttagt

SEQ ID NO: 138293 - DNA, 80 bp, synthetic construct
  source 1..80: mol_type = other DNA
actctccgccgccgcttcgtgccgttcgcagaaacatgccacccaagggaaacaagcatcccatcgcgcaacggcaatcc

SEQ ID NO: 138294 - DNA, 80 bp, synthetic construct
  source 1..80: mol_type = other DNA
aagggcatcggtaaacatctgctcaaactcgaagtcggccatatccagagcgccgtagggtgcggagtcgtgggaggtaa

SEQ ID NO: 138295 - DNA, 80 bp, synthetic construct
  source 1..80: mol_type = other DNA
gtcctggaccaagcggagacggctggagcgcggctcgtcgtgctcgccaccgctacgcctccgggatcggtgactgtgcc

SEQ ID NO: 138296 - DNA, 80 bp, synthetic construct
  source 1..80: mol_type = other DNA
tgtgcactatcataacacctcgggcatttatcacatcaccaatgactgccctaactctagcatagtctatgaggctgagc

SEQ ID NO: 138297 - DNA, 80 bp, synthetic construct
  source 1..80: mol_type = other DNA
ggggacggtgtgatgcacacggtgtgcccctgcggagcaaacctggccgggcacgtcaaaaatggttcgatgaggatcgt

SEQ ID NO: 138298 - DNA, 80 bp, synthetic construct
  source 1..80: mol_type = other DNA
caatgagaggaacgactgctctgtagtgatcaaatgcgagcaccagtgtcctctcaacattacattcaagaataagacca

SEQ ID NO: 138299 - DNA, 80 bp, synthetic construct
  source 1..80: mol_type = other DNA
cagaacaagatactttagcatgtggaactctgcggtggacagctatgatcccgatgtcaggatcattgagaatcacggtg

SEQ ID NO: 138300 - DNA, 80 bp, synthetic construct
  source 1..80: mol_type = other DNA
cttggcgttaatcttgtcgatcacctcctcgaagggaacgggggcgcggtcctcgaatatccccataaactgggagtagc

SEQ ID NO: 138301 - DNA, 80 bp, synthetic construct
  source 1..80: mol_type = other DNA
aaggatgtttgcggtccggtctactgctttacaccaagcccggttgtggtgggcaccacggatcgccgggtggtgcccac

SEQ ID NO: 138302 - DNA, 80 bp, synthetic construct
  source 1..80: mol_type = other DNA
acaagcttacggtattgaccctaacgtgcgcactggcacccgcaccataaccaccggtgcgaagcttacatactcaacat

SEQ ID NO: 138303 - DNA, 80 bp, synthetic construct
  source 1..80: mol_type = other DNA
ggaggccgtcccgccggagacaaagccgtcccgggtgtttcctcatggccccttttataccccagccgaggacgcgtgcc

SEQ ID NO: 138304 - DNA, 80 bp, synthetic construct
  source 1..80: mol_type = other DNA
ggcagactcgtccctgccaccacctacggggtcttgcagttgtggccacttctactcttgattttggcccttccaccacg

SEQ ID NO: 138305 - DNA, 80 bp, synthetic construct
  source 1..80: mol_type = other DNA
ccgcccccccgggagacccgcctcaaccagaatacgacttggagcttataacatcttgttcctccaatgtttcagtcgcg

SEQ ID NO: 138306 - DNA, 80 bp, synthetic construct
  source 1..80: mol_type = other DNA
aacgtgagcgaaccagccgaccagagaccgtattgctggcactacccccccaaaccatgtgatatagtccaggccaagtc

SEQ ID NO: 138307 - DNA, 80 bp, synthetic construct
  source 1..80: mol_type = other DNA
cgaatggatgctggacaagaccccagttcaaagctggacagacatcccttacaccgggaagcgggaagacatatggtgtg

SEQ ID NO: 138308 - DNA, 80 bp, synthetic construct
  source 1..80: mol_type = other DNA
ccttggctgtcatcaagggggggagacatctcatattctgtcattccaagaagaaatgtgacgagctggccaaacagctg

SEQ ID NO: 138309 - DNA, 80 bp, synthetic construct
  source 1..80: mol_type = other DNA
tgctctccccccccgaccattgccacctgttccaccaccgaggaggaagagggtcgtgcggcttgatgagtcgttggcag

SEQ ID NO: 138310 - DNA, 80 bp, synthetic construct
  source 1..80: mol_type = other DNA
tgctcaaaccgtatgtggcccagtgtattgtttcacccccagtccagtcgtggtaggcaccaccgacagacgcggggtgc

SEQ ID NO: 138311 - DNA, 80 bp, synthetic construct
  source 1..80: mol_type = other DNA
ggagagaaacagaccacgcggacatgggtggtgtttgggggtttattggcaccggaggctaaagggtggtaaccggatag

SEQ ID NO: 138312 - DNA, 80 bp, synthetic construct
  source 1..80: mol_type = other DNA
caaaagaaaagcaagcaacttacagagaacgtgagatccccctggccagcaaagggggcaaaccggtcaggtgtgaggga

SEQ ID NO: 138313 - DNA, 80 bp, synthetic construct
  source 1..80: mol_type = other DNA
gaaccacttcaaccctggcgggcttattcgcacctgggccggttcagaaaatccagctcgtcaacaccaacggcagctgg

SEQ ID NO: 138314 - DNA, 80 bp, synthetic construct
  source 1..80: mol_type = other DNA
agtgtccatcagccgcccatgggttttctcgatgattgtaatctccaaataaaattgcttgatgatgcataataagaccc

SEQ ID NO: 138315 - DNA, 80 bp, synthetic construct
  source 1..80: mol_type = other DNA
caaggcgcacgggatcaacccgaacgttaggaccgggatacgtaccgtgacgaccggggaacccatcacgtactccacat

SEQ ID NO: 138316 - DNA, 80 bp, synthetic construct
  source 1..80: mol_type = other DNA
agcagttgtaactaaagaaaacacaagtcttcctagtctagttggaacacttgtagttttaactggaaaaggaataggta

SEQ ID NO: 138317 - DNA, 80 bp, synthetic construct
  source 1..80: mol_type = other DNA
tcccggagtcactggaaacactcatgcttgtagccctactaggtgctatgacagccggcatcttcctgtttttcatgcag

SEQ ID NO: 138318 - DNA, 80 bp, synthetic construct
  source 1..80: mol_type = other DNA
tcgtgtcattaggcctgaacgccgtggcattttatcgaggtgtggacgtgtcggtcattcccacctcgggcgatgtagtg

SEQ ID NO: 138319 - DNA, 80 bp, synthetic construct
  source 1..80: mol_type = other DNA
aacgcgcatgcccccatgggccggggtgcgtcagaatgtgatgggctccagcattgatggtcgccccgtcctgcccgcaa

SEQ ID NO: 138320 - DNA, 80 bp, synthetic construct
  source 1..80: mol_type = other DNA
tccggtcgtccatggatgcgctttgcccccgaacaagccaacccctgtcccccctccgaggaggaagcggacggttgtgc

SEQ ID NO: 138321 - DNA, 80 bp, synthetic construct
  source 1..80: mol_type = other DNA
tcctataccagcagtttgatgagatggaggagtgctcacaccgactcccttacttggttgagggccaacaaattgccgag

SEQ ID NO: 138322 - DNA, 80 bp, synthetic construct
  source 1..80: mol_type = other DNA
gacgtcgccgcgctacaggacgccctggcgcacgggaccccgctacaaccggaccacatcgccgccaccctggacgcgga

SEQ ID NO: 138323 - DNA, 80 bp, synthetic construct
  source 1..80: mol_type = other DNA
ctaccaggtggcccacctgcacgcgcccaccgggagcggcaagagcactaaggtgccagcagcttacgcggctcaagggt

SEQ ID NO: 138324 - DNA, 80 bp, synthetic construct
  source 1..80: mol_type = other DNA
atgtattactccacagccgtcacgggaaaccttgttaattcggtcaatgtgctctcacggaaactcttggccagatttgg

SEQ ID NO: 138325 - DNA, 80 bp, synthetic construct
  source 1..80: mol_type = other DNA
cattataaggttataatccaagcacctgcgccaaaaaccagaaaacccctttcaaaaataaaatatgttaatgttaccat

SEQ ID NO: 138326 - DNA, 80 bp, synthetic construct
  source 1..80: mol_type = other DNA
aacaattttgggtaaagcatatgtggaacttcattagcggcatccagtatcttgccggcttgtccaccttgcccggcaat

SEQ ID NO: 138327 - DNA, 80 bp, synthetic construct
  source 1..80: mol_type = other DNA
cggggtcaaaaaccaggtttcccccatgctttttgatgcgtttcttacctctggtttccatgagccggtgtccacgctcg

SEQ ID NO: 138328 - DNA, 80 bp, synthetic construct
  source 1..80: mol_type = other DNA
acttagcccacagaacgagaaacgccctggacaatttggtgatgctgcacacgtcagaacatggcggtagggcctacagg

SEQ ID NO: 138329 - DNA, 80 bp, synthetic construct
  source 1..80: mol_type = other DNA
cggcgaaatgattgacccttttcagctgggccttctggtgatgtttctggccacccaggaggtccttcgcaagaggtgga

SEQ ID NO: 138330 - DNA, 80 bp, synthetic construct
  source 1..80: mol_type = other DNA
aatgtgtacttgctttaattgtagagggggatgcacatattaggcataatgcagcttcagaaaatgcctgttttgtatta

SEQ ID NO: 138331 - DNA, 80 bp, synthetic construct
  source 1..80: mol_type = other DNA
ggggccggtgctctgccctaggggccacgtcgttgggctcttccgagcagctgtgtgctctcgtggcgtggccaaatcca

SEQ ID NO: 138332 - DNA, 80 bp, synthetic construct
  source 1..80: mol_type = other DNA
ctttgtgtgtcgacgaacgttcgtggacagaggctggggcaatggttgtgggctattcggaaaaggtagcttaataacgt

SEQ ID NO: 138333 - DNA, 80 bp, synthetic construct
  source 1..80: mol_type = other DNA
aagctgtcgctgtactttttttagttatttgcaaaggctgcaatcccaatgcagtagcgcgcacttttaccatgcttaat

SEQ ID NO: 138334 - DNA, 80 bp, synthetic construct
  source 1..80: mol_type = other DNA
gctctctcaactttcaccaccagtcccgtgcgtgggtccgagccgatacgcagcggggcgaacagggccaccggcccggt

SEQ ID NO: 138335 - DNA, 80 bp, synthetic construct
  source 1..80: mol_type = other DNA
aaatacacgtacctacctggggatctcaacaggccccgggtggccaaccaggtcgtggacgcgttgtgcaggtgcgtgat

SEQ ID NO: 138336 - DNA, 80 bp, synthetic construct
  source 1..80: mol_type = other DNA
gtccccgatagacaagtgttgtaccaacagtatgatgagatggaagagtgctcccaagctgctccttacatcgagcaagc

SEQ ID NO: 138337 - DNA, 80 bp, synthetic construct
  source 1..80: mol_type = other DNA
gagcttgcacagtttcgtatggtgtgtcaggcaacaaagaaccgtgcaatacaaattttacaaaacattgttgatactgc

SEQ ID NO: 138338 - DNA, 80 bp, synthetic construct
  source 1..80: mol_type = other DNA
aactgatgcagccataactggaaccagccaacgcctagatgtaaaattggatgatgatggtgacttccaccttattaacg

SEQ ID NO: 138339 - DNA, 80 bp, synthetic construct
  source 1..80: mol_type = other DNA
caaaccgaaacccccgccgcggttggtaccaaagaagtggcgttgcaaaccgacccctggtacgaatttgccgccccccg

SEQ ID NO: 138340 - DNA, 80 bp, synthetic construct
  source 1..80: mol_type = other DNA
tacccggcgattgttatcgagacggggatgggtgcaacaccccgtccccaaagagaccccagcgtgccatcgagcgatac

SEQ ID NO: 138341 - DNA, 80 bp, synthetic construct
  source 1..80: mol_type = other DNA
agcagccatcctaaatggcgggcccggctgcccgggggacagagcgaccccaggtcatcatccatggcccagcagtatat

SEQ ID NO: 138342 - DNA, 80 bp, synthetic construct
  source 1..80: mol_type = other DNA
tcaagaacgtgaccgaggtgaaagggtatacaaaaggaggtccaggacatgaggaaccgattcccatggctacctatggc

SEQ ID NO: 138343 - DNA, 80 bp, synthetic construct
  source 1..80: mol_type = other DNA
acaatcgacctgacatgggtttgttcgggatgatgaagtttgcccacacacaccatctggtcaagcgccagggccttggg

SEQ ID NO: 138344 - DNA, 80 bp, synthetic construct
  source 1..80: mol_type = other DNA
cgcgatcggcccgctccttggcggcgatgttgagctgcacgtactttcgtgccacgcagcgccactcaggaaagacagtg

SEQ ID NO: 138345 - DNA, 80 bp, synthetic construct
  source 1..80: mol_type = other DNA
tacatgtcaagagcatacggcgtggaccccaacatcaggaccggagttaggactgtcaccaccggagccggtataacata

SEQ ID NO: 138346 - DNA, 80 bp, synthetic construct
  source 1..80: mol_type = other DNA
tgtccacgcattgcatgagcccgtagctgcgcggggccacgaccgtgccgcgctttagaagcggtgtcgcggacgcgctc

SEQ ID NO: 138347 - DNA, 80 bp, synthetic construct
  source 1..80: mol_type = other DNA
ctgcgtcggccattaccgacgcctgcgtcggcacccccgaagatttggggcgcagagacagaatctccgccgttagttct

SEQ ID NO: 138348 - DNA, 80 bp, synthetic construct
  source 1..80: mol_type = other DNA
catctacgtattagtcatcgctattaccatggtgatgcggttttggcagtacatcaatgggcgtggatagcggtttgact

SEQ ID NO: 138349 - DNA, 80 bp, synthetic construct
  source 1..80: mol_type = other DNA
acaagaggtgggcggcaacatcacgcgagttgagtctgagaacaaagtcatagtgctcgactccttcgatcctctagtcg

SEQ ID NO: 138350 - DNA, 80 bp, synthetic construct
  source 1..80: mol_type = other DNA
aacgacgggagcggctgcggagcacgcggaccgggagcgggagtcgcagagggccgtcggagcggacggcgtcggcatcg

SEQ ID NO: 138351 - DNA, 80 bp, synthetic construct
  source 1..80: mol_type = other DNA
acctcctcaaggtgtggcgttcgaagaagacaccaatgggtttctcatatgataccaggtgttttgattcaacagtgact

SEQ ID NO: 138352 - DNA, 80 bp, synthetic construct
  source 1..80: mol_type = other DNA
ccaaacccaggaggcccttgaaaaagcactcgacttcgatatgtacggagtcacatactctatcactccgctggatctgc

SEQ ID NO: 138353 - DNA, 80 bp, synthetic construct
  source 1..80: mol_type = other DNA
tggaaaagcaatccccctatctcagatcaaagggggaagacatctgatcttctgtcactccaagaagaagtgcgatgagc

SEQ ID NO: 138354 - DNA, 80 bp, synthetic construct
  source 1..80: mol_type = other DNA
tcatctcgggtattagacggtcgcacaactttgcttttaatgacatccatgtgtacggcagctcacgccacgcaagcagc

SEQ ID NO: 138355 - DNA, 80 bp, synthetic construct
  source 1..80: mol_type = other DNA
tggtgctgccgatcctgcacactaccacctctaagatacagaggtgaggatggatgctggtacgggatggaaatcagacc

SEQ ID NO: 138356 - DNA, 80 bp, synthetic construct
  source 1..80: mol_type = other DNA
gcggcgatggtatcatgaacacccgctgcccatgtggagctgacataactggacatgtgaaaaacgggtcgatgaggatt

SEQ ID NO: 138357 - DNA, 80 bp, synthetic construct
  source 1..80: mol_type = other DNA
ccgcaactagttcaaagctacggatggaacataattacaatgaagagcggggtcgacgtgttttaccgaccttccgaaac

SEQ ID NO: 138358 - DNA, 80 bp, synthetic construct
  source 1..80: mol_type = other DNA
attggtttgtgcaagagtgcaattgttccatctaccctggtaccatcactggacaccgtatggcatgggatatgatgatg

SEQ ID NO: 138359 - DNA, 80 bp, synthetic construct
  source 1..80: mol_type = other DNA
ttctcatggctcaagacacgctggaccagaacctcaactttgagatgtacggagcggtgtactccgtgagtcccttggac

SEQ ID NO: 138360 - DNA, 80 bp, synthetic construct
  source 1..80: mol_type = other DNA
ggatgtccagctgcaggcccatcacagctttcgagcaggggtggggtccactgaaagatgtcaacatatctggttccagc

SEQ ID NO: 138361 - DNA, 80 bp, synthetic construct
  source 1..80: mol_type = other DNA
gggcaccgtatggcatgggacatgatgatgaactggtctccaacggccacattgatcacctcctacttgctcaggatccc

SEQ ID NO: 138362 - DNA, 80 bp, synthetic construct
  source 1..80: mol_type = other DNA
agacctgcggaattgtcaagcgcctcctgagactggccgccacggaacagcagggccccacacccccggcgatcgcggcg

SEQ ID NO: 138363 - DNA, 80 bp, synthetic construct
  source 1..80: mol_type = other DNA
ggacctcgcgcgacagtctcggggtctggagctcggggcagccgactttgtggacgaggcggcacatagccaccgcgcag

SEQ ID NO: 138364 - DNA, 80 bp, synthetic construct
  source 1..80: mol_type = other DNA
gtccaccacgcagtggcagatccttccgtgctcatttacgaccttgccagccttgtcaactggacttatacacctccatc

SEQ ID NO: 138365 - DNA, 80 bp, synthetic construct
  source 1..80: mol_type = other DNA
gcggccgccggagaggtgccaccaggcccccggacccagggcacagcacgcccccggattcgggtgcggttccgtgggta

SEQ ID NO: 138366 - DNA, 80 bp, synthetic construct
  source 1..80: mol_type = other DNA
gtggggcgtgcaggcgcccgtgggcgaccggtcgacggtgagcagcttgctgacgcccaactcgcggctgctgctgctgc

SEQ ID NO: 138367 - DNA, 80 bp, synthetic construct
  source 1..80: mol_type = other DNA
ggagaccctccagggaacaaatagtgggaccatattgacgccagggaaagaccggagtggttctctgcttttcctccaga

SEQ ID NO: 138368 - DNA, 80 bp, synthetic construct
  source 1..80: mol_type = other DNA
accaagacctcgtaggctggcccgctccccaaggcgcccgctcattgacaccctgcacttgcggctcttctgacctttac

SEQ ID NO: 138369 - DNA, 80 bp, synthetic construct
  source 1..80: mol_type = other DNA
ccaatttaacactgtgtaaccaaaccacttcttcccaccttactctactaccaccttttgtcgctggtcgttatttttgc

SEQ ID NO: 138370 - DNA, 80 bp, synthetic construct
  source 1..80: mol_type = other DNA
cgaatagcagagatgttaaggtccaagatccaaggcctgctacaacaagccactaagcaggcccaagacatacagcctgc

SEQ ID NO: 138371 - DNA, 80 bp, synthetic construct
  source 1..80: mol_type = other DNA
cgggacgccgccacaaaaagcagacgccgacgaccccattcccggcgcatctaatgatgcctcgacggaaaaccgtccgg

SEQ ID NO: 138372 - DNA, 80 bp, synthetic construct
  source 1..80: mol_type = other DNA
gcgcctttggttacagcggatgaaagcttaagcttagtaacaacgcctcccattacagtagagtcttctcgtctgggatt

SEQ ID NO: 138373 - DNA, 80 bp, synthetic construct
  source 1..80: mol_type = other DNA
cgcgtccagaagtgcggcctgttgccgtagcaagctcacgaaacccgcgatccactaattggcaaagcaccctaaacagc

SEQ ID NO: 138374 - DNA, 80 bp, synthetic construct
  source 1..80: mol_type = other DNA
ccaccacccgccgccgtctggcccccgcccgcgtgcgccgcgtaaccacgcgccggggccgctcgctcgttctgcccacc

SEQ ID NO: 138375 - DNA, 80 bp, synthetic construct
  source 1..80: mol_type = other DNA
ttgggaaacagcccgtcacactccagtgaattcatggttgggaaacatcatcatgtatgcgccgacgatttgggtgcgta

SEQ ID NO: 138376 - DNA, 80 bp, synthetic construct
  source 1..80: mol_type = other DNA
cggggcggcggaggaagaggcggaggacgaggccgcaggggccgagtccgacccctgcctcttctgggggcgggccgcgg

SEQ ID NO: 138377 - DNA, 80 bp, synthetic construct
  source 1..80: mol_type = other DNA
gaaatgggctggaaagcatggggaaaaagcatcctctttgccccggaattggctaactccacatttgtcgtagatggacc

SEQ ID NO: 138378 - DNA, 80 bp, synthetic construct
  source 1..80: mol_type = other DNA
tacagcgggcattgcaaatttatttacaccaggggccaggcaacacatgcagcttatcaacagcaacggaagctggcacg

SEQ ID NO: 138379 - DNA, 80 bp, synthetic construct
  source 1..80: mol_type = other DNA
agaatataaagcagacattgtgttgtacactgaaaatgtcaaccttgaaaccccagacacccacgtggtatacaagccag

SEQ ID NO: 138380 - DNA, 80 bp, synthetic construct
  source 1..80: mol_type = other DNA
gttgaagggactaccaacgtcgggcattctgtgggccgcacagtaaacagcttcactggcatttttgcgcaggggcccaa

SEQ ID NO: 138381 - DNA, 80 bp, synthetic construct
  source 1..80: mol_type = other DNA
gaagcggcatcgatcggccttctggttattgtggccttgaccatcttcacgctcactcccacctacaagatcttactagc

SEQ ID NO: 138382 - DNA, 80 bp, synthetic construct
  source 1..80: mol_type = other DNA
gtagcgatcgctgccaggatatacgtaatctggcatttctggggattgcttataacaccctgttacgtatagccgaaatt

SEQ ID NO: 138383 - DNA, 80 bp, synthetic construct
  source 1..80: mol_type = other DNA
aaccccaccatgaaccttattaccggggtacccaactccatgcttaacagtccccaggtacagcccaccctgcgtcgcaa

SEQ ID NO: 138384 - DNA, 80 bp, synthetic construct
  source 1..80: mol_type = other DNA
ggaggtcggaagcctgctcgtctcgtgtatccggatctcggggttcgggtttgcgagaagaaagcacttcacgacgtcaa

SEQ ID NO: 138385 - DNA, 80 bp, synthetic construct
  source 1..80: mol_type = other DNA
ttttccctactaatactactttcaaaaccggaggtgagctccacggtctccctacagaaaacccttgggtggaagcgggc

SEQ ID NO: 138386 - DNA, 80 bp, synthetic construct
  source 1..80: mol_type = other DNA
cacatcgatgctcacttcctttcccagaccaaacaggcgggtgagaatttcgcgtacctagtggcctatcaggctacagt

SEQ ID NO: 138387 - DNA, 80 bp, synthetic construct
  source 1..80: mol_type = other DNA
gggttgggttatcaagtgggagtttgttgtcctggtgttcctcctgctttcagacgccagggtttgtgtggttttctgga

SEQ ID NO: 138388 - DNA, 80 bp, synthetic construct
  source 1..80: mol_type = other DNA
catatctgaaatgggagccaacttcagagctagcagggtgattgacagcaggaagagcgtgaagccaaccatcataactg

SEQ ID NO: 138389 - DNA, 80 bp, synthetic construct
  source 1..80: mol_type = other DNA
tacagacaattccaccccccccgccgtgcctcagacgtaccaggtggcccacctgcatgcgccgacagggagcggcaaga

SEQ ID NO: 138390 - DNA, 80 bp, synthetic construct
  source 1..80: mol_type = other DNA
ctggcgacctccattaacggtgtcatgtggaccgtctatcatggggccggttcaaagactctcgctggaccgaaaggacc

SEQ ID NO: 138391 - DNA, 80 bp, synthetic construct
  source 1..80: mol_type = other DNA
ggttacacgcgaggctgatgtcctccctgcccgccgtagaggtgactcaacagcaagtctccttagcccaagacctctct

SEQ ID NO: 138392 - DNA, 80 bp, synthetic construct
  source 1..80: mol_type = other DNA
taaaatttcttgtaaactggcgccatgtaattcaaaaagtttgttaagagcaccctctactgtcatacgcaggcacacct

SEQ ID NO: 138393 - DNA, 80 bp, synthetic construct
  source 1..80: mol_type = other DNA
attaataaccctactatgctggtatgcggggacgacctagtagtcatctcagagagtcagggcaccgaggaggatgagcg

SEQ ID NO: 138394 - DNA, 80 bp, synthetic construct
  source 1..80: mol_type = other DNA
cattgtttggaggcatgtcttggataactcagggtctgctgggggccctcctattgtggatgggtattaacgctcgtgat

SEQ ID NO: 138395 - DNA, 80 bp, synthetic construct
  source 1..80: mol_type = other DNA
gagcctcaggaatgtttgacagtgtagtgctttgtgagtgctacgacgcaggggctgcgtggtacgatctcacaccagcg

SEQ ID NO: 138396 - DNA, 80 bp, synthetic construct
  source 1..80: mol_type = other DNA
gacggcgtgaggttacatcgctacgcgcccgatccaggacccatgctcagggacgaagtctgcttcaccgttggacttaa

SEQ ID NO: 138397 - DNA, 80 bp, synthetic construct
  source 1..80: mol_type = other DNA
gcccttgtggcgtttcttcgcttcctgacaataccacccacaatggggatattgacaagatggggagcaattaaaaaatc

SEQ ID NO: 138398 - DNA, 80 bp, synthetic construct
  source 1..80: mol_type = other DNA
gtccggggctctcgttgcttttaagatcatgagcggcgagaccccttcagtagaggacatggtcaacctacttccggccc

SEQ ID NO: 138399 - DNA, 80 bp, synthetic construct
  source 1..80: mol_type = other DNA
cgctggtgtggatgccgagacctacgccactggggctgttgttggccgcacggcatctggcttaactagcctctttagca

SEQ ID NO: 138400 - DNA, 80 bp, synthetic construct
  source 1..80: mol_type = other DNA
taaagccaagctgctacccgcccttccgggcgtcccttttttctcgtgtcaacgaggatttaagggcgtgtggaggggcg

SEQ ID NO: 138401 - DNA, 80 bp, synthetic construct
  source 1..80: mol_type = other DNA
tatgcggccgctatctctttaattgggcagtgaggacaaagctcaaactcactccattgccggaggcgcgcctcctggac

SEQ ID NO: 138402 - DNA, 80 bp, synthetic construct
  source 1..80: mol_type = other DNA
gcggagtatgacgatagggaaatttcagtggcggctgagtgtcatagaccaccgcggccccgctatccacctgcgctccc

SEQ ID NO: 138403 - DNA, 80 bp, synthetic construct
  source 1..80: mol_type = other DNA
tactcctactaaccgtaggggtaggcatctttctcctgccagctcggtgagccggtaggataacactccatatttttccc

SEQ ID NO: 138404 - DNA, 80 bp, synthetic construct
  source 1..80: mol_type = other DNA
gttgctctatgtcctattcctggacaggggccttggttacgccatgcgcagccgaggaagctaagctaccaatcaacccc

SEQ ID NO: 138405 - DNA, 80 bp, synthetic construct
  source 1..80: mol_type = other DNA
tcgcttgacggaggagaaaaggaaacatttcagacatctcttaacaaactgtgacttcacaccctggcttgcatggcatg

SEQ ID NO: 138406 - DNA, 80 bp, synthetic construct
  source 1..80: mol_type = other DNA
cgataggggggagctcagccaggtccacacacgggttcacgtccctttttaaccttggaccaactcagaagatccagctt

SEQ ID NO: 138407 - DNA, 80 bp, synthetic construct
  source 1..80: mol_type = other DNA
cttaccaagttggatacctccatgcgcccacgggtagcgggaaaagcaccaaggtccctgtagcttacgcttcacaggtg

SEQ ID NO: 138408 - DNA, 80 bp, synthetic construct
  source 1..80: mol_type = other DNA
ctgatccatcccatatcacggcggagaaggcagcccgtaggctggccagggggtctcccccctccttggctagctcttcg

SEQ ID NO: 138409 - DNA, 80 bp, synthetic construct
  source 1..80: mol_type = other DNA
gtgacacaccccgtcacaaaatatgtcatggcatgtatgtcagctgatttggaagtaaccaccagcacttgggtgctgct

SEQ ID NO: 138410 - DNA, 80 bp, synthetic construct
  source 1..80: mol_type = other DNA
aggagcagagcgtagtttgctgctctatgtcatactcctggaccggcgccctgataacaccatgtagtgctgaggaggaa

SEQ ID NO: 138411 - DNA, 80 bp, synthetic construct
  source 1..80: mol_type = other DNA
ctgcttcacgccatcaccagtagtggtgggcaccactgatgccagaggtttaccaacttacaactttggtgagaatgaga

SEQ ID NO: 138412 - DNA, 80 bp, synthetic construct
  source 1..80: mol_type = other DNA
ggactagcggttagaggagacccctcccttacaaaatcgcagcaacaacgggggcccaaggtgagatgaagctgtagtct

SEQ ID NO: 138413 - DNA, 80 bp, synthetic construct
  source 1..80: mol_type = other DNA
cacgaacgtaagcacggggagggtgaacacgacgaactccccctcacgggtcaccttcaggtaggcgtggagcttggcca

SEQ ID NO: 138414 - DNA, 80 bp, synthetic construct
  source 1..80: mol_type = other DNA
agtaatcggtacctttgaaatccaaggaccagagcggcaagagggtgcttccaatcttaagcttactccggcgctctgga

SEQ ID NO: 138415 - DNA, 80 bp, synthetic construct
  source 1..80: mol_type = other DNA
gcgccgagccacagcccctagccgcagacgaggtccatcacgccgtagacgtcgacgcaaagccactttagccccagcgg

SEQ ID NO: 138416 - DNA, 80 bp, synthetic construct
  source 1..80: mol_type = other DNA
cggcccggttgagcaattgtaccacgtcctttcggacagcgttcccgctaagggggcaaaggcggacctgccgtttgaga

SEQ ID NO: 138417 - DNA, 80 bp, synthetic construct
  source 1..80: mol_type = other DNA
gaatggagaggagagagtgaccaggatggcgatcagcggagacgactgtgccgtcaaaccgctggacgacagattcgcca

SEQ ID NO: 138418 - DNA, 80 bp, synthetic construct
  source 1..80: mol_type = other DNA
ggcaaatgggcttggttcttctggtggtcatatcagtcttcacactcagccctgcttataagatcctcctcacccacagt

SEQ ID NO: 138419 - DNA, 80 bp, synthetic construct
  source 1..80: mol_type = other DNA
caagcggattccccaaaaagattggcgacagccattgcaggcgcttgggaaaatggagtgtgtggaattaggtcaacaac

SEQ ID NO: 138420 - DNA, 80 bp, synthetic construct
  source 1..80: mol_type = other DNA
gctttgaacagctgaaaacacattggatggagccttgggaggactgggaactagctttgaatatgtttgccaaagtggct

SEQ ID NO: 138421 - DNA, 80 bp, synthetic construct
  source 1..80: mol_type = other DNA
cagagcctcgcgcgccgccgggtgggtgggctgatcggcccctattggtcccctgggcttcctagtatgctaatgaattt

SEQ ID NO: 138422 - DNA, 80 bp, synthetic construct
  source 1..80: mol_type = other DNA
ccactatatgggtgcgtatggtactgatgacacacttctttggaatactccagtctcaagagcagctccacaaagcactc

SEQ ID NO: 138423 - DNA, 80 bp, synthetic construct
  source 1..80: mol_type = other DNA
ccggagcccagctaccgtagggctctgtggagggtgtcagcggaggagtacgtcgaagtcgtccgagtgggaggtcacca

SEQ ID NO: 138424 - DNA, 80 bp, synthetic construct
  source 1..80: mol_type = other DNA
ccagcttataaacaacttctcacaaattttctgtggtggacccaatacttcatcgcacgcatcgaggccactctccaagt

SEQ ID NO: 138425 - DNA, 80 bp, synthetic construct
  source 1..80: mol_type = other DNA
tccaactagccggagccgggagatcgtccttcactcccaaccaggcctacctgaccttgcagagcagctcttcggagcct

SEQ ID NO: 138426 - DNA, 80 bp, synthetic construct
  source 1..80: mol_type = other DNA
gtacgcggcccataggatctcgcgggtcaaaaatagatacaaatgcaaaaacagaacacgcgccagacgagcggtctctc

SEQ ID NO: 138427 - DNA, 80 bp, synthetic construct
  source 1..80: mol_type = other DNA
tcactcgcaaggggattatctctccccctcctggtctactcttaaaggtccgcattcctccggcgtgcggtaacagacct

SEQ ID NO: 138428 - DNA, 80 bp, synthetic construct
  source 1..80: mol_type = other DNA
tcaggggacacagagagcagaagggattgacctggattgtccccctggctagattgcttggtggagagggctctggaatc

SEQ ID NO: 138429 - DNA, 80 bp, synthetic construct
  source 1..80: mol_type = other DNA
gggatttgaccctgtctcattactaatttataatatactgttaagtgagccaagcgacggtttatgtaggcggatggtgg

SEQ ID NO: 138430 - DNA, 80 bp, synthetic construct
  source 1..80: mol_type = other DNA
agccgaccctaaggtcgtgagctgggcgatggccacccgcgcgtccagggccaaccgagtcgccttgacgtatcccgcgg

SEQ ID NO: 138431 - DNA, 80 bp, synthetic construct
  source 1..80: mol_type = other DNA
agttttgggcaaagcacatgtggaactttattagcggcatccagtaccttgccgggttatccaccttacctggcaacccc

SEQ ID NO: 138432 - DNA, 80 bp, synthetic construct
  source 1..80: mol_type = other DNA
ctttgatactctagcatgagccccccgtcgaagctgatgtccctcattttacaataaatgtctgcggccgacacggtcgg

SEQ ID NO: 138433 - DNA, 80 bp, synthetic construct
  source 1..80: mol_type = other DNA
agctgtgttgtgtgtacgtgatcaagagccagctccccccgcgcgggttggagccggccctggagcggctgtttgggcgc

SEQ ID NO: 138434 - DNA, 80 bp, synthetic construct
  source 1..80: mol_type = other DNA
taccatgagacacttaaggagatcaaggcacgagcgtcgcgagtgaaggcgcggaccctctcagtcgaggaggcctgcga

SEQ ID NO: 138435 - DNA, 80 bp, synthetic construct
  source 1..80: mol_type = other DNA
gcggcagggagcacaggttcactgccgcctgcaactggaccaggggagagcaatgcaacttggacgatcgtgacagggtc

SEQ ID NO: 138436 - DNA, 80 bp, synthetic construct
  source 1..80: mol_type = other DNA
gagtgtttatttgtttcttttgcggtaggccctggaccacctgtcgcggtcgttgaggactttgtggatgttttccaaga

SEQ ID NO: 138437 - DNA, 80 bp, synthetic construct
  source 1..80: mol_type = other DNA
ccccgccccactctgccaaatcacggtacggatttggggcaaaggaggtgcgcagcttatccaggagggccgtcaaccac

SEQ ID NO: 138438 - DNA, 80 bp, synthetic construct
  source 1..80: mol_type = other DNA
actgaggagtccatataccaggcctgctccctgcctgaggaggcccgcactgtcatacactcactgactgagaggcttta

SEQ ID NO: 138439 - DNA, 80 bp, synthetic construct
  source 1..80: mol_type = other DNA
caaccgcacggcgctgaattgcaatgactctctgcagacgggctttattgcaggactgtttgcccgctacaagttcaatt

SEQ ID NO: 138440 - DNA, 80 bp, synthetic construct
  source 1..80: mol_type = other DNA
tcaatcacagaaacagccctagaaggatatggttccatatcaatggaatgttcaccaaggacaggcctcgacttcaatga

SEQ ID NO: 138441 - DNA, 80 bp, synthetic construct
  source 1..80: mol_type = other DNA
tccggacctagagtccgcggcagtagagcggcccccctcatcacaagatggggtggaagttcctgctgacgattctggtt

SEQ ID NO: 138442 - DNA, 80 bp, synthetic construct
  source 1..80: mol_type = other DNA
cccatgggccggggtgcgtcagaatgtgatgggctccagcattgatggtcgccccgtcctgcccgcaaactctactacct

SEQ ID NO: 138443 - DNA, 80 bp, synthetic construct
  source 1..80: mol_type = other DNA
acaacatggtgtattctaccacctcccgtagcgccagccagaggcaaaagaaggtcacatttgacagaatgcaagtcctg

SEQ ID NO: 138444 - DNA, 80 bp, synthetic construct
  source 1..80: mol_type = other DNA
aaaatgacggaaatggttgggtaaaagatgacagtgtagcagataccaatgacatagccaaaggtaatatatttgccatg

SEQ ID NO: 138445 - DNA, 80 bp, synthetic construct
  source 1..80: mol_type = other DNA
accggccatcgcatggcatgggacatgatgctaaactggtcaccaactcttactatggtctttgcctacgctgctcgtgt

SEQ ID NO: 138446 - DNA, 80 bp, synthetic construct
  source 1..80: mol_type = other DNA
cggcgaccaacggccatattgctggcactatgccccacgcccgtgcggcattgtgccggcgaaagaggtttgcgggcctg

SEQ ID NO: 138447 - DNA, 80 bp, synthetic construct
  source 1..80: mol_type = other DNA
agtcattctggactcctttgaaccactcaaggcggaggagagtgacggggaggtctccgtccctgcagagattctgcggc

SEQ ID NO: 138448 - DNA, 80 bp, synthetic construct
  source 1..80: mol_type = other DNA
tgaacaagactatcacggaggactgcctgcccatcctggacatggagacggggaacatcggggcgtacgtggtcctggtg

SEQ ID NO: 138449 - DNA, 80 bp, synthetic construct
  source 1..80: mol_type = other DNA
gacagacctttcgaggttaaggatggtgtctacaggattttcagccccggcttgttctggggtcagaaccaagtgggagt

SEQ ID NO: 138450 - DNA, 80 bp, synthetic construct
  source 1..80: mol_type = other DNA
ccaaccctcaacatcggccgtggtaatgcccctgctttgtttgttggccccaggcatgaggatgctttacctggacacct

SEQ ID NO: 138451 - DNA, 80 bp, synthetic construct
  source 1..80: mol_type = other DNA
ggaaggaagacgggtcgaagcgcggcacccaggccccatcggtttgctgcgcggtggctatgtgccgcctcgtccacaaa

SEQ ID NO: 138452 - DNA, 80 bp, synthetic construct
  source 1..80: mol_type = other DNA
ggggcgtccggattggactcgggcgccataaaaagcggcgacaacaacctggaggcgctgtgcgttaactatgtacttcc

SEQ ID NO: 138453 - DNA, 80 bp, synthetic construct
  source 1..80: mol_type = other DNA
ttgcccggcattctgtccccaggcgcattggtggtgtgggtcatctgcgcggccatactccgccgccacgtgtggcaggg

SEQ ID NO: 138454 - DNA, 80 bp, synthetic construct
  source 1..80: mol_type = other DNA
tcgacacggaataccccaaaacaaagaacaacgaatgggacttcgttgtgaccactgacatatcagagatgggggccaac

SEQ ID NO: 138455 - DNA, 80 bp, synthetic construct
  source 1..80: mol_type = other DNA
cacagcctctgtcaccagcccgctcaccacccaaagcaccctcctgttaaacatcttagggggatgggtggctgcccaac

SEQ ID NO: 138456 - DNA, 80 bp, synthetic construct
  source 1..80: mol_type = other DNA
catcgtgtgtctacagacgatatataatatacataaacacaattggggttgtctcacatgcaaaacatcttatataacac

SEQ ID NO: 138457 - DNA, 80 bp, synthetic construct
  source 1..80: mol_type = other DNA
cctactgcaggcgagcctgttgcgcgtaccgtattacgtgcgcgctcatgccctattacgggtgtgtttggctgtccgca

SEQ ID NO: 138458 - DNA, 80 bp, synthetic construct
  source 1..80: mol_type = other DNA
gtcttaggcattgggactgtcttggaccaggcggagactgcgggagtaaggcttactgtgctcgctactgcgactccccc

SEQ ID NO: 138459 - DNA, 80 bp, synthetic construct
  source 1..80: mol_type = other DNA
accccccaggagggctcccagccctggctgtctgcggtcgtggccgataccagctccgtggaacgcccgggcccatccga

SEQ ID NO: 138460 - DNA, 80 bp, synthetic construct
  source 1..80: mol_type = other DNA
ccgcaggttgtaattgacatcttcctgggcagccactggggcgtccttggggccctgctatattatagcatggtcgctaa

SEQ ID NO: 138461 - DNA, 80 bp, synthetic construct
  source 1..80: mol_type = other DNA
gcaaatgcccggatacgagcctccagttgtgtctgggtgtgccgtcgccccacctaaaccggcaccagttcccccgccga

SEQ ID NO: 138462 - DNA, 80 bp, synthetic construct
  source 1..80: mol_type = other DNA
ttgtgatgagtgccactccacggatgcaacatccatcttgggcatcggtactgtccttgaccaagcagagaccgcgggtg

SEQ ID NO: 138463 - DNA, 80 bp, synthetic construct
  source 1..80: mol_type = other DNA
ttgagggaaacaagtatcacctgaagagtggtcatgtgacctgcgaagtgggactggaaaacctaaagatgaaaggtctc

SEQ ID NO: 138464 - DNA, 80 bp, synthetic construct
  source 1..80: mol_type = other DNA
attggttggaaaagtcaaaagtgtttatttatttcttttgcggtaggccctggaccacctgtcgcggtcgtttaaaactt

SEQ ID NO: 138465 - DNA, 80 bp, synthetic construct
  source 1..80: mol_type = other DNA
cacatcaacaggactgccttgaactgtaacgactccctccagactgggtttcttgccgcgctgttctatacacataggtt

SEQ ID NO: 138466 - DNA, 80 bp, synthetic construct
  source 1..80: mol_type = other DNA
ggtggctatcaaccaagtcagagcaatcattggagatgagaagtatgtggattacatgagttcactaaagagatatgaag

SEQ ID NO: 138467 - DNA, 80 bp, synthetic construct
  source 1..80: mol_type = other DNA
cgatgcgtaggagtaggaaacagagactttgtggaaggagtctcaggtggagcatgggtcgacctggtgctagaacatgg

SEQ ID NO: 138468 - DNA, 80 bp, synthetic construct
  source 1..80: mol_type = other DNA
gtcatcctgctttcgtgcttgttccaccctcagcttgggtttgaggtgacaaagatcctgatggccttgctcggttcaat

SEQ ID NO: 138469 - DNA, 80 bp, synthetic construct
  source 1..80: mol_type = other DNA
gcgcgcggtcggcgtccgacagcccggcggcgtggggcaggtaccgccgcagctcgttggcgtccagccgcacctgcgcc

SEQ ID NO: 138470 - DNA, 80 bp, synthetic construct
  source 1..80: mol_type = other DNA
tatcggagatgtcgcgcaagcggtgtcctaacgaccagcctcggcaacaccctcacctgctacctgaaggccagcgcggc

SEQ ID NO: 138471 - DNA, 80 bp, synthetic construct
  source 1..80: mol_type = other DNA
tgcgggccacgaccagctgctgtttgctgtgcacctcgcagcgcatgtgccccgcgtcctggtcctggctctgcgagtag

SEQ ID NO: 138472 - DNA, 80 bp, synthetic construct
  source 1..80: mol_type = other DNA
catacaacaggtctactactcctaatcagaaacacagatttgaattgcaaattgattctaatcaagacaatgacaaaatt

SEQ ID NO: 138473 - DNA, 80 bp, synthetic construct
  source 1..80: mol_type = other DNA
acatgatatgctcctcccttgttggaaggaaagaaagagcagaatgggcaaagaacatctggggagcggtggaaaaggtg

SEQ ID NO: 138474 - DNA, 80 bp, synthetic construct
  source 1..80: mol_type = other DNA
ctgcacgccttgcccatcacatacctactcccgcgcgttatggcgcgtagctgctgacagctacgttgaagtgcgccggg

SEQ ID NO: 138475 - DNA, 80 bp, synthetic construct
  source 1..80: mol_type = other DNA
ttgattccagaacctgagaagcaacggtcccagactgacaatcaactggctgtcttcttgatatgcatcatgaccctcat

SEQ ID NO: 138476 - DNA, 80 bp, synthetic construct
  source 1..80: mol_type = other DNA
aggcacgtcggcccaggggagggggcggtacaatggatgaaccggctgatagcgtttgcctcccggtgaaaccatgtctc

SEQ ID NO: 138477 - DNA, 80 bp, synthetic construct
  source 1..80: mol_type = other DNA
tcgtgtcgactcgattgtcggggccgctgcgttctgttcggctatgtatgtaggggacctatgcggctccatcttccttg

SEQ ID NO: 138478 - DNA, 80 bp, synthetic construct
  source 1..80: mol_type = other DNA
tctggttggccaggcagaggcggcgttggacaaactcatcatcctcaatgctgcctctgctgccagcacccaaggatggc

SEQ ID NO: 138479 - DNA, 80 bp, synthetic construct
  source 1..80: mol_type = other DNA
ttggactgcactttcatgagatgaataatggaggggatgccatgtatatggccctgatcgctgctttctcaatcagacca

SEQ ID NO: 138480 - DNA, 80 bp, synthetic construct
  source 1..80: mol_type = other DNA
tgcacacagcacttacaggggccacggaaatccagatgtcatcaggaaacttactgttcacaggacatcttaaatgtagg

SEQ ID NO: 138481 - DNA, 80 bp, synthetic construct
  source 1..80: mol_type = other DNA
cctcagcgcgatccgacatgtccgtgccgctttatcccacggcctcgccagtttcggccgaagcctactactcggaaagc

SEQ ID NO: 138482 - DNA, 80 bp, synthetic construct
  source 1..80: mol_type = other DNA
ccactgcgagcctcccgggagcgcggtgctgtacccctttttcctgctcaacaaacagaagacgcccgcctttgaacact

SEQ ID NO: 138483 - DNA, 80 bp, synthetic construct
  source 1..80: mol_type = other DNA
ttagttactttaaactcaccggtggagatgattgaagctgatttagaagtcgatggaagaattaccgaacaaagacttct

SEQ ID NO: 138484 - DNA, 80 bp, synthetic construct
  source 1..80: mol_type = other DNA
ctggttgaaaacaaaaatcatgccccaaatgcctggaatcccgttcctttcctgccaacgtgggtatcgtggagtctggc

SEQ ID NO: 138485 - DNA, 80 bp, synthetic construct
  source 1..80: mol_type = other DNA
tctccgtgcaccgtgtaacccgccggggccgcacaattacgctgcccaatgcgcgttaccaccccagcattctgatttaa

SEQ ID NO: 138486 - DNA, 80 bp, synthetic construct
  source 1..80: mol_type = other DNA
gactctaatgtgaataagatggacagattgggtaaatttttgttttttctgtcttgcagctgtcatgagtggaagcgctt

SEQ ID NO: 138487 - DNA, 80 bp, synthetic construct
  source 1..80: mol_type = other DNA
ctttgtccaactgactgcttccgcaaacatccggacgctacttatagcaagtgcgggtctgggccctggctcacccctcg

SEQ ID NO: 138488 - DNA, 80 bp, synthetic construct
  source 1..80: mol_type = other DNA
ggtgatggtgtctaggaagcggccagagggggcgacagatgcaagtcaggatatcttagaatataagtggtttgaattta

SEQ ID NO: 138489 - DNA, 80 bp, synthetic construct
  source 1..80: mol_type = other DNA
gaccagggatggggcccgttatcttatgccaacatttccgggtcgtctgaagacaagccctattgctggcactacgcccc

SEQ ID NO: 138490 - DNA, 80 bp, synthetic construct
  source 1..80: mol_type = other DNA
ggcacgtcggcccgagggcaggacctgggctcagcccgggtatccttggcccctctatggtaatgagggctgcggatgtg

SEQ ID NO: 138491 - DNA, 80 bp, synthetic construct
  source 1..80: mol_type = other DNA
gggtgagactacatcggtacgcgccccgctgcaaaccccttttgagggacgaggtttccttctctgtaggactatcgtct

SEQ ID NO: 138492 - DNA, 80 bp, synthetic construct
  source 1..80: mol_type = other DNA
gttagtggcgcagggcctccatcctcagatccacctcgctgcgacggcggcgcagagtctgacgttgagtcgtggtcctc

SEQ ID NO: 138493 - DNA, 80 bp, synthetic construct
  source 1..80: mol_type = other DNA
gccaccgggggacaacatcatctatgtgggggacttaagtcagcagtggttccagaaaggcagtaccataggtagaatgc

SEQ ID NO: 138494 - DNA, 80 bp, synthetic construct
  source 1..80: mol_type = other DNA
gggagcctggtgacatgcgctaagtttgcatgctccaagaaaatgaccgggaagagcatccagccagagaatttggagta

SEQ ID NO: 138495 - DNA, 80 bp, synthetic construct
  source 1..80: mol_type = other DNA
actacatggcaacccaaaaaagagtccaagaggtcagagggtacacaaagggtggtcccggacatgaagagccccaactg

SEQ ID NO: 138496 - DNA, 80 bp, synthetic construct
  source 1..80: mol_type = other DNA
catggatagacatgacctgcactgggagctcaagctagagagctcgataatctaaactagcatggctaaatagtcaaaag

SEQ ID NO: 138497 - DNA, 80 bp, synthetic construct
  source 1..80: mol_type = other DNA
cgatgacaagttgacggctcttttggcacaattggattctttgacccgggaacttaatgtcgtttctcagcagctgttgg

SEQ ID NO: 138498 - DNA, 80 bp, synthetic construct
  source 1..80: mol_type = other DNA
acagaggtggacggtgttaggctacacaggtatgctccaccatgtaaaccactgttgagggacgaggtcactttcacggt

SEQ ID NO: 138499 - DNA, 80 bp, synthetic construct
  source 1..80: mol_type = other DNA
gacgcgagtatgccgaactgacaaaaaaatcagaggtgccgtacgaggacaatgaaaactgttcctccagcggcagttct

SEQ ID NO: 138500 - DNA, 80 bp, synthetic construct
  source 1..80: mol_type = other DNA
ctaggaggctccgcaggggctccccaccatcggaagccagctcctccgccagtcagctgtcggctccgtcgacgagagct

SEQ ID NO: 138501 - DNA, 80 bp, synthetic construct
  source 1..80: mol_type = other DNA
cagccatggcttcagttatagctctaattattgtcagcattctcactgccgcacagggacaaacaattgtctatattacc

SEQ ID NO: 138502 - DNA, 80 bp, synthetic construct
  source 1..80: mol_type = other DNA
tgacctgcatgtccgcggacttggaggtagtcacaagtacttgggtgctagtgggaggtgtccttgccgctctggcagcc

SEQ ID NO: 138503 - DNA, 80 bp, synthetic construct
  source 1..80: mol_type = other DNA
ggcaccaccgtctgcaggtacttccagtactgcgtgaggatggcgcggctcaactggccgccgggcagctccacctcgcc

SEQ ID NO: 138504 - DNA, 80 bp, synthetic construct
  source 1..80: mol_type = other DNA
caaggttaagctccacgtgccgcgtaaaaacggcgtagttgcgcaggcgctgaaaaaggtagttaagggtggtggcaatg

SEQ ID NO: 138505 - DNA, 80 bp, synthetic construct
  source 1..80: mol_type = other DNA
tccccctcgagtacatcaagggcggcaggcacctcattttctgccactcaaagaagaagtgcgacgagctagccaagcaa

SEQ ID NO: 138506 - DNA, 80 bp, synthetic construct
  source 1..80: mol_type = other DNA
cggcacggaaggccattacatcactgaatgagcggctgtactgtggaggccccatgttcaactcccggggccaatcctgt

SEQ ID NO: 138507 - DNA, 80 bp, synthetic construct
  source 1..80: mol_type = other DNA
atttcttcttcttccggcggaggtgggggcgcacgtctctgtcgacggcgtattggcaatcggtcaacaaatctttcaat

SEQ ID NO: 138508 - DNA, 80 bp, synthetic construct
  source 1..80: mol_type = other DNA
tatgacgtgatacagaaactatcaactgccacaatgggagccgcttacgggtttcagtactctcccaagcagcgagtgga

SEQ ID NO: 138509 - DNA, 80 bp, synthetic construct
  source 1..80: mol_type = other DNA
cagcatcagtctcctggtgcgtcgggcacagcaccgcatcctgatctcgctcatgttctcacagtaagtgcagcacatta

SEQ ID NO: 138510 - DNA, 80 bp, synthetic construct
  source 1..80: mol_type = other DNA
tggcatggtacgttccccatcaacgcttataccactggcccaagcgtgcccgtccccacgcccgactattctcgggcgtt

SEQ ID NO: 138511 - DNA, 80 bp, synthetic construct
  source 1..80: mol_type = other DNA
ttggagatagactttggagaatgtcccggaacaacagttacaattcaggaggattgtgaccatagaggcccatctctgag

SEQ ID NO: 138512 - DNA, 80 bp, synthetic construct
  source 1..80: mol_type = other DNA
ggcggccctatgttcaattcaaagggccagtcgtgcgggtatcgcaggtgcagggctagtggtgttttaaccaccagcct

SEQ ID NO: 138513 - DNA, 80 bp, synthetic construct
  source 1..80: mol_type = other DNA
caagttcttggccgatggagggtgttctgggggggcttatgacatcattatatgtgatgaatgccattccacggatccca

SEQ ID NO: 138514 - DNA, 80 bp, synthetic construct
  source 1..80: mol_type = other DNA
gtgtctcaggcgccttggtggcttttaagatcatgggaggagaactccccaccactgaggacatggtcaacctgttgccc

SEQ ID NO: 138515 - DNA, 80 bp, synthetic construct
  source 1..80: mol_type = other DNA
aaaggctcctcgggtggtccactgctgtgccccgcgggacacgccgtaggcatattcagagccgcggtatgcacccgtgg

SEQ ID NO: 138516 - DNA, 80 bp, synthetic construct
  source 1..80: mol_type = other DNA
gaccgaaggcctgaagtgctggatatcagtaacaccaacggtagctatcaggtatcctggtgttgccactgcgtcgatcc

SEQ ID NO: 138517 - DNA, 80 bp, synthetic construct
  source 1..80: mol_type = other DNA
cgcctccggggcccggcccccgcgccccggcccccgtggcggagccggccgcccgccccgcggacgcgcgccgtgtgccc

SEQ ID NO: 138518 - DNA, 80 bp, synthetic construct
  source 1..80: mol_type = other DNA
cgcgccgccgagcaggctattacccgtcgccgccgaacccggcggtcccgggaggcgtacgcggccgaggccgggctgtg

SEQ ID NO: 138519 - DNA, 80 bp, synthetic construct
  source 1..80: mol_type = other DNA
gtcgcccgaggagcggcccaccttgcttttgatgaaaatcacgagggggcagtactcccccctgacattacgtacacgta

SEQ ID NO: 138520 - DNA, 80 bp, synthetic construct
  source 1..80: mol_type = other DNA
gtatagctccatgccaccccttgagggtgagccaggagaccctgacctaagctcaggatcgtggtccacagtcagtgatg

SEQ ID NO: 138521 - DNA, 80 bp, synthetic construct
  source 1..80: mol_type = other DNA
attgacccgaacattcggtcaggagtcaggaccatcaccacgggtgcgccaatcacgtactctacatacggtaagttcct

SEQ ID NO: 138522 - DNA, 80 bp, synthetic construct
  source 1..80: mol_type = other DNA
tgattacgtcagtgccataacgcaagccgaaagaattggtgagccagattatgaagtggatgaggacatttttcgaaaga

SEQ ID NO: 138523 - DNA, 80 bp, synthetic construct
  source 1..80: mol_type = other DNA
tggttatccgagcaagtccatatccggtgctagcctgaagataaacgtgacccataattccggcttcgcgtctacgtttt

SEQ ID NO: 138524 - DNA, 80 bp, synthetic construct
  source 1..80: mol_type = other DNA
gtctgttgttccatgtcatactcctggaccggggctctaataactccctgtagccccgaagaggaaaagttgccaatcaa

SEQ ID NO: 138525 - DNA, 80 bp, synthetic construct
  source 1..80: mol_type = other DNA
ttgccgcgtactgcctggcgaccgggtgtgtctccattatcggccggctgcacgtcaaccagcgagccgtcgttgcaccg

SEQ ID NO: 138526 - DNA, 80 bp, synthetic construct
  source 1..80: mol_type = other DNA
acttgaaagagcccatttatacacaaaatggaaaactaggactaaagtacggggctcctttgcatgtaacagacgaccta

SEQ ID NO: 138527 - DNA, 80 bp, synthetic construct
  source 1..80: mol_type = other DNA
aagctgcttattcgccacaaaaacaaaattggcaagtatgctgtttatgctatttggcagccaggtgacactacagagta

SEQ ID NO: 138528 - DNA, 80 bp, synthetic construct
  source 1..80: mol_type = other DNA
cacccaacaacaccgggctaaccaggaaatccatggccccggcccccaataaagatcgcggtagcccggccgtgtgacac

SEQ ID NO: 138529 - DNA, 80 bp, synthetic construct
  source 1..80: mol_type = other DNA
gtgccttgccgagaacaggacgagctcattgggagaggaagggtgtctccaggaaacggctggatgatcaaggaaacagc

SEQ ID NO: 138530 - DNA, 80 bp, synthetic construct
  source 1..80: mol_type = other DNA
ttggccccaaaacatgcagcaacgtctggcatggtagatttcccatcaatgcgactacgacgggccccagcgtacccatc

SEQ ID NO: 138531 - DNA, 80 bp, synthetic construct
  source 1..80: mol_type = other DNA
actccatggatactctccaagcgaactcaatagggtgggagcaagcctcaggaagcttggggctcctcctttgagagctt

SEQ ID NO: 138532 - DNA, 80 bp, synthetic construct
  source 1..80: mol_type = other DNA
tttttataggaaatgacatgttttttgggcgttgttgtgtaagttttgtgtttttggcggtaaaagtgatttgcggaagt

SEQ ID NO: 138533 - DNA, 80 bp, synthetic construct
  source 1..80: mol_type = other DNA
taaattgctatccgtagaggaggcatgtagcctgacgcccccgcactccgccagatcaaaatttggctatggggcgaagg

SEQ ID NO: 138534 - DNA, 80 bp, synthetic construct
  source 1..80: mol_type = other DNA
acgctgtcagcagaagccagaggcgcggtcgaacggggaggggcaaacccgggacatataggtttgtctcgcaaggtgag

SEQ ID NO: 138535 - DNA, 80 bp, synthetic construct
  source 1..80: mol_type = other DNA
aggtactcgtgctcaacccttccgttgcagcgaccctctccttcggtgcctacatgggcaaagcctacgggattgaccca

SEQ ID NO: 138536 - DNA, 80 bp, synthetic construct
  source 1..80: mol_type = other DNA
agtgtctcatcagactcaaacccacccttaccggccccactccacttttgtatcggttggtggccgtccaaaatggggta

SEQ ID NO: 138537 - DNA, 80 bp, synthetic construct
  source 1..80: mol_type = other DNA
tccaactacaatcatggctaagaacgaggtcttttccgtcaaaccggagaagggcggcagaaaaccagcgcgcctaatcg

SEQ ID NO: 138538 - DNA, 80 bp, synthetic construct
  source 1..80: mol_type = other DNA
ctatgaccaggtactcggccactcccggggacctacctagcccagcttacgatctggagcacataacatcatgctcttcc

SEQ ID NO: 138539 - DNA, 80 bp, synthetic construct
  source 1..80: mol_type = other DNA
tgaggccgaagcagcggccgaagctgcggaggctgcgcaacccgaggtcgagaagcctcagaagaaaccggtgatcaaac

SEQ ID NO: 138540 - DNA, 80 bp, synthetic construct
  source 1..80: mol_type = other DNA
ccagctgcttggctctctcactataactagcctgctcaggagacttcaccaatggatcgtggaagactgccctgtcccct

SEQ ID NO: 138541 - DNA, 80 bp, synthetic construct
  source 1..80: mol_type = other DNA
tcatagtgacttgtcatactggattgagagccgtctcaatgacacctggaaacttgagagggctgtcttcggagaagtga

SEQ ID NO: 138542 - DNA, 80 bp, synthetic construct
  source 1..80: mol_type = other DNA
gtttcaggggtcgatgccagcacatacaccaccggtggcagtgcagcttccgatgtcagagggcttactagccttttcca

SEQ ID NO: 138543 - DNA, 80 bp, synthetic construct
  source 1..80: mol_type = other DNA
tcagtggcactcgttccacatgtgggcatgggactggagacacgaactgaaacatggatgtcatcagaaggggcctggaa

SEQ ID NO: 138544 - DNA, 80 bp, synthetic construct
  source 1..80: mol_type = other DNA
cacatcactgctgaggcggcagctcgtcgcctaaaaagagggtccccaccatccttagctagctcgtccgctagtcagct

SEQ ID NO: 138545 - DNA, 80 bp, synthetic construct
  source 1..80: mol_type = other DNA
ggtcagcgcagtggccgccaacgagctggggtggttggacaggaccaagaatgacatcagcaatctgtttgcccagggag

SEQ ID NO: 138546 - DNA, 80 bp, synthetic construct
  source 1..80: mol_type = other DNA
tatggtcttaacggcaagcttatgttcgcgaatcagttggacttcgccgtatcccccagaccccccgaagcttcgggccc

SEQ ID NO: 138547 - DNA, 80 bp, synthetic construct
  source 1..80: mol_type = other DNA
atgtattgggttagtggagccgctggcaatgtggtgcacgctgtgaacatgaccagccaggtattactggggcgaatgga

SEQ ID NO: 138548 - DNA, 80 bp, synthetic construct
  source 1..80: mol_type = other DNA
tcttaggcacccaggtttcaccatactagctctatttcttgctcattacataggcacttccctgatccagaaagtggtca

SEQ ID NO: 138549 - DNA, 80 bp, synthetic construct
  source 1..80: mol_type = other DNA
gttggactggctatggtaacaacgttacaattgccagaggacattgaacaaatggcaaatggaatcgccctggggctcat

SEQ ID NO: 138550 - DNA, 80 bp, synthetic construct
  source 1..80: mol_type = other DNA
gctgatgtcatccctgcgcgacgtcgtggcgataaccgagctggcctcctcagtccgcggccgataagcacactcaaggg

SEQ ID NO: 138551 - DNA, 80 bp, synthetic construct
  source 1..80: mol_type = other DNA
gacgcgtggactgatgggtacaatagtgaccagcctcaccggtcgtgataggaatgaggtggcgggcgaagtgcaagtcc

SEQ ID NO: 138552 - DNA, 80 bp, synthetic construct
  source 1..80: mol_type = other DNA
tacctacacctggggagagaatgagacggacgttttcgtgctgaacagcacccgccctcctcggggcgcgtggtttggat

SEQ ID NO: 138553 - DNA, 80 bp, synthetic construct
  source 1..80: mol_type = other DNA
tcgccctggggcgagaggggtcgtggtgggaaatgttcaagttctttttccaccgcctctacgaccaccagatcgtaccg

SEQ ID NO: 138554 - DNA, 80 bp, synthetic construct
  source 1..80: mol_type = other DNA
gctctggcttagggccgtctacgactcccccgccctcaactgagactacaacatctgacgacgtacagtcagacgcagag

SEQ ID NO: 138555 - DNA, 80 bp, synthetic construct
  source 1..80: mol_type = other DNA
tattatacaggctaggggctgtccagaatgagatcactttaacccaccccataaccaagtacattatggcatgcatgtca

SEQ ID NO: 138556 - DNA, 80 bp, synthetic construct
  source 1..80: mol_type = other DNA
agggagagggcatctagtggtactgatgctagatctgagttggctttaagtttaatgagtcgcagacgtcctgaaaccat

SEQ ID NO: 138557 - DNA, 80 bp, synthetic construct
  source 1..80: mol_type = other DNA
ggatgtagatgcctatgagaacagtaagaaagaacaaaaagccaaaatagaagctgctatagctgctgcagaagctaagg

SEQ ID NO: 138558 - DNA, 80 bp, synthetic construct
  source 1..80: mol_type = other DNA
ctcaactgaacccgtgccgctttacgtgccggagttgggagatccggctagacagtaccgcgcgctgattaacctgatct

SEQ ID NO: 138559 - DNA, 80 bp, synthetic construct
  source 1..80: mol_type = other DNA
tggcgcgggggtccgcggccttcaccaccagcaggttcgcgggcctgtttaacctcgggccgtctcagagaatccagctc

SEQ ID NO: 138560 - DNA, 80 bp, synthetic construct
  source 1..80: mol_type = other DNA
aacatggctcaagtcaaagatcatgccttccttacccggcatccccttcatctcgtgccagaagggctacaagggggagt

SEQ ID NO: 138561 - DNA, 80 bp, synthetic construct
  source 1..80: mol_type = other DNA
agcgcgcgcgggactttagccgcgcctccaattccaagtgggccgcctttgcagccataaaggcgccaacaaaccgagga

SEQ ID NO: 138562 - DNA, 80 bp, synthetic construct
  source 1..80: mol_type = other DNA
ttctttacggaggtggacggcgtgaggctacataggtacgctccacggagcaagcccatgcttagggacgaggtcacatt

SEQ ID NO: 138563 - DNA, 80 bp, synthetic construct
  source 1..80: mol_type = other DNA
acatacatctatgaccatctcagccctcttgccgattgggcttgtaacggtctacgtgacctggccgtcgccgtcgagcc

SEQ ID NO: 138564 - DNA, 80 bp, synthetic construct
  source 1..80: mol_type = other DNA
atagatcgcaatgttggttgcccgttacaccgaccttggcaatcccaaacagctcagtgccagtccacgggtttcgcagg

SEQ ID NO: 138565 - DNA, 80 bp, synthetic construct
  source 1..80: mol_type = other DNA
tgataaggaagtcctgtacgaggcgtttgatgagatggaggaatgcgcttccagggctctcctacttgaggaggggcaac

SEQ ID NO: 138566 - DNA, 80 bp, synthetic construct
  source 1..80: mol_type = other DNA
gcgcccgcaaactcccgcttgtgggccataagcagggcgtacagctgcctgtgggtccggcaggcgctgtggtcgatgtg

SEQ ID NO: 138567 - DNA, 80 bp, synthetic construct
  source 1..80: mol_type = other DNA
acctttgtgttgaagaaagaagtctcagaaacgcagcacgggacaatactcattaaggttgagtacaaaggggaagatgc

SEQ ID NO: 138568 - DNA, 80 bp, synthetic construct
  source 1..80: mol_type = other DNA
ggaacgtacgagtgcgtcaccggttgctgcgcccacacctacagcctgaccgtaaccagacattactcccattttcccaa

SEQ ID NO: 138569 - DNA, 80 bp, synthetic construct
  source 1..80: mol_type = other DNA
actcaactgactcgactaccatcttgggcatcggcacggtcctggaccaagcggagacgactggagcgcggcttgtcgtg

SEQ ID NO: 138570 - DNA, 80 bp, synthetic construct
  source 1..80: mol_type = other DNA
agactaagacatgaatgtaatactcaaaacttaactctaatcaatgtaactaaaggttatgagggaacttactatggtac

SEQ ID NO: 138571 - DNA, 80 bp, synthetic construct
  source 1..80: mol_type = other DNA
agacggtggatctcagtctggatcccacctttaccattgagactaccacggtgccccaggacgcagtgtccagaagccaa

SEQ ID NO: 138572 - DNA, 80 bp, synthetic construct
  source 1..80: mol_type = other DNA
ccatgctgcggaggagggtttgcatttacttgcgggcgcagcctccgcggctggaccgagtggtggaggagaacgagccg

SEQ ID NO: 138573 - DNA, 80 bp, synthetic construct
  source 1..80: mol_type = other DNA
ggtgatggtggctagaaaaaaggcggaaggggctgatgcagatgatagaagcaaggatatcttagagtatgagtggtttg

SEQ ID NO: 138574 - DNA, 80 bp, synthetic construct
  source 1..80: mol_type = other DNA
agacgtcttccttctaaacagcacccggcctcccaagggagcctggtttggatgcacatggatgaatggcaccggattta

SEQ ID NO: 138575 - DNA, 80 bp, synthetic construct
  source 1..80: mol_type = other DNA
cagtaccaccatccttctcaacatcatgggaggctggttagcgtcccagatcgcaccacccgcgggggccaccggctttg

SEQ ID NO: 138576 - DNA, 80 bp, synthetic construct
  source 1..80: mol_type = other DNA
cgcccggaggccccatgggggttggagtgtatgtaggatgcgagccaatccttgaaggaccgttggcgtgcaccttggtg

SEQ ID NO: 138577 - DNA, 80 bp, synthetic construct
  source 1..80: mol_type = other DNA
gccgattacttccaggtgtcacctatgggttgctccaattgtggccccttttgttactgttgttagcattaccccctcgg

SEQ ID NO: 138578 - DNA, 80 bp, synthetic construct
  source 1..80: mol_type = other DNA
cctcatggaatttgaaggggcgcacgccacaaaacagtccgttgttgctcttgggtcacaggaaggaggcctccatcatg

SEQ ID NO: 138579 - DNA, 80 bp, synthetic construct
  source 1..80: mol_type = other DNA
ttccgcgagattctcctcgggcagatggggtacaccgagggtcaggtggtgtacaacgtcgtccggtccagcgaggccgc

SEQ ID NO: 138580 - DNA, 80 bp, synthetic construct
  source 1..80: mol_type = other DNA
ggcaaattgtcaccttgtcaccaaaacaccacattttttatcaagactgcaactgttctatctattcaggccgcatcacc

SEQ ID NO: 138581 - DNA, 80 bp, synthetic construct
  source 1..80: mol_type = other DNA
tttttaattagagagcagatctctgatgaataaccaacggaaaaaggcgagaagtacgcctttcaatatgctgaaacgcg

SEQ ID NO: 138582 - DNA, 80 bp, synthetic construct
  source 1..80: mol_type = other DNA
gatggccctttatgacttggcacaaaagctacctaaggcagtaatgggagcatcctatggattccaatactctcctgctc

SEQ ID NO: 138583 - DNA, 80 bp, synthetic construct
  source 1..80: mol_type = other DNA
caacagctccaactgctgcatataaaaaccgccccgtgttacagatttttcagatggcagttcgagtttcttgtggttcc

SEQ ID NO: 138584 - DNA, 80 bp, synthetic construct
  source 1..80: mol_type = other DNA
ggtgtggaacagagtgtggataaccaacaatccacacatgcaggacaaaacgacggtgaaggagtggcgagacatccctt

SEQ ID NO: 138585 - DNA, 80 bp, synthetic construct
  source 1..80: mol_type = other DNA
gccccaatgacccccgacgtagatcacgcaatttgggtaaggtcatcgataccctaacgtgtggcttcgccgatctcatg

SEQ ID NO: 138586 - DNA, 80 bp, synthetic construct
  source 1..80: mol_type = other DNA
gggatgtaaagcagctggccggggtcccgcggaaactcggccgtggtgaccaatacaaaacaaaagcgctcctcgtacca

SEQ ID NO: 138587 - DNA, 80 bp, synthetic construct
  source 1..80: mol_type = other DNA
gtttcccccggccatgccaatatgggctcgtccggattataaccccccgcttctggaaacctggaagcaagataactaca

SEQ ID NO: 138588 - DNA, 80 bp, synthetic construct
  source 1..80: mol_type = other DNA
attaccttgtgatccagaacctgacgtggtggccctaacatcaatgttgactgacccctctcacatcacggcggagacag

SEQ ID NO: 138589 - DNA, 80 bp, synthetic construct
  source 1..80: mol_type = other DNA
cgccgattcccgaaacttcatcacccccgagttcccccgggacttttggatgtcgcccgtctttaacctcccccgggaga

SEQ ID NO: 138590 - DNA, 80 bp, synthetic construct
  source 1..80: mol_type = other DNA
gaggcgctctcaactcattgggcaagggcatccatcaaatttttggagcagctttcaaatcattgtttggaggaatgtcc

SEQ ID NO: 138591 - DNA, 80 bp, synthetic construct
  source 1..80: mol_type = other DNA
cgaggcatatgcgccgcaatcttcgtgaatctcgcgtgacgcgtcccgacgactgtgcaatacataaaaaaacacggttg

SEQ ID NO: 138592 - DNA, 80 bp, synthetic construct
  source 1..80: mol_type = other DNA
tggagaaaaaggttatcacctggggtgctgacactgctgcatgtggagacatcctggctggcctcccagtctctgcacgg

SEQ ID NO: 138593 - DNA, 80 bp, synthetic construct
  source 1..80: mol_type = other DNA
cccgcgtaactaaaagtacccagacctttccgggaagtactcgtgtgaaaaacctaaaaaaaaaagatctagaaacttta

SEQ ID NO: 138594 - DNA, 80 bp, synthetic construct
  source 1..80: mol_type = other DNA
tcgaccctcttgtggccgaagacgatgacaaggagatttctgtggctgcagaaatactccgcaagacaaagaaatttccg

SEQ ID NO: 138595 - DNA, 80 bp, synthetic construct
  source 1..80: mol_type = other DNA
agatagcagaacaatttaagcagaaggtgctcgggctactccaggccagtgctaaacaagcagaagacatcaagcctgct

SEQ ID NO: 138596 - DNA, 80 bp, synthetic construct
  source 1..80: mol_type = other DNA
caggctcagacacacaagggtcaaattgggtgcaaaaggaaactctggtgacattcaagaatccacatgccaaaaaacaa

SEQ ID NO: 138597 - DNA, 80 bp, synthetic construct
  source 1..80: mol_type = other DNA
gatttcatcttgctcctcaaacgtctccgtggcatgcgacggagcgggtaagaggtactattacctcacccgggacccag

SEQ ID NO: 138598 - DNA, 80 bp, synthetic construct
  source 1..80: mol_type = other DNA
tgcgccaccgacgcccttatgaccgggtacacaggcgatttcgactctgtcatagactgcaatgtttctgtgacacaggt

SEQ ID NO: 138599 - DNA, 80 bp, synthetic construct
  source 1..80: mol_type = other DNA
ctctaacgtctccgtggcacgggacaacaagggaaagaggtactattacctcacccgtgatgccactactcccctagccc

SEQ ID NO: 138600 - DNA, 80 bp, synthetic construct
  source 1..80: mol_type = other DNA
gcatccggatgcccggagcgtatggccagctgtcgccccattgacaagttcgctcaggggtgcggtcccatcactcatgt

SEQ ID NO: 138601 - DNA, 80 bp, synthetic construct
  source 1..80: mol_type = other DNA
tgtctggttccagctggtgcagcaacatctggcacggtaccttccccatcaatgcgactacgaccggtcctagcgttccc

SEQ ID NO: 138602 - DNA, 80 bp, synthetic construct
  source 1..80: mol_type = other DNA
aaccaagtctcgttgtcgctcatgtgaatgcggagctaatcatttgaggttgtatcctgtaaccctgaacgttaccgagg

SEQ ID NO: 138603 - DNA, 80 bp, synthetic construct
  source 1..80: mol_type = other DNA
cccccgccgtcccccgggcgttataagccgccgcactcgcttttcccaccggaaaatcctcggcccgatccgaacggcgc

SEQ ID NO: 138604 - DNA, 80 bp, synthetic construct
  source 1..80: mol_type = other DNA
tcgtctcattgtctatcctgatctaggggtgcgggtctgtgagaaacgcgccctgtatgacgtgatacagaagttgtcaa

SEQ ID NO: 138605 - DNA, 80 bp, synthetic construct
  source 1..80: mol_type = other DNA
actttgcgtcaacggctaactgggccaaggttatactggtcttgtttctgtttgcaggagttgatggccgcacccatact

SEQ ID NO: 138606 - DNA, 80 bp, synthetic construct
  source 1..80: mol_type = other DNA
caggattgacacacatcgacgctcacttcttgtcccaaaccaagcaggcgggagagaacttcccttacctcgtggcctat

SEQ ID NO: 138607 - DNA, 80 bp, synthetic construct
  source 1..80: mol_type = other DNA
aatggggcttggaaaaggatggccgctccacaagatggacctcggcgtgccgctattggcaatgggatgctattcccaag

SEQ ID NO: 138608 - DNA, 80 bp, synthetic construct
  source 1..80: mol_type = other DNA
gatcccagtgacacctacagtggcagttaagtacgtcggagcaaccaccgcttcggtgcgcagtcatgtggatctgttag

SEQ ID NO: 138609 - DNA, 80 bp, synthetic construct
  source 1..80: mol_type = other DNA
ttttaaccccatgatccttgctgctggacttgtcgcatgtgatcccaatcgcaagcgggggtggcctgcaactgaagtga

SEQ ID NO: 138610 - DNA, 80 bp, synthetic construct
  source 1..80: mol_type = other DNA
gcagcacgcagcgataggcgagcagggccagggcgaagtccggcgacagctggttgttaaaatactggtaaccgggaaac

SEQ ID NO: 138611 - DNA, 80 bp, synthetic construct
  source 1..80: mol_type = other DNA
gccatcgttgtcatgctggccattctgacactgtctccgcactacaagttatggctggctaggggattgtggtggatcca

SEQ ID NO: 138612 - DNA, 80 bp, synthetic construct
  source 1..80: mol_type = other DNA
ctccggacgcttggactcaacgctgtcgccttctacaggggcgtggacgtgtcagtcattcccacaagtggggatgttgt

SEQ ID NO: 138613 - DNA, 80 bp, synthetic construct
  source 1..80: mol_type = other DNA
tcgggaaatacggtggtgcgctcgtcgggcaccaggtgcacgcgccaaccgcggttgtgcagggtgacaaggtcaacgct

SEQ ID NO: 138614 - DNA, 80 bp, synthetic construct
  source 1..80: mol_type = other DNA
gttaacagcgggggtggatgccaacactcgcctggttgccgggcagcctgcccagacagcgtcggcgcttgttagctggt

SEQ ID NO: 138615 - DNA, 80 bp, synthetic construct
  source 1..80: mol_type = other DNA
acggtttgctctgccctctacataggggatttgtgtggctcgatcatgatagctgctcaagttgtcatcgcctcgccgaa

SEQ ID NO: 138616 - DNA, 80 bp, synthetic construct
  source 1..80: mol_type = other DNA
agttcttctcatcagcacgcagaactgaccttgtattctcagggcaattgtctgaccatggggagaaacggccttttgac

SEQ ID NO: 138617 - DNA, 80 bp, synthetic construct
  source 1..80: mol_type = other DNA
gcccattttttggatccagctagcatagccgctagaggttgggcagcgcacagagctagggcaaatgaaagtgcaacaat

SEQ ID NO: 138618 - DNA, 80 bp, synthetic construct
  source 1..80: mol_type = other DNA
caggcggcgctggtgcgcctcaccgccctggaactcatcaaccgcacccgcacaaaccccacccccgtgggagaggttat

SEQ ID NO: 138619 - DNA, 80 bp, synthetic construct
  source 1..80: mol_type = other DNA
gccgggagctctggtggtaggagtggtatgtgccgcaattttgcggcgtcacgtgggaccgggtgagggagcggtccagt

SEQ ID NO: 138620 - DNA, 80 bp, synthetic construct
  source 1..80: mol_type = other DNA
gatggagagtacagactgcgtggtgaacaaaggaaaaactttgtggagctgatgagaagaggagacttgccagtatggct

SEQ ID NO: 138621 - DNA, 80 bp, synthetic construct
  source 1..80: mol_type = other DNA
gacagattatgactgagtcctttgcaatcatgtgccgacttacggcatcaccagaattggcctctgttgtagccaaagat

SEQ ID NO: 138622 - DNA, 80 bp, synthetic construct
  source 1..80: mol_type = other DNA
atcatactctgcgaggcctatgacacagggtgcgcgtggtatgagctcacgccgtctgagaccaccgtcagattacgggc

SEQ ID NO: 138623 - DNA, 80 bp, synthetic construct
  source 1..80: mol_type = other DNA
agaagaagtgcgacgaactggccgctaagttgtctagcctcggcctcaacgctgtggcttactatcgcggccttgacgtc

SEQ ID NO: 138624 - DNA, 80 bp, synthetic construct
  source 1..80: mol_type = other DNA
tcctaacaaaagaaaatggagaattgactgaagatcaggacatagatttgaacttctttgatattaataacccagataca

SEQ ID NO: 138625 - DNA, 80 bp, synthetic construct
  source 1..80: mol_type = other DNA
gcttattttaatactcccggccttccggtatgccaggatcacttggagttctgggaggccgtttttactggactgactca

SEQ ID NO: 138626 - DNA, 80 bp, synthetic construct
  source 1..80: mol_type = other DNA
cggtaagagcaccaaggtcccggccgcatacgcggctcagggctacaaggtgctggtgctcaacccctccgttgctgcaa

SEQ ID NO: 138627 - DNA, 80 bp, synthetic construct
  source 1..80: mol_type = other DNA
caagatctcaactttgaaatgtacggagcagtgtattcagtcagccctttggacctcccagccataattgagagactcca

SEQ ID NO: 138628 - DNA, 80 bp, synthetic construct
  source 1..80: mol_type = other DNA
catcagtgggtcaatgaagacacggccaccccttgcgctacctcatggttgcgcgacgtgtgggactgggtgtgtacagt

SEQ ID NO: 138629 - DNA, 80 bp, synthetic construct
  source 1..80: mol_type = other DNA
tcgcgtccacatggcagcccggggaccccgagtggtacaccgtctctgtccctggtgctgacggcttccttcgcacggta

SEQ ID NO: 138630 - DNA, 80 bp, synthetic construct
  source 1..80: mol_type = other DNA
tgggtggcagagacggcggcatgcggtgacatcatacatggattgcctgtctcagcccggttgggccgggaagtcttgct

SEQ ID NO: 138631 - DNA, 80 bp, synthetic construct
  source 1..80: mol_type = other DNA
tgtggtaggcgtcgtgtgcgcagccatactgcgccgccacgtgggcccaggcgagggcgccgtgcagtggatgaaccggc

SEQ ID NO: 138632 - DNA, 80 bp, synthetic construct
  source 1..80: mol_type = other DNA
tagtccccccaggcccctaggtcgcgacggctcgtaagcacgacgcggtcggccgcggggctttgcggtgtggcgtcctc

SEQ ID NO: 138633 - DNA, 80 bp, synthetic construct
  source 1..80: mol_type = other DNA
taggtatcttcctgctgcctgctcggtaggcagcttaacactccgaccttaaggtccttccgtcggtttttttttttttt

SEQ ID NO: 138634 - DNA, 80 bp, synthetic construct
  source 1..80: mol_type = other DNA
agtacaaccattctcggcccagtccaattatactggtcaaacatatttgccggtataggaatatacagttgttctgtttc

SEQ ID NO: 138635 - DNA, 80 bp, synthetic construct
  source 1..80: mol_type = other DNA
agtaagaaggccccgacctactgcggcagcacacacagtgacgggaagttggtcgctcccgacgcagttaggtcagagaa

SEQ ID NO: 138636 - DNA, 80 bp, synthetic construct
  source 1..80: mol_type = other DNA
tgcaggaggagcagcagaacactacgacggaggagtaaacatggaaccacaggtgcaagaaggccatgaacctgaccccg

SEQ ID NO: 138637 - DNA, 80 bp, synthetic construct
  source 1..80: mol_type = other DNA
cagtggcctactatcggggcctggacgtgtctgttataccatcttcgggagacgtcgtcgtggtggcaacagatgcactg

SEQ ID NO: 138638 - DNA, 80 bp, synthetic construct
  source 1..80: mol_type = other DNA
cctctacttactacagtatagcctactcaaagtgccatactttgtacgggcgcacatcctcttgcgcgcgtgcatgcttg

SEQ ID NO: 138639 - DNA, 80 bp, synthetic construct
  source 1..80: mol_type = other DNA
tgtcttgtgttaaccatccttacaatcttcacactcacccccgggtacaagaagatggtagtgttggtcatatggtggct

SEQ ID NO: 138640 - DNA, 80 bp, synthetic construct
  source 1..80: mol_type = other DNA
ttggcgtcatctgagcctgccgccgaaggcgacgcggcatcagacgccgggtcttatagctctatgccccctctggaagg

SEQ ID NO: 138641 - DNA, 80 bp, synthetic construct
  source 1..80: mol_type = other DNA
cgtctcccggttcgcctcgagttgctcctcctgcatctccagcaggtggcggcccacgtcgtccaggctccgcacggcct

SEQ ID NO: 138642 - DNA, 80 bp, synthetic construct
  source 1..80: mol_type = other DNA
gtccaccacacagtggcaggtccttccatgctccttcacgaccctgccagccttgtccaccggcctcatccacctccacc

SEQ ID NO: 138643 - DNA, 80 bp, synthetic construct
  source 1..80: mol_type = other DNA
gctggggaggaaacgactccgacgtgttcctactaagcagcgccagacctccccgaggggcctggttcggttgcacgtgg

SEQ ID NO: 138644 - DNA, 80 bp, synthetic construct
  source 1..80: mol_type = other DNA
atgtgtgtgggccagtttactgcttcacgccgagccctgtggttgtaggcactacggacagacgggaggcgcccacctac

SEQ ID NO: 138645 - DNA, 80 bp, synthetic construct
  source 1..80: mol_type = other DNA
ctccactgcgggattgggcccatgtgggcctgcgagatcttgcggtggcagttgagcccgttgtcttctctgacatggag

SEQ ID NO: 138646 - DNA, 80 bp, synthetic construct
  source 1..80: mol_type = other DNA
ttgtagcctgcttgcagcactgcggggggaatatctcatttgcaaggcggtatttgctataccatgatggagtggcgatt

SEQ ID NO: 138647 - DNA, 80 bp, synthetic construct
  source 1..80: mol_type = other DNA
tcacacgcgtctcgtgagcgcccaataaacacacccaggtatgctacgcacgaccacggtgtcgtctgttaaggggggtg

SEQ ID NO: 138648 - DNA, 80 bp, synthetic construct
  source 1..80: mol_type = other DNA
ccactattttcatgttgttgcagatgaagcgcgccagaccgtctgaagacaccttcaaccccgtgtacccttatgacacg

SEQ ID NO: 138649 - DNA, 80 bp, synthetic construct
  source 1..80: mol_type = other DNA
ccagtaccacccccctgtgaacacagaaacccaacccaaatcccataaacatacgacacacaggcatattttggaatttc

SEQ ID NO: 138650 - DNA, 80 bp, synthetic construct
  source 1..80: mol_type = other DNA
agatagccggaggtcattacgtgcaaatggccatcatcaagttaggggcgcttactggcacctatgtgtataaccatctc

SEQ ID NO: 138651 - DNA, 80 bp, synthetic construct
  source 1..80: mol_type = other DNA
aacctcatagtcctcaatgccgcttcggctacggctcttcacgggttttggtggtcattacttttcatctgctgtgcgtg

SEQ ID NO: 138652 - DNA, 80 bp, synthetic construct
  source 1..80: mol_type = other DNA
ttgccacctatcacatctttttccaaaactgcaagatacccctatcctgccgtgccaaccgcagccgagcggacaagcag

SEQ ID NO: 138653 - DNA, 80 bp, synthetic construct
  source 1..80: mol_type = other DNA
ctcaatccatcggttgctgccaccctcgggttcggtgcctacatgtcaaaagcatatggcatagaccccaacgtgcgcac

SEQ ID NO: 138654 - DNA, 80 bp, synthetic construct
  source 1..80: mol_type = other DNA
gggtgcttgcgagtgccccgggaggtctcgtagaccgtgcatcatgagcacacttccaaaaccccaaagaaaaaccaaaa

SEQ ID NO: 138655 - DNA, 80 bp, synthetic construct
  source 1..80: mol_type = other DNA
gggcatcgaatggcatgggacatgatgatgaattggtcgcctacagctgccctcattctatcatatgtcatgcgtattcc

SEQ ID NO: 138656 - DNA, 80 bp, synthetic construct
  source 1..80: mol_type = other DNA
gagactgatgtttttatcctggagagccagcgaccccccctaggagggtggtatggctgtacgtggatgaatggtacagg

SEQ ID NO: 138657 - DNA, 80 bp, synthetic construct
  source 1..80: mol_type = other DNA
cgagcaggggatgatgctcgccgagcagttcaagcagaaggctcttggcctcttgcagaccgcgtcccgccaggcagagg

SEQ ID NO: 138658 - DNA, 80 bp, synthetic construct
  source 1..80: mol_type = other DNA
cacctggaccttatggtgggtgctgctgcgctctgttcagcgatgtacgtcggcgatttgtgcggaggtgtcttcctcgc

SEQ ID NO: 138659 - DNA, 80 bp, synthetic construct
  source 1..80: mol_type = other DNA
tctctctcagacaaagcaggggggggaaaacttcccctatctggtggcttaccaagccaccgtgtgtgctagtgcccagg

SEQ ID NO: 138660 - DNA, 80 bp, synthetic construct
  source 1..80: mol_type = other DNA
tgtgtgggatagcgttcatctgcgccgcctggtacatccgcggcagggccgtccccataactacttatgccatactacag

SEQ ID NO: 138661 - DNA, 80 bp, synthetic construct
  source 1..80: mol_type = other DNA
ctgcgccgcgtggtatgtcaagggcaagtgggttcccggggctgtgtacgctctttatgggatgtggccgcttctcctcg

SEQ ID NO: 138662 - DNA, 80 bp, synthetic construct
  source 1..80: mol_type = other DNA
tttattcgcaaagtgaacagcaatgcagcgctaggagctatgtttgaggaacagaaccagtggaaaagcgctagagaagc

SEQ ID NO: 138663 - DNA, 80 bp, synthetic construct
  source 1..80: mol_type = other DNA
tcgcaaagccgctcgactgatagtctacccagacttgagtgtgcgggtttgcgaaaagatggcactgtatgatgtgacgc

SEQ ID NO: 138664 - DNA, 80 bp, synthetic construct
  source 1..80: mol_type = other DNA
ccaagtttttggagcaatctatggggctgccttcagtggggtctcatggactatgaaaatcctcataggagttgtcatca

SEQ ID NO: 138665 - DNA, 80 bp, synthetic construct
  source 1..80: mol_type = other DNA
ggatctcctcgttctcctgtgcgatggacacgtcctgggccgcggtcgtgtcgccgccgggggccgtcagctgctcctcc

SEQ ID NO: 138666 - DNA, 80 bp, synthetic construct
  source 1..80: mol_type = other DNA
cgctaaccgccgccctgagcgccatgcactgcatggagccggtcgtgccgctgggaccccggtccagatggcgcgcgaac

SEQ ID NO: 138667 - DNA, 80 bp, synthetic construct
  source 1..80: mol_type = other DNA
atcggtttatttaaataaacacagccgttctgcgtgtctgttcttgcgtgtggctggtggcttatatgtggggtcccggg

SEQ ID NO: 138668 - DNA, 80 bp, synthetic construct
  source 1..80: mol_type = other DNA
gtggatgggcagactcgtctcatcggtaacaatgctgcatccggggcctcaaggctagtgagcctcttcacgcgagggcc

SEQ ID NO: 138669 - DNA, 80 bp, synthetic construct
  source 1..80: mol_type = other DNA
acctgaccaagagacaggacaagctttgtggatcactgattgggatgaccaacagagccacttgggcatctcacatccac

SEQ ID NO: 138670 - DNA, 80 bp, synthetic construct
  source 1..80: mol_type = other DNA
ctgtgacaccctcctttgtgacatcggagagtcctcgtcaagtgctgaggttgaagagcacaggactcttcgggtccttg

SEQ ID NO: 138671 - DNA, 80 bp, synthetic construct
  source 1..80: mol_type = other DNA
tcccccaaaaaaacagctggcggtgcgggaaggcgcggggatccgagtggccgggagcgaggactaggtccccggcgtgc

SEQ ID NO: 138672 - DNA, 80 bp, synthetic construct
  source 1..80: mol_type = other DNA
ccttgttgcttatggcggctcatggaagttggatggtagatgggatggagaagaggaggttcagttgatagcagctgccc

SEQ ID NO: 138673 - DNA, 80 bp, synthetic construct
  source 1..80: mol_type = other DNA
aatctcaagttatacagtgaaccataaatcatcattttaaaccagtttgctaacactacaccgcccgccttacattgaag

SEQ ID NO: 138674 - DNA, 80 bp, synthetic construct
  source 1..80: mol_type = other DNA
gtgaggctgacgtgctcccagctcgccgtagaggagactcaacggcgagtttgctcagtcccagaccactatcctgcctc

SEQ ID NO: 138675 - DNA, 80 bp, synthetic construct
  source 1..80: mol_type = other DNA
gaggcccgccgcgcatttaaggagtcgccgccccgactctgtgtcttcgggtgacttggtgcgccgccgtcagctagtct

SEQ ID NO: 138676 - DNA, 80 bp, synthetic construct
  source 1..80: mol_type = other DNA
gggaacgttggtggcggcgtagatgcgcttctccagggcctccagaaagaccagcttctcgccgatggacaccagatccg

SEQ ID NO: 138677 - DNA, 80 bp, synthetic construct
  source 1..80: mol_type = other DNA
acaactctcgtggccagtcctgcgggtatcggagatgccgcgctagtggggtgctccccaccagcatggctaatacaatc

SEQ ID NO: 138678 - DNA, 80 bp, synthetic construct
  source 1..80: mol_type = other DNA
cttgtggacagagaacgtgaactccacaaattaggcaagtgtggaagctgtgtttacaacatgatgggcaagagagagaa

SEQ ID NO: 138679 - DNA, 80 bp, synthetic construct
  source 1..80: mol_type = other DNA
ccctttttatggcaaggctcttcctctagcttacatcaaggggggcagacacctgatcttttgccattcaaagaagaagt

SEQ ID NO: 138680 - DNA, 80 bp, synthetic construct
  source 1..80: mol_type = other DNA
ggaatatctaaatatgaccacaaacactaatagaacaataacaattaaattgttgttcgatgctaagggtgtcttattga

SEQ ID NO: 138681 - DNA, 80 bp, synthetic construct
  source 1..80: mol_type = other DNA
tatatggtggcatgaggttcagaatgagggcagggatgaagtatcaatattgcaagagaaatattctctagaacaggtga

SEQ ID NO: 138682 - DNA, 80 bp, synthetic construct
  source 1..80: mol_type = other DNA
atggtaaggccattcccctctcagtcatcaagggcgggcgtcaccttattttttgccattctaagaagaagtgtgacgaa

SEQ ID NO: 138683 - DNA, 80 bp, synthetic construct
  source 1..80: mol_type = other DNA
taagcataactatccttttagtgagctatgtacttatccgtcttccgaaaatttctacaattcaaaagaaacagtaagca

SEQ ID NO: 138684 - DNA, 80 bp, synthetic construct
  source 1..80: mol_type = other DNA
ttgacactgactccctggtcctgactattttatacagacaagacatggaagacatcaattttgcgtcgctggcgccgcgt

SEQ ID NO: 138685 - DNA, 80 bp, synthetic construct
  source 1..80: mol_type = other DNA
tgtggtgcgcatggccatgactgacacgacagcctttgggcagcagagagtgtttaaagagaaagttgacacaaaggcac

SEQ ID NO: 138686 - DNA, 80 bp, synthetic construct
  source 1..80: mol_type = other DNA
aaagtctggcttaaggctaagctcctgccgactctccctgggatgcctttttggtcgtgccagaagggctatcggggcgt

SEQ ID NO: 138687 - DNA, 80 bp, synthetic construct
  source 1..80: mol_type = other DNA
tccatggttactctcccggcgaactcaatcgggtggcttcgtgtctcaggaagcttgggatgcccccgttgagagcttgg

SEQ ID NO: 138688 - DNA, 80 bp, synthetic construct
  source 1..80: mol_type = other DNA
acgtgtataagatacacctgcaaaggcggcacaaccccagtgccacgttgtgagttggatagttgtggaaagagtcaaat

SEQ ID NO: 138689 - DNA, 80 bp, synthetic construct
  source 1..80: mol_type = other DNA
tagggataggggtcagcagagtccactgctgcattccactactgagtgggcggtgctcccatgctccttctctgacctac

SEQ ID NO: 138690 - DNA, 80 bp, synthetic construct
  source 1..80: mol_type = other DNA
aaaggagaggcagaacaggtaggaggaagcatggggtttataggtacgtctcgcagggcgaacggccgtcgggtatcttc

SEQ ID NO: 138691 - DNA, 80 bp, synthetic construct
  source 1..80: mol_type = other DNA
ctgtcctagaccaagcagagacatccggggctaggctcgtggtcctagccacggccacgcccccgggcagcgtcactgtg

SEQ ID NO: 138692 - DNA, 80 bp, synthetic construct
  source 1..80: mol_type = other DNA
ggtcctaccccgcttctgtataggttaggggcggtgcagaatgaaatcatcaccacgcacccgatcaccaagtatattat

SEQ ID NO: 138693 - DNA, 80 bp, synthetic construct
  source 1..80: mol_type = other DNA
ccaaactggatttatccagttggtttacggtgggcgccggcgtgagggacatttatcacagcgtgtcccatgcccgaccc

SEQ ID NO: 138694 - DNA, 80 bp, synthetic construct
  source 1..80: mol_type = other DNA
ttttctattacaacagattcaactcctcaggctgtcccgagaggttggccagctgccgacgccttgccgattttgaccag

SEQ ID NO: 138695 - DNA, 80 bp, synthetic construct
  source 1..80: mol_type = other DNA
gagtggaaggatgggtttggaaaaacaaactgcttgctctggcgatggttgccgttgtgtggctagcactggagagtgtg

SEQ ID NO: 138696 - DNA, 80 bp, synthetic construct
  source 1..80: mol_type = other DNA
cgctgggggcgacatccaagatgaggtacataattttaggcttgctcgcccttgcggcagtctgcagcgctgccaaaaag

SEQ ID NO: 138697 - DNA, 80 bp, synthetic construct
  source 1..80: mol_type = other DNA
gcacataaaccggaccgccctcaactgcaatgacagcttgcacacgggtttcatggccgccctgttttatgccaacaaat

SEQ ID NO: 138698 - DNA, 80 bp, synthetic construct
  source 1..80: mol_type = other DNA
atacacctccctttccccctgtaccaccgcaaacaactgcaatttaggatttacacaacgattcttctgtgacaaaatca

SEQ ID NO: 138699 - DNA, 80 bp, synthetic construct
  source 1..80: mol_type = other DNA
ggcgcggtggatcgctggtctacgcgggcgagctaacgcaggtgaccaccgagcacggcgactgcgtgcacgaggcgccc

SEQ ID NO: 138700 - DNA, 80 bp, synthetic construct
  source 1..80: mol_type = other DNA
aggacaccctgggtcaagacctcaacttcgagatgtacggagctgtgtactcagtaagtcctctggacctcccagccata

SEQ ID NO: 138701 - DNA, 80 bp, synthetic construct
  source 1..80: mol_type = other DNA
aggattacaagctcctcccgcgtcagaaccatatcccagggaacaacccattcctgaatcagcgtaaatcccacactgca

SEQ ID NO: 138702 - DNA, 80 bp, synthetic construct
  source 1..80: mol_type = other DNA
atggcgctggtggcgctggtcagttggtgccggaggttgatgcttctggccctcttgcagtggatcctgtggcgggttct

SEQ ID NO: 138703 - DNA, 80 bp, synthetic construct
  source 1..80: mol_type = other DNA
gagagtgccgtggaaaccaccaccagcccgcgcgagctcgcgggccacgccccgctccggcgcgtcctgcgcccgcccat

SEQ ID NO: 138704 - DNA, 80 bp, synthetic construct
  source 1..80: mol_type = other DNA
taattttataataatagtcatttggattatgattagacatgtaggtgtaggatagtgttatagttagtgtagtgtatata

SEQ ID NO: 138705 - DNA, 80 bp, synthetic construct
  source 1..80: mol_type = other DNA
agcaaggaatatctgcgggcctgtctactgtttcacgccctctccagtggtggtcggtactaccgacgagaagggagtgc

SEQ ID NO: 138706 - DNA, 80 bp, synthetic construct
  source 1..80: mol_type = other DNA
ctagtactcaatccctcggtggctgccactctggggttcggagcttacctgtccaaggcacatggcatcaatcccaacat

SEQ ID NO: 138707 - DNA, 80 bp, synthetic construct
  source 1..80: mol_type = other DNA
catgaaggctttcacagcttttgttctgattagcctagtcacacttagttcaactgctgcggctgcttgttatcataagc

SEQ ID NO: 138708 - DNA, 80 bp, synthetic construct
  source 1..80: mol_type = other DNA
attctggactccttcgatcctctcgtagcggaggaggatgaacgggaggtctccgtggccgcagagattctgcggaagtc

SEQ ID NO: 138709 - DNA, 80 bp, synthetic construct
  source 1..80: mol_type = other DNA
cggcgatggtggcgtgggccatggcgtggcgtcccacccccagctccaggccccgggcgtcccggaacgccgccggacat

SEQ ID NO: 138710 - DNA, 80 bp, synthetic construct
  source 1..80: mol_type = other DNA
aggaggaagaacatccagctggttctcgtctggaggatcagcatccacagtaaaaatgccaggacataaaattttatcaa

SEQ ID NO: 138711 - DNA, 80 bp, synthetic construct
  source 1..80: mol_type = other DNA
ctgtagaatttatgcctagctctaaaaggtatcccaatgaaaaaggttctgaagttcagaacatggctcttacctacact

SEQ ID NO: 138712 - DNA, 80 bp, synthetic construct
  source 1..80: mol_type = other DNA
accctaccttcacgcttccttcccatgctggttaggtaatcgttctatatatttatttgactattataattcaggaggtg

SEQ ID NO: 138713 - DNA, 80 bp, synthetic construct
  source 1..80: mol_type = other DNA
cggagcgtatgacatcataatgtgtgatgagtgccactcaacggacgcgacatcagttctaggcattggtaccgtcctgg

SEQ ID NO: 138714 - DNA, 80 bp, synthetic construct
  source 1..80: mol_type = other DNA
cgtcaggagggccagtcctctgctcttcagggcacgctgttgggctcttccgcgctgccgtgtgcacacgaggcgtggcg

SEQ ID NO: 138715 - DNA, 80 bp, synthetic construct
  source 1..80: mol_type = other DNA
caatcaaaaaataacgacggtgtggaaatgcgattttttgcatccagtgcgaatgacaatcaaaatgatccaactgttgt

SEQ ID NO: 138716 - DNA, 80 bp, synthetic construct
  source 1..80: mol_type = other DNA
ttcggtcgtcctctgcgaggcgtatgatgtcgggtgcgcgtggtacgagttgtctccctcagaaaccaccgtgaggttac

SEQ ID NO: 138717 - DNA, 80 bp, synthetic construct
  source 1..80: mol_type = other DNA
aagggctcctctggaggtcccgttatgtgcccttcggggcatgtcacgaggatctttcgggctgctgtgtgcaccagagg

SEQ ID NO: 138718 - DNA, 80 bp, synthetic construct
  source 1..80: mol_type = other DNA
tgttgtgctctgcgaggcatatgacgtggggtgtgcatggtatgagttgacaccacctgagactaccgtcaggttacgtg

SEQ ID NO: 138719 - DNA, 80 bp, synthetic construct
  source 1..80: mol_type = other DNA
gaaagtctggctcttgcgtatgtcttgtatcggtttagccgctctgacaccctgggctatcgtccccgccgcttttggct

SEQ ID NO: 138720 - DNA, 80 bp, synthetic construct
  source 1..80: mol_type = other DNA
gcaaaataacgcgctcactctttcttacaacgcgccctttaacgtagtaaataataatttagctctaaatatgtcacagc

SEQ ID NO: 138721 - DNA, 80 bp, synthetic construct
  source 1..80: mol_type = other DNA
agaagtaggtgggaacatcacacgggtagagtccgagaataaggtgatcgtcttggactcctttgagccgcttaaggcgg

SEQ ID NO: 138722 - DNA, 80 bp, synthetic construct
  source 1..80: mol_type = other DNA
agctcatcttaaagtactttagtatatcgcgacagttgatcgtgggaatgtagcaggcgctaatatccaacacaatatca

SEQ ID NO: 138723 - DNA, 80 bp, synthetic construct
  source 1..80: mol_type = other DNA
gtgtgacaccctgttgtgtgacattggagaatcttcaccaagcccaacagtggaagaaagcagaactataagagttctga

SEQ ID NO: 138724 - DNA, 80 bp, synthetic construct
  source 1..80: mol_type = other DNA
agacactacccagccatgctcaacatcctggctgcgggacatctgggactgggtgtgtacggtcttggcagatttcaaaa

SEQ ID NO: 138725 - DNA, 80 bp, synthetic construct
  source 1..80: mol_type = other DNA
ggtgcctgcccctcatgaacacactgcccatatacatgatctctttgggcatgtttctattcacaatctgacggtaccag

SEQ ID NO: 138726 - DNA, 80 bp, synthetic construct
  source 1..80: mol_type = other DNA
cggagtgtagtgggaggcaagtacgtacagggcgcgctgttgacccttgggaggtggacgggcacctacatctatgacca

SEQ ID NO: 138727 - DNA, 80 bp, synthetic construct
  source 1..80: mol_type = other DNA
atgagaccgatgtctttctgctaaatagcacaagacccccgcgaggagcttggttcggctgcacatggatgaacgggact

SEQ ID NO: 138728 - DNA, 80 bp, synthetic construct
  source 1..80: mol_type = other DNA
gggcgcgggcgtcgagggcgcgaagatcaacgagcaggtgcgcgtgcgcgggcgcggactccgcgcccgcgcccgtctgg

SEQ ID NO: 138729 - DNA, 80 bp, synthetic construct
  source 1..80: mol_type = other DNA
caggcatcatgacagaacactacttcctataaacgctacacaggctcctgagattaataatgcggatctctacgataatg

SEQ ID NO: 138730 - DNA, 80 bp, synthetic construct
  source 1..80: mol_type = other DNA
cggatgcgtgccgtgcgtcaggtctgggaacatgtccaaatgctggatgcaggtcacacctacggttgcagtcccgaatg

SEQ ID NO: 138731 - DNA, 80 bp, synthetic construct
  source 1..80: mol_type = other DNA
gtagcgttccatcagcacgttcatggcatccatgcccttctcccaggacgagaccagaggcagactcagagggttgcgta

SEQ ID NO: 138732 - DNA, 80 bp, synthetic construct
  source 1..80: mol_type = other DNA
cataggggagtcgtcaccaaattccacggttgaagcaggacgaacactcagagtcctaaacttggtggaaaattggctga

SEQ ID NO: 138733 - DNA, 80 bp, synthetic construct
  source 1..80: mol_type = other DNA
caatcacggcgtatgctcagcagaccagaggacttttaggaaccatagtcaccagcttgacaggtagagacaacaatata

SEQ ID NO: 138734 - DNA, 80 bp, synthetic construct
  source 1..80: mol_type = other DNA
taggcgatcgttcaactctgtccagtttactaacaccaaactcgcgcctattgctgttgctaattgccccctttaccaac

SEQ ID NO: 138735 - DNA, 80 bp, synthetic construct
  source 1..80: mol_type = other DNA
caacattgaagaggttgcccttggccatgagggagaaatacccttttacgggaaggccatccccctagcacaactcaaag

SEQ ID NO: 138736 - DNA, 80 bp, synthetic construct
  source 1..80: mol_type = other DNA
aagttactgtcacactaaacagacgtatgtcagcttctggaatggcctatgctatgaatttttcatggtctctaaattca

SEQ ID NO: 138737 - DNA, 80 bp, synthetic construct
  source 1..80: mol_type = other DNA
aacggagcaatttccagtgaagagaagcagatccctgatggggagtggcgcgatggattcgactggatcaccgagtatga

SEQ ID NO: 138738 - DNA, 80 bp, synthetic construct
  source 1..80: mol_type = other DNA
tacttgcgcccaattcgccattaaacgcataatatactctaccggaaaggcttcggatacgttgtcttcgccgttaaact

SEQ ID NO: 138739 - DNA, 80 bp, synthetic construct
  source 1..80: mol_type = other DNA
agggggtgatgtggcagcgcaccacgacatcgtgacgggaagaggtcgtccccgacgcatcatctctctagggcattttc

SEQ ID NO: 138740 - DNA, 80 bp, synthetic construct
  source 1..80: mol_type = other DNA
tcccttactatgtgagggctcacgccttgatcaagatctgtggctttgtgcgcagtatgacgcatggcaaatacgtgcaa

SEQ ID NO: 138741 - DNA, 80 bp, synthetic construct
  source 1..80: mol_type = other DNA
aaattcagggaaacagaaaccgcatcttttcctcgaaagggtacacaaagctcccgccctcgccccacacgccttccaga

SEQ ID NO: 138742 - DNA, 80 bp, synthetic construct
  source 1..80: mol_type = other DNA
cggacaccgcatggcatgggacatgatgatgaactggtcgccgaccatgacattggttatgtcctatgcggtgcgagtgc

SEQ ID NO: 138743 - DNA, 80 bp, synthetic construct
  source 1..80: mol_type = other DNA
gcggcgcggacgagctcccggaggaagcggcggttcgggtcctgcgggaagcggtggaagcggtatgtcggcctgacgct

SEQ ID NO: 138744 - DNA, 80 bp, synthetic construct
  source 1..80: mol_type = other DNA
attgattacaatgaaaacggtgccatgattactaaacttggagcgggtttaagctttgacaactcaggggccattacaat

SEQ ID NO: 138745 - DNA, 80 bp, synthetic construct
  source 1..80: mol_type = other DNA
atttgggggctcgtcgtggcatgttttctccatatcagagtaatttttgccatactaaagttttaatggaaactgatgct

SEQ ID NO: 138746 - DNA, 80 bp, synthetic construct
  source 1..80: mol_type = other DNA
ccttcaccaagtctttggagcagtgtacaacgccgccttcagtggagtgtcatggactatgaaaatattaattggagtta

SEQ ID NO: 138747 - DNA, 80 bp, synthetic construct
  source 1..80: mol_type = other DNA
ggagctgcccagtggatgaaccgcttgatagcctttgcgtcacggggtaaccacgtgtcgcctacacactatgtgcctga

SEQ ID NO: 138748 - DNA, 80 bp, synthetic construct
  source 1..80: mol_type = other DNA
atgcttgatcgactatccgtaccggctttggcattacccgtgtacagtcaagtttacagtgcacaaggtaaggatgtttg

SEQ ID NO: 138749 - DNA, 80 bp, synthetic construct
  source 1..80: mol_type = other DNA
tgaggaagaggctgctaaaaaagagctagttattttgccagtaacagaagatgaaagcaaaagaagctataatttaattc

SEQ ID NO: 138750 - DNA, 80 bp, synthetic construct
  source 1..80: mol_type = other DNA
acctcatggggtacatcccagtcgttggcgcccccttgggtggcgtcgcagcagctctggcacatggcatacgagctgtt

SEQ ID NO: 138751 - DNA, 80 bp, synthetic construct
  source 1..80: mol_type = other DNA
gacaacaaattggagctatcttatgatgatccatttaaggtagagaataacaaacttggaattaaagctggccatggttt

SEQ ID NO: 138752 - DNA, 80 bp, synthetic construct
  source 1..80: mol_type = other DNA
gatcgggcctcatatataatgagtctacaaactggaacttaacaactgatatcagcaccgaaaaaggcctaacgtttagt

SEQ ID NO: 138753 - DNA, 80 bp, synthetic construct
  source 1..80: mol_type = other DNA
gatatctaatggtacaggtaacattgtctcttcagtcaacatggtatccagattgttactgaacaggttcacaatgacac

SEQ ID NO: 138754 - DNA, 80 bp, synthetic construct
  source 1..80: mol_type = other DNA
tggcctctcctgttactggttctggcgttaccgcggcgtgcttacgctcaaagcgaagatcaagccgcttgccttggggt

SEQ ID NO: 138755 - DNA, 80 bp, synthetic construct
  source 1..80: mol_type = other DNA
cctgtctgcatagcacttaacggattgatatctcgcgggcacgcgcgcccttaatggaccggcgcggggcgtgtggccgg

SEQ ID NO: 138756 - DNA, 80 bp, synthetic construct
  source 1..80: mol_type = other DNA
gtggaggaattaagccgcgcgtatgaagctaacctgttttcgccgcgtgtaccgccaaaaaagcagcctaacggcacctg

SEQ ID NO: 138757 - DNA, 80 bp, synthetic construct
  source 1..80: mol_type = other DNA
tcgcggctttgttgggctgcttagccaaggccccaatcagaggatcagcctgattaacaccaatggcagttggcacataa

SEQ ID NO: 138758 - DNA, 80 bp, synthetic construct
  source 1..80: mol_type = other DNA
ataaaagctgaaataagaatcttctctggaccttgtcatcgacctcggaacaccaccgtcttactcaccaatcagaccaa

SEQ ID NO: 138759 - DNA, 80 bp, synthetic construct
  source 1..80: mol_type = other DNA
ggcgaggatcccaaatgtccattacccgggggatggtcctaatctgtacaaagttacttagtgtaatatgatcggacttc

SEQ ID NO: 138760 - DNA, 80 bp, synthetic construct
  source 1..80: mol_type = other DNA
tgttatcgcctggcgcactggtggtgggtgtggtgtgtgcggctatattgagacgccacgccgggcccgctgaggtggcc

SEQ ID NO: 138761 - DNA, 80 bp, synthetic construct
  source 1..80: mol_type = other DNA
gggcatcccggccgatgcagtcgcccaggtcgacgcgcgagagcgagtactgggtcaggttggtggtgaaggtggtcgag

SEQ ID NO: 138762 - DNA, 80 bp, synthetic construct
  source 1..80: mol_type = other DNA
tccccatcttcgttaccgatcgcggggtcaattgtatggagccggttgtgtttggagccaaggccatcctggcccgcacg

SEQ ID NO: 138763 - DNA, 80 bp, synthetic construct
  source 1..80: mol_type = other DNA
gtactaactctatattgcatttgtcctgcccccggattacatgaagatttttgctgtcatttgtgtgctgaatttaatca

SEQ ID NO: 138764 - DNA, 80 bp, synthetic construct
  source 1..80: mol_type = other DNA
ctccaatgtgtcggtcgcccacgacgagactggcaagagagtctactacctgacaagagaccctacaacacccctcgcac

SEQ ID NO: 138765 - DNA, 80 bp, synthetic construct
  source 1..80: mol_type = other DNA
cacattcccctacagaacatgcaacatccaatagcgctaatagaatacgaaagtgaaccacaacccccactactccctgc

SEQ ID NO: 138766 - DNA, 80 bp, synthetic construct
  source 1..80: mol_type = other DNA
gtggcataccaagcaacagtctgtgttcgtgcgaaggcgcccccccccagctgggatacaatgtggaagtgcatgatctg

SEQ ID NO: 138767 - DNA, 80 bp, synthetic construct
  source 1..80: mol_type = other DNA
tgctagactctttcgagcccctcatcccggaaccggaggccgataaggaaatatctgctccggcagagatcctgcgtcca

SEQ ID NO: 138768 - DNA, 80 bp, synthetic construct
  source 1..80: mol_type = other DNA
gagactacagtgagactccgggcttacttcaacacgcccggtctgcctgtgtgtcaagaccacctggaattctgggaggc

SEQ ID NO: 138769 - DNA, 80 bp, synthetic construct
  source 1..80: mol_type = other DNA
caccatgacgtgctacattaaggccttagcctcctgtagagctgcaaagctccgggattgcacgctcctggtgtgcggtg

SEQ ID NO: 138770 - DNA, 80 bp, synthetic construct
  source 1..80: mol_type = other DNA
acgtcaaaggtggtcggcatctcatcttctgtcactctaagaaaaaatgtgacgagctcgccaaacaattgacggggctc

SEQ ID NO: 138771 - DNA, 80 bp, synthetic construct
  source 1..80: mol_type = other DNA
caccgtggtggggggggggagcaagccagatccatccgtggagtaacgtccctctttagttttgcggcatctcagaaaat

SEQ ID NO: 138772 - DNA, 80 bp, synthetic construct
  source 1..80: mol_type = other DNA
gtctgggaggacttgctggaagacaattctaccccaatccctaccaccattatggcgaagaacgaggtgttcagcgtgaa

SEQ ID NO: 138773 - DNA, 80 bp, synthetic construct
  source 1..80: mol_type = other DNA
cagctctgggtgccatgtttgaagagcagaaccaatggaggagcgccagagaagcagttgaggatccaaaattttgggag

SEQ ID NO: 138774 - DNA, 80 bp, synthetic construct
  source 1..80: mol_type = other DNA
cactcaacagaccaggggtctattgggcacgattgtcaccagccttaccggccgagacaagaatgaggtggaaggtgaga

SEQ ID NO: 138775 - DNA, 80 bp, synthetic construct
  source 1..80: mol_type = other DNA
agtacatgctgaccagagcagaggcgctcctacaggtttgggtccccccgctcaacgcccgaggagggcgcgacggagtc

SEQ ID NO: 138776 - DNA, 80 bp, synthetic construct
  source 1..80: mol_type = other DNA
attcggcttatcgtcccatctacgttgcggtgcggggacggggaggcgggcccctactctccctccagcctccgctccag

SEQ ID NO: 138777 - DNA, 80 bp, synthetic construct
  source 1..80: mol_type = other DNA
agatcctgatagagttggagcccccatttggggactcatacattgttgttgggaagggagatcaacaagttacccaccac

SEQ ID NO: 138778 - DNA, 80 bp, synthetic construct
  source 1..80: mol_type = other DNA
agagcgcctacatcaggagctccaagacatgattaacctgcaccagtgcaaaagaggtattttttgtctagtcaaacagg

SEQ ID NO: 138779 - DNA, 80 bp, synthetic construct
  source 1..80: mol_type = other DNA
tgacgagagggagatatccgttccagctgagtgtcaccggccgcccaggcctaaatttccaccagcactgcccatatggg

SEQ ID NO: 138780 - DNA, 80 bp, synthetic construct
  source 1..80: mol_type = other DNA
agtagactataaggttacagtcataccacctcctccaaccactcgcaagcctttgtcagagcctcattatgttactgtta

SEQ ID NO: 138781 - DNA, 80 bp, synthetic construct
  source 1..80: mol_type = other DNA
tggctatgccggctgacttttgcgcgattattcacgcccccgcgctagccagccccgggcaccacgtaatactgggtctt

SEQ ID NO: 138782 - DNA, 80 bp, synthetic construct
  source 1..80: mol_type = other DNA
aaggtgctgtccagtggatgaatcggttgattgcctttgcatccaggggaaaccacgttgctcccacccactacgtggct

SEQ ID NO: 138783 - DNA, 80 bp, synthetic construct
  source 1..80: mol_type = other DNA
acattagggacccttgccgggttcctctcgcctggagccaaacaaaacatccaacttattaatagcaatgggagttggca

SEQ ID NO: 138784 - DNA, 80 bp, synthetic construct
  source 1..80: mol_type = other DNA
tattgtgtacgagacggccgatgccatcctacactctccggggtgtgtcccttgcgtccgcgagggcaacgcctcgaggt

SEQ ID NO: 138785 - DNA, 80 bp, synthetic construct
  source 1..80: mol_type = other DNA
agccacccaacaacaggctgtcattgaacctatagtgactaccaactggcaaaagcttgaagccttttggcacaagcata

SEQ ID NO: 138786 - DNA, 80 bp, synthetic construct
  source 1..80: mol_type = other DNA
tttacccagatctatctgtccgggtgtgcgaaaagatggcgttgtatgacgttacacgcaagttacctcaggcagtcatg

SEQ ID NO: 138787 - DNA, 80 bp, synthetic construct
  source 1..80: mol_type = other DNA
cgtccagagggaaccacgtcgcccctacccactacgtgcaggagtcagacgcgtcgcgccgggtcatggacgcgctcggg

SEQ ID NO: 138788 - DNA, 80 bp, synthetic construct
  source 1..80: mol_type = other DNA
gatgggggggcagttggtggtcggacgggtaagtaacagagtctgaataagagtgggggggggggaaaagaacgggctgg

SEQ ID NO: 138789 - DNA, 80 bp, synthetic construct
  source 1..80: mol_type = other DNA
cggcgtgatggtgctttccagcgatccccccggccccgcggcctaccgcattagcgacagcagctttgttcaatgcggct

SEQ ID NO: 138790 - DNA, 80 bp, synthetic construct
  source 1..80: mol_type = other DNA
gtctttacgggtttgaccaatatagatgctcacttcctgtctcagactaagcaggcgggggacaactatccatacctggt

SEQ ID NO: 138791 - DNA, 80 bp, synthetic construct
  source 1..80: mol_type = other DNA
caaactcactccattgcgcagcgcagccagcctggatctgtcagattggttcgtagctgcgtacagtgggggggacattt

SEQ ID NO: 138792 - DNA, 80 bp, synthetic construct
  source 1..80: mol_type = other DNA
ctgggtgctggtaggcggagtcctcgcagctctggccgcatattgcctgacaacaggcagtgtggttatcgtgggtagga

SEQ ID NO: 138793 - DNA, 80 bp, synthetic construct
  source 1..80: mol_type = other DNA
tatggaattgacccgaacatcaggacgggggttaggactatcaccactggtggtgctatcacctactcaacctatggtaa

SEQ ID NO: 138794 - DNA, 80 bp, synthetic construct
  source 1..80: mol_type = other DNA
gatcacaccggtcaacgagggttgggggggtccggcacggacccaaaataataaacacacaatcacgtgcgataaaaaga

SEQ ID NO: 138795 - DNA, 80 bp, synthetic construct
  source 1..80: mol_type = other DNA
ggtggtgtgcggtaaatactgccagatggcacttcttaaagtgggctcttggacaggcacctacatctataatcacctca

SEQ ID NO: 138796 - DNA, 80 bp, synthetic construct
  source 1..80: mol_type = other DNA
gatcgctggacatgtcaagaacgggacgatgaggatcgttggtcctaagacctgcaggaacatctggagtggaaccttcc

SEQ ID NO: 138797 - DNA, 80 bp, synthetic construct
  source 1..80: mol_type = other DNA
cccctcgaccgactgcccggcgaacaccccgtggcactggctcagggccaggtcctggtacacggcgaggttggatcgcc

SEQ ID NO: 138798 - DNA, 80 bp, synthetic construct
  source 1..80: mol_type = other DNA
tgtggacgctgaaacacatgttagcggcgccatcacaggccgaactctgacttcgcttagcggcttgtttacccgcgggt

SEQ ID NO: 138799 - DNA, 80 bp, synthetic construct
  source 1..80: mol_type = other DNA
ggaacaatcgccacaaactctcctgagttattggctagagatccatatggacctgccgtggacatatggagtgccgggat

SEQ ID NO: 138800 - DNA, 80 bp, synthetic construct
  source 1..80: mol_type = other DNA
aggagatggcatgtgctacaccacgtgcccctgtggggcacagattacgggtcacgtgaagaatgggaccatgaagatca

SEQ ID NO: 138801 - DNA, 80 bp, synthetic construct
  source 1..80: mol_type = other DNA
gcttgcagctgctggtctcgtgggagtcttggcagggctagctttccaggagatggaaaattttttaggtccagttgcag

SEQ ID NO: 138802 - DNA, 80 bp, synthetic construct
  source 1..80: mol_type = other DNA
tggtagtgcagctcgtagcgctcagtcgatcactactcttttcagtgtaggtgccaaacagaacctacagctggtcaata

SEQ ID NO: 138803 - DNA, 80 bp, synthetic construct
  source 1..80: mol_type = other DNA
tctgggcacggccggactacaacccaccgctgttagagacctggaagaagccagattacgaccctcccacagtggcgggc

SEQ ID NO: 138804 - DNA, 80 bp, synthetic construct
  source 1..80: mol_type = other DNA
cagccacatgaccctgcatggctgcgactttttcggctttaacaatatgtgcgcagaggtctggggcgcttccaagatca

SEQ ID NO: 138805 - DNA, 80 bp, synthetic construct
  source 1..80: mol_type = other DNA
agcatgctcagggtaaactccagcagagcggcggccgggccggccaccccggcctgggtgtgcgtccgggccccgttctc

SEQ ID NO: 138806 - DNA, 80 bp, synthetic construct
  source 1..80: mol_type = other DNA
gggatgttcgattccgtagtgctctgtgagtgctacgatgctggagcagcctggtatgagctcacgccagcggagaccac

SEQ ID NO: 138807 - DNA, 80 bp, synthetic construct
  source 1..80: mol_type = other DNA
caagggtacaaggtgctggtgctgaatccatctgtcgcggcgacgctcgggttcggggcatacatgtcaagagcttatgg

SEQ ID NO: 138808 - DNA, 80 bp, synthetic construct
  source 1..80: mol_type = other DNA
ggcccagccctctcgcggccccctcgagagagaaaaaaaaaagcgaccccacctccccgcgcgtttgcggggcgaccatc

SEQ ID NO: 138809 - DNA, 80 bp, synthetic construct
  source 1..80: mol_type = other DNA
acgcgcggccttcttgggtgcatcatcaccagccttaccggccgggacaaaaacactgtggagggcgaggttcaaatcgt

SEQ ID NO: 138810 - DNA, 80 bp, synthetic construct
  source 1..80: mol_type = other DNA
taattgtatatttatgtccaatctcaggtccaagttcagtgacatcacaaattacgttcttttttatatagtcacgcatg

SEQ ID NO: 138811 - DNA, 80 bp, synthetic construct
  source 1..80: mol_type = other DNA
ctggatgaataccaccggatatgtcaaaacatgcggtggccccccctgtgacatctacgggggcgtcccgcaggccagca

SEQ ID NO: 138812 - DNA, 80 bp, synthetic construct
  source 1..80: mol_type = other DNA
aagagtcgaaaacaggcggcatataataaactcgggaggttacttcgcccggtaaccggttttgtgggacttagggctgc

SEQ ID NO: 138813 - DNA, 80 bp, synthetic construct
  source 1..80: mol_type = other DNA
gcatttgcctggatgcttgccttgtgtgagggtcggtaatcggtccacctgctggcattctgtgtcccccaccctagcca

SEQ ID NO: 138814 - DNA, 80 bp, synthetic construct
  source 1..80: mol_type = other DNA
cgaggccatcaaagggggaaggcacctcatcttttgtcactcaaaaaagaagtgcgacgagctggccgccaaactgtcca

SEQ ID NO: 138815 - DNA, 80 bp, synthetic construct
  source 1..80: mol_type = other DNA
tcaaagaagaatcctatgggattctcttatgataccaaatgctttgactcaacggtcaccgagcgcgacatacgcaacga

SEQ ID NO: 138816 - DNA, 80 bp, synthetic construct
  source 1..80: mol_type = other DNA
tacgagaccaacgtcaccaatgttgaagacatgaggccgtactgctggcattaccccccaaagccatgcggtatcgtccc

SEQ ID NO: 138817 - DNA, 80 bp, synthetic construct
  source 1..80: mol_type = other DNA
cagtctggatcccacctttaccattgagactaccacggtgccccaggacgcagtgtccagaagccaacgtaggggtcgca

SEQ ID NO: 138818 - DNA, 80 bp, synthetic construct
  source 1..80: mol_type = other DNA
ttaagactggatcgccgacaactgtaatatttggacgataatacgttgtaactgtaatactgtgttccgatatgacgttc

SEQ ID NO: 138819 - DNA, 80 bp, synthetic construct
  source 1..80: mol_type = other DNA
cggagcgcacgcgggaaaaaaaatcaaacaggcgtcgatgcgacgccacctcgatcgtgctaaggagggacccggtcggc

SEQ ID NO: 138820 - DNA, 80 bp, synthetic construct
  source 1..80: mol_type = other DNA
attaagtgggagtacgtcgttctcctgttccttctgcttgcagacgcgcgcgtctgctcctgcttgtggatgatgttact

SEQ ID NO: 138821 - DNA, 80 bp, synthetic construct
  source 1..80: mol_type = other DNA
gaaagtgggtccaaacggatatagaactatggtccctgccaggttcactcaagtccttaaaggagtaatggccgtgcggc

SEQ ID NO: 138822 - DNA, 80 bp, synthetic construct
  source 1..80: mol_type = other DNA
ggcataggcacggtcttggatcaagcggagaccgctggtgcgcgccttgtcgtcctagcgaccgctacaccgccagggtc

SEQ ID NO: 138823 - DNA, 80 bp, synthetic construct
  source 1..80: mol_type = other DNA
gaacgtgtgtggtccagtctattgcttcacaccaagcccggtcgttgttggcacgaccgacaggaagggactacccactt

SEQ ID NO: 138824 - DNA, 80 bp, synthetic construct
  source 1..80: mol_type = other DNA
ttcagtctggatcctaccttcacaataaccacccaaacggttcctcaggactccgtctcgcgcagccagcgcagagggag

SEQ ID NO: 138825 - DNA, 80 bp, synthetic construct
  source 1..80: mol_type = other DNA
gtcgctcaagcatggttagtagagatgagagtctgaaaaacagaaagcatgcactaaaccagagtggccagtctgactga

SEQ ID NO: 138826 - DNA, 80 bp, synthetic construct
  source 1..80: mol_type = other DNA
tccatgccgccccttgaaggcgaaccgggagacccggaccttagttcgggttcctggtcaaccgtcagcgaggagggcga

SEQ ID NO: 138827 - DNA, 80 bp, synthetic construct
  source 1..80: mol_type = other DNA
gaggtggacggagtgagggtacatcgttacgctccagcctgtaagcccctcatacgggatgaggtctccttcaccgtggg

SEQ ID NO: 138828 - DNA, 80 bp, synthetic construct
  source 1..80: mol_type = other DNA
tgacgcccccacattcagccagatctaaatttggctatggggcgaaagacgtccgctgccatgccagaaaggccgtaaac

SEQ ID NO: 138829 - DNA, 80 bp, synthetic construct
  source 1..80: mol_type = other DNA
gctgtcgccccgcctgggtttctgacggccgttccgagcccccgtggtgtccgaacacgaaccgtgttccgtcgctcccc

SEQ ID NO: 138830 - DNA, 80 bp, synthetic construct
  source 1..80: mol_type = other DNA
cgcggatgacactgcaggctgggacacacgaataacgaaagctgaccttgaaaacgaagcgaaagtcctggaactgatgc

SEQ ID NO: 138831 - DNA, 80 bp, synthetic construct
  source 1..80: mol_type = other DNA
tcatcccagccctttttgagccagagagagaaaagagtgcagcaatagacggggagtacagactgcggggagaagcaagg

SEQ ID NO: 138832 - DNA, 80 bp, synthetic construct
  source 1..80: mol_type = other DNA
gataacaggggcccactggggtgtcttagctggtctggcgtactactccatggcgtggaattgggcaaaggtcatagtca

SEQ ID NO: 138833 - DNA, 80 bp, synthetic construct
  source 1..80: mol_type = other DNA
caggtgcaccgtgactggtttgaggatttggctttgccctggaaacataaggacaaccaagattggaacagtgtggagaa

SEQ ID NO: 138834 - DNA, 80 bp, synthetic construct
  source 1..80: mol_type = other DNA
tgcggcgcatcggacctgtacctcgttacaaggcatgcagacgtcgtgcccgtacgtaggagaggagacactcggggcgc

SEQ ID NO: 138835 - DNA, 80 bp, synthetic construct
  source 1..80: mol_type = other DNA
ggtgaccttcccagaccggaatatgacttggagcttataacatcctgctcctcaaacgtatcggtagcgctggaccctca

SEQ ID NO: 138836 - DNA, 80 bp, synthetic construct
  source 1..80: mol_type = other DNA
gtcacccagacagtcgactttacgagcaagggatgatgctcgctgagcagttcaagcagaaggccctcggcctcctgcag

SEQ ID NO: 138837 - DNA, 80 bp, synthetic construct
  source 1..80: mol_type = other DNA
gaaccctaatataggaggtggtgtggcagcgcacaatgacatcgtgacgggagtgggtcgcccccgacgcaccatcctct

SEQ ID NO: 138838 - DNA, 80 bp, synthetic construct
  source 1..80: mol_type = other DNA
agccaacgctgattggacgagagaagacgatgcaaatgacgtcacgacgcacggcgttaacggtcgccgcggaggcgtgg

SEQ ID NO: 138839 - DNA, 80 bp, synthetic construct
  source 1..80: mol_type = other DNA
gccccctgctctgtcccatgggacatgccgtgggcattttcagggccgcggtgtgcacccgtggggtcgcaaaggcggtc

SEQ ID NO: 138840 - DNA, 80 bp, synthetic construct
  source 1..80: mol_type = other DNA
gtttgcgctagggcaaaagcccccccaccatcatgggacgtcatgtggaaatgtcttatacggcttaagccaatgctcac

SEQ ID NO: 138841 - DNA, 80 bp, synthetic construct
  source 1..80: mol_type = other DNA
agtttaaggtagtagctatgtgttctgaaacaaaaaaataaagaatccaccgacgaagcgtgagctcgttgatgtctccc

SEQ ID NO: 138842 - DNA, 80 bp, synthetic construct
  source 1..80: mol_type = other DNA
tggtcccagtctgattatcagaccgacgatacgagtgggaccgtggtcccagactaataatcagaccgacgatacgagtg

SEQ ID NO: 138843 - DNA, 80 bp, synthetic construct
  source 1..80: mol_type = other DNA
gcgccgtagtcactttcaagatcatgagtggcgaggtgccgtcaacagaagacctagtcaacttgctcccggccatttta

SEQ ID NO: 138844 - DNA, 80 bp, synthetic construct
  source 1..80: mol_type = other DNA
gtactccgggttgggagatccacccggccaggctcgttgaggacatcaaccgtgtttttttatgtattgcacagtcgtcg

SEQ ID NO: 138845 - DNA, 80 bp, synthetic construct
  source 1..80: mol_type = other DNA
attgcgtggatgctgataagggcaatgaaagaaggtaaagtggcgatgtacgctcttcccatcttgtgtgctttgactcc

SEQ ID NO: 138846 - DNA, 80 bp, synthetic construct
  source 1..80: mol_type = other DNA
cccgagactaaggaatgtcccaccgtgagcagagcgtggaacagcatggaagtggaggattttggattcggcctcatgac

SEQ ID NO: 138847 - DNA, 80 bp, synthetic construct
  source 1..80: mol_type = other DNA
gacaaaaattttcccaacaatggcatagaaagtttggtagataaaatgtctcgctggaaaacatatgcacaagagcggcg

SEQ ID NO: 138848 - DNA, 80 bp, synthetic construct
  source 1..80: mol_type = other DNA
ttggtcgtcacaccctccgtgttcccacagtaggaagttagttcgctttttgtagtggggattgggaagggcaaaagtaa

SEQ ID NO: 138849 - DNA, 80 bp, synthetic construct
  source 1..80: mol_type = other DNA
cacaccgggcgggagatcgtggacctaatgtgtcatgccacatttactatgaggctgctatcaccagtcagagtgccaaa

SEQ ID NO: 138850 - DNA, 80 bp, synthetic construct
  source 1..80: mol_type = other DNA
ttccttgttagaaatgaggcgcgcggtggtgtcctctcctcctccctcgtacgaaagcgtgatggcgcaggcgaccctgg

SEQ ID NO: 138851 - DNA, 80 bp, synthetic construct
  source 1..80: mol_type = other DNA
aacctcagaatggtagggccactattgacggggagctactccgcaacactctcgactcccaagtttctgtgtgcaatttc

SEQ ID NO: 138852 - DNA, 80 bp, synthetic construct
  source 1..80: mol_type = other DNA
tggatgaactcgactggatacaccaaaacatgcggtgggcccccgtgtaacatctacccgggctctacgccccaagaggg

SEQ ID NO: 138853 - DNA, 80 bp, synthetic construct
  source 1..80: mol_type = other DNA
ggtttggacgcgggaggccatggtggtgataaagttaatggccgccgtccgccagggccacaggggcgacgtctcttggt

SEQ ID NO: 138854 - DNA, 80 bp, synthetic construct
  source 1..80: mol_type = other DNA
tcaagtcgttgacttcagcctggatcctacattcactatagagaccaccactgtgcctcaagatgccgtttcacggagtc

SEQ ID NO: 138855 - DNA, 80 bp, synthetic construct
  source 1..80: mol_type = other DNA
agcgagacgggagtggtcttcaccaggggcaccgagagcgagcgcacgatggcgatctcctcggagtgcgtctgggcgag

SEQ ID NO: 138856 - DNA, 80 bp, synthetic construct
  source 1..80: mol_type = other DNA
agaaaggtgttgttgatgcacacggcctccttgaagccctcggtaacgaccagatacaggagggcgcggtccgggtccag

SEQ ID NO: 138857 - DNA, 80 bp, synthetic construct
  source 1..80: mol_type = other DNA
ggcccgagcagtcagagctaagctaattgctcaggggggtaaagccaagatttgtggcatgtacctcttcaattgggcag

SEQ ID NO: 138858 - DNA, 80 bp, synthetic construct
  source 1..80: mol_type = other DNA
gcaaagattttgcttgacaacatacatctaccaaatgggttggtggcacaactgtattcacccgagcgtgacaaaacatt

SEQ ID NO: 138859 - DNA, 80 bp, synthetic construct
  source 1..80: mol_type = other DNA
taccggcactatctactggtttattgcacctccaccaaaacatcgtggacgtgcaatacctctatggactttctccggct

SEQ ID NO: 138860 - DNA, 80 bp, synthetic construct
  source 1..80: mol_type = other DNA
cggctttgcccatctgggcaaggcctgattacaatccgcctctcgttgagacgtggaaggctcctggttacgagcctccc

SEQ ID NO: 138861 - DNA, 80 bp, synthetic construct
  source 1..80: mol_type = other DNA
agtacaccggaattgccgggaagactgggtcctttcttggataaacccactctatgcccggccatttgggcgtgcccccg

SEQ ID NO: 138862 - DNA, 80 bp, synthetic construct
  source 1..80: mol_type = other DNA
accacgaggagccttgtcagtctcttttccccaggggcacagcagaacctgcagctcatcaattccaacggtagctggca

SEQ ID NO: 138863 - DNA, 80 bp, synthetic construct
  source 1..80: mol_type = other DNA
gggtgctgttgctgtttgccggcgtcgatgcgactaccaccgtcaccgggtggagtgttgctaggggagcatctatgatc

SEQ ID NO: 138864 - DNA, 80 bp, synthetic construct
  source 1..80: mol_type = other DNA
ggctgttattcatggaaacgaaagaaacttctgtgcgttactgcgactgttaacacagtgtattcgcgggtattgggagc

SEQ ID NO: 138865 - DNA, 80 bp, synthetic construct
  source 1..80: mol_type = other DNA
ccgaccgcagcatggtaaagagctaccttgcagcacgtacgtgcagagcaccgccgcaactaccgaagagatagaggtac

SEQ ID NO: 138866 - DNA, 80 bp, synthetic construct
  source 1..80: mol_type = other DNA
atccagtttttgccgatcccacttatcaacctgaacctcaggttggagaatctcagtggaatgaagctgaagcaactgca

SEQ ID NO: 138867 - DNA, 80 bp, synthetic construct
  source 1..80: mol_type = other DNA
gtcgcacccgaacgccagcccgcccgtcgtccagacgcccacgggccacgtcgaggccgacggggagaggtacacgtacc

SEQ ID NO: 138868 - DNA, 80 bp, synthetic construct
  source 1..80: mol_type = other DNA
cacctggcctgtggtaagtacgtccaggcagccttactccaccttggcaggttgactggaacgtacatttatgaccatct

SEQ ID NO: 138869 - DNA, 80 bp, synthetic construct
  source 1..80: mol_type = other DNA
tgcctcggcggtggcggatgccgcggtgcaggcggccgctgcggccgcgtccaagacctctacggaggtgcaaacggacc

SEQ ID NO: 138870 - DNA, 80 bp, synthetic construct
  source 1..80: mol_type = other DNA
atactgcggcatgtggagatatcatctgtggactgccagtctccgcccgtaggggcagagagctgttcttggggccggcc

SEQ ID NO: 138871 - DNA, 80 bp, synthetic construct
  source 1..80: mol_type = other DNA
cccgcaggcaggactcgcagacgagcggccgccgccgccgccgcggccatctctagcatgaccagacccaggcgcggaaa

SEQ ID NO: 138872 - DNA, 80 bp, synthetic construct
  source 1..80: mol_type = other DNA
acattaaaggcggcaggcacttgattttctgccactcaaaaaagaagtgcgacgaactatccaagcagcttcgagctctc

SEQ ID NO: 138873 - DNA, 80 bp, synthetic construct
  source 1..80: mol_type = other DNA
ggcacatcaaccgaacgtccctcaattgcaatgacagcttgcaaacggggttcattgctggcctattttatgcccacaag

SEQ ID NO: 138874 - DNA, 80 bp, synthetic construct
  source 1..80: mol_type = other DNA
cctattcacctcgcaaacatcagaccgtgcaggaatgcaattgttcaatatacagtggccaaatcaccggccaccggatg

SEQ ID NO: 138875 - DNA, 80 bp, synthetic construct
  source 1..80: mol_type = other DNA
atgctaacagatccgccccacatcacggcggagactgcggcgcggcgcttggcacggggatcacctccatctgaggcgag

SEQ ID NO: 138876 - DNA, 80 bp, synthetic construct
  source 1..80: mol_type = other DNA
accagtgcaagcgcagctcaacggaggggcagagtaggcagaaaccccaatcaagttggagatgaataccactatggtgg

SEQ ID NO: 138877 - DNA, 80 bp, synthetic construct
  source 1..80: mol_type = other DNA
gcccgcaggttcaactcctcaggctgcgggccccgcatgagcgcgtgcagaccccttacagatttcgatcaggggtgcgg

SEQ ID NO: 138878 - DNA, 80 bp, synthetic construct
  source 1..80: mol_type = other DNA
gtcgctaccattaccagttggtctggtgtcaaaaataataataaccgggcaggccatgtctgcccgtatttcgcgtaagg

SEQ ID NO: 138879 - DNA, 80 bp, synthetic construct
  source 1..80: mol_type = other DNA
cggctccatccttgaaggcaacatgtacaacaggcggcgtccatcccgacgctgagttgcttgaggcgaacctgctatgg

SEQ ID NO: 138880 - DNA, 80 bp, synthetic construct
  source 1..80: mol_type = other DNA
gcttatggtgctgttgctgtttgccggtgtcgatgcgtcaacctacaccactgggggaaccattgctcgggccacgtcca

SEQ ID NO: 138881 - DNA, 80 bp, synthetic construct
  source 1..80: mol_type = other DNA
gcatgtcagctgacttggaagtcacaacgagcgcctgggtactggtcggtggtgtcctagcagcccttgcagcctactgt

SEQ ID NO: 138882 - DNA, 80 bp, synthetic construct
  source 1..80: mol_type = other DNA
gcgtcagaggcgacccgctcgttacggccccgccaatgccatcatgccagaatatgcgctgcatccgtctatcctgccca

SEQ ID NO: 138883 - DNA, 80 bp, synthetic construct
  source 1..80: mol_type = other DNA
ttgcggtgatattgtagcgcaagtaacagcgactatgtttgcgctagttttagcggtggtaattcttcctctttggacca

SEQ ID NO: 138884 - DNA, 80 bp, synthetic construct
  source 1..80: mol_type = other DNA
tgacgtcatcctcccaattgggacacgcagtgttgagacagacaagggacccctggacaaagaggccatagaagaaaggg

SEQ ID NO: 138885 - DNA, 80 bp, synthetic construct
  source 1..80: mol_type = other DNA
tgtacaggctgggagccgttcaaaacgaggtcaccctcacacaccccataaccaaattcatcatggcaagcatgtcggct

SEQ ID NO: 138886 - DNA, 80 bp, synthetic construct
  source 1..80: mol_type = other DNA
ccaccggcatcgtcggcctggcctgcgagcactaccacaccggtggctactacgtggtggagcagcagtggccggtggcc

SEQ ID NO: 138887 - DNA, 80 bp, synthetic construct
  source 1..80: mol_type = other DNA
cgtcggccaaagtcacacagctgctcagctccctcacagtaacatcccttttgaagaggctccatacatggatcggtgag

SEQ ID NO: 138888 - DNA, 80 bp, synthetic construct
  source 1..80: mol_type = other DNA
cgaggacgaacgcgaggagagcgtgggcgagcgggagccggagggcgcgcgggagaccgccggccggcacgtggtgtacc

SEQ ID NO: 138889 - DNA, 80 bp, synthetic construct
  source 1..80: mol_type = other DNA
aacgtgctgacccagcttatgtgtgcagacaaggagtggtggataggggctggggcaatggctgcggactatttggcaaa

SEQ ID NO: 138890 - DNA, 80 bp, synthetic construct
  source 1..80: mol_type = other DNA
cgggcttcctcgccggcgacaagctggcctgcgccatcgtcaacacggccggccgcgagacaggaggcgtgcactggctc

SEQ ID NO: 138891 - DNA, 80 bp, synthetic construct
  source 1..80: mol_type = other DNA
ctgcaacttcattttgctacattaccgaacaataaaaccctgtgttcccaccgtttcgttttttccagatgaaacgggcc

SEQ ID NO: 138892 - DNA, 80 bp, synthetic construct
  source 1..80: mol_type = other DNA
gagctgcacaacggctggaaggctggggggaaatagtaggtaggcagagaagcaaagacaaagattttttttttaatgag

SEQ ID NO: 138893 - DNA, 80 bp, synthetic construct
  source 1..80: mol_type = other DNA
cggggccctagtgaccccgtgcgctgctgaggagaccagtttgcctattaacgcactcagcaacacgctgctgcgccatc

SEQ ID NO: 138894 - DNA, 80 bp, synthetic construct
  source 1..80: mol_type = other DNA
ttcttcactgaggtcgatggcgtgaggatacaccgttacgcgccaccttgtaagcccttgctcagggacgaagtgacatt

SEQ ID NO: 138895 - DNA, 80 bp, synthetic construct
  source 1..80: mol_type = other DNA
cccccatcatgggacacgatgtggaaatgcctgataaggctgaagcccaccctccacgggcccaccccactattgtacag

SEQ ID NO: 138896 - DNA, 80 bp, synthetic construct
  source 1..80: mol_type = other DNA
actgcaaatttactttggttcttacaaaatgtgggagtcaagtactagctactgtagctgctttggctgtatctggagat

SEQ ID NO: 138897 - DNA, 80 bp, synthetic construct
  source 1..80: mol_type = other DNA
tcatgtggatttgatggtggtggctgccactgcttgctcagccctttacatcggggacttgtgtggcggcttgttcctgg

SEQ ID NO: 138898 - DNA, 80 bp, synthetic construct
  source 1..80: mol_type = other DNA
agcttacttcaacacaccaggccttcctgtgtgccaagaccacctggagttctgggagagcgtctttacagggctaaccc

SEQ ID NO: 138899 - DNA, 80 bp, synthetic construct
  source 1..80: mol_type = other DNA
tccatacacgccacacatgagtggatgacaacagaagacatgctgacagtctggaacagggtgtggattcaagaaaaccc

SEQ ID NO: 138900 - DNA, 80 bp, synthetic construct
  source 1..80: mol_type = other DNA
accagtacttcatagccaggttggaggccatgttttatgagtgggtgccctcacttcgggtgaggggtagtagggatgca

SEQ ID NO: 138901 - DNA, 80 bp, synthetic construct
  source 1..80: mol_type = other DNA
ggaacttgtctccgaaaggattgactcgtcggggggtgtccgaccgctggagtcagcagcgtctgcccccgcggaagggc

SEQ ID NO: 138902 - DNA, 80 bp, synthetic construct
  source 1..80: mol_type = other DNA
gaattagggcgtcgccagctcacggacaccatccgcaaggacctgcggttgtcgctggccaagtttagcattgcgtgcac

SEQ ID NO: 138903 - DNA, 80 bp, synthetic construct
  source 1..80: mol_type = other DNA
gggtggggtaagatccaacacttttccgtgaaggattctgtggaggatagaccctactgctggcactaccctcctcggcc

SEQ ID NO: 138904 - DNA, 80 bp, synthetic construct
  source 1..80: mol_type = other DNA
ttgaccctaatatcaggactggggtcagaaccatcaccacaggagcgcccatcacatattccacctatggcaaattcctg

SEQ ID NO: 138905 - DNA, 80 bp, synthetic construct
  source 1..80: mol_type = other DNA
ccgctcggcggcccggtcgggcgcagggcagcctgcaggagctcggtccccagacgcgggagaaacaggcaccggcgcgc

SEQ ID NO: 138906 - DNA, 80 bp, synthetic construct
  source 1..80: mol_type = other DNA
cgtttagttggcttaatgcaagatgcagtcttacaccttctcgttggcgtcgctgtgtatatacaaaaaccaagaacaca

SEQ ID NO: 138907 - DNA, 80 bp, synthetic construct
  source 1..80: mol_type = other DNA
aatgcttgtcagtggtgatgactgtgtggtgagacccatggatgacagatttggcaaagctctctacttcctgaatgaca

SEQ ID NO: 138908 - DNA, 80 bp, synthetic construct
  source 1..80: mol_type = other DNA
agcgcgaactgacgagctttgtggtgctggttccccagggaacccccgacgttcggttgcgcctgacgaggccgcagctc

SEQ ID NO: 138909 - DNA, 80 bp, synthetic construct
  source 1..80: mol_type = other DNA
cctccacgctcccactgggagcggcaagagcacgaaggtgccggccgcttatgcggcccaggggtacaaagtgcttgtgc

SEQ ID NO: 138910 - DNA, 80 bp, synthetic construct
  source 1..80: mol_type = other DNA
ttacatcacgggggtgaccactgataagatcaagtgtccatgccaggtcccctcgcccgagttcttcacagaggtggatg

SEQ ID NO: 138911 - DNA, 80 bp, synthetic construct
  source 1..80: mol_type = other DNA
gccctacggtccacagacccgccttctcgggggggcccttggagcgaccggcagccgaggcgtccaggagaggagagggt

SEQ ID NO: 138912 - DNA, 80 bp, synthetic construct
  source 1..80: mol_type = other DNA
actgcggcatgtggtgatgtcatacatgggcttcctgtctccgcacgactcggccgagaggtcttactaggccccgccga

SEQ ID NO: 138913 - DNA, 80 bp, synthetic construct
  source 1..80: mol_type = other DNA
aagtatgggtacggggccaaagaggtgcgctccttggctagtaaggccgtcaaccatatccgctccgtatgggaggactt

SEQ ID NO: 138914 - DNA, 80 bp, synthetic construct
  source 1..80: mol_type = other DNA
tggggtagaccagggacccccccctgaagcttctgaacccgacctctccatcgcggatggccagtcagacggtgagtcat

SEQ ID NO: 138915 - DNA, 80 bp, synthetic construct
  source 1..80: mol_type = other DNA
gtgacccggattgagtccgactctaaggtggtcgtcctcgactccctcgattccatgattgaggtagaggacgatcgtga

SEQ ID NO: 138916 - DNA, 80 bp, synthetic construct
  source 1..80: mol_type = other DNA
cctagctgggggaaagtacatccaagcagcactcttgagggttggctcgtggacgggtacctacatttatgaccatttgg

SEQ ID NO: 138917 - DNA, 80 bp, synthetic construct
  source 1..80: mol_type = other DNA
tgacgcgtgaggccgacgtcctccccgcccgccgtaggggagactcaacggcgagtttactcagtaccagaccactgtcc

SEQ ID NO: 138918 - DNA, 80 bp, synthetic construct
  source 1..80: mol_type = other DNA
caagaaaaaccaagtttgcagtcaggacatggctttttgaaaatggagaggagagagtcaccagaatggcagtaagtggg

SEQ ID NO: 138919 - DNA, 80 bp, synthetic construct
  source 1..80: mol_type = other DNA
gttcctcgggggggcctattatgtgcccttcggggcacgtggtagggatcttccgagcggctgtgtgcgctaggtgtgtt

SEQ ID NO: 138920 - DNA, 80 bp, synthetic construct
  source 1..80: mol_type = other DNA
caaagagcgcctcactgcgggcgaaaaaggtgacttttgacagagtgcagctacttgactcacactatgatgcagttctg

SEQ ID NO: 138921 - DNA, 80 bp, synthetic construct
  source 1..80: mol_type = other DNA
agatgaggaaagagacattcctgaaagatcatggaactcaggctatgactggatcactgatttcccaggtaaaacagtct

SEQ ID NO: 138922 - DNA, 80 bp, synthetic construct
  source 1..80: mol_type = other DNA
gtcaccggggttacacaggataacatcaagtgcccctgccaggtacccgcacctgagttctttactgaggtggatggcgt

SEQ ID NO: 138923 - DNA, 80 bp, synthetic construct
  source 1..80: mol_type = other DNA
gggcgcgggcgcggcggccgcgcccgcgcccgtctggcctgtggccttggcgtacgcgctatataagcccatgcggcgtt

SEQ ID NO: 138924 - DNA, 80 bp, synthetic construct
  source 1..80: mol_type = other DNA
caccagcctagacgcggccatcgctccgtttcgccacctggacccggcgacgcgcgagggggtgcgacgcgaggccgccg

SEQ ID NO: 138925 - DNA, 80 bp, synthetic construct
  source 1..80: mol_type = other DNA
acagtctggcttaagtcaaaacttgttccatcaatcccaggcgtccctttcctctcgtgtcaacgagggtatcggggagt

SEQ ID NO: 138926 - DNA, 80 bp, synthetic construct
  source 1..80: mol_type = other DNA
aatggaagagtgtgctgcgcaccttccttaccttgaacatgggatgcagcttgctgagcaattcaagcagaaggccctag

SEQ ID NO: 138927 - DNA, 80 bp, synthetic construct
  source 1..80: mol_type = other DNA
actaccaataagccctttgagcaatacgctcatccgacaccacaatttggtgtattccaccacatcacgcagcgcagctc

SEQ ID NO: 138928 - DNA, 80 bp, synthetic construct
  source 1..80: mol_type = other DNA
tctcccgcaccgtgtgctgaaactgggccagcagcggcggcgggaccaccgcgccccgatcgcgggtcgtcaggtactcg

SEQ ID NO: 138929 - DNA, 80 bp, synthetic construct
  source 1..80: mol_type = other DNA
gaaagaagaaaatctcgtcaattcgctagttactgcaggacatgggcagattgacaacttttcattagggattcttggaa

SEQ ID NO: 138930 - DNA, 80 bp, synthetic construct
  source 1..80: mol_type = other DNA
gatactggacatgcagatgcaactgtcaattgggacgcgggccggatatctaccgtcttcaaacagcctgtacaactaca

SEQ ID NO: 138931 - DNA, 80 bp, synthetic construct
  source 1..80: mol_type = other DNA
gggaacaggtgtgcggtgacgtgtggatgaggaacaggagtcgttgttgcgcgttgagctgttgtgagccgttggtgggc

SEQ ID NO: 138932 - DNA, 80 bp, synthetic construct
  source 1..80: mol_type = other DNA
ggcgggcgctcctcgccgccctagaggctgtcccgctggtgtgacgttttcctcgtccgcgccccccgaccctcccatgg

SEQ ID NO: 138933 - DNA, 80 bp, synthetic construct
  source 1..80: mol_type = other DNA
ggacgccttcgccccacacagccctcccgaccgacacccccatatcgcttcccgacctccggtcccgatggccgtcccgc

SEQ ID NO: 138934 - DNA, 80 bp, synthetic construct
  source 1..80: mol_type = other DNA
ccgagaagaaggagaatcttaacattggagaattcttactggatttgaggcctgcgacttcttggtcactgtacgcagtg

SEQ ID NO: 138935 - DNA, 80 bp, synthetic construct
  source 1..80: mol_type = other DNA
gatgatttaaaaagaccatgtgaacctggatataagttaaactgtaagtgtgacaatcaaaacctaaccctaatcaatgt

SEQ ID NO: 138936 - DNA, 80 bp, synthetic construct
  source 1..80: mol_type = other DNA
atccatgaccctgtatgtcacggagaaggcggacgggaccctcccagcctccaccctggtccgccttctggtccacgcat

SEQ ID NO: 138937 - DNA, 80 bp, synthetic construct
  source 1..80: mol_type = other DNA
ccctgtgactcaacctggctcagagaaatctgggactgggtgtgcaccattctaactgacttcaagaactggctcaaggc

SEQ ID NO: 138938 - DNA, 80 bp, synthetic construct
  source 1..80: mol_type = other DNA
aagtgcccttctgttcacaccatttccatgagctaatcatgaaggatggtcgtgtacttgttgttccatgtagaaaccaa

SEQ ID NO: 138939 - DNA, 80 bp, synthetic construct
  source 1..80: mol_type = other DNA
cggaagataacgttgtccacgtacgtgctaaagggggcgccttcaaatgcctccccgaagagctcttggaggattcggaa

SEQ ID NO: 138940 - DNA, 80 bp, synthetic construct
  source 1..80: mol_type = other DNA
ctcactacagacaatctgaagtgcccgtgccaggtcccgtccccggagtttttcaccgaggttgatggcgtgcggttgca

SEQ ID NO: 138941 - DNA, 80 bp, synthetic construct
  source 1..80: mol_type = other DNA
tgatgatattcttgagcaggcggctgaccgattaggcgagtttgcttatggcaagcgtagtagaataacttccaaggatg

SEQ ID NO: 138942 - DNA, 80 bp, synthetic construct
  source 1..80: mol_type = other DNA
tgacagctgttggcctcatgtttgccattgttggagggctcgctgagctggatattgattccatggcggttcctatgact

SEQ ID NO: 138943 - DNA, 80 bp, synthetic construct
  source 1..80: mol_type = other DNA
agacagctgcttgtggggacattttacacggacttcccgtgtccgcccgacttggtcgggaggtcctccttggcccagct

SEQ ID NO: 138944 - DNA, 80 bp, synthetic construct
  source 1..80: mol_type = other DNA
gaggaggaggaagctagttcggcttgatgagtcagttgccgcccaggctctggctcagctagccgagaaatgcttcccaa

SEQ ID NO: 138945 - DNA, 80 bp, synthetic construct
  source 1..80: mol_type = other DNA
gcactcaaggcacgttgggaaataatgcaacttggggttataggcagggagaatctgcagacactaatgtactcaatgca

SEQ ID NO: 138946 - DNA, 80 bp, synthetic construct
  source 1..80: mol_type = other DNA
ctccgggagtcaagtctttggcaccgtgcaattgcggcgcgtcagacctgttcctggttacaaggaatgcagatgttatc

SEQ ID NO: 138947 - DNA, 80 bp, synthetic construct
  source 1..80: mol_type = other DNA
ttagagaagattattcattagagtgtgatccagccgttattggaacagctgctaagggaagggaggctgtacacagtgat

SEQ ID NO: 138948 - DNA, 80 bp, synthetic construct
  source 1..80: mol_type = other DNA
ttgacaccggttggaagattggtcacggtcaatccctttattagcacagggggagcgaacaacaaggtcatgatcgaagt

SEQ ID NO: 138949 - DNA, 80 bp, synthetic construct
  source 1..80: mol_type = other DNA
taccaaatctgtattatcaaggtgacacttgctcataatttcctctcaaaacagcgggtacatcgagaaaccctatgttt

SEQ ID NO: 138950 - DNA, 80 bp, synthetic construct
  source 1..80: mol_type = other DNA
aacactaccacctacaaggaatatcagaatgttacccttcctttccagcataataactcaggctttgtgggatacatggg

SEQ ID NO: 138951 - DNA, 80 bp, synthetic construct
  source 1..80: mol_type = other DNA
cgcatgaggcgcgcgccgtcggccgcgtatcgcgtgtttggcgggacgagctcgtcgtaactgaacaggagcacgcgggc

SEQ ID NO: 138952 - DNA, 80 bp, synthetic construct
  source 1..80: mol_type = other DNA
atcgcagggctcatgtttgctgcttttgtgatctctggaaaatcgaccgacatgtggattgagaggacagcggacatctc

SEQ ID NO: 138953 - DNA, 80 bp, synthetic construct
  source 1..80: mol_type = other DNA
tttcagggaaaggtgatgatgaccgtcaatgctactgatgttgccaacattatcactattccaacagcgtcagggaagaa

SEQ ID NO: 138954 - DNA, 80 bp, synthetic construct
  source 1..80: mol_type = other DNA
atcgcctgtctcctcgtggccgttctgtcgggcggatttggggcgctcctgatgtggctgctccgctaaaagaccgcatc

SEQ ID NO: 138955 - DNA, 80 bp, synthetic construct
  source 1..80: mol_type = other DNA
agagagaatggtgacattcaaagttcctcatgctaagagacaggatgtgacagtgctaggatctcaggagggagctatgc

SEQ ID NO: 138956 - DNA, 80 bp, synthetic construct
  source 1..80: mol_type = other DNA
gccgccgcggacctgctgtttgacaaccagagcctgcgccccctgctggcggcggcggccagcgcaccggacgccgccga

SEQ ID NO: 138957 - DNA, 80 bp, synthetic construct
  source 1..80: mol_type = other DNA
gcccaagacctgaccctaccttggcagagtggaagtggcggcgtgtggagagagatgcatcatctcgtggaatttgagcc

SEQ ID NO: 138958 - DNA, 80 bp, synthetic construct
  source 1..80: mol_type = other DNA
gaaaatgaccagtacatatacatgggagaacctctggaaaatgatgaagactgtgcacactggaaagaagcaaaaatgct

SEQ ID NO: 138959 - DNA, 80 bp, synthetic construct
  source 1..80: mol_type = other DNA
tacccaccgctgctatgggggctgcttatggcttccaatattcacctaagcagcgagttgagtacctcctcaaagtgtgg

SEQ ID NO: 138960 - DNA, 80 bp, synthetic construct
  source 1..80: mol_type = other DNA
gccatgtctttgaccttcctgaggacgtttgctccactctacactgcatggaagacagttatgactgtgttgttcatagc

SEQ ID NO: 138961 - DNA, 80 bp, synthetic construct
  source 1..80: mol_type = other DNA
gcaactgggcggctttccgcggctgggccttcacgcgccttaaaactaaggaaaccccatcactgggctcgggctacgac

SEQ ID NO: 138962 - DNA, 80 bp, synthetic construct
  source 1..80: mol_type = other DNA
ctcttgctaatgagaacatcatgggccttgtgtgaagctttaactctagctacaggaccaataacaacactctgggaagg

SEQ ID NO: 138963 - DNA, 80 bp, synthetic construct
  source 1..80: mol_type = other DNA
cggcgcgcgggagggctgaccgtccccggcgccccccgctatcacctgacccgccaggtaaccctgacggatctctgcca

SEQ ID NO: 138964 - DNA, 80 bp, synthetic construct
  source 1..80: mol_type = other DNA
cttaaaaacagcattactaatagtatcaggcatctttccatactccatacccgccacactgttggtctggcatacttggc

SEQ ID NO: 138965 - DNA, 80 bp, synthetic construct
  source 1..80: mol_type = other DNA
gaagatagtggaaactatgaaacacataaaatacttttattcaatctaacaataattgaaccaccgactactaaagcacc

SEQ ID NO: 138966 - DNA, 80 bp, synthetic construct
  source 1..80: mol_type = other DNA
taggcgcaggcgggaacgacatttatcacagcgtgtcacgtgcccgatcccgccatttactccttggcctactcctactc

SEQ ID NO: 138967 - DNA, 80 bp, synthetic construct
  source 1..80: mol_type = other DNA
tgactaccttgatcacagctacggctctggcgactttgcattacgggtacatgctgccaggatggcaagccgaggccttg

SEQ ID NO: 138968 - DNA, 80 bp, synthetic construct
  source 1..80: mol_type = other DNA
gagacttggaaatcaccgacctatgaaccaccagtggtccatggctgcgccatgcccccctcgggacctcctcctatccc

SEQ ID NO: 138969 - DNA, 80 bp, synthetic construct
  source 1..80: mol_type = other DNA
gattctacctcaccgggcatatgcctgggatgacagtcagaccgcatcacttggggccattgttctcgtggtgttgactc

SEQ ID NO: 138970 - DNA, 80 bp, synthetic construct
  source 1..80: mol_type = other DNA
tcgaggccacacgcgtcaccttaatatgcgaagtggacctgggaccgcgccgccccgactgcatctgcgtgttcgaattc

SEQ ID NO: 138971 - DNA, 80 bp, synthetic construct
  source 1..80: mol_type = other DNA
tcggcgtagcccttttgaaaaaacggcacgtactggcgcagggccggcacgccccccaagtcttccgacaggtgtaggac

SEQ ID NO: 138972 - DNA, 80 bp, synthetic construct
  source 1..80: mol_type = other DNA
cccttatgaccgggtacactggggacttcgactctgttatagactgcaatgttgcggtcacgcagatcgttgacttcagt

SEQ ID NO: 138973 - DNA, 80 bp, synthetic construct
  source 1..80: mol_type = other DNA
tgctttgaacgatatgggaaaggttcggaaagacatacctcaatggcagccatcaaagggatggcatgattggcaacagg

SEQ ID NO: 138974 - DNA, 80 bp, synthetic construct
  source 1..80: mol_type = other DNA
acaagggggtgtggcgaggggatggagtgatgacaacacgctgcccctgcggaaaggaattaacaggacacgtgaaaaat

SEQ ID NO: 138975 - DNA, 80 bp, synthetic construct
  source 1..80: mol_type = other DNA
ggctaacccccaggtgccttgtccactacccctataggttgtggcactacccctgcactgtcaactttaccatccataag

SEQ ID NO: 138976 - DNA, 80 bp, synthetic construct
  source 1..80: mol_type = other DNA
cgtcatctcagagagtcagggggtcgaggaggacgagcggaacctgagagtcttcacggaggctatgaccaggtactccg

SEQ ID NO: 138977 - DNA, 80 bp, synthetic construct
  source 1..80: mol_type = other DNA
ggaaacgaagaaaacacccagagggccacgtcgggaatgcgcccggagttgtccttaaaaggccggccgtgcgtgacgga

SEQ ID NO: 138978 - DNA, 80 bp, synthetic construct
  source 1..80: mol_type = other DNA
ggagcttcggcgacacgtcgacctgctcgttgggggggcggtgttctgttctgccatgtatgtgggagatgtttgcggtg

SEQ ID NO: 138979 - DNA, 80 bp, synthetic construct
  source 1..80: mol_type = other DNA
cattggactctatggaaatggagtggttaccaaatcaggtgattacgtcagtgccataacgcaagccgaaagaattggag

SEQ ID NO: 138980 - DNA, 80 bp, synthetic construct
  source 1..80: mol_type = other DNA
cgtcctcgccttcttggtgcttgccgacgcacgcatctgcgcgatcttgtggttaatgctactgatcgctcaggttgagg

SEQ ID NO: 138981 - DNA, 80 bp, synthetic construct
  source 1..80: mol_type = other DNA
aagaggaggacctataccagtctacttaggctataagtggccaggcgaaggtatcaactacgcagacagtagattgtgtg

SEQ ID NO: 138982 - DNA, 80 bp, synthetic construct
  source 1..80: mol_type = other DNA
ccgaccccacccccgaccccagccgattacgacgaggatgacaatgacgagggcgaggacgaaagtctagccggcactcc

SEQ ID NO: 138983 - DNA, 80 bp, synthetic construct
  source 1..80: mol_type = other DNA
ataccaacgtggaccaagacctcgtaggctggcccgctcctcaaggtgcccgctcactgacaccctgcacttgcggctct

SEQ ID NO: 138984 - DNA, 80 bp, synthetic construct
  source 1..80: mol_type = other DNA
taatgcctatgggataactagtttattttctgtgggcgccaaacagaacctgcaactgatcaacactaatggctcgtggc

SEQ ID NO: 138985 - DNA, 80 bp, synthetic construct
  source 1..80: mol_type = other DNA
tggggccggcattctggacacgggagttgcgatacactgggttgcaacactggaacactatcaacgctgggtgtcttacg

SEQ ID NO: 138986 - DNA, 80 bp, synthetic construct
  source 1..80: mol_type = other DNA
catcactggcccctctcatgagagaccgtactgttggcactacgcacctaggccttgtggagtcgtcccagcgttaaacg

SEQ ID NO: 138987 - DNA, 80 bp, synthetic construct
  source 1..80: mol_type = other DNA
ccgcgtgggagacagcaagacacactccagtaaattcctggctaggcaacataatcatgtttgcccccacattgtgggcg

SEQ ID NO: 138988 - DNA, 80 bp, synthetic construct
  source 1..80: mol_type = other DNA
tgtggatgaactccacggggtttaccaagacgtgtggagccgccccctgtaacatctatgggggtgataccgatttcaac

SEQ ID NO: 138989 - DNA, 80 bp, synthetic construct
  source 1..80: mol_type = other DNA
tgaagccacgcaactggctgaagtacgaacctattgctaccacgctacagtggctgacatttcaacagtagcaagatgcc

SEQ ID NO: 138990 - DNA, 80 bp, synthetic construct
  source 1..80: mol_type = other DNA
ggtcacctattcagtcactccactcgatctaccacagatcatccaaagactgcacggaatggccgctttttcactccatg

SEQ ID NO: 138991 - DNA, 80 bp, synthetic construct
  source 1..80: mol_type = other DNA
cagtaccaccgggataagtccggagatgtgaacgcctcctgcgctctgtgctatatgaaacagactttcagctttattta

SEQ ID NO: 138992 - DNA, 80 bp, synthetic construct
  source 1..80: mol_type = other DNA
cggtctcgggggggagccccccccgcgaagaagaacccggcagttgcaggggcgccacccctcgagaggacggggggggc

SEQ ID NO: 138993 - DNA, 80 bp, synthetic construct
  source 1..80: mol_type = other DNA
ccaagcgctcaagtcatttaaagagtttgcggcaggaaagagatcagcgttgggcatgatggaggtcatgggtaggatgc

SEQ ID NO: 138994 - DNA, 80 bp, synthetic construct
  source 1..80: mol_type = other DNA
catgacaatgagatgtgtgggagtgggaaacagagattttgtggaaggtctgtcaggagctacgtggattgacgtggtgc

SEQ ID NO: 138995 - DNA, 80 bp, synthetic construct
  source 1..80: mol_type = other DNA
atcagcccggccgcatgttgctcgaagagcacataacctcttaacaccgtacagaggggatggcgtcggtgcatgtgagt

SEQ ID NO: 138996 - DNA, 80 bp, synthetic construct
  source 1..80: mol_type = other DNA
ctgtgtactgtttcacaccatcgccagtggttgtaggcaccactgataagaggggcgtcccgacttacgactggggtgag

SEQ ID NO: 138997 - DNA, 80 bp, synthetic construct
  source 1..80: mol_type = other DNA
cccagcaaagtccttccggggataaagaccggtgggttggaaatgtttccccgagggtggcaggctatgtttcgctggat

SEQ ID NO: 138998 - DNA, 80 bp, synthetic construct
  source 1..80: mol_type = other DNA
ggatgatgctgttgatatcacaagctgaagctgctttggagaacttgattgtcctgaacgctatctccgctgcgggcaca

SEQ ID NO: 138999 - DNA, 80 bp, synthetic construct
  source 1..80: mol_type = other DNA
gtacaacacggagacgtaggccaggagctcgctcagccgcagtgcggtgtccgtgctcggccggctcgggtctgcggggc

SEQ ID NO: 139000 - DNA, 80 bp, synthetic construct
  source 1..80: mol_type = other DNA
gtgtgatggtgtccagaaaacctcccgaaggtgctgcagttggggatacatatgatcacaagcaggatattttggaatat

SEQ ID NO: 139001 - DNA, 80 bp, synthetic construct
  source 1..80: mol_type = other DNA
ccccaactccagtatagtgtatgagacagaccaccacatcatgcacttgccggggtgcgtgccctgtgtcaaaacaggga

SEQ ID NO: 139002 - DNA, 80 bp, synthetic construct
  source 1..80: mol_type = other DNA
atgtgtgcccatccccactgagaactattccagagctctctggcgcgttgctgccgaggactatgtggaagttaaaagag

SEQ ID NO: 139003 - DNA, 80 bp, synthetic construct
  source 1..80: mol_type = other DNA
tttcaaccccatgattcttgcggctggactcatcgcttgtgatccaaaccggaagcgagggtggccggccacggaagtca

SEQ ID NO: 139004 - DNA, 80 bp, synthetic construct
  source 1..80: mol_type = other DNA
ttaacaggacagccttaaactgtaatgatagcctccagaccggctttctcgctggtctgttctacaccaaaaattacaac

SEQ ID NO: 139005 - DNA, 80 bp, synthetic construct
  source 1..80: mol_type = other DNA
aaacttcccatcgccgtgatgggggacgcctacgggtttcaatactcacctgggcagcgggtcgacttcctggtgaaagc

SEQ ID NO: 139006 - DNA, 80 bp, synthetic construct
  source 1..80: mol_type = other DNA
tgcacgcttttgaccagggatggggaccactctcatatgccactatatctggatcatctgatgatagaccatactgttgg

SEQ ID NO: 139007 - DNA, 80 bp, synthetic construct
  source 1..80: mol_type = other DNA
ctaggcgttagggtctgtgagaaaatggccctctatgacatcacacagaagctgccccaagcagtgatgggggcatcgta

SEQ ID NO: 139008 - DNA, 80 bp, synthetic construct
  source 1..80: mol_type = other DNA
cgggtacccttggcccctctatggcaacgagggctgtgggtgcgcgggatggcttctgtccccccgcggctctcggccta

SEQ ID NO: 139009 - DNA, 80 bp, synthetic construct
  source 1..80: mol_type = other DNA
accccaaaaatgtacagacaacaccgggcaccttcaagactcctgaaggcgaagttggagccatagctctagatttcaaa

SEQ ID NO: 139010 - DNA, 80 bp, synthetic construct
  source 1..80: mol_type = other DNA
caggcgcgcggtggcttttatgccgaaggttagcggggactccggatgggccgtcggccgcgtctctctggacctgcgaa

SEQ ID NO: 139011 - DNA, 80 bp, synthetic construct
  source 1..80: mol_type = other DNA
gccgtgtccttcacggggctctggtccacgcgctccagcgccgccacgcacgccaccagcgcgtcctcgctcgggcagag

SEQ ID NO: 139012 - DNA, 80 bp, synthetic construct
  source 1..80: mol_type = other DNA
ctaaaccagaaggaaaagttacttggttcgatggagatttaaaaagaccatgtgagcctaattatagactaagacatgaa

SEQ ID NO: 139013 - DNA, 80 bp, synthetic construct
  source 1..80: mol_type = other DNA
aatgaggtgttctgcgtggaccccgccaaggggggtaagaaaccagctcgcctcatcgtttaccctgacctcggcgtccg

SEQ ID NO: 139014 - DNA, 80 bp, synthetic construct
  source 1..80: mol_type = other DNA
ttgaagttgtcaaactttcaaggcaagttactaatggctgtcaacaatacggacatcgcggatgtcatcgtgatcccgac

SEQ ID NO: 139015 - DNA, 80 bp, synthetic construct
  source 1..80: mol_type = other DNA
agtctgagggaatcttctcacccagtgaattagagaccccaaatttagccgagagagttctctactggctggaaaaatat

SEQ ID NO: 139016 - DNA, 80 bp, synthetic construct
  source 1..80: mol_type = other DNA
aataccccaattccaacaacaatcatggccaaaaatgaggtcttcgctgtgaacccagcgaagggaggtcggaagcctgc

SEQ ID NO: 139017 - DNA, 80 bp, synthetic construct
  source 1..80: mol_type = other DNA
acgatagagagatctctgtggcggctgagtgccatagaccacctagaccgaagtacccgcctgcattacccatctgggca

SEQ ID NO: 139018 - DNA, 80 bp, synthetic construct
  source 1..80: mol_type = other DNA
ttctcaacgccgtctctgttgctagcaatcagggtccgcttttcgggtcggctctcatctgcattgcgtggcatatccgg

SEQ ID NO: 139019 - DNA, 80 bp, synthetic construct
  source 1..80: mol_type = other DNA
agtcgctcaacatcgttacaaggtcccccagtttcagcgacaacagcactccgcccgccgcgccccagacctatcaggtg

SEQ ID NO: 139020 - DNA, 80 bp, synthetic construct
  source 1..80: mol_type = other DNA
taaggccgtggattttatccccgttgaaagccttgagaccaccgctcgatctcccgtgttctcagacaattctgccccgc

SEQ ID NO: 139021 - DNA, 80 bp, synthetic construct
  source 1..80: mol_type = other DNA
cgagtcaactctcagcgccgtcgttgcgagctacctgtaccgcccatgctaagaactatgcggttgagatggtggatgca

SEQ ID NO: 139022 - DNA, 80 bp, synthetic construct
  source 1..80: mol_type = other DNA
gctgtggccgcttttgctgcttgttctggcattgccccagcgggcatatgcctacgatcaggagcaagcagcctcaattg

SEQ ID NO: 139023 - DNA, 80 bp, synthetic construct
  source 1..80: mol_type = other DNA
tgaccagatactcagcccctcctggggatgccccgcagcccacgtacgacctcgagctgataacatcatgctcgtcaaac

SEQ ID NO: 139024 - DNA, 80 bp, synthetic construct
  source 1..80: mol_type = other DNA
ctggactggcccccccctccggagactccactgcgccggtggcctcggtggaggatgacaccacatccatccctgagtca

SEQ ID NO: 139025 - DNA, 80 bp, synthetic construct
  source 1..80: mol_type = other DNA
tccaccagcaacacagacatgacctccccggctggggtgtagcgcataaacacggcccccacgagccccaggtcgcgctg

SEQ ID NO: 139026 - DNA, 80 bp, synthetic construct
  source 1..80: mol_type = other DNA
caacattgtttggtccggaaagggaaaaaacccaagccattgatggagagtttcgcctcagaggagaacaaaggaagaat

SEQ ID NO: 139027 - DNA, 80 bp, synthetic construct
  source 1..80: mol_type = other DNA
tggtctccgccgccgtggccgcggaggccttagtcgccacccgctgggttcggggggcccggggggcagtgatgagtgtg

SEQ ID NO: 139028 - DNA, 80 bp, synthetic construct
  source 1..80: mol_type = other DNA
agcacgtccgccgacttgtccgcggcccccaccgacatgtacatctgcaggatggtggccatgcacgtgtccgccaggcg

SEQ ID NO: 139029 - DNA, 80 bp, synthetic construct
  source 1..80: mol_type = other DNA
taccaaagtcgcagatcgtaaccaactgtgcaagggtaacatcttcgccatggagatcaacctccaggccaacctgtgga

SEQ ID NO: 139030 - DNA, 80 bp, synthetic construct
  source 1..80: mol_type = other DNA
cttcaggacaggatcgagacagaatctgcaactcatcaattccaacgggagctggcatatcaacaggacagctctgaact

SEQ ID NO: 139031 - DNA, 80 bp, synthetic construct
  source 1..80: mol_type = other DNA
tgtcattgaaaaggattttgccggcccgtggcataaagttgcgggtgattttgaaaggtccgggcacgtccgagcggttg

SEQ ID NO: 139032 - DNA, 80 bp, synthetic construct
  source 1..80: mol_type = other DNA
cacgctggcgcaggccctccgagaggcctttgagagaggcatctgtggagttgtgccccagaatagacttgaaatggcca

SEQ ID NO: 139033 - DNA, 80 bp, synthetic construct
  source 1..80: mol_type = other DNA
gagcagttcaagcaaaaggtcatcggcctgttacagaacacagctaaacaggccgacgaccttaagccggcagcctatgc

SEQ ID NO: 139034 - DNA, 80 bp, synthetic construct
  source 1..80: mol_type = other DNA
ttgatgccaccacaaccgttggcagtgcagtcagccaaacctcatttcgtctcacgagcctgttcagccccggtgccagg

SEQ ID NO: 139035 - DNA, 80 bp, synthetic construct
  source 1..80: mol_type = other DNA
tgtgaactgggtccctaccggaaggaccacatggtccatccatgcaggaggagagtggatgacaacagaggacatgctgg

SEQ ID NO: 139036 - DNA, 80 bp, synthetic construct
  source 1..80: mol_type = other DNA
gagggatggggatcaacgctgtggcgttttacaggggcctcgacgtgtccgtgatacccacatccggagacgtggtagtg

SEQ ID NO: 139037 - DNA, 80 bp, synthetic construct
  source 1..80: mol_type = other DNA
ggttgaagccggaactacggtgagtgggggtgtggctagtcactccacctccggcattgtaggcttgctttcccctggag

SEQ ID NO: 139038 - DNA, 80 bp, synthetic construct
  source 1..80: mol_type = other DNA
acatcaacaggactgccctcaattgcaatgacagtctccagactgggtttatagctggcctcctttattaccataagttt

SEQ ID NO: 139039 - DNA, 80 bp, synthetic construct
  source 1..80: mol_type = other DNA
gatacgccctggttcctggaacaattgcttttacagatgcacatatcgaggtggacatcacttacgctgagtacttcgaa

SEQ ID NO: 139040 - DNA, 80 bp, synthetic construct
  source 1..80: mol_type = other DNA
gagactttgactccgtgatcgactgcaatgtagcggtcacccaagctgtcgacttcagcctggaccccaccttcactata

SEQ ID NO: 139041 - DNA, 80 bp, synthetic construct
  source 1..80: mol_type = other DNA
agttcaagcagaaggccgtaggccttctaaacttcgctggcaagcaagcccaagaggcaacaccagtaatccagtccaac

SEQ ID NO: 139042 - DNA, 80 bp, synthetic construct
  source 1..80: mol_type = other DNA
cccccccgaaacacacccccggggtcgcgcgcggccctttaaagcgcggcggcgcagcccgggcccccgcggccgagacg

SEQ ID NO: 139043 - DNA, 80 bp, synthetic construct
  source 1..80: mol_type = other DNA
gcgtcatgtatgaaggagttcttcacaccctgtggcacaccacaagaggggcagctatcagaagtggtgaaggaaggctc

SEQ ID NO: 139044 - DNA, 80 bp, synthetic construct
  source 1..80: mol_type = other DNA
acgtcgcgtaccttggtgcgttcctgagcgtgctgtacgctggccgcgggcgcatgtccgcagccacgcacaccgcgcgg

SEQ ID NO: 139045 - DNA, 80 bp, synthetic construct
  source 1..80: mol_type = other DNA
ctaaaaatggataaactgaccttaaaggggatgtcatatgtgatgtgcacaggctcatttaagctagagaaggaagtggc

SEQ ID NO: 139046 - DNA, 80 bp, synthetic construct
  source 1..80: mol_type = other DNA
ctaatgaatgttttttaagcattttacagcagaactattgaatcttttacttttagctgccaacgaatgaaaatgaatca

SEQ ID NO: 139047 - DNA, 80 bp, synthetic construct
  source 1..80: mol_type = other DNA
tccaagactcaaaaaacatttatcagagagggacacatccgttttccagaatacgtgatggcctacaatacggctggaag

SEQ ID NO: 139048 - DNA, 80 bp, synthetic construct
  source 1..80: mol_type = other DNA
gctcaaactcactccaataccgtccgcgtccctactggacttgtccggttggttcacggccgggtacagcgggggggaca

SEQ ID NO: 139049 - DNA, 80 bp, synthetic construct
  source 1..80: mol_type = other DNA
atattggttacaacaaagaaggtacagacagagagcattatgaagtatcagtgttagatttaatgccaattgcaggacaa

SEQ ID NO: 139050 - DNA, 80 bp, synthetic construct
  source 1..80: mol_type = other DNA
aataaaatggatataattccgcctatagctgtcactgttgcgggagtgggaagccgtaatcaatttgacggtgccctggg

SEQ ID NO: 139051 - DNA, 80 bp, synthetic construct
  source 1..80: mol_type = other DNA
cacccccaaaagagactccgattcccccgcccaggaggaagcggcttgtgagactcgatgagtccactgttgcggccgcg

SEQ ID NO: 139052 - DNA, 80 bp, synthetic construct
  source 1..80: mol_type = other DNA
atgttgactctgggacggggcttacgcctccttctgaaacttccacgcctgacccccccatagcggatgacagatccgat

SEQ ID NO: 139053 - DNA, 80 bp, synthetic construct
  source 1..80: mol_type = other DNA
gtagtagtgtggcggaagtgtaatgttgcaagtgtggcggaacacatgtaagcgacggatgtggtaaaagtgacgttttt

SEQ ID NO: 139054 - DNA, 80 bp, synthetic construct
  source 1..80: mol_type = other DNA
gcctcccaaacccaaagttaccggtcttttcaccctcggggcccagcaacacattcagctcatcaacaccaacgggagct

SEQ ID NO: 139055 - DNA, 80 bp, synthetic construct
  source 1..80: mol_type = other DNA
cgtggtgaagcccctagatgagaggtttagcacctccctcctcttcttgaatgacatgggaaaggtgaggaaagacatcc

SEQ ID NO: 139056 - DNA, 80 bp, synthetic construct
  source 1..80: mol_type = other DNA
ctcaaaatgtggcgctcaaagaagacccccatggggttttcctatgacaccaagtgctttgactctactgtgacagagcg

SEQ ID NO: 139057 - DNA, 80 bp, synthetic construct
  source 1..80: mol_type = other DNA
ttgcaatgattccctaaacaccgggttcatagcagggctcgtctactatcacaggttcaactccacggggtgtccagccc

SEQ ID NO: 139058 - DNA, 80 bp, synthetic construct
  source 1..80: mol_type = other DNA
ataaaagaccacaccaacgcacgagccttgcgtttaatgtcgtgtttattcaagggagtgggatagggttcgacggttcg

SEQ ID NO: 139059 - DNA, 80 bp, synthetic construct
  source 1..80: mol_type = other DNA
cggggtcacgtatagcatcactccacttgatctacctcagatcatccaacgccttcatggcatggctgccttctcactac

SEQ ID NO: 139060 - DNA, 80 bp, synthetic construct
  source 1..80: mol_type = other DNA
tttaacagctcaggatgtacagagaggctttccagctgcaagacccttgacagctttgaccaaggttggggtccactcgg

SEQ ID NO: 139061 - DNA, 80 bp, synthetic construct
  source 1..80: mol_type = other DNA
ccgccagggtcagtgaccacgccccacgccaatatagaggaggtcgccttgccgacgacaggagagatacctttctacgg

SEQ ID NO: 139062 - DNA, 80 bp, synthetic construct
  source 1..80: mol_type = other DNA
cgagatcggatttatccgatcccaggcgccgacggacagccatatcctgagcccggcggcgctggcggccatcgaaaact

SEQ ID NO: 139063 - DNA, 80 bp, synthetic construct
  source 1..80: mol_type = other DNA
acacatagacgcccactttttgtcccaaacgaaacaaggaggggagaacttcgcgtacctagtggcctatcaggccacag

SEQ ID NO: 139064 - DNA, 80 bp, synthetic construct
  source 1..80: mol_type = other DNA
ccacagtcactctcagtgagtcgtgcggacatcgcggacccgcggcacgcaccactacagagagcgggaagctgatctct

SEQ ID NO: 139065 - DNA, 80 bp, synthetic construct
  source 1..80: mol_type = other DNA
tcaaatgggagtacgttgtgctcgccttcctgctgctcgcagacgccagaatctgtgcatgtttctggatgatgttgctt

SEQ ID NO: 139066 - DNA, 80 bp, synthetic construct
  source 1..80: mol_type = other DNA
tggacgagagcaaccccacgccgagcctgaagcccgtgaccctgcagcaggtgctgccccaggcggtgctgctgccgagc

SEQ ID NO: 139067 - DNA, 80 bp, synthetic construct
  source 1..80: mol_type = other DNA
gcggcgacgctctgctcagccctttacgtaggggacgtgtgtggagccgtgatgattgcctcgcaagtcgtcatggtgtc

SEQ ID NO: 139068 - DNA, 80 bp, synthetic construct
  source 1..80: mol_type = other DNA
aggaactaaaccttccatcacctttgtgtgctactgcgtctccccattcgcagcatgtccccgaaagccgcaaaacaggc

SEQ ID NO: 139069 - DNA, 80 bp, synthetic construct
  source 1..80: mol_type = other DNA
tcgacttcgacatgtacggagtcacctattctatcactccgctggatttgccagcaatcattcaaagactccatggctta

SEQ ID NO: 139070 - DNA, 80 bp, synthetic construct
  source 1..80: mol_type = other DNA
tacgcctatcccggctgagaattacacccgcgctctttggcgcgtttcagccggggactatgcggagattactaaggtag

SEQ ID NO: 139071 - DNA, 80 bp, synthetic construct
  source 1..80: mol_type = other DNA
gttagagcaatcgaggacggggtcaattacgcaacagggaatcttcccggttgctctttctctatcttcattctggcact

SEQ ID NO: 139072 - DNA, 80 bp, synthetic construct
  source 1..80: mol_type = other DNA
caaaatcaagcgggttaaaaaaaaggatgaggtggacgaggtggcagtagagtttgtgcgcgagttcgctccgcggcggc

SEQ ID NO: 139073 - DNA, 80 bp, synthetic construct
  source 1..80: mol_type = other DNA
ttaaattcagactctgtagagaaattcccactccacctcgactttgtaataccgttcccacatcgcctgtgatagctcga

SEQ ID NO: 139074 - DNA, 80 bp, synthetic construct
  source 1..80: mol_type = other DNA
agacaatgtacatacatggacagaacaatacaaattccaaccagaatccccctcaaagctggcttcggccatccaaaaag

SEQ ID NO: 139075 - DNA, 80 bp, synthetic construct
  source 1..80: mol_type = other DNA
cgttacaagttctacccggagacaccacaaggcctagcaagaattattcagaaagcacatgcagaaggagtctgcggctt

SEQ ID NO: 139076 - DNA, 80 bp, synthetic construct
  source 1..80: mol_type = other DNA
acctttaagatcatgagcggcgaggtaccaactggagaagacctggtaaatctgctcccggctatactatctcctggagc

SEQ ID NO: 139077 - DNA, 80 bp, synthetic construct
  source 1..80: mol_type = other DNA
agctgtacgcacagtgtagcagactagcggttagaggagacccctcccatgacacaacgcagcagcggggcccgagcact

SEQ ID NO: 139078 - DNA, 80 bp, synthetic construct
  source 1..80: mol_type = other DNA
gcatacacaaacattcagcctaaatacgctatgcaactagaaatcaccatactaattgtaattggaattcttatactatc

SEQ ID NO: 139079 - DNA, 80 bp, synthetic construct
  source 1..80: mol_type = other DNA
cttgccggccagtttaaagagaaagccctcggcattctgggcgccgctggcaaacaagctcatgaggctacaccagtggt

SEQ ID NO: 139080 - DNA, 80 bp, synthetic construct
  source 1..80: mol_type = other DNA
gagcgagaaccttccattccatcggaatatttgctccccaggaagaaggcgttcccagccgccttgccagtttgggcgcg

SEQ ID NO: 139081 - DNA, 80 bp, synthetic construct
  source 1..80: mol_type = other DNA
tatggctgctggatgggcgtggtcggaagacccaagagcgagatgtctgtgaagcagtgtgtgtttgagaaatgctacct

SEQ ID NO: 139082 - DNA, 80 bp, synthetic construct
  source 1..80: mol_type = other DNA
atcgagaacgcgctcgagtctcgcctcatcgacgccttcgccgcccggcctctcctggtagaaaccgaacgcgggaccac

SEQ ID NO: 139083 - DNA, 80 bp, synthetic construct
  source 1..80: mol_type = other DNA
ggagacgaaggattcgtgcgccacgtcggccagcgtcagttgccggcggatggtcggcaggaataccacccgcccttcgc

SEQ ID NO: 139084 - DNA, 80 bp, synthetic construct
  source 1..80: mol_type = other DNA
acacatggggtggaaatgaatccgatgtgctcatcctgcagagcctaaggccgccggagggtggctggtatggttgcact

SEQ ID NO: 139085 - DNA, 80 bp, synthetic construct
  source 1..80: mol_type = other DNA
tgcagaggaaaccttagtaacgcacacaacagaaccgccgtcctatgaggaagcaataaaacaaggagccgctttgtcac

SEQ ID NO: 139086 - DNA, 80 bp, synthetic construct
  source 1..80: mol_type = other DNA
gcatggcctaagctggagcaattctggcagaagcatttgtggaactttgtcagcgggatccaatacctggcagggctgtc

SEQ ID NO: 139087 - DNA, 80 bp, synthetic construct
  source 1..80: mol_type = other DNA
cccgtccctgagcccaactacaagcaagctctttggagggtgtctgctgacgagtacgtcgaggtccggagggtagtgga

SEQ ID NO: 139088 - DNA, 80 bp, synthetic construct
  source 1..80: mol_type = other DNA
agggctataaggtgctagtgctcaacccctcagttgcggccacactggggtttggggtatacatgtccaaggcatatggt

SEQ ID NO: 139089 - DNA, 80 bp, synthetic construct
  source 1..80: mol_type = other DNA
caagtaacacctaatgtggctgtgaaacatcgcggtgcactcactcgcaacctgcgaacgcacgtcgacatgatcgtaat

SEQ ID NO: 139090 - DNA, 80 bp, synthetic construct
  source 1..80: mol_type = other DNA
acgggtttcagtactcgccggggcagcgggtagagtttctggtctccgcctggaaggccaagaagagccccatgggcttt

SEQ ID NO: 139091 - DNA, 80 bp, synthetic construct
  source 1..80: mol_type = other DNA
gcttctgtccgtttgccggtcgtgggcggcatggtgcaagttgaataaccggaaatggtttcccgcagaacctgaagatg

SEQ ID NO: 139092 - DNA, 80 bp, synthetic construct
  source 1..80: mol_type = other DNA
gcgtgtgcatggccgttcgggggatagtgggaggcaagtatgtccaggctttattgttgagactggtggctatgactggt

SEQ ID NO: 139093 - DNA, 80 bp, synthetic construct
  source 1..80: mol_type = other DNA
gcgcgagaacgcggcgctgacggaggccgcggggagccccggcgccggcgcagatgacgaggtggtcgccgccgccgtcg

SEQ ID NO: 139094 - DNA, 80 bp, synthetic construct
  source 1..80: mol_type = other DNA
gcacgcacgtggagacggccatcacgtcgccgagcatccgcgcgctcacccgccggcccacggtggccgaggcgatggcg

SEQ ID NO: 139095 - DNA, 80 bp, synthetic construct
  source 1..80: mol_type = other DNA
cgagctttatacgacattacatgcaaattgccccaggcagtaatgggagccgcttatggcttccagtactcgccgaatca

SEQ ID NO: 139096 - DNA, 80 bp, synthetic construct
  source 1..80: mol_type = other DNA
gtttagttataactaataatgccgtaacagttaatcctaccggagcgctaggtttcaacaacacaggagctttgcaatta

SEQ ID NO: 139097 - DNA, 80 bp, synthetic construct
  source 1..80: mol_type = other DNA
ttgaacatcgttttgatgcggcgtgcaactggacccgtggcgaacgttgcgatattgaagatcgtgatcgtagcgaacag

SEQ ID NO: 139098 - DNA, 80 bp, synthetic construct
  source 1..80: mol_type = other DNA
aaggagccgaccagggtcgccttcttggtgcgcagaaagtggcggtccatgacgtacacaaactcgaacgcggccacgaa

SEQ ID NO: 139099 - DNA, 80 bp, synthetic construct
  source 1..80: mol_type = other DNA
ctccaaggggtggagtcttctcgctcccatcactgcttatgcccagcaaacacgaggcctcctgggcgccatagtggtga

SEQ ID NO: 139100 - DNA, 80 bp, synthetic construct
  source 1..80: mol_type = other DNA
atgcacgtggatgaacggcactgggtttactaagacctgtggcgcgccgccttgccgtataagaccagacttcaactcca

SEQ ID NO: 139101 - DNA, 80 bp, synthetic construct
  source 1..80: mol_type = other DNA
aataccatcagaatacctgcttcccaaaagcaaatttccaccggcattgccaccctgggcgcggcctgattacaatccgc

SEQ ID NO: 139102 - DNA, 80 bp, synthetic construct
  source 1..80: mol_type = other DNA
tgcctagtccactatccgtacaggctgtggcactacccctgcactgttaatttcaccatccataaggttcgtatgttcgt

SEQ ID NO: 139103 - DNA, 80 bp, synthetic construct
  source 1..80: mol_type = other DNA
atagctccatgccaccgcttgaaggcgagcctggtgaccccgatctctccgatgggggggactcgggatcatggtccaca

SEQ ID NO: 139104 - DNA, 80 bp, synthetic construct
  source 1..80: mol_type = other DNA
acacgctacttggtaaaaactgaatcttggatcctgcggaacccaggttacgccctcgtagcagcagtgctcgggtggat

SEQ ID NO: 139105 - DNA, 80 bp, synthetic construct
  source 1..80: mol_type = other DNA
cggtatggtaattagaaactcattaatgggcggccccggccgcccttcccgcttccggcaattcccgcggcccttaatgg

SEQ ID NO: 139106 - DNA, 80 bp, synthetic construct
  source 1..80: mol_type = other DNA
ggaaaaagggtctactacctgacccgtgaccccacaacaccccttgcgagagccgcatgggaaacagcacgacacactcc

SEQ ID NO: 139107 - DNA, 80 bp, synthetic construct
  source 1..80: mol_type = other DNA
cggagcgacgtacacagtggtccccactgacttgccagcaatcattgaacgactccatggcctgagcgccttctcgcttc

SEQ ID NO: 139108 - DNA, 80 bp, synthetic construct
  source 1..80: mol_type = other DNA
ctatgaggcaaagcatcacatcttgcaccttccgggatgcgtcccttgtgtgagaactgggaaccggtcacaatgctgga

SEQ ID NO: 139109 - DNA, 80 bp, synthetic construct
  source 1..80: mol_type = other DNA
ttggcaaaaacacctgtggaacttcgtgagcggtattcaatacctggcaggtctttcgaccttaccaggtaatccagctg

SEQ ID NO: 139110 - DNA, 80 bp, synthetic construct
  source 1..80: mol_type = other DNA
ctctactccttgtgatcgctcttggttatgggagatctgggattgggtctgcaccgtactgagtgacttcaaaacgtggc

SEQ ID NO: 139111 - DNA, 80 bp, synthetic construct
  source 1..80: mol_type = other DNA
gaacaaccaacggaaaaagacgggaaaaccgtctatcaatatgctgaaacgcgtgagaaaccgtgtgtcaactggatcac

SEQ ID NO: 139112 - DNA, 80 bp, synthetic construct
  source 1..80: mol_type = other DNA
gatgtttgtggtcgggtttgaacaccggtttgacgccgcttgcaactggaccaggggggagcgttgcgacatcgaggatc

SEQ ID NO: 139113 - DNA, 80 bp, synthetic construct
  source 1..80: mol_type = other DNA
ctttgcccccacgccgaagcctttctttcgggacgaggtctctttctctgtaggtcttaacgactatgtcgtcggatctc

SEQ ID NO: 139114 - DNA, 80 bp, synthetic construct
  source 1..80: mol_type = other DNA
atctatcttgggcatcggcaccgtccttgaccaagcagagactgcgggggcgagactgactgtgctcgctaccgctactc

SEQ ID NO: 139115 - DNA, 80 bp, synthetic construct
  source 1..80: mol_type = other DNA
tatacccagcgtgatgcagattactcccgctgggactcaacacaacaaagagcagtgctggctgcagctctggaaataat

SEQ ID NO: 139116 - DNA, 80 bp, synthetic construct
  source 1..80: mol_type = other DNA
gcggtggtttccggcaaccctcctcgctgcgccgggcgcgcccaccggtccttcgcgggagccggggctcttctggtcat

SEQ ID NO: 139117 - DNA, 80 bp, synthetic construct
  source 1..80: mol_type = other DNA
ccctcttccgaggccagcagagaggcaggactttgtgaggcgggggggggagaggtggaactcgttggtgctgattgacg

SEQ ID NO: 139118 - DNA, 80 bp, synthetic construct
  source 1..80: mol_type = other DNA
cccctacgctcgcggcacgggacccaggcttctccactaaggacgtcagacgtcacgtcgacctactggtgggtgctgcc

SEQ ID NO: 139119 - DNA, 80 bp, synthetic construct
  source 1..80: mol_type = other DNA
tcttgcggtgccaacatttccggccacgtccgatttggttccatgagaataacggggcctaaaacctgcatgaacacatg

SEQ ID NO: 139120 - DNA, 80 bp, synthetic construct
  source 1..80: mol_type = other DNA
tgccggcgttgtccactgggctgatccatctacaccagaacgtggtagatgtccaatacctatatggaatatccccgtca

SEQ ID NO: 139121 - DNA, 80 bp, synthetic construct
  source 1..80: mol_type = other DNA
gttagcctaaaggtcaggcaggacgctatggggaacttgcacttgacggaggtggaacgggaggagcgcaggctggcact

SEQ ID NO: 139122 - DNA, 80 bp, synthetic construct
  source 1..80: mol_type = other DNA
ggaggcgtgcactggctcgccttcggctggaacccgcgctcgcgcacctgctacatgttcgacccctttgggttctcgga

SEQ ID NO: 139123 - DNA, 80 bp, synthetic construct
  source 1..80: mol_type = other DNA
cgcatacgcgcagcaaacgcggggcttactgggcacgatcgtgacaagcctcaccggcagggataccaatgagaactgtg

SEQ ID NO: 139124 - DNA, 80 bp, synthetic construct
  source 1..80: mol_type = other DNA
caacataacacctatttcaacaaccatcatggcaaagaatgaagtgttctgtgttgaccctcaaaaaggcggtcgcaagc

SEQ ID NO: 139125 - DNA, 80 bp, synthetic construct
  source 1..80: mol_type = other DNA
gtgctgcgcaaaggagagggagagttggcaggaacccacaaaaagaaaatgaccagtacatattcacgggccagcctctc

SEQ ID NO: 139126 - DNA, 80 bp, synthetic construct
  source 1..80: mol_type = other DNA
tgtacgtgatcaagagccagctccccccgcgcgggttggagccggccctggagcggctgtttgggcgcctccggatcacc

SEQ ID NO: 139127 - DNA, 80 bp, synthetic construct
  source 1..80: mol_type = other DNA
tccgtagttgccaataaaccaatatccagacatccttttaaatctaaagttataaattcggattaccggggaatatgtca

SEQ ID NO: 139128 - DNA, 80 bp, synthetic construct
  source 1..80: mol_type = other DNA
gatggatgagccaatcccagccggattcgaacctgagatgctgaggaaaaaacagatcactgtactggatctccatcccg

SEQ ID NO: 139129 - DNA, 80 bp, synthetic construct
  source 1..80: mol_type = other DNA
tgtaaaacttccctttgacaatcagggaaatttactcaactgtgccttggaatcatccacctggcgttaccaggaaacca

SEQ ID NO: 139130 - DNA, 80 bp, synthetic construct
  source 1..80: mol_type = other DNA
cacttcctaaacctcaaagaaaaaccaaaagaaatgccaaccgtcgcccacaggacgttaagttcccgggtggcggtcag

SEQ ID NO: 139131 - DNA, 80 bp, synthetic construct
  source 1..80: mol_type = other DNA
atgctcatcctgctgggccaggcggaggcggcgttggagaagttggtcgtcctgcatgcagctagtgccgccagctccaa

SEQ ID NO: 139132 - DNA, 80 bp, synthetic construct
  source 1..80: mol_type = other DNA
gaggtccattgggtgtggttgatacgggaaagacgatatcgggcttttgatgcgacgtccccgcccgcccagagtcggtg

SEQ ID NO: 139133 - DNA, 80 bp, synthetic construct
  source 1..80: mol_type = other DNA
caccaaacacaaatcccctcaaaacaaaaattggccatggcctagaatttgattcaaacaaggctatggttcctaaacta

SEQ ID NO: 139134 - DNA, 80 bp, synthetic construct
  source 1..80: mol_type = other DNA
accgccgccacgctcaccctatgggacaacggagcaagtgctgtttggaattcaactacagccacaggactctgccacgt

SEQ ID NO: 139135 - DNA, 80 bp, synthetic construct
  source 1..80: mol_type = other DNA
ggggaggtacaggtggtctccacggctacccagtccttcctagcgacctccattaacggtgtcatgtggactgtttatca

SEQ ID NO: 139136 - DNA, 80 bp, synthetic construct
  source 1..80: mol_type = other DNA
gccagcgccgcggcggaagtcgtcgcgcggactctctgggtccgccggggagaccgggccatagtacaactcctcgtgtg

SEQ ID NO: 139137 - DNA, 80 bp, synthetic construct
  source 1..80: mol_type = other DNA
actctcatcaagaacgctgataagccctccttgaaaaggggaaggcctggaggcaggacgctaggggagcagtggaagga

SEQ ID NO: 139138 - DNA, 80 bp, synthetic construct
  source 1..80: mol_type = other DNA
agaccatgactatcgatctgatgaacaatgcgatcgtggacaattacctgcaagtggagaggcagaacggggtgctggag

SEQ ID NO: 139139 - DNA, 80 bp, synthetic construct
  source 1..80: mol_type = other DNA
caaggtggctgcaaggctcctctcggtggaggaagcctgcgacctcactcctccccattccgcccgatcaaagttcgggt

SEQ ID NO: 139140 - DNA, 80 bp, synthetic construct
  source 1..80: mol_type = other DNA
aggaatttgaaaacatattggccgactgtccagggcttttggcttcactagacctttgttaccacttggtgtttcaggaa

SEQ ID NO: 139141 - DNA, 80 bp, synthetic construct
  source 1..80: mol_type = other DNA
cccatggggttctcttatgacacccgctgttttgactccactgtgaccgaaaaggacatcaggaccgaggaagaggtcta

SEQ ID NO: 139142 - DNA, 80 bp, synthetic construct
  source 1..80: mol_type = other DNA
tgccgcgcaagcggcgtctacacgaccagcttcggaaacacactgacgtgctatctcaaagccacagctgctatcaaagc

SEQ ID NO: 139143 - DNA, 80 bp, synthetic construct
  source 1..80: mol_type = other DNA
tacccttggccccttttcgggaatgagggttgcgggtgggcaggttggctcctgtcccctcgtggctctcgcccgagctg

SEQ ID NO: 139144 - DNA, 80 bp, synthetic construct
  source 1..80: mol_type = other DNA
cactaagggactgagggctcatatcgatacgatcgtgttctcagctacgctctgttccgccttatacataggcgatgttt

SEQ ID NO: 139145 - DNA, 80 bp, synthetic construct
  source 1..80: mol_type = other DNA
ctacagccgtgatgggagcctcatacggcttccaatactcaccagcacagcgagttgactacctcttgaacgcttggagg

SEQ ID NO: 139146 - DNA, 80 bp, synthetic construct
  source 1..80: mol_type = other DNA
ggatgaacagcacagggtttacaaaatcctgcggcggccccccctgcagtgtgaccacaaataacggcacctggggatgc

SEQ ID NO: 139147 - DNA, 80 bp, synthetic construct
  source 1..80: mol_type = other DNA
gcgctgcggctgctgttgcttttttgagttttataaaggataaatggagcgaagaaacccatctgagcggggggtacctg

SEQ ID NO: 139148 - DNA, 80 bp, synthetic construct
  source 1..80: mol_type = other DNA
accagtaccagctacatggtgactaacgactgctccaatgccagcatcacctggcagctccaagctgcggtcctccacgt

SEQ ID NO: 139149 - DNA, 80 bp, synthetic construct
  source 1..80: mol_type = other DNA
ctaacaccacattcaggaatgggattggaaacaagggctgaaacatggatgtcatcggaaggagcttggaaacacgccca

SEQ ID NO: 139150 - DNA, 80 bp, synthetic construct
  source 1..80: mol_type = other DNA
aaggaatgttcctggaaatgttttgatacaacttgagctttcacctcgccttaacccctttttggcccatttgtcccaaa

SEQ ID NO: 139151 - DNA, 80 bp, synthetic construct
  source 1..80: mol_type = other DNA
gaagcgcctggtcacctcccccaaccacgcgcgttggtcggggccaaagtcatagcgcaggcgctgtgagattcgcgggc

SEQ ID NO: 139152 - DNA, 80 bp, synthetic construct
  source 1..80: mol_type = other DNA
gaagaggacgtgggttgtcctgacaaagtccactgtatcttctgccttggcggagctcgctactaagaccttcggcagct

SEQ ID NO: 139153 - DNA, 80 bp, synthetic construct
  source 1..80: mol_type = other DNA
aggtccagatcctgtccaacgcgctcaccaaggcgggccaggcggccgccaacgccaagacggtgtacggggaaaatacc

SEQ ID NO: 139154 - DNA, 80 bp, synthetic construct
  source 1..80: mol_type = other DNA
attgtcttgtccgggaagccggcaatcatacccgacagggaagtcctctaccaggagttcgatgagatggaagagtgctc

SEQ ID NO: 139155 - DNA, 80 bp, synthetic construct
  source 1..80: mol_type = other DNA
gacctggtgggatggcctgcccctccgggggtcaaatccttggccccctgcacttgcggagcttcagatctgtttctggt

SEQ ID NO: 139156 - DNA, 80 bp, synthetic construct
  source 1..80: mol_type = other DNA
aggaggtcactggggcgtgatgtttggcttggcttacttttccatgcagggagcgtgggcgaaggttatcgtcatcctct

SEQ ID NO: 139157 - DNA, 80 bp, synthetic construct
  source 1..80: mol_type = other DNA
gaaagcttgcggaggcgatcattgatctaacctaccgccataaggtggtgaaagtcatgagaccagggcctgatggtaaa

SEQ ID NO: 139158 - DNA, 80 bp, synthetic construct
  source 1..80: mol_type = other DNA
tgcgccatgatgtccacgacgcggacccgcggccccagcacggactcgctattcaggggtgcggtgtggaaggccgccag

SEQ ID NO: 139159 - DNA, 80 bp, synthetic construct
  source 1..80: mol_type = other DNA
ctggtcaacgggttcaagccgctggtgagccggtccgctcgcctttaccgcatcctgggggttctggtgcacctgcggat

SEQ ID NO: 139160 - DNA, 80 bp, synthetic construct
  source 1..80: mol_type = other DNA
ttagcacgagatggacgaaccaagaaaacgtggttctggtcctaggggctgcttttttccaattggcctcagtagatctg

SEQ ID NO: 139161 - DNA, 80 bp, synthetic construct
  source 1..80: mol_type = other DNA
atgatcgttggtaggcaagagaaagggaaaagtcttctgttcaaaacagaggatggtgttaacatgtgcaccctcatggc

SEQ ID NO: 139162 - DNA, 80 bp, synthetic construct
  source 1..80: mol_type = other DNA
gcagcaggaacacaggctatgagggatcttggtggaggcaccccattctttggcgtggctggacatgttgtggcacttgg

SEQ ID NO: 139163 - DNA, 80 bp, synthetic construct
  source 1..80: mol_type = other DNA
ccaccgggtgccagatctctgacgccttgcacctgcggcgggtgcgacctttatttggtgacccgcaccgccgatgtcat

SEQ ID NO: 139164 - DNA, 80 bp, synthetic construct
  source 1..80: mol_type = other DNA
gccctgctccgcgctggtgcggtgcctgccgataaacgtcaccagatgcgagtggggggggcagtcggtgaagtggctgt

SEQ ID NO: 139165 - DNA, 80 bp, synthetic construct
  source 1..80: mol_type = other DNA
aaacgggtcatccccgtggaacgcccgtttgcggccggcaaatgccggtcccggggcccccgggccgccgaacggcgtcg

SEQ ID NO: 139166 - DNA, 80 bp, synthetic construct
  source 1..80: mol_type = other DNA
gtgatacagaagttgtcaatcgcgacgatgggtcctgcttatggattccagtactcgcctcagcagcgggtcgaacgtct

SEQ ID NO: 139167 - DNA, 80 bp, synthetic construct
  source 1..80: mol_type = other DNA
tttgtaagcgaagacgacgaggaccgctcagtaccaacagaggataaaaagcaagaccaggacaacgcagaggcaaacga

SEQ ID NO: 139168 - DNA, 80 bp, synthetic construct
  source 1..80: mol_type = other DNA
cggcatatgcccagcaaactagaggccttcttgggactattgtgactagcttgactggcagggataagaacgtggtggcc

SEQ ID NO: 139169 - DNA, 80 bp, synthetic construct
  source 1..80: mol_type = other DNA
cgctcctgcatccatcattaggcttcgaggttacaaagatcttgttagcaatcttgggccccctatacctgcttcagtgg

SEQ ID NO: 139170 - DNA, 80 bp, synthetic construct
  source 1..80: mol_type = other DNA
cattccgacacggaggtggggccctccccggccggccgggagaacccggaatccgcgtccggcgtggctatcgcggctcg

SEQ ID NO: 139171 - DNA, 80 bp, synthetic construct
  source 1..80: mol_type = other DNA
tcacggaacagttgttattgaactctcctactctgggagtgatggcccctgcaaaattccgattgtttccgttgcgagcc

SEQ ID NO: 139172 - DNA, 80 bp, synthetic construct
  source 1..80: mol_type = other DNA
gatggtatctatagaattatgcagagaggactgttgggcaggtcccaagtaggggtaggagttttccaagaaaacgtgtt

SEQ ID NO: 139173 - DNA, 80 bp, synthetic construct
  source 1..80: mol_type = other DNA
ggtgttgcggagattgacggtgccggcgtgcgtgagccccaggtccacggggcaggcgacgattcgcgtgggcagcaccc

SEQ ID NO: 139174 - DNA, 80 bp, synthetic construct
  source 1..80: mol_type = other DNA
ccccgccgacctgcctcacctggcccaccagcgcgccccgccaggccggcagaccgagcggctgggcgaggcctgtggcc

SEQ ID NO: 139175 - DNA, 80 bp, synthetic construct
  source 1..80: mol_type = other DNA
ggaatcgctctggggctcatggctctcaaactaataacacaatttgaaacataccaattatggacagcattaatctcctt

SEQ ID NO: 139176 - DNA, 80 bp, synthetic construct
  source 1..80: mol_type = other DNA
caagtagggggttatggagctgcctgcttggttctgacggttggccattgtatcctaggcagaaagacatggagcttatg

SEQ ID NO: 139177 - DNA, 80 bp, synthetic construct
  source 1..80: mol_type = other DNA
ctgtcattggatggatgctcggaagcaacaccatgcagcgtgtcgtgtttgccgtgttactgcttttggtagctccagct

SEQ ID NO: 139178 - DNA, 80 bp, synthetic construct
  source 1..80: mol_type = other DNA
cgccaaacagaagcacctccgagacaacgccgctatttaactccaccaaggcccgatccgcggcggagcaccgccttttt

SEQ ID NO: 139179 - DNA, 80 bp, synthetic construct
  source 1..80: mol_type = other DNA
attttgtgactcaaaactcatgtcagcggccataaaagacaacagagccgtccatgccgatatgggttattggatagaaa

SEQ ID NO: 139180 - DNA, 80 bp, synthetic construct
  source 1..80: mol_type = other DNA
cccgaggcgtgcggcgaggtcgccgccggggccggggtcgatacggccccggcggcgccgactccacaccaaacacccgc

SEQ ID NO: 139181 - DNA, 80 bp, synthetic construct
  source 1..80: mol_type = other DNA
ccagggcattatccaccgcgacattaagaccgaaaatatttttattaacacccccgaggacatttgcctggtggactttg

SEQ ID NO: 139182 - DNA, 80 bp, synthetic construct
  source 1..80: mol_type = other DNA
tacaactggtcaacaccaatggctcgtggcacattaatagcactgccctgaactgtaatgattccataaacaccgggttc

SEQ ID NO: 139183 - DNA, 80 bp, synthetic construct
  source 1..80: mol_type = other DNA
taggtgctgctgcgctctgctcggctatgtatgttggtgacttgtgcggaggtgtcttccttgcaggccagctcttcacg

SEQ ID NO: 139184 - DNA, 80 bp, synthetic construct
  source 1..80: mol_type = other DNA
aacgagagtgatcccgaaggggcactctggtaagccaactcattcacaaaataaaggaaaataaaaaatcaaacaaggca

SEQ ID NO: 139185 - DNA, 80 bp, synthetic construct
  source 1..80: mol_type = other DNA
atggtgggcactgcagcggcttgctcggctttgtatctgggtgatctgtgcggagccgtcttcctagcggggcagctctt

SEQ ID NO: 139186 - DNA, 80 bp, synthetic construct
  source 1..80: mol_type = other DNA
tagttcatcttagtaatggagttggaaactgtgctgcaaagttttcagagcgttcgccagctcttgcagtatacctctaa

SEQ ID NO: 139187 - DNA, 80 bp, synthetic construct
  source 1..80: mol_type = other DNA
atgatgatggcgtctaaggacgcccctcaaagcgctgatggcgcaagcggcctggtgccggaggttaatactgaccttat

SEQ ID NO: 139188 - DNA, 80 bp, synthetic construct
  source 1..80: mol_type = other DNA
cgaatccggcggtccgacgtcccctggtgagccggccccctcagagacaggttccgcctcctctatgccccccctcgagg

SEQ ID NO: 139189 - DNA, 80 bp, synthetic construct
  source 1..80: mol_type = other DNA
tcaatgtcctacattggaattggaagaaggagaaggcatagcccgattgggcgcccactctcctgagcgccacccaaggg

SEQ ID NO: 139190 - DNA, 80 bp, synthetic construct
  source 1..80: mol_type = other DNA
ggatagatctgaagccaaagaggggttaaaaagaggagaaacgactaaacacgcagtgtcgagaggaacggccaaactga

SEQ ID NO: 139191 - DNA, 80 bp, synthetic construct
  source 1..80: mol_type = other DNA
acctcccagctataattgagagactacacggcctcgaggccttctcactgcacggttacactccaaccgagctcactcgg

SEQ ID NO: 139192 - DNA, 80 bp, synthetic construct
  source 1..80: mol_type = other DNA
ttagcgtaatataacagaattttttacgatgatatattttatgttgatattttccaattcgacgcaaaaattcatctgcc

SEQ ID NO: 139193 - DNA, 80 bp, synthetic construct
  source 1..80: mol_type = other DNA
caggggagggcttcatattactgataaaggactacaaataggagaagatgaaaataacgaggatggtgaagaagagatat

SEQ ID NO: 139194 - DNA, 80 bp, synthetic construct
  source 1..80: mol_type = other DNA
tgtcagggggcactacagcttacaatacccggagctttacgtccctcttttcatctggggcgcaacagaaaatccagctt

SEQ ID NO: 139195 - DNA, 80 bp, synthetic construct
  source 1..80: mol_type = other DNA
aattcagcaacccttacctatgccactgttggatcgtcggtggacaccgctgcggctgctgccgcttctgccgctgcctc

SEQ ID NO: 139196 - DNA, 80 bp, synthetic construct
  source 1..80: mol_type = other DNA
gaagatttttctgctgtgcgtaacttgctggaacagagctctaacagtacctccaaaaccaagaggttactgttgagctc

SEQ ID NO: 139197 - DNA, 80 bp, synthetic construct
  source 1..80: mol_type = other DNA
atgaagaaaagtacatggactacctatccacccaagttcgctacttgggtgaagaagggtctacacctggagtgctgtaa

SEQ ID NO: 139198 - DNA, 80 bp, synthetic construct
  source 1..80: mol_type = other DNA
gagctcccattccaaatgcgcaaaatgttaaaccctgataaacgttctaataaaaacatcaaatcatggttggttactgt

SEQ ID NO: 139199 - DNA, 80 bp, synthetic construct
  source 1..80: mol_type = other DNA
caaaaagactgtcagtgtctccgtatacagatttaaggggtctatccttcaggggtattccgcggtcctcctcgtacagg

SEQ ID NO: 139200 - DNA, 80 bp, synthetic construct
  source 1..80: mol_type = other DNA
cccccgtccgatgtgggggtcgcaccgccggagcagctctatctgaaacacataggtctgcacctgcccgagcagggcta

SEQ ID NO: 139201 - DNA, 80 bp, synthetic construct
  source 1..80: mol_type = other DNA
gtgtccatcaataatacctatagacacgttgggaaatggatagacgtcaggggtaacgacagcagaatatttcatattag

SEQ ID NO: 139202 - DNA, 80 bp, synthetic construct
  source 1..80: mol_type = other DNA
cggcacgtagacttaatggtgggcactgccactgtctgctcagctctttacatcggagacctctgcggaggtgtcttcct

SEQ ID NO: 139203 - DNA, 80 bp, synthetic construct
  source 1..80: mol_type = other DNA
gtgaccttgacccccaagcccgcgtggccatcaagtccctcaccgagaggctttatgtcgggggccctcttaccaattca

SEQ ID NO: 139204 - DNA, 80 bp, synthetic construct
  source 1..80: mol_type = other DNA
gaggggatggtgtaatgcacactacatgcacctgcggggcggaaatagctggccacatcaagaacggctccatgagaatc

SEQ ID NO: 139205 - DNA, 80 bp, synthetic construct
  source 1..80: mol_type = other DNA
cacctacacatggggagagaatgagacagatgtcttcctactgaacagcacccgaccgccgcagggctcatggttcggct

SEQ ID NO: 139206 - DNA, 80 bp, synthetic construct
  source 1..80: mol_type = other DNA
gcgtggccgaaacttgaacaattttggaccaaacacctgtggaacttcgtcagtggtattcaatacctggctggcctgtc

SEQ ID NO: 139207 - DNA, 80 bp, synthetic construct
  source 1..80: mol_type = other DNA
aaccaccgtaaccggagggacagtggcctacaacgtccacagcttcgcctcgttgttcagtcaggggcccaagcagaata

SEQ ID NO: 139208 - DNA, 80 bp, synthetic construct
  source 1..80: mol_type = other DNA
tggattttctgatcagcgactgaaacaaatctatcagtttgagtacgaaagtctgttgcgccgtagtgcgctagcggcca

SEQ ID NO: 139209 - DNA, 80 bp, synthetic construct
  source 1..80: mol_type = other DNA
tggtcgtggggttgtacggaaatggcctaaaaactaatgagacctacgtcagcagcattgctcaaggggaagcggagaag

SEQ ID NO: 139210 - DNA, 80 bp, synthetic construct
  source 1..80: mol_type = other DNA
cgaaaacaagggtgagggccgggtgcgtggcttgcgggcccacagcctcccccccgatatgaggagccaaaacggcgtcc

SEQ ID NO: 139211 - DNA, 80 bp, synthetic construct
  source 1..80: mol_type = other DNA
gaggaagatcaactgctatgtttaaatatagaagcacaactccgtgtggaggtataacaaaattcgcaggagaaaataac

SEQ ID NO: 139212 - DNA, 80 bp, synthetic construct
  source 1..80: mol_type = other DNA
ccccttctacggcagagccatcccccttgttcttataaagggcggtaggcatctcatcttctgccactctaagaaaaaat

SEQ ID NO: 139213 - DNA, 80 bp, synthetic construct
  source 1..80: mol_type = other DNA
gggttcgcgttaggttggtttcggtgacggtaaaggggcgcgctccgggttgggcgcttgccagggttctcttcaggctc

SEQ ID NO: 139214 - DNA, 80 bp, synthetic construct
  source 1..80: mol_type = other DNA
ggttgcgggggggaagtatgttcaagcatgcctccttactctgggtaaatggactggcacgtacatatatgaccaccttg

SEQ ID NO: 139215 - DNA, 80 bp, synthetic construct
  source 1..80: mol_type = other DNA
cataggccaggctgaggcggcgctggagaacctcatcgttctcaacgccgcctcggcagccagtaagtgtggctggggtt

SEQ ID NO: 139216 - DNA, 80 bp, synthetic construct
  source 1..80: mol_type = other DNA
cacatttcatacaaaccaagcaaaactgatgaaaactctaaggctatgttgggtcaacaagcaatgccaaacagacccaa

SEQ ID NO: 139217 - DNA, 80 bp, synthetic construct
  source 1..80: mol_type = other DNA
ccagagccagggtaccacaaagcattgtggagggtctctgcggaggaatacgttgaggtcgcacgggtggtggacttcca

SEQ ID NO: 139218 - DNA, 80 bp, synthetic construct
  source 1..80: mol_type = other DNA
cataagaaacttgctgcttttacctggttcgtacacgtacgaatggaactttagaaaagatgtaaatatgatacttcaaa

SEQ ID NO: 139219 - DNA, 80 bp, synthetic construct
  source 1..80: mol_type = other DNA
atcgtcgttgccgtgcgagcggcgtgctgaccaccagctgcggcaacaccctgacctgctatattaaagcgcgtgcggcg

SEQ ID NO: 139220 - DNA, 80 bp, synthetic construct
  source 1..80: mol_type = other DNA
gcgtcgttcccaggtgtggcaggcgcgggtcgggcccatacgcccaccgcccccacgcgccggtcacccccccccaacaa

SEQ ID NO: 139221 - DNA, 80 bp, synthetic construct
  source 1..80: mol_type = other DNA
ttaccccacccaggagctgccgcagcgcagggcaggcgttgcacgtgtccgggaccaggcgctccaagacggccccggcc

SEQ ID NO: 139222 - DNA, 80 bp, synthetic construct
  source 1..80: mol_type = other DNA
ccggatgtccgcgtttgaccgcgggccggcgggtgcggctggccgcacgcgaaccgccgggtacctggacgcgctgctta

SEQ ID NO: 139223 - DNA, 80 bp, synthetic construct
  source 1..80: mol_type = other DNA
caaaaactccgacatgtttgtctttaaaaaatctaccacagaaatgtccatattatttaaataaaacatcaggggctgag

SEQ ID NO: 139224 - DNA, 80 bp, synthetic construct
  source 1..80: mol_type = other DNA
atttcagtctcacaacgtcacttccgcgcgccttttcactttcccacacacgcccttcgcccgccctcgcgccaccccgc

SEQ ID NO: 139225 - DNA, 80 bp, synthetic construct
  source 1..80: mol_type = other DNA
acccgtaccgaacgtggcagtactggggtagctatcgcacagcgcccactggctctgcagcctcactgatcaatggagtt

SEQ ID NO: 139226 - DNA, 80 bp, synthetic construct
  source 1..80: mol_type = other DNA
ctgtgccagggcaaaagcccccccaccatcgtgggacaccatgtggaagtgcctcatccgcctcaagcctacactacaag

SEQ ID NO: 139227 - DNA, 80 bp, synthetic construct
  source 1..80: mol_type = other DNA
aacattgaagagattggcctgtccactacaggggagatccccttttacggcaaagctataccattggaggccatcaaggg

SEQ ID NO: 139228 - DNA, 80 bp, synthetic construct
  source 1..80: mol_type = other DNA
cctccccctaggaggaagaggaagacggtcgtactctctgagtccaccgtttcagaggccttggcggacttggcggcaaa

SEQ ID NO: 139229 - DNA, 80 bp, synthetic construct
  source 1..80: mol_type = other DNA
gggagggcaaaggacgccttcggacggatgtgcggggagctcgcagcggatagacaacgtccaccctcggttccgccgat

SEQ ID NO: 139230 - DNA, 80 bp, synthetic construct
  source 1..80: mol_type = other DNA
ggcctcgccgacctcatggggtacattcccgtcctaggcggccccttaggtggtgtcgcagcagccctagcacacggtgt

SEQ ID NO: 139231 - DNA, 80 bp, synthetic construct
  source 1..80: mol_type = other DNA
aaatcagttccactgaaacaggctacggcagcactccggaaaattaagaaggcagtgagcaccctgatggtaggtctgca

SEQ ID NO: 139232 - DNA, 80 bp, synthetic construct
  source 1..80: mol_type = other DNA
cctgtacggcaatgagggctgcggttgggcgggatggctcctgtccccccgcggttctcggcctacttggtgccccactg

SEQ ID NO: 139233 - DNA, 80 bp, synthetic construct
  source 1..80: mol_type = other DNA
atcttcctactggctctcttgtcttgtatgactgtaccagcgtccgctatacaggttaggaacaccagtcagacctacat

SEQ ID NO: 139234 - DNA, 80 bp, synthetic construct
  source 1..80: mol_type = other DNA
aaaactgaaaccgggataaaaactacggatggagaaccggactccacacatcaaacacaagaggatgtcagcccagaaac

SEQ ID NO: 139235 - DNA, 80 bp, synthetic construct
  source 1..80: mol_type = other DNA
tgccgacggcgggtgctcaggaggtgcttatgacataataatttgtgacgagtgccactccacggatgccacatccatct

SEQ ID NO: 139236 - DNA, 80 bp, synthetic construct
  source 1..80: mol_type = other DNA
gctttaacaaagacggaactgacagacatcactatgaggttactattctagatgggttcacaaatgcagggcagacaaaa

SEQ ID NO: 139237 - DNA, 80 bp, synthetic construct
  source 1..80: mol_type = other DNA
tattcatggaagacatggggaaaagcaaaaatctttaccccagaagcaagaaatagcacatttctaatagacggaccaga

SEQ ID NO: 139238 - DNA, 80 bp, synthetic construct
  source 1..80: mol_type = other DNA
aggataccaaaatgaaaccatgttacggttcatttgctagacccaccaatgaaaaaggagggcaagcaaaattaaagctc

SEQ ID NO: 139239 - DNA, 80 bp, synthetic construct
  source 1..80: mol_type = other DNA
tgatgatgttaaagagttagattttcccagtggatctaatcaaactttagttggcccccctggatcaaaagttgattggt

SEQ ID NO: 139240 - DNA, 80 bp, synthetic construct
  source 1..80: mol_type = other DNA
gctcccataaccgcgtacacccagcaaacccgagggctactgggcgctatagtggtgagcatgacggggcgcgacaagac

SEQ ID NO: 139241 - DNA, 80 bp, synthetic construct
  source 1..80: mol_type = other DNA
aaatttgggccaacgcaaaactgatgaaaaccataaaaatggaatgcaacagaaagtcgaacaaaagccttcaaaaaggc

SEQ ID NO: 139242 - DNA, 80 bp, synthetic construct
  source 1..80: mol_type = other DNA
gctcagggaaagagcccgaagaaaaagactttgaaggttaaggtcccactcccggcgcggaaacccggtggacctgtacc

SEQ ID NO: 139243 - DNA, 80 bp, synthetic construct
  source 1..80: mol_type = other DNA
ttcccgagatcgtcgcgtgtcactccctccgggaacacgcgcacgtctgccggctgcgcaataccgcgtccgtcaaggtg

SEQ ID NO: 139244 - DNA, 80 bp, synthetic construct
  source 1..80: mol_type = other DNA
taattctaagtgttggttgcccgccacgcccaccatggcggtgccgaatgcgtccgtgccgatccaggggtttcgcaaac

SEQ ID NO: 139245 - DNA, 80 bp, synthetic construct
  source 1..80: mol_type = other DNA
gtgttttgagggtcccgaagagcatgaaatactcaatgacaatggtgaaacagtaaagtgtagatctccgggcggagcaa

SEQ ID NO: 139246 - DNA, 80 bp, synthetic construct
  source 1..80: mol_type = other DNA
tgtactgtggtggtcccatgtacaactcacggggccaatcatgcgggtatcgaagatgccgcgctagtggtgtccttccc

SEQ ID NO: 139247 - DNA, 80 bp, synthetic construct
  source 1..80: mol_type = other DNA
tttcagctgggcctcctggtgatgtttctggccacccaggaagtccttcgcaagaggtggacggccagattgaccattcc

SEQ ID NO: 139248 - DNA, 80 bp, synthetic construct
  source 1..80: mol_type = other DNA
gggatatgatgatgaactggtcacctacagcggccttggtggcatcgcagttactccggatcccacaagccatcgtggac

SEQ ID NO: 139249 - DNA, 80 bp, synthetic construct
  source 1..80: mol_type = other DNA
acgagctggcctttccggtggccgggcacccggaggacctggtcatccagatatcctgtctgctctacgacctgtccacc

SEQ ID NO: 139250 - DNA, 80 bp, synthetic construct
  source 1..80: mol_type = other DNA
gggcgagggagcagtgcagtggatgaaccggttgatagccttcgcctcccggtggaaccatgtttcccccacgcactatg

SEQ ID NO: 139251 - DNA, 80 bp, synthetic construct
  source 1..80: mol_type = other DNA
aatgctggacccctctgacaccgaacctcgcagtgtcgtaccctggcgctcttactgcgggtctcaggacccatgtggac

SEQ ID NO: 139252 - DNA, 80 bp, synthetic construct
  source 1..80: mol_type = other DNA
gggcgaaaggactagaggttagaggagaccccgcggtctgaagtgcacggcccagcctggctgaagctgtaggtcaggtg

SEQ ID NO: 139253 - DNA, 80 bp, synthetic construct
  source 1..80: mol_type = other DNA
caagctgctgttggagaacgatgccttctccagggtgaacctgaacggcatctttgacatggatgtctcggtgtacaaga

SEQ ID NO: 139254 - DNA, 80 bp, synthetic construct
  source 1..80: mol_type = other DNA
ttcttcaaatatggccattgctactgctgctcttgcttttgccgccccgggcatatgcctatgacggctcacaggcgggc

SEQ ID NO: 139255 - DNA, 80 bp, synthetic construct
  source 1..80: mol_type = other DNA
aaaaagctcatgaggaaggtgtttgcggtataagatcagttacaaggctagagaacataatgtggaaacaaataacccca

SEQ ID NO: 139256 - DNA, 80 bp, synthetic construct
  source 1..80: mol_type = other DNA
agcacgccttatcgtataccctgatctaggcgtcagagtgtgcgaaaagaaggctttgttcgacatcacccgcaagctgc

SEQ ID NO: 139257 - DNA, 80 bp, synthetic construct
  source 1..80: mol_type = other DNA
gctgtggagccactgctacctcttgcagctggccaactacatcgcccaccactcggacgtgatcgaggacgtaagcggcg

SEQ ID NO: 139258 - DNA, 80 bp, synthetic construct
  source 1..80: mol_type = other DNA
tctcatatgacacccgctgctttgactccacggtgactgaaagggacatcagggtcgaagaagagatctaccaatgctgc

SEQ ID NO: 139259 - DNA, 80 bp, synthetic construct
  source 1..80: mol_type = other DNA
gccctattggcattcttcaagttcacagcaatcgctccgactcgagcagtgttggaaagatggagaggtgtcaacaaaca

SEQ ID NO: 139260 - DNA, 80 bp, synthetic construct
  source 1..80: mol_type = other DNA
ccgcagctcccgtagatcgcgctgggccctgagggcgtcgaaatgtacgccccgcaaaaacagacagaagtcctttggcg

SEQ ID NO: 139261 - DNA, 80 bp, synthetic construct
  source 1..80: mol_type = other DNA
cgtggttgttgccactgacgccctaatgactggatacacgggcgacttcgactccgtagtggattgcaatgtcgcagtga

SEQ ID NO: 139262 - DNA, 80 bp, synthetic construct
  source 1..80: mol_type = other DNA
gcaacaacagcgccaaggctaccgctcgtggcgcgggcacaagaacgccatagttgcttgcttgcaagactgtggtggca

SEQ ID NO: 139263 - DNA, 80 bp, synthetic construct
  source 1..80: mol_type = other DNA
agacagaagtcctttggggtcagggtatcgtcgtgtccccagaagcgcacgcgtatgcagtttagggtcagcagcatgtg

SEQ ID NO: 139264 - DNA, 80 bp, synthetic construct
  source 1..80: mol_type = other DNA
acgggacccgcgcgcctgcctttatacgcggaccccagcaccacgagccgttctgtgacgcgaatctacacgaccgcggg

SEQ ID NO: 139265 - DNA, 80 bp, synthetic construct
  source 1..80: mol_type = other DNA
ccatctcatgcctttcctctcccataaatctcagaggtatattggctgggtgggcaacatgcaattgcaagttgtcttgg

SEQ ID NO: 139266 - DNA, 80 bp, synthetic construct
  source 1..80: mol_type = other DNA
ggttccgcagaccactatggctctcccgggagggggggtcctggaggctgtacaaaccggtgagtacaccggaattgccg

SEQ ID NO: 139267 - DNA, 80 bp, synthetic construct
  source 1..80: mol_type = other DNA
gctgcgtggtgtgggtcgccggatgcgtgcgggatgatgcggggcgtggtttgttgtgaggagccacgagggaccgtagc

SEQ ID NO: 139268 - DNA, 80 bp, synthetic construct
  source 1..80: mol_type = other DNA
atagacactaccatcatggcaaagaatgaggtcttctgcgtgaagcccgaaaaggggggccgcaagcccgctcgtcttat

SEQ ID NO: 139269 - DNA, 80 bp, synthetic construct
  source 1..80: mol_type = other DNA
agcaggagtggcaggcgcgctcgtggcctttaaggtcatgagcggcgagatgccctccaccgaggatctggtcaacttac

SEQ ID NO: 139270 - DNA, 80 bp, synthetic construct
  source 1..80: mol_type = other DNA
acctagcggtcgccgtggagcccatcatcttcagtccgatggagaagaaagtcatcgtctggggagcggagacggctgca

SEQ ID NO: 139271 - DNA, 80 bp, synthetic construct
  source 1..80: mol_type = other DNA
gcggcttccaagctggatttatccagctggttcaccgccggctacagcgggggagacgtttatcacagcgcgtctcgtgc

SEQ ID NO: 139272 - DNA, 80 bp, synthetic construct
  source 1..80: mol_type = other DNA
cgaggtgcctggtcgattacccctacaggctctggcactacccctgcacagtcaactttaccatcttcaaggtgagaatg

SEQ ID NO: 139273 - DNA, 80 bp, synthetic construct
  source 1..80: mol_type = other DNA
tgactctacagtcactgagagcgatatccgtacggaggaggcaatctaccagtgttgtgacctggacccccaagcccgcg

SEQ ID NO: 139274 - DNA, 80 bp, synthetic construct
  source 1..80: mol_type = other DNA
caggcggcggcgcgctatcagcaagaggctgggaggtggctttctgcctgctctgatccccatcatagccgcagcgatcg

SEQ ID NO: 139275 - DNA, 80 bp, synthetic construct
  source 1..80: mol_type = other DNA
atgcccggtcccgctggttctggttctgcctactcctactatcagtaggggtaggcatctacctccttcccaaccgatga

SEQ ID NO: 139276 - DNA, 80 bp, synthetic construct
  source 1..80: mol_type = other DNA
cttacactgacgtaatgaccaaaggtgtaaaaaccccgccaaaaaaaaacacacacgccctaggtgtttttcgtaaaaac

SEQ ID NO: 139277 - DNA, 80 bp, synthetic construct
  source 1..80: mol_type = other DNA
ccacatatgggaaattcttggccgatggggggtgctccggaggagcgtatgacatcatcatctgtgatgagtgccactcc

SEQ ID NO: 139278 - DNA, 80 bp, synthetic construct
  source 1..80: mol_type = other DNA
ggggtaaatttcgcaacagggaacctacctggttgctctttttctatcttcttgcttgctcttttgtcgtgcgccacagt

SEQ ID NO: 139279 - DNA, 80 bp, synthetic construct
  source 1..80: mol_type = other DNA
aaaaacagctgctgcatgtctgcggcggagccggccggggccgccacgtacgccccgtacggattggcggcttcgacgtg

SEQ ID NO: 139280 - DNA, 80 bp, synthetic construct
  source 1..80: mol_type = other DNA
gtgccatatgcacctgggtgccagaaggggcaccttccagccgtaccagtgcaactttagccagaccaagctgctgttgg

SEQ ID NO: 139281 - DNA, 80 bp, synthetic construct
  source 1..80: mol_type = other DNA
catggagcgggcaataagtcgcttgctgggaagaagcgtccttggctacaatcttacacaaatgtggaccaggacctggt

SEQ ID NO: 139282 - DNA, 80 bp, synthetic construct
  source 1..80: mol_type = other DNA
ttggaaactacaaagagagatctaggaatgtccaaggaaccaggtgttgtttctccaactagctatttggatgtggattt

SEQ ID NO: 139283 - DNA, 80 bp, synthetic construct
  source 1..80: mol_type = other DNA
cggacgaaaaaaatcggttaatgacacttgttggattagctgtgtcgttgatttaaaattatttaacgggagtctaatgg

SEQ ID NO: 139284 - DNA, 80 bp, synthetic construct
  source 1..80: mol_type = other DNA
ggcactgactctatcaccatattataagcgctatatcagctggtgcttatggtggcttcagtactttctgaccagagtgg

SEQ ID NO: 139285 - DNA, 80 bp, synthetic construct
  source 1..80: mol_type = other DNA
attcaaggtcagaatgttcgtaggaggacatgaacatcgattctcagccgcctgcaactggacgaggggagagcgctgtg

SEQ ID NO: 139286 - DNA, 80 bp, synthetic construct
  source 1..80: mol_type = other DNA
ctacaaggtggcgtccaatggcattcagtacaccgacagaaagtggtgttttgatgggccgcgtacgaatgccatactgg

SEQ ID NO: 139287 - DNA, 80 bp, synthetic construct
  source 1..80: mol_type = other DNA
cacggcaatgaaacacctgactagcttcaaaaaggaattaggaacaatgatcaacgtggttaacaatcggggcacaaaaa

SEQ ID NO: 139288 - DNA, 80 bp, synthetic construct
  source 1..80: mol_type = other DNA
agacccctagaatgtgtaccagagaagaattcacaagaaaagtgagaagcaatgcagccttgggggccatatttactgat

SEQ ID NO: 139289 - DNA, 80 bp, synthetic construct
  source 1..80: mol_type = other DNA
ccagccacgtgggaggcgccaacctatccccaaggttaggcgctccactggccgatcctggcagcagccgggatatcctt

SEQ ID NO: 139290 - DNA, 80 bp, synthetic construct
  source 1..80: mol_type = other DNA
tcaagatcatgagcggagaggcccccaccaccgaggatttagtcaaccttctacctgccatcctctcgccaggagctctc

SEQ ID NO: 139291 - DNA, 80 bp, synthetic construct
  source 1..80: mol_type = other DNA
tggacgcggagacccacatcactggtggaatcgctggtagtaccgccggcgcttttgtcggcctctttaggccaggatcc

SEQ ID NO: 139292 - DNA, 80 bp, synthetic construct
  source 1..80: mol_type = other DNA
atccacctgccttgcccatatgggcgagacctgactacaatccacctctaatagagacttggaaagctccggattacgac

SEQ ID NO: 139293 - DNA, 80 bp, synthetic construct
  source 1..80: mol_type = other DNA
ggaagttattcgggatatacgagttaaaaatagggtcgttttttcaggtaactgtacaaatctctctgaggcagcccggg

SEQ ID NO: 139294 - DNA, 80 bp, synthetic construct
  source 1..80: mol_type = other DNA
ggatcctaactctatgtgcactgtcagaagtcactggcttatcccctgatgtgatacaatcacaatcttatttctcattt

SEQ ID NO: 139295 - DNA, 80 bp, synthetic construct
  source 1..80: mol_type = other DNA
gtggtgtaatgggcgggaagtaccttcaggctgcacttttgcggctaggggcctggactggcacatacatctatgaccat

SEQ ID NO: 139296 - DNA, 80 bp, synthetic construct
  source 1..80: mol_type = other DNA
gcgttggccgtgagccacttttcaatcgtcaggccgggctggtgtgtcagccgtcggtattcgtcaaactccttgaccga

SEQ ID NO: 139297 - DNA, 80 bp, synthetic construct
  source 1..80: mol_type = other DNA
atggctcataatacggcgtccaccctagaagctatgttgagaaatgacaccaacgaccagtcatttaatgactacctatg

SEQ ID NO: 139298 - DNA, 80 bp, synthetic construct
  source 1..80: mol_type = other DNA
gcctagtgttactggcagccatcaccatcttcacctttacaccggcctataagatcctcctctgccgctgtctgtggtgg

SEQ ID NO: 139299 - DNA, 80 bp, synthetic construct
  source 1..80: mol_type = other DNA
ccccgccgccgcggagatggaggttcagatcgtacgcaacgacccgccgctacgatacgataccaacctccccgtggatc

SEQ ID NO: 139300 - DNA, 80 bp, synthetic construct
  source 1..80: mol_type = other DNA
gaatctacacgaccgcgggctcgtaggcgcgactaacgcccaacccaacggcacacaccccccaccccgcgcgtaacccc

SEQ ID NO: 139301 - DNA, 80 bp, synthetic construct
  source 1..80: mol_type = other DNA
ttactgttccgcggtgagcaacacgcctgcttaaaagcgacggcgtgcaggaactgggacttccgcttctgcgggagctt

SEQ ID NO: 139302 - DNA, 80 bp, synthetic construct
  source 1..80: mol_type = other DNA
acggtggtcctcactgattcaactgtatctgctgccttggctgagcttgccaccaagagctttggcagctcatcaactcc

SEQ ID NO: 139303 - DNA, 80 bp, synthetic construct
  source 1..80: mol_type = other DNA
tgaggtgggagtggatcatactcctcttccttctcttagccgatgctagagtctgcgcgtgcatgtggatgctgattatg

SEQ ID NO: 139304 - DNA, 80 bp, synthetic construct
  source 1..80: mol_type = other DNA
attctatatccatatttctaaattatctaatatttccctataaatatttatatctatttcatactatatttatctatagt

SEQ ID NO: 139305 - DNA, 80 bp, synthetic construct
  source 1..80: mol_type = other DNA
catctcggcttataaggtcgttaaattgacaagttacaacaaatagtccgttattgcgtaaatatgcaatagccgcgaac

SEQ ID NO: 139306 - DNA, 80 bp, synthetic construct
  source 1..80: mol_type = other DNA
ccgaatactgcacctcgctgcgaaccagcccggaggtgctggtgaccggggtgcgcgtgcgcgcgcgagacagggtcatc

SEQ ID NO: 139307 - DNA, 80 bp, synthetic construct
  source 1..80: mol_type = other DNA
tagtacggaaaaaactatgctacctgtgagccccgtccaaggacgttaaaagaagtcaggccatcataaatgccatagct

SEQ ID NO: 139308 - DNA, 80 bp, synthetic construct
  source 1..80: mol_type = other DNA
ctaaacctcactggctgcccagagaggatgtctgcttgcaagcggttaacagactttggacaaggatggggcccgctaac

SEQ ID NO: 139309 - DNA, 80 bp, synthetic construct
  source 1..80: mol_type = other DNA
cgagaagagggcgcttcatgacgtcgtcaaaaaactctctgaggtcgtgatgggagacgcttatggtttccaatactccc

SEQ ID NO: 139310 - DNA, 80 bp, synthetic construct
  source 1..80: mol_type = other DNA
aggagtcatgggggggaactactatgcttttgtgggtgttatgtataatctctggaagatgaagactggacgcaggtgga

SEQ ID NO: 139311 - DNA, 80 bp, synthetic construct
  source 1..80: mol_type = other DNA
ttagggaaaagagaggaccaatggtgtggctcactcataggattgaccagcagggcaacatgggcaaagaacataaaagt

SEQ ID NO: 139312 - DNA, 80 bp, synthetic construct
  source 1..80: mol_type = other DNA
gtttccgtggcccacgaccacaccggacagagatattactacctcactcgtgaccctgttataccactatctcgggctgc

SEQ ID NO: 139313 - DNA, 80 bp, synthetic construct
  source 1..80: mol_type = other DNA
ggttgggcagtgtcaccaacgatgtcatcttcacgcaccccatcaccaaatacattgccacatgcatggccgcggaccta

SEQ ID NO: 139314 - DNA, 80 bp, synthetic construct
  source 1..80: mol_type = other DNA
taattacctctgtcaggttatccaactgtttacatagatactccacggggtctacacctaactttactgttagggataca

SEQ ID NO: 139315 - DNA, 80 bp, synthetic construct
  source 1..80: mol_type = other DNA
ccatgatggcattcagtgccgccctcaccagtccgttgtcgaccagtaccaccatccttctcaacatcatgggaggctgg

SEQ ID NO: 139316 - DNA, 80 bp, synthetic construct
  source 1..80: mol_type = other DNA
aatgtatcgacatgctggtatccaatatcgcccacgctggctgcccctaacgcttcagtgcccgtgagggggtttcgcaa

SEQ ID NO: 139317 - DNA, 80 bp, synthetic construct
  source 1..80: mol_type = other DNA
gacaacaatgaagtggaggtgatgacaaaactcggagagaggaagattctcaggccgcgctggacagacgctcgggtgta

SEQ ID NO: 139318 - DNA, 80 bp, synthetic construct
  source 1..80: mol_type = other DNA
ctccttgacaccatgcacgtgcggcagttcggacctttatttggtcacgagacatgccgatgtcattccggtgcgccggc

SEQ ID NO: 139319 - DNA, 80 bp, synthetic construct
  source 1..80: mol_type = other DNA
aagccacctgttctgacaacacgcaggcctttattaaaacctgaagatgttgtaattactaagggaagcaacaaaactct

SEQ ID NO: 139320 - DNA, 80 bp, synthetic construct
  source 1..80: mol_type = other DNA
ggcccgagtccgcgacgtagcgaaacacgtccatctcctggcgcccgacgatgactccgccgtcgcagcgctccaggtaa

SEQ ID NO: 139321 - DNA, 80 bp, synthetic construct
  source 1..80: mol_type = other DNA
ggcaattgcgctcactgagtcgaacgtctccagcgccctggctgatctggcagcaaaggccttcagccagccgagcgctg

SEQ ID NO: 139322 - DNA, 80 bp, synthetic construct
  source 1..80: mol_type = other DNA
acatggtgggatgggcgctgaaatgggagttcgtcatcctcgttttcctcctcctggcagacgcacgcgtgtgcgttgcc

SEQ ID NO: 139323 - DNA, 80 bp, synthetic construct
  source 1..80: mol_type = other DNA
ccacatggtccatccatgcaggaggagagtggatgacaacagaggacatgctggaggtttggaaccgcgtttggatagag

SEQ ID NO: 139324 - DNA, 80 bp, synthetic construct
  source 1..80: mol_type = other DNA
ggcgggctatggagcaggagtggctggagcactcgtggccttcaaggtcatgagcggccagacgccctctaccgaggatc

SEQ ID NO: 139325 - DNA, 80 bp, synthetic construct
  source 1..80: mol_type = other DNA
catgtttgactcttcagtgagctggcctggaaatgacaggttactatctcctaacgaatttgaaataaagcgtactgtgg

SEQ ID NO: 139326 - DNA, 80 bp, synthetic construct
  source 1..80: mol_type = other DNA
tggctgcgttctcgctccacagttactctcctaatgagctcaacagggtggctggtgccctcagaaagcttgggagcccc

SEQ ID NO: 139327 - DNA, 80 bp, synthetic construct
  source 1..80: mol_type = other DNA
tcacttctgagtcggcagcgcgccggctcaagagggggtcccctccatctctcgctagctcttccgccagtcaactgtca

SEQ ID NO: 139328 - DNA, 80 bp, synthetic construct
  source 1..80: mol_type = other DNA
gtaccacaccctaacataactgaggtcgccctctccactacaggggaggtgcccttttatggcaaggctatccccctcga

SEQ ID NO: 139329 - DNA, 80 bp, synthetic construct
  source 1..80: mol_type = other DNA
caaaaccaagcttgttcaaagtgaaaaatggtggtgagattggagcagttgctctagactaccccagtggaacctcaggc

SEQ ID NO: 139330 - DNA, 80 bp, synthetic construct
  source 1..80: mol_type = other DNA
ttgggttctggataaccttacagtataccaagcgaggaggagtcttgtgggacacaccatcccccaaggagtacaagaaa

SEQ ID NO: 139331 - DNA, 80 bp, synthetic construct
  source 1..80: mol_type = other DNA
acctacactgatctggtgagatatgtggtactagtggctgctgccttcgctgaagctaacaatggaggagatgtggtcca

SEQ ID NO: 139332 - DNA, 80 bp, synthetic construct
  source 1..80: mol_type = other DNA
cgcacggatgtggttatcacggcccgccgcgccccacgacccatcgccgggtcgggtgcgtggtcgggtggcgctggcgc

SEQ ID NO: 139333 - DNA, 80 bp, synthetic construct
  source 1..80: mol_type = other DNA
cctaggcaaaatagcaccctcccgctccagaacaacatacagcgcttccacagcggcagccataacagtcagccttacca

SEQ ID NO: 139334 - DNA, 80 bp, synthetic construct
  source 1..80: mol_type = other DNA
tgctcgactgtggcttcgagcagtggctctacgcgtacatccagcataagaatcacattaaaggctggacctccatcgat

SEQ ID NO: 139335 - DNA, 80 bp, synthetic construct
  source 1..80: mol_type = other DNA
gcggcgatgtcaaagggcggcaggacggtgcgcgggtggcgcaggggcacctcgagcgcgggaaagcgtagcagcagctc

SEQ ID NO: 139336 - DNA, 80 bp, synthetic construct
  source 1..80: mol_type = other DNA
cacccctcgagggcgagcctggtgaccctgacctctccgatcaggagagctcggggtcatggtctacggtcagtactgag

SEQ ID NO: 139337 - DNA, 80 bp, synthetic construct
  source 1..80: mol_type = other DNA
gcacgatcccgggcatagcttccgttgcgctgcaggcgtcgcagcgccgttgatgtgcgaataaaagcctctttagactc

SEQ ID NO: 139338 - DNA, 80 bp, synthetic construct
  source 1..80: mol_type = other DNA
cccccgccttacattgaagagacccaggtttaatacagtgacagtgtatagtccagcgttcaaaacctcttacaatttga

SEQ ID NO: 139339 - DNA, 80 bp, synthetic construct
  source 1..80: mol_type = other DNA
aggagaagctgccaatcagcccattgagcaactctctcatcagacaccacaacctggtgtactccactacggctcgcagc

SEQ ID NO: 139340 - DNA, 80 bp, synthetic construct
  source 1..80: mol_type = other DNA
gaccctgtgttcccactccggcgtacaactactcgcgtggtttgtggcgcgtggcttctgacagctatgtggaggtgcgt

SEQ ID NO: 139341 - DNA, 80 bp, synthetic construct
  source 1..80: mol_type = other DNA
atgtgctctcccccccccgactaaggcccccacgccaccgcctaggaggcgtaaggctatggtcttgagccagagcaatg

SEQ ID NO: 139342 - DNA, 80 bp, synthetic construct
  source 1..80: mol_type = other DNA
tgtctggtcctccctaagtaccaggccgacctgtatacctatctgagtaggcgcctgaacccgctgggacgcccgcagat

SEQ ID NO: 139343 - DNA, 80 bp, synthetic construct
  source 1..80: mol_type = other DNA
ttcacccagcgaattagagaccccaaatttagccgggagagttctcgactggctggaaaaacatggcgtcgaaaggctga

SEQ ID NO: 139344 - DNA, 80 bp, synthetic construct
  source 1..80: mol_type = other DNA
ccgcgaaccgccgacccgccccaaaatagcccgcgcgtcgacgggacccaggtatcccccctgccgggcctgcggaggac

SEQ ID NO: 139345 - DNA, 80 bp, synthetic construct
  source 1..80: mol_type = other DNA
ccgggccgggagccgcggcgatggtggtcggtgtcatacataggtacacagggtgtgctccagggacaggagcgagatcg

SEQ ID NO: 139346 - DNA, 80 bp, synthetic construct
  source 1..80: mol_type = other DNA
gcccgctcaccacccaaagtaccctcctgttcaatatcttgggggggtgcgtggctgctcagctcgctccgcccagcgcc

SEQ ID NO: 139347 - DNA, 80 bp, synthetic construct
  source 1..80: mol_type = other DNA
acgagatactcggctccccccggagacctaccgcaaccagcatacgacctagagcatatcacatcgtgctcatccaatgt

SEQ ID NO: 139348 - DNA, 80 bp, synthetic construct
  source 1..80: mol_type = other DNA
tacaccaacaagcgcctggcccacctgacggtgtattacaagctcatggcccgccgcgcgcaggtcccgtccatcaagga

SEQ ID NO: 139349 - DNA, 80 bp, synthetic construct
  source 1..80: mol_type = other DNA
gggagtctggcggggggatggcattatgcaaaccacctgcccatgtggagcacagatcaccggacatgtcaaaactggtt

SEQ ID NO: 139350 - DNA, 80 bp, synthetic construct
  source 1..80: mol_type = other DNA
tgtgcaccacaacccacacataactacaaaaccgctatatggaaggtggcagcagcggaatatgcggaggtgacacgaca

SEQ ID NO: 139351 - DNA, 80 bp, synthetic construct
  source 1..80: mol_type = other DNA
atctccccccggtatacgacgacgcagccgggatgagattggggccacgggatttaccgcggaagagctggacgccatgg

SEQ ID NO: 139352 - DNA, 80 bp, synthetic construct
  source 1..80: mol_type = other DNA
tgactacatgacctcactcaggagatacgaagacgtcttgatccaggaagacagggtcatctagtgtgatttaaggtaga

SEQ ID NO: 139353 - DNA, 80 bp, synthetic construct
  source 1..80: mol_type = other DNA
atccaaaaaatgaaaatgaccagtacatatacatgggagaacctctggaaaatgatgaagactgtgcacattggaaagaa

SEQ ID NO: 139354 - DNA, 80 bp, synthetic construct
  source 1..80: mol_type = other DNA
taccaggatgcggagtggacttcacggagagcagattaagcaacatgctgggaatcagaaaaagacagccttttcaggag

SEQ ID NO: 139355 - DNA, 80 bp, synthetic construct
  source 1..80: mol_type = other DNA
gttgctcaagcacgtgatcacttcggattacatcaacacttcactgacgtcaatcaacgtgcaggcgagcgcgctctact

SEQ ID NO: 139356 - DNA, 80 bp, synthetic construct
  source 1..80: mol_type = other DNA
acatgcggactcgccgacctcatggggtacattcccgtcgtaggcggacccttgggtggcgtcgcggctgcgctcgcaca

SEQ ID NO: 139357 - DNA, 80 bp, synthetic construct
  source 1..80: mol_type = other DNA
aattattcgattcccggcatatggctacagattcgggtatatcctcagccgtatctcccgatattgtttcttgggggtta

SEQ ID NO: 139358 - DNA, 80 bp, synthetic construct
  source 1..80: mol_type = other DNA
cgagcgttcacggacgctatgaccaggtactcagcacctcctggagacgaaccgcacccggaatatgatctggaactaat

SEQ ID NO: 139359 - DNA, 80 bp, synthetic construct
  source 1..80: mol_type = other DNA
cgacgccttaatgactggatatacaggtgatttcgactcggtcatcgactgcaatgttgcggtcacacaagtcgtggatt

SEQ ID NO: 139360 - DNA, 80 bp, synthetic construct
  source 1..80: mol_type = other DNA
gatacaagtggtctcaacggctactcagaccttcctcgccacgggcatcaacggggtcctctggactgtgttccatggtg

SEQ ID NO: 139361 - DNA, 80 bp, synthetic construct
  source 1..80: mol_type = other DNA
agggatagagccctggtgagcccactactgcattccaccacggagtgggccatcctgccctgcacctacgcggatctgcc

SEQ ID NO: 139362 - DNA, 80 bp, synthetic construct
  source 1..80: mol_type = other DNA
tagcctgaaaaataaaaatatgttaaagtaaagttgcctggcgaataggtggaaaaataactctatttaaaaccaagcgc

SEQ ID NO: 139363 - DNA, 80 bp, synthetic construct
  source 1..80: mol_type = other DNA
tatagagatggctgggcccatggccgcggtcggtctgctaattgtcagttacgtggtctcaggaaagagtgtggacatgt

SEQ ID NO: 139364 - DNA, 80 bp, synthetic construct
  source 1..80: mol_type = other DNA
atgaagtgggaatacgtagtccttgcatttctggtcctggccgatgctcgcgtttgtgcgtgcttatggttgatgttcct

SEQ ID NO: 139365 - DNA, 80 bp, synthetic construct
  source 1..80: mol_type = other DNA
cggctccgctctgcggtattcgggggggagggggatccagtcggccccgcggagttcgtctcggaccaccggtcgtccga

SEQ ID NO: 139366 - DNA, 80 bp, synthetic construct
  source 1..80: mol_type = other DNA
gcatcactggtccctctccggagagaccctactgctggcattacgcacctaaaccatgcaccgtcgtgtcagcccaaaat

SEQ ID NO: 139367 - DNA, 80 bp, synthetic construct
  source 1..80: mol_type = other DNA
caactcgtcccccccggctgtaccgcagactttccaagtggcccacttacacgctcctactggcagcggcaagagcacca

SEQ ID NO: 139368 - DNA, 80 bp, synthetic construct
  source 1..80: mol_type = other DNA
tagcgtggtgtgctgttcgtattcatacagctggacgggagctcttgtgaccccttgtgttcctgaggaggagaaattgc

SEQ ID NO: 139369 - DNA, 80 bp, synthetic construct
  source 1..80: mol_type = other DNA
ggctcgatgtggcgctagatgagagtggtgatttctccctggtggaggatgacggtccctccatgagagagatcatactc

SEQ ID NO: 139370 - DNA, 80 bp, synthetic construct
  source 1..80: mol_type = other DNA
tgcaccccgaacagttcgccccagatgatcttgaacagcgacagcgcgtgctccgtctcgctcacggacccgcgcgtggg

SEQ ID NO: 139371 - DNA, 80 bp, synthetic construct
  source 1..80: mol_type = other DNA
attcccctcatcacatcagccaggactctgtaggccatccccatccagttaatgctgccttgtctatcatttaaaggtgg

SEQ ID NO: 139372 - DNA, 80 bp, synthetic construct
  source 1..80: mol_type = other DNA
cacggagcgggctctaaaacacttgcgggggtcaaacatcctgctctgcaaatgtacacaaatgtggaccaagacttggt

SEQ ID NO: 139373 - DNA, 80 bp, synthetic construct
  source 1..80: mol_type = other DNA
tcaccgtcccggcaaacggcaccacggtcgtgcagccatccctccgcatgctccccgcggacgccgggcccgcggcctgc

SEQ ID NO: 139374 - DNA, 80 bp, synthetic construct
  source 1..80: mol_type = other DNA
ccctcggtagctgccaccctggggtttggggcgtacctatccaaggcacatggcatcaatcccaacattaggactggagt

SEQ ID NO: 139375 - DNA, 80 bp, synthetic construct
  source 1..80: mol_type = other DNA
agatgagatactgcgtaaagtgggtctctcgcgcgtgggcctccccatcgcgggcgctgcgtagcagggcgtggtcgctg

SEQ ID NO: 139376 - DNA, 80 bp, synthetic construct
  source 1..80: mol_type = other DNA
agggtggatgcggtcgtgaggccccgccggagcagggcccatagctggcagtcggcctggttttgcgtggccgcctcgta

SEQ ID NO: 139377 - DNA, 80 bp, synthetic construct
  source 1..80: mol_type = other DNA
caaaatatccaccagccctccctatttgggcacggccggattacaatcctcccttattggagaattggaagtctcctggt

SEQ ID NO: 139378 - DNA, 80 bp, synthetic construct
  source 1..80: mol_type = other DNA
tgatggtactacttgttcccgagccagagaaacaaagaacacctcaggacaaccagttgatttacgtcatcttgggtatc

SEQ ID NO: 139379 - DNA, 80 bp, synthetic construct
  source 1..80: mol_type = other DNA
tgggaacctcctacgggttccagtactcaccagcgcagcgggtcgacttcctgcttaatgcgtggaaatcaaagaaaaat

SEQ ID NO: 139380 - DNA, 80 bp, synthetic construct
  source 1..80: mol_type = other DNA
aaatgatagaaaacacgttttcttggttattgttaaggttaaccctacaacacacgaaggagacgtcgggctggttatat

SEQ ID NO: 139381 - DNA, 80 bp, synthetic construct
  source 1..80: mol_type = other DNA
acttggtgcaggcgagcttgctgcatgtgccttattttgtgcgtgcccatgtcctactgcgggcgtgcttgcttgctcgc

SEQ ID NO: 139382 - DNA, 80 bp, synthetic construct
  source 1..80: mol_type = other DNA
gcaatcgctcatcctcaccagacagtcagatagaagcattaattaaagcctgttatgcccatcatctatcgtcgcctctc

SEQ ID NO: 139383 - DNA, 80 bp, synthetic construct
  source 1..80: mol_type = other DNA
ttatggtggctgtcctatctgttggtccgggcggaagctttgatccaccagtgggtaccgcctttgcaggcgcgaggcgg

SEQ ID NO: 139384 - DNA, 80 bp, synthetic construct
  source 1..80: mol_type = other DNA
tctttcgtgccttaccacccctgcctcagccgtgccttatgccaaccggtccggcatttaccatcttactaatgactgcc

SEQ ID NO: 139385 - DNA, 80 bp, synthetic construct
  source 1..80: mol_type = other DNA
tctccacagccacccaaactttcctcggcacgagtatcaatggcgtgctttggaccgtttatcatggagcgggctcaaaa

SEQ ID NO: 139386 - DNA, 80 bp, synthetic construct
  source 1..80: mol_type = other DNA
aggccagcagatgaatcacagttccgttggggaacaacaacagggccacggacggcacgtcgctggaaaacacgttcggg

SEQ ID NO: 139387 - DNA, 80 bp, synthetic construct
  source 1..80: mol_type = other DNA
acctcgttggcaaagtgcgcgttcatggcccggccggcggtgcgagcccttcccggtgccggaaggtgcgtgggtgcgtg

SEQ ID NO: 139388 - DNA, 80 bp, synthetic construct
  source 1..80: mol_type = other DNA
agggagcagcccaattctgtcaataacaatatcagaagatggcagcatgtcgataaaaaatgaagaggaagaacaaacac

SEQ ID NO: 139389 - DNA, 80 bp, synthetic construct
  source 1..80: mol_type = other DNA
tcaagctcgatgggtcgaatgtgtccgcggcactccttgccctggcagagagatctttcccgtcgacgaaaccggaaggg

SEQ ID NO: 139390 - DNA, 80 bp, synthetic construct
  source 1..80: mol_type = other DNA
cccttgtcaatggagtggtaaaactcatgagcaagccttgggacgccatcaccagtgtcaccactatggccatgactgat

SEQ ID NO: 139391 - DNA, 80 bp, synthetic construct
  source 1..80: mol_type = other DNA
ccagccatactatcgccgggagccttagtagtggaggtagtatgcgctgcaatactgcggcgccacgtggggcccggtga

SEQ ID NO: 139392 - DNA, 80 bp, synthetic construct
  source 1..80: mol_type = other DNA
tgccgttgtatgcctatacgggggactatgggggggggggaaaggaaaggaaacaggaatggagaaggtaaaggaacaga

SEQ ID NO: 139393 - DNA, 80 bp, synthetic construct
  source 1..80: mol_type = other DNA
tctcggggccgcgctggccctgagcccgacccaaaagctcgccgtctactactatctcatccaccgggagcggcgcatgt

SEQ ID NO: 139394 - DNA, 80 bp, synthetic construct
  source 1..80: mol_type = other DNA
aaatgatggtgacaatgcttgtaaacggacatattctgacagaggctggggcaatggctgtggtctttttgggaaaggaa

SEQ ID NO: 139395 - DNA, 80 bp, synthetic construct
  source 1..80: mol_type = other DNA
acctcctatggaggcaggagatgggcggcaacatcaccagggttgagtcagaaaacaaagtggtgattctggactccttc

SEQ ID NO: 139396 - DNA, 80 bp, synthetic construct
  source 1..80: mol_type = other DNA
tgggtcccaagacatgcagcaacatctggcatggcacatttcccatcaacgcttccaccactggccccagcgtacctatc

SEQ ID NO: 139397 - DNA, 80 bp, synthetic construct
  source 1..80: mol_type = other DNA
cctcttcaattgggctgtacgcacaaaggccaaactcactccattgccgcaagcgagccacctggatctctccagctggt

SEQ ID NO: 139398 - DNA, 80 bp, synthetic construct
  source 1..80: mol_type = other DNA
ttgtgagtcttcaaagtggagttgattccttattagcccccaaggaaagcgtgacaaattgtgagtccgatagggaatct

SEQ ID NO: 139399 - DNA, 80 bp, synthetic construct
  source 1..80: mol_type = other DNA
atgcttgaatctggatgtgtacaggatcctgctattgatggtcggaataggcagcttgatcagagagaagagaagcgcag

SEQ ID NO: 139400 - DNA, 80 bp, synthetic construct
  source 1..80: mol_type = other DNA
gacgtagcacggtaggtcacctacggactctcgatggggggaggtggcgagacccacggaccccgacgacacccgccgtc

SEQ ID NO: 139401 - DNA, 80 bp, synthetic construct
  source 1..80: mol_type = other DNA
caactacacagtcaactactagggagacaacgcggccaaccacacatcaaaccaccacagccagtacaactgctgagacc

SEQ ID NO: 139402 - DNA, 80 bp, synthetic construct
  source 1..80: mol_type = other DNA
ttgaagcggttgggtatttgattttaggggtggtcctgggtgggtgcatagcggtgctgtattaccttccttgctggatt

SEQ ID NO: 139403 - DNA, 80 bp, synthetic construct
  source 1..80: mol_type = other DNA
ggggcctagactcccacctgcttcgtatcttcagccagcgcccgatcctggtccagcgccaacagggcaacaccctcctg

SEQ ID NO: 139404 - DNA, 80 bp, synthetic construct
  source 1..80: mol_type = other DNA
tgcggtcacacagaccgtcgacttcagtttggaccccacttttactgtgaccacacaaactgttccccaagacgctgtgt

SEQ ID NO: 139405 - DNA, 80 bp, synthetic construct
  source 1..80: mol_type = other DNA
ggtcgtcatcgctgaaagcgagggcgtcgaggaggacaagcgagctctcggagccttcacggaggctatgacgagatact

SEQ ID NO: 139406 - DNA, 80 bp, synthetic construct
  source 1..80: mol_type = other DNA
aataagtcagactccctccgctgccccaccgactgcttcaggaaacatcctgaggccacatacagccggtgtggcgcggg

SEQ ID NO: 139407 - DNA, 80 bp, synthetic construct
  source 1..80: mol_type = other DNA
gtctccgtagcccatgaccatactggacagagatattactacctcactcgtgatcccgtcggaccactagctcgagctgc

SEQ ID NO: 139408 - DNA, 80 bp, synthetic construct
  source 1..80: mol_type = other DNA
gcagggctacaaggtgctggtgcttaacccttccgtggctgcaacattgtccttcggtgcctacctgagtaaggcttacg

SEQ ID NO: 139409 - DNA, 80 bp, synthetic construct
  source 1..80: mol_type = other DNA
cggtcgttgagggtcctgtgtattttttccaggacgtggtaaaggtgactctggatgttcagatacatgggcataagccc

SEQ ID NO: 139410 - DNA, 80 bp, synthetic construct
  source 1..80: mol_type = other DNA
ggtgagtacaccggaatcgccggggtgaccgggtcctttcttggaatcaacccgctcaatacccggaaatttgggcgtgc

SEQ ID NO: 139411 - DNA, 80 bp, synthetic construct
  source 1..80: mol_type = other DNA
cgtgtgggtttcgatacgtgagcgacggggaaactccacgttggcgctcaaagggcgcgtttattgttctgtcagctgat

SEQ ID NO: 139412 - DNA, 80 bp, synthetic construct
  source 1..80: mol_type = other DNA
cgggattgtagcaaccgacataccagacctgtcaccggcgaccccaatgacagagaagaaaatgggtcaaatcctgctca

SEQ ID NO: 139413 - DNA, 80 bp, synthetic construct
  source 1..80: mol_type = other DNA
attgaatgacctaacgccagtgggcaggttagttaccgtcaacccctttgtctccgtgtcaacggccaatgctaaagtcc

SEQ ID NO: 139414 - DNA, 80 bp, synthetic construct
  source 1..80: mol_type = other DNA
cacatcccagtgctggataccattgtcacccacggtctctgtgagtggccctggggtcgtcacagcctcgcttcgtagtc

SEQ ID NO: 139415 - DNA, 80 bp, synthetic construct
  source 1..80: mol_type = other DNA
acctacaactggggggaggggcccgacgatgtgttcatactcaacagtacacggcctccctcaggaggttggtttgtgtg

SEQ ID NO: 139416 - DNA, 80 bp, synthetic construct
  source 1..80: mol_type = other DNA
ataagcaatgacagcaccttcacccagtaccgcagctggtaccttgcatacaactacggcgaccctcagaccgggatccg

SEQ ID NO: 139417 - DNA, 80 bp, synthetic construct
  source 1..80: mol_type = other DNA
tctgttgcagcagagatcttgcgccccactaaaaagttcccgccggccataccaatctgggcccggccagactacaaccc

SEQ ID NO: 139418 - DNA, 80 bp, synthetic construct
  source 1..80: mol_type = other DNA
gggctcaacgcggtcgcattctacagaggcgttgacgtgtcggtaatccccactgctggggatgtagtcatctgcgccac

SEQ ID NO: 139419 - DNA, 80 bp, synthetic construct
  source 1..80: mol_type = other DNA
ctttggacttacacgctttatccatgaacataaactggttaaacccagcatcatttcaacgccacccggagttttaaccc

SEQ ID NO: 139420 - DNA, 80 bp, synthetic construct
  source 1..80: mol_type = other DNA
gaatcgagtcgttttgctggtttccgaatggcagggaagtgagtcctattttttttttttgccgctcagatgcatcccgt

SEQ ID NO: 139421 - DNA, 80 bp, synthetic construct
  source 1..80: mol_type = other DNA
tcgccgccgccgccgcaccgggcgagcgcgcggtgcccgccgggtacggcgccgcggggatcctcgccgccctggtgcgg

SEQ ID NO: 139422 - DNA, 80 bp, synthetic construct
  source 1..80: mol_type = other DNA
gggccaggtcggccttgtgcttttagtagccatttctgttatcacactcactccggcgtataagatcttcctttaccggt

SEQ ID NO: 139423 - DNA, 80 bp, synthetic construct
  source 1..80: mol_type = other DNA
cagtgggcctctttagggctgctgtgtgcacccgcggggtcgcaaaggcagtcgactttgtgcccgtcgagtctatggag

SEQ ID NO: 139424 - DNA, 80 bp, synthetic construct
  source 1..80: mol_type = other DNA
tcttgctttctaagatcatatggtggcatcagtatttcatcaccagggtcgaggcacagctgcaagtgtgggtccctccg

SEQ ID NO: 139425 - DNA, 80 bp, synthetic construct
  source 1..80: mol_type = other DNA
tactggaaacgggcgctccaacgaaactcggggatcaccagccgcggcaggggcacgtcttctaggttctgcttccaaaa

SEQ ID NO: 139426 - DNA, 80 bp, synthetic construct
  source 1..80: mol_type = other DNA
caaccctcctacttaacatcttaggagggtgggttgcgtcgcaactcgcgaaccctacggcctctaccgcatttgtggtt

SEQ ID NO: 139427 - DNA, 80 bp, synthetic construct
  source 1..80: mol_type = other DNA
tgcgctcgggctaaagccccccccccttcgtgggataacatgtggaaatgtctcctgcggctcaagcccgtgctaacagg

SEQ ID NO: 139428 - DNA, 80 bp, synthetic construct
  source 1..80: mol_type = other DNA
gcaaagaaaacatggaggaatgctagtgcgaaatccactctcaagaaactccactcatgaaatgtactgggtttcatgtg

SEQ ID NO: 139429 - DNA, 80 bp, synthetic construct
  source 1..80: mol_type = other DNA
cctagccggtgccgctgttggcagcattggtctagggagggtcatcgtggacatcttggctgggtacggagcgggcgtgt

SEQ ID NO: 139430 - DNA, 80 bp, synthetic construct
  source 1..80: mol_type = other DNA
gcccgcggagggcgagacggcgcgatcttgttagcaagtttcctgtacccatctctggtctttgacattactaagctatt

SEQ ID NO: 139431 - DNA, 80 bp, synthetic construct
  source 1..80: mol_type = other DNA
gtcgtgtcgaccgatgctctcatgactggctttaccggcgacttcgactctgtgatagactgcaacacgtgtgtcactca

SEQ ID NO: 139432 - DNA, 80 bp, synthetic construct
  source 1..80: mol_type = other DNA
gaacgacatttatcacagcgtgtcgcgtgcccgaccccgccatttactcctgtgcctactcctactcactgtaggggtag

SEQ ID NO: 139433 - DNA, 80 bp, synthetic construct
  source 1..80: mol_type = other DNA
ttccggtatgtttgactcgtctgtcctctgtgagtgctatgacgcgggttgtgcttggtacgagctcacacccgccgaga

SEQ ID NO: 139434 - DNA, 80 bp, synthetic construct
  source 1..80: mol_type = other DNA
ggaagtggacggcatcaggctacaccgccacgccccgaagtgcaaacccttgctgcgggacgaagtgtcgttctcagtag

SEQ ID NO: 139435 - DNA, 80 bp, synthetic construct
  source 1..80: mol_type = other DNA
tgggagcctcttatggcttccaatactcaccagcacagcgggtcgaatatcttctgaccgcatggcggtcgaagaagagc

SEQ ID NO: 139436 - DNA, 80 bp, synthetic construct
  source 1..80: mol_type = other DNA
agcagatccgcgtctttacgtgcctgctgcgcctggccgaccagaagggctttattctgccggacacccaggggcgattt

SEQ ID NO: 139437 - DNA, 80 bp, synthetic construct
  source 1..80: mol_type = other DNA
ccttttacggtagggcgattcccctcgctgtcatcaagggagggaggcacctaatattctgtcattccaagaaaaagtgc

SEQ ID NO: 139438 - DNA, 80 bp, synthetic construct
  source 1..80: mol_type = other DNA
acagcaatgcagctttgggtgccatgtttgaagagcagaatcaatggaggagcgccagagaagcagttgaagatccaaaa

SEQ ID NO: 139439 - DNA, 80 bp, synthetic construct
  source 1..80: mol_type = other DNA
tcctttttattttctttttattttacacgcacagtaaggcttcctccgcccttccatttgacagcatacaccagcctctc

SEQ ID NO: 139440 - DNA, 80 bp, synthetic construct
  source 1..80: mol_type = other DNA
tcctgtgggaggaccagactctgctgcgggcaaccgcgaacaccataacggccctgggcgttatccagcggctcctcgcg

SEQ ID NO: 139441 - DNA, 80 bp, synthetic construct
  source 1..80: mol_type = other DNA
atggcttccggtgctgttaggatcttttggatgcaaaccattaaccatgtttcttataacagaaaacaaaatctggggaa

SEQ ID NO: 139442 - DNA, 80 bp, synthetic construct
  source 1..80: mol_type = other DNA
ccgtggctgacccctagatgcctagtggattatccatataggttgtggcactacccatgcaccgtcaacttcactcgtca

SEQ ID NO: 139443 - DNA, 80 bp, synthetic construct
  source 1..80: mol_type = other DNA
ccggtgccgcgcgagcggcgtgctgacgactagctgcggtaataccctcacatgttacttgaaagcctctgccgcctgtc

SEQ ID NO: 139444 - DNA, 80 bp, synthetic construct
  source 1..80: mol_type = other DNA
gagcccggcgctatgctaaaatgaagagacggcggaggcgcgtagcacgtcgccaccgccgccgacccggcactgccgcc

SEQ ID NO: 139445 - DNA, 80 bp, synthetic construct
  source 1..80: mol_type = other DNA
gaataagcgtcggcgccacactgtgcacacacggtttcgcactccactaaccaggcgagctcagggtgttttgggtcaaa

SEQ ID NO: 139446 - DNA, 80 bp, synthetic construct
  source 1..80: mol_type = other DNA
aaagtgtttgtggccctgtctactgtttcaccccttcgcccgttgtggtgggagcgactgacaaacgtggagcccccact

SEQ ID NO: 139447 - DNA, 80 bp, synthetic construct
  source 1..80: mol_type = other DNA
tactcaaaaacatgcaccacctgcgcggcgtcgggcagtgcgctggtcagcgaggccctggcgtggcataggctatacgc

SEQ ID NO: 139448 - DNA, 80 bp, synthetic construct
  source 1..80: mol_type = other DNA
ggataaggacgacgacgaggacggggacgaggacggtgacgaggacggggacgaggacgcggacgagcgcgaggaggtcg

SEQ ID NO: 139449 - DNA, 80 bp, synthetic construct
  source 1..80: mol_type = other DNA
gatcatgagcggggaggttccgaccaccgaggacttagtcaacttgcttcccgccatcttgtcgccaggcgctcttgtgg

SEQ ID NO: 139450 - DNA, 80 bp, synthetic construct
  source 1..80: mol_type = other DNA
caagcattcacctttaggcctcgccgacacgagaccgtacagatgtgcaactgctcaatttacccaggccacattacagg

SEQ ID NO: 139451 - DNA, 80 bp, synthetic construct
  source 1..80: mol_type = other DNA
taaagagttacaaaggcattaagcaaaacaacggagggggcggtaactgggctgcggacgacactgttggcgacaaaaac

SEQ ID NO: 139452 - DNA, 80 bp, synthetic construct
  source 1..80: mol_type = other DNA
gattaccacgcacacgttattaatttttatgaagatcagttaaagccccctaaagcgccactaacggcctgcgtcattac

SEQ ID NO: 139453 - DNA, 80 bp, synthetic construct
  source 1..80: mol_type = other DNA
ccgctatgctccagagtgcaagcccctactacgggacgaagtcaccttctcagttgggctcaatagctacgtggtagggt

SEQ ID NO: 139454 - DNA, 80 bp, synthetic construct
  source 1..80: mol_type = other DNA
tcataaaaatcgtgagtcacggcaaccgcaccttcgcctccggccctccgccagcgcccttccgcgtccgcgatgacctc

SEQ ID NO: 139455 - DNA, 80 bp, synthetic construct
  source 1..80: mol_type = other DNA
cagggcgttgttctggtcaaggagggtcattacgttgacgacaacaacgcccatgttggtatattacaggcccgtgtccg

SEQ ID NO: 139456 - DNA, 80 bp, synthetic construct
  source 1..80: mol_type = other DNA
tggttggcctgcgccgcctggagccaggtcgtcagacccctgcacatgtggttcttctgacctatatttggtcacacggg

SEQ ID NO: 139457 - DNA, 80 bp, synthetic construct
  source 1..80: mol_type = other DNA
atcttctttatagcggcctggtacctaaagggtagggtggtccccgtggccacgtactctattctcggcttgtggtcttt

SEQ ID NO: 139458 - DNA, 80 bp, synthetic construct
  source 1..80: mol_type = other DNA
ggtgatttccattatgtcaccggggtaacacaagacaacatcaagtgcccctgccaagttccggccccagagttcttcac

SEQ ID NO: 139459 - DNA, 80 bp, synthetic construct
  source 1..80: mol_type = other DNA
atctactgccttggccgagcttgccaccaaaagttttggcagctcctcaacttccggcattacgggcgacaatacgacaa

SEQ ID NO: 139460 - DNA, 80 bp, synthetic construct
  source 1..80: mol_type = other DNA
atggcatgctttgtttcatcatcttcttcatagctgcttggtacatcaagggtcgagtcacccccctggttacttactcg

SEQ ID NO: 139461 - DNA, 80 bp, synthetic construct
  source 1..80: mol_type = other DNA
gttcacaccattttcatgagttagtcatgaaagatggtcgcgtgctcgtagtcccatgcagaaaccaagatgaactgatt

SEQ ID NO: 139462 - DNA, 80 bp, synthetic construct
  source 1..80: mol_type = other DNA
catgtagacttaatggtgggagcggctaccgtgtgctccgcgttgtatgtcggggatctatgtggtggtatattcatggt

SEQ ID NO: 139463 - DNA, 80 bp, synthetic construct
  source 1..80: mol_type = other DNA
tacgtggattacatgccagccatgaaaagatacagcgctcctttcgagagtgaaggagttctgtaattatcaataacaaa

SEQ ID NO: 139464 - DNA, 80 bp, synthetic construct
  source 1..80: mol_type = other DNA
gcacaccgcatggctcttgaagaactgcccgacgcattggagaccatcacactcatcgttgccatcactgtgatgacagg

SEQ ID NO: 139465 - DNA, 80 bp, synthetic construct
  source 1..80: mol_type = other DNA
tcttcagtcctatggagataaaggttatcacctggggtgcggacactgcagcctgcggagacatcctatgcgggttgccc

SEQ ID NO: 139466 - DNA, 80 bp, synthetic construct
  source 1..80: mol_type = other DNA
tgctaaagttcaccgccccctgcatcatgggccaggcctcggtgggaagctccgacagagccgcctcgagaatgatgtca

SEQ ID NO: 139467 - DNA, 80 bp, synthetic construct
  source 1..80: mol_type = other DNA
tcagcctggaccctacattctccatagagacaaccacagtccctcaggatgccgtagcgaggagccaacggcgaggccgg

SEQ ID NO: 139468 - DNA, 80 bp, synthetic construct
  source 1..80: mol_type = other DNA
cgactagctgtggtaataccctcacttgctacatcaaggcccaagcagcctgtcgagccgcagggctccgggattgcacc

SEQ ID NO: 139469 - DNA, 80 bp, synthetic construct
  source 1..80: mol_type = other DNA
tcaacaggttctggtcatagctgtttcctgaacccaatcacttcccccgaccttatctcttatagccgctaatctcactt

SEQ ID NO: 139470 - DNA, 80 bp, synthetic construct
  source 1..80: mol_type = other DNA
ctgggactttggatcagttggaggcgctctcaactcattgggcaagggcatccatcaaatttttggagcagctttcaaat

SEQ ID NO: 139471 - DNA, 80 bp, synthetic construct
  source 1..80: mol_type = other DNA
gcgaaggtcctggtggtgctgttgctgtttgccggcgtcgatgcgacaacctataccaccggggggaatgctgccaggac

SEQ ID NO: 139472 - DNA, 80 bp, synthetic construct
  source 1..80: mol_type = other DNA
gatgcccggccgatgatggccagcatgtggatcagctgctttgtgcgcatgccccgcgtgcagctcgcgtttcggttcat

SEQ ID NO: 139473 - DNA, 80 bp, synthetic construct
  source 1..80: mol_type = other DNA
tcgaactactgcgaatcttgttggcctcttcgcccccggcccacagcagcgtatccaactggtcaactccaacggcagct

SEQ ID NO: 139474 - DNA, 80 bp, synthetic construct
  source 1..80: mol_type = other DNA
gccgcttacgtagcacaaggataccatgttctcgtgttgaatccatcagtggcggccacactaggcttcggctcttacat

SEQ ID NO: 139475 - DNA, 80 bp, synthetic construct
  source 1..80: mol_type = other DNA
tgatcgtcattgcagagagtgcgggcgtgcaggaggacgctagtgcactgcgagccttcacggaggctatgaccaggtac

SEQ ID NO: 139476 - DNA, 80 bp, synthetic construct
  source 1..80: mol_type = other DNA
atgaactcgtcggggtttgtcaagacgtgtggggctccaccttgtagaataaagcccaccatcaacgagaccgacctggt

SEQ ID NO: 139477 - DNA, 80 bp, synthetic construct
  source 1..80: mol_type = other DNA
caggcgtccaaaagctgggatacatcctccgtgacatagcaggaaagcaaggagggaaaatgtacgctgatgataccgcc

SEQ ID NO: 139478 - DNA, 80 bp, synthetic construct
  source 1..80: mol_type = other DNA
accactgaagatggtcaacctacagaaaactttgacatagacttggctttctttgatattccacaagctggtggaaatga

SEQ ID NO: 139479 - DNA, 80 bp, synthetic construct
  source 1..80: mol_type = other DNA
gcacgtctgccggctgcgcaataccgcgtccgtcaaggtgctgctggggcgcaagagcgacagcgagcgcggtgtggccg

SEQ ID NO: 139480 - DNA, 80 bp, synthetic construct
  source 1..80: mol_type = other DNA
catgttcgactcctcggtcagctggcccggcaacgaccggctgctcacgccgaacgagttcgagatcaagcgcagtgtcg

SEQ ID NO: 139481 - DNA, 80 bp, synthetic construct
  source 1..80: mol_type = other DNA
cccacagacatatcaagtggggtacctccatgcacccacgggcagtggcaagagcactaaagtccctgcggcgtacgccg

SEQ ID NO: 139482 - DNA, 80 bp, synthetic construct
  source 1..80: mol_type = other DNA
actggtcaacgccttgtgccacatcgtggctaagggatatctgggactgggtctgcaccgtattgtctgacttcaaagtc

SEQ ID NO: 139483 - DNA, 80 bp, synthetic construct
  source 1..80: mol_type = other DNA
agacgatcaagacgacgacgaagaagaggaacaactacctcagcagagaaatggcaaaaaaactcacgtatatgctcagg

SEQ ID NO: 139484 - DNA, 80 bp, synthetic construct
  source 1..80: mol_type = other DNA
ccgaggacagcagcggagggcgggcgcgtcgcccgccccacgccacggagttctcgtaggagacgacgacgaagcgctgc

SEQ ID NO: 139485 - DNA, 80 bp, synthetic construct
  source 1..80: mol_type = other DNA
tgtgtctgtatctgctgtaccgaaccacccacgagtcctcccccgatcgcgatcgcgctcccgttgcgttcggggacctg

SEQ ID NO: 139486 - DNA, 80 bp, synthetic construct
  source 1..80: mol_type = other DNA
aactcactccattgccagaggctaccagactagacttgtctagctggtttaccgttggcgccggcgggggcgacatttat

SEQ ID NO: 139487 - DNA, 80 bp, synthetic construct
  source 1..80: mol_type = other DNA
attaaagcctcccacgaggagggcaaatgtggattgaattcagttgattccctcgaacacgagatgtggaggagtagggc

SEQ ID NO: 139488 - DNA, 80 bp, synthetic construct
  source 1..80: mol_type = other DNA
atgccaacatgtggtcactgatgtattttcacaaaagggacatgaggctactgtcattggctgtttcctcagctgttccc

SEQ ID NO: 139489 - DNA, 80 bp, synthetic construct
  source 1..80: mol_type = other DNA
ggcatataaacagcaccgccctcaactgcaatgatagcctcaacaccggctttattgcgggtctgttttactataacaat

SEQ ID NO: 139490 - DNA, 80 bp, synthetic construct
  source 1..80: mol_type = other DNA
cacccctgggaacgacgcccccggacgacaccacggggggggggggaaacggtggtgagtggaagagaagaggaagaaga

SEQ ID NO: 139491 - DNA, 80 bp, synthetic construct
  source 1..80: mol_type = other DNA
gggtgcgccttgcctcctaagggcttacctccagtaccaccacccaggaggaagagggtcgtgcagctcaacgaagacac

SEQ ID NO: 139492 - DNA, 80 bp, synthetic construct
  source 1..80: mol_type = other DNA
ctataccaacagtttgacgagatggaagagtgctctaagcacatcccactggtcgaacatggcttgcaactagcagagca

SEQ ID NO: 139493 - DNA, 80 bp, synthetic construct
  source 1..80: mol_type = other DNA
tttacccgaatcagagacggaattgcaaagatattggtttgaaagcaatgtaatcccgcccatatatccccaacgtcgcc

SEQ ID NO: 139494 - DNA, 80 bp, synthetic construct
  source 1..80: mol_type = other DNA
ctcatggggtacatccccgtcgtaggaggccccctcggtggcgtcgcggcagccctcgcgcatggcgtgcgggctctcga

SEQ ID NO: 139495 - DNA, 80 bp, synthetic construct
  source 1..80: mol_type = other DNA
gcgttgatcccgccaaaggtgggaagaaggcagcccgcctcatcgtataccctgatctaggtgtcagggtttgcgagaag

SEQ ID NO: 139496 - DNA, 80 bp, synthetic construct
  source 1..80: mol_type = other DNA
attgagagcgtggagacatcgggcccgagcagtccgcgctaagctcatcgcccagggagggagagccagaatctgtggca

SEQ ID NO: 139497 - DNA, 80 bp, synthetic construct
  source 1..80: mol_type = other DNA
ccccaaggagggcgcctcggtcaccccaatcccgcccgaccgggttcccccggcaaccccgaaggcggagaggccaaggg

SEQ ID NO: 139498 - DNA, 80 bp, synthetic construct
  source 1..80: mol_type = other DNA
ggcggcgaaaaggccccgatagcgctggcgctcgtgtaaacacagctcctgtttgcgggcgtgaggcggcaggctcttcc

SEQ ID NO: 139499 - DNA, 80 bp, synthetic construct
  source 1..80: mol_type = other DNA
tgtcgccgcctactgcctcgcaactggttgcgtgtccatcatcggccgcgtggtcatcaatgagaagaccgtagttgtcc

SEQ ID NO: 139500 - DNA, 80 bp, synthetic construct
  source 1..80: mol_type = other DNA
ctcaatgctgtagcatattaccggggtcttgatgtgtccgtcataccgaccagcggagacgtcgttgttgtggcaacaga

SEQ ID NO: 139501 - DNA, 80 bp, synthetic construct
  source 1..80: mol_type = other DNA
acagcggcaatcccacacccagcctcaaacccgtgacactgcaacaagtgctccccgtgagcgccagcacggacagcaag

SEQ ID NO: 139502 - DNA, 80 bp, synthetic construct
  source 1..80: mol_type = other DNA
ctcactcctctaacacgagccctttttataatctgtatgattgatgaatatctcacggaaacgccagtacatagcatatc

SEQ ID NO: 139503 - DNA, 80 bp, synthetic construct
  source 1..80: mol_type = other DNA
atcgcgcaacaatttaaggacaaggtcattggcctgctgcaatatgctggcaagcaggccgacgagatccagcctatagc

SEQ ID NO: 139504 - DNA, 80 bp, synthetic construct
  source 1..80: mol_type = other DNA
ttcgaagaaaactcccatgggtttctcttacgacaccagatgctttgactcctccgtcacggaacgtgacatccgcactg

SEQ ID NO: 139505 - DNA, 80 bp, synthetic construct
  source 1..80: mol_type = other DNA
cgttgtccaggtatcgttgcatcggcaacaacaaagccaggggcggcgccttttccagcagcacgtgcagcatctggtcg

SEQ ID NO: 139506 - DNA, 80 bp, synthetic construct
  source 1..80: mol_type = other DNA
ccgctctcgctggttacatccatctctatcaagtgctctttgcgcaccatttccatgccgtgcaggcatctaagctcccc

SEQ ID NO: 139507 - DNA, 80 bp, synthetic construct
  source 1..80: mol_type = other DNA
tgggccgatcacctttgatgagcgcgatgacgatcgggggcagtcatattgttggcactatgccccgcgcccctgcggtg

SEQ ID NO: 139508 - DNA, 80 bp, synthetic construct
  source 1..80: mol_type = other DNA
cgcgcggcgaggaaaacttccgaacggtcccagccacgtgggaggcgccagcccatccccaaagctcggcgctccactgg

SEQ ID NO: 139509 - DNA, 80 bp, synthetic construct
  source 1..80: mol_type = other DNA
atgacttggttgtcatctcggaaagccagggggccgaggaggatgagcgaaacctgagagcctttacggaggctatgacc

SEQ ID NO: 139510 - DNA, 80 bp, synthetic construct
  source 1..80: mol_type = other DNA
ttttgtttgatttgagtttaggcccccatcttaatcccttcttgctacatttgtcacagatgtataatggctggtttgga

SEQ ID NO: 139511 - DNA, 80 bp, synthetic construct
  source 1..80: mol_type = other DNA
tccttgggtaccagcgtcgtagtcttgctcaccatcatcacactgtctccccactacaagtcatggcttgctaggataat

SEQ ID NO: 139512 - DNA, 80 bp, synthetic construct
  source 1..80: mol_type = other DNA
tatggacttaggagacggtcttgcactaggtgactctaagttaataatcaatcttggtccaggtttacaaatgtctaatg

SEQ ID NO: 139513 - DNA, 80 bp, synthetic construct
  source 1..80: mol_type = other DNA
aggctacggtgtgcgctagagctaaggcccctcccccatcgtgggacacaatgtggaagtgtcttataagacttaagccc

SEQ ID NO: 139514 - DNA, 80 bp, synthetic construct
  source 1..80: mol_type = other DNA
acaagtactctcgacagcgacacagacattccttggcaccaacgtcaacggtgtgatgtggacagttttccatggtgccg

SEQ ID NO: 139515 - DNA, 80 bp, synthetic construct
  source 1..80: mol_type = other DNA
ttggggatcggcaccgtcttagaccaggcagagacagccggggtgcgcctcacggtcttagcgactgctactcctcctgg

SEQ ID NO: 139516 - DNA, 80 bp, synthetic construct
  source 1..80: mol_type = other DNA
tgatcctccccctgatggcactcatgactcccatgacaatgcatgaggtgaggatggcgacgatgctgttctgcactgtt

SEQ ID NO: 139517 - DNA, 80 bp, synthetic construct
  source 1..80: mol_type = other DNA
cggtgtgatgaatatgaattcaatgatattcatgaacatcaagttcaatggagagaagtttaatggggtgctgttcatgg

SEQ ID NO: 139518 - DNA, 80 bp, synthetic construct
  source 1..80: mol_type = other DNA
cacggccagcagggtgccacccgcccgacactgcagggagcccggggatgaacagtggcaatgcaggatccagcgctcgt

SEQ ID NO: 139519 - DNA, 80 bp, synthetic construct
  source 1..80: mol_type = other DNA
acagcatgtggcccccgtacgtggggtccgggtaaaaaagaaaccggaggtcgcacgccccccctccgcgcaggatcgtg

SEQ ID NO: 139520 - DNA, 80 bp, synthetic construct
  source 1..80: mol_type = other DNA
cagaggacgaagacagggaaatctctgtcgctgcggagattctgcagcctaggaagagattcccgccagccttaccaatt

SEQ ID NO: 139521 - DNA, 80 bp, synthetic construct
  source 1..80: mol_type = other DNA
gtgaggtatgtggccccgtatactgtttcaccccgagccctgtggtggtgggtaccaccaaccgtaggtgggatccaact

SEQ ID NO: 139522 - DNA, 80 bp, synthetic construct
  source 1..80: mol_type = other DNA
ggcttgtggtccttcttcctgctgctcttggcactgcctcaccaggcttacgcttacgagacacctgtgcatgggcaggt

SEQ ID NO: 139523 - DNA, 80 bp, synthetic construct
  source 1..80: mol_type = other DNA
cccccagatcgtgcgcggggcttcggacgaggcccgaaagcacacgtacaacctgaccatcgcctggtatcgcatgggag

SEQ ID NO: 139524 - DNA, 80 bp, synthetic construct
  source 1..80: mol_type = other DNA
ggcttaattcctatgctgtcgggtcccagcttccctgtgaacctgagcccgacgcagacgtattgaggtccatgctaaca

SEQ ID NO: 139525 - DNA, 80 bp, synthetic construct
  source 1..80: mol_type = other DNA
ttacactgacctgcttaggtatgttcttctggttggtgcggccttcgccgaagccaacagcgggggtgacgtcgttcatc

SEQ ID NO: 139526 - DNA, 80 bp, synthetic construct
  source 1..80: mol_type = other DNA
ctcctcagtgagccagctatcagcaccgtcgctgcgggccacctgcaccacccacagcaacacctatgacgtggacatgg

SEQ ID NO: 139527 - DNA, 80 bp, synthetic construct
  source 1..80: mol_type = other DNA
gcggtcatcgttctggcatgccttctgcacccacagcttgggtttgatgtgactaaaatcctgctagccatgctcgggcc

SEQ ID NO: 139528 - DNA, 80 bp, synthetic construct
  source 1..80: mol_type = other DNA
gcgtgaggttgcaccggtatgccccggcatgccggccattgctccgggacgaagtgactttttccgtggtgcttgctagc

SEQ ID NO: 139529 - DNA, 80 bp, synthetic construct
  source 1..80: mol_type = other DNA
gtcaacaggacagcacttagctgcaatgactcactccaaaccggcttcattgctggtttgttttacacccatcgcttcaa

SEQ ID NO: 139530 - DNA, 80 bp, synthetic construct
  source 1..80: mol_type = other DNA
tgcgggaacagtacaatgagacttggcacaaggacgaggaacacccgtacagaacatggcagtactggggtagctaccgc

SEQ ID NO: 139531 - DNA, 80 bp, synthetic construct
  source 1..80: mol_type = other DNA
attggtcaacaccttgtggctccagctggctgagggacatttgggactgggtctgcactgtcctgtcggacttcaaaacg

SEQ ID NO: 139532 - DNA, 80 bp, synthetic construct
  source 1..80: mol_type = other DNA
gtggaggtctaaaaaatgtaaccgaagtgaaaggtctgacgaaaggaggtccaggacatgaagaacccatcccaatgtca

SEQ ID NO: 139533 - DNA, 80 bp, synthetic construct
  source 1..80: mol_type = other DNA
gggtggcagcaactctcaggaaacttggagcgcctccccttagagcgtggaagagtcgggcgcgtgctgtgagggcctct

SEQ ID NO: 139534 - DNA, 80 bp, synthetic construct
  source 1..80: mol_type = other DNA
atagctgggctattttactatcataagttcaactctaccgggtgtccccaaaggctcagtagctgcagacctatcactga

SEQ ID NO: 139535 - DNA, 80 bp, synthetic construct
  source 1..80: mol_type = other DNA
tgcatgtctgccgacctagaggtggtgaccagcacgtgggtcttggtgggtggcatcctggcagccttagctgcatactg

SEQ ID NO: 139536 - DNA, 80 bp, synthetic construct
  source 1..80: mol_type = other DNA
agagaacaattcagctggatggctccaatgtgtccgcggcgctagctgcgctggcggaaaagtcattcccgcctccagga

SEQ ID NO: 139537 - DNA, 80 bp, synthetic construct
  source 1..80: mol_type = other DNA
accgagcttgatggggtgaggctccaccgctacgctccggcttgcaggccccttttaagggatgaagtcaccttcactgt

SEQ ID NO: 139538 - DNA, 80 bp, synthetic construct
  source 1..80: mol_type = other DNA
tctggtcgacacttggaagcggccggactaccagcccccggtcgttcacggttgcgctctcccccccagtaagccagccc

SEQ ID NO: 139539 - DNA, 80 bp, synthetic construct
  source 1..80: mol_type = other DNA
tagaggttagaggagaccccccgcaaataaaaacagcatattgacgctgggagagaccagagatcctgctgcctcctcag

SEQ ID NO: 139540 - DNA, 80 bp, synthetic construct
  source 1..80: mol_type = other DNA
acagtacttagcaggcttgtctactctgcctggaaaccccgcgatagcatcactgatggctttcacagcctctatcacta

SEQ ID NO: 139541 - DNA, 80 bp, synthetic construct
  source 1..80: mol_type = other DNA
atcaaccccataatagttgcattgacggcagcttcgcagacgtgatattgtaaaattaacccggacgtgataacacttgc

SEQ ID NO: 139542 - DNA, 80 bp, synthetic construct
  source 1..80: mol_type = other DNA
ggtctctacgtccttaccaacgactgtcccaacagcagtattgtgtatgaggccgatgaagtcattctgcacttacccgg

SEQ ID NO: 139543 - DNA, 80 bp, synthetic construct
  source 1..80: mol_type = other DNA
tgactttaagctatggcttggggcaaagatcatgcccaagatgccaggtatccccttcctttcttgtcaaaagggataca

SEQ ID NO: 139544 - DNA, 80 bp, synthetic construct
  source 1..80: mol_type = other DNA
gtccaccaacaccgggaaggccagtacgagctttttgtacaacctccgcggggccgcagacgagcttctcaacgtggtga

SEQ ID NO: 139545 - DNA, 80 bp, synthetic construct
  source 1..80: mol_type = other DNA
tgtggatgaacagcaccgggtttacaaaggcctgcggcgcacctccatgtgaggttaacgccaaaactaatgactcctgg

SEQ ID NO: 139546 - DNA, 80 bp, synthetic construct
  source 1..80: mol_type = other DNA
gccttggtagccattatgaatcagcacgctcactctcaggtgaagcaaaaccaccccatgcggaggaatgtggaaagatt

SEQ ID NO: 139547 - DNA, 80 bp, synthetic construct
  source 1..80: mol_type = other DNA
atagctgagcagttccgacagaaagcaatcggcatccttcagagcaccacacagaggaccgaggaccttaagcctgctgt

SEQ ID NO: 139548 - DNA, 80 bp, synthetic construct
  source 1..80: mol_type = other DNA
acgccacaacttcgtccaggactgtaactgctccatctacccagggcacatcacggggcatcgtatggcgtgggacatga

SEQ ID NO: 139549 - DNA, 80 bp, synthetic construct
  source 1..80: mol_type = other DNA
cccgtttggctggcttataaggtagcagccgctggagtatcctatcatgaccggaagtggtgcttcgacgggcccagaac

SEQ ID NO: 139550 - DNA, 80 bp, synthetic construct
  source 1..80: mol_type = other DNA
attctcttccggaattcgacgctaaattaacggcaatcatatcgtccctgtctatacaccctcctcctgagactatacaa

SEQ ID NO: 139551 - DNA, 80 bp, synthetic construct
  source 1..80: mol_type = other DNA
agggcccattacagtgtcagatggaaagctagccctgcaaacatcagcccccctctctggcagtgacagcgacaccctta

SEQ ID NO: 139552 - DNA, 80 bp, synthetic construct
  source 1..80: mol_type = other DNA
cagagacagccctccctactacgggagaaataccattttatggaaagggcatcccccttgagtacatcaaaggtggaaga

SEQ ID NO: 139553 - DNA, 80 bp, synthetic construct
  source 1..80: mol_type = other DNA
gcttctggagaggatggaaaagaaaacatggaagggaccccagtttgaggaagatgtcaacttgggaagtggaacgcggg

SEQ ID NO: 139554 - DNA, 80 bp, synthetic construct
  source 1..80: mol_type = other DNA
tgtccatggatgcgccttaccaccacggggtgctccaccggtgcctccccctcggaggaaaagaacaattcaactggacg

SEQ ID NO: 139555 - DNA, 80 bp, synthetic construct
  source 1..80: mol_type = other DNA
ttctgtattacgcagcacgtggtaaacccgtttgcctataaaaggggcaggcgtgtataagagggcccctgtttaatacg

SEQ ID NO: 139556 - DNA, 80 bp, synthetic construct
  source 1..80: mol_type = other DNA
accatgccagcgttatctaccggactcgtccaccttcaccagaacatagttgacgtgcagtatctctacggggtatcaac

SEQ ID NO: 139557 - DNA, 80 bp, synthetic construct
  source 1..80: mol_type = other DNA
tcctctcctgttctctactacccaacttgccattctgccctgttcttttactaccatgccagccctatccacagggctaa

SEQ ID NO: 139558 - DNA, 80 bp, synthetic construct
  source 1..80: mol_type = other DNA
gtgtttgtcgtgctattgcttctggtggccccagcttacagcttcaactgccttggaatgagcaacagagacttcttgga

SEQ ID NO: 139559 - DNA, 80 bp, synthetic construct
  source 1..80: mol_type = other DNA
gctcggccacgtggcggcccgcggtctgcagccccaacggctggttcgccggtacaggaacgcccgggaggcggatatcg

SEQ ID NO: 139560 - DNA, 80 bp, synthetic construct
  source 1..80: mol_type = other DNA
tttccgcgaggctaggtagggaagttctgcttggccccgccgatgactacacctcgaaggggtggaagctcctggctccc

SEQ ID NO: 139561 - DNA, 80 bp, synthetic construct
  source 1..80: mol_type = other DNA
ctgttttcgccgcgtgtaccgccaaaaaagcagcctaacggcacctgcgaaacaaacccgcgcctcaatttttatcccgt

SEQ ID NO: 139562 - DNA, 80 bp, synthetic construct
  source 1..80: mol_type = other DNA
ggcttgtcaacattacctggcaaccccgccgttgcagctctgatgtcattcacagcatctctaaccagtccactcacaac

SEQ ID NO: 139563 - DNA, 80 bp, synthetic construct
  source 1..80: mol_type = other DNA
cagggaggtgatgtatcaacagtatgacgagatggaagaatgctctcgacacctcccttacctggttgaaggacagcaat

SEQ ID NO: 139564 - DNA, 80 bp, synthetic construct
  source 1..80: mol_type = other DNA
aggtggactggctggaggcgcgggtgcgggaatgcgactcgatcccggagaagttcatcctcatgatcctcatcgagggc

SEQ ID NO: 139565 - DNA, 80 bp, synthetic construct
  source 1..80: mol_type = other DNA
gtacgcgcgcggctgtacgcgtgttcccgcatgaccgcctcggagggcgaggtcgtgaagctggaatacgagtccaactt

SEQ ID NO: 139566 - DNA, 80 bp, synthetic construct
  source 1..80: mol_type = other DNA
gtcaccaagtatatatctgcttgcatgtcagctgatttggagattaccaccagcacgtgggtgctggttggcggcgtaat

SEQ ID NO: 139567 - DNA, 80 bp, synthetic construct
  source 1..80: mol_type = other DNA
cgcgcaatgctgacatcatcccagcgcggcgtcgcggtgacagtcgggctggcctcctcagcccgcggccgatatccacc

SEQ ID NO: 139568 - DNA, 80 bp, synthetic construct
  source 1..80: mol_type = other DNA
aaccactgtggactgtttgggaagggcagcattgtggcttgtgccaagtttgcctgtgaggccaagaagaaggcaaccgg

SEQ ID NO: 139569 - DNA, 80 bp, synthetic construct
  source 1..80: mol_type = other DNA
agtcttcattatcatcgtcatgttctctggagttgacgcccgaacacacaccactggcggcgtagcagctcatactacta

SEQ ID NO: 139570 - DNA, 80 bp, synthetic construct
  source 1..80: mol_type = other DNA
gcggctcgcggtagaggggccagcgaagtgtggcgggcgtaccggtggccaggtcctccagcataaggcgatggtagtgg

SEQ ID NO: 139571 - DNA, 80 bp, synthetic construct
  source 1..80: mol_type = other DNA
gatgtgatggagcgcactggggccctgaaggaacaatactcagaatcatggcatgaagacaaggaacacccctacagaac

SEQ ID NO: 139572 - DNA, 80 bp, synthetic construct
  source 1..80: mol_type = other DNA
aggaggaggactacgaggacgagccctgattggccaggtggtgtttttgtagatgcagcggtcgacggcggtggtggacg

SEQ ID NO: 139573 - DNA, 80 bp, synthetic construct
  source 1..80: mol_type = other DNA
cgaggcccgcgtggccataaagtctctcacagagcgactttacatcggaggccccctgactaactcaagaggggagagct

SEQ ID NO: 139574 - DNA, 80 bp, synthetic construct
  source 1..80: mol_type = other DNA
tatgttcgactccgttgtcctctgcgaagcctatgacaccggcgcctcctggtatgagctgacaccagcggagactacgg

SEQ ID NO: 139575 - DNA, 80 bp, synthetic construct
  source 1..80: mol_type = other DNA
ctctgccctggagccctagtagttggggtcatatgcgccgcagtcttgcggcgtcatatcggcccaggtgaggtggccgt

SEQ ID NO: 139576 - DNA, 80 bp, synthetic construct
  source 1..80: mol_type = other DNA
accctgtggaacggcaacaaaattatcgacgagcgcctgatcaaccccgacggctccctgctgttccgagtaaccatcaa

SEQ ID NO: 139577 - DNA, 80 bp, synthetic construct
  source 1..80: mol_type = other DNA
ctggacctcccagctataattgaacggctacatggacttgaagccttctcactgcacacatacactccccacgaactcac

SEQ ID NO: 139578 - DNA, 80 bp, synthetic construct
  source 1..80: mol_type = other DNA
gcgcttacccccactctggccaccaaggatggcaaactccccgcaacgcagcttcgacgccacgtcgatctgcttgtcgg

SEQ ID NO: 139579 - DNA, 80 bp, synthetic construct
  source 1..80: mol_type = other DNA
tcgtgggcgctcaagtgggagtacgtagtgctcgcatttttgctgcttgcagacgccaggatctgcgcatgcctctggat

SEQ ID NO: 139580 - DNA, 80 bp, synthetic construct
  source 1..80: mol_type = other DNA
cggagccggccggggacccccgccttgcttgaggcaaaacttttacaacccctacctcgccccagtggggacgcaacaga

SEQ ID NO: 139581 - DNA, 80 bp, synthetic construct
  source 1..80: mol_type = other DNA
ccgggacccccacggcagtgccaaccgcctgcgccacctgatacgcgactgttacctgatgggatactgccgagcccgtc

SEQ ID NO: 139582 - DNA, 80 bp, synthetic construct
  source 1..80: mol_type = other DNA
ggggctgctggccggcgcctgcgaccgccgcctcatcgtcgtcaacgccgtgcgcgccgcggactggcccgccgacgggc

SEQ ID NO: 139583 - DNA, 80 bp, synthetic construct
  source 1..80: mol_type = other DNA
cgacccgccgctacgatacgataccaacctccccgtggatctgctacacatggtgtacgcgggccgcggggccgcgggtt

SEQ ID NO: 139584 - DNA, 80 bp, synthetic construct
  source 1..80: mol_type = other DNA
cttgccgcactagagctgacttcaatgccagctcagacctgctgtgccccacggactgttttaggaagcatcctgatgcc

SEQ ID NO: 139585 - DNA, 80 bp, synthetic construct
  source 1..80: mol_type = other DNA
cacctggggtgaaaacgagactgacgtctttatgatgtccagtctccggccccctgcgggaggatggtacggttgcacgt

SEQ ID NO: 139586 - DNA, 80 bp, synthetic construct
  source 1..80: mol_type = other DNA
aaaggtgttgccccaaatcatcaaagattgcatccaaaaacgcttgcgaacggccgtgctagctcccactcgggtagtgg

SEQ ID NO: 139587 - DNA, 80 bp, synthetic construct
  source 1..80: mol_type = other DNA
cagtactccgcgtccagacgcctcccgaaggcatccaggacaaagcggtcacaggcgtcctccatgatgccccgggccgc

SEQ ID NO: 139588 - DNA, 80 bp, synthetic construct
  source 1..80: mol_type = other DNA
agtgagtcacattgatcctgattgtatagcaccctttgcggtgtatttgatttttacatttgtgaccgccacgtgcgtct

SEQ ID NO: 139589 - DNA, 80 bp, synthetic construct
  source 1..80: mol_type = other DNA
ttcaactggcatcggcagacctgcagattggagttcatggaatgttgaatgccgcagctatagcttggatgatcattaaa

SEQ ID NO: 139590 - DNA, 80 bp, synthetic construct
  source 1..80: mol_type = other DNA
tgacgtgctacatcaaagcctcagcagctgccaaggccgcaggtctaaaggactgcagtatgctggtctgcggtgacgac

SEQ ID NO: 139591 - DNA, 80 bp, synthetic construct
  source 1..80: mol_type = other DNA
gttagggctgtcgaagatggggttaactatgcaacagggaaccttcccggttgctccttttctatcttcattttggcgct

SEQ ID NO: 139592 - DNA, 80 bp, synthetic construct
  source 1..80: mol_type = other DNA
taacgtgccctacggactgtttccggaagcatcctgaggcaacgtacagcaagtgtggttctgggccttggctcacgccg

SEQ ID NO: 139593 - DNA, 80 bp, synthetic construct
  source 1..80: mol_type = other DNA
atctcatcccgagtgtgggtatttaatgatccggacatacaaaaggggacaattacaaccattgcatgggccactggaga

SEQ ID NO: 139594 - DNA, 80 bp, synthetic construct
  source 1..80: mol_type = other DNA
tgaccactgacaacgtaaagtgcccatgccaggttccggcccccgaatttttcacggaaatagacggggtgcggttgcac

SEQ ID NO: 139595 - DNA, 80 bp, synthetic construct
  source 1..80: mol_type = other DNA
tgatcccgccaaaggtgggaaaaaaccagctcgccttatcgtataccccgatctaggtgtcagggtttgcgaaaaaatgg

SEQ ID NO: 139596 - DNA, 80 bp, synthetic construct
  source 1..80: mol_type = other DNA
ggcttacaaaaccatcgtcgccaggatcatgtggtggctccagtacttcttgaccaaggctgaggctgcgctgcaagtat

SEQ ID NO: 139597 - DNA, 80 bp, synthetic construct
  source 1..80: mol_type = other DNA
gaggctatgaccaggtactccgctccccccggggacccccctcaaccagagtacgacttggagcgcattacatcatgctc

SEQ ID NO: 139598 - DNA, 80 bp, synthetic construct
  source 1..80: mol_type = other DNA
aatctgttttggcttaaggtggaaaattcggctatttacaacgttaaaaatacagtcaatgcttctgaaacaaatattta

SEQ ID NO: 139599 - DNA, 80 bp, synthetic construct
  source 1..80: mol_type = other DNA
cgtgtcctccctcccgcccctccgaccccctgacgcccctcccgcccctccgaccccctgacgccactcccgcctctcgc

SEQ ID NO: 139600 - DNA, 80 bp, synthetic construct
  source 1..80: mol_type = other DNA
ggagcggagagtacctggctttgttgcgcttgcgcagaaccatgttggtgaccttggagctgagcagggcgctcgtgccc

SEQ ID NO: 139601 - DNA, 80 bp, synthetic construct
  source 1..80: mol_type = other DNA
tccggaagacgtggactgctggtgcgacaatcaagaagtctacgtgcagtatggtcgctgcacacggaccaggcattcca

SEQ ID NO: 139602 - DNA, 80 bp, synthetic construct
  source 1..80: mol_type = other DNA
atacttcatagccagagccgaggccctgctgcacgtctatgttccatctttggaagtgcgcggccctcgtgactcggtca

SEQ ID NO: 139603 - DNA, 80 bp, synthetic construct
  source 1..80: mol_type = other DNA
gtctgcgccaccgacgccctcatgaccggctacacaggggactttgattccgtcatagactgcaacgtggcagtgaccca

SEQ ID NO: 139604 - DNA, 80 bp, synthetic construct
  source 1..80: mol_type = other DNA
aatagtctccaccgcaacacaaaccttcctggcaacctgcgtcaacggcgtgtgctggactgtctttcacggcgccggct

SEQ ID NO: 139605 - DNA, 80 bp, synthetic construct
  source 1..80: mol_type = other DNA
gtcccactgactgcttcaggaaacacccggaaaccacctacgccaaatgcggatccggcccttggctcacgccaaggtgc

SEQ ID NO: 139606 - DNA, 80 bp, synthetic construct
  source 1..80: mol_type = other DNA
tagagaagaatcgagagattagtgcagtttaaacagttttttagaacggaagataaccatgactaaaaaaccaggagggc

SEQ ID NO: 139607 - DNA, 80 bp, synthetic construct
  source 1..80: mol_type = other DNA
cagaaaacttggagcgcctccccttagagcgtggaagagtcgggcacgtgcagtgagggcggcactcatcgctcggagag

SEQ ID NO: 139608 - DNA, 80 bp, synthetic construct
  source 1..80: mol_type = other DNA
cgtctgcgcaactgatgccctcatgactggatatacaggggactttgactctgtcatagactgcaacgtggcggtaactc

SEQ ID NO: 139609 - DNA, 80 bp, synthetic construct
  source 1..80: mol_type = other DNA
gcagcccgcgtcacccaaatactgtcatctctgactgtgacttcccttctcaggagactccacaagtggatcaatgaaga

SEQ ID NO: 139610 - DNA, 80 bp, synthetic construct
  source 1..80: mol_type = other DNA
ctggtgctgcgcgcgctacaattacctacaccgcagtcccgaatacagggacgagaacgtggccagaatcttaaggctca

SEQ ID NO: 139611 - DNA, 80 bp, synthetic construct
  source 1..80: mol_type = other DNA
tcaaccccgtctacccctatggctacgcgcggaatcaaaatattcccttcctcactcccccctttgtctcctccaatgga

SEQ ID NO: 139612 - DNA, 80 bp, synthetic construct
  source 1..80: mol_type = other DNA
gccgccaaaacccacgtcatcgccagcatgagcaaggagattcccaccccctacatgtggagttatcagccccagatggg

SEQ ID NO: 139613 - DNA, 80 bp, synthetic construct
  source 1..80: mol_type = other DNA
cttacgctgctcaggggtacaaggtattggtgctaaacccttctgtggctgccaccttagggtttggggcttacatgtcc

SEQ ID NO: 139614 - DNA, 80 bp, synthetic construct
  source 1..80: mol_type = other DNA
ccttgtcggccaagcagaggcggcattagagaacctcatcgttctcaatgccacttccgccgctggtagtcagggatggg

SEQ ID NO: 139615 - DNA, 80 bp, synthetic construct
  source 1..80: mol_type = other DNA
ttccaggtgctgggtctcggcgacccccaccctggctataccgaatgagacgatcccggtccaggggttccgcaggcatg

SEQ ID NO: 139616 - DNA, 80 bp, synthetic construct
  source 1..80: mol_type = other DNA
agcagttcaagcagaaggtgcttggcctaattcaaactactaccaaacaagcggaggagatcaagccagctgtcacagcc

SEQ ID NO: 139617 - DNA, 80 bp, synthetic construct
  source 1..80: mol_type = other DNA
tggtacatcaagggtcgggtagtccccttagctacctattccctcactggcctgtggtcctttagcctactgctcctagc

SEQ ID NO: 139618 - DNA, 80 bp, synthetic construct
  source 1..80: mol_type = other DNA
tgctcaggccagaggcggacaccctttggacgatgccagtggcctgtggcctgagcggtgtggtcaggggcagcctctgg

SEQ ID NO: 139619 - DNA, 80 bp, synthetic construct
  source 1..80: mol_type = other DNA
cgtggatgaactccacggtgttcctcaagacgtgtggagctcccccttgtaacatctatgggggtgaggtggatcccgaa

SEQ ID NO: 139620 - DNA, 80 bp, synthetic construct
  source 1..80: mol_type = other DNA
ggcccgcactgccatacactcgctgactgagagactttacgtaggagggcccatgttcaacagcaagggtcaaacctgcg

SEQ ID NO: 139621 - DNA, 80 bp, synthetic construct
  source 1..80: mol_type = other DNA
ctctgccctattactatatcccggttaatagtgacctgttatgtgatttagaggtattactgttaggcgaggtcgacctc

SEQ ID NO: 139622 - DNA, 80 bp, synthetic construct
  source 1..80: mol_type = other DNA
gcttgtcggcctgtcggggcattgagtccttccgcatagggtggggtactcttaagtatgaggagaatgtcaccaatgac

SEQ ID NO: 139623 - DNA, 80 bp, synthetic construct
  source 1..80: mol_type = other DNA
ccctgtgtcctggaagataatgtcagtaggtgctgggtccaaatcacccccacgctgtcagccccgagcttcggagcagt

SEQ ID NO: 139624 - DNA, 80 bp, synthetic construct
  source 1..80: mol_type = other DNA
ttctgaccatcaagctctgaaggcattcaaggattttgcatcggggaagcgctcacaagtgggagtgatagaagttctcg

SEQ ID NO: 139625 - DNA, 80 bp, synthetic construct
  source 1..80: mol_type = other DNA
tgcctcaacaacaccggacgacgcctgctcagaagcagagtcctatagctcaatgccccctcttgagggagagcctggtg

SEQ ID NO: 139626 - DNA, 80 bp, synthetic construct
  source 1..80: mol_type = other DNA
gagagccttcacggaggctatgaccaggtattctgctccacctggagatgttccacaacccacctatgacctcgagctta

SEQ ID NO: 139627 - DNA, 80 bp, synthetic construct
  source 1..80: mol_type = other DNA
gataaggaggtcgacgcatctcatgacatgcagaataaaaaagcgaaagagtctgagacagacatcgagcaagacccggg

SEQ ID NO: 139628 - DNA, 80 bp, synthetic construct
  source 1..80: mol_type = other DNA
tttctatgggtctcttgtgcctgaccttgtttgtggaagaatgcttgagaagaagagtcaccagaagacacatgatatta

SEQ ID NO: 139629 - DNA, 80 bp, synthetic construct
  source 1..80: mol_type = other DNA
taggtacgaaactgttgaccgaccttcattttttctggggttaagcagtagaaagtagtagagtctttttcccattggtc

SEQ ID NO: 139630 - DNA, 80 bp, synthetic construct
  source 1..80: mol_type = other DNA
gagctatttgagcacccggcgatcgtcaacatttcctcgcgcttcgcgtacaccccctccccctacgtattcgccctggc

SEQ ID NO: 139631 - DNA, 80 bp, synthetic construct
  source 1..80: mol_type = other DNA
ccgcagcatcttctcgagctccccgcgctgctcgcgcacgcagcgcccgaggctggccagcgaccgcttggtcaggcggt

SEQ ID NO: 139632 - DNA, 80 bp, synthetic construct
  source 1..80: mol_type = other DNA
cgcagaaaaagtttttgtgcgatcgcgtaatgtggcgcatcccattttccagcaattttatgtctatgggagcgcttacc

SEQ ID NO: 139633 - DNA, 80 bp, synthetic construct
  source 1..80: mol_type = other DNA
gtcggagtacgccgtgtccttcacggggctctggtccacgcgctccagcgccgccacgcacgccaccagcgcgtcctcgc

SEQ ID NO: 139634 - DNA, 80 bp, synthetic construct
  source 1..80: mol_type = other DNA
acgtgcctacctgaatactccggggctccccgtctgtcaagatcatctggaattttgggatggcgtctttaccgggttaa

SEQ ID NO: 139635 - DNA, 80 bp, synthetic construct
  source 1..80: mol_type = other DNA
acggagcagtgtactccgtgagtcctttggacctcccggccataattgaaaggctacatgggcttgacgccttctccctg

SEQ ID NO: 139636 - DNA, 80 bp, synthetic construct
  source 1..80: mol_type = other DNA
tcgggctcggggtcttggtctacttgctccgaggaggacgataccaccgtgtgctgctccatgtcatactcctggaccgg

SEQ ID NO: 139637 - DNA, 80 bp, synthetic construct
  source 1..80: mol_type = other DNA
aacacgatgtccttgcggggccaacatctctggcaatgtccgcttaggctccatgagaatcacggggcctaaaacctgca

SEQ ID NO: 139638 - DNA, 80 bp, synthetic construct
  source 1..80: mol_type = other DNA
cgcccagagactcgggtgatggtcgtacccgggactcaacgggttaccggattacggggactgtcggtcacggtcccgcc

SEQ ID NO: 139639 - DNA, 80 bp, synthetic construct
  source 1..80: mol_type = other DNA
cgcggttctcgcccttcatggggccccagtgacccccggcataaatcgcgcaacttgggcaaggtcatcgataccctaac

SEQ ID NO: 139640 - DNA, 80 bp, synthetic construct
  source 1..80: mol_type = other DNA
agttctacatgttgggtatctgccgcacctacactggccgtcccgaatgcgactacccccatccatgggttccgcagaca

SEQ ID NO: 139641 - DNA, 80 bp, synthetic construct
  source 1..80: mol_type = other DNA
gcagggcctgggcgcagcccgggtacccatggcccctctatggcaatgagggttgcgggtgtgcaggttggctcctgtca

SEQ ID NO: 139642 - DNA, 80 bp, synthetic construct
  source 1..80: mol_type = other DNA
tcaacagtcacggagagagacattagaacagaggagtccatatatctatcctgctccttgcctccggaggctcgtgctgc

SEQ ID NO: 139643 - DNA, 80 bp, synthetic construct
  source 1..80: mol_type = other DNA
acactccagtgaactcgtggctgggtaacatcatcatgtacgcgcccaccatatgggtccgcatggtactgatgacacat

SEQ ID NO: 139644 - DNA, 80 bp, synthetic construct
  source 1..80: mol_type = other DNA
ctagattctttaaattttggccaccagtcccttttccaggaaagggtactccacagccttgatttttccagcccagggcg

SEQ ID NO: 139645 - DNA, 80 bp, synthetic construct
  source 1..80: mol_type = other DNA
aataatcagaccgacgatacgagtgggaccgtggttccagactaataatcagaccgacgatacgagtgggaccgtggtcc

SEQ ID NO: 139646 - DNA, 80 bp, synthetic construct
  source 1..80: mol_type = other DNA
gtcggagacgagctaatcgcgatttccgacgaacgcggacccccccgacatgaccgcccgcccctcgccacgtcgaccgc

SEQ ID NO: 139647 - DNA, 80 bp, synthetic construct
  source 1..80: mol_type = other DNA
tggatcgatagatcccttcccccagagcaacagcccaatagaagacatcgagagggaaatcccagaaaggtcatggaacg

SEQ ID NO: 139648 - DNA, 80 bp, synthetic construct
  source 1..80: mol_type = other DNA
ttccccagactgtaagctcactttagttctagttaagaatggaggactgataaatggatacataacattaatgggagcct

SEQ ID NO: 139649 - DNA, 80 bp, synthetic construct
  source 1..80: mol_type = other DNA
cagtagagtttgtgcgcgagtttgctccgcggcggcgcgtaaattggaaggggcgcagggtgcagcgcgtgttgcggccc

SEQ ID NO: 139650 - DNA, 80 bp, synthetic construct
  source 1..80: mol_type = other DNA
caccacaatttggtgtattccaccacctctcgcagtgctggtcagagacagaaaaaagtcacattcgacagactgcaagt

SEQ ID NO: 139651 - DNA, 80 bp, synthetic construct
  source 1..80: mol_type = other DNA
gaaggtgacctttgaccgtctccaggtgtttgaccagcattaccatgatgtcctaaaggaggttaaggcccgagcctcag

SEQ ID NO: 139652 - DNA, 80 bp, synthetic construct
  source 1..80: mol_type = other DNA
gtgcgctcgtcaggaagcaaccgtacctgccacccgcggttgtgcagggtgatcagatctatgctagtggccacctcgcc

SEQ ID NO: 139653 - DNA, 80 bp, synthetic construct
  source 1..80: mol_type = other DNA
ctgggacacccgcatcacgagagctgacttggaaaatgaagctaaggtgctggagctgcttgatggggaacatcggcgtc

SEQ ID NO: 139654 - DNA, 80 bp, synthetic construct
  source 1..80: mol_type = other DNA
tacggggcgaaggacgtgcggagccataccagcaaggccattaagcacatcaactccgtgtgggaggacttgctggagga

SEQ ID NO: 139655 - DNA, 80 bp, synthetic construct
  source 1..80: mol_type = other DNA
acaaggaggtgttgtaccaacagtacgatgagatggaggagtgctcacaagccgccccatatattgaacaagctcaggca

SEQ ID NO: 139656 - DNA, 80 bp, synthetic construct
  source 1..80: mol_type = other DNA
gggatgattttgaggaggctattagggtatatgcaaaggtggcacttaggccagattgcaagtacaagatcagcaaactt

SEQ ID NO: 139657 - DNA, 80 bp, synthetic construct
  source 1..80: mol_type = other DNA
ccctcccacagtagaaacatggaagagggatggcttccaaccacccacggtcatggggtgcgccctcccccctcccagca

SEQ ID NO: 139658 - DNA, 80 bp, synthetic construct
  source 1..80: mol_type = other DNA
ctgcagtagtagtgaacccgtctgtgaagacagtgcgagaagccggaattctgatcacggcagcagcggtgacactctgg

SEQ ID NO: 139659 - DNA, 80 bp, synthetic construct
  source 1..80: mol_type = other DNA
gtcattacgtggccggggtcacgacggaggacctaaaggtgccctgtcaagtcccctctcccgagtttttcaccttcgtg

SEQ ID NO: 139660 - DNA, 80 bp, synthetic construct
  source 1..80: mol_type = other DNA
gatctagcaagttggcgggcggggggtcggcgtcgatggtgaagatgccgggtagcaaaacctgattaaaataatctatt

SEQ ID NO: 139661 - DNA, 80 bp, synthetic construct
  source 1..80: mol_type = other DNA
acctgcatgtcagctgacctcgaagtgatcactagcgcctgggtgctcacgggtggaattcttgctgcgttggccgcgta

SEQ ID NO: 139662 - DNA, 80 bp, synthetic construct
  source 1..80: mol_type = other DNA
tggtactaatgacagaggcaacagcaaaagatatagagtaaaagtaaacactactaattctcaaagtgtgaaaattcagc

SEQ ID NO: 139663 - DNA, 80 bp, synthetic construct
  source 1..80: mol_type = other DNA
catgcccccccttgaaggcgaacctggcgacccggacctggactctggctcatgggataccgtgagcgaagagagcgact

SEQ ID NO: 139664 - DNA, 80 bp, synthetic construct
  source 1..80: mol_type = other DNA
aaagatcacctacgagctcctgtccggcggcaagcagcatcgcctcgcctatgagctgccccagcagaagcagaagttca

SEQ ID NO: 139665 - DNA, 80 bp, synthetic construct
  source 1..80: mol_type = other DNA
ggtggtcggacggcttcagatggcttcgagatcgtagtgtccgcaccgactcgtagtagacccgaatctccacattgccc

SEQ ID NO: 139666 - DNA, 80 bp, synthetic construct
  source 1..80: mol_type = other DNA
tagccaggtcaagccgctcgccggggcgctggcgtttggccaggcggtcgatgtgtctgtcctccggaagggcccccaac

SEQ ID NO: 139667 - DNA, 80 bp, synthetic construct
  source 1..80: mol_type = other DNA
gctcaggatgccacctctatactgggcataggcacggtgctggaccaggcggagactgctggagtaaggctgacagtctt

SEQ ID NO: 139668 - DNA, 80 bp, synthetic construct
  source 1..80: mol_type = other DNA
caccagcagtgccccagacttaccaagtgggctatctccacgctcctacgggtagcgggaagagcaccaaggttccagta

SEQ ID NO: 139669 - DNA, 80 bp, synthetic construct
  source 1..80: mol_type = other DNA
ccctgcacttccaatatgggcccggccagactacaacccaccattacttgagacctggaagaagccggactacacgccgc

SEQ ID NO: 139670 - DNA, 80 bp, synthetic construct
  source 1..80: mol_type = other DNA
ccaataccaaccttatcctacacggtgtaagcttctatgggtttaacaatacctgtgtggaagcctggaccgatgtaagg

SEQ ID NO: 139671 - DNA, 80 bp, synthetic construct
  source 1..80: mol_type = other DNA
ggcccttgcttctcctggttttgcttttgcctgaaagggcatatgcattcgatcgggaggtggcagggtcccttggcggc

SEQ ID NO: 139672 - DNA, 80 bp, synthetic construct
  source 1..80: mol_type = other DNA
ctcgtgtctctggaataaaacgttttaaaagccgttctgtgagtttagtgtcgtttccaaataacgccttaaaagttaca

SEQ ID NO: 139673 - DNA, 80 bp, synthetic construct
  source 1..80: mol_type = other DNA
gtaaaatcataaaatgcatgtaatttctgagacacttgcatatgggcatgttcccgcatttattatgggctccactctgg

SEQ ID NO: 139674 - DNA, 80 bp, synthetic construct
  source 1..80: mol_type = other DNA
ttgggaaaccgctcgccacacgccggtcaattcctggttaggaaacatcatcatgtacgcgcccacgatttgggtgcgca

SEQ ID NO: 139675 - DNA, 80 bp, synthetic construct
  source 1..80: mol_type = other DNA
tccacggaaaaagcggactgtagtcctagatcagagcaccgtgggggaggctcttaaggagctggccatgaagagctttg

SEQ ID NO: 139676 - DNA, 80 bp, synthetic construct
  source 1..80: mol_type = other DNA
tcccagacaccgcggagaggaatcacggcccgcccagagatatagacacggaccacaaacaagcacggatgtcgtagcaa

SEQ ID NO: 139677 - DNA, 80 bp, synthetic construct
  source 1..80: mol_type = other DNA
gtaacgtagccgtgacacaggtggtggatttcagcttggacccaacattttccatagagactaccatcgtccctcaggat

SEQ ID NO: 139678 - DNA, 80 bp, synthetic construct
  source 1..80: mol_type = other DNA
atctaggggaaaaaggtccgtggttattccaacacatgcacaaaaggacatggttgggcgaggtcatgcatggcttaaag

SEQ ID NO: 139679 - DNA, 80 bp, synthetic construct
  source 1..80: mol_type = other DNA
tgggctgctgcgtcattcttcccaggaggctctactggtcctctcggctggttcctttctcattctgatgttgattttgg

SEQ ID NO: 139680 - DNA, 80 bp, synthetic construct
  source 1..80: mol_type = other DNA
gcaagtcgcggggctgatgacgtataaaaaagcggactttagacccggaaacggccgattttcccgtggccacgcccgga

SEQ ID NO: 139681 - DNA, 80 bp, synthetic construct
  source 1..80: mol_type = other DNA
catattgtctgggaatatctcatatggagcctagctttggtctaatcttacacgacgggggcaccacgttaaagtttgta

SEQ ID NO: 139682 - DNA, 80 bp, synthetic construct
  source 1..80: mol_type = other DNA
tcattgagacggtggctggaggccattggggcgtgctttttggccttgcatatttctccatggcagggagttgggccaag

SEQ ID NO: 139683 - DNA, 80 bp, synthetic construct
  source 1..80: mol_type = other DNA
tgtcctcaacgctgcctctgctgccagctgccatggtctgttctggggcttggtctttatctgcttcgcgtggcacgtgc

SEQ ID NO: 139684 - DNA, 80 bp, synthetic construct
  source 1..80: mol_type = other DNA
caacagaactgctctcaactgcaacgacagcttgcaaacgggcttcattgccgcactcttctacgcccacaagttcaact

SEQ ID NO: 139685 - DNA, 80 bp, synthetic construct
  source 1..80: mol_type = other DNA
ggtctcggggtgtgctctcccccctcagggtggaccaccaatccccccccccaggaggaagagggtcgtacgcctggatg

SEQ ID NO: 139686 - DNA, 80 bp, synthetic construct
  source 1..80: mol_type = other DNA
cgtcgagtcatcttggcccaaacttgaacaattctggcagaagcacatgtggaacttcatcagtggcatacagtacttag

SEQ ID NO: 139687 - DNA, 80 bp, synthetic construct
  source 1..80: mol_type = other DNA
atgttggtctgtggagacgatctggttgttatttctgagagtgtaggagtctcggaggatataagtgccctgcgagcgtt

SEQ ID NO: 139688 - DNA, 80 bp, synthetic construct
  source 1..80: mol_type = other DNA
ggccgttaaaactaagctcaaactcactccattgcgcgacgcataccgcctggacttatctggatggtttgtgtcgggct

SEQ ID NO: 139689 - DNA, 80 bp, synthetic construct
  source 1..80: mol_type = other DNA
caactcttcaggctgccctgagaggatggccagctgcagacccctcgccgatttcaaccagggctggggccctatcagct

SEQ ID NO: 139690 - DNA, 80 bp, synthetic construct
  source 1..80: mol_type = other DNA
tccccgccccgtacgttgtgcacggctccctgacgatgcgtggggtggcgagggtgatccagcaggcggtgctgttggac

SEQ ID NO: 139691 - DNA, 80 bp, synthetic construct
  source 1..80: mol_type = other DNA
caacgtctccgtggcacacgaccacactggacagagatattactacctcactcgggacccaaccacccccctgtcacggg

SEQ ID NO: 139692 - DNA, 80 bp, synthetic construct
  source 1..80: mol_type = other DNA
ggcgtgcgcagcccgggccgtgttgcgggccttcttaaggtgcggcggcaggacggggactcccgccccgcctcttttcc

SEQ ID NO: 139693 - DNA, 80 bp, synthetic construct
  source 1..80: mol_type = other DNA
tattgcgcaagacgcgcgagggggaggcgacgcagcgcctggaggcgtttctcaggcagcacacgctgccccggcagctg

SEQ ID NO: 139694 - DNA, 80 bp, synthetic construct
  source 1..80: mol_type = other DNA
atgaccacctggcccccctaactacatgggctagcgacggtctgcgtgacctcgccgtggctgtagagcctgttatcttt

SEQ ID NO: 139695 - DNA, 80 bp, synthetic construct
  source 1..80: mol_type = other DNA
agtggaatattacagcttacaagtgttatgataatggaagcattactattactgccactggtgaaattacttctggcaga

SEQ ID NO: 139696 - DNA, 80 bp, synthetic construct
  source 1..80: mol_type = other DNA
ttgcgcgagctgcttgggagacagctcgccatacccctgtcaattcgtggttgggcaacatcatcatgtacgcccccaca

SEQ ID NO: 139697 - DNA, 80 bp, synthetic construct
  source 1..80: mol_type = other DNA
tgtggcgagcgcggtgggctttggtacaaatacctgatacgtcttgaaggtgtagatgagggcacgcaacgctatgcaga

SEQ ID NO: 139698 - DNA, 80 bp, synthetic construct
  source 1..80: mol_type = other DNA
gagttgcttcctgacattctcgtattttgtatagcaaaacgctgccctggcacaacacactcttcttcgtcttctatcct

SEQ ID NO: 139699 - DNA, 80 bp, synthetic construct
  source 1..80: mol_type = other DNA
gaggagaaactgcccatcagtcccctcagcaactctttgttgaggcatcataacctagtctattcaacgtcgtctagaag

SEQ ID NO: 139700 - DNA, 80 bp, synthetic construct
  source 1..80: mol_type = other DNA
caaaacatgttcaaacgaaaccaggccttttcaagaccctaactggagaaattggagcagtaactctggatttcaaaccc

SEQ ID NO: 139701 - DNA, 80 bp, synthetic construct
  source 1..80: mol_type = other DNA
gtcgagttggatgacaaggtaatggtgctggactctttcgagccgctcgcggctgaggaggacaaggaggtctctgtcgc

SEQ ID NO: 139702 - DNA, 80 bp, synthetic construct
  source 1..80: mol_type = other DNA
cgatgcttcgactcaaccgtcactgagagagacatcaggaccgaggagtccatataccaggcctgctccctgcccgagga

SEQ ID NO: 139703 - DNA, 80 bp, synthetic construct
  source 1..80: mol_type = other DNA
tgactcccatgctgagacacaccatagaaaacacgtcagccaacctatctttagcagccatcgccaaccaggcagccgtc

SEQ ID NO: 139704 - DNA, 80 bp, synthetic construct
  source 1..80: mol_type = other DNA
atggggacagttgaagaaaaataaggccatcaagatactgattggattcaggaaggagataggccgcatgctgaacatct

SEQ ID NO: 139705 - DNA, 80 bp, synthetic construct
  source 1..80: mol_type = other DNA
tgtagcagccacgccgatttgcttgtaagctaataataacacaacggcgtttaataaccacaatgacaaaagaccccaaa

SEQ ID NO: 139706 - DNA, 80 bp, synthetic construct
  source 1..80: mol_type = other DNA
tgcgctagagctaaagctcctcccccgtcatgggaccaaatgtggaagtgcttgatacggctcaagcccaccctcactgg

SEQ ID NO: 139707 - DNA, 80 bp, synthetic construct
  source 1..80: mol_type = other DNA
gaacctcagcccctccaagtggatggaggcttaagaaatcttctcttctcttttacagtatggtgatcagccatgattcc

SEQ ID NO: 139708 - DNA, 80 bp, synthetic construct
  source 1..80: mol_type = other DNA
cgtggccgacagcgagctgtacgcggactggagctcggacagcgagggagaacgcgaccaggtcccgtggctggcccccc

SEQ ID NO: 139709 - DNA, 80 bp, synthetic construct
  source 1..80: mol_type = other DNA
atgtacgggattataaccgacaagatcaagctctcgagctacaagctcaacgccgtggccgaagccgtcctgaaggacaa

SEQ ID NO: 139710 - DNA, 80 bp, synthetic construct
  source 1..80: mol_type = other DNA
acggggtttcaagaaagaaatctcaaatatgttgaatataatgaatagaaggaaaagatctgtgaccatgctccttatgc

SEQ ID NO: 139711 - DNA, 80 bp, synthetic construct
  source 1..80: mol_type = other DNA
ccccacccgaacatcgaggagtcggccctcccgtccgaaggggaaatccctttctacggcaaggccatccccctcgcgac

SEQ ID NO: 139712 - DNA, 80 bp, synthetic construct
  source 1..80: mol_type = other DNA
tctcccaccgccatcagccttaccacgcccgaccacacaccccccatgccaagtattggactggaggaggaggaagagga

SEQ ID NO: 139713 - DNA, 80 bp, synthetic construct
  source 1..80: mol_type = other DNA
cagtgggatgcaaaggaaaaggaaggagttgcccaaacagaaaaaaatgttttaaaaacatttggtgttgccgctacagg

SEQ ID NO: 139714 - DNA, 80 bp, synthetic construct
  source 1..80: mol_type = other DNA
ggttgagatgagtccactgctgttttcaacgacacagttgtccatcctaccgtgctctttcacaaccatgcctgcgctgt

SEQ ID NO: 139715 - DNA, 80 bp, synthetic construct
  source 1..80: mol_type = other DNA
cttgcatggacccacccccctcttatacagattggggtctgtgcagaatgaagtgacactcacacatccaataaccaaat

SEQ ID NO: 139716 - DNA, 80 bp, synthetic construct
  source 1..80: mol_type = other DNA
gatggatcgggtagaatcagaagaacccatggatggattcgaatcgcccgtattctccgaaaatacatcttctaattccg

SEQ ID NO: 139717 - DNA, 80 bp, synthetic construct
  source 1..80: mol_type = other DNA
acaaccttaggtaatcacagctttgaactgcaattgggaaatggcgaatcagaagatgatcaaaaacaaattccatctac

SEQ ID NO: 139718 - DNA, 80 bp, synthetic construct
  source 1..80: mol_type = other DNA
ttactctccacatgaacttaatcgggtggctgcctgcctcaggaagcttggggcgcccccgttaagggcgtggagacatc

SEQ ID NO: 139719 - DNA, 80 bp, synthetic construct
  source 1..80: mol_type = other DNA
caaccctcgttggacctaccccactgctgtacaggcttggggctgtccaaaacgagatagtgacaacccatcctatcact

SEQ ID NO: 139720 - DNA, 80 bp, synthetic construct
  source 1..80: mol_type = other DNA
agcacaaacgtgctctgccacacgtgggcgacgaaccggtaccccgggcacgcggtgagcatccggtctatgagccggta

SEQ ID NO: 139721 - DNA, 80 bp, synthetic construct
  source 1..80: mol_type = other DNA
ccgacttgggtgtacgcgtgtgcgagaagatggccctgtacgacgtggtcagcaagctccccgtggccgtgatgggaagc

SEQ ID NO: 139722 - DNA, 80 bp, synthetic construct
  source 1..80: mol_type = other DNA
agcccccaaaaactgcatgctggaataagctctctttgtgtctccggtgatgccttccaagaggtgagtaacaaagcgag

SEQ ID NO: 139723 - DNA, 80 bp, synthetic construct
  source 1..80: mol_type = other DNA
aattggttcagaaattacagacggcgaagccaaaccaatttatgcagataaactataccaaccagaacctcaggtgggag

SEQ ID NO: 139724 - DNA, 80 bp, synthetic construct
  source 1..80: mol_type = other DNA
ccagtggatgaaccggctgatagccttcgcctcaaggggcaaccacgtttcgcccacgcactatgtgcctgagactgatg

SEQ ID NO: 139725 - DNA, 80 bp, synthetic construct
  source 1..80: mol_type = other DNA
aaacagttagacactcccctatcaattcatggctgggaaacatcatccagtatgctccaaccatatgggttcgcatggtc

SEQ ID NO: 139726 - DNA, 80 bp, synthetic construct
  source 1..80: mol_type = other DNA
acctggcagtactggggcagctaccgcaccgcgccaaccgggtcggcggcgtcactgatcaatggagtcgtgaaacttct

SEQ ID NO: 139727 - DNA, 80 bp, synthetic construct
  source 1..80: mol_type = other DNA
cctcaacaccccgggactcccagtatgccaagaccatctggaattctgggagggtgtctttacgggcctcacccacatag

SEQ ID NO: 139728 - DNA, 80 bp, synthetic construct
  source 1..80: mol_type = other DNA
ctcaaaaggtcataccccgtaaacggcgggctccagtcccggcccggcggttggcgtgaacgcaacggcgggagctgggt

SEQ ID NO: 139729 - DNA, 80 bp, synthetic construct
  source 1..80: mol_type = other DNA
aaatgagtccacggcatcacaagctcttaaacaattagccgacaagctatttgtagagagccgcgatgactcggggtcga

SEQ ID NO: 139730 - DNA, 80 bp, synthetic construct
  source 1..80: mol_type = other DNA
cccgcccccccgggatccaggtgtctaaccgcttgcacctgcgggtcaagcgatctttacctggtcacgcgggacgccga

SEQ ID NO: 139731 - DNA, 80 bp, synthetic construct
  source 1..80: mol_type = other DNA
cctactgttgtttactgggaattgctaccatcgtgtgcctgtattccccccatagactgcgctgctcatctcaagcccct

SEQ ID NO: 139732 - DNA, 80 bp, synthetic construct
  source 1..80: mol_type = other DNA
aaaagaagagaacatggtcaaatcacaggtatcagccggacagggtacatcagagactttttctatggggctgctatgcc

SEQ ID NO: 139733 - DNA, 80 bp, synthetic construct
  source 1..80: mol_type = other DNA
tcgtggtggggtcccagcttccatgtgagccagagccagacgtgtccgtactgacatccatgctaacggacccgtctcat

SEQ ID NO: 139734 - DNA, 80 bp, synthetic construct
  source 1..80: mol_type = other DNA
ctcagaacccgtctcggaaggaggacccccacacatgtaagcccctcagaacccgtctcggaaggaggacccccacacat

SEQ ID NO: 139735 - DNA, 80 bp, synthetic construct
  source 1..80: mol_type = other DNA
gtgttgggccacgcgccccccgagctcctccacggccccggcccgctcggcgctcttggcgcccaggacgccctggtact

SEQ ID NO: 139736 - DNA, 80 bp, synthetic construct
  source 1..80: mol_type = other DNA
gttgaaccaggaaaaaaccccaaaaatgtacaaacagcgccgggcacctttaagacctctgaaggtgaagttggagccat

SEQ ID NO: 139737 - DNA, 80 bp, synthetic construct
  source 1..80: mol_type = other DNA
accgccgccgggctcacgagcctgttcagccgtggcccgaatcagaacctccatcttgtaaacaccaatggcaggtggca

SEQ ID NO: 139738 - DNA, 80 bp, synthetic construct
  source 1..80: mol_type = other DNA
cgccgagaacagcgtcacccgattactcaccagggccaagaaccggaggccctcttgcacgaacggggcgtggaagagca

SEQ ID NO: 139739 - DNA, 80 bp, synthetic construct
  source 1..80: mol_type = other DNA
gttacatttactaaactccgacccggaagcggaaaccacatctggaagtaatgtagcagaacacacccgtggcatttggg

SEQ ID NO: 139740 - DNA, 80 bp, synthetic construct
  source 1..80: mol_type = other DNA
ctcatccatgccccccctagagggggagccgggtgatcctgacctcagcgatggttcatggtccaccgtgagtacgcatt

SEQ ID NO: 139741 - DNA, 80 bp, synthetic construct
  source 1..80: mol_type = other DNA
ttgacgccagggtgtactcggatcatcaggcactaaaggcgttcaaggacttcgcctcgggaaaacgttctcagataggg

SEQ ID NO: 139742 - DNA, 80 bp, synthetic construct
  source 1..80: mol_type = other DNA
cgtcgtcttgataacggcgtacggcctcgtgctcgtgtggtacaccgtcttcggtgccagtccgctgcaccgatgtattt

SEQ ID NO: 139743 - DNA, 80 bp, synthetic construct
  source 1..80: mol_type = other DNA
gcagttatcgttccggaaattcccgctgatgaagaagccccaactaccccagaagatccaagacaccctcttcacgcaca

SEQ ID NO: 139744 - DNA, 80 bp, synthetic construct
  source 1..80: mol_type = other DNA
gtgtggatgaacggtaccgggtttacaaaaacctgtggcgctcctccatgcaaagtcaacaccagcaataacacctggca

SEQ ID NO: 139745 - DNA, 80 bp, synthetic construct
  source 1..80: mol_type = other DNA
agggaggtcttggggactggggccaggtagccgtgaatgtcccgaggacagacgagaatatccagggacgccccgaccat

SEQ ID NO: 139746 - DNA, 80 bp, synthetic construct
  source 1..80: mol_type = other DNA
cagacctcttctgccccaccgactgcttcagaaaacaccctgaggccacatatagccggtgtggtgcggggccatggtta

SEQ ID NO: 139747 - DNA, 80 bp, synthetic construct
  source 1..80: mol_type = other DNA
tgccaacatcacagaaaccgaggatgcgcgacaccattgctggcaccatgctcccgcgccctgtcgtgtagtacctgcat

SEQ ID NO: 139748 - DNA, 80 bp, synthetic construct
  source 1..80: mol_type = other DNA
cgctgtaacgttaccgacgctaagattatattaaaccgcccggtttggcgaacaaccggattcttagatggatgccataa

SEQ ID NO: 139749 - DNA, 80 bp, synthetic construct
  source 1..80: mol_type = other DNA
ttcttcactgaggtggatggtgtcagaattcaccgccatgcgcctccgtgcaagcccttgctgacggatgaagtcacgtt

SEQ ID NO: 139750 - DNA, 80 bp, synthetic construct
  source 1..80: mol_type = other DNA
tactgcttgtcagtgggctgcgtagtgatatgcggtagagtctctaccactggcaagcccgtgctaataccagatcggga

SEQ ID NO: 139751 - DNA, 80 bp, synthetic construct
  source 1..80: mol_type = other DNA
tgcaggcttctttactgctctattttatgtccacaagatcaactcctcggggtgtaccgcccgaatgagttcctgcaagc

SEQ ID NO: 139752 - DNA, 80 bp, synthetic construct
  source 1..80: mol_type = other DNA
tatggagttccgcgttacataacttacggtaaatggcccgcctggctgaccgcccaacgacccccgcccattgacgtcaa

SEQ ID NO: 139753 - DNA, 80 bp, synthetic construct
  source 1..80: mol_type = other DNA
cggatcctgtgtcgcgccgccgagcaggccctcgcccgtcgccgccggtccaggcggtcccaggatgactacggtgcggt

SEQ ID NO: 139754 - DNA, 80 bp, synthetic construct
  source 1..80: mol_type = other DNA
aaggacggagcgaccgccgcaaaaccgtcgctttcaaccaagccctctccaatgaaacccgctgtgagcaaatctcagaa

SEQ ID NO: 139755 - DNA, 80 bp, synthetic construct
  source 1..80: mol_type = other DNA
ctcatgggaccaaatgtggaagtgtttgacgcggctgaagccaacgctgcatggtccaacgcctctcctatataggctgg

SEQ ID NO: 139756 - DNA, 80 bp, synthetic construct
  source 1..80: mol_type = other DNA
taacagctcaggatgccccgagcgcttagccgcttgtcggagcatcgagtccttccgcataggatggggctcccttgagt

SEQ ID NO: 139757 - DNA, 80 bp, synthetic construct
  source 1..80: mol_type = other DNA
tcgtgtagtgtagggcgtggttgatggcgaacacggggctgcatagcttgcggatgcgcgtgagggtgaggatgtgcgag

SEQ ID NO: 139758 - DNA, 80 bp, synthetic construct
  source 1..80: mol_type = other DNA
caagtgaacccactgactctaactgcggcagtacttttgctaatcacacattatgctatcataggtccaggattgcaagc

SEQ ID NO: 139759 - DNA, 80 bp, synthetic construct
  source 1..80: mol_type = other DNA
cattctggaagacaacaatgaagtcgaaattgtcacccgcacaggtgaacgcaagatgctgaagccacgctggttggatg

SEQ ID NO: 139760 - DNA, 80 bp, synthetic construct
  source 1..80: mol_type = other DNA
agagccacttccagaagcgcagcaagataaaggtgaacggcatggtgaacatcgacatgtacgggattataaccgacaag

SEQ ID NO: 139761 - DNA, 80 bp, synthetic construct
  source 1..80: mol_type = other DNA
tgcgcgctcacatgcttctgcgcatctgcgcactcgtcaagcacctcgcgggaggtaagtacgtgcaaatggccctcctc

SEQ ID NO: 139762 - DNA, 80 bp, synthetic construct
  source 1..80: mol_type = other DNA
agtcggcgtgggagcggtttctgctgtaccgcccctccaccaccaccaacagcggcctgatggcccccgagctgtacgtg

SEQ ID NO: 139763 - DNA, 80 bp, synthetic construct
  source 1..80: mol_type = other DNA
gtaaggcgccgctgcggcccgcctacgggaaccctggggtgggttggcgcgggacccgaggttagcgggcgacggcgttt

SEQ ID NO: 139764 - DNA, 80 bp, synthetic construct
  source 1..80: mol_type = other DNA
caacgtgttgcattactaccgtcaccttcacagctaagaaaaaatcagagtaagaggagtcgccggaggaggcgtgagga

SEQ ID NO: 139765 - DNA, 80 bp, synthetic construct
  source 1..80: mol_type = other DNA
ccaacagcagcattgtatatgaggcagacgatttcatcatgcatctccctggatgcatcccatgtgtcaggtcaggcaat

SEQ ID NO: 139766 - DNA, 80 bp, synthetic construct
  source 1..80: mol_type = other DNA
gccaaactcttccccagcctccccggcattcccttcttatcatgccagaagggctaccggggtgcctggcgtggtgacgg

SEQ ID NO: 139767 - DNA, 80 bp, synthetic construct
  source 1..80: mol_type = other DNA
tgtgcagcctttcttaaagatgtatgagtaagagcaaaggtatctctgaccattacttttaaatactggtatttaaaatc

SEQ ID NO: 139768 - DNA, 80 bp, synthetic construct
  source 1..80: mol_type = other DNA
ccaacaccaagcgtttctccgcgttcaacgttagcagcgactacgacatgttgtattttttatgtctggggttcattcca

SEQ ID NO: 139769 - DNA, 80 bp, synthetic construct
  source 1..80: mol_type = other DNA
tggccctgggctctgaaggtgagatccccttctacggtagggctttaccgatagcccttgtcaaaggagggaggcacctc

SEQ ID NO: 139770 - DNA, 80 bp, synthetic construct
  source 1..80: mol_type = other DNA
gtactctccaactgaactcaatcgggtgggagcatgcctcagaaagcttggggcccctccattgagagcgtggagacatc

SEQ ID NO: 139771 - DNA, 80 bp, synthetic construct
  source 1..80: mol_type = other DNA
tgtatgaaaagtctggcatccccgccctgtgcagttgtcacttttagcgctgcctttgaatttgtgtatcttatggatcg

SEQ ID NO: 139772 - DNA, 80 bp, synthetic construct
  source 1..80: mol_type = other DNA
tccccccgtagattggcagcagcagtcaagcaagcctgggaagatggtatctgcgggatctcctctgtttcaagaatgga

SEQ ID NO: 139773 - DNA, 80 bp, synthetic construct
  source 1..80: mol_type = other DNA
catcaatgccgttgctttctacaggggtctggatgtgtcggttataccaacgtcaggcgacgtggtcgtatgtgccacgg

SEQ ID NO: 139774 - DNA, 80 bp, synthetic construct
  source 1..80: mol_type = other DNA
aacatgtggggcccctccatgtaccatctacggaggaagcagcgttactggtaacgacacgctgaactgctccactgact

SEQ ID NO: 139775 - DNA, 80 bp, synthetic construct
  source 1..80: mol_type = other DNA
ccactgaacctgtaatatttagtcccatggaaatcaaggtcattacctggggcgcggatacagcagcttgcggagatatc

SEQ ID NO: 139776 - DNA, 80 bp, synthetic construct
  source 1..80: mol_type = other DNA
aaatgttcaacaacagcatctaaaagagccacggctctaatttccacaaacaaaagtaaagcaaatgcgttatcatgaaa

SEQ ID NO: 139777 - DNA, 80 bp, synthetic construct
  source 1..80: mol_type = other DNA
gctggtgtttcgggtgctcttgtggcttttaagatcatgagcggcgaggccccgtcagtggaggacatggtcaacctgct

SEQ ID NO: 139778 - DNA, 80 bp, synthetic construct
  source 1..80: mol_type = other DNA
agggaagccgccccccaccggaccaccggccgaggcgcctcgggggcagagtgacgtgggggggggaagacggagagaag

SEQ ID NO: 139779 - DNA, 80 bp, synthetic construct
  source 1..80: mol_type = other DNA
cggagtgaccggctggcggctgtgcgaacgcattctggcgcagctgttgaattttgaccttctcaagctggcgggagacg

SEQ ID NO: 139780 - DNA, 80 bp, synthetic construct
  source 1..80: mol_type = other DNA
agacctgtcactagagaaggctgccaatgtgcaatgggatgaaatggcggacataactggctcaagcccaatcatagaag

SEQ ID NO: 139781 - DNA, 80 bp, synthetic construct
  source 1..80: mol_type = other DNA
gaattcataatatcccccttgaatacccccggttttgtgctttttgatttgggtgagtttactcatttaaacccttttct

SEQ ID NO: 139782 - DNA, 80 bp, synthetic construct
  source 1..80: mol_type = other DNA
gccgctcgcgtgtgtgagaaataaagaacgagacagacgaaaacgtaccgccttgtgtggtttattcgggggtcgggcgg

SEQ ID NO: 139783 - DNA, 80 bp, synthetic construct
  source 1..80: mol_type = other DNA
acacaaactttgtgcaggaactgatacttttcgcaaggaactaaatcacacatgtaatttacaaaatatgacacttacct

SEQ ID NO: 139784 - DNA, 80 bp, synthetic construct
  source 1..80: mol_type = other DNA
gccacggagaaagaaggtcgtgcgcctcgatgcgtcaaccgtgtcgcaagctttggctgagctggcccagaagagttttc

SEQ ID NO: 139785 - DNA, 80 bp, synthetic construct
  source 1..80: mol_type = other DNA
aactcaatcgggttggagcatgcctcaggaagcttggggcccccccgttgagagcctggcgacatcgagccagagcggtc

SEQ ID NO: 139786 - DNA, 80 bp, synthetic construct
  source 1..80: mol_type = other DNA
ttcgaattgataaaaacggaagccaaacagcctgccaccctaaggaagtactgcatagaagcaaagctaaccaacacaac

SEQ ID NO: 139787 - DNA, 80 bp, synthetic construct
  source 1..80: mol_type = other DNA
aggactggggtccgcacggtgacaactggggaagccatcacttactccacatacggcaagttcctcgcagacggtggttg

SEQ ID NO: 139788 - DNA, 80 bp, synthetic construct
  source 1..80: mol_type = other DNA
tgttgtcgacggtgacacactgaaggagtgtccgctcaaacatagagcatggaatagcttccttgtggaggatcacgggt

SEQ ID NO: 139789 - DNA, 80 bp, synthetic construct
  source 1..80: mol_type = other DNA
cagggctatccacactgccggggaatcccgctgtggcctcaatgatggcgttcagtgctgccctcaccagcccgctgtcc

SEQ ID NO: 139790 - DNA, 80 bp, synthetic construct
  source 1..80: mol_type = other DNA
ttcacggaggctatgaccaggtactctgctccccccggcgacatgccccagcctacttacgacttggaactaattacatc

SEQ ID NO: 139791 - DNA, 80 bp, synthetic construct
  source 1..80: mol_type = other DNA
gcgcgacgcgtaaaacttccgagcggtcacagcctcgcggaagacggcagcctatccccaaggcgcgtcggagcgaaggc

SEQ ID NO: 139792 - DNA, 80 bp, synthetic construct
  source 1..80: mol_type = other DNA
atgcgcccacaggaagcggtaaaagcaccaaggtgccagctgcttatgtggcgcaggggtatagcgtgctagtgcttaac

SEQ ID NO: 139793 - DNA, 80 bp, synthetic construct
  source 1..80: mol_type = other DNA
tcgcctgatcgtgtatccggatctcggatcccgggtttgcgagaagagagcgcttcacgacgtcatcaaaaaaactgcct

SEQ ID NO: 139794 - DNA, 80 bp, synthetic construct
  source 1..80: mol_type = other DNA
agtgctctatcaacaattcgatgagatggaggagtgttccagacacatcccctacctcgtcgaaggtcaacaccttgcag

SEQ ID NO: 139795 - DNA, 80 bp, synthetic construct
  source 1..80: mol_type = other DNA
cgggcccatgctgtgcccctcgggccatgtagcggggatcttccgcgctgctgtgtgtactaggtgtgtggctaagtccc

SEQ ID NO: 139796 - DNA, 80 bp, synthetic construct
  source 1..80: mol_type = other DNA
aattgcccgactgactgtttcaggaaacatccggaaaccacttacaccaggtgtggatcaggtccatggctcacgcccag

SEQ ID NO: 139797 - DNA, 80 bp, synthetic construct
  source 1..80: mol_type = other DNA
agcagcgaccaactcccgaaccagaagaggtggaagtggaagaaaaattacccccgttggaaacggcacctcccttgcct

SEQ ID NO: 139798 - DNA, 80 bp, synthetic construct
  source 1..80: mol_type = other DNA
tgcttgcgaaagaacgggaaaaaggtcattcaacttagtaggaagacttttgaaacagaatatcagaagactaaactaaa

SEQ ID NO: 139799 - DNA, 80 bp, synthetic construct
  source 1..80: mol_type = other DNA
agcagtgtctcgaagacgagaacctgaaggagctggacaagcttcttgctagaaacctcaaaaagctgtggacgggcttc

SEQ ID NO: 139800 - DNA, 80 bp, synthetic construct
  source 1..80: mol_type = other DNA
caggctcaaggcgcgcatgcccgacggcgaggatctcgtcgtgacccatggcgatgcctgcttgccgaatatcatggtgg

SEQ ID NO: 139801 - DNA, 80 bp, synthetic construct
  source 1..80: mol_type = other DNA
aggtgacgcccaaggagcccggcctcgtcgataacgatcacgttgctgcgggtaaaggccggcagcgccccgtgggtggc

SEQ ID NO: 139802 - DNA, 80 bp, synthetic construct
  source 1..80: mol_type = other DNA
taacaaatcgattaagttgggagggatgcatgcgaggggaaatcagatgcattttggcctgaatttttaggttagcaatg

SEQ ID NO: 139803 - DNA, 80 bp, synthetic construct
  source 1..80: mol_type = other DNA
tcccgagatggtcctcgaaattattttcggcggccattggggtgtggtgtttggcttggcctacttctccatgcaaggag

SEQ ID NO: 139804 - DNA, 80 bp, synthetic construct
  source 1..80: mol_type = other DNA
taattggggccccaatgacccccggcggaaatcgcgcaacttgggtaaggtcatcgataccctgacgtgcggattcgccg

SEQ ID NO: 139805 - DNA, 80 bp, synthetic construct
  source 1..80: mol_type = other DNA
gcgactccgactcgcggtcggacgactccgtgcagcccgacgttgtcgttcgtcgcagatggagcgacggccccgccccc

SEQ ID NO: 139806 - DNA, 80 bp, synthetic construct
  source 1..80: mol_type = other DNA
accgcggaggaaaaaactagtgcggcttgacgagtccaccgttagccaagcactagccgagctcgctcagaagagcttcc

SEQ ID NO: 139807 - DNA, 80 bp, synthetic construct
  source 1..80: mol_type = other DNA
gtacacactggagaccagcaccaagttggaaatgagaccacagaacatggaacaactgcaaccataacacctcaagctcc

SEQ ID NO: 139808 - DNA, 80 bp, synthetic construct
  source 1..80: mol_type = other DNA
gaggagaatggggaagcgcccggtcacctcccccagccacgcgcgttggtcggggccaaagtcatagcgcaggcgctgtg

SEQ ID NO: 139809 - DNA, 80 bp, synthetic construct
  source 1..80: mol_type = other DNA
ggccgcgcgaagctgcagctccaggtccgcgagttccccgtaaaaggcgtccgtctcccgaatgacatccctagccacaa

SEQ ID NO: 139810 - DNA, 80 bp, synthetic construct
  source 1..80: mol_type = other DNA
tgaatggagagacattccataccttcccaagtcacaagacatgatgtgctcatcattggttggaagaagggaaagagcag

SEQ ID NO: 139811 - DNA, 80 bp, synthetic construct
  source 1..80: mol_type = other DNA
tgacttcaacgccagcacggacttgttgtgccctacggattgttttaggaagcatcctgatgccacttatattaagtgtg

SEQ ID NO: 139812 - DNA, 80 bp, synthetic construct
  source 1..80: mol_type = other DNA
agtcacttactctgtcactccattggatctaccccagatcattcaacgtttacatggcttggcagccttttcgctccatg

SEQ ID NO: 139813 - DNA, 80 bp, synthetic construct
  source 1..80: mol_type = other DNA
gctgaagtccctgggacaaaaatagctggcatgctcttgctatctctgctcatgatgatcgttttgattcctgagcctga

SEQ ID NO: 139814 - DNA, 80 bp, synthetic construct
  source 1..80: mol_type = other DNA
gcatacccatcccagcgcccggctactgcagggcgctgtggagggtaagtgctgaggagtatgtcgaagtcagaagggtg

SEQ ID NO: 139815 - DNA, 80 bp, synthetic construct
  source 1..80: mol_type = other DNA
ccacgcccacgacgccctggcgatccaatacgaacaggggcttggcctgctggcgcagcaggcacgcattggcttgggct

SEQ ID NO: 139816 - DNA, 80 bp, synthetic construct
  source 1..80: mol_type = other DNA
cgggttaatagacaatgaccacgttcggatcgcgcagagccgatagtatgtgctcactaatgacgtcatcgcgctcgtgg

SEQ ID NO: 139817 - DNA, 80 bp, synthetic construct
  source 1..80: mol_type = other DNA
tgtgccatctttccaagtacgtggtccgcgggattctttgatcgttctcgcggccctggcccacccctttctggtttttg

SEQ ID NO: 139818 - DNA, 80 bp, synthetic construct
  source 1..80: mol_type = other DNA
cggcccaggcaaccatcatttcgccgcaacaccacacttttgttcaggactgcaattgttccatttacccgggccacgtc

SEQ ID NO: 139819 - DNA, 80 bp, synthetic construct
  source 1..80: mol_type = other DNA
cgccgagatgagaatgctgccggacttcttcaccgggaactgggatgacatgttccaggggctgctggaggctgagcatc

SEQ ID NO: 139820 - DNA, 80 bp, synthetic construct
  source 1..80: mol_type = other DNA
gaaggcggtgatgagctgcctttgcccttggtggaagcggcttccaggggccagagccttttcccaagcctcccatcgct

SEQ ID NO: 139821 - DNA, 80 bp, synthetic construct
  source 1..80: mol_type = other DNA
gagggagcggctagacgctcggtcggggttctctctttcttctccttcctcctcttgggaaggtgagacgatgctgctgg

SEQ ID NO: 139822 - DNA, 80 bp, synthetic construct
  source 1..80: mol_type = other DNA
tattgatggcatattggtgctgtttgggacacgccggacttccgactattggattgtcgcccgataataaatgcatccgc

SEQ ID NO: 139823 - DNA, 80 bp, synthetic construct
  source 1..80: mol_type = other DNA
atatgatattgacatgaacttttttgatcaagcgtcacagaaagcaaacttcagtccaaaaattgtgatgtatgcagaaa

SEQ ID NO: 139824 - DNA, 80 bp, synthetic construct
  source 1..80: mol_type = other DNA
gcggtcattggatggatgctaggaagcaacacaatgcaacgcgtcgtgtttgccatcctattgctcctggtggcaccagc

SEQ ID NO: 139825 - DNA, 80 bp, synthetic construct
  source 1..80: mol_type = other DNA
gggtgaaagtcatcggcatcctcttcctgtttgctggtgtggacgctgtcacacacactaccggttccgctgtaggtgac

SEQ ID NO: 139826 - DNA, 80 bp, synthetic construct
  source 1..80: mol_type = other DNA
ccgagacccccaacgccacgcagccagaactcgccccggaagaccccgaggattcggccctcttggaggaccccgtggtg

SEQ ID NO: 139827 - DNA, 80 bp, synthetic construct
  source 1..80: mol_type = other DNA
gcttactcctactttctgtaggggtaggcatcttcatgcttcccgctcggtaggcgtgaagcaaaacactccataccatt

SEQ ID NO: 139828 - DNA, 80 bp, synthetic construct
  source 1..80: mol_type = other DNA
gtccactacacaatggcagatcctcccatgctcattcacgacattgccagctctttcgaccggcctcatccatctccacc

SEQ ID NO: 139829 - DNA, 80 bp, synthetic construct
  source 1..80: mol_type = other DNA
gttctgcgcggcgccagggcccccctgccgggcggtgcggtggggcggggcctgggtcgcgggggggaaggaagaaaagg

SEQ ID NO: 139830 - DNA, 80 bp, synthetic construct
  source 1..80: mol_type = other DNA
ggaatacgaccgcgtgcacatctactacaaccatcgccgggaggagtggctggtgcgcgacccggtcagcgggcagcgcg

SEQ ID NO: 139831 - DNA, 80 bp, synthetic construct
  source 1..80: mol_type = other DNA
attaggctcaaaaccccgatcccgaatctccatgcgtagcattagttgtacaaagtcatccaaatcattgcatataagct

SEQ ID NO: 139832 - DNA, 80 bp, synthetic construct
  source 1..80: mol_type = other DNA
acccctacgggtggttagagaaccctgccctgggaccacagtcaagattgaccagaattgtgacaaaagggggtcgtcgt

SEQ ID NO: 139833 - DNA, 80 bp, synthetic construct
  source 1..80: mol_type = other DNA
actcccctgtcagactgggccgctgagggtcttcgagacttggcggtggccctggagccggttgtgttcacgcccatgga

SEQ ID NO: 139834 - DNA, 80 bp, synthetic construct
  source 1..80: mol_type = other DNA
cgctggcctcgctggccgcgcgctgcgccgccccgccccccggcggcgcgcccgccgccttcggcccgctgcgcgcctcg

SEQ ID NO: 139835 - DNA, 80 bp, synthetic construct
  source 1..80: mol_type = other DNA
cgccacctcgatcgtactcaggatggagccggtgggcaccatggccgcggcgtaccggtaacccggagggtcgcgggcag

SEQ ID NO: 139836 - DNA, 80 bp, synthetic construct
  source 1..80: mol_type = other DNA
atttcgtgccggttgaatcccttgaaaccacgatgcgggcccccgttttcacagataattccacccctccagctgtgccc

SEQ ID NO: 139837 - DNA, 80 bp, synthetic construct
  source 1..80: mol_type = other DNA
gtgcactcaatgacacatggaagatggagaaagcctctttcattgaagtcaaaagctgccactggccaaagtcacacacc

SEQ ID NO: 139838 - DNA, 80 bp, synthetic construct
  source 1..80: mol_type = other DNA
tcggtctggttggagtccgcgacgtatcgaaacacgtccatctcctggcgcccgacgatcacgccgccgtcgcagcgctc

SEQ ID NO: 139839 - DNA, 80 bp, synthetic construct
  source 1..80: mol_type = other DNA
ggcgcgccgaaccgagggccggtcctgggctcagcccgggtacccttggcccctatatgggaatgagggctgcgtgtgtg

SEQ ID NO: 139840 - DNA, 80 bp, synthetic construct
  source 1..80: mol_type = other DNA
ctcggggctgcctccggttccaccaccaaggaggaaaaggactgtacagctcgacgagtccgcggcagctaaggcgctag

SEQ ID NO: 139841 - DNA, 80 bp, synthetic construct
  source 1..80: mol_type = other DNA
gttaagttgcgggcatatttcaacacgcccggattaccagtgtgccaggaccacttagagttctgggaggcagtttacac

SEQ ID NO: 139842 - DNA, 80 bp, synthetic construct
  source 1..80: mol_type = other DNA
ccagatacattaaaataacacataaggtaaaatctaggacattatccgggcggaatagagtcatccgatagattaacagg

SEQ ID NO: 139843 - DNA, 80 bp, synthetic construct
  source 1..80: mol_type = other DNA
ccccccagcaagcaaacccccgttcctcctcccaggaggaagaggacggttcagctcactgagtccgttgttaccactgc

SEQ ID NO: 139844 - DNA, 80 bp, synthetic construct
  source 1..80: mol_type = other DNA
tcccgtcgaataatccactcactagctcctgcaaaccttctggtaactccaacatacgcatatacaccaatgaaaaactg

SEQ ID NO: 139845 - DNA, 80 bp, synthetic construct
  source 1..80: mol_type = other DNA
caaatgattgcagtagctccggggaaaccagccattaatgtccagacaacaccaggagtgtttaagaccccgctcgggac

SEQ ID NO: 139846 - DNA, 80 bp, synthetic construct
  source 1..80: mol_type = other DNA
gccggcctcggcctaccaagtacgcaactcctcgggcctctaccatgtcaccaatgattgccctaattcgagtattgtgt

SEQ ID NO: 139847 - DNA, 80 bp, synthetic construct
  source 1..80: mol_type = other DNA
ttttaataaaccgtttgtgtttaacccgaccgtggtgtatgtctggtgtgtggcgtccgatcccgttactatcaccgtcc

SEQ ID NO: 139848 - DNA, 80 bp, synthetic construct
  source 1..80: mol_type = other DNA
tggaaacccatcccccataaccagtgcaagtgcagcccaacggagaggtagagtgggcaggaatcccaaccaagttggag

SEQ ID NO: 139849 - DNA, 80 bp, synthetic construct
  source 1..80: mol_type = other DNA
gtccgctgctctgccccatgggacacgccgccggcatatttcgcgcggcggtgtgtactcgaggggtggccaaggcagtg

SEQ ID NO: 139850 - DNA, 80 bp, synthetic construct
  source 1..80: mol_type = other DNA
taggtgagtgataaaacgaggtaggtgctctttaatcattgcagtaaaggaaaagtcctctaaataagtcactagggccc

SEQ ID NO: 139851 - DNA, 80 bp, synthetic construct
  source 1..80: mol_type = other DNA
caatcagtccattgagtaattctctcatccgacatcataatttggtgtattccacctcttcacgcagcgcgtcccttcga

SEQ ID NO: 139852 - DNA, 80 bp, synthetic construct
  source 1..80: mol_type = other DNA
agccgcacctgggcctgttgggtgacgtggttacagatgcggtccgccaggcggcgggcgatggtcgccccctggttcgc

SEQ ID NO: 139853 - DNA, 80 bp, synthetic construct
  source 1..80: mol_type = other DNA
aggagctgaacgtcttgcagtgatgggtgatgctgcttgggattttagttctgctggtgggttcttcacatctgtgggaa

SEQ ID NO: 139854 - DNA, 80 bp, synthetic construct
  source 1..80: mol_type = other DNA
gtggtcccatgtttaactccaagggccagtcatgcgggtaccgcaggtgccgggccagtggcgtcctcaccaccagcctt

SEQ ID NO: 139855 - DNA, 80 bp, synthetic construct
  source 1..80: mol_type = other DNA
ccggctggtggtggtcacttatcttcgtgtgctttgtttggtacgtgaggggccggatggtgcccgcatgcacttacata

SEQ ID NO: 139856 - DNA, 80 bp, synthetic construct
  source 1..80: mol_type = other DNA
catttgatgagatggaggaatgtgcttccaggacccccctcatcgaggaggggcatcggatcgccgagatgctaaagtcc

SEQ ID NO: 139857 - DNA, 80 bp, synthetic construct
  source 1..80: mol_type = other DNA
gtggcctctcctcctgctcctgttggcattgccccccagggcgtatgctttggataaggaggtcgcagcgtcgtgtggtg

SEQ ID NO: 139858 - DNA, 80 bp, synthetic construct
  source 1..80: mol_type = other DNA
cccccgaggcccgcgtggctataaggtctcttacagagagactttacatcggaggcccacttaccaattctaagggacaa

SEQ ID NO: 139859 - DNA, 80 bp, synthetic construct
  source 1..80: mol_type = other DNA
ggccttctgggatgttcgacagcgtagtgctctgtgagtgctatgatgccggggcagcctggtacgaactcacgcctgct

SEQ ID NO: 139860 - DNA, 80 bp, synthetic construct
  source 1..80: mol_type = other DNA
ccgctcggaaggggagggagatacttctgggaccggccgatagttttaaagggcaggtgtggcgactccttgcacctatc

SEQ ID NO: 139861 - DNA, 80 bp, synthetic construct
  source 1..80: mol_type = other DNA
catcccgtcctgcgccaaatgcgtcccacccccccggcgaccaccgcaaccgcggccgtagcaggcgccggcgctgtaca

SEQ ID NO: 139862 - DNA, 80 bp, synthetic construct
  source 1..80: mol_type = other DNA
tccggctaggacggtttgcggcccggtctactgtttcactcccaaccctgttgttgtgggtaccactgacaagcagggcc

SEQ ID NO: 139863 - DNA, 80 bp, synthetic construct
  source 1..80: mol_type = other DNA
tccgccgtggaagttaagaacaacagtgactcttacatggtgaccaatgactgctccaacaggagcatcacttggcagct

SEQ ID NO: 139864 - DNA, 80 bp, synthetic construct
  source 1..80: mol_type = other DNA
accaccctcaaatctgtgacagataaccctcagactatcctgtcgtcatggaagtgatatcgcggaaggaaaatacgata

SEQ ID NO: 139865 - DNA, 80 bp, synthetic construct
  source 1..80: mol_type = other DNA
ccgtgcgcaggagtggcgactctcggggtgctctgctgagtcctaggccgatatccacccttaaggggtcctcaggcggt

SEQ ID NO: 139866 - DNA, 80 bp, synthetic construct
  source 1..80: mol_type = other DNA
aaatccatcagcggcccaaaaggacccgtctgtcagatgtacaccaacgtcgaccaagacctggtgggatggcctgcccc

SEQ ID NO: 139867 - DNA, 80 bp, synthetic construct
  source 1..80: mol_type = other DNA
tccggacctgcgacagcggtaaggtggaggccacggggttcaccccggaagagctcgacaccatggaccgggaggcactt

SEQ ID NO: 139868 - DNA, 80 bp, synthetic construct
  source 1..80: mol_type = other DNA
tgcccgaggaagctcgggttgccatacactcactaactgagagactttacgtgggcgggcccatgatgaacagcaagggc

SEQ ID NO: 139869 - DNA, 80 bp, synthetic construct
  source 1..80: mol_type = other DNA
tggctaattggaaagattgcgcgcggatggttgactgttcatcatcggaacatcgcacaagtgggatgattacctgcgcg

SEQ ID NO: 139870 - DNA, 80 bp, synthetic construct
  source 1..80: mol_type = other DNA
tggtcaatccatgcccaccaccaatggatgacaacagaagacatgttatcagtgtggaatagagtttggatagaggaaaa

SEQ ID NO: 139871 - DNA, 80 bp, synthetic construct
  source 1..80: mol_type = other DNA
cagtggatcaatgaagactacccaagtccttgctgcggcgactggctgcgtaccatctgggactgggtttgcatggtgtt

SEQ ID NO: 139872 - DNA, 80 bp, synthetic construct
  source 1..80: mol_type = other DNA
cctggctcagaacaaagctcgtgccggcactgccaggtttgcctttcctctcatgtcaacgggggttccgcggcgtgtgg

SEQ ID NO: 139873 - DNA, 80 bp, synthetic construct
  source 1..80: mol_type = other DNA
taagtcccttcaatttgtgcccgtggagaccttggccacacaatcgcggtctccctccttcactgacaattcagttcctc

SEQ ID NO: 139874 - DNA, 80 bp, synthetic construct
  source 1..80: mol_type = other DNA
gtaaagggggggagacacctcattttttgtcactcaaaaaagaagtgcgacgagctggccaagcagctgtcatctttagg

SEQ ID NO: 139875 - DNA, 80 bp, synthetic construct
  source 1..80: mol_type = other DNA
gtgttggtggggacgagctcgtcgtaactaaacagaatcacgcgggcacagctcgcccccgagccccacgcaaggcgcag

SEQ ID NO: 139876 - DNA, 80 bp, synthetic construct
  source 1..80: mol_type = other DNA
gggactcgtcctggaggccgctatttggtgggtggttggtgctggcgcgcgcctataaaaaaggacacaccgccgccata

SEQ ID NO: 139877 - DNA, 80 bp, synthetic construct
  source 1..80: mol_type = other DNA
cctccggcacttccggtatgggcccggcccgactacaatcccccactcctccagtcatggcaagctcctgattatgagcc

SEQ ID NO: 139878 - DNA, 80 bp, synthetic construct
  source 1..80: mol_type = other DNA
ggatgggccggagttcgtcagaatgtgatgggatcaacggtggacgggcgcccagtgcttccagcaaattcctctaccat

SEQ ID NO: 139879 - DNA, 80 bp, synthetic construct
  source 1..80: mol_type = other DNA
aggtgagcgctaacctactgactgtagaggaagcatgctccctaacccctcctcattcagcccgatccaaatttggatat

SEQ ID NO: 139880 - DNA, 80 bp, synthetic construct
  source 1..80: mol_type = other DNA
gtctcgagaagccaacggcgtggtcgcacgggacgaggaaagccgggggtgtataggtttgtctcgcaggtggaaagacc

SEQ ID NO: 139881 - DNA, 80 bp, synthetic construct
  source 1..80: mol_type = other DNA
gcccccccggtggccaggtcattaacaccttgcacttgcgggtccagtgacttgtacctggtaacgcgggctgcggacgt

SEQ ID NO: 139882 - DNA, 80 bp, synthetic construct
  source 1..80: mol_type = other DNA
cataacacccaacgcagcggaggagtctaagctgcccgttaaccccctgagcaactcactactgcggcaccacaacatgg

SEQ ID NO: 139883 - DNA, 80 bp, synthetic construct
  source 1..80: mol_type = other DNA
gcttggtgccgtccagaatgaggtcactctaacccatcctataaccaaatacatcatggcttgcatgtcagccgacttgg

SEQ ID NO: 139884 - DNA, 80 bp, synthetic construct
  source 1..80: mol_type = other DNA
gtggcggcgaaccgcccgtctcccgcgttgcacgcgggacagcaacccccgatgcctaggtagtagcccatcccggagag

SEQ ID NO: 139885 - DNA, 80 bp, synthetic construct
  source 1..80: mol_type = other DNA
cgccccgcccacctatctcgcttccccccgggagatccgtgtcctgcacagcctgggtggtgactatgtgagcttctttg

SEQ ID NO: 139886 - DNA, 80 bp, synthetic construct
  source 1..80: mol_type = other DNA
ccaagcttgcaacctggatcccacagccaggaaagccattaggaacctcaccgagaggctatactgtggtggcccaatgt

SEQ ID NO: 139887 - DNA, 80 bp, synthetic construct
  source 1..80: mol_type = other DNA
ttccatgtagaaaccaggatgaactgatagggagagccagaatctcgcagggggctggatggagcttaagggaaacagct

SEQ ID NO: 139888 - DNA, 80 bp, synthetic construct
  source 1..80: mol_type = other DNA
gcgcgccgcatcagggcgtcacagtcccacacgaggggtggcagcagcgccgggtctcgcattaggtgattcagctcggc

SEQ ID NO: 139889 - DNA, 80 bp, synthetic construct
  source 1..80: mol_type = other DNA
agaggtgggggatatattaaaggtgccttgtgtgccgctcccgtctgacgatcttgattggcgttacgagaccccctcgg

SEQ ID NO: 139890 - DNA, 80 bp, synthetic construct
  source 1..80: mol_type = other DNA
tacagtgcagaatactactttattgattgggtttttaataagaggaaatgaaagtactactgatcagacagaggctacct

SEQ ID NO: 139891 - DNA, 80 bp, synthetic construct
  source 1..80: mol_type = other DNA
aaagttaccatctatgaattacacaaagttaataaaactaaatctatgcttaagccatacactacaaaaagaactacagt

SEQ ID NO: 139892 - DNA, 80 bp, synthetic construct
  source 1..80: mol_type = other DNA
aacggcacggccgcggccccgacgggacgcaacgccgtgaggctcgcgaactgccgcctcagctcggccgccctgtcgtc

SEQ ID NO: 139893 - DNA, 80 bp, synthetic construct
  source 1..80: mol_type = other DNA
gattgcaggagctcattggggtattcttggcgccgtattgtattacagtatggttgccaactgggccaaggtgtgctgtg

SEQ ID NO: 139894 - DNA, 80 bp, synthetic construct
  source 1..80: mol_type = other DNA
acccctcttcgagactgggcgcacaacggcctgcgagatctggccgtggctgtggaaccagtcgtcttctcccgaatgga

SEQ ID NO: 139895 - DNA, 80 bp, synthetic construct
  source 1..80: mol_type = other DNA
cactatgtccaaatggctctcatcaagctggctgcactgacgggcacgtacgtgtatgaccatcttaccccactgcggga

SEQ ID NO: 139896 - DNA, 80 bp, synthetic construct
  source 1..80: mol_type = other DNA
ccccaccatggaccttcttaccggcgttccaaacagcatgcttcaaagcccccaggttgtacccaccctgcgtcacaacc

SEQ ID NO: 139897 - DNA, 80 bp, synthetic construct
  source 1..80: mol_type = other DNA
gctggctacaggaaggccagacgcgaattatttttgatggcgttaactcggcgtttcatctgtggtgcaacgggcgctgg

SEQ ID NO: 139898 - DNA, 80 bp, synthetic construct
  source 1..80: mol_type = other DNA
tgtagggcgccacggcgggaggtgtcaggcggactatcgggactcgccatacctgaagacggtgtgtagtacagatcctc

SEQ ID NO: 139899 - DNA, 80 bp, synthetic construct
  source 1..80: mol_type = other DNA
tgcatgcatttgatcaaggctggggacccctcgaatatgtcaacatcagtggctcatctcaagacagaccatattgctgg

SEQ ID NO: 139900 - DNA, 80 bp, synthetic construct
  source 1..80: mol_type = other DNA
gcttggatggacagcaccaaggccacaaggtatctggtaaaaacagaatcatggatcctgaggaaccctggatatgccct

SEQ ID NO: 139901 - DNA, 80 bp, synthetic construct
  source 1..80: mol_type = other DNA
aaggtgatatcattaaaaaggattttgccggctctaggcataaagttgcgggtgattttgaaaggcccgggcacatccga

SEQ ID NO: 139902 - DNA, 80 bp, synthetic construct
  source 1..80: mol_type = other DNA
agctatgactgataccacaccctttggacaacagagagtgtttaaagagaaagttgacacgcgcacaccaagagcaaaac

SEQ ID NO: 139903 - DNA, 80 bp, synthetic construct
  source 1..80: mol_type = other DNA
gtcatcgtaatgtctgcgacgctctgttcagcccttcacgtgggagacttttgcggcgctgtactgatagcttcccaagc

SEQ ID NO: 139904 - DNA, 80 bp, synthetic construct
  source 1..80: mol_type = other DNA
catcacggcggagtcggcacgccgacgccttgatcgaggctccccgccgtctctcgccagctcatctgcgagccagttgt

SEQ ID NO: 139905 - DNA, 80 bp, synthetic construct
  source 1..80: mol_type = other DNA
ttctccgcggtcaggcggcggcgctgacggaccttggtctggcccacgcaaacaacacgtttaccccgcagcctatgttc

SEQ ID NO: 139906 - DNA, 80 bp, synthetic construct
  source 1..80: mol_type = other DNA
acacccgttgaaagatggagtgatgttccctactcagggaaaagagaagacatctggtgtggaagcctaatcggaacccg

SEQ ID NO: 139907 - DNA, 80 bp, synthetic construct
  source 1..80: mol_type = other DNA
gggtgcccatgtacaactctaagggccaactctgcggtcaacgcagatgccgggcaagcggggtgctccccaccagtgcg

SEQ ID NO: 139908 - DNA, 80 bp, synthetic construct
  source 1..80: mol_type = other DNA
gagtgaattccagatctataagaaaagtggaattcaggaagtggatagaacgttagcaaaagaaggcatcaagagaggag

SEQ ID NO: 139909 - DNA, 80 bp, synthetic construct
  source 1..80: mol_type = other DNA
tgctgataacgccaaaccccacaattgaaaatgatggaggaggcttcatagagatgcagcttcccccaggggacaatatc

SEQ ID NO: 139910 - DNA, 80 bp, synthetic construct
  source 1..80: mol_type = other DNA
tacctgctggattttctggccatgcatctgtggagagcggtggtgagacacaagaatcgcctgctactgttgtcttccgt

SEQ ID NO: 139911 - DNA, 80 bp, synthetic construct
  source 1..80: mol_type = other DNA
acgaagggcctagttgtgcagttgttaaaaagcgggaaagaaaagaaagtttaaaggaaactgtccttaataggctgact

SEQ ID NO: 139912 - DNA, 80 bp, synthetic construct
  source 1..80: mol_type = other DNA
cgcgaaaggttgtcaagaatggccatcagtggagatgattgtgttgtgaaacctttagatgacaggttcgcaaacgcttt

SEQ ID NO: 139913 - DNA, 80 bp, synthetic construct
  source 1..80: mol_type = other DNA
tttgccctaccgactgtttcaggaagcatccggacgcaacctacgcgaagtgtgggtcagggccctggatcacgccgcga

SEQ ID NO: 139914 - DNA, 80 bp, synthetic construct
  source 1..80: mol_type = other DNA
ccaatccgacatgaccatcatacattattttaatataaatcaagtgtttccctctaacaaaaatgcttcccatatacagc

SEQ ID NO: 139915 - DNA, 80 bp, synthetic construct
  source 1..80: mol_type = other DNA
tctctgcacgattgggccatgaggtgttgttgggacctgctgatgactatcgggagatgggttggcgtctgttggctccg

SEQ ID NO: 139916 - DNA, 80 bp, synthetic construct
  source 1..80: mol_type = other DNA
ggtcaaccctatccagctaactatccctatccactcattggaacaactgccgtaaatagtgttacgcagaaaaagttctt

SEQ ID NO: 139917 - DNA, 80 bp, synthetic construct
  source 1..80: mol_type = other DNA
atggcgtcggaggagaagcggaaggagccgccgtactcggcgcggagcatctcgtccacctcctgccacttggtcatggt

SEQ ID NO: 139918 - DNA, 80 bp, synthetic construct
  source 1..80: mol_type = other DNA
ggtggcccagccctcctgggaccaaatctttggagccgtgcacatgtggagcggtcgacctgtacttggtcacgcggaac

SEQ ID NO: 139919 - DNA, 80 bp, synthetic construct
  source 1..80: mol_type = other DNA
aaaactctggcgggtcccaaggggcctgtatgccagatgtacaccaatgtggatcaagacctggttggctggcccgcgcc

SEQ ID NO: 139920 - DNA, 80 bp, synthetic construct
  source 1..80: mol_type = other DNA
ggtggatgctaaccttttcatgggaggtgatgtgacccggattgagtccgactccaaggtaatcgttctcgactccctcg

SEQ ID NO: 139921 - DNA, 80 bp, synthetic construct
  source 1..80: mol_type = other DNA
caacgggctggttcgcgacgcgctggcggccggaaccacagccgagcagctcctcatgttcgaccttctccccccaaagg

SEQ ID NO: 139922 - DNA, 80 bp, synthetic construct
  source 1..80: mol_type = other DNA
ggggaccggcccgtccgtggcatcaggccgtgcagttgttccgggccccgcgtccgggccccccggcgcttctgttgctg

SEQ ID NO: 139923 - DNA, 80 bp, synthetic construct
  source 1..80: mol_type = other DNA
tgcccccccccagcgccgcttcggctttcgtgggcgccggcatcgcgcgagctgttggcagcataggccttgggaaggtg

SEQ ID NO: 139924 - DNA, 80 bp, synthetic construct
  source 1..80: mol_type = other DNA
agtgcagccagcatgataaatggagtcatcaaaatcttgacttttccatgggacaggatagaagaagtcacaagaatggc

SEQ ID NO: 139925 - DNA, 80 bp, synthetic construct
  source 1..80: mol_type = other DNA
agcgtttgtcttcctgccgccggctggacgattttcgcatcgggtggggaaccttagaatacgaggacaatgtcaccaat

SEQ ID NO: 139926 - DNA, 80 bp, synthetic construct
  source 1..80: mol_type = other DNA
tgatgaggcctctgcaatggaggcacttgcacaaatgcggaaagcagtcttccctgaggcaccaaaaagcttaggcaccg

SEQ ID NO: 139927 - DNA, 80 bp, synthetic construct
  source 1..80: mol_type = other DNA
agggccccatcatccaaatgtacaccaatgtggatctagacctcgtcggctggcaggccccgcaaggggcccgctccctg

SEQ ID NO: 139928 - DNA, 80 bp, synthetic construct
  source 1..80: mol_type = other DNA
agagattcagccatagctcagcccgcttaccagtagacagagagcacagcagtacaagcgccaacagcagcgactgacta

SEQ ID NO: 139929 - DNA, 80 bp, synthetic construct
  source 1..80: mol_type = other DNA
tctgcgtgactcaagtattaatgatgaggactacatgggctctgtgtgaggctctaaccttagcgacagggcccatctcc

SEQ ID NO: 139930 - DNA, 80 bp, synthetic construct
  source 1..80: mol_type = other DNA
cccctccgtgtgggagggcttgctagaagactctgataccccaattccaacgaccatcatggctaagaatgaggtcttct

SEQ ID NO: 139931 - DNA, 80 bp, synthetic construct
  source 1..80: mol_type = other DNA
gccagtgtctgcagtggaagtcaggaacataagttccagttactacgccactaatgactgctcaaacagcagcatcacct

SEQ ID NO: 139932 - DNA, 80 bp, synthetic construct
  source 1..80: mol_type = other DNA
gtcagcaagtccatggacgacgacacgtacgtcgccaacagctttcagcacccgtacatcccttcgtacgcccaggacct

SEQ ID NO: 139933 - DNA, 80 bp, synthetic construct
  source 1..80: mol_type = other DNA
ttttgtgtgacattggagagtcatcatcgtcatcggtcacagagggggaaaggaccgtgagagttcttgatactgtagaa

SEQ ID NO: 139934 - DNA, 80 bp, synthetic construct
  source 1..80: mol_type = other DNA
gatacaaccatcatggccaaaaacgaggtgttctgcgttgaccccaccaaaggtggaaagaaaccggctcgcctcatcgt

SEQ ID NO: 139935 - DNA, 80 bp, synthetic construct
  source 1..80: mol_type = other DNA
ctcgcagtatggcagccgatttcaacttctacagtcacttagcttcaaacgctgtgacgcgcactgcggttcgggaagac

SEQ ID NO: 139936 - DNA, 80 bp, synthetic construct
  source 1..80: mol_type = other DNA
gctacagcttatataaatttatgtgcgatacatcttaagtgcatccgtacgttatttatacattgcctgtcacgtgaaaa

SEQ ID NO: 139937 - DNA, 80 bp, synthetic construct
  source 1..80: mol_type = other DNA
ataactgctttcacactcaccccggcatataagatccttctcacccggtgcctatggtggctgtgctacatgttggtcct

SEQ ID NO: 139938 - DNA, 80 bp, synthetic construct
  source 1..80: mol_type = other DNA
cgccgtataccgatttaagggtacgctgctccaacggcgtgcctcggtcctccgcgtacagaaactcggaccattctgag

SEQ ID NO: 139939 - DNA, 80 bp, synthetic construct
  source 1..80: mol_type = other DNA
gatgctgatgactggaacactggctgttttcctccttcttataatggggcaactgacatggaatgatctgattaggttat

SEQ ID NO: 139940 - DNA, 80 bp, synthetic construct
  source 1..80: mol_type = other DNA
actcctggccacagtcacaggaggaatcttcttattcttaatgagcggaaaaggtatagggaagatgaccctgggaatgt

SEQ ID NO: 139941 - DNA, 80 bp, synthetic construct
  source 1..80: mol_type = other DNA
ctgcctggcaatccagctgtagcagctatgatgtcattcacagcctctttaaccagccccttgacaacgtcacagaccct

SEQ ID NO: 139942 - DNA, 80 bp, synthetic construct
  source 1..80: mol_type = other DNA
aataggtacagcccaagttgaaccacctccatattattcatgattccataactaaaaaaactgatcattgctgaactttg

SEQ ID NO: 139943 - DNA, 80 bp, synthetic construct
  source 1..80: mol_type = other DNA
accgaggtagacggggtaagacttcatcgatacgcccctgcatgcaagcccttgttgagggacgaaattacctttgcagt

SEQ ID NO: 139944 - DNA, 80 bp, synthetic construct
  source 1..80: mol_type = other DNA
aggatgacagttcagaagtaaatttaactcagcagtccatgccaaacaggccaaattacatcggtttcagagacaatttt

SEQ ID NO: 139945 - DNA, 80 bp, synthetic construct
  source 1..80: mol_type = other DNA
acggcaaattccttgccgacggcgggtgtagtgggggcgcgtatgacataatcatttgtgatgagtgccactccacggac

SEQ ID NO: 139946 - DNA, 80 bp, synthetic construct
  source 1..80: mol_type = other DNA
acggaataaaacttaatacccaaggtcaacttacagctagtaataatatcaatgttttggagccccttaccaacacctca

SEQ ID NO: 139947 - DNA, 80 bp, synthetic construct
  source 1..80: mol_type = other DNA
cagccctcctctagcagcggcctcggtcactctatagaggaggacaccccaaatgccaagggcgatctacccccggatga

SEQ ID NO: 139948 - DNA, 80 bp, synthetic construct
  source 1..80: mol_type = other DNA
cttgccgggcaacccagccgtggcttccttaatgtccttctccgcagccctaactagtcctctgactacatcaacaactc

SEQ ID NO: 139949 - DNA, 80 bp, synthetic construct
  source 1..80: mol_type = other DNA
tgcggctgctacagatgggatcgggatcgcaagtctctttcactataatccccacagcctttagcattagtcttctggtg

SEQ ID NO: 139950 - DNA, 80 bp, synthetic construct
  source 1..80: mol_type = other DNA
atctatgaccatctctcccctttgtcaacttgggcagcccagggattgcgggacctggcagtcgccgtggagcccgtggt

SEQ ID NO: 139951 - DNA, 80 bp, synthetic construct
  source 1..80: mol_type = other DNA
ccaagtgctcgcagacatttttgttggcggacactggggtgtgctggccgggctcttgtatttcagcatggtggccaact

SEQ ID NO: 139952 - DNA, 80 bp, synthetic construct
  source 1..80: mol_type = other DNA
ggcgtcgatcaggcgtgccgcgctcggggccaccgcgccataggccgcggggctgtccaacacgaacgccagctgatagc

SEQ ID NO: 139953 - DNA, 80 bp, synthetic construct
  source 1..80: mol_type = other DNA
gttgatgagcagcgaatattatttgcgatgaagcatacaatccagaagtgttagtatcagttaaagaaaaaaaacgtcca

SEQ ID NO: 139954 - DNA, 80 bp, synthetic construct
  source 1..80: mol_type = other DNA
tacagactgggagctgtccagaatgaagtgactctgacgcacccagtaaccaagtacataatgacatgtatgtcagctga

SEQ ID NO: 139955 - DNA, 80 bp, synthetic construct
  source 1..80: mol_type = other DNA
gacagctcttcacctttcgtcccagggtgcatcaaaccacccaggattgtaactgctctatctacactggtcacatcaca

SEQ ID NO: 139956 - DNA, 80 bp, synthetic construct
  source 1..80: mol_type = other DNA
tgtggtgcggagacgatagcctgtggggacatcctacacgggcttcccgtctctgcgcgcctgggccgggaggtcctgct

SEQ ID NO: 139957 - DNA, 80 bp, synthetic construct
  source 1..80: mol_type = other DNA
aatggtttggaacacaggtttgaagttgcatgcaactggaccaggggggagcgttgtgagctcgaggatagagatcgagt

SEQ ID NO: 139958 - DNA, 80 bp, synthetic construct
  source 1..80: mol_type = other DNA
ttttagccttgaccctaccttctcaattgaaacaactacagttccccaggatgcagtgtcccgcagtcaaagacgcgggc

SEQ ID NO: 139959 - DNA, 80 bp, synthetic construct
  source 1..80: mol_type = other DNA
tgtgacctctttggtaggagcgacgcccacttctctggcattgggagtcgctttggccgccctccacttggctgtggtca

SEQ ID NO: 139960 - DNA, 80 bp, synthetic construct
  source 1..80: mol_type = other DNA
attccaccccccctgccgtcccggagtcctaccaagtaggataccttcacgcccccactggaagcggcaaaagcaccaaa

SEQ ID NO: 139961 - DNA, 80 bp, synthetic construct
  source 1..80: mol_type = other DNA
acgttccatctctggaggtgcgcggcccacgggactctatgatcatcctcctggccatattccatccctacctggccttt

SEQ ID NO: 139962 - DNA, 80 bp, synthetic construct
  source 1..80: mol_type = other DNA
ggccattgcgttggtatctttagggcggcagtctgcacgcgtggcgtggccaaggctgtgcagtttgtcccagtagagaa

SEQ ID NO: 139963 - DNA, 80 bp, synthetic construct
  source 1..80: mol_type = other DNA
accgcagggggccaaatcactgacgccctgcacttgtggagcaagcgacctctacctagtgacacggaacgcagatgtca

SEQ ID NO: 139964 - DNA, 80 bp, synthetic construct
  source 1..80: mol_type = other DNA
acaggttcggaaaggcattgtacttcctgaatgacatggccaaagttcgcaaggatgtgggggaatgggagccctcaatg

SEQ ID NO: 139965 - DNA, 80 bp, synthetic construct
  source 1..80: mol_type = other DNA
aactcatgaggatacccgccgccctatttgacatgctagcgggcggtcattggggcgtcctggctggcatagctttcttt

SEQ ID NO: 139966 - DNA, 80 bp, synthetic construct
  source 1..80: mol_type = other DNA
gaagtgcagcagcgaagaagaaaggagctagtcttatgtgtctcgccctagcttctacaggactgttcaatcccatgata

SEQ ID NO: 139967 - DNA, 80 bp, synthetic construct
  source 1..80: mol_type = other DNA
acttcattttttagaaataataagactacattcgaagattctggaaattatgaacaacagaaattgactttatttaatct

SEQ ID NO: 139968 - DNA, 80 bp, synthetic construct
  source 1..80: mol_type = other DNA
cttcatgaggttaccgaactcgtgctcgacgcaccgtttgttgttaataaaaatggcccagctatacgagaggcgggcgt

SEQ ID NO: 139969 - DNA, 80 bp, synthetic construct
  source 1..80: mol_type = other DNA
gagattggaaggatgctgaacatcttgaacaggagacgcagaactgcaggtatagttatcatgatgatcccaacagtgat

SEQ ID NO: 139970 - DNA, 80 bp, synthetic construct
  source 1..80: mol_type = other DNA
ctgttgtcctgcatcaccgttccggtctctgctgcccaggtgaagaataccagtagcagctacatggtgaccaatgactg

SEQ ID NO: 139971 - DNA, 80 bp, synthetic construct
  source 1..80: mol_type = other DNA
tatgccgcctggccaaaaatcgaacaattttggcagaagcacctgtggaacttcgttagcggcattcaatacctcgcagg

SEQ ID NO: 139972 - DNA, 80 bp, synthetic construct
  source 1..80: mol_type = other DNA
taggcatcttcctgcttccagcccgataggctggaagctaaacactccataccattaggtcatttccgtttttttttttt

SEQ ID NO: 139973 - DNA, 80 bp, synthetic construct
  source 1..80: mol_type = other DNA
aacccgccatttgctgctttgcctactcctactaacggtaggggtaggcatctttctcctgccagctcggtgagctggta

SEQ ID NO: 139974 - DNA, 80 bp, synthetic construct
  source 1..80: mol_type = other DNA
gcgctttttatcgggaggagcttatgggcgtggcgggcctcccagcccggtcgcgcgcctccccgacacgtgcgcccgca

SEQ ID NO: 139975 - DNA, 80 bp, synthetic construct
  source 1..80: mol_type = other DNA
tcactcagtccttcctcgggacttccatctcgggggtcttgtggactgtgtaccacggagccggcaataagactctagcc

SEQ ID NO: 139976 - DNA, 80 bp, synthetic construct
  source 1..80: mol_type = other DNA
gtggtccgtgtggaggtcgttttcagtgcccggtctcgctttgccgggaacgctagccgatccctcgcgagggtgaggcg

SEQ ID NO: 139977 - DNA, 80 bp, synthetic construct
  source 1..80: mol_type = other DNA
cgcaacaaacgcgtgggttgctgggcacgatagtgaccagccttaccggtcgcgacaagaacgaagtggcgggcgagata

SEQ ID NO: 139978 - DNA, 80 bp, synthetic construct
  source 1..80: mol_type = other DNA
agtgcgtcctcctccggcacgcctgccgttgtcaggcccaggacccgtcgcagcgtgtcgcgtacgaccccggccgccgt

SEQ ID NO: 139979 - DNA, 80 bp, synthetic construct
  source 1..80: mol_type = other DNA
cagtgcggcctgtcgagctgcaaagctccaggactgcaccatgctcgtgtgcggcgacgacctcgtcgttatctgtgaga

SEQ ID NO: 139980 - DNA, 80 bp, synthetic construct
  source 1..80: mol_type = other DNA
gggctgggacacaagaattaccaatgcagaccttgaggatgaggagcaaatcctgcgttatctgaagggcgaacaccgaa

SEQ ID NO: 139981 - DNA, 80 bp, synthetic construct
  source 1..80: mol_type = other DNA
tgaacgaccggcaaggcaatgctactaaaccaaaagtggttttgtacagtgaagatgtaaatatggaaaccccagacaca

SEQ ID NO: 139982 - DNA, 80 bp, synthetic construct
  source 1..80: mol_type = other DNA
tttactgacgtcaccatccatcgccacggcgattggacgattgttaagccgcagcgtgtctccgcttgtgctgtagtagt

SEQ ID NO: 139983 - DNA, 80 bp, synthetic construct
  source 1..80: mol_type = other DNA
acactctaaaagtccaggagtcctttccattgtggcaatgggcacaaaatcctcagagggaggtggaaggcggtgggttt

SEQ ID NO: 139984 - DNA, 80 bp, synthetic construct
  source 1..80: mol_type = other DNA
aaagggcgctaacgatgcatcttatcaattgcggcgtaggggacgtaagcgcgtcaagatcgaccggatcggagaatctt

SEQ ID NO: 139985 - DNA, 80 bp, synthetic construct
  source 1..80: mol_type = other DNA
gctgggtggcagcccagctcgctgctcccagcgccgccacatccttcgtgggcgccggcattgctggcgcggctgttggc

SEQ ID NO: 139986 - DNA, 80 bp, synthetic construct
  source 1..80: mol_type = other DNA
cggggtcacttactctgttgctcccttggatttgccagtgatcattcaacgactccatggcatggctgccttttcccttc

SEQ ID NO: 139987 - DNA, 80 bp, synthetic construct
  source 1..80: mol_type = other DNA
ccagagcgcactacccaatgacgtcctagctctgacggacgcattggctttagggataatgattctgaaattagtacgga

SEQ ID NO: 139988 - DNA, 80 bp, synthetic construct
  source 1..80: mol_type = other DNA
cccatatgggcgaggcctgactacaacccacctttaatagagacctggaaaaagccagattatgaccctcctacggtagc

SEQ ID NO: 139989 - DNA, 80 bp, synthetic construct
  source 1..80: mol_type = other DNA
ccgccaatcagagctggagctgtcccaccgattgcttcacaaaacacccagaaacaacctacaccaagtgtggctcacgt

SEQ ID NO: 139990 - DNA, 80 bp, synthetic construct
  source 1..80: mol_type = other DNA
gggaggacgtcgtgtgctgctcgatgtcatattcgtggaccggggctctagtaaccccatgcgctgccgaggaaaccagt

SEQ ID NO: 139991 - DNA, 80 bp, synthetic construct
  source 1..80: mol_type = other DNA
gcgcccgcgccgccctccacgcccccggggcccgagcccgcccccgcccagcccgcggcgccccgggccgccgcgtcgca

SEQ ID NO: 139992 - DNA, 80 bp, synthetic construct
  source 1..80: mol_type = other DNA
taatgagccaaaagccgttctttacgctgaaaacgtgtccattgaagcgcccgacacccatttggtgtacaagccagatg

SEQ ID NO: 139993 - DNA, 80 bp, synthetic construct
  source 1..80: mol_type = other DNA
gaaactactgtccggaaggggaaggtatttattctcgcttgcagcttgtcgcgcgtgtatgcacaacaaaagctatatat

SEQ ID NO: 139994 - DNA, 80 bp, synthetic construct
  source 1..80: mol_type = other DNA
attgccggcagcgcgccgcctggatctatccgggtggttcactgtcggcgctggcggtggcgacatttatcacagcgtgt

SEQ ID NO: 139995 - DNA, 80 bp, synthetic construct
  source 1..80: mol_type = other DNA
tgatgcaagacccggtcaccttccgcccctccacccaggtcagcaactttccggtggtgggcaccgagctgctgcccgtc

SEQ ID NO: 139996 - DNA, 80 bp, synthetic construct
  source 1..80: mol_type = other DNA
tgggactccacccagcaaaggagcattctgtcagccgctatggaaatgatggtgagattctccgcagaaccagaattggc

SEQ ID NO: 139997 - DNA, 80 bp, synthetic construct
  source 1..80: mol_type = other DNA
cttgattatcatggacgaagcccatttcacagacccagcaagtatagcagctagaggatacatctcaacccgagtggaaa

SEQ ID NO: 139998 - DNA, 80 bp, synthetic construct
  source 1..80: mol_type = other DNA
cccaaactcttctatcgtctatgaggctgaagacctgatcttacacgcacctggttgcgtgccctgtgttaggcagggta

SEQ ID NO: 139999 - DNA, 80 bp, synthetic construct
  source 1..80: mol_type = other DNA
atcatcctgctagcatgtttcctccatccacggctgatctttgatataacaaagctcatcctcgcagttttggggcccat

SEQ ID NO: 140000 - DNA, 80 bp, synthetic construct
  source 1..80: mol_type = other DNA
gcactgggctcagcctggttacccttggcccctttatgggaatgagggttgcggatggtcgggatggctcctgtctcccc

SEQ ID NO: 140001 - DNA, 80 bp, synthetic construct
  source 1..80: mol_type = other DNA
gcaagactgcaactgctctatctatacaggccacatcaccggccataggatggcttgggacatgatgatgaactggtcac

SEQ ID NO: 140002 - DNA, 80 bp, synthetic construct
  source 1..80: mol_type = other DNA
cccccttccccgcgctcgtgcggctcgtcggtcggtacatccagcgccacggcctgtacgttcccgcgcccgacgaaccg

SEQ ID NO: 140003 - DNA, 80 bp, synthetic construct
  source 1..80: mol_type = other DNA
acaccgggttgtgccatttaatacatgactgtgttattgctcccatggccgttgccttgcgcgtcagaaatgtaactgcc

SEQ ID NO: 140004 - DNA, 80 bp, synthetic construct
  source 1..80: mol_type = other DNA
ctcatttcctatcccaaactaaacagggaggggagaatttcgcctacctcgtggcctatcaagccaccgtgtgtgcgcga

SEQ ID NO: 140005 - DNA, 80 bp, synthetic construct
  source 1..80: mol_type = other DNA
agcaacacctggcgtggatcgttccccatcaacgcctacactacgggcccttgcacgccctccccggcgccgaactacac

SEQ ID NO: 140006 - DNA, 80 bp, synthetic construct
  source 1..80: mol_type = other DNA
cctcaccgccggcggacgcgactaacaacccacgggccgccaaaaaccccaaggggcaacccgaccaacaacaggcgagg

SEQ ID NO: 140007 - DNA, 80 bp, synthetic construct
  source 1..80: mol_type = other DNA
tgccgtccccctcatcgtgggggggctgtgtctcatgattctggagatggcgtgtctactcgaggtcctgcgtcgcctgg

SEQ ID NO: 140008 - DNA, 80 bp, synthetic construct
  source 1..80: mol_type = other DNA
tgctgggcctcccgtggactccatttccgagacgacgtgggtggagcggtggttgagcgcgccgccgggtgaacgctgat

SEQ ID NO: 140009 - DNA, 80 bp, synthetic construct
  source 1..80: mol_type = other DNA
tgttgcagtcacgcagatagttgacttcagcctggaccccactttttccattgagaccactactgtcccgcaagacgctg

SEQ ID NO: 140010 - DNA, 80 bp, synthetic construct
  source 1..80: mol_type = other DNA
tgagattttgcttgaccttccattaggccctgaactgaacccataccttgctcatctggcacgcatgtataatggccatg

SEQ ID NO: 140011 - DNA, 80 bp, synthetic construct
  source 1..80: mol_type = other DNA
ggggtaactgacatcagtggcaatcccaccttcacctctggagccaatgacaccgacttcttcctacttaacaacacaag

SEQ ID NO: 140012 - DNA, 80 bp, synthetic construct
  source 1..80: mol_type = other DNA
gtctatgacccggcatgttacagggctcttcaccccaggggccaggcagaacctgcagcttgtaaattccaacggaagct

SEQ ID NO: 140013 - DNA, 80 bp, synthetic construct
  source 1..80: mol_type = other DNA
catctgtcgctgctgagtgcctcaccccgaggaagaggttcccaccggctctgccgatatgggcaagaccagactataac

SEQ ID NO: 140014 - DNA, 80 bp, synthetic construct
  source 1..80: mol_type = other DNA
ggttttgttatcatgtatgaagacttagaagggggaaatatcccagcgcttttagatgttaaaaaatacgaagacagctt

SEQ ID NO: 140015 - DNA, 80 bp, synthetic construct
  source 1..80: mol_type = other DNA
tggccgctcctgctactggttgtggcgctccctcgccgcgcatacgcctatgatggcgaacagggggcatccatcggtat

SEQ ID NO: 140016 - DNA, 80 bp, synthetic construct
  source 1..80: mol_type = other DNA
cccgtctccgcccgtaggggccgagagatattgcttggacccgccgacgcattggtctccaaggcgtggaggttgctagc

SEQ ID NO: 140017 - DNA, 80 bp, synthetic construct
  source 1..80: mol_type = other DNA
tgaatatgaattccatgatcttcatgaacatgaagttcaatggagagaagtttaatggggtgctgttcatggccaacagc

SEQ ID NO: 140018 - DNA, 80 bp, synthetic construct
  source 1..80: mol_type = other DNA
attcaaacagaaagccctcggcgttttgaacctcgctggcaagcaagcgcaggaggcaacaccagtaatccagtcaaatt

SEQ ID NO: 140019 - DNA, 80 bp, synthetic construct
  source 1..80: mol_type = other DNA
acggatgcaacatccatcctaggcatcggcaccgtccttgaccaagcagagaccgcgggggcgagactggttgtgctcgc

SEQ ID NO: 140020 - DNA, 80 bp, synthetic construct
  source 1..80: mol_type = other DNA
cactcgtgtccggagagtggatcgcttcccgcagccagcggatcagcgcggtagtttttcccgaccccattggcgcgcgg

SEQ ID NO: 140021 - DNA, 80 bp, synthetic construct
  source 1..80: mol_type = other DNA
ggcggttggcagtatagggctgggcaaggtcctcgttgacatccttgcagggtacggggcaggagtagcaggtgctctag

SEQ ID NO: 140022 - DNA, 80 bp, synthetic construct
  source 1..80: mol_type = other DNA
tactcgccgaccaccacatgcacgtttttttcgccccggagaccgcacaggaagtccaccaactgcgcgttggcggttgc

SEQ ID NO: 140023 - DNA, 80 bp, synthetic construct
  source 1..80: mol_type = other DNA
ccgcatacgccattgcccacggcgtcgccctgaacacggactattacttctcccacctgttgggggcggcgtgcgtgaca

SEQ ID NO: 140024 - DNA, 80 bp, synthetic construct
  source 1..80: mol_type = other DNA
cccgcagatcccgctgggccctgagggcatcaaaatgtatcccccgcaaaaacagacaaaagttcctcggggtcagcgcg

SEQ ID NO: 140025 - DNA, 80 bp, synthetic construct
  source 1..80: mol_type = other DNA
gttcgcgacgcgctggcggccggaaccacagccgagcagctcctcatgttcgaccttctccccccaaaggacgtgccggt

SEQ ID NO: 140026 - DNA, 80 bp, synthetic construct
  source 1..80: mol_type = other DNA
ccgccagacaaacaaggctcttgcacatgccggcccgggcgagcctgggggtccggtaattttgccatcccacccaagcg

SEQ ID NO: 140027 - DNA, 80 bp, synthetic construct
  source 1..80: mol_type = other DNA
acaacgtgaccccccgggagaccgtcctggatggcgatacggccaaggcctacctgcgcgctcgcacgtacgcgcccggg

SEQ ID NO: 140028 - DNA, 80 bp, synthetic construct
  source 1..80: mol_type = other DNA
ctataccatcttacaaatgattgctctaactccagcatcgtgctggaagcggacgctatgattttgcatttgcctggatg

SEQ ID NO: 140029 - DNA, 80 bp, synthetic construct
  source 1..80: mol_type = other DNA
cggatctcccaactccggcacgtaaagcggcacgggttcagttgaggcctcgtaacgagcccgcgccgctctcacagcct

SEQ ID NO: 140030 - DNA, 80 bp, synthetic construct
  source 1..80: mol_type = other DNA
gttcctggatgaacggcaccgggttcaccaagacgtgcggggcagcgccctgccgtctcagaagggacttcaatgccagc

SEQ ID NO: 140031 - DNA, 80 bp, synthetic construct
  source 1..80: mol_type = other DNA
attcgactggcctcaaggggacaggacatcagaaagggagaatgcccagatgctggtaagctatccccttgtgacccaga

SEQ ID NO: 140032 - DNA, 80 bp, synthetic construct
  source 1..80: mol_type = other DNA
tacatcttcctcactgtgctgcagccagagccggggaaacagcgaagtagcgatgataatagactggcatacttcctcct

SEQ ID NO: 140033 - DNA, 80 bp, synthetic construct
  source 1..80: mol_type = other DNA
cccctgttcgtcggcaccctgtggatggtcgtcggcgggctgacgatcggaggcagcgcgcgctactggtggatcggtgg

SEQ ID NO: 140034 - DNA, 80 bp, synthetic construct
  source 1..80: mol_type = other DNA
ttatcttattattggcatcctgacgctgatttctgtggtggcagccaatgaactaggcatgctggaaaagactaaggaag

SEQ ID NO: 140035 - DNA, 80 bp, synthetic construct
  source 1..80: mol_type = other DNA
tctccacgcccctactggcagcggcaaaagcaccaaagtgccggccgcatatgcggctcaggggtacaaggtacttgtgc

SEQ ID NO: 140036 - DNA, 80 bp, synthetic construct
  source 1..80: mol_type = other DNA
gcagccccgtgtgacggtcgggccgcattcgcaccccggcactgcgagcgacggagcggcggcccggcgtgaggaggaga

SEQ ID NO: 140037 - DNA, 80 bp, synthetic construct
  source 1..80: mol_type = other DNA
tctgcgatcacgttactaagcaagttcgggttaacgtggatgttgacgatattattcggtgtttaccatatatccctgat

SEQ ID NO: 140038 - DNA, 80 bp, synthetic construct
  source 1..80: mol_type = other DNA
gattggctgtgacagcggcgttcgttaggggcggggcaggtgacgttttgatgacgcgactatgaggaggagttagtttg

SEQ ID NO: 140039 - DNA, 80 bp, synthetic construct
  source 1..80: mol_type = other DNA
cagttccgggccggtcagggtaaagtcatcaaccagctgggccagggcctcgacgtgcgccaccaggtcccggtacacgg

SEQ ID NO: 140040 - DNA, 80 bp, synthetic construct
  source 1..80: mol_type = other DNA
gtcactggcctcctcgtccgtccggcactgggccgtcgtgcgggccaggatggccttggctccaaacacaaccggctcca

SEQ ID NO: 140041 - DNA, 80 bp, synthetic construct
  source 1..80: mol_type = other DNA
tcttttgcaaactgcgatctccgccttggaaggcgacctgatggttctcatcaatggttttgctttggcctggttggcaa

SEQ ID NO: 140042 - DNA, 80 bp, synthetic construct
  source 1..80: mol_type = other DNA
ccatgaaaataacaggcccgaagacctgcctaaacatgtggcagggaaccttccccatcaattgttacacagaagggcct

SEQ ID NO: 140043 - DNA, 80 bp, synthetic construct
  source 1..80: mol_type = other DNA
accaacttatgctggacgcacttggcgatcggagcagatatttttctatgtggaatcaggctgttgacagttacgacccc

SEQ ID NO: 140044 - DNA, 80 bp, synthetic construct
  source 1..80: mol_type = other DNA
ccggagaccaaggaatgtccgactcagaatcgcgcttggaacagcttagaagtggaggattttggatttggtctcaccag

SEQ ID NO: 140045 - DNA, 80 bp, synthetic construct
  source 1..80: mol_type = other DNA
acgctcgtcgagcggtggctgcagtcggcgctgaagtacgaagagttttacctcaagcgcttcggcgggcactacatgga

SEQ ID NO: 140046 - DNA, 80 bp, synthetic construct
  source 1..80: mol_type = other DNA
ggtttgctgttctatgtcatactcctggactggcgctgtaataacaccgtgcagtgccgaggaggaaaaactacctatta

SEQ ID NO: 140047 - DNA, 80 bp, synthetic construct
  source 1..80: mol_type = other DNA
aggcggctgcaccagtggataagctcggattgcaccactccgtgctctggttcctggctaagggacatctgggactggat

SEQ ID NO: 140048 - DNA, 80 bp, synthetic construct
  source 1..80: mol_type = other DNA
aacacctatataggtaggatagcacctgccgccgcgaatgcttgcgcgaacatagtcgtatagttcgtgcgaaggcgcca

SEQ ID NO: 140049 - DNA, 80 bp, synthetic construct
  source 1..80: mol_type = other DNA
ggtttgcgctactgacgccctcatgactggattcaccggagacttcgattctgtcatagactgcaacgtggctgttgaac

SEQ ID NO: 140050 - DNA, 80 bp, synthetic construct
  source 1..80: mol_type = other DNA
attggtccagttacctcagaatggccgatgagggcttctaatggagttttataactcaggatggatacatcatgtgtggc

SEQ ID NO: 140051 - DNA, 80 bp, synthetic construct
  source 1..80: mol_type = other DNA
aaacaaaagaggaggaagtaatggaacaattatttggatgataggtttggcagtcgtgttcgccactgtgagtgcagtca

SEQ ID NO: 140052 - DNA, 80 bp, synthetic construct
  source 1..80: mol_type = other DNA
cggagacgatctagtcgttatcgcggagagcgaaggagtctctgaggatgctgatgcgctgcgagcattcacggaagcta

SEQ ID NO: 140053 - DNA, 80 bp, synthetic construct
  source 1..80: mol_type = other DNA
tggatcactgaggatcacaccacaatgtgttcatcatcatggctcaaggatgtttgggattgggtgtgcactgttctttc

SEQ ID NO: 140054 - DNA, 80 bp, synthetic construct
  source 1..80: mol_type = other DNA
cccaacaagctaacaggttcgtgtccatgttctcacgtgggccgtctcagacaatccagcttgtaaacaccaacggcagc

SEQ ID NO: 140055 - DNA, 80 bp, synthetic construct
  source 1..80: mol_type = other DNA
cgcccgaatcaacaccataaagtacccagaggcgcgggcctggttgccatgcagggtgtgaggggtcgtcaacggcgccc

SEQ ID NO: 140056 - DNA, 80 bp, synthetic construct
  source 1..80: mol_type = other DNA
gaggagaagctgcccatcagccccctcagcaactctttgctgagacaccataacttagtatactcaacgtcatccaagag

SEQ ID NO: 140057 - DNA, 80 bp, synthetic construct
  source 1..80: mol_type = other DNA
cgccgtcgtcggggtagggcgacgcgccgggcgcaggaacaaaggccgcgtcgctgtccagctgctggcccagggccgca

SEQ ID NO: 140058 - DNA, 80 bp, synthetic construct
  source 1..80: mol_type = other DNA
aaggggcctcctagggtgtataatcaccagcctgactggtcgggacaaaaaccaagtagagggtgaggtccagattgtgt

SEQ ID NO: 140059 - DNA, 80 bp, synthetic construct
  source 1..80: mol_type = other DNA
gtgtcccaccacgccgagatcgaccggtatggggattccgacggggacccgatctacgacgaagtggcccccgaccacga

SEQ ID NO: 140060 - DNA, 80 bp, synthetic construct
  source 1..80: mol_type = other DNA
gcagtggcacacggatctccagatgtgaacgtggccatgctgataacgccaaacccaacaattgaaaacaatggaggtgg

SEQ ID NO: 140061 - DNA, 80 bp, synthetic construct
  source 1..80: mol_type = other DNA
tctcttcaaaacgctagctgggggacggtacgtgcaggccgcgctgctcactattggccgctggaccggcacttatattt

SEQ ID NO: 140062 - DNA, 80 bp, synthetic construct
  source 1..80: mol_type = other DNA
tccatacaggctttggcattacccatgcactgtcaactataccatctttaaagtcagaatgtacgtgggaggaatagagc

SEQ ID NO: 140063 - DNA, 80 bp, synthetic construct
  source 1..80: mol_type = other DNA
caccgtttgctggagaagcaattaacaaaaacggcctgcagatagggactaacggtgcagccactgaaggaaataaggaa

SEQ ID NO: 140064 - DNA, 80 bp, synthetic construct
  source 1..80: mol_type = other DNA
ggctttgaaagagggcgcttcaccttatcccatgaccaaacctattggttccatggcccgacctgtatacgggaaggaaa

SEQ ID NO: 140065 - DNA, 80 bp, synthetic construct
  source 1..80: mol_type = other DNA
cggtgcctcagtcttaccaggtggggtacctgcatgcccccactggcagtggaaaaagcacaaaggtgccggctgcatat

SEQ ID NO: 140066 - DNA, 80 bp, synthetic construct
  source 1..80: mol_type = other DNA
cgtcaaccgcactgcgcttaactgcaatgactctctgcagacggggttctttgttccgttattctacaagcagaacatta

SEQ ID NO: 140067 - DNA, 80 bp, synthetic construct
  source 1..80: mol_type = other DNA
tctcaggctcccggtggtgcagtaacatctggcatggcaccttccccatcaacgctacgacgaccggtccgagcgtgcct

SEQ ID NO: 140068 - DNA, 80 bp, synthetic construct
  source 1..80: mol_type = other DNA
cttgcatgtcagcagacttggaggtgatcactagtacttgggtgcttgctggggggatactagcagccctggcagcttac

SEQ ID NO: 140069 - DNA, 80 bp, synthetic construct
  source 1..80: mol_type = other DNA
acacaactttggttgaggacacagtattgtaaatactttatcaattgtaaatagacaacataagcatgtatataggtata

SEQ ID NO: 140070 - DNA, 80 bp, synthetic construct
  source 1..80: mol_type = other DNA
tggtccgactgttgtccaagccttgggacacaattaccaacgtgaccacgatggcaatgacagacacgactccatttggc

SEQ ID NO: 140071 - DNA, 80 bp, synthetic construct
  source 1..80: mol_type = other DNA
cgttcggctacgggcatatttgaatactcctggcctcccagtttgccaagaccatctggaattctgggagggagtgttca

SEQ ID NO: 140072 - DNA, 80 bp, synthetic construct
  source 1..80: mol_type = other DNA
gtcttccatgcccccccttgagggcgagcctggggatcctgacttgagcgcgggctcttggtcgacggttagcgatgaag

SEQ ID NO: 140073 - DNA, 80 bp, synthetic construct
  source 1..80: mol_type = other DNA
gtttcgcacgctggttcagcgcatatggacgacgacgtccgacggcgaggccgttgagctagccagcgagacgctgatga

SEQ ID NO: 140074 - DNA, 80 bp, synthetic construct
  source 1..80: mol_type = other DNA
tggtcattaccttcctgcagcttatcgactggtgctgcgcgcgctacaattatcttcaccacagtcccgaatacagggac

SEQ ID NO: 140075 - DNA, 80 bp, synthetic construct
  source 1..80: mol_type = other DNA
tgaccacccaacaaaccctcctttttaacatcttggggggatgggtggcctcacagattcgcgactccgatgcttctacc

SEQ ID NO: 140076 - DNA, 80 bp, synthetic construct
  source 1..80: mol_type = other DNA
cacgagcagtgcgcgccaaactcattgcccagggaggaaaggccaggatatgtggcttatacctctttaactgggcagtg

SEQ ID NO: 140077 - DNA, 80 bp, synthetic construct
  source 1..80: mol_type = other DNA
cggtacgtctcctgcatgatggtccgggcggtctcggatccgtccgcgcgcttcagggccgagaaggcggcgtagtttcc

SEQ ID NO: 140078 - DNA, 80 bp, synthetic construct
  source 1..80: mol_type = other DNA
cactgtcgccggaggtcggtacgtacaggccttgttgctcaagctcggtgcttggactggtacctatgtgtatgaccatc

SEQ ID NO: 140079 - DNA, 80 bp, synthetic construct
  source 1..80: mol_type = other DNA
tagcaacatatagactgtggtacgcggcggcgtttggaaaacccggggttgtccgtccaatctttgcgtatttaggcccg

SEQ ID NO: 140080 - DNA, 80 bp, synthetic construct
  source 1..80: mol_type = other DNA
aacatctggggagcagtagagaaagtcaggaagatgatcggacaagagaagttcaaggactacctttcctgcatggaccg

SEQ ID NO: 140081 - DNA, 80 bp, synthetic construct
  source 1..80: mol_type = other DNA
tagaaaaaaaggatacgggttggctcgcgggcggtgcggctgacctgcctgccctttctgggacccccgcctcgtgtttc

SEQ ID NO: 140082 - DNA, 80 bp, synthetic construct
  source 1..80: mol_type = other DNA
gggacggaagactgcgatcacgaagggcggtcggttgcggctcccgtggaggttacggtgctgtatgcgaccgacgggtg

SEQ ID NO: 140083 - DNA, 80 bp, synthetic construct
  source 1..80: mol_type = other DNA
agtcagcgcatgtaacgcccacacgcaaggtacgtcgctagcctacgcccgcctgaccgcacttaaatctaacggtgaca

SEQ ID NO: 140084 - DNA, 80 bp, synthetic construct
  source 1..80: mol_type = other DNA
acgggtgtgggttgagattcagtcgataattgtatacacgcgatcgttaaaattaaatttatttgtatccgcttcatcct

SEQ ID NO: 140085 - DNA, 80 bp, synthetic construct
  source 1..80: mol_type = other DNA
ccgaaaacacgcaggggcatccagaatctcgatgctttccagggggtcgtcctccgcaaacaggcccgtcgtggtgtttg

SEQ ID NO: 140086 - DNA, 80 bp, synthetic construct
  source 1..80: mol_type = other DNA
aactccagtgggctataccatcttacaaatgattgccctaactccagcatcgtgctggaggcggatgctatgatcttgca

SEQ ID NO: 140087 - DNA, 80 bp, synthetic construct
  source 1..80: mol_type = other DNA
atacgtccaccacgaggcgcgcgtgcttgccgcgtaccgcagggcgtattatggaagcgcgcagagtcccttctggtttc

SEQ ID NO: 140088 - DNA, 80 bp, synthetic construct
  source 1..80: mol_type = other DNA
acctatgccaggtgtggttccgggccctggctcacgcccaggtgcctggttgactacccttacaggctatggcactatcc

SEQ ID NO: 140089 - DNA, 80 bp, synthetic construct
  source 1..80: mol_type = other DNA
cgagtggcgggcatgcgcgtgagcgtagcaaacgccccgcccacacaacgctccgcccccaaccccttccccgctgtcac

SEQ ID NO: 140090 - DNA, 80 bp, synthetic construct
  source 1..80: mol_type = other DNA
acacttcgcgccaaatcatgaccatcttaagttcccttaccataaccagcctactgcgtaagctgcacgagtggatcaat

SEQ ID NO: 140091 - DNA, 80 bp, synthetic construct
  source 1..80: mol_type = other DNA
aaaccgggtggatttgagggaatagtggaggaccatccatatggactaaattgtttttcaatgttttccacacgacgagt

SEQ ID NO: 140092 - DNA, 80 bp, synthetic construct
  source 1..80: mol_type = other DNA
aacaacggtcaacgcgtggtatttaccatcctcctgctgttggtcgctccggcttacagttttaattgtctgggaatggg

SEQ ID NO: 140093 - DNA, 80 bp, synthetic construct
  source 1..80: mol_type = other DNA
taggaataattggcttcagcattttgattattatagcagcctttatttatctgtgctggcatagaaaatctttgtgtgtt

SEQ ID NO: 140094 - DNA, 80 bp, synthetic construct
  source 1..80: mol_type = other DNA
ctcagcagaagctcacctgtacgaccctaaacctacctgcgagaacgcgcggcgttcgaggggcgcgctctctcacacga

SEQ ID NO: 140095 - DNA, 80 bp, synthetic construct
  source 1..80: mol_type = other DNA
tataaccaacacgttgctcaacccgtcctcgaatttccatatccgggtgcggtagtcgccctgctttctcggcatctctg

SEQ ID NO: 140096 - DNA, 80 bp, synthetic construct
  source 1..80: mol_type = other DNA
cgttgctgcgggtaaaggccggcagcgccccgtgggtggccggtgccaaccgcgtcagggcgccctcggccaaccccagg

SEQ ID NO: 140097 - DNA, 80 bp, synthetic construct
  source 1..80: mol_type = other DNA
aggcctcggtcagggccgtggccagcgccgaggacagcagcggagggcgggcgcgtcgcccgccccacgccactgagttc

SEQ ID NO: 140098 - DNA, 80 bp, synthetic construct
  source 1..80: mol_type = other DNA
tgttaatggcactgccccaccgggcatatgccttcaaccaggagatggctgcgtcatgtggaggcgtcgtccttgtctgc

SEQ ID NO: 140099 - DNA, 80 bp, synthetic construct
  source 1..80: mol_type = other DNA
tcttcagccagccagctgtctgccccgtctctaaaagccactcgctcgggaagggctccaaacccagacgtcgagctgat

SEQ ID NO: 140100 - DNA, 80 bp, synthetic construct
  source 1..80: mol_type = other DNA
aggagtctttaaaggcatccagcacctaacagctacagaagaaatcgcggtgcgagactggttagcaagagtggggcgtg

SEQ ID NO: 140101 - DNA, 80 bp, synthetic construct
  source 1..80: mol_type = other DNA
cactatcgttccgggcgaaagacggctgctggtatggaatggagataaggcccagaaaggaaccagagagcaacttagtg

SEQ ID NO: 140102 - DNA, 80 bp, synthetic construct
  source 1..80: mol_type = other DNA
gggagcctggtgacccggacctgacatcagattcatggtccaccgttagcgggtcagaggatgtcgtgtgctgctcaatg

SEQ ID NO: 140103 - DNA, 80 bp, synthetic construct
  source 1..80: mol_type = other DNA
ggtcaaactcactccactgcgcggcgctgccaacctggatttgtccggatggtttgtgtcgggcggaagcggtgtggaca

SEQ ID NO: 140104 - DNA, 80 bp, synthetic construct
  source 1..80: mol_type = other DNA
acgtttaccccgcagcctatgttcgcgggcgacgccccggccgcctggttgcggcccgcgtttggcctgcggcgcaccta

SEQ ID NO: 140105 - DNA, 80 bp, synthetic construct
  source 1..80: mol_type = other DNA
cttcgcgggtcttttcagcacaggccccagtcagacaataaacctggtcaacaccgcgggcagctggcacatcaaccgga

SEQ ID NO: 140106 - DNA, 80 bp, synthetic construct
  source 1..80: mol_type = other DNA
acgccccccggtacggtgacaactccccacgctaacatagaggaggtggcccttggtcatgagggcgagatcccttttta

SEQ ID NO: 140107 - DNA, 80 bp, synthetic construct
  source 1..80: mol_type = other DNA
acggcctgacgggtctttggtccctagcattgcttgtcctcttgctcccccaacgggcgtatgcttggtcgggtgaagac

SEQ ID NO: 140108 - DNA, 80 bp, synthetic construct
  source 1..80: mol_type = other DNA
tgaaacctggatcttgagacatccaggttttaccataatggcagcaatcttggcatacaccataggaacaacatatttcc

SEQ ID NO: 140109 - DNA, 80 bp, synthetic construct
  source 1..80: mol_type = other DNA
tacaggccgcgtgtcgggggtataaaatagtcgcacacgtttggcagacaacatttttactgtcggtatgtcgcaaccca

SEQ ID NO: 140110 - DNA, 80 bp, synthetic construct
  source 1..80: mol_type = other DNA
ccggcctgatccacctgcatcagaacattgtggacatacagtatctctatggagtatccacggcagttgtgtcgtgggca

SEQ ID NO: 140111 - DNA, 80 bp, synthetic construct
  source 1..80: mol_type = other DNA
ggagtggacgccgatacccacaccgtcgggggggccgcaggtcactccgtcgcaacctttgccaacctgttcacacttgg

SEQ ID NO: 140112 - DNA, 80 bp, synthetic construct
  source 1..80: mol_type = other DNA
gggacataggatggcctgggatatgatgatgaactggtccccgacagcgacctatgccatctctgctttactgagggtgc

SEQ ID NO: 140113 - DNA, 80 bp, synthetic construct
  source 1..80: mol_type = other DNA
accctcgtcgcgggcgggctcgctcccctgcccttccgggttcgtggtaatgagatgccggccccgcgctcccgttggcc

SEQ ID NO: 140114 - DNA, 80 bp, synthetic construct
  source 1..80: mol_type = other DNA
cgctcggtcgccgcgcggtacgtctcctgcatgatggtccgggcggtctcggatccgtccgcgcgcttcagggccgagaa

SEQ ID NO: 140115 - DNA, 80 bp, synthetic construct
  source 1..80: mol_type = other DNA
tgggggtttgggaggggccggtggtcgcgcgaaatcagtaacaggggcgaccgtgtcggggagggaaggcggccgccaac

SEQ ID NO: 140116 - DNA, 80 bp, synthetic construct
  source 1..80: mol_type = other DNA
gcacagatcgccggacatgtcaaaaacggttccatgaggatcatcgggccgaaaacctgcagcaacacgtggcatggaac

SEQ ID NO: 140117 - DNA, 80 bp, synthetic construct
  source 1..80: mol_type = other DNA
ccaacggcagaagaaggtcaccttcgacaggctacaagtgcttgatgactactacaacactactctgaaggagattaagg

SEQ ID NO: 140118 - DNA, 80 bp, synthetic construct
  source 1..80: mol_type = other DNA
ggttaacaccccggtgtatggtcgactacccataccggctttggcattacccatgtactgtcaacttcacattgttcaag

SEQ ID NO: 140119 - DNA, 80 bp, synthetic construct
  source 1..80: mol_type = other DNA
tcggcgtcgtttgcgctgcgattctgcgccggcacgtgggcccgggcgaaggagctgtgcagtggatgaaccggctgata

SEQ ID NO: 140120 - DNA, 80 bp, synthetic construct
  source 1..80: mol_type = other DNA
agctggatatggagccggggtctccggtgctctcgtcgccttcaagatcatgggcgtggagctccccactacagaagaca

SEQ ID NO: 140121 - DNA, 80 bp, synthetic construct
  source 1..80: mol_type = other DNA
cgacgaggaagacctccgaacggtcccaacccagaggtaggcgtcagcccataccaaaggcgcgccagtctcagggccgg

SEQ ID NO: 140122 - DNA, 80 bp, synthetic construct
  source 1..80: mol_type = other DNA
gctcgcggaggccggatcggtggcggcacccgtgggaggagcgggagacggcggcgttctggagagaggtgccgctggtg

SEQ ID NO: 140123 - DNA, 80 bp, synthetic construct
  source 1..80: mol_type = other DNA
atgcttcccaggggtacaaggtgctcgtgctcaacccgtcggtggctgcgaccctgtcctttggtgcatacctcagcaaa

SEQ ID NO: 140124 - DNA, 80 bp, synthetic construct
  source 1..80: mol_type = other DNA
tcattgggccaatgtatttaatacaagctgcactcaccagtaccccctattttgtacgcgctcacatactggttcgtatc

SEQ ID NO: 140125 - DNA, 80 bp, synthetic construct
  source 1..80: mol_type = other DNA
ccataaagcacttgacttcgatatatacggagtcacatacagtatcactccacttgatctacctcagattattcagcgcc

SEQ ID NO: 140126 - DNA, 80 bp, synthetic construct
  source 1..80: mol_type = other DNA
gcaagggggtgagaacttcgcgtacctcgtagcataccaggctacagtgtgcgccagggccaaagcccccccgccttctt

SEQ ID NO: 140127 - DNA, 80 bp, synthetic construct
  source 1..80: mol_type = other DNA
aaagagttcgcagcaggaagaagaagtgtctcaggtgacctaatattggaaatagggaaacttccacaacatttgacgct

SEQ ID NO: 140128 - DNA, 80 bp, synthetic construct
  source 1..80: mol_type = other DNA
catctcccaaggaggtaaagcggccacatgtggccgctacctcttcaactgggcggtgagaacaaagctcaaactcactc

SEQ ID NO: 140129 - DNA, 80 bp, synthetic construct
  source 1..80: mol_type = other DNA
ctttccaacttccaggggaaagtcatgatgaccatcaacgcgactgatatggcggatgtcattgttgttcccacgcaaca

SEQ ID NO: 140130 - DNA, 80 bp, synthetic construct
  source 1..80: mol_type = other DNA
tgaaagctcgattatgtggcttgccagcttggcaatcgtgacagcctgtgccggagccatgaagctatcaaactttcaag

SEQ ID NO: 140131 - DNA, 80 bp, synthetic construct
  source 1..80: mol_type = other DNA
actattacttatgtctgaagttaaaaaagagttaaagatccaacctttagaaaaagacagcaagaatagaagctacaatg

SEQ ID NO: 140132 - DNA, 80 bp, synthetic construct
  source 1..80: mol_type = other DNA
gggttctcctttagcgcgcgttgcccgttctcgcttgccacatccatctcgatcatgtgctccttctggatcatggtggt

SEQ ID NO: 140133 - DNA, 80 bp, synthetic construct
  source 1..80: mol_type = other DNA
tgggaatgctggaaaagaccaaggaagacttttttggaagaagaaatactgccacacctggtgggacgattccatggagt

SEQ ID NO: 140134 - DNA, 80 bp, synthetic construct
  source 1..80: mol_type = other DNA
ggcgcatggcgtgagggcactcgaggatggggtgaactatgcaacagggaaccttcccggttgctccctttctatcttcc

SEQ ID NO: 140135 - DNA, 80 bp, synthetic construct
  source 1..80: mol_type = other DNA
aggccaccgggtggccgttcacgtttacggcacgcggcagtacttttacatgaacaaggaggaggtcgacaggcacctac

SEQ ID NO: 140136 - DNA, 80 bp, synthetic construct
  source 1..80: mol_type = other DNA
actcaaaagggcagaactgcggttatcgccggtgccgcgcgagcggtgtgctgacgactagctgcggtaataccctcaca

SEQ ID NO: 140137 - DNA, 80 bp, synthetic construct
  source 1..80: mol_type = other DNA
cacaacagcttgcgcgatcttgctgtggccgtcgagcctgttgtcttctctcaaatggagaccaagctcatcacttgggg

SEQ ID NO: 140138 - DNA, 80 bp, synthetic construct
  source 1..80: mol_type = other DNA
gtttcggttgaagtgtcttgttaatgtttgtttgggcgtggttaaacagggatataaagctgggttggtgttgctttgaa

SEQ ID NO: 140139 - DNA, 80 bp, synthetic construct
  source 1..80: mol_type = other DNA
cccgctggtaacctacagcctgacgggtctttggtccctagcaatgcttgtcctcttgctcccccaacgggcgtatgcct

SEQ ID NO: 140140 - DNA, 80 bp, synthetic construct
  source 1..80: mol_type = other DNA
ccactgacaacgtaaaatgcccatgccaagttcccgcccccgaattcttcactgaagtggatggggtacggttgcacagg

SEQ ID NO: 140141 - DNA, 80 bp, synthetic construct
  source 1..80: mol_type = other DNA
ccgcctcatgtggtggaaccagtacgccatatgcaggtgcgagtccgcccttcaagtgtgggtcccccccctacttgcac

SEQ ID NO: 140142 - DNA, 80 bp, synthetic construct
  source 1..80: mol_type = other DNA
ggtcgcgcgcgtcgcggcttggatcagggaggcatgctctccctccggttggttggcggcccggcgcacctggacgacaa

SEQ ID NO: 140143 - DNA, 80 bp, synthetic construct
  source 1..80: mol_type = other DNA
gtccggggctctcgtagcgttcaagatcatgagcggtgatgccccggcagcagaagacatggtcaatctccttcccgcca

SEQ ID NO: 140144 - DNA, 80 bp, synthetic construct
  source 1..80: mol_type = other DNA
tggaaaacaaagaaagttttggaattgaaaaggttctgctcgacctgaaaccagcaacatcttggtctctctacgctgtg

SEQ ID NO: 140145 - DNA, 80 bp, synthetic construct
  source 1..80: mol_type = other DNA
cagcacatgggtcctcgtgggtggagtcctagccgcgctcgcagcctactgcttgtcagtgggctgcgtcgtcatctgtg

SEQ ID NO: 140146 - DNA, 80 bp, synthetic construct
  source 1..80: mol_type = other DNA
tactccttaacatcttaggaggatgggtggcatcccaactggcaccgccgtccgcgtccacggcttttgtcgtaagcggc

SEQ ID NO: 140147 - DNA, 80 bp, synthetic construct
  source 1..80: mol_type = other DNA
cgtgagcggccttgcaggagcagcgatcggtagcgtaggtcttgggaagatcctagttgacattctcgccggatacggcg

SEQ ID NO: 140148 - DNA, 80 bp, synthetic construct
  source 1..80: mol_type = other DNA
caacgcgtccttgttctcggccccccgcggccccaaaaggggcccgtgcgacagtcagatcacccgcatcatccgacagg

SEQ ID NO: 140149 - DNA, 80 bp, synthetic construct
  source 1..80: mol_type = other DNA
gggggcggggcttcttagagacctcggggggacgtgggattggtgtgcaaaggcacgcgcacccgcgcgggccaggtggg

SEQ ID NO: 140150 - DNA, 80 bp, synthetic construct
  source 1..80: mol_type = other DNA
taatagctctgggtgtcccgaaagggtcgccagctgcaaacgtcttggagattttccccagggccatgggcagcttaaag

SEQ ID NO: 140151 - DNA, 80 bp, synthetic construct
  source 1..80: mol_type = other DNA
cactgaaagaatggaacttcgctgtggtgaaggcttggtcgtgtggagagaggtgtcagaatggtatgataactatgctt

SEQ ID NO: 140152 - DNA, 80 bp, synthetic construct
  source 1..80: mol_type = other DNA
cggggtcagactaactgtgctggctacggccacaccccccgggtcagtgacaaccccccatcccgatatagaagaggtag

SEQ ID NO: 140153 - DNA, 80 bp, synthetic construct
  source 1..80: mol_type = other DNA
ccgacggagggtgctcgggtggcgcgtatgacatcatcatctgtgacgagtgccattccacagaccccacgacggtcttg

SEQ ID NO: 140154 - DNA, 80 bp, synthetic construct
  source 1..80: mol_type = other DNA
attctgccatcggttattgggttttggatcactctccagtacactaagagaggaggggtcctttgggacacaccgtctcc

SEQ ID NO: 140155 - DNA, 80 bp, synthetic construct
  source 1..80: mol_type = other DNA
gattattcatcaataggtcgtttaaagcgcgttttcataaacgttgtcagctataccgacattctcacaaagaggtaaag

SEQ ID NO: 140156 - DNA, 80 bp, synthetic construct
  source 1..80: mol_type = other DNA
gtacatcgccacatgcatgcaagctgaccttgaggtcatgaccagcacctgggtgctcgttggcggcgtcctggctgctc

SEQ ID NO: 140157 - DNA, 80 bp, synthetic construct
  source 1..80: mol_type = other DNA
gtacctgaatatgatgacagagagccatctgtgcccgcggagtgccacaggccacctaggccgaagttcccaccagcgct

SEQ ID NO: 140158 - DNA, 80 bp, synthetic construct
  source 1..80: mol_type = other DNA
tgttcccgaaaatgcctggccttccctttgtttcctgtcaaaagggctacaaggtggtgtgggccggtaccggcatcatg

SEQ ID NO: 140159 - DNA, 80 bp, synthetic construct
  source 1..80: mol_type = other DNA
cgcggttgctaacatcgaagtagactgcattccagccttcacagtctacctgctttacggatttgtcacccttacgctca

SEQ ID NO: 140160 - DNA, 80 bp, synthetic construct
  source 1..80: mol_type = other DNA
tcgagcccttgcatgccgtccatgatgatcatgagatctccgaggcggcggactgtttcaaaaagccgccgagctatcca

SEQ ID NO: 140161 - DNA, 80 bp, synthetic construct
  source 1..80: mol_type = other DNA
gatattactacctcacacgtgactgcactactccactcgcgcgggctgcatgggagacagcccgccacactccagtcaat

SEQ ID NO: 140162 - DNA, 80 bp, synthetic construct
  source 1..80: mol_type = other DNA
ctgtttatccgtatattcttctgcccggcatgcggcgatgaaacttaatgacgttacatatgctctaagccccccacctt

SEQ ID NO: 140163 - DNA, 80 bp, synthetic construct
  source 1..80: mol_type = other DNA
gagaatggccgggcttgacgtcatcatatgtctgttgttgataattggaattgtaacactcctgaatgaaagaagagaaa

SEQ ID NO: 140164 - DNA, 80 bp, synthetic construct
  source 1..80: mol_type = other DNA
cgatcgcctccaggtggttgaccaacattacaatgatgtcctcaaggagataaagctccgcgcgtccacggtgtctgcaa

SEQ ID NO: 140165 - DNA, 80 bp, synthetic construct
  source 1..80: mol_type = other DNA
ccctccgaaaagtctgcatccaaaacgcatgcccggcggacggtctcgcattccacgagccaggtgagctctggccgttc

SEQ ID NO: 140166 - DNA, 80 bp, synthetic construct
  source 1..80: mol_type = other DNA
aacgcttctctgcctaaggctcgccgcctgctgtgtgcacatttgcatttattgtcagctttttaaacgctggggtcgcc

SEQ ID NO: 140167 - DNA, 80 bp, synthetic construct
  source 1..80: mol_type = other DNA
agttaaccttgagtttaatgtctcgtcgccatcatgagtctgtttggtgggctgatttggaagatgagtttaaaaacggt

SEQ ID NO: 140168 - DNA, 80 bp, synthetic construct
  source 1..80: mol_type = other DNA
ggcgaagcgcgcagagactatgtgcgcgattgcatttatctgtttctactgcacacctggcaaaccggcatgggggtgtg

SEQ ID NO: 140169 - DNA, 80 bp, synthetic construct
  source 1..80: mol_type = other DNA
gcatacccaatgttcatagaaattctaaaagacgtcccatctattcttctatgattagtcgtccccatatggctctgaat

SEQ ID NO: 140170 - DNA, 80 bp, synthetic construct
  source 1..80: mol_type = other DNA
ctatggccccttctgctgttagtgcttgccctacctcgtagagcatatgcccaggacaccgatcaggcggcgtcagtggg

SEQ ID NO: 140171 - DNA, 80 bp, synthetic construct
  source 1..80: mol_type = other DNA
gcagggctcccccaggcccgcgatctcgccccgcagggggtgcgtgatggccacgcgccgttcgctgaacgcttcgtcct

SEQ ID NO: 140172 - DNA, 80 bp, synthetic construct
  source 1..80: mol_type = other DNA
gccggttccaagaccctagctggccctaagggacctgtctgccaaatgtacaccaatgtggaccaagacctggtagggtg

SEQ ID NO: 140173 - DNA, 80 bp, synthetic construct
  source 1..80: mol_type = other DNA
aaggagaatatcaaaatatgactgccagtactaataagaatgtaaaaataacactgctatttgatgctaatggagtcttg

SEQ ID NO: 140174 - DNA, 80 bp, synthetic construct
  source 1..80: mol_type = other DNA
gagcatcgtagtgcaggagcgcagcctgagcctggccgagaaggtggcggcgatcaactactcggtgctgagcctgggca

SEQ ID NO: 140175 - DNA, 80 bp, synthetic construct
  source 1..80: mol_type = other DNA
tgagcgcgcgcagcagcagggcaacctgggctccatggttgcactaaacgccttcctgagtacacagcccgccaacgtgc

SEQ ID NO: 140176 - DNA, 80 bp, synthetic construct
  source 1..80: mol_type = other DNA
ctggcacataaaccggaccgccctcaactgtaatgacagcttgcagacgggtttcatcagttccctgttttacacccgcc

SEQ ID NO: 140177 - DNA, 80 bp, synthetic construct
  source 1..80: mol_type = other DNA
ccctgtcgcgtatgccgcccaggggtacaaagtactagtgcttaacccctcggtagctgccaccctggggtttgtggcgt

SEQ ID NO: 140178 - DNA, 80 bp, synthetic construct
  source 1..80: mol_type = other DNA
ggttcttcgggaggccccatcatgtgtccttctggtcatgttgcgggcctcttcagggccgccgtctgtaccagaggtgt

SEQ ID NO: 140179 - DNA, 80 bp, synthetic construct
  source 1..80: mol_type = other DNA
acagaatgaagtgacactcacccatcctgtgaccaaatacatcatggcctgcatgtcagctgacctcgaagtggtgacca

SEQ ID NO: 140180 - DNA, 80 bp, synthetic construct
  source 1..80: mol_type = other DNA
tccgcgcagcaccgcgcgtcgtcattcttgatttggaccacgctgcgaccccagcggttctgaacaactttggttttgct

SEQ ID NO: 140181 - DNA, 80 bp, synthetic construct
  source 1..80: mol_type = other DNA
gacaaggtatttgtggagagtagtagtggcccaggacctagttcagactcgggactatcaatagccagtcccgttccacc

SEQ ID NO: 140182 - DNA, 80 bp, synthetic construct
  source 1..80: mol_type = other DNA
catccccgtcgtaggcgccccggttgggggcgttgctagggctctcgcgcatggcgtgcgagttctagaggacggtgtga

SEQ ID NO: 140183 - DNA, 80 bp, synthetic construct
  source 1..80: mol_type = other DNA
gtgctcgctgccgtgtatggcggcctgcagcaggtaaaacaccgccgggtagttgcggtcgtcgaacgccccgcgaacgg

SEQ ID NO: 140184 - DNA, 80 bp, synthetic construct
  source 1..80: mol_type = other DNA
ctgattgaaaaaacaaaaacggactttgggttttaccaggtaaaaacagaaactaccattctggatgtggatttgagacc

SEQ ID NO: 140185 - DNA, 80 bp, synthetic construct
  source 1..80: mol_type = other DNA
aactgatgctctcatgaccggctataccggcgacttcgactcggtgatagactgcaacacgtgtgtcacccagacagtcg

SEQ ID NO: 140186 - DNA, 80 bp, synthetic construct
  source 1..80: mol_type = other DNA
cgctggtcagcgaggccctggcgtggcataggctatacgcgatggtcgtctgtggattggacatctcgcggtgggtagtg

SEQ ID NO: 140187 - DNA, 80 bp, synthetic construct
  source 1..80: mol_type = other DNA
gcaacaccccctgggtcagtcactgtccctcatccaaacatttcagaagtcgcgctgcccacgacaggggaaatcccctt

SEQ ID NO: 140188 - DNA, 80 bp, synthetic construct
  source 1..80: mol_type = other DNA
cggctggacttggaagctttgtctcatccggcgccactgagaacatcccactgatcaacaccaacggcagttggcacata

SEQ ID NO: 140189 - DNA, 80 bp, synthetic construct
  source 1..80: mol_type = other DNA
taaggcccaacaggcgatccgcgctgaatcgcacgtagttttcgatggccgccagcgccgccgggctcaggatatggctg

SEQ ID NO: 140190 - DNA, 80 bp, synthetic construct
  source 1..80: mol_type = other DNA
gagcggctgtacatcgggggccccatgtataacagcaaagggctccagtgcggctatcgccgctgccgcgctagcggtgt

SEQ ID NO: 140191 - DNA, 80 bp, synthetic construct
  source 1..80: mol_type = other DNA
tccgtttggagattcttacattgtggttggaagaggaagccaacagattaaccaccattggcacaaatcaggtagtagca

SEQ ID NO: 140192 - DNA, 80 bp, synthetic construct
  source 1..80: mol_type = other DNA
attggatagaaagctcaaaaaaccagacctggcagatagagagagcatctctcattgaggtgaaaacatgtctgtggccc

SEQ ID NO: 140193 - DNA, 80 bp, synthetic construct
  source 1..80: mol_type = other DNA
agcactcaagtacactgaccccattactaccaatgctaaacatgagcttactttaaaacttggcagcaacataactttac

SEQ ID NO: 140194 - DNA, 80 bp, synthetic construct
  source 1..80: mol_type = other DNA
gaagctcgtcttcgaggtcaccaaataccttctggtcatcatcggccctgcctccatactacaggcctccctgctgcaaa

SEQ ID NO: 140195 - DNA, 80 bp, synthetic construct
  source 1..80: mol_type = other DNA
gagctggagtctctggagccttggtggcatttaagatcatgggcggggaaatgccctctactgaggacatggttaacatg

SEQ ID NO: 140196 - DNA, 80 bp, synthetic construct
  source 1..80: mol_type = other DNA
agtatgcaggctaactgggctaaagtcatcctgattttattcatctttgccggggtcgacgcgaacacgcagatcactgg

SEQ ID NO: 140197 - DNA, 80 bp, synthetic construct
  source 1..80: mol_type = other DNA
tcatcatcccgaacaaacccatgtcaggtcaattgtaactgcggatcggcctaactaaggcgtggttggtgcgacggtcc

SEQ ID NO: 140198 - DNA, 80 bp, synthetic construct
  source 1..80: mol_type = other DNA
taggcttcctcaacgaagaacactgggcttccagggtggtcagtggagccggagtggaaggaaccagcctcaactatctt

SEQ ID NO: 140199 - DNA, 80 bp, synthetic construct
  source 1..80: mol_type = other DNA
aagcttagatggttggtagagagaggatacctgcagccccatggaaaggttgttgaccttggatgtggcagaggaggctg

SEQ ID NO: 140200 - DNA, 80 bp, synthetic construct
  source 1..80: mol_type = other DNA
tgcttcacccccagcccagtagttgtgggcactaccgacaagttcggggcacccacctacaactggggagagaatgaaac

SEQ ID NO: 140201 - DNA, 80 bp, synthetic construct
  source 1..80: mol_type = other DNA
cgcccgcagtgccgcagagctaccaggttgcccacttgcatgctccgacggggagcggcaagagcacgaaagtcccggca

SEQ ID NO: 140202 - DNA, 80 bp, synthetic construct
  source 1..80: mol_type = other DNA
gaagcttgggacttgactgtgaaccaaggacaggccttgacttctcagacctgtattacctgaccatgaacaataagcat

SEQ ID NO: 140203 - DNA, 80 bp, synthetic construct
  source 1..80: mol_type = other DNA
ggaggagttgaaggagctggtattcagaagctgggatacatcttgagagatgtggctcaaaagcctggagggaaaattta

SEQ ID NO: 140204 - DNA, 80 bp, synthetic construct
  source 1..80: mol_type = other DNA
acccgcgtaaccccgtggagtttgactggttcgaggacgaccgccaggtgtttaacccgggccagatcgacacgcagacg

SEQ ID NO: 140205 - DNA, 80 bp, synthetic construct
  source 1..80: mol_type = other DNA
acgtagccagcgccggggtcgcacgggtaggggaagactgggcatttataggtatgtttccactggtgagcgagcctcag

SEQ ID NO: 140206 - DNA, 80 bp, synthetic construct
  source 1..80: mol_type = other DNA
ccacagtgcggaaagaaagagacggcaccaccgtgatcagagctgaaggaaaagatgcggcaacccaggtgcgtgtggaa

SEQ ID NO: 140207 - DNA, 80 bp, synthetic construct
  source 1..80: mol_type = other DNA
ctcacacgagtggcggcaaccctcaggaaacttggggcaccgccactcagagcctggaagagtcgggcgcgtgcagttag

SEQ ID NO: 140208 - DNA, 80 bp, synthetic construct
  source 1..80: mol_type = other DNA
acgtcggtatggagggggactggtgcggaacccactgtcacgcaattcgacacatgagatgtactgggtaagccgagcat

SEQ ID NO: 140209 - DNA, 80 bp, synthetic construct
  source 1..80: mol_type = other DNA
cgattcgtaccagtcgaccgcgaggacaccgcttattcttacaaagtgcgctttacgctggccgtgggcgacaaccgggt

SEQ ID NO: 140210 - DNA, 80 bp, synthetic construct
  source 1..80: mol_type = other DNA
aaaaatgggactgttgctggcaaagtggaatgggatccagacacaaaagttgcttcaaagaacagaatatgcaagggcag

SEQ ID NO: 140211 - DNA, 80 bp, synthetic construct
  source 1..80: mol_type = other DNA
gggtgttcacagggcttactaacatcgacgcccacatgctgtcacaggcaaagcagggtgtggaaaacttcccatacctt

SEQ ID NO: 140212 - DNA, 80 bp, synthetic construct
  source 1..80: mol_type = other DNA
cacttgactccgaggcggggctaaccacctcaatcaagacttctgaaccggaccccaccactgcagacgacaagtcggac

SEQ ID NO: 140213 - DNA, 80 bp, synthetic construct
  source 1..80: mol_type = other DNA
atgacccctgtggggaggctggtaacagtaaaccccttcgtcgcgacatctagctccaactcaaaggtgctggttgagat

SEQ ID NO: 140214 - DNA, 80 bp, synthetic construct
  source 1..80: mol_type = other DNA
ccaacagcagcattgtgtatgaggcatctgatgtcattctgcacctccctggatgcgtcccttgcacgaggtctggtaac

SEQ ID NO: 140215 - DNA, 80 bp, synthetic construct
  source 1..80: mol_type = other DNA
aacaactgctgctaacggggaccaaggcaatactacctggcaaaaagattcaacatttgcagaacgcaatgaaataggtg

SEQ ID NO: 140216 - DNA, 80 bp, synthetic construct
  source 1..80: mol_type = other DNA
tcctatgtcacaaaaacctcaggaagtgcggcgagcatggtaaatggtgttattaaaattctgacatatccatgggacag

SEQ ID NO: 140217 - DNA, 80 bp, synthetic construct
  source 1..80: mol_type = other DNA
gtggatgaactccacggggtttgtcaaaacgtgcggcgcgccaccgtgtaacatcgggccggcctccaacaactccctga

SEQ ID NO: 140218 - DNA, 80 bp, synthetic construct
  source 1..80: mol_type = other DNA
aaggccttgatcccgactcactggaggtggagggagagacggaagaggcataattattccagacggttgtaaagcgagcc

SEQ ID NO: 140219 - DNA, 80 bp, synthetic construct
  source 1..80: mol_type = other DNA
acccgtactaccctttcgacgcgctggacgtttgggaacacaggcgcttcatcgtcgccgactccaggagcttcatcacc

SEQ ID NO: 140220 - DNA, 80 bp, synthetic construct
  source 1..80: mol_type = other DNA
gatcgtgccgatgatgtatggccaacattatccaggtttggatatacaaattactttcctgattgtctgtggggtcttta

SEQ ID NO: 140221 - DNA, 80 bp, synthetic construct
  source 1..80: mol_type = other DNA
cgcctatggagaccaaaatcatcacttggggtgcagacacagctgcatgcggagatatcctttgcggactgccggtgtcc

SEQ ID NO: 140222 - DNA, 80 bp, synthetic construct
  source 1..80: mol_type = other DNA
gccccccgaaccacacccacgcccccccaaccccgcaaggcgacgaaaagtaaggcctccgccgccaaaccggccccgcc

SEQ ID NO: 140223 - DNA, 80 bp, synthetic construct
  source 1..80: mol_type = other DNA
aatctaacactaagtggaccaccaggaacgccagttacatggcatggagagggtcacaaactttgcgaaggcaaaaatgt

SEQ ID NO: 140224 - DNA, 80 bp, synthetic construct
  source 1..80: mol_type = other DNA
tcttgcacgtgtgtgtgggcactttagtcagtgtctgcggcgttcttcttttgaacgtgagtgtgttgaggaaaagacag

SEQ ID NO: 140225 - DNA, 80 bp, synthetic construct
  source 1..80: mol_type = other DNA
cccgcccgccgggcccttgccgccgccgtcgcgcccgccccgcggggtcttaccctggctggcttcgaaggccgtgaacg

SEQ ID NO: 140226 - DNA, 80 bp, synthetic construct
  source 1..80: mol_type = other DNA
acttacacctgagaggagaatgagactgatgtcttcatcctcaattcgaccagacccccggggggggcttggtttgggtg

SEQ ID NO: 140227 - DNA, 80 bp, synthetic construct
  source 1..80: mol_type = other DNA
gtcacgctgaatgctatcgccgctgctgggacacatggtatcggttggtacctagtggctttttgcgcggcgtggcatgt

SEQ ID NO: 140228 - DNA, 80 bp, synthetic construct
  source 1..80: mol_type = other DNA
acgcctcctgggtctgtaacgactccccaccccaacatagaggaagtagctctcggccacgagggtgaaatcccttttta

SEQ ID NO: 140229 - DNA, 80 bp, synthetic construct
  source 1..80: mol_type = other DNA
tggatcaatgaagactatcccactccttgcgatgggagttggctttatgacatctggaactgggtctgtactgtgctcac

SEQ ID NO: 140230 - DNA, 80 bp, synthetic construct
  source 1..80: mol_type = other DNA
ccggtagccggggcacgcggtcagcatccgatcgatgagccggtagtgcaggtgggccgacgtgccggggaagatgacgt

SEQ ID NO: 140231 - DNA, 80 bp, synthetic construct
  source 1..80: mol_type = other DNA
tgtaatctgtgcacccctcaccgttccctggtttgtaacacagaactactgagtgaaagtcaacttataggaacctttga

SEQ ID NO: 140232 - DNA, 80 bp, synthetic construct
  source 1..80: mol_type = other DNA
ggctatgaccaggtattctgcccctcccggtgacctccccagaccggaatatgacctggagctgataacatcttgttcct

SEQ ID NO: 140233 - DNA, 80 bp, synthetic construct
  source 1..80: mol_type = other DNA
tgcacaccatgtgtgctggctggaggcttccatgctcctggataacatggaggttagaggggggatggttgctccacttc

SEQ ID NO: 140234 - DNA, 80 bp, synthetic construct
  source 1..80: mol_type = other DNA
cttggctgcctattgcctcacgatgggcagcgttgtcatctgcggcaggatcataaccagtggcaagcccgccgtcatgc

SEQ ID NO: 140235 - DNA, 80 bp, synthetic construct
  source 1..80: mol_type = other DNA
gcgcttgcgattctagcctcgtggggctggacgttcgacacgccaaaccacgagtcagggatatcgccagatacgactcc

SEQ ID NO: 140236 - DNA, 80 bp, synthetic construct
  source 1..80: mol_type = other DNA
catccggcgggccggtaatgtgttcagcaggtcatgtcgttggactattccgcgccgccgtttgtaccaggggagtcgcc

SEQ ID NO: 140237 - DNA, 80 bp, synthetic construct
  source 1..80: mol_type = other DNA
gaacgtttgcggtcctgtttactgcttcacccctagccctgtggtcgtaggcactactgaccgtaggggtcttcccacct

SEQ ID NO: 140238 - DNA, 80 bp, synthetic construct
  source 1..80: mol_type = other DNA
ttgtttgctctccgctcccgtgtcaacaccaccgggtgcgtggaacggctgagcccctgccacccgatcacccacttcga

SEQ ID NO: 140239 - DNA, 80 bp, synthetic construct
  source 1..80: mol_type = other DNA
tggtgatgatgacgcatttttttggaatactccagtcccaagaaacactccacaaagcactcgacttcgacatgtacggg

SEQ ID NO: 140240 - DNA, 80 bp, synthetic construct
  source 1..80: mol_type = other DNA
gtcctgctcttcctttctgtgaacgtccacgctgacaccgggtgtgcaattgatctcaaaagacaagagctcaggtgtgg

SEQ ID NO: 140241 - DNA, 80 bp, synthetic construct
  source 1..80: mol_type = other DNA
tgccagctatactgattgctctgctagtcctggtgtttgggggcattacttacactgacgtgttacgctatgtcatctta

SEQ ID NO: 140242 - DNA, 80 bp, synthetic construct
  source 1..80: mol_type = other DNA
tgctggtctgcggagacgacttggtgatcatctctgagagtttgggggtctcggaagatgcgggtgccctgcgagcgttc

SEQ ID NO: 140243 - DNA, 80 bp, synthetic construct
  source 1..80: mol_type = other DNA
cggaaagggcccgggacggaggctcggttgttgatgacctgggcggcgaggacgatctcgtcgaagccgttgatgttgtg

SEQ ID NO: 140244 - DNA, 80 bp, synthetic construct
  source 1..80: mol_type = other DNA
accgggagagggaagcacggcatctataggttcgtctcgccaggtgagcggccctcgggcatcttcgactccgtggtgct

SEQ ID NO: 140245 - DNA, 80 bp, synthetic construct
  source 1..80: mol_type = other DNA
attcaaagactccatggcttgagcgctttcacgctgcacggatactctccacacgaactcaatcgggtggcggcaaccct

SEQ ID NO: 140246 - DNA, 80 bp, synthetic construct
  source 1..80: mol_type = other DNA
tctgcccgttcaaaatacgggtatagtgcgaaagatgttcgctccttagccagcaaggccgtgacccaaatccgctccgt

SEQ ID NO: 140247 - DNA, 80 bp, synthetic construct
  source 1..80: mol_type = other DNA
ccgagagcgacgcggcagcgaagatcacctcgctgctaagctccttaaccgtcacgcagctgttgcggcggctgcatcga

SEQ ID NO: 140248 - DNA, 80 bp, synthetic construct
  source 1..80: mol_type = other DNA
cagagtaccaaaaaacaaaaaataacgactgggactacgtcgtcacaacagacatctccgaaatgggagcaaatttccgg

SEQ ID NO: 140249 - DNA, 80 bp, synthetic construct
  source 1..80: mol_type = other DNA
atccttgttaagatcatgtggtggtgtcagtacttcctcaccagatgcgaggcggtcatgcaggtatgggtcccccccct

SEQ ID NO: 140250 - DNA, 80 bp, synthetic construct
  source 1..80: mol_type = other DNA
atcctgataccacttacctcaaatgcggctctgggccctggctcacgccaaggtgcctgatcgactacccctacaggctc

SEQ ID NO: 140251 - DNA, 80 bp, synthetic construct
  source 1..80: mol_type = other DNA
tcacaactcttctgctagcagctaaggggggatcgtgcgcagcacttgaattatggtgatattttctgctgagccacaat

SEQ ID NO: 140252 - DNA, 80 bp, synthetic construct
  source 1..80: mol_type = other DNA
gctgtggtaatcactctttgtgctatcatccttgggggcctcacatggatggacttgctacgagccctcatcatgttagg

SEQ ID NO: 140253 - DNA, 80 bp, synthetic construct
  source 1..80: mol_type = other DNA
tgtattgcggagggcccatgtacaactctaagggccagaaatgcggataccgccggtgtcgagctagtggggttctcact

SEQ ID NO: 140254 - DNA, 80 bp, synthetic construct
  source 1..80: mol_type = other DNA
cggaggacgtggtgttggtgtgcaaaggcacgcgcacccgcgccggccaggtgggccggtaccccatcccccctcccccg

SEQ ID NO: 140255 - DNA, 80 bp, synthetic construct
  source 1..80: mol_type = other DNA
gcggagactccggggcgatgccggcgtgcgcgtgggagcagggcgatgacccaccggataaatgtggtgccccggcccgg

SEQ ID NO: 140256 - DNA, 80 bp, synthetic construct
  source 1..80: mol_type = other DNA
ccaaggagctcctcgatgccatcaacatccaccagtgcaagaaaggcatcttctgcttggtcaaacaggcaaagataacc

SEQ ID NO: 140257 - DNA, 80 bp, synthetic construct
  source 1..80: mol_type = other DNA
ctcggttaagagaagaagatgccctgtccgtggtgttgacccgcttggaggagttgtctcagcagttgcaagatctgtct

SEQ ID NO: 140258 - DNA, 80 bp, synthetic construct
  source 1..80: mol_type = other DNA
cggttactcctggccggtaatacaaaagggctgaaattactcctctgtaacccgcatcaataactccgttggcgacaaaa

SEQ ID NO: 140259 - DNA, 80 bp, synthetic construct
  source 1..80: mol_type = other DNA
acacacggcgtggagcaaaacgcctccccctgagccgctttcctaccaacacaacggcatgcctctgcgggcatcggaac

SEQ ID NO: 140260 - DNA, 80 bp, synthetic construct
  source 1..80: mol_type = other DNA
catagatcttatggtcggcgctgcagcgctgtgctcagctctctatgtcggagacctttgtgggggcgcgttcttagcag

SEQ ID NO: 140261 - DNA, 80 bp, synthetic construct
  source 1..80: mol_type = other DNA
accccgcggagtcgtctccgggaacgcgcgctacccgagacgataccgagcaggccgtggacaagatcctcaggggagcc

SEQ ID NO: 140262 - DNA, 80 bp, synthetic construct
  source 1..80: mol_type = other DNA
aggtcagaatgtttgtaggcggcattgagcaccggctcgacgctgcctgcaactggactagaggagaacgctgtgacctg

SEQ ID NO: 140263 - DNA, 80 bp, synthetic construct
  source 1..80: mol_type = other DNA
tttgaaatttttaagtggctttaggccatcggccataggcatgtggtccagggtttgcttcagcagttgcaagcgatccc

SEQ ID NO: 140264 - DNA, 80 bp, synthetic construct
  source 1..80: mol_type = other DNA
aacagcgatgaaacatctcaccagtttcaagaaagaactgggaatactcaccaacgccatcagtagaaggagcgaaaaga

SEQ ID NO: 140265 - DNA, 80 bp, synthetic construct
  source 1..80: mol_type = other DNA
cgagccgcccgcagttcacgggtgtgccttgccaccaactcgtcccgcaccagtgcctcccccccgcagaaagaggacaa

SEQ ID NO: 140266 - DNA, 80 bp, synthetic construct
  source 1..80: mol_type = other DNA
tcatgcgcacagcttcaccagtctgtttactccaggcgcccaacagaacatccagctcatcaacagcaacgggtcttggc

SEQ ID NO: 140267 - DNA, 80 bp, synthetic construct
  source 1..80: mol_type = other DNA
cacgtggtacttgtccatcagcgcgcgcgcagcctccatgcccttctcccacgcagacacgatcggcacactcagcgggt

SEQ ID NO: 140268 - DNA, 80 bp, synthetic construct
  source 1..80: mol_type = other DNA
taaagtgcagagcccctggaggagccaagaagcctctgcgtccacggtggtgcgatgaaagggtgtcgtctgaccagagt

SEQ ID NO: 140269 - DNA, 80 bp, synthetic construct
  source 1..80: mol_type = other DNA
gatatggcgccggtgtgtcaggagctctggtagcctttaagatcatgagcggcgaggcaccatcaatggaggacatggtc

SEQ ID NO: 140270 - DNA, 80 bp, synthetic construct
  source 1..80: mol_type = other DNA
ccggccatcgcatggcatgggacatgatgctgaactggtctccaactcttgccatgatcctcgcctacgccgctcgtgtt

SEQ ID NO: 140271 - DNA, 80 bp, synthetic construct
  source 1..80: mol_type = other DNA
gcgggggggcagccataccgcgtaaagggtaatggcgctgacgctctcctccacccacacgatatctgcggtgtccatcg

SEQ ID NO: 140272 - DNA, 80 bp, synthetic construct
  source 1..80: mol_type = other DNA
ccgcgacgctcgccaggaccccgggtggcgaagttgtcatggctgggcgagaggggcgcacgcgccagcgaactttacgg

SEQ ID NO: 140273 - DNA, 80 bp, synthetic construct
  source 1..80: mol_type = other DNA
ggcaaccgcgacccctcccggcagcatcacggtgccgcatcctaatatcgaggaggtgggcctcaccagtgacggagaaa

SEQ ID NO: 140274 - DNA, 80 bp, synthetic construct
  source 1..80: mol_type = other DNA
tgaacagttttggaacaagcacatgtggaacttcgtgagcgggattcaatacctagccggcttatcaactttgccaggca

SEQ ID NO: 140275 - DNA, 80 bp, synthetic construct
  source 1..80: mol_type = other DNA
tgtgtgttttttccctcttcccagtagcaaaatgagacgagcggtgggagtgccacccgtgatggcatacgcagagggtc

SEQ ID NO: 140276 - DNA, 80 bp, synthetic construct
  source 1..80: mol_type = other DNA
agtgccgctcagagaagagggcgaataggtaggaatccagcacaagaagatgatcaatatgttttctccggagacccact

SEQ ID NO: 140277 - DNA, 80 bp, synthetic construct
  source 1..80: mol_type = other DNA
cgcctacctaaataccccagggcttccggtctgccaagaccatcttgagttttgggaggtggtctttacaggcctgactc

SEQ ID NO: 140278 - DNA, 80 bp, synthetic construct
  source 1..80: mol_type = other DNA
gcgcggagacggcgagggagagtcgctgatgactatgggaggctcctggaccgcgcggggctgtctcgcggtgagcgtcc

SEQ ID NO: 140279 - DNA, 80 bp, synthetic construct
  source 1..80: mol_type = other DNA
ccggtttccgctcgattggggagggaggtgttgctcggcccagctgatgctgcggtcgacaagggatggaggctacttgc

SEQ ID NO: 140280 - DNA, 80 bp, synthetic construct
  source 1..80: mol_type = other DNA
tgacttcaaaacgtggctcaaggctaagctcctgccccgcatgcccggcattccattcttgtcctgccaaaaagggtaca

SEQ ID NO: 140281 - DNA, 80 bp, synthetic construct
  source 1..80: mol_type = other DNA
cttatagtaatggatgaagcacatttcaccgatccttccagtgtcgcggctagaggatacatttcgaccagggtggaaat

SEQ ID NO: 140282 - DNA, 80 bp, synthetic construct
  source 1..80: mol_type = other DNA
tagcctggtgccggcgcaactaaaggggcgtgatttcggtggcgaccacacggccaagctggaattcctggcccccgagt

SEQ ID NO: 140283 - DNA, 80 bp, synthetic construct
  source 1..80: mol_type = other DNA
cctcaaacataccaggtagggtatctgcacgctccgaccggaagcgggaagagcactaaagtcccggcagcttatgcaag

SEQ ID NO: 140284 - DNA, 80 bp, synthetic construct
  source 1..80: mol_type = other DNA
catcgcctgagttcttcactgagatagacggggtgcgcctccacaggtacgcccctccatgtaaacctctgctgcgcgat

SEQ ID NO: 140285 - DNA, 80 bp, synthetic construct
  source 1..80: mol_type = other DNA
tgctgcagatgggatcgggatcgcaagtctctctgactatgatccccacagccttcagcatcagtctcctggtgcgtcgg

SEQ ID NO: 140286 - DNA, 80 bp, synthetic construct
  source 1..80: mol_type = other DNA
cgcgcgccaggtacgccccgacggcgttggcgcgggccgcggccgtgtcctggccctcgaacagcggccacgcggagatg

SEQ ID NO: 140287 - DNA, 80 bp, synthetic construct
  source 1..80: mol_type = other DNA
aggaggccagggtccttgaccccacttccgggtttcacgtgaaccccgtggtggtgttcgactttgccagcctgtacccc

SEQ ID NO: 140288 - DNA, 80 bp, synthetic construct
  source 1..80: mol_type = other DNA
aggaaagacaaaaagataccttccagccatagttagagaagccataaaacgtggcttgagaacattaatcctggctccca

SEQ ID NO: 140289 - DNA, 80 bp, synthetic construct
  source 1..80: mol_type = other DNA
cgcgtacgaccccggccgccgtggtgtacgcgggcccgcggagaggaaatcccccaagatggtcagtgttgtcgcgggag

SEQ ID NO: 140290 - DNA, 80 bp, synthetic construct
  source 1..80: mol_type = other DNA
caagctagcccttgacaacatagtcatgctccacacaacagaaaaaggagggagggcctaccaacacgccctgaacgaac

SEQ ID NO: 140291 - DNA, 80 bp, synthetic construct
  source 1..80: mol_type = other DNA
aggagatgtcgtagtcgtcgctacagatgccctcatgacagggtacactggagacttcgattccgtgattgattgcaacg

SEQ ID NO: 140292 - DNA, 80 bp, synthetic construct
  source 1..80: mol_type = other DNA
tgcccggctcggccaagaggtcctgctgggccctgctgatggatacacctctaaagggtggagacttctcgcccctatca

SEQ ID NO: 140293 - DNA, 80 bp, synthetic construct
  source 1..80: mol_type = other DNA
agggcagcaaatgtcatggcagcctctttgcgcaaagctggaaagagtgtggtggtgctaaacaggaaaacctttgagaa

SEQ ID NO: 140294 - DNA, 80 bp, synthetic construct
  source 1..80: mol_type = other DNA
tggtcttactgtttctgctgctagcagatgcccggatttgcgcctgtctatggatgctgatcttattaggccaagccgaa

SEQ ID NO: 140295 - DNA, 80 bp, synthetic construct
  source 1..80: mol_type = other DNA
cacaggaggaggacgagcgcgaaccctcaattccctcggaatatttgcttcccagaaagaagaaatttccaccagcacta

SEQ ID NO: 140296 - DNA, 80 bp, synthetic construct
  source 1..80: mol_type = other DNA
acgttgaggagccttgcaggttgggtgccgcgcttcaccggtattatacataaccgatttaccgtgtttacggcagtctg

SEQ ID NO: 140297 - DNA, 80 bp, synthetic construct
  source 1..80: mol_type = other DNA
ccatgagcttccttctggctggaggactggttttggccatgacgctcggagtgggagctgatgttggctgtgctgtggat

SEQ ID NO: 140298 - DNA, 80 bp, synthetic construct
  source 1..80: mol_type = other DNA
ggtccaagaggttcacccccgctctgcctatatgggcatctccatcatacaatccccccctcatagaagagtggaagaaa

SEQ ID NO: 140299 - DNA, 80 bp, synthetic construct
  source 1..80: mol_type = other DNA
gtctatgccggcgagctgacgccggttcagacggaacacggggacggcgtacgagaagccatcgccttccttccaaaacg

SEQ ID NO: 140300 - DNA, 80 bp, synthetic construct
  source 1..80: mol_type = other DNA
ttctgccattcaaagaaaaagtgtgacgagctcgcggcggcccttcggggcatgggcttgaacgctgtggcatactacag

SEQ ID NO: 140301 - DNA, 80 bp, synthetic construct
  source 1..80: mol_type = other DNA
gagctctcgtggcttttaaaatcatgagcggcgaggctcctgctatggaagacatggtcaatctgctgcctgcccttctg

SEQ ID NO: 140302 - DNA, 80 bp, synthetic construct
  source 1..80: mol_type = other DNA
tccgcaaagttcaagaagtgaaaggatacacaaaaggaggccctggtcatgaagaacccgtgttggtgcaaagctagcgg

SEQ ID NO: 140303 - DNA, 80 bp, synthetic construct
  source 1..80: mol_type = other DNA
ctctatctcgcctggtgtacacagttaagaaggattatagcgaggaatttgaaaatctttttgccgactgctctggcctg

SEQ ID NO: 140304 - DNA, 80 bp, synthetic construct
  source 1..80: mol_type = other DNA
tagtggaaaaaataaaattgtgagtaatatttattttggaggagaaatttatcaacctggcctaatagttattaagttta

SEQ ID NO: 140305 - DNA, 80 bp, synthetic construct
  source 1..80: mol_type = other DNA
ttcgcacatcaccgcggagaccgctgcccgacgactcaagagagggtccccgccatctctggcgagttcgtctgccagcc

SEQ ID NO: 140306 - DNA, 80 bp, synthetic construct
  source 1..80: mol_type = other DNA
tggttaactccttggtcacagccggacatgggcagattgacaacttttcactaggagtcttgggaatggcactgttcctg

SEQ ID NO: 140307 - DNA, 80 bp, synthetic construct
  source 1..80: mol_type = other DNA
cagcaaacgcgagcaacgggccacggggatgaagcagctgcgccactccctgaagctcctgcagtccctcgcgcctccgg

SEQ ID NO: 140308 - DNA, 80 bp, synthetic construct
  source 1..80: mol_type = other DNA
gtggacgcagaaacccatgttacgggtgccgctgcgggccgcaccgcccacaccttcgccagcatcctctcacccggtgc

SEQ ID NO: 140309 - DNA, 80 bp, synthetic construct
  source 1..80: mol_type = other DNA
gtcagactacacaggtacgcgccgccatgccgccccctcattagggacgagttatctttcagtgtgggactcaatagttt

SEQ ID NO: 140310 - DNA, 80 bp, synthetic construct
  source 1..80: mol_type = other DNA
gtcccactggcaagcgtggacaaccagaaatatcacctgaaaagtggtcatgtcacctgtgatgtgggacttgaaaagct

SEQ ID NO: 140311 - DNA, 80 bp, synthetic construct
  source 1..80: mol_type = other DNA
actcgttgttgcggtaccacaacaaagtgtactgcaccacgtcaaggagtgcctcacaacgggcgaaaaaggtgactttc

SEQ ID NO: 140312 - DNA, 80 bp, synthetic construct
  source 1..80: mol_type = other DNA
gtgctgtactcgccgctgccgggcgaggacctggccgacggcgaggcctcggtggggccgccggagtggtccgccgagcg

SEQ ID NO: 140313 - DNA, 80 bp, synthetic construct
  source 1..80: mol_type = other DNA
cgaacaagttcctgtttccatagctcagacaaacgttttatatcatctccataaggggggatataacgagattgaaaact

SEQ ID NO: 140314 - DNA, 80 bp, synthetic construct
  source 1..80: mol_type = other DNA
catggccggcgctgctgtgggcagcatcgggctaggcaaggtcattgttgacatcctggcaggctacggggcaggcgtgt

SEQ ID NO: 140315 - DNA, 80 bp, synthetic construct
  source 1..80: mol_type = other DNA
ctgtatcacaggcggcaccacaccaaattttttatgcgcatgcgcgacacgcgacaccgcgcacattccgccctcaagcg

SEQ ID NO: 140316 - DNA, 80 bp, synthetic construct
  source 1..80: mol_type = other DNA
tcgcttggcttcgatgtgaccaagatcttgttggctatgctaggtcccctctatctgttgcagcacagcctgttgcgggt

SEQ ID NO: 140317 - DNA, 80 bp, synthetic construct
  source 1..80: mol_type = other DNA
ccccccgtctctgaccctccagccccacgcggtgatggagggtcagccgttcaaggcgacgtgcacggccgccgcctact

SEQ ID NO: 140318 - DNA, 80 bp, synthetic construct
  source 1..80: mol_type = other DNA
tgctgcgcgtgccctacttcgtacgtgcccatgcgctcttgcgcgtgtgcatggctgttcggtggatagcgggaggcaag

SEQ ID NO: 140319 - DNA, 80 bp, synthetic construct
  source 1..80: mol_type = other DNA
tgcgagctcatgctctgctacaggcgtgcctgatggtacggcgcctgacctgtggcaaatacgcgcaggccttattgttg

SEQ ID NO: 140320 - DNA, 80 bp, synthetic construct
  source 1..80: mol_type = other DNA
ttctacaccaattcctacaacaatcatggctaaaaatgaggtgttttgcgtggacccgcgtaagggaggtcgcaagccgg

SEQ ID NO: 140321 - DNA, 80 bp, synthetic construct
  source 1..80: mol_type = other DNA
gcggcctagccgatctcatggggtacatccctgtcctagggaggccgcttggcggcgttgcggctgccctggcgcatggc

SEQ ID NO: 140322 - DNA, 80 bp, synthetic construct
  source 1..80: mol_type = other DNA
gccctgagatgccattggcagttcagggtggcagatggacatcgaaaggcagcattacagttttggacatgcatcccggg

SEQ ID NO: 140323 - DNA, 80 bp, synthetic construct
  source 1..80: mol_type = other DNA
ggtttgctagccttttctcagtgggcgcccaacaggaactgcagctggtcaacagcaatggctcgtggcacatcaacagt

SEQ ID NO: 140324 - DNA, 80 bp, synthetic construct
  source 1..80: mol_type = other DNA
ttccctgacatgccctactgactgcttcaggaaacacccagaggcaacttacagcaaatgtggttctggcccttggctta

SEQ ID NO: 140325 - DNA, 80 bp, synthetic construct
  source 1..80: mol_type = other DNA
tcaaaatctgtgcgcttctttgagagggggttaggcagagcgaaagtgacgtcattgaagagaatcttgcctgctcgtgg

SEQ ID NO: 140326 - DNA, 80 bp, synthetic construct
  source 1..80: mol_type = other DNA
gggatgagatcatccagtgcgtcctcagtaagcagctcctggtcacgttcattacctgaccatacccgagaggtcttctc

SEQ ID NO: 140327 - DNA, 80 bp, synthetic construct
  source 1..80: mol_type = other DNA
tttttgtgtctgttcccgtcccccgtcacccccctccctccgtccccccgtcgcgggtgtttgtgtttgtttattccgac

SEQ ID NO: 140328 - DNA, 80 bp, synthetic construct
  source 1..80: mol_type = other DNA
cagaagaagagggaagagaaggtcaaccactgggcttctcacatcaatcttgctggcctgcctggcgacactggtgatct

SEQ ID NO: 140329 - DNA, 80 bp, synthetic construct
  source 1..80: mol_type = other DNA
tacctggggtcaacctgggtacccttggcctctgtatgggaacgagggctgcggttgggcagtgtggctcctgtcccctc

SEQ ID NO: 140330 - DNA, 80 bp, synthetic construct
  source 1..80: mol_type = other DNA
aaccttaaagcttacccaaaaactcaaagtagaactgcaaaaagcaacattgttagtcaggtttatcttaatggagaaaa

SEQ ID NO: 140331 - DNA, 80 bp, synthetic construct
  source 1..80: mol_type = other DNA
cttggaccctactttcaccataaccacacagactgtcccccaagactccgtgtcccgcagccaacgccggggcaggacgg

SEQ ID NO: 140332 - DNA, 80 bp, synthetic construct
  source 1..80: mol_type = other DNA
aatgctggttggcgcgaatattgtggtggtcgcagtacttcatagccagggctgaggccctgctgcatgtgtacgtccca

SEQ ID NO: 140333 - DNA, 80 bp, synthetic construct
  source 1..80: mol_type = other DNA
tacctcctcctcctgctactgtaaagccacaaccagaaccagaatatgtgtttatttatattggagacaacaaaactcta

SEQ ID NO: 140334 - DNA, 80 bp, synthetic construct
  source 1..80: mol_type = other DNA
tgggattccacacaaagcagagaaatcatgatggaatccttcaacattatgtgcaaattaacagccaacccctctctggc

SEQ ID NO: 140335 - DNA, 80 bp, synthetic construct
  source 1..80: mol_type = other DNA
cagagatgggtgccaatttcaaggctgaccgggtcatagattccaggagatgcctaaagccagtcatactcgatggcgag

SEQ ID NO: 140336 - DNA, 80 bp, synthetic construct
  source 1..80: mol_type = other DNA
ctccggttcctggctcaacgagatttgggactggatctgcacggtactgagtgactttaagacctggctacgtgctaaac

SEQ ID NO: 140337 - DNA, 80 bp, synthetic construct
  source 1..80: mol_type = other DNA
cgaggcggcttgcaattggacccggtgggagcgctgtgagctagacgatcgggatagggtggagatgtcacctttgctcc

SEQ ID NO: 140338 - DNA, 80 bp, synthetic construct
  source 1..80: mol_type = other DNA
gcgccgctctacgccagaagaaggtcaccttcgacaggctgcaggtgctcgatgaccattacaaaagtgtacttaaggag

SEQ ID NO: 140339 - DNA, 80 bp, synthetic construct
  source 1..80: mol_type = other DNA
cggacaagggatcttcatccacaatgatgttgaagcgtgggtcgaccggtacaaattcatgcctggaacaccaaaacagc

SEQ ID NO: 140340 - DNA, 80 bp, synthetic construct
  source 1..80: mol_type = other DNA
aatatatcgccacgtgcatgcaagccgacctcgaggtcatgacaagcacatgggtcctggctggggtggtgctagccgcc

SEQ ID NO: 140341 - DNA, 80 bp, synthetic construct
  source 1..80: mol_type = other DNA
gcggttcgcggtagaggggccatcgtagggttgctggggcgcccggcgcaaggtcctccagcataagacgatggtaatgg

SEQ ID NO: 140342 - DNA, 80 bp, synthetic construct
  source 1..80: mol_type = other DNA
accccccggcgctggacgcacgcggaaggaggccagggtgtgccggcacgacggaggccagaagctcccccaccgcatcc

SEQ ID NO: 140343 - DNA, 80 bp, synthetic construct
  source 1..80: mol_type = other DNA
ccctaccaaggagaacatggttgggttttctttggcttttgtgatcatggcctgcttgatgtcaggtctgctggtagggg

SEQ ID NO: 140344 - DNA, 80 bp, synthetic construct
  source 1..80: mol_type = other DNA
ctgtttcatgtcaggggagctaggagaagtggggatgtcttgtgggatattcccactcctaagatcatcgaggaatgtga

SEQ ID NO: 140345 - DNA, 80 bp, synthetic construct
  source 1..80: mol_type = other DNA
gaggaaaagttgccaatcaaccctttgagtaactcgctgttgcgataccataacaaggtgtactgtacaacatcaaagag

SEQ ID NO: 140346 - DNA, 80 bp, synthetic construct
  source 1..80: mol_type = other DNA
ttgccggtgataagatacaccgcgaacggaaactccctgaggggcaggcctgcggtggactctaaggccgccacgtcccg

SEQ ID NO: 140347 - DNA, 80 bp, synthetic construct
  source 1..80: mol_type = other DNA
gctgccacttgctctcgcgcagcttgctgagaagtcgtttccaacatcttcatcgtcatccacaggcccagactcgggtt

SEQ ID NO: 140348 - DNA, 80 bp, synthetic construct
  source 1..80: mol_type = other DNA
caacgttaacctatgcaactgtgggaccttcgccgttggataccgccgccgccgctgcagcttctgcggcggcttgtacg

SEQ ID NO: 140349 - DNA, 80 bp, synthetic construct
  source 1..80: mol_type = other DNA
aaaacacaatttttttattatctagtttggtagcaaacgacccgtaaagggcgttggaaagcagcttggcaatggaacgc

SEQ ID NO: 140350 - DNA, 80 bp, synthetic construct
  source 1..80: mol_type = other DNA
agtttctccttctaaaggtacagaggaaattgtgtacttttcaaactttacaaaccacttagttttaaattgttcctgtt

SEQ ID NO: 140351 - DNA, 80 bp, synthetic construct
  source 1..80: mol_type = other DNA
tgtttcgcgccaaccagtaccctgacctgcggcgggtggagctgacggtcacgggccaggccccgtttcgcacgctggtg

SEQ ID NO: 140352 - DNA, 80 bp, synthetic construct
  source 1..80: mol_type = other DNA
gtgtgtaaacaaggagttgttgatagaggatggggcaatggatgcggcctctttggaaaaggaagcatagacacctgtgc

SEQ ID NO: 140353 - DNA, 80 bp, synthetic construct
  source 1..80: mol_type = other DNA
aaggtgagcacagaaccttggcaagggcaattatagagctcacctataggcacaaagtagtgaaagtcatgaggcccgct

SEQ ID NO: 140354 - DNA, 80 bp, synthetic construct
  source 1..80: mol_type = other DNA
cacctctacactgacctgccccactgactgtttccgcaaacatccggaagcgacgtacagtaagtgtggttcagggcctt

SEQ ID NO: 140355 - DNA, 80 bp, synthetic construct
  source 1..80: mol_type = other DNA
gtgagctggacaccgaatgtgcacgagctctcgcaagattgtaactgctctctctactcgggccacatcacaggacatcg

SEQ ID NO: 140356 - DNA, 80 bp, synthetic construct
  source 1..80: mol_type = other DNA
agaagacctccttgcccccagtagtctagacgtgggcgatttcattgtgtcagtgcaggagggtctcccctcaggtgtcc

SEQ ID NO: 140357 - DNA, 80 bp, synthetic construct
  source 1..80: mol_type = other DNA
ccaccagcgccagcccgagcccgtcgagcccacccgcccgcacgtgagagccccccctcccgcgccctccgcgcgcggcc

SEQ ID NO: 140358 - DNA, 80 bp, synthetic construct
  source 1..80: mol_type = other DNA
gggtacatacccgtcgttggcgccccagttggcggcgttgctagagccctcgcccatggtgtgagggtcctggaggacgg

SEQ ID NO: 140359 - DNA, 80 bp, synthetic construct
  source 1..80: mol_type = other DNA
ctctgcggagaagccctattgttggcactatgctcccaggccatgcaaagtggagctagctagggatatctgtggacctg

SEQ ID NO: 140360 - DNA, 80 bp, synthetic construct
  source 1..80: mol_type = other DNA
gtgggggaccgagccaccatctccagcttattgacgccgaacactcggttgttgctgttgttgatagcgccatttaccaa

SEQ ID NO: 140361 - DNA, 80 bp, synthetic construct
  source 1..80: mol_type = other DNA
cctcatcgcccaggagcaactccacaaggctctggaatgcgagatctacggagcttgctactccatcgagccgctagacc

SEQ ID NO: 140362 - DNA, 80 bp, synthetic construct
  source 1..80: mol_type = other DNA
tctccgtccgaacgacaggaaccccgggagcccgaggtcgccccccctggcggcgaccacgtgttttgcaggaaagtcag

SEQ ID NO: 140363 - DNA, 80 bp, synthetic construct
  source 1..80: mol_type = other DNA
actatgcaactgggaacctgcctggttgctctttctctatcttcttgcttgctcttctgtcctgcgtcactgtgcctgtg

SEQ ID NO: 140364 - DNA, 80 bp, synthetic construct
  source 1..80: mol_type = other DNA
cgtgaaggcggggtggtacacgagcacgagccacgaggcgcgactgctgaggcgactggaccacccggcgatcctgcccc

SEQ ID NO: 140365 - DNA, 80 bp, synthetic construct
  source 1..80: mol_type = other DNA
cttagagaaattggggcaaaagatggaggaatgatgtacgcagatgacacagccggatgggacacacgtgtcacagaaga

SEQ ID NO: 140366 - DNA, 80 bp, synthetic construct
  source 1..80: mol_type = other DNA
ctttgagccagatgaacattcggggattagttctgcacgggcccatgtatcagcagccaacttagtaacagcatatgaac

SEQ ID NO: 140367 - DNA, 80 bp, synthetic construct
  source 1..80: mol_type = other DNA
ggctgacccttaattgctggagcttttttaaggtcttcgtaggcaaggtcctcaagagcggttagtccgtgttcctgttg

SEQ ID NO: 140368 - DNA, 80 bp, synthetic construct
  source 1..80: mol_type = other DNA
aagaagatccatccaaagatattttgaagtatgaatgggcagaatttgttttgcctgagggtaactattctgaaaccatg

SEQ ID NO: 140369 - DNA, 80 bp, synthetic construct
  source 1..80: mol_type = other DNA
gcgcccccgacttggacacagggtcgtgggccacgtgttccgacgagagcgactctgtcatatgctgctccatgtcatac

SEQ ID NO: 140370 - DNA, 80 bp, synthetic construct
  source 1..80: mol_type = other DNA
cttctctcgtgcctcactgttcccgcttcagccatacactatcgcaacgagtcgggcatctatcacatcacaaatgattg

SEQ ID NO: 140371 - DNA, 80 bp, synthetic construct
  source 1..80: mol_type = other DNA
ggaagcatagtggcctgtgccaagtctgaatgcgaggaagcaaaaaaggctgtaggtcatgtttatgactcaacaaaaat

SEQ ID NO: 140372 - DNA, 80 bp, synthetic construct
  source 1..80: mol_type = other DNA
ccctccgtggacctagccgaaaatcttatgcaatacaggaatgaaattctgggtttggattggaaaagcgtagccatgca

SEQ ID NO: 140373 - DNA, 80 bp, synthetic construct
  source 1..80: mol_type = other DNA
ccaaactaggacatggccttgtgtttgactcttccaatgctatcaccatagaaaacaacaccttgtggacaggtgcaaaa

SEQ ID NO: 140374 - DNA, 80 bp, synthetic construct
  source 1..80: mol_type = other DNA
ctgaagctaacttaactcagcagtccatgccaaacagaccaaactacattggcttcagagacaactttgtggggctcatg

SEQ ID NO: 140375 - DNA, 80 bp, synthetic construct
  source 1..80: mol_type = other DNA
tggggtccacctattccgtggggtacttgcatgcgcctaccgggtcgcggaagagtacaaaggtcccggccgcatacgcg

SEQ ID NO: 140376 - DNA, 80 bp, synthetic construct
  source 1..80: mol_type = other DNA
cagataggcgtgggtttgttgatattgatcaccctcttcacactcaccccggggtataagaccctcctcggccagtgtct

SEQ ID NO: 140377 - DNA, 80 bp, synthetic construct
  source 1..80: mol_type = other DNA
aggaagatgataggtcctgagaggttcaaagactatctctcttgcatggaccgccatgacctacactgggagctcaagct

SEQ ID NO: 140378 - DNA, 80 bp, synthetic construct
  source 1..80: mol_type = other DNA
atttacagtacaagtatggttttgagcaattaaaaactcactggttagagccttgggaagatattgagagtgctattaaa

SEQ ID NO: 140379 - DNA, 80 bp, synthetic construct
  source 1..80: mol_type = other DNA
ccttggctcaatcccaggtgcctggtggactacccctacaggctgtggcattatccctgcaccgtcaacttcaccgtgac

SEQ ID NO: 140380 - DNA, 80 bp, synthetic construct
  source 1..80: mol_type = other DNA
acaataacacccaattctgcataaaggttctcaacccatatatgccctcagtcatagaaaaaatggaagcactgcaaagg

SEQ ID NO: 140381 - DNA, 80 bp, synthetic construct
  source 1..80: mol_type = other DNA
gggctaaaaaggtgacttttgacaggatgcaagtgctcgacacccattatgactcagttttaaaggacatcaagctagcg

SEQ ID NO: 140382 - DNA, 80 bp, synthetic construct
  source 1..80: mol_type = other DNA
gaagggctttattctgccggacacccagaggcgatttaggggcgccggtggtgaggcgcccaagcgtccggccgcagccc

SEQ ID NO: 140383 - DNA, 80 bp, synthetic construct
  source 1..80: mol_type = other DNA
gcgagggacgcgaccagcgcgcgcttggcgtcgtgatacatgccgcagtactggctcaccgcgtcgcccatggcctcggg

SEQ ID NO: 140384 - DNA, 80 bp, synthetic construct
  source 1..80: mol_type = other DNA
ggggcccttgtggcctacaagattatgtctggcgaaaagcccaccatggaggatgtggtcaacatgctgcccgccatcct

SEQ ID NO: 140385 - DNA, 80 bp, synthetic construct
  source 1..80: mol_type = other DNA
cacatcgataccgttgtcatgtcagctacactctgctccgcgctgtatgtgggggatgtctgcggagctgtgatgctggc

SEQ ID NO: 140386 - DNA, 80 bp, synthetic construct
  source 1..80: mol_type = other DNA
ggggtggggccagataacccacaaaaacgtctcgggcccctctgacgaccgtccctactgttggcattacgctcctaggc

SEQ ID NO: 140387 - DNA, 80 bp, synthetic construct
  source 1..80: mol_type = other DNA
cggaagggtgatcgaggaatggtgctgcagggagtgcacaatgcccccactgtcgttccgggctaaagatggctgttggt

SEQ ID NO: 140388 - DNA, 80 bp, synthetic construct
  source 1..80: mol_type = other DNA
ggtccagcacggcctccacgtcggcggcccagcgctcgtggctactgcgggcgcgctgggccgccatcttctctctgagg

SEQ ID NO: 140389 - DNA, 80 bp, synthetic construct
  source 1..80: mol_type = other DNA
taaacaagtcaatattacatattctgttgtgttttcttttttgcgtgtagtccttacccatatgacctgtaatatagtgt

SEQ ID NO: 140390 - DNA, 80 bp, synthetic construct
  source 1..80: mol_type = other DNA
gcgcaggggctcattggtccagcaaaggcgcccacctttgcgcgaacagagtgggggcaaaacatctagtaggttttcag

SEQ ID NO: 140391 - DNA, 80 bp, synthetic construct
  source 1..80: mol_type = other DNA
atcttactcacgtgcttgttgcacccctccttgggctttgacatcaccaagatactactggctgtgctaggtccagtcta

SEQ ID NO: 140392 - DNA, 80 bp, synthetic construct
  source 1..80: mol_type = other DNA
agcttggcagataaagcctttagccagccagttgccagctccgattccggagcggctctttccaccccaactgagacttc

SEQ ID NO: 140393 - DNA, 80 bp, synthetic construct
  source 1..80: mol_type = other DNA
gccgtcttcctcgtgggacaagccttcacgctacgccctcgccgccatcacacggtccagacctgtaactgctcgctgta

SEQ ID NO: 140394 - DNA, 80 bp, synthetic construct
  source 1..80: mol_type = other DNA
cattgcctggcaacccggctgtggcctccctaatgtccttctctgcagctctgacaagccctttaagcacatccacaacc

SEQ ID NO: 140395 - DNA, 80 bp, synthetic construct
  source 1..80: mol_type = other DNA
acgaaaagacccacctcctccgtctcggcggcctgggccggcagcgacgcctcgggatcccggcaccgcagctcccgtag

SEQ ID NO: 140396 - DNA, 80 bp, synthetic construct
  source 1..80: mol_type = other DNA
ttgacatggctaggattaaactcaaggagcacgtccctttcgatgacgtgcattgcagttggcctagtaacgctatactt

SEQ ID NO: 140397 - DNA, 80 bp, synthetic construct
  source 1..80: mol_type = other DNA
gagcgcctgctcggcgcgcttgcggaagtcccgggggttgtagccgtgcgtgcccgccagcgcctgcaggcggcgcagct

SEQ ID NO: 140398 - DNA, 80 bp, synthetic construct
  source 1..80: mol_type = other DNA
cagtgtacacgattctttcagcacgggtggccttaaataggggaatattattattggaacgggaactagatttagtgtct

SEQ ID NO: 140399 - DNA, 80 bp, synthetic construct
  source 1..80: mol_type = other DNA
ataccttccagctatagtcagagaggccataaaacgaggcttgagaacactaatcctggcccctactagagtcgtggcag

SEQ ID NO: 140400 - DNA, 80 bp, synthetic construct
  source 1..80: mol_type = other DNA
ccaacaaactcgcggtctgttagggacgattgtcactagcctcactgggcgcgacaaaaacgaggttgagggtgaggtac

SEQ ID NO: 140401 - DNA, 80 bp, synthetic construct
  source 1..80: mol_type = other DNA
ccgatggccgtcccgcaatttcaccgccccagcaccgttaccaccgatagcgtccgggcgcttggcatgcgcgggctcgt

SEQ ID NO: 140402 - DNA, 80 bp, synthetic construct
  source 1..80: mol_type = other DNA
aagcgggggggacatatttcacagcgtgtccaaggcccgaccccgcatgttactcctgtgcctactcctgctttcagtgg

SEQ ID NO: 140403 - DNA, 80 bp, synthetic construct
  source 1..80: mol_type = other DNA
gtcaggccggaaagtttccgccaccggaagttgagtagacggtgctgcctgcgactcaaccccaggaggactgggtgaac

SEQ ID NO: 140404 - DNA, 80 bp, synthetic construct
  source 1..80: mol_type = other DNA
aacgccgcggtagaacggggagaggtaagcccggtgtctataggtttgtcgcgcaaggtgaaagaccatctgggatgttt

SEQ ID NO: 140405 - DNA, 80 bp, synthetic construct
  source 1..80: mol_type = other DNA
tttcagaaccatgaaggctttcacagcttgcgttctgattagcatagtcacattagtatcagctgattacaaacaagttc

SEQ ID NO: 140406 - DNA, 80 bp, synthetic construct
  source 1..80: mol_type = other DNA
aggatggcccgcccccccgggtgctaagtcgtacacggcctgcacttgcggagcaagtgacacatatctagtcacaagaa

SEQ ID NO: 140407 - DNA, 80 bp, synthetic construct
  source 1..80: mol_type = other DNA
tgatgacgccatacttcgtgagggctcacgccctcgtgaagttatgtgcgttcttcagaactgtagccgggggccggtat

SEQ ID NO: 140408 - DNA, 80 bp, synthetic construct
  source 1..80: mol_type = other DNA
ggaaaaactccgccgccgctgccgccaaggatccaccggccaccgaggagctgagaaagcgcatctttcccactctgtat

SEQ ID NO: 140409 - DNA, 80 bp, synthetic construct
  source 1..80: mol_type = other DNA
ccggcgtggtttgctgttcaatgtcttattcttggaccggtgccctaataacacctatggggcccgaagaggagaggtta

SEQ ID NO: 140410 - DNA, 80 bp, synthetic construct
  source 1..80: mol_type = other DNA
tgtggatctcatggtgggcgctgctgcattttgctccgctatgtatgtgggcgacctctgtggaggcatctttttggtcg

SEQ ID NO: 140411 - DNA, 80 bp, synthetic construct
  source 1..80: mol_type = other DNA
cgtactgaacccctcagtcgctgccaccctgggcttcggagcttatatgtccaaggcccatggggtcgatcctaacatca

SEQ ID NO: 140412 - DNA, 80 bp, synthetic construct
  source 1..80: mol_type = other DNA
cccgcggctcccggccacactggggccccaacgacccccggcgtcgatcccggaatttgggtaaggtcatcgatacccta

SEQ ID NO: 140413 - DNA, 80 bp, synthetic construct
  source 1..80: mol_type = other DNA
gcctccaaggtcagcgcaaggctcctcaccttggaggaggcatgccagttgactccgccccattctgcgagatccaagta

SEQ ID NO: 140414 - DNA, 80 bp, synthetic construct
  source 1..80: mol_type = other DNA
cacccgagggggatgataaaccgggcgcggtcggtaaagttgttccattttttgaagcgaaggttgtggatctggatacc

SEQ ID NO: 140415 - DNA, 80 bp, synthetic construct
  source 1..80: mol_type = other DNA
aaccactacgggctgaggaggatgagggtgagatctcggtgccggctgactgcttcaaaaaaccgccgcactatccacca

SEQ ID NO: 140416 - DNA, 80 bp, synthetic construct
  source 1..80: mol_type = other DNA
gccaacaaatcggtgtgttggacgcccgtaacaccaacagtggctgtcaaataccccggagcaactaccgcatcgatccg

SEQ ID NO: 140417 - DNA, 80 bp, synthetic construct
  source 1..80: mol_type = other DNA
ggtgtgtgggccggcactggcatcatgaccacgcgctgcccttgcggcgccaacatctctggcaatgtccgcctgggctc

SEQ ID NO: 140418 - DNA, 80 bp, synthetic construct
  source 1..80: mol_type = other DNA
ggggacagcgacaggagcgggttcgcacgatcggtcgggtgaatttgggcaagtccatcagaggctcggccagcctgcga

SEQ ID NO: 140419 - DNA, 80 bp, synthetic construct
  source 1..80: mol_type = other DNA
agctaagctcatgccacaactgcctggggttccctttgtgtcctgccagcgcgggtataagggagtctggcgagaggacg

SEQ ID NO: 140420 - DNA, 80 bp, synthetic construct
  source 1..80: mol_type = other DNA
caagggagatgtcttgcttaaacatttacagcgacaaagcattatcgttcgcgacgccgtagctgaccgctctttattgc

SEQ ID NO: 140421 - DNA, 80 bp, synthetic construct
  source 1..80: mol_type = other DNA
tttcagaagagtccacggcccccgctccttggggccgataagcgatatgacgtacttaatgtagcggtgttccaccagct

SEQ ID NO: 140422 - DNA, 80 bp, synthetic construct
  source 1..80: mol_type = other DNA
gaagagggcaatgttgagcctgatcgacggcaagggaccaatacgatttgtgttggctctcttggcgttcttcaggttca

SEQ ID NO: 140423 - DNA, 80 bp, synthetic construct
  source 1..80: mol_type = other DNA
tacactttcggcgagaatgagacagacgtgctgctgttggagtcccaacgacccccctctggtggttggttcggctgtgc

SEQ ID NO: 140424 - DNA, 80 bp, synthetic construct
  source 1..80: mol_type = other DNA
gctcggcgtccctacgtacagctggggggcaaacgagacagatgtcttcatccttaactcgaccaggcctccacgaggcg

SEQ ID NO: 140425 - DNA, 80 bp, synthetic construct
  source 1..80: mol_type = other DNA
gggcccctgcgtcccccttcccgcgcctaactatacgtttgcgctatggagggtgtctgcagaggactacgtggaaataa

SEQ ID NO: 140426 - DNA, 80 bp, synthetic construct
  source 1..80: mol_type = other DNA
tgctccggttcgtggctaagggatgtttgggactggatatgtacggtgttgactgacttcaagacttggctccagtccaa

SEQ ID NO: 140427 - DNA, 80 bp, synthetic construct
  source 1..80: mol_type = other DNA
gttaacctaatgtctcgcccgcgcttggaaactgtatattggcaggaattacaggatgaatttaagcagggacacatgca

SEQ ID NO: 140428 - DNA, 80 bp, synthetic construct
  source 1..80: mol_type = other DNA
tggtggcattgaacatcgagtggaagtggcctgcaattggaccagaggggagccgtgcggattggagcacagagatcgtg

SEQ ID NO: 140429 - DNA, 80 bp, synthetic construct
  source 1..80: mol_type = other DNA
gcccaccaccaatggatgacaacagaagacatgttatcagtgtggaatagggtttggatagaggaaaacccatggatgga

SEQ ID NO: 140430 - DNA, 80 bp, synthetic construct
  source 1..80: mol_type = other DNA
gatgataccatttcagcccataatcaaattggaaagggcaacatctttgccatggagatcaacctccaggccaacctgtg

SEQ ID NO: 140431 - DNA, 80 bp, synthetic construct
  source 1..80: mol_type = other DNA
actcctctggttgtcctgagcgcttatcatcttgcaagccgctcactgcttttgaccaggggtggggccctataacatac

SEQ ID NO: 140432 - DNA, 80 bp, synthetic construct
  source 1..80: mol_type = other DNA
cacagaaaaagtttctatgcgatcgtgttatgtggcgcattccattttctagtaacttcatgtctatgggggcgctaacg

SEQ ID NO: 140433 - DNA, 80 bp, synthetic construct
  source 1..80: mol_type = other DNA
cttttgtactacttctacgcctggatagctgaacccgtggtacagcacctcttcgtcctcctcgctgtccggaaccactt

SEQ ID NO: 140434 - DNA, 80 bp, synthetic construct
  source 1..80: mol_type = other DNA
tgaggaagagaagctacctataagccctctgagcaatacgctcattaggcatcacaatctggtatactccaccacatctc

SEQ ID NO: 140435 - DNA, 80 bp, synthetic construct
  source 1..80: mol_type = other DNA
tctggtcatgaaaaacccaaaaaagaaatccggaggattccggattgtcaatatgctaaaacgcggagtagcccgtgtga

SEQ ID NO: 140436 - DNA, 80 bp, synthetic construct
  source 1..80: mol_type = other DNA
ggccgtgaactaccgcaatgcttcgggcgtctaccatgtcaccaatgactgccctaattcaagcatagtctatgaggccg

SEQ ID NO: 140437 - DNA, 80 bp, synthetic construct
  source 1..80: mol_type = other DNA
caaagctggcacagaggagggtgtttcatggtgttgctaagaatccggtggttgatgggaatccaacagtcgacattgag

SEQ ID NO: 140438 - DNA, 80 bp, synthetic construct
  source 1..80: mol_type = other DNA
cgggcatcttctcagtagggccgaagcagaaaatccaactcgtaaacaccaacggcagctggcacatcaataggaccgct

SEQ ID NO: 140439 - DNA, 80 bp, synthetic construct
  source 1..80: mol_type = other DNA
ttctttctggccttgtgttccgtgcgctccatggccgacaccaaagccatatatcggatcatttgtcgggcctcggccaa

SEQ ID NO: 140440 - DNA, 80 bp, synthetic construct
  source 1..80: mol_type = other DNA
tgctggcctcgttgctactcttgtgggcaggtggcgtcggctatgggaatatggccggagtggctctcatcttctacacg

SEQ ID NO: 140441 - DNA, 80 bp, synthetic construct
  source 1..80: mol_type = other DNA
acttgggctcagcccgggtacccttggcccctttacgggaatgagggctgcgggtgtgcaggatggctcctgtcaccccg

SEQ ID NO: 140442 - DNA, 80 bp, synthetic construct
  source 1..80: mol_type = other DNA
gtaaaaagctggttccatcctgggcctcagtcaaggaagacctcgttgcttatggcggctcatggaagttggatggtaga

SEQ ID NO: 140443 - DNA, 80 bp, synthetic construct
  source 1..80: mol_type = other DNA
cacacggcgcacccggtgggctcccagctcttgcgtttcacccccgcgtatgcttccatgtaagccatgaggaatctgcc

SEQ ID NO: 140444 - DNA, 80 bp, synthetic construct
  source 1..80: mol_type = other DNA
caccgttggcgctggcgggggggacatttatcacagcatgtcccgtgcccgaccccgcaacttactcctgtgcctactcc

SEQ ID NO: 140445 - DNA, 80 bp, synthetic construct
  source 1..80: mol_type = other DNA
atcttacacatttccatgcttgttttcattgtctcatacaacattaactccgctatttgtacatttaaccgtctagctgg

SEQ ID NO: 140446 - DNA, 80 bp, synthetic construct
  source 1..80: mol_type = other DNA
ttgctgagcagttcaaacaaaaagttcttggcctattgcagacaaccgcaaagcaggccgaggaccttaaaccagctgtt

SEQ ID NO: 140447 - DNA, 80 bp, synthetic construct
  source 1..80: mol_type = other DNA
cggcctccgcgggccgcatcgagcgccgccgggcccgcgcggcggtggccggccgcgacgccacgggccgcttcacggcc

SEQ ID NO: 140448 - DNA, 80 bp, synthetic construct
  source 1..80: mol_type = other DNA
ttgaccccactttctctatagagaccacaactgtcccacaagacgctgttagcaggagtcagcgacgcggtcgaacggtg

SEQ ID NO: 140449 - DNA, 80 bp, synthetic construct
  source 1..80: mol_type = other DNA
cctgttgggagattggtcaccgtaaatcccttcgtttcggaaagcactgccaattcaaaggttctcattgaactagaacc

SEQ ID NO: 140450 - DNA, 80 bp, synthetic construct
  source 1..80: mol_type = other DNA
gaccggagttaggactataacaacgggtggggcgatcacctactccacctatggtaagttcctagcagatggcggctgca

SEQ ID NO: 140451 - DNA, 80 bp, synthetic construct
  source 1..80: mol_type = other DNA
gcgacgagcgggaggccctcgggtgtggcgtggagacggaggagagcggggacgaccccgaccacgacccggaccacacc

SEQ ID NO: 140452 - DNA, 80 bp, synthetic construct
  source 1..80: mol_type = other DNA
gtggagtttctggggctgctcgccagcgccggcgaccggcggctcatcgtggtcaacaccgtgcgcgcctgcgactggcc

SEQ ID NO: 140453 - DNA, 80 bp, synthetic construct
  source 1..80: mol_type = other DNA
gcggggggggaggacgagctggcctttccggtggccgggcacccggaggacctggtcatccagatatcctgtctgctcta

SEQ ID NO: 140454 - DNA, 80 bp, synthetic construct
  source 1..80: mol_type = other DNA
ccatcctggcccctctatacatcctgcagtacagtttgctcaaggtgccttactttgtgcgcgcccacgtactcctgcgt

SEQ ID NO: 140455 - DNA, 80 bp, synthetic construct
  source 1..80: mol_type = other DNA
gagatctcaagcatgttgaacataatgaacaggaggaaaagatccgtgaccatgctcctcatgctgctgcccacagccct

SEQ ID NO: 140456 - DNA, 80 bp, synthetic construct
  source 1..80: mol_type = other DNA
gtgggccagtgatgtgctcctcgggacatgccgtcggcgtgttccgagctgccgtgtgcactcgaggcgtcgctaaggcg

SEQ ID NO: 140457 - DNA, 80 bp, synthetic construct
  source 1..80: mol_type = other DNA
ccaatggcagctggcatctcaacaggacggccttgaactgttttgacagtctccaaacaggcttcctcgcggccctgttc

SEQ ID NO: 140458 - DNA, 80 bp, synthetic construct
  source 1..80: mol_type = other DNA
ggcgtgaactacgcaacagggaatcttcccggttgctctttctctatcttcctcctggcccttctctcttgtctgactgt

SEQ ID NO: 140459 - DNA, 80 bp, synthetic construct
  source 1..80: mol_type = other DNA
caatgccactactaccggccccagcacaccacgaccagcccccaactatcagcgcgctctttggcgggtatctgccgagg

SEQ ID NO: 140460 - DNA, 80 bp, synthetic construct
  source 1..80: mol_type = other DNA
ccatatcagtccttacactcaacccggcttataagatcctcctctgccgcagtttatggtggttatcctatctattggtc

SEQ ID NO: 140461 - DNA, 80 bp, synthetic construct
  source 1..80: mol_type = other DNA
ggggatccaccacagggcccgaggtgatggtcacgggctcggatacccgcctcttggccttggaaaccacatgatcgtct

SEQ ID NO: 140462 - DNA, 80 bp, synthetic construct
  source 1..80: mol_type = other DNA
cgactgctgaggcgactggaccacccggcgatcctgcccctcctggacctgcatgtcgtctccggggtcacgtgtctggt

SEQ ID NO: 140463 - DNA, 80 bp, synthetic construct
  source 1..80: mol_type = other DNA
ctgagtgacttcaagacgtgcttaaaagcaaagttcgtgcccttaatgccaggcatccccctcctctcatggccaagagg

SEQ ID NO: 140464 - DNA, 80 bp, synthetic construct
  source 1..80: mol_type = other DNA
cgctggtggatagccggggcagcgctacccgtaaacgccagtggcacgacaggcagcgtggcctggtgtgggccgatgat

SEQ ID NO: 140465 - DNA, 80 bp, synthetic construct
  source 1..80: mol_type = other DNA
acacaagtgttgtgttgcatggtgtgtactttcttaactttaataacacgtgtgtagagtgttggaataaggtttctgcc

SEQ ID NO: 140466 - DNA, 80 bp, synthetic construct
  source 1..80: mol_type = other DNA
cccggagcattagttgtgggggtggtttgtgctgccgttctacggaggcatgtgggccccagtgaggtggctgtccagtg

SEQ ID NO: 140467 - DNA, 80 bp, synthetic construct
  source 1..80: mol_type = other DNA
tccagtatggtagcgcgggtctctgtctcaaaaggaggtaggcgatccctactgtacggagtgcgccgagacaaccgaga

SEQ ID NO: 140468 - DNA, 80 bp, synthetic construct
  source 1..80: mol_type = other DNA
aatggcctgggacatgatgcagaattggtccccgacagtgactctgctcacgtcatacattctcagagtgcctggcgtgg

SEQ ID NO: 140469 - DNA, 80 bp, synthetic construct
  source 1..80: mol_type = other DNA
gcggcacctgggcgcacccgaacacggggacgggctgggccggccccaggcggtttcccgccacgaccgcgttccgcagg

SEQ ID NO: 140470 - DNA, 80 bp, synthetic construct
  source 1..80: mol_type = other DNA
gagacccaccccaaccagagtacgacctggagcacatcacatcgtgctcctccaatgtttcagtcgcccacgatggagca

SEQ ID NO: 140471 - DNA, 80 bp, synthetic construct
  source 1..80: mol_type = other DNA
ccaccacccaaccccaactccagaccaccggtcgtacctcgcatgaagcccccaacatgacccagaccggcaccaccgac

SEQ ID NO: 140472 - DNA, 80 bp, synthetic construct
  source 1..80: mol_type = other DNA
attggtcatcaccgtgtgctgattcctggctatggcaagtgtgggaatgggtctgcacggttctctctgactttaaaact

SEQ ID NO: 140473 - DNA, 80 bp, synthetic construct
  source 1..80: mol_type = other DNA
cgggaacatcacccgcgtggagtcagagaacaaggtaataatcctagactcttttgaaccacttcgggcggaggaggatg

SEQ ID NO: 140474 - DNA, 80 bp, synthetic construct
  source 1..80: mol_type = other DNA
atggaaatgacatacaagaacaaagtggtgaaagtgttgagaccagccccaggagggaaagcctacatggatgtcataag

SEQ ID NO: 140475 - DNA, 80 bp, synthetic construct
  source 1..80: mol_type = other DNA
ggggttgtagccgtgcgtgcccgccagcgcctgcaggcgacggagctcgaccacgtcaaactcggcaccgctttccacgc

SEQ ID NO: 140476 - DNA, 80 bp, synthetic construct
  source 1..80: mol_type = other DNA
aaaggccaagggcagccgcgccatctggtatatgtggctaggggctagatttctagaattcgaagcccttggattcttga

SEQ ID NO: 140477 - DNA, 80 bp, synthetic construct
  source 1..80: mol_type = other DNA
gcacgcggggtgcgttgtgttaaaaaaataaataaatggggtagtgtgtccccccccctccaaccaatatggctgtcgtg

SEQ ID NO: 140478 - DNA, 80 bp, synthetic construct
  source 1..80: mol_type = other DNA
gaaattctgcagctaagaagaaaagtgccagtcttttgtgccttgccctggcctcaactggagctttcaacccactgatc

SEQ ID NO: 140479 - DNA, 80 bp, synthetic construct
  source 1..80: mol_type = other DNA
gttggaggacgttttggagaaagtaaaagtggatccagatattcaacctgaggttaaagtgagacccattaagcaggtag

SEQ ID NO: 140480 - DNA, 80 bp, synthetic construct
  source 1..80: mol_type = other DNA
gaaataacagatgcttgtgcactgggcttaatgttactaaaaatgaccagagaattggaaaggtaccagttggcagtgac

SEQ ID NO: 140481 - DNA, 80 bp, synthetic construct
  source 1..80: mol_type = other DNA
ggatgctcggcaccatagtcaccagcttaaccggccgagacaagaacgaggtagagggcgaggtgcaggtggtatccact

SEQ ID NO: 140482 - DNA, 80 bp, synthetic construct
  source 1..80: mol_type = other DNA
caccttccgccctcgcctccactggaccacccaggactgtaactgctcaatctactctgggcatgtcacaggacacagga

SEQ ID NO: 140483 - DNA, 80 bp, synthetic construct
  source 1..80: mol_type = other DNA
tcgggccccaaaacatgcagcaatgtctggcatggcaggtttccaatcaatgccaccaccacaggccccggcgtacccgt

SEQ ID NO: 140484 - DNA, 80 bp, synthetic construct
  source 1..80: mol_type = other DNA
tatcaggggggagcatgggccacaccaccagccggctcacgtccatcttcagtgctgggccgactcagaacctccagctt

SEQ ID NO: 140485 - DNA, 80 bp, synthetic construct
  source 1..80: mol_type = other DNA
ggaggtgtgcggccccgtctactgttttacacctagtccagtagtcatcggcaccactgacaagaagggcctgcctacat

SEQ ID NO: 140486 - DNA, 80 bp, synthetic construct
  source 1..80: mol_type = other DNA
acaggggcgctcataacacctagcgcagcggaagagtccaagctgcccatcaatcccctgagcaactcactactgcgaca

SEQ ID NO: 140487 - DNA, 80 bp, synthetic construct
  source 1..80: mol_type = other DNA
ctgtaaccacaggtggagccatcacgtactccacatatgggaaattcttggccgatgggggatgttctggaggagcgtac

SEQ ID NO: 140488 - DNA, 80 bp, synthetic construct
  source 1..80: mol_type = other DNA
gccactggggtgttctgtttgggctcgcctacttcggtatggcgggcaactgggcgaaggtagtagtcatcctgctgctg

SEQ ID NO: 140489 - DNA, 80 bp, synthetic construct
  source 1..80: mol_type = other DNA
agaacatccatacagaacatggcaatactggggaagttacaagacagaagccacaggatcggctgcctctttgatcaatg

SEQ ID NO: 140490 - DNA, 80 bp, synthetic construct
  source 1..80: mol_type = other DNA
ttttaaaaagcgaacacgctgccaacaaatgttcgcaaaccgacggtttcgttggcgcgctctttcagttttcagggcag

SEQ ID NO: 140491 - DNA, 80 bp, synthetic construct
  source 1..80: mol_type = other DNA
gttccaccaacgtgattgccggcgtgttcagccatggccctcagcagaacattcagctcattaacaccaacggcagttgg

SEQ ID NO: 140492 - DNA, 80 bp, synthetic construct
  source 1..80: mol_type = other DNA
cggttccataacaaggtgtactccacaacctcgaggagtgcttctctgagggcaaagaaggtgacctttgacagggtgca

SEQ ID NO: 140493 - DNA, 80 bp, synthetic construct
  source 1..80: mol_type = other DNA
caccaggacgcccaggcccatgccagggacaagaaaggctatggagatcacagcggagtggctctggagaaccctgggaa

SEQ ID NO: 140494 - DNA, 80 bp, synthetic construct
  source 1..80: mol_type = other DNA
tcttcgcccccgtgcgccgccagggcccgcttggtgatgtcgaggatcacctcccagtagtacgtcaggtctcgccgctg

SEQ ID NO: 140495 - DNA, 80 bp, synthetic construct
  source 1..80: mol_type = other DNA
ctaacccccctttctgactgggcgtgtgacggcttgcgagatcttgccgtcgctgttgaacctgtcatcttctcgcctat

SEQ ID NO: 140496 - DNA, 80 bp, synthetic construct
  source 1..80: mol_type = other DNA
gacgctactaccatattgggtattggcacggtcttagatcaggctgagacggctggggtgaggctgacggttctggcgac

SEQ ID NO: 140497 - DNA, 80 bp, synthetic construct
  source 1..80: mol_type = other DNA
ttgcagcttttgtgatttcaggcaaatccacagacatgtggatagaaaggactgctaacataacatgggaaaatgatgca

SEQ ID NO: 140498 - DNA, 80 bp, synthetic construct
  source 1..80: mol_type = other DNA
agcaccctcccgctccagaacaacatacagcgcttccacagcggcagccataacagtcagccttaccagtaaaaaaacct

SEQ ID NO: 140499 - DNA, 80 bp, synthetic construct
  source 1..80: mol_type = other DNA
cacatcaaccggaccgctttgaactgcaatgactctttgcagacagggttcatagcggccctcttctacacacataggtt

SEQ ID NO: 140500 - DNA, 80 bp, synthetic construct
  source 1..80: mol_type = other DNA
cggtgccccctccgaggaggcggcgcgctgtggtgctgactgaaagtaacgtgggagaagtccttaagggtttggccgat

SEQ ID NO: 140501 - DNA, 80 bp, synthetic construct
  source 1..80: mol_type = other DNA
gcgtgaggctgcatagatatgctcccccctgccgcccgctcattaaggacgatatttcgttctctgtggggctgtccagc

SEQ ID NO: 140502 - DNA, 80 bp, synthetic construct
  source 1..80: mol_type = other DNA
gtccagggaaaactttttaatgaacgcgatggtctcgatgtcctcgcgcgacaggagccgggcgggaagctggttgcgtt

SEQ ID NO: 140503 - DNA, 80 bp, synthetic construct
  source 1..80: mol_type = other DNA
ttcagccaggtcttgcatacggccgccagagcttccacttggtcaggcagtagtttgaagttcgcctttagatcgttatc

SEQ ID NO: 140504 - DNA, 80 bp, synthetic construct
  source 1..80: mol_type = other DNA
actttcctgattgtctgtggggtatttatcctcgctgtccttctctactttgtctgctgcaaggccagagagaaatctag

SEQ ID NO: 140505 - DNA, 80 bp, synthetic construct
  source 1..80: mol_type = other DNA
gctcagcagactaggggtgtggtgggtaccatcgtcaccagccttactggtcgagacaaaaatgaggtggagtgtgagat

SEQ ID NO: 140506 - DNA, 80 bp, synthetic construct
  source 1..80: mol_type = other DNA
agcagtgcttggaggagtgcaacctcaaggagctgcagaaactgctaaagcaaaacttgaaggacctatggacggccttc

SEQ ID NO: 140507 - DNA, 80 bp, synthetic construct
  source 1..80: mol_type = other DNA
cgaccagcgatcgcggcttggcggtccccggcacgagggtgagcacgtcgttgaggacgtcctcgcccgcggcccggtgg

SEQ ID NO: 140508 - DNA, 80 bp, synthetic construct
  source 1..80: mol_type = other DNA
agggccgaaggggccggtctgccagatgtacaccaacgtggatcaagaccttgtaggctggccggcgccccccgggtgca

SEQ ID NO: 140509 - DNA, 80 bp, synthetic construct
  source 1..80: mol_type = other DNA
acctactttctggccgccgtgctgctcggggaccacgcggagcaggtcaacacgttcctgcggctcgtgttcgagatccc

SEQ ID NO: 140510 - DNA, 80 bp, synthetic construct
  source 1..80: mol_type = other DNA
cagtcccgcaagccgcgcaagtattacacgcgatcttcggacgggcggctctgccccgccgtccccgtgttcgtccacga

SEQ ID NO: 140511 - DNA, 80 bp, synthetic construct
  source 1..80: mol_type = other DNA
cagatgaaaagaaccagaattgaagacgacttcaaccccgtctacccctatgacacctcctcaactcccagcattcccta

SEQ ID NO: 140512 - DNA, 80 bp, synthetic construct
  source 1..80: mol_type = other DNA
agcctgacgggtctgtggtccctagcactgctcgtccttctgctccctcaacgggcgtacgcatggtcgggtgaagacag

SEQ ID NO: 140513 - DNA, 80 bp, synthetic construct
  source 1..80: mol_type = other DNA
tttgtcagtgggcagcgtagtaattaccgggagagtcatcttgtctggccaacctgccgtcgtcccagaccgagaggcat

SEQ ID NO: 140514 - DNA, 80 bp, synthetic construct
  source 1..80: mol_type = other DNA
tggcaaagccatccccatcgaggtcattaagggggggaggcaccttatcttctgccattccaagaagaagtgtgacgagc

SEQ ID NO: 140515 - DNA, 80 bp, synthetic construct
  source 1..80: mol_type = other DNA
cgatacagccgtcgggggcgctctcgacgatggccaccagcggacagtcggagtcgtacgtgagatatacgccgggcgtg

SEQ ID NO: 140516 - DNA, 80 bp, synthetic construct
  source 1..80: mol_type = other DNA
agcttgctacagacaaaccatttaaaattgaaaacaacaaactggcattagacgttggtcatggattaaaagttatagat

SEQ ID NO: 140517 - DNA, 80 bp, synthetic construct
  source 1..80: mol_type = other DNA
cgtcggtggagagggagttccctctgcgcttgcgattctagcctcgtggggctggacgttcgacacgccaaaccacgagt

SEQ ID NO: 140518 - DNA, 80 bp, synthetic construct
  source 1..80: mol_type = other DNA
agaaggcggcgagcgtgcgcatgtgcagccgcagcagcacgatcgcgtcctccagctggcggaccaggtggtcggcgcgc

SEQ ID NO: 140519 - DNA, 80 bp, synthetic construct
  source 1..80: mol_type = other DNA
actgctccacgccgtgctccggctcgtggctaagggatgtttgggactggatatgcacggtgttggctgacttcaagacc

SEQ ID NO: 140520 - DNA, 80 bp, synthetic construct
  source 1..80: mol_type = other DNA
ccgtgatgctgtgatactactcacctgcctatttcatcccactttggggtttgaggtcaccaagatacttcttgccttaa

SEQ ID NO: 140521 - DNA, 80 bp, synthetic construct
  source 1..80: mol_type = other DNA
gtgtcgtgggcagtgaaatgggagtacgtcgtccttctgttcttggtccttgctgacgcacgcatttgtgcatgtctgtg

SEQ ID NO: 140522 - DNA, 80 bp, synthetic construct
  source 1..80: mol_type = other DNA
catattgctcacttgcttgatgcatcctgcccttgggtttgacatcaccaaggtgctgctggctcttctggggcctcttt

SEQ ID NO: 140523 - DNA, 80 bp, synthetic construct
  source 1..80: mol_type = other DNA
cgtacgaaaatcgctgcgacgcccacgggttggccgtggccgcaaaggcccgggacgggtcgctctggccgtggtcgtac

SEQ ID NO: 140524 - DNA, 80 bp, synthetic construct
  source 1..80: mol_type = other DNA
gggaaaaccaggagggttcttcctgaaatagtccgtgaagccataaagaagagacttcgcacagtgatcctagcaccaac

SEQ ID NO: 140525 - DNA, 80 bp, synthetic construct
  source 1..80: mol_type = other DNA
aatgacagcctaaacaccggctttatcgcgtccttgttctatgtccgcaatttcaacagctctggctgccccgagcgcat

SEQ ID NO: 140526 - DNA, 80 bp, synthetic construct
  source 1..80: mol_type = other DNA
cacggacgcctggccgcggccacgcataccgcgcgcctgacgggcgtgacgtccctggtcctgaccgtggtggacgtcga

SEQ ID NO: 140527 - DNA, 80 bp, synthetic construct
  source 1..80: mol_type = other DNA
cttggatcacaccacgctgcctgattgattacccgtaccggctgtggcatttcccgtgcaccgccaacttctccgtcttt

SEQ ID NO: 140528 - DNA, 80 bp, synthetic construct
  source 1..80: mol_type = other DNA
cagcagtcgaacagtacgtcgatttcagcctcgatcctacttttaccatcgagacccgcaccgtcccccaggacgcggtt

SEQ ID NO: 140529 - DNA, 80 bp, synthetic construct
  source 1..80: mol_type = other DNA
ctgtgattcttgattcattcgagcctctgagagccgaaactgatgatgctgagctctcggtagctgcggagtgcttcaag

SEQ ID NO: 140530 - DNA, 80 bp, synthetic construct
  source 1..80: mol_type = other DNA
ggctacctcgcggaccaccaggctccccgcgcccgcccccccccaaagactcccgccgtcacggcgacagtcgcaccacc

SEQ ID NO: 140531 - DNA, 80 bp, synthetic construct
  source 1..80: mol_type = other DNA
actcagtggatgaaccgactgatagcgttcgcctcgaggggtaatcacgtatcgcccacacattacgtgcctgaaactga

SEQ ID NO: 140532 - DNA, 80 bp, synthetic construct
  source 1..80: mol_type = other DNA
gccgagttaatagaagccaacctcctgtggagacaggagatgggcggcaacatcacgagggtagagtcagagaacaaggt

SEQ ID NO: 140533 - DNA, 80 bp, synthetic construct
  source 1..80: mol_type = other DNA
gtaatgagatgccatgcggggcgtggcgcgggcccacccgccctcacgccccgcccatggcagatggcgcggatgtgcgg

SEQ ID NO: 140534 - DNA, 80 bp, synthetic construct
  source 1..80: mol_type = other DNA
atcgtcgcttcgggattggaagcagaactgacgcagagggcgcacagggtgttcttctcggcaatggtcaaaaatccaat

SEQ ID NO: 140535 - DNA, 80 bp, synthetic construct
  source 1..80: mol_type = other DNA
gaagacagtacaccttgatgagtccacagtatcccaagctctcgcgcaacttgccgagaagtcatttccaacatcgtcaa

SEQ ID NO: 140536 - DNA, 80 bp, synthetic construct
  source 1..80: mol_type = other DNA
gtcaatgccaataccagcaaaggtcttgctgttgaaaataactcactagttgttaagctaggaaacggtcttcgctttga

SEQ ID NO: 140537 - DNA, 80 bp, synthetic construct
  source 1..80: mol_type = other DNA
tttcctggctaaaaaaggtggagaggcaatggataccatcagtgtgtttctccactctgaggaaggctctagggcttacc

SEQ ID NO: 140538 - DNA, 80 bp, synthetic construct
  source 1..80: mol_type = other DNA
tgatgatcttacagcggcaatcaataaaggcattttggttacagttaaccccatcgcctcaaccaatgatgatgaagtgc

SEQ ID NO: 140539 - DNA, 80 bp, synthetic construct
  source 1..80: mol_type = other DNA
gggctccgatacagatctatgctactaggcaatggcaggtttgtgccttttcacattcaggtgccgcagaaattttttgc

SEQ ID NO: 140540 - DNA, 80 bp, synthetic construct
  source 1..80: mol_type = other DNA
agtgaggatggtactggaggtgaagaagggggggggagaagcgagaacaggaaaggcgacggagcccgacaaaacaccga

SEQ ID NO: 140541 - DNA, 80 bp, synthetic construct
  source 1..80: mol_type = other DNA
accaagtacatcatggcttgcatgtcagccgacctggaagtcacgacgagcgcctgggtactggtcggtggtgtcctagc

SEQ ID NO: 140542 - DNA, 80 bp, synthetic construct
  source 1..80: mol_type = other DNA
cctgcactgcccgctgaaccaacgcgaggatctcctcgttctcctgtgcgatggacacgtcctgggccgcggtcgtgtcg

SEQ ID NO: 140543 - DNA, 80 bp, synthetic construct
  source 1..80: mol_type = other DNA
gcgtcccgtcatgtcaccaacatactatctggactgactatcaccagccttctccgccggctccatcagtggattactga

SEQ ID NO: 140544 - DNA, 80 bp, synthetic construct
  source 1..80: mol_type = other DNA
tgcgccgcatggctccatccattgtgatgaaaaccggcttatttaatacataacacgaacaagctgtgacatcgctatgt

SEQ ID NO: 140545 - DNA, 80 bp, synthetic construct
  source 1..80: mol_type = other DNA
tgtcatcttgcaccttcctgggtgtgtcccctgcgtcaaagtagggaaccaatcgcggtgctggtatcctgcctcaccta

SEQ ID NO: 140546 - DNA, 80 bp, synthetic construct
  source 1..80: mol_type = other DNA
ccgggtcgatctcccgcacggtgtgctgaaactgcgccaacaggggcggcgggaccacagccccccgctcggtggtcgtc

SEQ ID NO: 140547 - DNA, 80 bp, synthetic construct
  source 1..80: mol_type = other DNA
ctgagatcaaccactgcaagcggaagggtgatcgaggaatggtgctgcagggagtgcacaatgcccccactgtcgttccg

SEQ ID NO: 140548 - DNA, 80 bp, synthetic construct
  source 1..80: mol_type = other DNA
gccgaatttcaggacctgaacaaacacatcgccgaggtgatgctgctgtcggcgatgaagaccagcaacgcgctgtgcgt

SEQ ID NO: 140549 - DNA, 80 bp, synthetic construct
  source 1..80: mol_type = other DNA
ctgtcccctgcccttgctgattactctaaatgcaaatttgtggagctatggaatttcttagaatgctatgatgcgaaaat

SEQ ID NO: 140550 - DNA, 80 bp, synthetic construct
  source 1..80: mol_type = other DNA
ttttctatataaagggatggggtgtcaggatctctcgtaggttcttgggactccaagggacccgcagcccaggtacgcgt

SEQ ID NO: 140551 - DNA, 80 bp, synthetic construct
  source 1..80: mol_type = other DNA
ccggcacgccgtcgtggtgacaatcgagccgggctcattagcccgcgaccgatagccaaacttaagggatcatctggagg

SEQ ID NO: 140552 - DNA, 80 bp, synthetic construct
  source 1..80: mol_type = other DNA
cttgttctccctgagccaccatcacccagacacagatagtctgacaaggaggtgatgtgtgactcggaaaaacacccgct

SEQ ID NO: 140553 - DNA, 80 bp, synthetic construct
  source 1..80: mol_type = other DNA
ggatgagagtgaaatcacccttgactttgactactgtccggggacaacagttaccattgctgaaggatgtggaaaaagag

SEQ ID NO: 140554 - DNA, 80 bp, synthetic construct
  source 1..80: mol_type = other DNA
ctccggctctataaaaaggctaatcattcgaggccgaggtatccagctcaacgacgaggtagtgagctcttccaccggtc

SEQ ID NO: 140555 - DNA, 80 bp, synthetic construct
  source 1..80: mol_type = other DNA
ttcacctggggtgccaacgaatcagacgtcttcctgctggagtccaacaggccgccgcaaggcgcctggttcggatgcac

SEQ ID NO: 140556 - DNA, 80 bp, synthetic construct
  source 1..80: mol_type = other DNA
ccaccacgtctggattggccagccttttcaaccatggcgccaggcagaatgtccagctgatcaattccaacggcagctgg

SEQ ID NO: 140557 - DNA, 80 bp, synthetic construct
  source 1..80: mol_type = other DNA
gactggagacgcgaaccgaaacatggatgtcatcagaaggggcttggaaacatgcccagagaattgaaacttggatcctg

SEQ ID NO: 140558 - DNA, 80 bp, synthetic construct
  source 1..80: mol_type = other DNA
gttagttaatgtggatcgctcgtgtgctagttaatttcccattttgttctgcgattagtgtagtcattatatttgattgt

SEQ ID NO: 140559 - DNA, 80 bp, synthetic construct
  source 1..80: mol_type = other DNA
gagtctgacgcctctagccgcgtgacacaacttctcagttcactcactattactgctctgctcaggagactccacacttg

SEQ ID NO: 140560 - DNA, 80 bp, synthetic construct
  source 1..80: mol_type = other DNA
cttcatcaagcccttgcaggagccattccagtgcagatggatagcacattgaagctgtcatcaggacacctcaaatgcag

SEQ ID NO: 140561 - DNA, 80 bp, synthetic construct
  source 1..80: mol_type = other DNA
atgggggatgttctgggggcgcttacgatgtcatcatttgtgacgagtgccactctacggaccctaccacagttttggtg

SEQ ID NO: 140562 - DNA, 80 bp, synthetic construct
  source 1..80: mol_type = other DNA
ccagtcaccaatgatgtcaccctgacccaccccgtaaccaaatacatcgccacttgcatgcaggctgatctcgagatcat

SEQ ID NO: 140563 - DNA, 80 bp, synthetic construct
  source 1..80: mol_type = other DNA
aaagctgcgaagtgatccatgtaagccctcagaaccgtctcggaaggaggaccccacatgttgtaacttcaaagcccaat

SEQ ID NO: 140564 - DNA, 80 bp, synthetic construct
  source 1..80: mol_type = other DNA
cctcgtgcgagacctgggccgccagctcgtcgcataccccgaggtgcgccgtcgtctcggtgacgacggaccgcagcccc

SEQ ID NO: 140565 - DNA, 80 bp, synthetic construct
  source 1..80: mol_type = other DNA
cgagctgttcggtggttgggtcggaggtttcctccgggggggtggccgcccgtatgcgtgcgaacgtgaggttgcacagg

SEQ ID NO: 140566 - DNA, 80 bp, synthetic construct
  source 1..80: mol_type = other DNA
cgttgccccaacaggcctacgccctcaacgcggaagagcaaggccaaatcggccttgtgcttttagcaatcatctctgtc

SEQ ID NO: 140567 - DNA, 80 bp, synthetic construct
  source 1..80: mol_type = other DNA
caggttcggcctggccctgtcccatctcaacgccatgtccaaggttagaaaggacatatctgaatggcagccatcaaaag

SEQ ID NO: 140568 - DNA, 80 bp, synthetic construct
  source 1..80: mol_type = other DNA
aacgatcagggtcagccaactaaagattatgacatagacctggcattctttgatactccgggcggaacacctccaacagg

SEQ ID NO: 140569 - DNA, 80 bp, synthetic construct
  source 1..80: mol_type = other DNA
tatgatgatgaactggtcaccgacaatcaccatgactctggcgtacctggcacgcatccctgaagtcattctggagatca

SEQ ID NO: 140570 - DNA, 80 bp, synthetic construct
  source 1..80: mol_type = other DNA
cactccgctggatttaccagccatcattcaaagactccacgggcttagcgcgttttcactccacacatactctccttgcg

SEQ ID NO: 140571 - DNA, 80 bp, synthetic construct
  source 1..80: mol_type = other DNA
cggaatcgatgtggggcggcgtggcgcaggactcgcagccccccgggtggttagtgatcctggccaggagccatcccaga

SEQ ID NO: 140572 - DNA, 80 bp, synthetic construct
  source 1..80: mol_type = other DNA
atcgacgaccgcttcgggaaggccctctacttcttgaatgatatggctaaggtgagaaaggacattggagaatgggagcc

SEQ ID NO: 140573 - DNA, 80 bp, synthetic construct
  source 1..80: mol_type = other DNA
gtgggcgaaggtcatcgtcattctcctattgacagccggggtggaggcaagtaccaggattacgggtggctcagcagcac

SEQ ID NO: 140574 - DNA, 80 bp, synthetic construct
  source 1..80: mol_type = other DNA
ctgacccttctctccctgacaccaatatacaagagactaatcattctgactctctggtggctccagtactttctgaccag

SEQ ID NO: 140575 - DNA, 80 bp, synthetic construct
  source 1..80: mol_type = other DNA
ctaacatcagtggcccctctcaggagaaaccctactgttggcattatgcaccccggccgtgtgaggtcgtaccggcccgc

SEQ ID NO: 140576 - DNA, 80 bp, synthetic construct
  source 1..80: mol_type = other DNA
gctacaaaatcgcgaacgcgccctttggagcggactatttccaattaacccaagtgctttagcgagcaccattttggatc

SEQ ID NO: 140577 - DNA, 80 bp, synthetic construct
  source 1..80: mol_type = other DNA
gggcccggtgcggcccggtggggaaaatagggcggatcccccccagtcgtacagaggattttccgcctcaatgtacggtg

SEQ ID NO: 140578 - DNA, 80 bp, synthetic construct
  source 1..80: mol_type = other DNA
aaccctggctttgccctggctgctgctgccattgcctggctgctgggctcctccacctcccaaaaagtgatctacctggt

SEQ ID NO: 140579 - DNA, 80 bp, synthetic construct
  source 1..80: mol_type = other DNA
agacataccatagagaattccacagcaaatgtgtccttggcagccatagctaaccaggcagtggtcctgatgggtttaga

SEQ ID NO: 140580 - DNA, 80 bp, synthetic construct
  source 1..80: mol_type = other DNA
gctggacatgaggaacctatgttgatgcaaagttacggctggaatttggtcacaatgaagagtggagtggacgtgttcta

SEQ ID NO: 140581 - DNA, 80 bp, synthetic construct
  source 1..80: mol_type = other DNA
ggccgccacttgcggcaaatacctcttcaactgggcagtaaagaccaagctcaaactcactccaatcccggctgcgtccc

SEQ ID NO: 140582 - DNA, 80 bp, synthetic construct
  source 1..80: mol_type = other DNA
cagcgcgcgcgccttggaggcgacgggctaccccgacgaggaggatcgggacgatttggaggaggcaggcgagtacgagg

SEQ ID NO: 140583 - DNA, 80 bp, synthetic construct
  source 1..80: mol_type = other DNA
cggacatttgcatttccaaacgattgggtggtggatatcccggaaacccgtacggtcccccgaagtgtcccggagggcaa

SEQ ID NO: 140584 - DNA, 80 bp, synthetic construct
  source 1..80: mol_type = other DNA
aatctaatattgctcaatgctgcctctgcagcaggttgccaaggctggtggtgggctataatcttcatctgctgggcatg

SEQ ID NO: 140585 - DNA, 80 bp, synthetic construct
  source 1..80: mol_type = other DNA
tgagttttatatatacagttggcctttagttaaactcttggtgtcatatctcattttcctaaaaagggcgatcttaatat

SEQ ID NO: 140586 - DNA, 80 bp, synthetic construct
  source 1..80: mol_type = other DNA
aacctttgactgctcagctttttttgatagtacaacatagtagagataatgaaacatttagagacgcaatgcttaacatt

SEQ ID NO: 140587 - DNA, 80 bp, synthetic construct
  source 1..80: mol_type = other DNA
catatacaaaccatgcaaaaaaaatcatttttagctgcacgcaccaaaaataagcgtgacaattacgtgttcccagaaca

SEQ ID NO: 140588 - DNA, 80 bp, synthetic construct
  source 1..80: mol_type = other DNA
caactggttcgggtgtgcgtggatgagcaatgatggctacaccaagacatgcggcgcacccgcgtgcaacatcggaggca

SEQ ID NO: 140589 - DNA, 80 bp, synthetic construct
  source 1..80: mol_type = other DNA
atggaaggcaattttttaagttcctcgtaggtgagctcttcaggggagctgagcccgtgctctgaaagggcccagtctgc

SEQ ID NO: 140590 - DNA, 80 bp, synthetic construct
  source 1..80: mol_type = other DNA
tgcgcagcaatactgcgccggcacgttggcccgggcgagggagcagtgcagtggatgaaccggctgatagccttcgcctc

SEQ ID NO: 140591 - DNA, 80 bp, synthetic construct
  source 1..80: mol_type = other DNA
catctaaatcgtgttgcacgcgcggccctactttcggacctcaaacgtagagtctgtgcggatatgttttttatgacccg

SEQ ID NO: 140592 - DNA, 80 bp, synthetic construct
  source 1..80: mol_type = other DNA
ggtggtctagccctccagggaccaagtcgctggagccatgtacttgcggggccgtggacctatacctcgtcacccggaac

SEQ ID NO: 140593 - DNA, 80 bp, synthetic construct
  source 1..80: mol_type = other DNA
atacctaggaaaaagggaagatcaatggtgtggttccctaataggcttaacagcacgagccacctgggccaccaacatac

SEQ ID NO: 140594 - DNA, 80 bp, synthetic construct
  source 1..80: mol_type = other DNA
gagcccggtgacccggacttggcatcagattcttggtccactgttagcggatcagaggacgtcgtgtgctgctcaatgtc

SEQ ID NO: 140595 - DNA, 80 bp, synthetic construct
  source 1..80: mol_type = other DNA
gtttgggtggcgaaccggccgcctgtcgctcgtcagggccggcgggcgctcctcgccgccctagaggctgtcccgctggt

SEQ ID NO: 140596 - DNA, 80 bp, synthetic construct
  source 1..80: mol_type = other DNA
caggttttggcattagagcctggaaagaatccaagagccgtccaaacgaaacccggcctttttaagactaacaccggaac

SEQ ID NO: 140597 - DNA, 80 bp, synthetic construct
  source 1..80: mol_type = other DNA
tccaggtcctcggcgttgctcaggccgaacggggtcatcttacacagctggcggcccaggaagggcacgctgtgtggctt

SEQ ID NO: 140598 - DNA, 80 bp, synthetic construct
  source 1..80: mol_type = other DNA
ccgcctccgataccaccccctcggcggaagaagacagtggtgcttactgagtccaccgtgtccactgccctggctaacct

SEQ ID NO: 140599 - DNA, 80 bp, synthetic construct
  source 1..80: mol_type = other DNA
ggatcgtggccccagctttaaaccctactccggaaccgcctataactccctggctcctaaaacagcacccaatccatgcg

SEQ ID NO: 140600 - DNA, 80 bp, synthetic construct
  source 1..80: mol_type = other DNA
tacctgttgcaacttagtttgctaaaagtaccgtacttcgtgcgagctcacgctcttctgcgtgtgtgcatgcttttccg

SEQ ID NO: 140601 - DNA, 80 bp, synthetic construct
  source 1..80: mol_type = other DNA
ggcagccatagctgcatactgcttgacagtgggcagcgtggtaattgtcgggagggtcgttctatcgggccaacccgccg

SEQ ID NO: 140602 - DNA, 80 bp, synthetic construct
  source 1..80: mol_type = other DNA
caggatatcagggtggaagaggaaatttaccaatgttgtgaccttgaaccggaggctaggcaggctatcaaggcactgac

SEQ ID NO: 140603 - DNA, 80 bp, synthetic construct
  source 1..80: mol_type = other DNA
cgttaccccatgtcacaaatcatgcggaaggttgtgtgtgttgggctccgtgtatgtggagaaaggccggtcagcgggaa

SEQ ID NO: 140604 - DNA, 80 bp, synthetic construct
  source 1..80: mol_type = other DNA
ttcaaggccataaatctaccttggtagccagtaggaatcagcacgctcactctcaagtgaaccaaaaccaccccatgcgg

SEQ ID NO: 140605 - DNA, 80 bp, synthetic construct
  source 1..80: mol_type = other DNA
atctcaaaagtcaggtcaaatgcagccataggcgcagtctttcaggaagaacagggatggacatcagccagtgaagccgt

SEQ ID NO: 140606 - DNA, 80 bp, synthetic construct
  source 1..80: mol_type = other DNA
cacagatagaagatggtgctttgacggcacgaccaacaacaccataatggaagacagtgtgccggcagaggtgtggacca

SEQ ID NO: 140607 - DNA, 80 bp, synthetic construct
  source 1..80: mol_type = other DNA
cggctatcgtggctggccacgacgggcgttccttgcgcagctgtgctcgacgttgtcactgaagcgggaagggactggct

SEQ ID NO: 140608 - DNA, 80 bp, synthetic construct
  source 1..80: mol_type = other DNA
tcaactcctcagggtgtcccgagaggatggctagttgccaacctcttaccgccttcgaccaagggtggggacccatcact

SEQ ID NO: 140609 - DNA, 80 bp, synthetic construct
  source 1..80: mol_type = other DNA
tttcagcagagtcgaggtcaagaacacgaactgaaaataaaaaaccggtccctgcgttcgctaacccgcagctgtcttta

SEQ ID NO: 140610 - DNA, 80 bp, synthetic construct
  source 1..80: mol_type = other DNA
ttggtaaacgtaggaagtgaaaaagaggttaactgtcaggccacattaagccacagtacggaagaagctgtgctgcctgt

SEQ ID NO: 140611 - DNA, 80 bp, synthetic construct
  source 1..80: mol_type = other DNA
gcgatcggcgccggtcagaaacgccggctgcaggtcgtcggcgcgctgccgcaggacgcccacggccgcgctgaggagcc

SEQ ID NO: 140612 - DNA, 80 bp, synthetic construct
  source 1..80: mol_type = other DNA
accctgcggaagaaatgagtggcccaagctcgccgaagctgtaaggcgggtggacggactagaggttagaggagacccca

SEQ ID NO: 140613 - DNA, 80 bp, synthetic construct
  source 1..80: mol_type = other DNA
tggcccgctccggcaggcaccaggtcatacacaccttgcacatgtggcgcgagcgatctttacctcatcacgcgacaagc

SEQ ID NO: 140614 - DNA, 80 bp, synthetic construct
  source 1..80: mol_type = other DNA
tcgccttatcgtgttcccagatctgggggtgcgcgtgtgcgagaaaatggccctctacgatgtggtctccacccttcctc

SEQ ID NO: 140615 - DNA, 80 bp, synthetic construct
  source 1..80: mol_type = other DNA
taaggaggtcaaggagcgtgcgtccggggtgaagggccgcctactctcgtttgaggaagcgtgcgctctcgtccctcccc

SEQ ID NO: 140616 - DNA, 80 bp, synthetic construct
  source 1..80: mol_type = other DNA
ggtgaagcagctgcgattttcatgacagccactccccccggatcggtggaggcctttccacagagcaatgcagttatcca

SEQ ID NO: 140617 - DNA, 80 bp, synthetic construct
  source 1..80: mol_type = other DNA
acagcttacagccagaagacgcgaggtctcctcggcaccattgtcaccagccttactggcagggataagaatgaggttga

SEQ ID NO: 140618 - DNA, 80 bp, synthetic construct
  source 1..80: mol_type = other DNA
ctatagggcaacaaaggatgggaggggtggcggtgcgggacgcggcgcccaaaaggaggtcggccacaccacagacgttg

SEQ ID NO: 140619 - DNA, 80 bp, synthetic construct
  source 1..80: mol_type = other DNA
aactcctcggggtgcttagaccgcatgagctcgtgtagccctcttgccgcctttgatcaaggctggggccccatctcata

SEQ ID NO: 140620 - DNA, 80 bp, synthetic construct
  source 1..80: mol_type = other DNA
tgttcttccgcaagcttgcttgcggtaggtatgtgcaggcctgcctcttgaagttgggcgcatggacaggtacctatcta

SEQ ID NO: 140621 - DNA, 80 bp, synthetic construct
  source 1..80: mol_type = other DNA
tcaccaatgactgcccaaattccagcatagtgtttgaaactgaaactcagattctacacttgccggggtgtgttccctgt

SEQ ID NO: 140622 - DNA, 80 bp, synthetic construct
  source 1..80: mol_type = other DNA
gtgaatggcatagttagtttgataggtgttaagggggatctcttacatattcaacctaccaccaccactgtgggactgca

SEQ ID NO: 140623 - DNA, 80 bp, synthetic construct
  source 1..80: mol_type = other DNA
gggaacgcgtcccggtgctggtattccgcaacgcccacattggctattcccaacgccacggtccccgtgagcgggttccg

SEQ ID NO: 140624 - DNA, 80 bp, synthetic construct
  source 1..80: mol_type = other DNA
ggcaaaagcttgaggaggtgttggagaacatgaaagtggatcccagcgttgagccggaagttaaagtgcgccccattaaa

SEQ ID NO: 140625 - DNA, 80 bp, synthetic construct
  source 1..80: mol_type = other DNA
ccaggtccagcgccacgcttccgatcgcgcgccgcgcgtcggcccggagggcgtccaggcgatcgcggatatccacgtac

SEQ ID NO: 140626 - DNA, 80 bp, synthetic construct
  source 1..80: mol_type = other DNA
attctagcacgtaaagcagcgggggggaagtacatccaaatggccattcttactatcggccgctggtgtaacacctacct

SEQ ID NO: 140627 - DNA, 80 bp, synthetic construct
  source 1..80: mol_type = other DNA
ttgggggctctggcgaacctgaagagccttccacgttggagttggaagaaggagaaggcttagcccgtctgggcgctcac

SEQ ID NO: 140628 - DNA, 80 bp, synthetic construct
  source 1..80: mol_type = other DNA
cgcaatggatgaaccggttgatagcttttgcctccaggggtaaccatgtatcgcccacgcactatgtgccagagacagac

SEQ ID NO: 140629 - DNA, 80 bp, synthetic construct
  source 1..80: mol_type = other DNA
accttgccgggttatccaccttacctggcaatcccgctatagcttccctaatgtccttcaccgccgctgttaccagccca

SEQ ID NO: 140630 - DNA, 80 bp, synthetic construct
  source 1..80: mol_type = other DNA
cctacggcaagttccttgctgacggtggatgctcagggggtgcttatgacataataatttgtgacgagtgccactctacg

SEQ ID NO: 140631 - DNA, 80 bp, synthetic construct
  source 1..80: mol_type = other DNA
aagctgattgctaagggaagacctttagtgtaggtatttataaagcggttaagctgggtggggtgcatacggagggacat

SEQ ID NO: 140632 - DNA, 80 bp, synthetic construct
  source 1..80: mol_type = other DNA
acagtctgacaggcctctggtccctagccctgctcgtcctcctgctccctcaccgtgcctacgcatggacgggcgaggat

SEQ ID NO: 140633 - DNA, 80 bp, synthetic construct
  source 1..80: mol_type = other DNA
ggcccacgcccctattgtataggttgggtgctgtgcagaatgagatcactaccactcatccaatcactaaatacatcatg

SEQ ID NO: 140634 - DNA, 80 bp, synthetic construct
  source 1..80: mol_type = other DNA
tactcaatatcattcagttggtcatggaacagtggacaatacactaatgacaaatttgccaccaactcctataccttctc

SEQ ID NO: 140635 - DNA, 80 bp, synthetic construct
  source 1..80: mol_type = other DNA
aatgactgcccaaacagcagtattgtgtatgaggctgaattattaatcctgcacttacccgggtgtgtgccgtgcacgag

SEQ ID NO: 140636 - DNA, 80 bp, synthetic construct
  source 1..80: mol_type = other DNA
ctccggatttcagcttcctccgctgcccaaaggagggggcgcattggaaggaaccctaacagagacggagattcatacta

SEQ ID NO: 140637 - DNA, 80 bp, synthetic construct
  source 1..80: mol_type = other DNA
tcaacaggacagctttaaactgtaatgacagcctccagaccggcttcattgctggcctgctttaccgccacagattcaac

SEQ ID NO: 140638 - DNA, 80 bp, synthetic construct
  source 1..80: mol_type = other DNA
cacaaggctataaggttttggtactcaatccatcagtagcagccactcttggcttcggggcctacatgcgtacagcctat

SEQ ID NO: 140639 - DNA, 80 bp, synthetic construct
  source 1..80: mol_type = other DNA
ggcatggaaatcagaccagtaaaggagaaggaggagaatctagtcaggtcaatggtctctgcagggtcaggagaagtgga

SEQ ID NO: 140640 - DNA, 80 bp, synthetic construct
  source 1..80: mol_type = other DNA
ttggcaccaggacaaagatcatccttatcgcacgtggacgtaccatggaagctatgaggtgaagccaactgggtcggcaa

SEQ ID NO: 140641 - DNA, 80 bp, synthetic construct
  source 1..80: mol_type = other DNA
catatttcacagcgtgtcccgggctcggccccgcaacttactcctgtgcctactcctactcaccgtaggggtaggcatct

SEQ ID NO: 140642 - DNA, 80 bp, synthetic construct
  source 1..80: mol_type = other DNA
tgcgtcattacccagggccatattcttggccaattgcaagccatcaacaaagcccgccaagagtttttgctacgaaaggg

SEQ ID NO: 140643 - DNA, 80 bp, synthetic construct
  source 1..80: mol_type = other DNA
gtatcactcataaaggaaagcgcgtctgcggggaaagcttgcaagttaacttcacaaaggcgggtaagagcaggccgtag

SEQ ID NO: 140644 - DNA, 80 bp, synthetic construct
  source 1..80: mol_type = other DNA
gattggacaacaccatgtgctacgtcatggttgagggacatctgggattgggtttgcactgtgctgtctgacttcaagac

SEQ ID NO: 140645 - DNA, 80 bp, synthetic construct
  source 1..80: mol_type = other DNA
ggtcttcgccctgcgcgtcggccaggtagcatttgaccatggtgtcatagtccaacccctccgcggcgtggcccttggcg

SEQ ID NO: 140646 - DNA, 80 bp, synthetic construct
  source 1..80: mol_type = other DNA
actgctcgtggcatggcagcagattttggactgtacaatcaactggccgcgtctcggttaagagaagaagatgccctgtc

SEQ ID NO: 140647 - DNA, 80 bp, synthetic construct
  source 1..80: mol_type = other DNA
tcagggttacaaagttttggtgctcaatccctccgtggcggccaccctcgggtttggggcatacatgtctaccgcccatg

SEQ ID NO: 140648 - DNA, 80 bp, synthetic construct
  source 1..80: mol_type = other DNA
atcatgtgacttagatcctgaagcccggaaggtcatatcatcactgacggagcgcctgtactgcggtggtcctatgttta

SEQ ID NO: 140649 - DNA, 80 bp, synthetic construct
  source 1..80: mol_type = other DNA
cccattgagacaagtgtggatttttttgtaaaaaagtcatccaaagatcagtagctaaggaggtttgtaagcggtttcta

SEQ ID NO: 140650 - DNA, 80 bp, synthetic construct
  source 1..80: mol_type = other DNA
acagggccggtccagcgcgaaggtgtcgatggccgccgcggaaaagggcccggtgtccaaaagcccctccccacagggat

SEQ ID NO: 140651 - DNA, 80 bp, synthetic construct
  source 1..80: mol_type = other DNA
ggaagcctttcacggtttagatgtcaagtttcacacacaggctttctccgctcacggtagcggaaaagaggtcattgacg

SEQ ID NO: 140652 - DNA, 80 bp, synthetic construct
  source 1..80: mol_type = other DNA
tgagtccagggtgcccgttctggactttctcgagccaatggccgaggaagagagcgaccttgagccctcaataccatcgg

SEQ ID NO: 140653 - DNA, 80 bp, synthetic construct
  source 1..80: mol_type = other DNA
gtgcgcgcgcgccaaggcgcctcccccctcttgggacaacatgtggaagtgcttgattcgactaaagcccatgcttacgg

SEQ ID NO: 140654 - DNA, 80 bp, synthetic construct
  source 1..80: mol_type = other DNA
aatgagacggacgtgttcctgctggcgtccttgcggcctcccagtggtcggtggtttgggtgcacgtggatgaactccac

SEQ ID NO: 140655 - DNA, 80 bp, synthetic construct
  source 1..80: mol_type = other DNA
cttttcgtgcctcaccacacctgcatcagccgtcaactatgctaacaggtctggcatttaccatctcaccaatgactgcc

SEQ ID NO: 140656 - DNA, 80 bp, synthetic construct
  source 1..80: mol_type = other DNA
cggccgacacccaggaaacaacgacgcgccgggccctttataaagagatacgcgatgcgttgggcagtcgaaaacaggcc

SEQ ID NO: 140657 - DNA, 80 bp, synthetic construct
  source 1..80: mol_type = other DNA
gggctacaaggtcctcgtgctcaatccctcggttgcagcaaccctgtcctttggtggctacctcagtagtgctcacggca

SEQ ID NO: 140658 - DNA, 80 bp, synthetic construct
  source 1..80: mol_type = other DNA
agatcgtgacagggttgaaatgagtcctctgttgttttcaacaactgagctctcgatcctcccctgttcattcacgacca

SEQ ID NO: 140659 - DNA, 80 bp, synthetic construct
  source 1..80: mol_type = other DNA
gcgcgcctaccttaatacccccggcctccccgtttgtcaagatcatcttgagttctgggaggtggttttcactggactga

SEQ ID NO: 140660 - DNA, 80 bp, synthetic construct
  source 1..80: mol_type = other DNA
agaaagtgatcacctggggtgccgacacagctgcttgtggtgacatcattgctggattgccagtatctgcaaggagtgga

SEQ ID NO: 140661 - DNA, 80 bp, synthetic construct
  source 1..80: mol_type = other DNA
ggcctctttacgggaatgagggccttggctgggcagggtggctcctgtccccccagggttctcgcccgtcttggtgcccc

SEQ ID NO: 140662 - DNA, 80 bp, synthetic construct
  source 1..80: mol_type = other DNA
atgaggtccatgctcagtttctgttaatgaaagctatttacgatggtcgatatgccatattagcagagcttttcgaaagc

SEQ ID NO: 140663 - DNA, 80 bp, synthetic construct
  source 1..80: mol_type = other DNA
tcctggttctggcagatgctcggatttgtacgtgtctctggttaatgctgctcataagtagggttgaggcagcagtggag

SEQ ID NO: 140664 - DNA, 80 bp, synthetic construct
  source 1..80: mol_type = other DNA
gcgattttcgagcgccgcgggccgccgctctcccgggaggagcgcctgttgtacctgatcaccaactacctgccctcggt

SEQ ID NO: 140665 - DNA, 80 bp, synthetic construct
  source 1..80: mol_type = other DNA
tagcaaaatgagacgagcggtgggagtgccacccgtgatggcatacgcagagggtcctcctccttcttacgaaagcgtga

SEQ ID NO: 140666 - DNA, 80 bp, synthetic construct
  source 1..80: mol_type = other DNA
ggtaggagccttcttagaggagcaggagcaatggaagacagccaatgaagcggttcaagaccctaagttttgggagatgg

SEQ ID NO: 140667 - DNA, 80 bp, synthetic construct
  source 1..80: mol_type = other DNA
gagaggttaaaaagaatggccattagcggggatgattgcgtggtgaaaccaatcgatgacaggttcgctaatgccctgct

SEQ ID NO: 140668 - DNA, 80 bp, synthetic construct
  source 1..80: mol_type = other DNA
cttgagctgcctcctttgccagaacccactatcgcggatcccgtagattccgttcccgttgcatctgttccagttgcatc

SEQ ID NO: 140669 - DNA, 80 bp, synthetic construct
  source 1..80: mol_type = other DNA
acaatgtggcatgtcacacgtggtgctgttctaatgcataaaggaaagaggattgaaccttcatgggcggacgtcaaaaa

SEQ ID NO: 140670 - DNA, 80 bp, synthetic construct
  source 1..80: mol_type = other DNA
ggacccaaagacgcacccacacggacccgcggacgctccccccggctcgccagccccgccaccccccgaacatcgcggcg

SEQ ID NO: 140671 - DNA, 80 bp, synthetic construct
  source 1..80: mol_type = other DNA
tcaaaacaaagtggtgaaagttctcagacccacaccgagaggagcggtgatggatatcatatccaggaaagaccagagag

SEQ ID NO: 140672 - DNA, 80 bp, synthetic construct
  source 1..80: mol_type = other DNA
acctgatcgcattctgcgctgcatggcacatccggggaaggcttgttccgctgataacctacggactgacaggcctgtgg

SEQ ID NO: 140673 - DNA, 80 bp, synthetic construct
  source 1..80: mol_type = other DNA
gatgctgattacacggcatgggaaattgaggacaagcagaattacggtttcgatctgggactgtttgataaccgcatcga

SEQ ID NO: 140674 - DNA, 80 bp, synthetic construct
  source 1..80: mol_type = other DNA
gcgcgctctacttgcttcaagctgccctcacacggactccctacttcgttcgtgctcatgtgctccttcgggtttgcgca

SEQ ID NO: 140675 - DNA, 80 bp, synthetic construct
  source 1..80: mol_type = other DNA
gagcgcgggaaagcggagcagcagctccgcctgcccagcgggagacagctggtgtgggcgcacgacgcgttctgcggcgc

SEQ ID NO: 140676 - DNA, 80 bp, synthetic construct
  source 1..80: mol_type = other DNA
acgtctggtctcgtgagcctgttctccgctggtgcccggcagaatctccagcttatcaacaccaacggaagctggcatat

SEQ ID NO: 140677 - DNA, 80 bp, synthetic construct
  source 1..80: mol_type = other DNA
acgaaagtcaaattatcggtacctttgagctgcagggtccctcgcctgacgaaaagtccgcggctccggggttgaaactc

SEQ ID NO: 140678 - DNA, 80 bp, synthetic construct
  source 1..80: mol_type = other DNA
ggatgagatcaacgccatttttgaagaaaatgaagtagacatctcggtcgtcgtccaagacccaaagaacatctaccaaa

SEQ ID NO: 140679 - DNA, 80 bp, synthetic construct
  source 1..80: mol_type = other DNA
cctcaaggttcccgctcattgacaccctgcacctgcggctcctcggacctttacctggtcacgaggcacgccgatgtcat

SEQ ID NO: 140680 - DNA, 80 bp, synthetic construct
  source 1..80: mol_type = other DNA
ggagatgcctcaagccagttatcctaacagatgggccagagagagttattctagcaggtccaattccagtaactccagca

SEQ ID NO: 140681 - DNA, 80 bp, synthetic construct
  source 1..80: mol_type = other DNA
tactgcttgtcggtgggctgcgtggtcatttgtggcaggatctctaccagtggtcaaccagtgctgatccccgatcggga

SEQ ID NO: 140682 - DNA, 80 bp, synthetic construct
  source 1..80: mol_type = other DNA
gcgtcagtgcccatcggagtgacatgattgatccttttcagttgggccttctggtgatgtttctggccacccaggaggtc

SEQ ID NO: 140683 - DNA, 80 bp, synthetic construct
  source 1..80: mol_type = other DNA
ccggcagggagacgaacagcccgcccgcgctggggacgcgcggcaggaggtccgggtgcgccgggatgacggtggctagg

SEQ ID NO: 140684 - DNA, 80 bp, synthetic construct
  source 1..80: mol_type = other DNA
attgatgttagtgtacaatggggtcttaatttaacactagtagggccatcgcaaacaccagttgaatggcatggtcccag

SEQ ID NO: 140685 - DNA, 80 bp, synthetic construct
  source 1..80: mol_type = other DNA
agcatgacatctaccagagctgccaattggaaccagaagccagaaaggctataacatctttgaccgagaggctgtactgc

SEQ ID NO: 140686 - DNA, 80 bp, synthetic construct
  source 1..80: mol_type = other DNA
gttgtcgatcgttacgctgcaacctaaaatgctgggtatatttattccggacatcccatcggccatccccgcgcctccgg

SEQ ID NO: 140687 - DNA, 80 bp, synthetic construct
  source 1..80: mol_type = other DNA
tggatgaacagtactggatttgtcaagacatgtggcgccccaccctgtaagttaacacccgggagtgggaacacttctct

SEQ ID NO: 140688 - DNA, 80 bp, synthetic construct
  source 1..80: mol_type = other DNA
gaggggtaagcttgttccgctggtgacctacagcctgacgggtctttggtccttagcgttacttgtcctcctgctccccc

SEQ ID NO: 140689 - DNA, 80 bp, synthetic construct
  source 1..80: mol_type = other DNA
ggaagacgaccagccgtcctcgcaccagcccttgttttactagatacccccccttaatgggtgcggggtggtcaggtctg

SEQ ID NO: 140690 - DNA, 80 bp, synthetic construct
  source 1..80: mol_type = other DNA
caaggtcccggccgcatacgcggctcagggctacaaggtgctggtgctcaacccttccgttgccgcgacactgggctttg

SEQ ID NO: 140691 - DNA, 80 bp, synthetic construct
  source 1..80: mol_type = other DNA
ggtagtcgacttcagcctagaccctactttcacaattgagaccaccactatcccgcaagacgctgtggcgagaagccaac

SEQ ID NO: 140692 - DNA, 80 bp, synthetic construct
  source 1..80: mol_type = other DNA
cctctgggtgttccgagcgcttgtcccactgcaaaccgctacgcgatttcgcacagggttggggccctatatcctacgcc

SEQ ID NO: 140693 - DNA, 80 bp, synthetic construct
  source 1..80: mol_type = other DNA
cccggcgccatgagccgccgggtcatgaacgtgcacgaggccgtaaactgcttggaggccctctgggacacccagatgcg

SEQ ID NO: 140694 - DNA, 80 bp, synthetic construct
  source 1..80: mol_type = other DNA
attacattagatggaccattcgataatactacatggacaagatatcataatgatggacataaaaatggttggatgaaaat

SEQ ID NO: 140695 - DNA, 80 bp, synthetic construct
  source 1..80: mol_type = other DNA
cccaagcgagggtgccacccaatggatgaatcgcctgatagcctttgcctcgcggggcaaccatgtgtcacccacgcact

SEQ ID NO: 140696 - DNA, 80 bp, synthetic construct
  source 1..80: mol_type = other DNA
gcatatatccttgtaggaagcgtcccataagctcctgaaaggttttctgggatgaaaaagttagctgcaacccgcgtttt

SEQ ID NO: 140697 - DNA, 80 bp, synthetic construct
  source 1..80: mol_type = other DNA
actcggatggaagccggtcttgtcgatcaggatgatctggacgaagagcatcaggggctcgcgccagccgaactgttcgc

SEQ ID NO: 140698 - DNA, 80 bp, synthetic construct
  source 1..80: mol_type = other DNA
taaagccctcgcagcatgcaaagctgcggggatcgtggaccccgttatgctggtgtgtggagacgacctggtcgtcatct

SEQ ID NO: 140699 - DNA, 80 bp, synthetic construct
  source 1..80: mol_type = other DNA
cttgcttggactaatgaaaccggagtatcattgatgcatggccagccttactcaggtttggatattcaaattacttttct

SEQ ID NO: 140700 - DNA, 80 bp, synthetic construct
  source 1..80: mol_type = other DNA
atgatggcattcagcgccgctctcactagccctctgtccactagcaccacaatcctcctaaacgtcatggggggttggtt

SEQ ID NO: 140701 - DNA, 80 bp, synthetic construct
  source 1..80: mol_type = other DNA
gcttaagcctatgctcacagggcctacccctttgctctataggttagggcctgtcaataatgagatcaccaccactcatc

SEQ ID NO: 140702 - DNA, 80 bp, synthetic construct
  source 1..80: mol_type = other DNA
ccaaaccggccagatgctaagggataagttaaaagaccaaaattttcaacagaaagttgtagatggtctggcttcgggaa

SEQ ID NO: 140703 - DNA, 80 bp, synthetic construct
  source 1..80: mol_type = other DNA
gtgttagagttctggaggacggggtcaactatgcaacagggaacttgcctggttgctccttttctatcttcttactagcc

SEQ ID NO: 140704 - DNA, 80 bp, synthetic construct
  source 1..80: mol_type = other DNA
cacagaaaccccaacccaaatcccataaacatacgacacacaggcatattttggaatttcttaggtttttatttatttag

SEQ ID NO: 140705 - DNA, 80 bp, synthetic construct
  source 1..80: mol_type = other DNA
taccacggaggaagcttgcgacctgacgcccccccactctgccaaatcgaaattcggctatggggcgaaggatgttcgta

SEQ ID NO: 140706 - DNA, 80 bp, synthetic construct
  source 1..80: mol_type = other DNA
gacttgggtgtgcgagtctgcgagaagaaggcactctacgatgtcatccaacaactgcctaaggcagtgatgggagaggc

SEQ ID NO: 140707 - DNA, 80 bp, synthetic construct
  source 1..80: mol_type = other DNA
atgccgcctcttgaaggcgagccgggcgaccctgacctcagctcagggtcatggtccacgattagtgaggagggcgacgg

SEQ ID NO: 140708 - DNA, 80 bp, synthetic construct
  source 1..80: mol_type = other DNA
tgcacccgcgcctatctgtatcacaggcggcaccacaccaaattttttatgcgcatgcgcgacacgcgacaccgcgcaca

SEQ ID NO: 140709 - DNA, 80 bp, synthetic construct
  source 1..80: mol_type = other DNA
gttgcgcgacgtgtgggactgggtgtgcacagtgctatctgactttaaagtatggctgcaagctaaacttctccctcgcc

SEQ ID NO: 140710 - DNA, 80 bp, synthetic construct
  source 1..80: mol_type = other DNA
tgacatcattgccggggcccactggagggtcttgttcgccgccgcatactacgcgtcggcggctaactgggccaaggttg

SEQ ID NO: 140711 - DNA, 80 bp, synthetic construct
  source 1..80: mol_type = other DNA
gaacgagactgacgtctttatgatgtcaagcctacgacccccggctggagggtggtttggctgtacgtggatgaatagta

SEQ ID NO: 140712 - DNA, 80 bp, synthetic construct
  source 1..80: mol_type = other DNA
gtggttagaccacctttcaatatgctgaaacgcgagagaaaccgcgtatcaacccctcaagggttggtgaagagattctc

SEQ ID NO: 140713 - DNA, 80 bp, synthetic construct
  source 1..80: mol_type = other DNA
ggctccaggcgactgcgtgggtgtagacgccctcgagggccaggcacagtgggtgccgcagccggaggccgttggcccta

SEQ ID NO: 140714 - DNA, 80 bp, synthetic construct
  source 1..80: mol_type = other DNA
atgattgccatggaggtggtgttgcgcagaaggcaaggaccaaaacaaatgctggtaggaggagttgtgctgcttggagc

SEQ ID NO: 140715 - DNA, 80 bp, synthetic construct
  source 1..80: mol_type = other DNA
ccgtcctcgctcaccgtctcgtatattgactcgtcgtcctcgtaggtggcgtgccgttcgcgggccgaggcggcgtgggt

SEQ ID NO: 140716 - DNA, 80 bp, synthetic construct
  source 1..80: mol_type = other DNA
caaccagacgacgtccatggcgtaggtctggtcgtcgtgggcgatggcatggatggagacgttcgtgctgaacgcctccc

SEQ ID NO: 140717 - DNA, 80 bp, synthetic construct
  source 1..80: mol_type = other DNA
cttgcccgacatacttttttttctgccgaagcaattatcaccaactcaacgttgagaatacacgttcccctttttgggtc

SEQ ID NO: 140718 - DNA, 80 bp, synthetic construct
  source 1..80: mol_type = other DNA
catgtggatttgctggtgggtgcggccacgctgtgttcggcactttatgttggagatctatgtggaggcgtgttccttgt

SEQ ID NO: 140719 - DNA, 80 bp, synthetic construct
  source 1..80: mol_type = other DNA
gactttgacatgtacggggtcacgtataatatcactccacttgatctaccccagatcattcaacgccttcatggcatggc

SEQ ID NO: 140720 - DNA, 80 bp, synthetic construct
  source 1..80: mol_type = other DNA
aggccgctgctatcttcatgacagctactcctcccggtacctctgacccatttccggaatccaactcccccatatctgat

SEQ ID NO: 140721 - DNA, 80 bp, synthetic construct
  source 1..80: mol_type = other DNA
gttggtgttactacatggccatcaaaaaaagagtccaggaagtccgaggctatacaaaaggaggacccggtcacgaggag

SEQ ID NO: 140722 - DNA, 80 bp, synthetic construct
  source 1..80: mol_type = other DNA
acagcagggcgctgtggaggatcgcggcagaggaatacgcggaggtgaagcgggtgggtgactaccattacatcgtagga

SEQ ID NO: 140723 - DNA, 80 bp, synthetic construct
  source 1..80: mol_type = other DNA
acctcagtgtggttgtgaacaagcccgtgggaagatatcgctcagcccctaaacgcctatccatgacgcaagagaagttt

SEQ ID NO: 140724 - DNA, 80 bp, synthetic construct
  source 1..80: mol_type = other DNA
gcgcgtccgaccggcgcgtgcgtgtacctggagccgtggcacaccgacgtgcgggccgtgctccggatgaaggtggtcct

SEQ ID NO: 140725 - DNA, 80 bp, synthetic construct
  source 1..80: mol_type = other DNA
gtggcgtacgcgtccgggcggcggagctttgtggatgttttgacagggatgtcgggagttccggagcttctgcggcacag

SEQ ID NO: 140726 - DNA, 80 bp, synthetic construct
  source 1..80: mol_type = other DNA
agttcaagcagaagatcatgggcctgctgcaaagcacagcaaagcaggccgaagacctcaagccagcggtgcactctgcc

SEQ ID NO: 140727 - DNA, 80 bp, synthetic construct
  source 1..80: mol_type = other DNA
gcagacctccggtggcagcccagcgctcgtgctctggaggcggtcggagcaacaaccgctgatgtcaccgacgagtatga

SEQ ID NO: 140728 - DNA, 80 bp, synthetic construct
  source 1..80: mol_type = other DNA
cgccaccccgtcgacctttgccaaggttctggcgtggctcggggtcgcgggtcgccgcacgtccccattcgaacgcgttc

SEQ ID NO: 140729 - DNA, 80 bp, synthetic construct
  source 1..80: mol_type = other DNA
tacatagtgctggccttcttattacttgctgatgcccgtatttgtacttgcctatggatcatgctcctggtttgtcaggc

SEQ ID NO: 140730 - DNA, 80 bp, synthetic construct
  source 1..80: mol_type = other DNA
catgcgggttcaggatacaaccggcgctttacatgccgaactagatgtgttagaagcggatctaggaggttcgtcgccca

SEQ ID NO: 140731 - DNA, 80 bp, synthetic construct
  source 1..80: mol_type = other DNA
gtcccccgacgacctcttgcagacggtccgtgatgcaaggacggcgggtggcctgcagcagggtgaccgtatccacggga

SEQ ID NO: 140732 - DNA, 80 bp, synthetic construct
  source 1..80: mol_type = other DNA
aacgattgctcgaacagcagcatcgtttatgaggcggaaaccatgatacttcatcttcctggctgcgtcccctgcgttcg

SEQ ID NO: 140733 - DNA, 80 bp, synthetic construct
  source 1..80: mol_type = other DNA
gagtgctacgatgccggtgcggcctggtacgaactcactccagcggagactaccgtcaggttgcgggcgtacatcaacac

SEQ ID NO: 140734 - DNA, 80 bp, synthetic construct
  source 1..80: mol_type = other DNA
aataatgacactagcaagattaaaaggagaatcgagagactcaagcaagagtacagctcaacttggcacctcgaccccaa

SEQ ID NO: 140735 - DNA, 80 bp, synthetic construct
  source 1..80: mol_type = other DNA
gatagctgtcaggacctggctctttgagaatggagaggagagagtgaccaggatggcgatcagcggagacgactgtgccg

SEQ ID NO: 140736 - DNA, 80 bp, synthetic construct
  source 1..80: mol_type = other DNA
ccgagtgacaagagaagagtgccctggcacgagggtcaccataaatgctgactgtgacaaaaggggggcttctgtgagga

SEQ ID NO: 140737 - DNA, 80 bp, synthetic construct
  source 1..80: mol_type = other DNA
gctaaaagaccgcatcgacacgcgcgtccttcttgtcgtctctccccccccccatcgccccgcaatttgcacccagcctt

SEQ ID NO: 140738 - DNA, 80 bp, synthetic construct
  source 1..80: mol_type = other DNA
ttaggcataggcactgttcttgaccaagcggaaactgcaggggccagactggtcgtgcttgccaccgccacgcctccggg

SEQ ID NO: 140739 - DNA, 80 bp, synthetic construct
  source 1..80: mol_type = other DNA
tgactaagaaggaggagcctgtcaatattgaggctgaacctccttttggggaaagcaatatagtaattggaattggagac

SEQ ID NO: 140740 - DNA, 80 bp, synthetic construct
  source 1..80: mol_type = other DNA
gcaacctgcatggccgccgaccttgaagttgtcaccagctcctgggtccttgtgggcggcgtggtcgctgccgtggcagc

SEQ ID NO: 140741 - DNA, 80 bp, synthetic construct
  source 1..80: mol_type = other DNA
ctggccccttgaaccactgggtaacgcagacacctggcgttgtctccatggcactgccctggccactttacggcgcgtat

SEQ ID NO: 140742 - DNA, 80 bp, synthetic construct
  source 1..80: mol_type = other DNA
acggctaaaaccgaccctgcatggacaaacccctatcctgtataggctgggaccgatccaaaatgaggtctgcacaacac

SEQ ID NO: 140743 - DNA, 80 bp, synthetic construct
  source 1..80: mol_type = other DNA
ggcatcgcagtgcgattgtgttatatcgccgtggtggccggggtggtgctcgtggcgcttcactacgagcaggagatcca

SEQ ID NO: 140744 - DNA, 80 bp, synthetic construct
  source 1..80: mol_type = other DNA
gtatgccaagaccacctggaattttgggaaggcgtgttttctggcttgacccacatagacgcccactttctgtcccagac

SEQ ID NO: 140745 - DNA, 80 bp, synthetic construct
  source 1..80: mol_type = other DNA
cttggccacctgcataaatggtgtgtgctggaccgtgtaccacggtgcagggtctcggcctttggctggccctaaagggc

SEQ ID NO: 140746 - DNA, 80 bp, synthetic construct
  source 1..80: mol_type = other DNA
ggatttgggagaaaatagtctattgcgtattttctgttcaataattggactgcgttatttaaaggtctgattggttgatt

SEQ ID NO: 140747 - DNA, 80 bp, synthetic construct
  source 1..80: mol_type = other DNA
aatcccttttcgggctcgcctggacactatcctgacgccttcatacccaactttgacgccgtgagcgaatctgtggatgg

SEQ ID NO: 140748 - DNA, 80 bp, synthetic construct
  source 1..80: mol_type = other DNA
gaattggaacccccttttggggacagctacatagtgataggtgttggagatagtgcattaacactccattggttcaggaa

SEQ ID NO: 140749 - DNA, 80 bp, synthetic construct
  source 1..80: mol_type = other DNA
cttttgacaggacgcaagtgctcgacgcccattatgactcagtcttaaaggacatcaagctagcggcttccaaggtcagc

SEQ ID NO: 140750 - DNA, 80 bp, synthetic construct
  source 1..80: mol_type = other DNA
atgggtttgatgagtcctggtttgctatgcgcgaatgtacccgtcgcgaatatattacggtccaaggattatacgaccca

SEQ ID NO: 140751 - DNA, 80 bp, synthetic construct
  source 1..80: mol_type = other DNA
atttctcccaggtcgcgatcgcgtccgcgcatgtgcgcctggcggtgcagctgccggacgctggcgcgcaggtaccggta

SEQ ID NO: 140752 - DNA, 80 bp, synthetic construct
  source 1..80: mol_type = other DNA
gtggggtgcggagacggcggcttgtggtgacatcatacacgggctccccgtctctgcccggctcggccgggagatcctgc

SEQ ID NO: 140753 - DNA, 80 bp, synthetic construct
  source 1..80: mol_type = other DNA
aatcaatagggtggcttcatgcctcaggaaacttggggtaccgcccttgcgagtctggagacatcgggccagaagtgtcc

SEQ ID NO: 140754 - DNA, 80 bp, synthetic construct
  source 1..80: mol_type = other DNA
ccaaacagctacgaacacttgggcttaacgctgtcgctttttacagaggcgtcgacgtggctgtcattcctgcagatggc

SEQ ID NO: 140755 - DNA, 80 bp, synthetic construct
  source 1..80: mol_type = other DNA
aagaacgtagccaaactcttaaggcttatatgaccatgcagactctgctaatactgctatcccttttatcccccgccctt

SEQ ID NO: 140756 - DNA, 80 bp, synthetic construct
  source 1..80: mol_type = other DNA
gcgagacgatgcacttttacatcccgggggcctgcatggcgggtctcattgaaatactggacacgcaccgccaggagtgt

SEQ ID NO: 140757 - DNA, 80 bp, synthetic construct
  source 1..80: mol_type = other DNA
gatggaagaacccgtaccttcggggtttgaaccggacatgcttcgcaagaagcaaatcaccgtccttgacctccatccag

SEQ ID NO: 140758 - DNA, 80 bp, synthetic construct
  source 1..80: mol_type = other DNA
gagccggccccctcagagacaggttccgcctcctctatgccccccctcgagtgggagcctggagatccggacctggagtc

SEQ ID NO: 140759 - DNA, 80 bp, synthetic construct
  source 1..80: mol_type = other DNA
agaaattggcaactctcttcgggacttttcctcctcctataccaaattccccctcaatagagggggggcggttcttgttc

SEQ ID NO: 140760 - DNA, 80 bp, synthetic construct
  source 1..80: mol_type = other DNA
ttacctgggaggagaatgagactgatgtgttcctgcttgggagcgcacggcctccgcaggggtcttggttcggatgcacc

SEQ ID NO: 140761 - DNA, 80 bp, synthetic construct
  source 1..80: mol_type = other DNA
tgcggacaaggaatattcattcacaatgatgttgaggcctggatcgaccgctacaagttcatgcccggaaccccgaaaca

SEQ ID NO: 140762 - DNA, 80 bp, synthetic construct
  source 1..80: mol_type = other DNA
cctcttacgaaaccgtgatggcagcggcaccaccctacgtgcctccccgctatttgggtcctacggagggaagaaacagt

SEQ ID NO: 140763 - DNA, 80 bp, synthetic construct
  source 1..80: mol_type = other DNA
tgagggtgagcctggtgacccagatctgagctccgggtcgtggtctaccgtcagcgatgagggtgacagcgttgtttgct

SEQ ID NO: 140764 - DNA, 80 bp, synthetic construct
  source 1..80: mol_type = other DNA
gggtgcggtgacgtccctgcagcaggaactggcgcacatgcgcgcgcgtacccacgccccctacgggccgtatccgccgg

SEQ ID NO: 140765 - DNA, 80 bp, synthetic construct
  source 1..80: mol_type = other DNA
ttccgcccctctccctcccccccccctaacgttactggccgaagccgcttggaataaggccggtgtgcgtttgtctatat

SEQ ID NO: 140766 - DNA, 80 bp, synthetic construct
  source 1..80: mol_type = other DNA
cacggtcacttataaatgccccctcattgccgaagtggaacctgaagacattgactgctggtgcaaccttacatcgacat

SEQ ID NO: 140767 - DNA, 80 bp, synthetic construct
  source 1..80: mol_type = other DNA
ggtaataaagggaaaactactactgctcaaagtggtggtaaaaaaaccaaaacagaacatagaaaccagagtccaaaaag

SEQ ID NO: 140768 - DNA, 80 bp, synthetic construct
  source 1..80: mol_type = other DNA
gtcataataggggtgcttcatcagaattcaaaagacacatctatgcaaaagaccattcccattgtagccctgacactgac

SEQ ID NO: 140769 - DNA, 80 bp, synthetic construct
  source 1..80: mol_type = other DNA
gacatgatgatgaactggtcccccactgtgactctggcggtagcgcagctgctccggatcccacaagccatcgtggacat

SEQ ID NO: 140770 - DNA, 80 bp, synthetic construct
  source 1..80: mol_type = other DNA
tacatctatgaccaccttactcccatgtcagattggccgccttacggcctccgcgatttggcggtggccctagagccagt

SEQ ID NO: 140771 - DNA, 80 bp, synthetic construct
  source 1..80: mol_type = other DNA
gggtctactacatgacccgcgatcctgaaacacccctcgccagagctgcgtgggagacagccagacacactccagtcaac

SEQ ID NO: 140772 - DNA, 80 bp, synthetic construct
  source 1..80: mol_type = other DNA
tttgtgtttaaaacccggggtcggtgtggtgttcggtcataagctgcattgcgaacgactagtcgccgtttttcgtgtgc

SEQ ID NO: 140773 - DNA, 80 bp, synthetic construct
  source 1..80: mol_type = other DNA
ggccattacaataggaaacaaaaatgatgacaaacttaccctgtggacaaccccagacccatctcctaactgcagaattc

SEQ ID NO: 140774 - DNA, 80 bp, synthetic construct
  source 1..80: mol_type = other DNA
gcccagagggccgcggtgcacactgggatgtgaggacggactgatcggcggttggcgaaaggtggtccgggacaaggagg

SEQ ID NO: 140775 - DNA, 80 bp, synthetic construct
  source 1..80: mol_type = other DNA
tgcggcttcgggcgattctggggttggagaagacctggtggaggttaatttggacttgaaatgctatgaagagggtttgc

SEQ ID NO: 140776 - DNA, 80 bp, synthetic construct
  source 1..80: mol_type = other DNA
tggataaacccactctatgcccggccatttgggcgtgcccccgcaagactgctagccgagtagcgttgggttgcgaaagg

SEQ ID NO: 140777 - DNA, 80 bp, synthetic construct
  source 1..80: mol_type = other DNA
gtcagtactgaagaggccagcgttgtctgttgctcaatgtcgtactcttggacgggggcgctcatcaccccctgcgctgc

SEQ ID NO: 140778 - DNA, 80 bp, synthetic construct
  source 1..80: mol_type = other DNA
aggaagcccttctgcgcgcggtcgtatcggcggctcatggccacggcggccgccgcgtgcgccaggccccagccgaagcg

SEQ ID NO: 140779 - DNA, 80 bp, synthetic construct
  source 1..80: mol_type = other DNA
ggcccaaagggtccaattacccaaatgtacaccaatgtggaccaggacctcgtcggctggccggcgccctccggggcgcg

SEQ ID NO: 140780 - DNA, 80 bp, synthetic construct
  source 1..80: mol_type = other DNA
tgttggtgaataccgcttgagaggagaagcaaggaaaacatttgtggacttaatgaggagaggagacttaccagtctggt

SEQ ID NO: 140781 - DNA, 80 bp, synthetic construct
  source 1..80: mol_type = other DNA
gcagagcgacgtagcggcacaaatgccgacagacgcgcatgatgcgcgtgctgtcggccgcgtagcgcgtgttggaggtg

SEQ ID NO: 140782 - DNA, 80 bp, synthetic construct
  source 1..80: mol_type = other DNA
acactagaacgcttgtttatcgatctagaacaagagcgactactggatcgcggtgccccatgttcttccgagggactatc

SEQ ID NO: 140783 - DNA, 80 bp, synthetic construct
  source 1..80: mol_type = other DNA
gagactctcgacgttgtgactaggtctccaagcttcactgacaacagtacacctccagctgtgccccagacctatcaagt

SEQ ID NO: 140784 - DNA, 80 bp, synthetic construct
  source 1..80: mol_type = other DNA
gttgtttctccaaccagctatttggatgtggacttgcacccagcatcagcctggacattgtacgccgtggccactacagt

SEQ ID NO: 140785 - DNA, 80 bp, synthetic construct
  source 1..80: mol_type = other DNA
gcgtatgctatggaggcagagacagccgcatcgtgtgggggcgctgtgctcgtgtgcttgatagtgttgacactgtcgcc

SEQ ID NO: 140786 - DNA, 80 bp, synthetic construct
  source 1..80: mol_type = other DNA
atgctcgtctgtggcgacgacttagtcgtaatctgtgaaagccagggggtccaggaggatgcagcgagcctgagagcctt

SEQ ID NO: 140787 - DNA, 80 bp, synthetic construct
  source 1..80: mol_type = other DNA
aggcgtggggtataagttagccctggcccgacagtctggtcgcatttgcacctcggcactcggagcgagacgcagcagcc

SEQ ID NO: 140788 - DNA, 80 bp, synthetic construct
  source 1..80: mol_type = other DNA
gcgtttactgcttcagtcaccagtcccctgacaaccaaccaaactatgttttttaacatactcggggggtgggttgctac

SEQ ID NO: 140789 - DNA, 80 bp, synthetic construct
  source 1..80: mol_type = other DNA
catgaaacaaaggaaaatagaagatcaaacaaagtaagaagtcaggccagattaagccatagtacggaaaaagctatgct

SEQ ID NO: 140790 - DNA, 80 bp, synthetic construct
  source 1..80: mol_type = other DNA
ggagcttgatgtatttccacaggcgtgacctcaggctggcggcaaatgccatttgctcggcagtgccatcacactgggtt

SEQ ID NO: 140791 - DNA, 80 bp, synthetic construct
  source 1..80: mol_type = other DNA
accacacagactgtcccacaagacgctgtctcacgcagtcagcgccgcgggcgcacaggtagaggaagacagggcactta

SEQ ID NO: 140792 - DNA, 80 bp, synthetic construct
  source 1..80: mol_type = other DNA
gtgcgcccgcgcgcaggctcctcccccaagttgggacgagatgtggaaatgtctcgtgcggctcaagccaacactacatg

SEQ ID NO: 140793 - DNA, 80 bp, synthetic construct
  source 1..80: mol_type = other DNA
tacttcatagcacgggcggaagccctggtacaagtgttggttccctcccttcaggtccgaggaggccgtgacgctgtcgt

SEQ ID NO: 140794 - DNA, 80 bp, synthetic construct
  source 1..80: mol_type = other DNA
aggcgtttaacgactccggccccgggaccgccagcgtcatgcccgccctcaaggtccttgactcgctggtggcggcgcac

SEQ ID NO: 140795 - DNA, 80 bp, synthetic construct
  source 1..80: mol_type = other DNA
agagttgaaagtttttaatggtttcagaccgtcagccattggcatgtggtccagggtttgttttaacagttgcaagcggt

SEQ ID NO: 140796 - DNA, 80 bp, synthetic construct
  source 1..80: mol_type = other DNA
caattaacacccctgaccctaatagtggccatcattttgctcgtggcgcactacatgtacttgatcccagggctgcaggc

SEQ ID NO: 140797 - DNA, 80 bp, synthetic construct
  source 1..80: mol_type = other DNA
tgcccggcatccccttcatctcttgccaaaaggggtatagggtggtgtgggccggcactggcatcatgaccacacggtgc

SEQ ID NO: 140798 - DNA, 80 bp, synthetic construct
  source 1..80: mol_type = other DNA
tccgcatgccgtcactatcagagtactggccctgggaaaccaggaaggctccttgaaaacagctcttactggcgcaatga

SEQ ID NO: 140799 - DNA, 80 bp, synthetic construct
  source 1..80: mol_type = other DNA
gtaaataacgtgtccccgatatggggtcgtgggcccgcgttgctctggggctcggcaccctggtgcggcacggccgtccc

SEQ ID NO: 140800 - DNA, 80 bp, synthetic construct
  source 1..80: mol_type = other DNA
aatgactctactgtggggcaagccttagcccaattggctgagaaaagcttcccaactacaccggactcatcccaggccgc

SEQ ID NO: 140801 - DNA, 80 bp, synthetic construct
  source 1..80: mol_type = other DNA
tgtatcgaagcttacaaacttattcagcctaggggccagccaaaaattgcagcttgtcaacaccaacggaagctggcaca

SEQ ID NO: 140802 - DNA, 80 bp, synthetic construct
  source 1..80: mol_type = other DNA
gtccggctcgtaggccggtacacacagcgccacggcctgtacgtccctcggcccgacgacccagtcttggccgatgccat

SEQ ID NO: 140803 - DNA, 80 bp, synthetic construct
  source 1..80: mol_type = other DNA
acgagcctacccttctttatgttttatttgaagttttcgacgtggtacgcattcatcagccacaccgcggagtcattgaa

SEQ ID NO: 140804 - DNA, 80 bp, synthetic construct
  source 1..80: mol_type = other DNA
tagcagacggggggtgctctggaggagcttatgacatcatcatatgtgatgagtgccattctacagaccccacaaccgtc

SEQ ID NO: 140805 - DNA, 80 bp, synthetic construct
  source 1..80: mol_type = other DNA
gtcaagaaagatctaatatcatatggaggaggctggaagctagaaggagaatggaaggaaggagaggaagtccaagtcct

SEQ ID NO: 140806 - DNA, 80 bp, synthetic construct
  source 1..80: mol_type = other DNA
ctccctcaggccgtgatgggaagctcctacggatttcaatactcaccagggcagcgggttgaattcctcgtgaaagcgtg

SEQ ID NO: 140807 - DNA, 80 bp, synthetic construct
  source 1..80: mol_type = other DNA
tccgcccgggagctcgtgccgggccggggttccatgagccgtggtagggtagactcgagacggcggcccgcggtctctct

SEQ ID NO: 140808 - DNA, 80 bp, synthetic construct
  source 1..80: mol_type = other DNA
cgacatcttgtcgtcaaagggatacacaaacttccccccctcgccccatactcccgccagcaccccggtaaacaccaact

SEQ ID NO: 140809 - DNA, 80 bp, synthetic construct
  source 1..80: mol_type = other DNA
atccaacgtcaggtctccctttttgtcgggaggcccctccccaaacgggtcatccccgtggaacgcccgtttgcggccgg

SEQ ID NO: 140810 - DNA, 80 bp, synthetic construct
  source 1..80: mol_type = other DNA
gggcgatggcatctgctatacaacatgcgcctgcggcgcaagcatcaccggtcacgtcaaaaatgggaccatgaaaatcg

SEQ ID NO: 140811 - DNA, 80 bp, synthetic construct
  source 1..80: mol_type = other DNA
gcgaagctgacgtcctccccgcccggcgtaggggggactccacagcgagcttgctcagtcctcgacccctctcctgtctc

SEQ ID NO: 140812 - DNA, 80 bp, synthetic construct
  source 1..80: mol_type = other DNA
aaattacgtcattgacattatgagcaaagacattcccacgccttacatgtggagttatcagccgcaaatgggcctggcag

SEQ ID NO: 140813 - DNA, 80 bp, synthetic construct
  source 1..80: mol_type = other DNA
cccagaattcgaggagagggaaatgtccgtgcccgctgaatgccatcggcctcgcaggcccaaattcccaccagcgctgc

SEQ ID NO: 140814 - DNA, 80 bp, synthetic construct
  source 1..80: mol_type = other DNA
gcgcgcagaggtcatgaagtgctactgggcccggcagataacatcaggagaggaggctggcgcctcctatcccccatcac

SEQ ID NO: 140815 - DNA, 80 bp, synthetic construct
  source 1..80: mol_type = other DNA
cggcgggagaatatttgcatttcggatggcagattggaaacttgttaaaatgccacagaaaataacggatccttttgcgc

SEQ ID NO: 140816 - DNA, 80 bp, synthetic construct
  source 1..80: mol_type = other DNA
accgccggcttaagcagatttacagcttcgagtacgaggccatgttgcgtcgcagtgccctggccttatcgcccgaccgc

SEQ ID NO: 140817 - DNA, 80 bp, synthetic construct
  source 1..80: mol_type = other DNA
tggtttcatcgcaggcctgttctactacaacaaattcaattccaccggttgtgtagaaagaatgtcctcgtgcaggcccc

SEQ ID NO: 140818 - DNA, 80 bp, synthetic construct
  source 1..80: mol_type = other DNA
tatgcagatcaccaggccctcaagtggttcaaagactttgcagcagggaagagatcagccgttagcttcatagaggtgct

SEQ ID NO: 140819 - DNA, 80 bp, synthetic construct
  source 1..80: mol_type = other DNA
gctctccactgcgacccagaccttcctagctagctgtattaacggcgtgctgtggacggtctaccacggtgctggttcaa

SEQ ID NO: 140820 - DNA, 80 bp, synthetic construct
  source 1..80: mol_type = other DNA
gagatcgtggatgtgatgtgccacgccactctcacccaccgcctgatgtcatcacatagagtgcctaactataacctttt

SEQ ID NO: 140821 - DNA, 80 bp, synthetic construct
  source 1..80: mol_type = other DNA
ctggctgcaagcaaagctcctcccgcaactccccggggtaccctttctctcatgtcagagagggtacaagggtgtgtggc

SEQ ID NO: 140822 - DNA, 80 bp, synthetic construct
  source 1..80: mol_type = other DNA
gagatcgtcgcgtgccacgccctccgggaacacgcgcacatctgccgtctgcgcaacaccgcgtccgtcaaggtgctgtt

SEQ ID NO: 140823 - DNA, 80 bp, synthetic construct
  source 1..80: mol_type = other DNA
atagctacagcataataccagcatgttatttaaaaatccatagctaaatgcactgcatccaaaactcattttttctaaca

SEQ ID NO: 140824 - DNA, 80 bp, synthetic construct
  source 1..80: mol_type = other DNA
ccatgtcctacagttggacaggggcactcataacaccatgcaatgcagaagaggaaaaactgcccattagccccttgagc

SEQ ID NO: 140825 - DNA, 80 bp, synthetic construct
  source 1..80: mol_type = other DNA
caccactgctaccggactaacatctgccctaaatttaccccaagttcatgcctttgtcaatgactgggcgagcttggaca

SEQ ID NO: 140826 - DNA, 80 bp, synthetic construct
  source 1..80: mol_type = other DNA
ctggagactaccatgcgatctccggtgttcactgacaattcatctccacctgctgtgcctcagactttccaggtggccca

SEQ ID NO: 140827 - DNA, 80 bp, synthetic construct
  source 1..80: mol_type = other DNA
gaaaagggtcatccagcttgacgagtcaactgcctctgcggcgctcgccgagctggccaagaaggcatttccgtcggacc

SEQ ID NO: 140828 - DNA, 80 bp, synthetic construct
  source 1..80: mol_type = other DNA
catgtgtagaacacccttctcactggctgaaggcattgtgctagcatcagcagccctgggaccgctcatcgagggaaata

SEQ ID NO: 140829 - DNA, 80 bp, synthetic construct
  source 1..80: mol_type = other DNA
cgataacgccatggcacggaaaaagccatgctgcctgtgagcccctcagaggacactgagtcaaaaaaccccacgcgctt

SEQ ID NO: 140830 - DNA, 80 bp, synthetic construct
  source 1..80: mol_type = other DNA
gaagctgcccttgccaatctgatcaccatcaatgctgtagcggcggccggaacccacaactttttatatgccatcttgct

SEQ ID NO: 140831 - DNA, 80 bp, synthetic construct
  source 1..80: mol_type = other DNA
agcggtctcggtcgttgagggtcctgtgtattttttccaggacgtggtagagatggctctggatgttcagatacatgggc

SEQ ID NO: 140832 - DNA, 80 bp, synthetic construct
  source 1..80: mol_type = other DNA
ctgaaagggtcatcaggtggcccggtgatgtgcccctctggacatgcagttgggattttccgggcggctgtctgcacccg

SEQ ID NO: 140833 - DNA, 80 bp, synthetic construct
  source 1..80: mol_type = other DNA
gacgttgacctcattgaggccaacctcctgtggcggcaggagatgggcgggaacatcacccgcgtggagtcagagaataa

SEQ ID NO: 140834 - DNA, 80 bp, synthetic construct
  source 1..80: mol_type = other DNA
ctggcagagcacgctgcacagtatcgtgggcctgggagtgaaaagtctgaagcgccgccgatgctattgagagagaggaa

SEQ ID NO: 140835 - DNA, 80 bp, synthetic construct
  source 1..80: mol_type = other DNA
cgaatgcggcccgaccgtcacacggggctgccttatacccggcgcctatccactcccccaaagggacggcatttacgatt

SEQ ID NO: 140836 - DNA, 80 bp, synthetic construct
  source 1..80: mol_type = other DNA
tgaacccactgactctaacagcggcagtactcttgctgatcacacattatgccattataggtccaggattgcaggcaaaa

SEQ ID NO: 140837 - DNA, 80 bp, synthetic construct
  source 1..80: mol_type = other DNA
cgcgggaggtcactggggcgtgatgtttggcctagcctacttttccatgcagggagcgtgggcaaaggtcatcgccatcc

SEQ ID NO: 140838 - DNA, 80 bp, synthetic construct
  source 1..80: mol_type = other DNA
gcggtttggccagcggaaagtacatccaagctctcttgctacggctcggagcgtggactggcacttatgtgtatgaccat

SEQ ID NO: 140839 - DNA, 80 bp, synthetic construct
  source 1..80: mol_type = other DNA
caagtatttccctctgactccaactggactcgcgcgtgtgattcaagaggcgcatgccaatggcatctgtggcatccgat

SEQ ID NO: 140840 - DNA, 80 bp, synthetic construct
  source 1..80: mol_type = other DNA
tcgggcgagtaggcgtcggctccgcactgagcgcagacggtctcgcactccaccagccacgtgagctcgggtttagcggg

SEQ ID NO: 140841 - DNA, 80 bp, synthetic construct
  source 1..80: mol_type = other DNA
gcacatggcatcgacccgaacatacggtcgggtgtcagaaccatcactacaggcgcaccaatcacatactccacctacgg

SEQ ID NO: 140842 - DNA, 80 bp, synthetic construct
  source 1..80: mol_type = other DNA
ccaaccaccatgttatgcattaatcacagcctgaagatcattcacgtagccagccactctcgcaaggcctggccagtgtt

SEQ ID NO: 140843 - DNA, 80 bp, synthetic construct
  source 1..80: mol_type = other DNA
tcatccttatggccctttgtcaccctcacctggtctttgacatcaccaaatacttgctggctatgactggcccgctttac

SEQ ID NO: 140844 - DNA, 80 bp, synthetic construct
  source 1..80: mol_type = other DNA
tggtgatggcatatgccataccacatgcgggtgcggcgcacacatcgccggccatgtgaagaatgggaccatgaaaatca

SEQ ID NO: 140845 - DNA, 80 bp, synthetic construct
  source 1..80: mol_type = other DNA
cccgcccgcacagacagacagacacttttttcataaaaaccgttccgcttttattaacaaacaacaaacagtccgcgcgc

SEQ ID NO: 140846 - DNA, 80 bp, synthetic construct
  source 1..80: mol_type = other DNA
atacaaggactcccaggccacaaccaggaactcgagaagccatgtccacaacagccgaatggctatggagttttttaggc

SEQ ID NO: 140847 - DNA, 80 bp, synthetic construct
  source 1..80: mol_type = other DNA
atacaggcgctgccgtgccagcggggtgctcaccactagcatgggaaacactctcacatgctatgtgaaggcccaggcgg

SEQ ID NO: 140848 - DNA, 80 bp, synthetic construct
  source 1..80: mol_type = other DNA
atggagttacatttcaaaatgtcagatttactggtgataattttaatggctctgtgtttgtgactagcacccagctaacc

SEQ ID NO: 140849 - DNA, 80 bp, synthetic construct
  source 1..80: mol_type = other DNA
gagtccttcccaccagtttgggcaatactctgacttgctatataaaggccatggctgcctgtaaggcagcaggcctaaag

SEQ ID NO: 140850 - DNA, 80 bp, synthetic construct
  source 1..80: mol_type = other DNA
cgcaggccccgggccggacaaaaccgccccggaaacgggacgccgcgtccggtggacctccgggtgttcgtcgtcttcgg

SEQ ID NO: 140851 - DNA, 80 bp, synthetic construct
  source 1..80: mol_type = other DNA
gaacgcgccctccttcttgatcggcggaaacgcaagagtctggtattcgcgcgcaaatagcgcggttccggtggtgatgt

SEQ ID NO: 140852 - DNA, 80 bp, synthetic construct
  source 1..80: mol_type = other DNA
ctacgggagaaataccattttatggaaaggccatcccccttgagtacatcaaagggggaagacatctcatattctgtcac

SEQ ID NO: 140853 - DNA, 80 bp, synthetic construct
  source 1..80: mol_type = other DNA
agcggcgggcgcggccagccgcacgcgggccgccgggtacctggatgtgcttcttaccgttcgtctcgctcgctccaaac

SEQ ID NO: 140854 - DNA, 80 bp, synthetic construct
  source 1..80: mol_type = other DNA
tccatctggcgttcttttacaccccagtgtacttccatcccccactggctcccccctccgtgtgcactctctgaagtcac

SEQ ID NO: 140855 - DNA, 80 bp, synthetic construct
  source 1..80: mol_type = other DNA
ttgaggggaacacgctcgtcggccatgctgcgagtcataccatgcgaggactcgctagcctgttcaacccgggaccttct

SEQ ID NO: 140856 - DNA, 80 bp, synthetic construct
  source 1..80: mol_type = other DNA
tacctgccaggcgcagaggggacacccgggcaggcttactcagccctaggccgctgagtacgctaaaagggtcgtcggga

SEQ ID NO: 140857 - DNA, 80 bp, synthetic construct
  source 1..80: mol_type = other DNA
tgctccaacagcagcatcacatggcaacttgagggtgcggtacttcatgttcctggttgcataccctgcgagcaggcgga

SEQ ID NO: 140858 - DNA, 80 bp, synthetic construct
  source 1..80: mol_type = other DNA
ggagtctcttgggtgatgaaaattggaataggtgttctcttaacttggatagggttgaattcaaaaaacacatccatgtc

SEQ ID NO: 140859 - DNA, 80 bp, synthetic construct
  source 1..80: mol_type = other DNA
ggcttgctttttctattatgaaatcagttggaacaggaaaaagaggaacaggctcacaaggtgaaactttaggagaaaaa

SEQ ID NO: 140860 - DNA, 80 bp, synthetic construct
  source 1..80: mol_type = other DNA
cgcaggtggtccttgacatccttgctgggggccactggggtgtcatcggtgcgttgatgtactacagcatggtggctaat

SEQ ID NO: 140861 - DNA, 80 bp, synthetic construct
  source 1..80: mol_type = other DNA
cctcgttcgccgccatcactcggttctgttgcacgagccagtactcccgcggggccgcggccgctgggtttccgctgtat

SEQ ID NO: 140862 - DNA, 80 bp, synthetic construct
  source 1..80: mol_type = other DNA
gaaaccacgtcgcccccactcactacgtgacggagtcagatgcgtcgcagcgtgtgacccaactgcttagttcccttacc

SEQ ID NO: 140863 - DNA, 80 bp, synthetic construct
  source 1..80: mol_type = other DNA
aagtatttcttcccctgaatttaaaagacgattgtattctaaaaaaatacctttcgcgtacggctctttaagttcgtccg

SEQ ID NO: 140864 - DNA, 80 bp, synthetic construct
  source 1..80: mol_type = other DNA
tggttagacttctctcaaaaccatgggacaccatcacgaacgttaccaccatggccatgactgacaccactcccttcgga

SEQ ID NO: 140865 - DNA, 80 bp, synthetic construct
  source 1..80: mol_type = other DNA
ggagctcagtccgctgctgctgtctacaacagagtggcagataatgccctgttcttttaccaccctaccagccttgtcca

SEQ ID NO: 140866 - DNA, 80 bp, synthetic construct
  source 1..80: mol_type = other DNA
acatagatgcccacttcctgtctcagacgaaacagagcggggaaaatttcccctacctagtcgcataccaagccaccgtg

SEQ ID NO: 140867 - DNA, 80 bp, synthetic construct
  source 1..80: mol_type = other DNA
cgttggagacttctgtggaggtgccttcctagtagggcagatgtttaccttccagccgcgtcgtcattggactgtccaag

SEQ ID NO: 140868 - DNA, 80 bp, synthetic construct
  source 1..80: mol_type = other DNA
tcttacgccatcacaacatggtgtatgccacgaccacccgttctgccgtaacccggcagaagaaggtgacctttgaccgc

SEQ ID NO: 140869 - DNA, 80 bp, synthetic construct
  source 1..80: mol_type = other DNA
ccaaggtttgtccgctgtggtttttcggagcgatatagaatttgcctaaaaattgcatgagagttagaggaaatggtagg

SEQ ID NO: 140870 - DNA, 80 bp, synthetic construct
  source 1..80: mol_type = other DNA
tacaaaatacattgtcaaatgggagtgggtggtccttcttttcctgctcctcgcggacgctagagtctgcgcatgcttgt

SEQ ID NO: 140871 - DNA, 80 bp, synthetic construct
  source 1..80: mol_type = other DNA
tactgcctcacggtgggcagcgttgtcatctgcggtaggattgtaacgtctggcaagcccgtattggtgcctgatcggga

SEQ ID NO: 140872 - DNA, 80 bp, synthetic construct
  source 1..80: mol_type = other DNA
tggtagtgatgggtgttggtatcccatggaaattaggccaaggaaaacgcatgaaagccatctggtgcgctcctgggtta

SEQ ID NO: 140873 - DNA, 80 bp, synthetic construct
  source 1..80: mol_type = other DNA
ctaccaagccactgtgtgcgcccgcgcgcaggctcctcccccaagttgggacgagacgtggaaatgtctcgtacggctta

SEQ ID NO: 140874 - DNA, 80 bp, synthetic construct
  source 1..80: mol_type = other DNA
agttcagctggtgaggatgatggaaggagagggggttataggaccagaagacctggagaagttgggaaaaggaaaaggcg

SEQ ID NO: 140875 - DNA, 80 bp, synthetic construct
  source 1..80: mol_type = other DNA
cgcgcgtgcgtgccccgcgatgcgcttcccaggactggcggaccgtggcgcgacgggcctccgcagcagcgcgcagctgg

SEQ ID NO: 140876 - DNA, 80 bp, synthetic construct
  source 1..80: mol_type = other DNA
caattgcaaccataacacctcaagctcccacgtcggaaatacagctgactgactacggagccctcacactggactgctca

SEQ ID NO: 140877 - DNA, 80 bp, synthetic construct
  source 1..80: mol_type = other DNA
caggacaaaacgacggtgaaggagtggcgagacatcccttacctgaccaagagacaggacaagctttgtggatcactgat

SEQ ID NO: 140878 - DNA, 80 bp, synthetic construct
  source 1..80: mol_type = other DNA
taccatcgctcccgggcatccccctactctcttgccagaaggggtataaggtggcctggaaggtggatggcgtgatgacc

SEQ ID NO: 140879 - DNA, 80 bp, synthetic construct
  source 1..80: mol_type = other DNA
tttttttttttgtttgttttctttccttttttatttttaaatctttggtggctccatcttagccctagtcacggctagct

SEQ ID NO: 140880 - DNA, 80 bp, synthetic construct
  source 1..80: mol_type = other DNA
gacacggagagaaaagagtgctcaaaccgaggtggatggacgccagagtttgttcagatcatgcggccctgaagtcattc

SEQ ID NO: 140881 - DNA, 80 bp, synthetic construct
  source 1..80: mol_type = other DNA
accggccttacacatatagatgcccatttcctttcccagacgaagcaggcgggagacaactttgcgtacttagtggccta

SEQ ID NO: 140882 - DNA, 80 bp, synthetic construct
  source 1..80: mol_type = other DNA
attgaacgacctaacgccagtgggcagattggtcactgtcaacccttttgtttcagtggccacggccaacgctaaggtcc

SEQ ID NO: 140883 - DNA, 80 bp, synthetic construct
  source 1..80: mol_type = other DNA
actttttactaactaaccgtcgccagcaagtgcctcctcagtacactttaaatgcggaagaagaacgcatattgcgttat

SEQ ID NO: 140884 - DNA, 80 bp, synthetic construct
  source 1..80: mol_type = other DNA
ggatgagctcccgcgcgccccggaactcctccatcgcccatggggccaggtccccggccaccgcgtcgaattccgccaac

SEQ ID NO: 140885 - DNA, 80 bp, synthetic construct
  source 1..80: mol_type = other DNA
taggcatctttttgctcccagctcggtaggctgagagcttaacactccaaacatctgtttttttttttgttgcttttttt

SEQ ID NO: 140886 - DNA, 80 bp, synthetic construct
  source 1..80: mol_type = other DNA
atgatgcagggcaaaacgtggtttgctgctctatgtcttactcttggaccggcgctttgataactccatgcagcgccgag

SEQ ID NO: 140887 - DNA, 80 bp, synthetic construct
  source 1..80: mol_type = other DNA
ctgattgaggtcctaggaagaatgcccgaacacttcatggggaaaacatgggaggcactcgacaccatgtacgtcgtggc

SEQ ID NO: 140888 - DNA, 80 bp, synthetic construct
  source 1..80: mol_type = other DNA
accatccatggacaatggactctgtggaatatgtgctcccaggtgggcaaatcaagaccacgcctgcaaccttgacgtca

SEQ ID NO: 140889 - DNA, 80 bp, synthetic construct
  source 1..80: mol_type = other DNA
accccgcgcgttggggtgtagagcgctgcatcggcggcgtatccatcgcactggggtgaatttagacgtacccgagtttt

SEQ ID NO: 140890 - DNA, 80 bp, synthetic construct
  source 1..80: mol_type = other DNA
cagtgggctcccattcattgttttttaccccggcgtacgactccacgtaggctctcaaaaaacgtcccatcatttccaca

SEQ ID NO: 140891 - DNA, 80 bp, synthetic construct
  source 1..80: mol_type = other DNA
cggtgggggcgtcaacaggtcgctctaccctagggattacgtcctttttttcacctggtgcggctcagaagatccaactc

SEQ ID NO: 140892 - DNA, 80 bp, synthetic construct
  source 1..80: mol_type = other DNA
gcggtggtcagatcgtgggtggagtttacttgttaccgcgcaggggccctcgtttgggtgtgcgcgcgacgaggaagact

SEQ ID NO: 140893 - DNA, 80 bp, synthetic construct
  source 1..80: mol_type = other DNA
gcgccagggccaaagcccctcccccctcttgggacaccatgtggaagtgtctcatcagactaaaacccaccctgactgga

SEQ ID NO: 140894 - DNA, 80 bp, synthetic construct
  source 1..80: mol_type = other DNA
ccatgtatgtaggcgatttgtgtggtggcatctttttagccggacagctcctcacatttcgcccccgtgtgcatgaaact

SEQ ID NO: 140895 - DNA, 80 bp, synthetic construct
  source 1..80: mol_type = other DNA
gcgccggtaaaacaaggaggattctgccacagatcatcaaagaggccataaacagaagactgagaacagccgtgctagca

SEQ ID NO: 140896 - DNA, 80 bp, synthetic construct
  source 1..80: mol_type = other DNA
gaagcccgccgccgccgccgccccgttgccgtcggcggcggcgtcgccggccgacgagcgcgcggtgcccgccggctacg

SEQ ID NO: 140897 - DNA, 80 bp, synthetic construct
  source 1..80: mol_type = other DNA
acagtagatgcggctatgttacctgcacttacacataaattttttgagttggtcaacggcccattgtttaatcacgatga

SEQ ID NO: 140898 - DNA, 80 bp, synthetic construct
  source 1..80: mol_type = other DNA
aatcttgcacttggcccgagacacacactctttggggtgacggtgttgaggagagcgagcttatcatcccacacaccata

SEQ ID NO: 140899 - DNA, 80 bp, synthetic construct
  source 1..80: mol_type = other DNA
tcatgggcggacgtcaaaaaagatctaatatcatatggaggaggctggaagttagaaggagaatggaaggaaggagaaga

SEQ ID NO: 140900 - DNA, 80 bp, synthetic construct
  source 1..80: mol_type = other DNA
taccgatgacacgcacggttccgttataatcaaactcacatccgatagcggtttggctccaaaaaacaacggagtgtcgt

SEQ ID NO: 140901 - DNA, 80 bp, synthetic construct
  source 1..80: mol_type = other DNA
gtgttccagcagcggccgccagcatgcccgcgcgtctgccggggcgatggccgttcccgacaacagaaacgccgccatgg

SEQ ID NO: 140902 - DNA, 80 bp, synthetic construct
  source 1..80: mol_type = other DNA
gcgcagacgtgatccccgtgcgccggagggtggacactcggggcgccctcttaagccccaagccaattgccacccttaag

SEQ ID NO: 140903 - DNA, 80 bp, synthetic construct
  source 1..80: mol_type = other DNA
tgactcgtttgaccccatcgtgcctgaatatgatgaccgagagatgtcagtagctgctgaatgtcaccgaccgcctcggc

SEQ ID NO: 140904 - DNA, 80 bp, synthetic construct
  source 1..80: mol_type = other DNA
tacaggacatgggcctaccatgggagctacgaagcccccacgcaggggtcagcgtcatccctcgtgaacggggttgttag

SEQ ID NO: 140905 - DNA, 80 bp, synthetic construct
  source 1..80: mol_type = other DNA
gctcaaatgtatctgcggcgctggctgcgctagcggagaaatcattcccaccctcgaagccgcaggaagagaatagctca

SEQ ID NO: 140906 - DNA, 80 bp, synthetic construct
  source 1..80: mol_type = other DNA
ccgtcatctttagtcctatggagattaaggttatcacctggggtgcagacacagcagcctgcggagacatcttgtgcggg

SEQ ID NO: 140907 - DNA, 80 bp, synthetic construct
  source 1..80: mol_type = other DNA
gcaggtgttctgtggtagaaggcaaaactaacatgaaacaaggctaaaagtcaggtcggattaagccatagtacgggaaa

SEQ ID NO: 140908 - DNA, 80 bp, synthetic construct
  source 1..80: mol_type = other DNA
agttccgccagccaactacaagcgggctttgtggcgtgtctcagcgtccgagtacgttgagatactgcaacatggcggtt

SEQ ID NO: 140909 - DNA, 80 bp, synthetic construct
  source 1..80: mol_type = other DNA
cggcccgagggcaggtcctgggcgcagcctgggtatccttggcccctttatggcaatgagggctgtgggtgtgcagggtg

SEQ ID NO: 140910 - DNA, 80 bp, synthetic construct
  source 1..80: mol_type = other DNA
gacaaggaggtcctgtatgaggcgtttgatgaaatggaagaatgtgcctccagggctgccctcatcccagagagccaccg

SEQ ID NO: 140911 - DNA, 80 bp, synthetic construct
  source 1..80: mol_type = other DNA
gcagctttcaaatcactgtttggaggaatgtcctggttctcacagatcctcataggcacactgttggtgtggttaggttt

SEQ ID NO: 140912 - DNA, 80 bp, synthetic construct
  source 1..80: mol_type = other DNA
tgtcaatgttggcctccgcgaccaggagagcggcgcgaggggcggcgggcgggccccacgacgctctctcaactttcacc

SEQ ID NO: 140913 - DNA, 80 bp, synthetic construct
  source 1..80: mol_type = other DNA
agcctcagacgaagacctccgttcagagactggatcacactcctccatgccccctctggaaggggaacccggagatcctg

SEQ ID NO: 140914 - DNA, 80 bp, synthetic construct
  source 1..80: mol_type = other DNA
cgaagatgacatcttccgaaaaaaaagattgaccatcatggacctccatccaggagcaggaaagacaaaaagataccttc

SEQ ID NO: 140915 - DNA, 80 bp, synthetic construct
  source 1..80: mol_type = other DNA
cagcagcacagccgctccagaacctaaccttccttctgatactatcaaacctcgtttcggaggtgagctaaggcttcccc

SEQ ID NO: 140916 - DNA, 80 bp, synthetic construct
  source 1..80: mol_type = other DNA
agccgcgccatctggtatatgtggctaggggctagatttctagagttcgaagcccttggattcttgaacgaggatcactg

SEQ ID NO: 140917 - DNA, 80 bp, synthetic construct
  source 1..80: mol_type = other DNA
aagacatccaagagtggaaaccgtcaactggatggtatgattggcagcaggttccattttgctcaaaccatttcactgaa

SEQ ID NO: 140918 - DNA, 80 bp, synthetic construct
  source 1..80: mol_type = other DNA
gccggtgcctccgagtctacggaacgtgctggcggcggttaaaaattgttaccccgacgcgcgcatgagcggccgcggct

SEQ ID NO: 140919 - DNA, 80 bp, synthetic construct
  source 1..80: mol_type = other DNA
aggctgcacaacccgaggtcgagaagcctcagaagaaaccggtgattaaacccctgacagaggacagcaagaaacgcagt

SEQ ID NO: 140920 - DNA, 80 bp, synthetic construct
  source 1..80: mol_type = other DNA
aaatccccctggcccgtgcggcctgggagactgctcgccacactccggtaaactcctggttggggaacattatcatgtac

SEQ ID NO: 140921 - DNA, 80 bp, synthetic construct
  source 1..80: mol_type = other DNA
cagcctcagcatggacactctatgcggtagccaccaccattctgactcccatgctgagacacaccatagaaaacacgtct

SEQ ID NO: 140922 - DNA, 80 bp, synthetic construct
  source 1..80: mol_type = other DNA
atcaagtgggagtatgtggtcctggccttcctcgtcctggcggacgcccgcgtttgcgcgtgtctttggcttatgctcct

SEQ ID NO: 140923 - DNA, 80 bp, synthetic construct
  source 1..80: mol_type = other DNA
ggtgtttgtggtcctgtctactgttttacaccgagccccgtagtgctgggcaccactgaccggctaggtaaccccactta

SEQ ID NO: 140924 - DNA, 80 bp, synthetic construct
  source 1..80: mol_type = other DNA
agcaccctgctgcccccggagctgtccgagacccccaacgccacgcagccagaactcgccccggaagaccccgaggattc

SEQ ID NO: 140925 - DNA, 80 bp, synthetic construct
  source 1..80: mol_type = other DNA
ggcaatgagatcttgcttggcccggctgactcggagaccagcaaaggatggaggctccttgctcccatcaccgcgtacgc

SEQ ID NO: 140926 - DNA, 80 bp, synthetic construct
  source 1..80: mol_type = other DNA
acgggaaagacgatatcgggcttttgatgcgatcgtccccgcccgcccagagagtgtgggacgcccgacggcgcgggaag

SEQ ID NO: 140927 - DNA, 80 bp, synthetic construct
  source 1..80: mol_type = other DNA
tggaggcaagagatagggggcaacattacccgggtagagtctgaaaacaaagtgatcgttctcgactcctttgaccctct

SEQ ID NO: 140928 - DNA, 80 bp, synthetic construct
  source 1..80: mol_type = other DNA
ctctgtcacacaatccttcttgggaacatccatttcgggggtcctctggacagtgtatcacggagccggtaataagaccc

SEQ ID NO: 140929 - DNA, 80 bp, synthetic construct
  source 1..80: mol_type = other DNA
ataaccataattctctaaaccgttgtagaaaatcacaaaaaaatttattcaaaaacaagtcgaagaacttcatatctgag

SEQ ID NO: 140930 - DNA, 80 bp, synthetic construct
  source 1..80: mol_type = other DNA
tgtcagggctgtggaggacgggataaattatgcaacggggaatcttcctggttgctctttctctatcttcctcttggcca

SEQ ID NO: 140931 - DNA, 80 bp, synthetic construct
  source 1..80: mol_type = other DNA
taatcatatccatctttactcttactccagcatacaaagttctcctgggccgttcggtgtggtggctgtcctacatgctg

SEQ ID NO: 140932 - DNA, 80 bp, synthetic construct
  source 1..80: mol_type = other DNA
caaagcacatggaatcaaccccaacatcaggaccggggttcggactgtgacaactggggagtccatcacatactccacct

SEQ ID NO: 140933 - DNA, 80 bp, synthetic construct
  source 1..80: mol_type = other DNA
tggacagcacaaaagccacgagatatctggtgaagacagaatcatggatactgagaaacccgggctacgccctcgttgca

SEQ ID NO: 140934 - DNA, 80 bp, synthetic construct
  source 1..80: mol_type = other DNA
gaacaaaacccatgaaaggacatacatgggttataatagacagagtactcataaggaagactataaagtcatagttatac

SEQ ID NO: 140935 - DNA, 80 bp, synthetic construct
  source 1..80: mol_type = other DNA
gataaacaattggaaattgcactggctgatccatttgaagtcagtaaaggcaggcttggtataaaagcaggtcatggatt

SEQ ID NO: 140936 - DNA, 80 bp, synthetic construct
  source 1..80: mol_type = other DNA
tgttccgggacaggtttccctgcctttacgcccccgcgacctcttatgcggaggcgaacgccacggtcgaggtgcgcggg

SEQ ID NO: 140937 - DNA, 80 bp, synthetic construct
  source 1..80: mol_type = other DNA
ccaatggatcaacgaggactatccaagcccttgtgctggtgactggctatatgacatctggaactggatctgcactgtgc

SEQ ID NO: 140938 - DNA, 80 bp, synthetic construct
  source 1..80: mol_type = other DNA
agtaagtggagtgaatgtgagagaggctgagtgcttaacacataactgtaatgcttgaacagctgtgctaagtgtggttt

SEQ ID NO: 140939 - DNA, 80 bp, synthetic construct
  source 1..80: mol_type = other DNA
ctgctgcacgaaggccaggattagggcctcgcggctggtggcggcgaaccgcccgtctcccgcgttgcacgcgggacagc

SEQ ID NO: 140940 - DNA, 80 bp, synthetic construct
  source 1..80: mol_type = other DNA
gcttatgcctatgacaatgagcaaggagcgtccattgggatactggtgatcgtaggcatcaccatattcacaatgacccc

SEQ ID NO: 140941 - DNA, 80 bp, synthetic construct
  source 1..80: mol_type = other DNA
agcgaaagcattaagtggctcgctccctgtagccggagggttattttccaagggttgagtcgcgggacccccggttcgag

SEQ ID NO: 140942 - DNA, 80 bp, synthetic construct
  source 1..80: mol_type = other DNA
cgtactacgtacgcgcgcacgcattgcttcgcgcatgcgcgttggtgcggcgcgcggcgtggggacggtacgtgcaggcc

SEQ ID NO: 140943 - DNA, 80 bp, synthetic construct
  source 1..80: mol_type = other DNA
gctgttggagctgcgccagcaggtttctgccctgaaggcttcctcccctcccaatgcggtttaaaacataaataaaaacc

SEQ ID NO: 140944 - DNA, 80 bp, synthetic construct
  source 1..80: mol_type = other DNA
aaactgggttatattctgcgtgaagttggcacccgacctggaggcaagatctatgctgatgacacagctggctgggacac

SEQ ID NO: 140945 - DNA, 80 bp, synthetic construct
  source 1..80: mol_type = other DNA
gggagctgcagggcgcaccacgcacggcattgccagccttttcaacccagggtcgaagcagtccttgcaactcatcaaca

SEQ ID NO: 140946 - DNA, 80 bp, synthetic construct
  source 1..80: mol_type = other DNA
tgttaccagcaacacttgctttccacttgacttcacgcgatggagagccgcgcatgattgtggggaagaatgaaagaggg

SEQ ID NO: 140947 - DNA, 80 bp, synthetic construct
  source 1..80: mol_type = other DNA
agttctggtggagattgaaccacccttcggagactcatacattgtggtaggcaggggagacaagcagatcaatcaccact

SEQ ID NO: 140948 - DNA, 80 bp, synthetic construct
  source 1..80: mol_type = other DNA
atacatgtccccgttttttggcctacgggatggtgcatacagagaacattccaattatgcaatggatcgttttcaccagt

SEQ ID NO: 140949 - DNA, 80 bp, synthetic construct
  source 1..80: mol_type = other DNA
agtgacctctcactggcaaaaacttgaggtcttttggcacaagcacatgtggaacttcgtaagtggcatacaatacctag

SEQ ID NO: 140950 - DNA, 80 bp, synthetic construct
  source 1..80: mol_type = other DNA
catttcgcggttgggccttcacacgcttgaagacaaaggaaaccccttccctgggatcaggctacgacccttactacacc

SEQ ID NO: 140951 - DNA, 80 bp, synthetic construct
  source 1..80: mol_type = other DNA
tcgtatggggccttgctttcatatgtttcgcctggcatatacgggggcgtgccgttcctctcttcacctatgctttccta

SEQ ID NO: 140952 - DNA, 80 bp, synthetic construct
  source 1..80: mol_type = other DNA
tgcgcgcgagcaaaagctcctccgccctcgtgggacgttatgtggaaatgcctcacacggctaaagcctatgcttacggg

SEQ ID NO: 140953 - DNA, 80 bp, synthetic construct
  source 1..80: mol_type = other DNA
aaatgccagaattgagcttaacctggagggctcattaaacattgtccagacaaaacaaaattgaaaacacccccggagtg

SEQ ID NO: 140954 - DNA, 80 bp, synthetic construct
  source 1..80: mol_type = other DNA
tggggtacatacccgtcgttggcgccccggttggcggagttgccagagctcttgcacatggtgtgagggtcctggaagac

SEQ ID NO: 140955 - DNA, 80 bp, synthetic construct
  source 1..80: mol_type = other DNA
atgcctaacggttcgtacatcagcgccatcgtgcaaggtgagagaatggaagaaccggcaccagcaggctttgaaccaga

SEQ ID NO: 140956 - DNA, 80 bp, synthetic construct
  source 1..80: mol_type = other DNA
ggcccgcgcagcgcggggtgatcggcgagtattgtgtgcaggactcgctgctggtcgggcagctgttcttcaagtttctg

SEQ ID NO: 140957 - DNA, 80 bp, synthetic construct
  source 1..80: mol_type = other DNA
gctaagcttaggtctatgggccttaatgcagtcgccttctacaggggtgtagacgtctcggtcattcctacaatggagga

SEQ ID NO: 140958 - DNA, 80 bp, synthetic construct
  source 1..80: mol_type = other DNA
tacggggtcacctactccataactccacttgatcttccacagatcattcagaggttgcacggaatggccgctttttcact

SEQ ID NO: 140959 - DNA, 80 bp, synthetic construct
  source 1..80: mol_type = other DNA
ggacgacagggagatatccgtgggtgccgaatgtttcaacccccctcggccaaagttcccgcccgcgctgccagtctggg

SEQ ID NO: 140960 - DNA, 80 bp, synthetic construct
  source 1..80: mol_type = other DNA
tgagactgacgcttcccggaatgtcaccaacatcctatctagtcttaccatcaccagtttgctccgtagactccaccagt

SEQ ID NO: 140961 - DNA, 80 bp, synthetic construct
  source 1..80: mol_type = other DNA
acaaggtctttttctctgcaatggtacgcaaccctatggtggatggggacgtcatcaacccgttcagagagggagaggca

SEQ ID NO: 140962 - DNA, 80 bp, synthetic construct
  source 1..80: mol_type = other DNA
cgagctccccgcccccctaaagacgacagtcgcaccaccgctcgccctcgcagaccacacagtagcaccaagcacccgcc

SEQ ID NO: 140963 - DNA, 80 bp, synthetic construct
  source 1..80: mol_type = other DNA
acgccgaaccaccactggaacccgccgccgccgtcgccgtcgccagcccgtactggccccgatttccgtgcgcagggtgg

SEQ ID NO: 140964 - DNA, 80 bp, synthetic construct
  source 1..80: mol_type = other DNA
ctagccaactaccttgcctaccactccgacatcatggaagacgtgagcggtgacggcctactggagtgtcactgtcgctg

SEQ ID NO: 140965 - DNA, 80 bp, synthetic construct
  source 1..80: mol_type = other DNA
cgaggtcttccacacccgattctcggaggccggcgcgcgagaaccaacaggagccgatcgctccctcgagacagtctctc

SEQ ID NO: 140966 - DNA, 80 bp, synthetic construct
  source 1..80: mol_type = other DNA
gcgcggatctcccgcggtcacccttctccaacaaccccggccacacagactcccgaccctcagccgtcggccgccgcacg

SEQ ID NO: 140967 - DNA, 80 bp, synthetic construct
  source 1..80: mol_type = other DNA
ccttggatcactccgcgctgtttggtacacttcccctatcggctgtggatgttcccgtgcaccatcaacttcaccatcca

SEQ ID NO: 140968 - DNA, 80 bp, synthetic construct
  source 1..80: mol_type = other DNA
tcggcggctgcagcgcgccggccacccttatcccccgtgcggccgccaagcacctggccgctctgacacgcgtccaggcg

SEQ ID NO: 140969 - DNA, 80 bp, synthetic construct
  source 1..80: mol_type = other DNA
gatgtgcgctttggcaggaggtcttctcgagtttgaggaaacctcaatggtggtcccttttgcaatagccggactgatgt

SEQ ID NO: 140970 - DNA, 80 bp, synthetic construct
  source 1..80: mol_type = other DNA
aacagtacatatgccgcagagatgtggtagatcgaggatggggaaacggatgcggcttgttcgggaaaggagtggttgtt

SEQ ID NO: 140971 - DNA, 80 bp, synthetic construct
  source 1..80: mol_type = other DNA
acttggcagctccaggccgcggttctccacgtccccgggtgcgtcccgtgcgagaaagtgggaaacgggtctcggtgctg

SEQ ID NO: 140972 - DNA, 80 bp, synthetic construct
  source 1..80: mol_type = other DNA
cgcaaacatcacggacccctcggaagaccggccatactgctggcactatccacccaagccttgtaaaatagtccccgcga

SEQ ID NO: 140973 - DNA, 80 bp, synthetic construct
  source 1..80: mol_type = other DNA
gcccggggcttctttagtcttttcgcacccggtgctcgccaagacttacagcttatcaataccaacggcagctggcacat

SEQ ID NO: 140974 - DNA, 80 bp, synthetic construct
  source 1..80: mol_type = other DNA
ctggtcttggccgaggcccagatccagcaatgggttccccccctagaggctcgagggtggcgtgacggaatcatctggat

SEQ ID NO: 140975 - DNA, 80 bp, synthetic construct
  source 1..80: mol_type = other DNA
acgtgctcaacgagaccaccaactggttgtgggcgtttttggccagagaaaaacgtcccagaatgtgctctcgagaggaa

SEQ ID NO: 140976 - DNA, 80 bp, synthetic construct
  source 1..80: mol_type = other DNA
gctggcacctcaataggacggccttgaactgttttgacaatatccagacgggcttccttgcggccctgtttgccaccaca

SEQ ID NO: 140977 - DNA, 80 bp, synthetic construct
  source 1..80: mol_type = other DNA
gctcagattccggagttccgactgtcagtgttccctcttctgaagaacctgacgatgactccgtggtgtctgatgccgag

SEQ ID NO: 140978 - DNA, 80 bp, synthetic construct
  source 1..80: mol_type = other DNA
aggtcccgctgacggctacacctccaaagggtggagactcctcgctcccattaccgcttacgcccagcagacacgtggcc

SEQ ID NO: 140979 - DNA, 80 bp, synthetic construct
  source 1..80: mol_type = other DNA
tgaagcgcccgacacccatttggtgtacaagccagatgtagctcagggaaccataagttcggcagatcttttaacgcagc

SEQ ID NO: 140980 - DNA, 80 bp, synthetic construct
  source 1..80: mol_type = other DNA
agacaagagttgaggtgtggaagcggagtgtttatacacaatgatgtggaagcctgggtggatagatacaaattccatcc

SEQ ID NO: 140981 - DNA, 80 bp, synthetic construct
  source 1..80: mol_type = other DNA
tatatccgccctcacagaaagactctatgtgggtggccccatgtacaacagcaggggagacctatgcgggcttcggaggt

SEQ ID NO: 140982 - DNA, 80 bp, synthetic construct
  source 1..80: mol_type = other DNA
acccaaacgcacgaaacaaatgctggcagtgtgccgaatataaccccgcgtaggaacacgtcgacgcgtgcgccaaacag

SEQ ID NO: 140983 - DNA, 80 bp, synthetic construct
  source 1..80: mol_type = other DNA
caagcacaggctatcgctcagcaattcaaggacaaagtcctcggcttgctgcaaagggcgagccaacaagaagctgaaat

SEQ ID NO: 140984 - DNA, 80 bp, synthetic construct
  source 1..80: mol_type = other DNA
gcacatacccgcggacgcactggtcgcaccactgtggacgatgttatcgactcggtcgtagccgatgctcgaaaataccg

SEQ ID NO: 140985 - DNA, 80 bp, synthetic construct
  source 1..80: mol_type = other DNA
attacgcgcgttacagtatcttcataataacagtattattcaccgtgatataaaatctgaaaatatatttattaaccacc

SEQ ID NO: 140986 - DNA, 80 bp, synthetic construct
  source 1..80: mol_type = other DNA
caccgcagtatctgaacgtaatcagatatgcaagggcaacatctatgccatggagatcaacctccaggccaacctgtgga

SEQ ID NO: 140987 - DNA, 80 bp, synthetic construct
  source 1..80: mol_type = other DNA
cttgtgagatcgctgaagcgttaaaaggactgccaatccgttacctaacaccagccgtgaggaatgaacatcagggcaat

SEQ ID NO: 140988 - DNA, 80 bp, synthetic construct
  source 1..80: mol_type = other DNA
ggagtattaatggacagttcgacacttaagaaagaatattggaactacagaaatgataattctactgtatctcaggccta

SEQ ID NO: 140989 - DNA, 80 bp, synthetic construct
  source 1..80: mol_type = other DNA
gacgggctacaccggcgactttgactcagtgatcgactgtaacaactgtgtcacccagacagtcgatttcagcttggatc

SEQ ID NO: 140990 - DNA, 80 bp, synthetic construct
  source 1..80: mol_type = other DNA
aacgccctgcaagcagaaaacaagcaaaatcaaagtgcgctcatagaactagaaggtgacaatgcccgtttggccatttt

SEQ ID NO: 140991 - DNA, 80 bp, synthetic construct
  source 1..80: mol_type = other DNA
ctagaagaggcatgcgctttgacccccccccactctgcaagatcgaagcatgggtacggggctaaggaggtccgcagctt

SEQ ID NO: 140992 - DNA, 80 bp, synthetic construct
  source 1..80: mol_type = other DNA
cataccgttggaatacatcaaggggggaagacacttgattttctgccattcgaagaagaaatgcgacgagctggcgaagc

SEQ ID NO: 140993 - DNA, 80 bp, synthetic construct
  source 1..80: mol_type = other DNA
atggtttatccgcgggtcaaccgattccaaagaactcgccgctaaagatatacacatatgggatatatacggatcgagca

SEQ ID NO: 140994 - DNA, 80 bp, synthetic construct
  source 1..80: mol_type = other DNA
ccttccttgtgttcttttgtgccgcctggtacatcaagggtaggctggtccctggggcggcatacgctctctatggcgta

SEQ ID NO: 140995 - DNA, 80 bp, synthetic construct
  source 1..80: mol_type = other DNA
tgctccgtcagaagaaggtcacttttgacagacaacaggtagttgaccaatactatcatgatgctctcaaggaggtgaag

SEQ ID NO: 140996 - DNA, 80 bp, synthetic construct
  source 1..80: mol_type = other DNA
ctcctctgcccatcaggccacgttgtcgggttgttccgtgcggccgtctgtacgcgcggcgttgccaaagctctcgagtt

SEQ ID NO: 140997 - DNA, 80 bp, synthetic construct
  source 1..80: mol_type = other DNA
ctcaaagaccctggcgggccccaaggggcccatctgccaaatgtacaccaatgtggaccaggacatggtcggctggccag

SEQ ID NO: 140998 - DNA, 80 bp, synthetic construct
  source 1..80: mol_type = other DNA
ctacaacactcctccttaacatcttaggaggatggtttgcatcccaactagcaccgcccaccgcgtctacggcgtttgtt

SEQ ID NO: 140999 - DNA, 80 bp, synthetic construct
  source 1..80: mol_type = other DNA
caaacagatctgcgtctccggtctcgtcgcttagctcgctctgtgtagtagttgtagtatatccactctctcaaagcatc

SEQ ID NO: 141000 - DNA, 80 bp, synthetic construct
  source 1..80: mol_type = other DNA
ccagcagctccacgatggctcgcttggtgaggtttttaacgcgccccgccccgggaaacgtctgcgtgctcttggccagc

SEQ ID NO: 141001 - DNA, 80 bp, synthetic construct
  source 1..80: mol_type = other DNA
tcgtctgaacgcggccggggtcgctactcgaaggggcgacgggggcgggaagccgagcgggggggggcccgttcggtcgg

SEQ ID NO: 141002 - DNA, 80 bp, synthetic construct
  source 1..80: mol_type = other DNA
acacgccagggaacctaggctgatctctgcgtatctgtcggatatggtttcgtgcacccaaccatcggtgatggtatcac

SEQ ID NO: 141003 - DNA, 80 bp, synthetic construct
  source 1..80: mol_type = other DNA
tgccggtggacgcgcaccgcgcgccccggtcgcgcatgacccaggctcagaccgacacccaagcacagagtctgggccgg

SEQ ID NO: 141004 - DNA, 80 bp, synthetic construct
  source 1..80: mol_type = other DNA
gtgggcgagggtgatactgttgacccattttttcagtgtccttatagccagggatcagcttgaacaggccctagattgtg

SEQ ID NO: 141005 - DNA, 80 bp, synthetic construct
  source 1..80: mol_type = other DNA
tatgatgtaacccaacagggacacgagctgtcatatactttaaacaagcaaaagggaacttctcccctttaattaaagtt

SEQ ID NO: 141006 - DNA, 80 bp, synthetic construct
  source 1..80: mol_type = other DNA
ccctcggaggcgaaaagctcccgtcacgctgaacgaaagcaacatagcgtcagctctctccgagctggctcaaaagtgct

SEQ ID NO: 141007 - DNA, 80 bp, synthetic construct
  source 1..80: mol_type = other DNA
ccgtcccttcggcgtgcaacaggcccccgaacctgccctcgtggcccgcgaggctttcccgcgcgccggtggtcgcgcgc

SEQ ID NO: 141008 - DNA, 80 bp, synthetic construct
  source 1..80: mol_type = other DNA
ctatacctgggaggaaaatgagactgatgtcttcatattaaattccaccagacctcccggcggtgggtggtttgggtgca

SEQ ID NO: 141009 - DNA, 80 bp, synthetic construct
  source 1..80: mol_type = other DNA
gcggtccgcttctgtgtcgatcgggccatgtagtagggctgttccgtgccgcagtctgcactcgtggggtggcgaaagca

SEQ ID NO: 141010 - DNA, 80 bp, synthetic construct
  source 1..80: mol_type = other DNA
ggcggcagtacttgtaacggtggaactggagtgcatgcaccgttttttttccaacgttagcacgttgcgcaaaattgaag

SEQ ID NO: 141011 - DNA, 80 bp, synthetic construct
  source 1..80: mol_type = other DNA
atctgaccgattgtttatgacctgcgcggcaagaactatttcatcaaatccattaatattgtgccccactatgtataact

SEQ ID NO: 141012 - DNA, 80 bp, synthetic construct
  source 1..80: mol_type = other DNA
ccctccatccccgagctcgcagcagcccctccctcccgcgccccgtgccttccctcccgctcctgcggtgtggctcgggc

SEQ ID NO: 141013 - DNA, 80 bp, synthetic construct
  source 1..80: mol_type = other DNA
ccacctggtactaaatctctgacaccttgtacttgtggagccagcgacctgtatctggtgaccaggaacgctgacgtcat

SEQ ID NO: 141014 - DNA, 80 bp, synthetic construct
  source 1..80: mol_type = other DNA
gaggccccatactatgcccatccggccacgctgtgggagttttccgcgcagcagtgtgcactaggggtgtggcaaagtcc

SEQ ID NO: 141015 - DNA, 80 bp, synthetic construct
  source 1..80: mol_type = other DNA
ttctacgggtggcataacctcacttttcagccctggggccaagcagaatatacagctcataaacaccaacgggagctggc

SEQ ID NO: 141016 - DNA, 80 bp, synthetic construct
  source 1..80: mol_type = other DNA
gcgttttgaacccgccgccgagcccgtgtgcgagctgccctgtctgaacgccaggcgttacggccccgagtgtgatgttg

SEQ ID NO: 141017 - DNA, 80 bp, synthetic construct
  source 1..80: mol_type = other DNA
caagcgcaaaatcaaagaagagatgctccaggtcatcgcgccggagatctatggccccccgaagaaggaagagcaggatt

SEQ ID NO: 141018 - DNA, 80 bp, synthetic construct
  source 1..80: mol_type = other DNA
aacatgggaacattacaatggaaatgatttaacctccctctttatccaattaaagcccacacgcgggtgagtgtacgtaa

SEQ ID NO: 141019 - DNA, 80 bp, synthetic construct
  source 1..80: mol_type = other DNA
aatgggtctatgagactggtaggacctaagacttgcgccaatacgtggcgcggtacttttcccatcaacgcccacaccac

SEQ ID NO: 141020 - DNA, 80 bp, synthetic construct
  source 1..80: mol_type = other DNA
cagccgtagcggcgttagccgagatggctgaaaaggcatttccatccagcccatctcatgaccatactgactccgggaag

SEQ ID NO: 141021 - DNA, 80 bp, synthetic construct
  source 1..80: mol_type = other DNA
aacgaggcaaacgctattcaacctaaactagtgttgtacagtgaagatgtaaatatggaaaccccagacactcatctttc

SEQ ID NO: 141022 - DNA, 80 bp, synthetic construct
  source 1..80: mol_type = other DNA
ggtaaccgcccttgtgatgggaaaggccgtccgcggaatggatgatgtagcccgccatctccttgatataaccgacccta

SEQ ID NO: 141023 - DNA, 80 bp, synthetic construct
  source 1..80: mol_type = other DNA
tggctgcaacaatagcagccaatgaaatgggactgctggaaaccacaaagagagacttaggaatgtctaaggagccaggt

SEQ ID NO: 141024 - DNA, 80 bp, synthetic construct
  source 1..80: mol_type = other DNA
tccgtcgcggtgacggagacctccgcaaagcgcgcgcgaccctcccctgcggcgttgcgacatacaaaatacaccagggc

SEQ ID NO: 141025 - DNA, 80 bp, synthetic construct
  source 1..80: mol_type = other DNA
tcttcatagccgcctggtgcatcaagggccgtgtggtcccgatggcaacatactccctgttaggatgttggtcctttgtt

SEQ ID NO: 141026 - DNA, 80 bp, synthetic construct
  source 1..80: mol_type = other DNA
ttttgcagaacgaaatgaaataggggtgggaaataactttgccatggaaattaacctgaatgccaacctatggagaaatt

SEQ ID NO: 141027 - DNA, 80 bp, synthetic construct
  source 1..80: mol_type = other DNA
gtgggacaccatgtggaaatgcctcatccgcctcaaacctacactgcaagggccaaccccccttctctacagattggagg

SEQ ID NO: 141028 - DNA, 80 bp, synthetic construct
  source 1..80: mol_type = other DNA
tgtttctgaggagccttcaggattacaagattcaaagtgcgctgctggtgccaaccctattctccttcttcgccaaaagc

SEQ ID NO: 141029 - DNA, 80 bp, synthetic construct
  source 1..80: mol_type = other DNA
agcgcgcagcagcgacggggaaatggtcgcacccgacgcaccatccatgaggcagcaattcgtgagaccccccctggcca

SEQ ID NO: 141030 - DNA, 80 bp, synthetic construct
  source 1..80: mol_type = other DNA
aaagatcatgttagataatatccacctcccaaatgggcttgttgcacaaatgtatgggccagaaagagacaaagccttca

SEQ ID NO: 141031 - DNA, 80 bp, synthetic construct
  source 1..80: mol_type = other DNA
cgacgcgagtcgccaccggaagctgagtagacggtgctgcctgcgcctcagccccaggaggactgggttaacaaatctga

SEQ ID NO: 141032 - DNA, 80 bp, synthetic construct
  source 1..80: mol_type = other DNA
gtggatgccaacctcttcatgggaggcgatgtgacccggattgagtccgactctaaagtgatcattctcgactcccttga

SEQ ID NO: 141033 - DNA, 80 bp, synthetic construct
  source 1..80: mol_type = other DNA
acgcaacggggagaagcgttccatggcgggcacgctttgaccagtcagacgggcgcaatcttgtacgctctagatgaaaa

SEQ ID NO: 141034 - DNA, 80 bp, synthetic construct
  source 1..80: mol_type = other DNA
tgaggcacgaatcatgctggacaacatcaacatgccaaatggactgatcgctcaattttaccaaccagagcgtgagaagg

SEQ ID NO: 141035 - DNA, 80 bp, synthetic construct
  source 1..80: mol_type = other DNA
gttcctggttgaaagacatatgggactgggtatgtgaggtgatgagcgactttgcaacctggctcaaggccaaggtcatg

SEQ ID NO: 141036 - DNA, 80 bp, synthetic construct
  source 1..80: mol_type = other DNA
aaacaactgtcaggctgagggcctatctgaacactcctggccttcccgtatgccaagaccacctggagttttgggaaggc

SEQ ID NO: 141037 - DNA, 80 bp, synthetic construct
  source 1..80: mol_type = other DNA
tttttccttttgagatgcgtttgcagctgggacactgaaggcatttaagggcgtatagttttggagccaaaaacacagat

SEQ ID NO: 141038 - DNA, 80 bp, synthetic construct
  source 1..80: mol_type = other DNA
ggaaagaaaaatatgtagactacatgcagtcgctgaggaggtatgaagaaactcatgtgagtgaagatagggtcttgtaa

SEQ ID NO: 141039 - DNA, 80 bp, synthetic construct
  source 1..80: mol_type = other DNA
ggccaccgcatggcgtgggatatgatgatgaactggtctccgaccgcgacgttgatcgtgtcctatgctatgcgggtgcc

SEQ ID NO: 141040 - DNA, 80 bp, synthetic construct
  source 1..80: mol_type = other DNA
ggacgaagtgactttctctgtgggtctctcaaactatgccgtagggtcgcagctcccttgcgagccagagcctgacgtga

SEQ ID NO: 141041 - DNA, 80 bp, synthetic construct
  source 1..80: mol_type = other DNA
taacagcgggcaggaggctgaggaaatgagagactgtagatttagggccggccgcgagctgcgttgcggacttaatcgcg

SEQ ID NO: 141042 - DNA, 80 bp, synthetic construct
  source 1..80: mol_type = other DNA
gggtttgtgagaagcgggctttgtatgacatagcccaacagcttccaacggccgttatggaggctgcgtacgggtttcaa

SEQ ID NO: 141043 - DNA, 80 bp, synthetic construct
  source 1..80: mol_type = other DNA
cggaaatgacatagcaaactgcctgcgaaaaaatggaaaaaaggtcatccaacttagtaggaagacttttgatacagaat

SEQ ID NO: 141044 - DNA, 80 bp, synthetic construct
  source 1..80: mol_type = other DNA
cggcacatactcccgagtatatacaaagctattatttttatagccaatgaaattagcctttgcgtcgaacaaacggcctt

SEQ ID NO: 141045 - DNA, 80 bp, synthetic construct
  source 1..80: mol_type = other DNA
ggcaacaccctaacatgctacctgaaggcacaagcagcatgcagggcagctaaactcaaagactttgacatgttggtctg

SEQ ID NO: 141046 - DNA, 80 bp, synthetic construct
  source 1..80: mol_type = other DNA
ccgggcgaaggggccgtgcagtggatgaaccgtctaattgcgttcgcatcgcgaggcaatcacgtgtctcccacgcatta

SEQ ID NO: 141047 - DNA, 80 bp, synthetic construct
  source 1..80: mol_type = other DNA
tgccttcaaccgaatatgttattcggagtcgggtggctcgagaggtgggggatatattaaaggtgccttgtgtgccgctc

SEQ ID NO: 141048 - DNA, 80 bp, synthetic construct
  source 1..80: mol_type = other DNA
catggaagctagatgccgcctgggacgggcacagcgaggtgcagctcttggccgtgccccccggagagagagcgaggaac

SEQ ID NO: 141049 - DNA, 80 bp, synthetic construct
  source 1..80: mol_type = other DNA
attcgcggcggtcattaaccggttcctggacctgcaccagattctgcggggctgacgcgcgtgctgttgggcgtgacggt

SEQ ID NO: 141050 - DNA, 80 bp, synthetic construct
  source 1..80: mol_type = other DNA
tttgattctacttcatttaccttctcctatatcgcccaagaatgaaagaccaataaacatgttctcatttgaaaattttc

SEQ ID NO: 141051 - DNA, 80 bp, synthetic construct
  source 1..80: mol_type = other DNA
acctctcgagggcgaaccaggcgacccggatctccttgaggaggggagcgctgggtcgtggtccactatcgaggacgaag

SEQ ID NO: 141052 - DNA, 80 bp, synthetic construct
  source 1..80: mol_type = other DNA
tgtaaagccgaaacagaaaaggactcaaagcttactttggttctaacaaaatgcggaagtcaaatcttagctactgtgtc

SEQ ID NO: 141053 - DNA, 80 bp, synthetic construct
  source 1..80: mol_type = other DNA
tctaaccaagtcgactcccttcattaaaacctttccgccgtaaattaccccaatgtactttttctttgttataagtaaaa

SEQ ID NO: 141054 - DNA, 80 bp, synthetic construct
  source 1..80: mol_type = other DNA
ctcatgtgtcacgccactttcactatgcgcctcttgtctcccgtgagagttcccaattacaacatgattatcatggatga

SEQ ID NO: 141055 - DNA, 80 bp, synthetic construct
  source 1..80: mol_type = other DNA
ccatcaggcatgtttgacactgcagagctttgcgagtgctacgatgccgggtgcgcctggtacgagctgacacctgctga

SEQ ID NO: 141056 - DNA, 80 bp, synthetic construct
  source 1..80: mol_type = other DNA
cgagcgaaaacggtctgcgctgcgggacgcgcgaattgaattatggcccacaccagtggcgcggcgacttccagttcaac

SEQ ID NO: 141057 - DNA, 80 bp, synthetic construct
  source 1..80: mol_type = other DNA
gcaataaaaacaaaactcaaactcactccattgcgtggcgtgtccaacctcgacttgtcggggtggttcacggcaggcta

SEQ ID NO: 141058 - DNA, 80 bp, synthetic construct
  source 1..80: mol_type = other DNA
tataggcacggtcttagaccaagcggagaccgctagagcgcgtcttgtcgtgctcgcgaccgctacgccgcccggatcgg

SEQ ID NO: 141059 - DNA, 80 bp, synthetic construct
  source 1..80: mol_type = other DNA
cgccctaataatatatatatatattgggacgaagtgcgaacgcttcgcgttctcacttcttttacccggcggccccgccc

SEQ ID NO: 141060 - DNA, 80 bp, synthetic construct
  source 1..80: mol_type = other DNA
acacgggcgccgacaacggcagacgatccctcttgatgttaacgtacaggaggagcgcccgcaccgcccacgtaacgtag

SEQ ID NO: 141061 - DNA, 80 bp, synthetic construct
  source 1..80: mol_type = other DNA
ctgaatatttagactataatcccttgcttgcttacggcggtctcgcagctcttattttattcctgatttctaacttgttt

SEQ ID NO: 141062 - DNA, 80 bp, synthetic construct
  source 1..80: mol_type = other DNA
cacaactgttttgggaatcgggactgtgctagaccaggctgagacggctggctgtcgcctcacggtgcttgctaccgcca

SEQ ID NO: 141063 - DNA, 80 bp, synthetic construct
  source 1..80: mol_type = other DNA
acatcacagtcgcggcagcgtcatcggcggtaacgcaagacccccccgttacctttttaatatctatatagtttggtccc

SEQ ID NO: 141064 - DNA, 80 bp, synthetic construct
  source 1..80: mol_type = other DNA
gcgtcccaggcggcaaagtttacagtaacacccaatgctccttcggtagccctcaaacttggtgactacggagaagtcac

SEQ ID NO: 141065 - DNA, 80 bp, synthetic construct
  source 1..80: mol_type = other DNA
caaacctctggcgatgcaccatccgctgagagtgaagaagcagcatcagacgacggctcatacagctccatgccccccct

SEQ ID NO: 141066 - DNA, 80 bp, synthetic construct
  source 1..80: mol_type = other DNA
attaaaataagcggtcctttgcaagtagcacaaaactccgatacactaacagtagttactggaccaggtgtcaccgttga

SEQ ID NO: 141067 - DNA, 80 bp, synthetic construct
  source 1..80: mol_type = other DNA
gacggacgcctctagggcggtgactacgatcctaagttccctcaccataaccagcctcctacgcaagctccatgagtgga

SEQ ID NO: 141068 - DNA, 80 bp, synthetic construct
  source 1..80: mol_type = other DNA
ctgccggacacccagaggcggtttcggggcctcgacaaggaggcgcccaagcgcccggccgtgcctcgggaggaaggtga

SEQ ID NO: 141069 - DNA, 80 bp, synthetic construct
  source 1..80: mol_type = other DNA
ctttaccaagacgtgcggggctccggcctgtaacatcggcgggagcggaaacaacactctgctgtgcccaacagattgct

SEQ ID NO: 141070 - DNA, 80 bp, synthetic construct
  source 1..80: mol_type = other DNA
catccttacaatcttcacactcacccccgggtacaagaagatggtagtgttggtcatatggtggcttcagtatttcatag

SEQ ID NO: 141071 - DNA, 80 bp, synthetic construct
  source 1..80: mol_type = other DNA
cctttattaaagccacggtatccctcagctggcgcataccctcgcaaaactggtgatacttagtaggggtatgtatatta

SEQ ID NO: 141072 - DNA, 80 bp, synthetic construct
  source 1..80: mol_type = other DNA
ctccacctggggctcgttcgcttactccgtgcacctgcggtacaagtgacctttacctagtgacgaggaatgctgacgtc

SEQ ID NO: 141073 - DNA, 80 bp, synthetic construct
  source 1..80: mol_type = other DNA
gcatgaagcccccaacatgacccagaccggcaccaccgactctcccaccgccatcagccttaccacgcccgaccacacac

SEQ ID NO: 141074 - DNA, 80 bp, synthetic construct
  source 1..80: mol_type = other DNA
cgccacgaccccggggctgcccaggtgcagggcgcgaaacagcgcctcctgctccacgtccgcaaacgcggtgtgtgcgg

SEQ ID NO: 141075 - DNA, 80 bp, synthetic construct
  source 1..80: mol_type = other DNA
ctatggctgaggtgagacttgccgcaatgttcttttgtgccgtggttatcataggggtccttcaccagaatttcaaggac

SEQ ID NO: 141076 - DNA, 80 bp, synthetic construct
  source 1..80: mol_type = other DNA
tggggtacattccgctcgtcggcgcccccctcggaggcgcagctagggccctggcacacggtgttcgggtcctagaagac

SEQ ID NO: 141077 - DNA, 80 bp, synthetic construct
  source 1..80: mol_type = other DNA
ggaaaccaacatgattaccctcctggtgaaactggcactgataacagtgtcaggtctctaccccttggcaattccagtca

SEQ ID NO: 141078 - DNA, 80 bp, synthetic construct
  source 1..80: mol_type = other DNA
cggtgccgtgccgagaccaagatgaactcgttgggagggcgcgcatctcaccggggtgtggctggagtgtccgcgagacg

SEQ ID NO: 141079 - DNA, 80 bp, synthetic construct
  source 1..80: mol_type = other DNA
caggcgcgcgggttcgctaatatattccagtttgggcctaggcagaacattcagctcatgaataccaacgggagctggca

SEQ ID NO: 141080 - DNA, 80 bp, synthetic construct
  source 1..80: mol_type = other DNA
ccacaaagtcagggaggtggcgcaggaccccctggagtttgtgcaagaacttctcccgggcgtcgcgggccaccttcgcc

SEQ ID NO: 141081 - DNA, 80 bp, synthetic construct
  source 1..80: mol_type = other DNA
tgcgcgcgacgaggaagacttcggagcgatcccagccccgcgggaagcgccaatctataccaaaggcgcgtcccagtacg

SEQ ID NO: 141082 - DNA, 80 bp, synthetic construct
  source 1..80: mol_type = other DNA
caaaagaaaagaggaggcacagcgggctttactatcttgcttgggctgatcgcttgtgctggagctgtgaccctctcgaa

SEQ ID NO: 141083 - DNA, 80 bp, synthetic construct
  source 1..80: mol_type = other DNA
aacttctgcccggccatcaagaagtacgagggtggggtcgacgccaccacccggttcatcctggacaaccccgggttcgt

SEQ ID NO: 141084 - DNA, 80 bp, synthetic construct
  source 1..80: mol_type = other DNA
ggaactcaggctacgactggatcaccgactttccaggtaaaacagtctggtttgttccaagcattaaatcaggaaatgac

SEQ ID NO: 141085 - DNA, 80 bp, synthetic construct
  source 1..80: mol_type = other DNA
tcgggcccctgccccccgggcccgcggcgacggtcttcgtcctcgcccccgcccccgggagctcccaaccctcgtgccgc

SEQ ID NO: 141086 - DNA, 80 bp, synthetic construct
  source 1..80: mol_type = other DNA
ggctttcggacccccggccacgtctgggaacgggcacggcctaccccgtccccctggaactcacgcccgagaacgcggag

SEQ ID NO: 141087 - DNA, 80 bp, synthetic construct
  source 1..80: mol_type = other DNA
cagctctgccttttccaacatgcgccggcgcggcacctctctggcctcggggacccggtggacggccgggtccggagccg

SEQ ID NO: 141088 - DNA, 80 bp, synthetic construct
  source 1..80: mol_type = other DNA
atggtaagttccttgcagacggaggttgttccggaggagcatacgatgtgatcatctgtgacgagtgccatgcgcaagat

SEQ ID NO: 141089 - DNA, 80 bp, synthetic construct
  source 1..80: mol_type = other DNA
tgcgcccccctcctcagcagcggcaagagcaagagcagcggcagacatgcagggcaccctccccttctcctaccgcgtca

SEQ ID NO: 141090 - DNA, 80 bp, synthetic construct
  source 1..80: mol_type = other DNA
ctggcccaagctcgagcagttctggcagaaacatctgtggaactttgtcagtgggattcaatacctggcaggcctgtcaa

SEQ ID NO: 141091 - DNA, 80 bp, synthetic construct
  source 1..80: mol_type = other DNA
acctgctgcagcatttgctcaccaagcagccttacttcgtcagggcccgcgccctgctgaggatgtgcctactggtgaag

SEQ ID NO: 141092 - DNA, 80 bp, synthetic construct
  source 1..80: mol_type = other DNA
gcgccttgatcataccgccccccacgagcatgaaactggtcgcgtggtagacgatcatagcaaaattgataactgttttt

SEQ ID NO: 141093 - DNA, 80 bp, synthetic construct
  source 1..80: mol_type = other DNA
acccaaaccagattggggatgagtaccactatggaggaggaacgagcgaagatgattccattctcgcccactggactgag

SEQ ID NO: 141094 - DNA, 80 bp, synthetic construct
  source 1..80: mol_type = other DNA
ctcgcatgttttccctgaccaaatccgccagaaggcgctcgccgcccagcgatagcagttcttgcaaggaagcaaagttt

SEQ ID NO: 141095 - DNA, 80 bp, synthetic construct
  source 1..80: mol_type = other DNA
ctcggggtgaggagttgagggcataggactccagcacttgggctatgttatcagggacttgtcaaccaaagaaggtggag

SEQ ID NO: 141096 - DNA, 80 bp, synthetic construct
  source 1..80: mol_type = other DNA
ataaagaagttcaagaaagatctggctgccatgctgagaataatcaatgctaggaaggagaagaagagacgaggcgcaga

SEQ ID NO: 141097 - DNA, 80 bp, synthetic construct
  source 1..80: mol_type = other DNA
aaccacaacaaggctgaaagcttacttcgacacaccaggccttcctgtgtgccaagaccatctggaattctgggagagcg

SEQ ID NO: 141098 - DNA, 80 bp, synthetic construct
  source 1..80: mol_type = other DNA
tagccgccgaagggactctggcgtacaacggctcggcctatggctcctgcgacccgaaactgcttccgtcttcggccccg

SEQ ID NO: 141099 - DNA, 80 bp, synthetic construct
  source 1..80: mol_type = other DNA
aaaccttctgttcacaggacacttgaaatgcaggctgcgaatggacaaactagaactcaaaggaatgtcttactcaatgt

SEQ ID NO: 141100 - DNA, 80 bp, synthetic construct
  source 1..80: mol_type = other DNA
gctggcactaccccccaatgccgtgcggcattgtgcccgcgagcactgtgtgcggtccagtgtactgtttcactcccagc

SEQ ID NO: 141101 - DNA, 80 bp, synthetic construct
  source 1..80: mol_type = other DNA
cgtttcaccgggacgaccacgagaccgacatggagctcaagccggcgaaggtcgccacgcgcacgagccggtggtggcac

SEQ ID NO: 141102 - DNA, 80 bp, synthetic construct
  source 1..80: mol_type = other DNA
attgtttcaggaaacacccggaggctacctacgggaggtgtggatcggggccttggattacgccgagatgcctggtcgac

SEQ ID NO: 141103 - DNA, 80 bp, synthetic construct
  source 1..80: mol_type = other DNA
gataactgaggactgccccatcccatgcgccgaatcttggctatgggaggtatgggattgggtctgcaccgtgctgagtg

SEQ ID NO: 141104 - DNA, 80 bp, synthetic construct
  source 1..80: mol_type = other DNA
ctatgatcatctctccccaatgtcagactgggctgccagtggcctgcgggacctagcggtcgcggtagaacccattatct

SEQ ID NO: 141105 - DNA, 80 bp, synthetic construct
  source 1..80: mol_type = other DNA
aacacattcaaatcgcgacttaattgtagcccgtacagacatcacttacgtgctaaatagtctcgtagttgtaaccacaa

SEQ ID NO: 141106 - DNA, 80 bp, synthetic construct
  source 1..80: mol_type = other DNA
gaagaaggtcatcacctggggtgcggacacggccgcttgtggcgacatcctggccggcctgccagtttctgctcggcgtg

SEQ ID NO: 141107 - DNA, 80 bp, synthetic construct
  source 1..80: mol_type = other DNA
cgtggatgaacggcacggggttcacaaagacctgcggagccccaccctgcatggtgcaaacaaacaatgaatcctggccc

SEQ ID NO: 141108 - DNA, 80 bp, synthetic construct
  source 1..80: mol_type = other DNA
gggccagctcttcaccttccggccgcgccgtcattggacaacccaggactgtaactgctctatctacacaggacacatta

SEQ ID NO: 141109 - DNA, 80 bp, synthetic construct
  source 1..80: mol_type = other DNA
cggagacgacctcgtcgtcatctccgaaagcgtgggggtcaatgaggatgctagtgcactgagagccttcacggaggcta

SEQ ID NO: 141110 - DNA, 80 bp, synthetic construct
  source 1..80: mol_type = other DNA
gggggccactgctgacaatctgaaatgtccatgccaggttcccgcaccagaattcttcactgaagtggatggcgtcaggc

SEQ ID NO: 141111 - DNA, 80 bp, synthetic construct
  source 1..80: mol_type = other DNA
ccacccgtggtggctgggtgtgctctccccccgaagggagggccgccagtgccaccgccgcggaggaaaagagtcgtgca

SEQ ID NO: 141112 - DNA, 80 bp, synthetic construct
  source 1..80: mol_type = other DNA
tggttctcgcgcgccggcctccgagaatcgggtgtggaagacctcggccagcgggattacaggcgagcccattagatcct

SEQ ID NO: 141113 - DNA, 80 bp, synthetic construct
  source 1..80: mol_type = other DNA
ggtggaggccatggaaacgcagcctgagctgccagaggccgtagcccgtgcggttgcggccacgcgagagatgggtttgc

SEQ ID NO: 141114 - DNA, 80 bp, synthetic construct
  source 1..80: mol_type = other DNA
actagtaaaatcaagaacaggattgaacgactcaggcgtgagtacagttcgacgtggcaccacgatgagaaccacccata

SEQ ID NO: 141115 - DNA, 80 bp, synthetic construct
  source 1..80: mol_type = other DNA
gaaggtatgtggccctgtctactgcttcacgcccactcctgtcgtcgtgggcacgactgataggaggggcaaccccactt

SEQ ID NO: 141116 - DNA, 80 bp, synthetic construct
  source 1..80: mol_type = other DNA
ggatggtttacaaattggcgttgaagaaacagttgacaagcaagaaaaggaaatttatgctgacaagagtttccagccag

SEQ ID NO: 141117 - DNA, 80 bp, synthetic construct
  source 1..80: mol_type = other DNA
tgacccaggcgtcccatggaaaatttgggtattgcgcatgtcttgtataggattggccgccttcacaccatgggccatta

SEQ ID NO: 141118 - DNA, 80 bp, synthetic construct
  source 1..80: mol_type = other DNA
gtacgatccgggtgaaaatcggtccaggtgttgggaacccgttactcccacgctggcagttaaatatcggggtgccctaa

SEQ ID NO: 141119 - DNA, 80 bp, synthetic construct
  source 1..80: mol_type = other DNA
ccacaataaagagggggtcttcagagagatggcagacaaagtgctcagccctctccaagaccacaatgactccggtcact

SEQ ID NO: 141120 - DNA, 80 bp, synthetic construct
  source 1..80: mol_type = other DNA
ctcaccccccttactgattgggcctgtgacgggttgcgagaccttgccgttgcagtggagccggtcgtcttctctccaat

SEQ ID NO: 141121 - DNA, 80 bp, synthetic construct
  source 1..80: mol_type = other DNA
ttcatagaaggcgcctcaggagcaacctgggtcgatctagtgctggaaggagacagttgcgtgaccataacggccaaaga

SEQ ID NO: 141122 - DNA, 80 bp, synthetic construct
  source 1..80: mol_type = other DNA
tgcccttaactgtaatgacagcctccagactgggtttgtagccggcctcctgtattatcacaagttcaactccactgggt

SEQ ID NO: 141123 - DNA, 80 bp, synthetic construct
  source 1..80: mol_type = other DNA
gactcccaagtgcttggtccattacccctatagattgtggcattacccatgcacagtaaactacactctttttaaaataa

SEQ ID NO: 141124 - DNA, 80 bp, synthetic construct
  source 1..80: mol_type = other DNA
caggactttccggaaaaagagttgcttccgcagccgacatcatggaaacagcagcgagcgtcatcgtttttaatttgcac

SEQ ID NO: 141125 - DNA, 80 bp, synthetic construct
  source 1..80: mol_type = other DNA
ttccaaattgcagtcttcttgaagacttagatacaaagctaacattgtgtttaagtaaaaatggcgccattgtacatggc

SEQ ID NO: 141126 - DNA, 80 bp, synthetic construct
  source 1..80: mol_type = other DNA
ctgcactcaactacggagtgggctatacttccttgtactttttcagatctcccggcgctctcctcgggtttgctacacct

SEQ ID NO: 141127 - DNA, 80 bp, synthetic construct
  source 1..80: mol_type = other DNA
aaaacctcaattttgaaatgtacggagcagtttactcggtaactccacttgacctcccggccataattgagaggttacac

SEQ ID NO: 141128 - DNA, 80 bp, synthetic construct
  source 1..80: mol_type = other DNA
aagcaagggtccgccactgcgcttctacagatactggatgttttattttgattaagggaaatgccagcgtaaagcataac

SEQ ID NO: 141129 - DNA, 80 bp, synthetic construct
  source 1..80: mol_type = other DNA
tctaagaagacacccatgggtttttcctatgacaccagatgctttgactccacggtcactgagcatgacatcaagactga

SEQ ID NO: 141130 - DNA, 80 bp, synthetic construct
  source 1..80: mol_type = other DNA
aggagggtgggtggcctctcagatcgccacccccacggcttctacggctttcgtcgtcagcggcctcgcggtggctgcga

SEQ ID NO: 141131 - DNA, 80 bp, synthetic construct
  source 1..80: mol_type = other DNA
tgcgcgccagcacgcgacgcagcgcctcctcgtcgcactgttcggggctgacgaggcgccgcaagagcggcgtcgtcagg

SEQ ID NO: 141132 - DNA, 80 bp, synthetic construct
  source 1..80: mol_type = other DNA
agtccctcgcgcctccgggtgacaagatagtgtacctgtgccccgtcctggtgtttgtcgcccaacggacgctccgcgtc

SEQ ID NO: 141133 - DNA, 80 bp, synthetic construct
  source 1..80: mol_type = other DNA
atgaggctgagtccctcataatgcacatgccggggtgcgtgccttgtgtccgcactaacaacgtatccaagtgctggtac

SEQ ID NO: 141134 - DNA, 80 bp, synthetic construct
  source 1..80: mol_type = other DNA
tcctggaccggggctctaataactccctgtagccccgaagaggaaaagttgccaatcaaccctttgagtaactcgctgtt

SEQ ID NO: 141135 - DNA, 80 bp, synthetic construct
  source 1..80: mol_type = other DNA
gcctattcctgataggccaggccttcactttccaaccacgccgccacttgactactcaggattgcaattgctccatctat

SEQ ID NO: 141136 - DNA, 80 bp, synthetic construct
  source 1..80: mol_type = other DNA
cggtggtcgggaaagcgtcgccggtacgaggcggggccgtcggagtcctactgcgaccaggacgaaccggacgcggacta

SEQ ID NO: 141137 - DNA, 80 bp, synthetic construct
  source 1..80: mol_type = other DNA
ttggatgctattcacaagtcaaccctataactctcacagcagctcttcttctactggtagcacattatgccattataggg

SEQ ID NO: 141138 - DNA, 80 bp, synthetic construct
  source 1..80: mol_type = other DNA
accaccacagccagtacaactactgagaccactactcatactacacagctagacactacagtgcagaatagtactgtgtt

SEQ ID NO: 141139 - DNA, 80 bp, synthetic construct
  source 1..80: mol_type = other DNA
caggctataaaatcgctcacagagcggctttatatcgggggtcccctgactaattcaaaagggcagagctgtggttatcg

SEQ ID NO: 141140 - DNA, 80 bp, synthetic construct
  source 1..80: mol_type = other DNA
ctgggccgaaaacttgcagcaacacatggcatggtaccttccccattaatgcttacaccacaggccccggcgtgcccatc

SEQ ID NO: 141141 - DNA, 80 bp, synthetic construct
  source 1..80: mol_type = other DNA
tttactaatcatgctgctgtttttactttgccttcttttctgctctgcctatgccgccgtgccagaaaaaacccttaaca

SEQ ID NO: 141142 - DNA, 80 bp, synthetic construct
  source 1..80: mol_type = other DNA
caaatgttttgactccacggtgacagaacgtgacatccgcactgaggagtccatctatcaatgctgtcagttagatccga

SEQ ID NO: 141143 - DNA, 80 bp, synthetic construct
  source 1..80: mol_type = other DNA
tgcgtcgggtgggggacgcccactacattgtaggggccacagatgacaatctaaaatgcccatgtcaagtgccagcacca

SEQ ID NO: 141144 - DNA, 80 bp, synthetic construct
  source 1..80: mol_type = other DNA
gagatgacacgctaaccattctccttaaagcaactctgctagcagtttcaggggtgtacccattatcaataccagcgacc

SEQ ID NO: 141145 - DNA, 80 bp, synthetic construct
  source 1..80: mol_type = other DNA
gccatggtgaaacaccttgtggggggtaagtacgcccagatggcgctgctcagccttggcagatacactggtacgtacat

SEQ ID NO: 141146 - DNA, 80 bp, synthetic construct
  source 1..80: mol_type = other DNA
ccgcacctggagctttccgccgtcgcgcgcctggcgggcatcaacatcacccgcaccatctacgacggccagcagatccg

SEQ ID NO: 141147 - DNA, 80 bp, synthetic construct
  source 1..80: mol_type = other DNA
catactcatactcgtggacgggagccctcataacaccatgcgttgccgaggaggaaaagttaccgattagcccgctgagc

SEQ ID NO: 141148 - DNA, 80 bp, synthetic construct
  source 1..80: mol_type = other DNA
ccgcgccgccgatttgttcgtctctcagatgatgggggcccgctgattcgccccggtctttggtaccatgggatgtctta

SEQ ID NO: 141149 - DNA, 80 bp, synthetic construct
  source 1..80: mol_type = other DNA
cggatcggccggtttccgcgacttctccagtttacgggagcgagccctctttttttttttgttttttgttgcccagatgc

SEQ ID NO: 141150 - DNA, 80 bp, synthetic construct
  source 1..80: mol_type = other DNA
cctggaccggggcgctgataactccatgcggcccggaagaggaaaagttaccgatcaacccgttgagcaactcattgctg

SEQ ID NO: 141151 - DNA, 80 bp, synthetic construct
  source 1..80: mol_type = other DNA
cgtggaccttatcgttggcgctgcagccttttgttctgccatgtatattggagatctttgtggcggcgttttccttgtgg

SEQ ID NO: 141152 - DNA, 80 bp, synthetic construct
  source 1..80: mol_type = other DNA
cctccgcgagcaagcttgacttatcaggctggttcgtggcaggctacgacggggaggacatttatcacagcgtgtcccag

SEQ ID NO: 141153 - DNA, 80 bp, synthetic construct
  source 1..80: mol_type = other DNA
ttagatgacaaaagtgctggagggttgcaagatttaattggcaaacttgtggttttaacaggaaaaggaataggtattga

SEQ ID NO: 141154 - DNA, 80 bp, synthetic construct
  source 1..80: mol_type = other DNA
aaataaacatctcataatcggttagaatcatatcccacggtattggccattcctgcaacactgtaaaacctacacatgaa

SEQ ID NO: 141155 - DNA, 80 bp, synthetic construct
  source 1..80: mol_type = other DNA
caccgtagagacctgagattgatggctaacgccatctgttccgctgtgcctgtcaactgggttcccacagggcgtaccac

SEQ ID NO: 141156 - DNA, 80 bp, synthetic construct
  source 1..80: mol_type = other DNA
gtgccgcgcagcaggcctcaccgattctgacatgttggtctgcggagatgatttggtggtcatcactgagagtgctggag

SEQ ID NO: 141157 - DNA, 80 bp, synthetic construct
  source 1..80: mol_type = other DNA
gactataacccgccactgatagagccttggaaggacccggactacgtccctccggtagtacacgggtgcccattaccacc

SEQ ID NO: 141158 - DNA, 80 bp, synthetic construct
  source 1..80: mol_type = other DNA
actcccatgctgagacacaccatagaaaacacatctgcaaacctatctctggcggccattgccaaccaagcggccgtctt

SEQ ID NO: 141159 - DNA, 80 bp, synthetic construct
  source 1..80: mol_type = other DNA
gccgattccttcatgcaggagatcatcgggggccaggccagggagaccggcgacgaccggcccgttctgaccaagtctgc

SEQ ID NO: 141160 - DNA, 80 bp, synthetic construct
  source 1..80: mol_type = other DNA
caactgctgcccagactttcctggcaacctgcatcaacggggtgtgctggactgtctaccacggggccggaggaaggacc

SEQ ID NO: 141161 - DNA, 80 bp, synthetic construct
  source 1..80: mol_type = other DNA
gctggtgctctttcacaacaacgaccaggcgcggcgcgcctatgtggcccgcaccatcaaccacccggccattcgcgtca

SEQ ID NO: 141162 - DNA, 80 bp, synthetic construct
  source 1..80: mol_type = other DNA
aacaagacatgtggcagtggaaccagaggtagccaacctagatatcattggccagaggatagagaatataaaaaatgaac

SEQ ID NO: 141163 - DNA, 80 bp, synthetic construct
  source 1..80: mol_type = other DNA
cggatgtgctgattctcaacaacaccagacctcctttgggcaattggttcggctgcacctggatgaacagcaccgggttc

SEQ ID NO: 141164 - DNA, 80 bp, synthetic construct
  source 1..80: mol_type = other DNA
cgggccagctgagagcattaggcctcaatgccgtcgctttctacagaggcatagacgtctccgtcatccccacctcgggt

SEQ ID NO: 141165 - DNA, 80 bp, synthetic construct
  source 1..80: mol_type = other DNA
gggagaaatccccttctatggcaaggctatccccctcgagaccatcaaggggggaagacacctcatattctgtcactcaa

SEQ ID NO: 141166 - DNA, 80 bp, synthetic construct
  source 1..80: mol_type = other DNA
cctcagaaaacttggggcgccacccctcagggtgtggaagagtcgggctcgcgcagtcagggcgtccctcatctcccgtg

SEQ ID NO: 141167 - DNA, 80 bp, synthetic construct
  source 1..80: mol_type = other DNA
caggactgtcaccacgggggcttccctaacatattctacctatgggaagtttttggctgatggtggttgctcggcgtgtg

SEQ ID NO: 141168 - DNA, 80 bp, synthetic construct
  source 1..80: mol_type = other DNA
ggcccccctgcaacatcgggtggcatggcaacaaaaccctgacctgccccactgactgcttccgcaaacatccggaggcc

SEQ ID NO: 141169 - DNA, 80 bp, synthetic construct
  source 1..80: mol_type = other DNA
ttggaataccgtggattatatgctgtatctgcagtacgctccacatacacagttctagacgttgtggagtcctcgcctgg

SEQ ID NO: 141170 - DNA, 80 bp, synthetic construct
  source 1..80: mol_type = other DNA
ctctttgtgtggtatttttggcagaaaaagaaacagagatcaggagtgctatgggacacacccagccctccagaagtgga

SEQ ID NO: 141171 - DNA, 80 bp, synthetic construct
  source 1..80: mol_type = other DNA
taaagcccatgttaactggacccactccgttgttgtacaggttaggacctgtcaccaacgaaacaactctcacccaccct

SEQ ID NO: 141172 - DNA, 80 bp, synthetic construct
  source 1..80: mol_type = other DNA
cgaccgggaggtgctataccagcaatttgatgagatggaagagtgttccagacacatcccatacttggtagaggggcagc

SEQ ID NO: 141173 - DNA, 80 bp, synthetic construct
  source 1..80: mol_type = other DNA
gaacgggcgtgtgactgccccggggttggtggatacctatgtcaatatcggcgctcgctggtccccagatgtgatggata

SEQ ID NO: 141174 - DNA, 80 bp, synthetic construct
  source 1..80: mol_type = other DNA
ttcatctccaccagctgtgcctagcacttatcaagtgggttacctccatgcccccaccggcagcggtaagagtacgaagg

SEQ ID NO: 141175 - DNA, 80 bp, synthetic construct
  source 1..80: mol_type = other DNA
tacccatctgggctaggcctgactacaacccgcctcttgtggagccgtggaagtctccggactacgatcctcctgtggtc

SEQ ID NO: 141176 - DNA, 80 bp, synthetic construct
  source 1..80: mol_type = other DNA
cggtatattacaaagatgttatcgttagcacggcgtgggccggaagttcttatacgcaaattactaatagatatgctgat

SEQ ID NO: 141177 - DNA, 80 bp, synthetic construct
  source 1..80: mol_type = other DNA
gcagcgtggtgatcgttgggagggtcgtcttatcgggtaagcccgtcatcattcccgaccgagagaccctctaccaacag

SEQ ID NO: 141178 - DNA, 80 bp, synthetic construct
  source 1..80: mol_type = other DNA
tgatgttttcctgctcaacagcactagaccaccaggtggggcatggttcggatgcacatggatgaacggcactgggttta

SEQ ID NO: 141179 - DNA, 80 bp, synthetic construct
  source 1..80: mol_type = other DNA
ctcctgctgacagcaggagtggatgcggccacttatgtcaccggggggaatgcaggccgtcagaccagcatcttcactgg

SEQ ID NO: 141180 - DNA, 80 bp, synthetic construct
  source 1..80: mol_type = other DNA
caggcgctgttcgaacccgcccgccgggcccttgccgccgccgtcgcgcccgccccgcggggtcttaccctggctggctt

SEQ ID NO: 141181 - DNA, 80 bp, synthetic construct
  source 1..80: mol_type = other DNA
agtcagccgtgtttgtaagatacgggaggtgcacaaggactcgaaactcacggcgtagccgtaggtcactcaatgtccaa

SEQ ID NO: 141182 - DNA, 80 bp, synthetic construct
  source 1..80: mol_type = other DNA
tctctaccgagagtttgatgagatggaagagtgcgccgcccacatcccctaccttgagcaggggatgcatttggctgaac

SEQ ID NO: 141183 - DNA, 80 bp, synthetic construct
  source 1..80: mol_type = other DNA
ctggcagaggccgtgatggggtccgcatatgggttccaatactcaccttcacagcgggttgaggtcttactcaaggcgtg

SEQ ID NO: 141184 - DNA, 80 bp, synthetic construct
  source 1..80: mol_type = other DNA
agtgattgttgtcatcaccgttctatcactaacccccgcttacaagtggctgctcctgcagttcctgtggtggaaccagt

SEQ ID NO: 141185 - DNA, 80 bp, synthetic construct
  source 1..80: mol_type = other DNA
gattggactaaagagggcaatgctgagcctgattgatggcaaaggaccgatacgatttgtgctggccctgctggcatttt

SEQ ID NO: 141186 - DNA, 80 bp, synthetic construct
  source 1..80: mol_type = other DNA
cagagcctggaactcagggtacgaatggatcactgagtacgtgggaaaaactgtctggtttgtgcccagcgtgcgcatgg

SEQ ID NO: 141187 - DNA, 80 bp, synthetic construct
  source 1..80: mol_type = other DNA
gatccctgcgaggcgcaggggtgatacacgtgcagcgcttcttagtccgaggcctatcagtaccttgaagggatcgtcgg

SEQ ID NO: 141188 - DNA, 80 bp, synthetic construct
  source 1..80: mol_type = other DNA
tggcactacccgccgcgacgttgtggcatcgtccctgcaaaggaggtctgcgggccagtgtattgcctcacccccagccc

SEQ ID NO: 141189 - DNA, 80 bp, synthetic construct
  source 1..80: mol_type = other DNA
ccaatcattgaaagactccatggtctcagcgcgttttcgctccacagttactctccaggtgagatcaatagggtggctgc

SEQ ID NO: 141190 - DNA, 80 bp, synthetic construct
  source 1..80: mol_type = other DNA
atgctgtggtagatggtttggtggctacggatgttcctgaactggagagaaccacccccctcatgcaaaagaaggtaggc

SEQ ID NO: 141191 - DNA, 80 bp, synthetic construct
  source 1..80: mol_type = other DNA
gactgttgacttcagcttggaccccaccttctccatagagactacaactgttcctcaggacgcggtatcccgcagtcagc

SEQ ID NO: 141192 - DNA, 80 bp, synthetic construct
  source 1..80: mol_type = other DNA
agaggagaccccgcatttgcatcaaaacagcatattgacacctgggaatagactgggagatcttctgctctatctcaaca

SEQ ID NO: 141193 - DNA, 80 bp, synthetic construct
  source 1..80: mol_type = other DNA
ttatacccaatcaatacgacaatgcagtgccgtttatgccaaacctaaaagcttatcctaaaccttcaactgtcttgcca

SEQ ID NO: 141194 - DNA, 80 bp, synthetic construct
  source 1..80: mol_type = other DNA
gccctgttcggccgttaccatcccggcctgcgccttcgtggacctggacgccgagctgtgcctgggtggccctggtgcgg

SEQ ID NO: 141195 - DNA, 80 bp, synthetic construct
  source 1..80: mol_type = other DNA
cctgggagactgttcggcacactccagtcaactcctggttagggaacatcatactctacgcgcccacaatctgggtgcgc

SEQ ID NO: 141196 - DNA, 80 bp, synthetic construct
  source 1..80: mol_type = other DNA
gctcctgccgcggttgccggggatccctttcctctcatgccaacgtgggtacaggggagtctggcgtggagacggcatca

SEQ ID NO: 141197 - DNA, 80 bp, synthetic construct
  source 1..80: mol_type = other DNA
tgtccgaattccagcatagtctatgagtccgaccaccacatcttacacctgccggggtgtgtgccctgtgtgaggaccgg

SEQ ID NO: 141198 - DNA, 80 bp, synthetic construct
  source 1..80: mol_type = other DNA
tacgaccacctctcccctttatcaacttgggcggcccagggtttgcgggacctggcaatcgccgtggagcctgtggtgtt

SEQ ID NO: 141199 - DNA, 80 bp, synthetic construct
  source 1..80: mol_type = other DNA
atttgttgcctaaagcgcagacgcgccagaccccccatctataggcctatcattgtgctcaacccacacaatgaaaaaat

SEQ ID NO: 141200 - DNA, 80 bp, synthetic construct
  source 1..80: mol_type = other DNA
cccgcggcgggaagttgtggactgggaaggcgcctgggacgaagacgacggcggcgcgttcgaggtggacggtgtgctgt

SEQ ID NO: 141201 - DNA, 80 bp, synthetic construct
  source 1..80: mol_type = other DNA
acgttttgcgtataccccagactttgttcgacataatagccggggcccattggggcatcttagcgggcctagcctattac

SEQ ID NO: 141202 - DNA, 80 bp, synthetic construct
  source 1..80: mol_type = other DNA
caacagctctggctgccccgagcgcttgtcttcctgccgcgggctggacgattttcgcatcggctggggaaccttggaat

SEQ ID NO: 141203 - DNA, 80 bp, synthetic construct
  source 1..80: mol_type = other DNA
ccgtcctgtgcgggattgcgttttacgtgacgtcaatcgcccgaggcgcataaaggtccggcggccagccccgccgcagc

SEQ ID NO: 141204 - DNA, 80 bp, synthetic construct
  source 1..80: mol_type = other DNA
acgctgcctgggaacccagccatagcctccctgatgtccttcactgccgccgtcacaagccctctctccacacagcagac

SEQ ID NO: 141205 - DNA, 80 bp, synthetic construct
  source 1..80: mol_type = other DNA
gcctcgtggggctggacgttcgacacgccaaaccacgagtcggggatatcgccagatacgactcccgcagattccattcg

SEQ ID NO: 141206 - DNA, 80 bp, synthetic construct
  source 1..80: mol_type = other DNA
tgaagcaggatgaagatggctctttctccatacgagacgtcgaggaaaccaacatgataaccctcttggtgaaactggcg

SEQ ID NO: 141207 - DNA, 80 bp, synthetic construct
  source 1..80: mol_type = other DNA
cagtggatgaaccggctgatagcgttcgcttcgcggggtaaccacgtctcccccacgcactatgtgcctgagagcgacgc

SEQ ID NO: 141208 - DNA, 80 bp, synthetic construct
  source 1..80: mol_type = other DNA
cgtttctgctctattcccagacaccgcggagaggaatcacggcccgcccagagatatagacacggaacacaaacaagcac

SEQ ID NO: 141209 - DNA, 80 bp, synthetic construct
  source 1..80: mol_type = other DNA
acgcagtggcctctaatgccttaacatttatgcccaacagtacagtgtatccccgaaacaaaaccgccgacccaggcaac

SEQ ID NO: 141210 - DNA, 80 bp, synthetic construct
  source 1..80: mol_type = other DNA
ggggccccaccttgccaagtgcagggatcgaactcaagtctaagctggagttgccccactgactgcttcaggaaacaccc

SEQ ID NO: 141211 - DNA, 80 bp, synthetic construct
  source 1..80: mol_type = other DNA
ttctttctagaaacaagaagccaagaatttgtacaagagaggagtttacaagaaaagttaggtcaaacgcagccatcgga

SEQ ID NO: 141212 - DNA, 80 bp, synthetic construct
  source 1..80: mol_type = other DNA
agttgcgcagatgatagagataagcaggaaaaaaaagaaagtttaaaggaagctgctgttcttagtaggctaactgttaa

SEQ ID NO: 141213 - DNA, 80 bp, synthetic construct
  source 1..80: mol_type = other DNA
cgccactcagtccctaaatgaagattacatttatggagagtgttactacaaatctaccaatggaactctctttccactaa

SEQ ID NO: 141214 - DNA, 80 bp, synthetic construct
  source 1..80: mol_type = other DNA
gcttgccggtgctgccgtaggcagcatcggattaggccgcgtcatcgtcgacatcttggcgggctacggggcaggagtgt

SEQ ID NO: 141215 - DNA, 80 bp, synthetic construct
  source 1..80: mol_type = other DNA
tgcgatttcagcacgccgcggatgtcaaacaaaagaaacacataggccattcacacgaatactccggcgatctgcgccga

SEQ ID NO: 141216 - DNA, 80 bp, synthetic construct
  source 1..80: mol_type = other DNA
actacatcgtaggggccacggctgacaacttgaaatgcccgtaccaagtccccgccccggagttcttcactgaagtggac

SEQ ID NO: 141217 - DNA, 80 bp, synthetic construct
  source 1..80: mol_type = other DNA
ccggaggttgtcctggacatcatcactgggggtcactggggcgtgatgtttggcctggcttacttctccatgcaggtggc

SEQ ID NO: 141218 - DNA, 80 bp, synthetic construct
  source 1..80: mol_type = other DNA
atgtgataccagctaggcgcaggggcgacaaccgcgcggctctattgagcccccggccggtgagcaccctcaagggctcc

SEQ ID NO: 141219 - DNA, 80 bp, synthetic construct
  source 1..80: mol_type = other DNA
atggggagtggcgtgatggttttgactggattactgagtacgagggacgcaccgcctggtttgttccttcaattgcaaag

SEQ ID NO: 141220 - DNA, 80 bp, synthetic construct
  source 1..80: mol_type = other DNA
cgcggtggcctccgggtcattccgggccgcggatatctgctccgcggcggccgccaggtccaggggcacgccgccgagcg

SEQ ID NO: 141221 - DNA, 80 bp, synthetic construct
  source 1..80: mol_type = other DNA
gtgacgttttcctcgtccgcgccccccgaccctcccatggatttaacaaacggggtggtgtcgcctgcggcgacctcggc

SEQ ID NO: 141222 - DNA, 80 bp, synthetic construct
  source 1..80: mol_type = other DNA
acgggtgtactacctcacccgtgaccccaccacccccctcgcgcgggctgcgtgggagacagctagacacactccagtca

SEQ ID NO: 141223 - DNA, 80 bp, synthetic construct
  source 1..80: mol_type = other DNA
agcgacatgcaccacccaccacgactctcccgacgcggacctcatcgaggccaacctcctgtggaggcaggagatgggcg

SEQ ID NO: 141224 - DNA, 80 bp, synthetic construct
  source 1..80: mol_type = other DNA
gaatgagactctcaggggtaaaataattttagatgttaattatccctttgatgcaaccaccaacctttcattgaggagag

SEQ ID NO: 141225 - DNA, 80 bp, synthetic construct
  source 1..80: mol_type = other DNA
acctgtgcattgtgagggctatggacgtgggatacctttgtgaggatactatcacttatgaatgtccggtcctagctgct

SEQ ID NO: 141226 - DNA, 80 bp, synthetic construct
  source 1..80: mol_type = other DNA
caaaaagtccgtgcgctttttggaacgcggatttggcagggcgaaggtgacatcgttgaagagtatctttcccgcgcgag

SEQ ID NO: 141227 - DNA, 80 bp, synthetic construct
  source 1..80: mol_type = other DNA
tcgccgcccggatccgccagacaaacaaggctcttgcacatgccggcccgggcgagcctgggggtccggtaattttgcca

SEQ ID NO: 141228 - DNA, 80 bp, synthetic construct
  source 1..80: mol_type = other DNA
agcaccaccactttgtccaggactgcaactgttccatatacccgggccgcattacggggcatcgtatggcttgggatatg

SEQ ID NO: 141229 - DNA, 80 bp, synthetic construct
  source 1..80: mol_type = other DNA
gtgttttttactgctaaagggaactgccagtgtaaagcataacatgatttgtggcggtggtcactctcagctgctaacct

SEQ ID NO: 141230 - DNA, 80 bp, synthetic construct
  source 1..80: mol_type = other DNA
ttgcctcccaagggcttgcccccagtgccaccccctcggaaaaaaagagtagtgcagctcgacgaggggtctgccaaacg

SEQ ID NO: 141231 - DNA, 80 bp, synthetic construct
  source 1..80: mol_type = other DNA
acaggagacctaccatagagaaagacgtggatttaggagcaggaactcgacatgttaatgcggaaccagaaacacccaac

SEQ ID NO: 141232 - DNA, 80 bp, synthetic construct
  source 1..80: mol_type = other DNA
gtacatcgccacatgcatgcaagctgaccttgaggtcatgaccagcacgtgggttctggtgggtggtgtcgtggcggcct

SEQ ID NO: 141233 - DNA, 80 bp, synthetic construct
  source 1..80: mol_type = other DNA
attccacccttcaatccagacatgcacggggatgactctaaggctgtgttgttgtttccaaacggaactgtggtaacgct

SEQ ID NO: 141234 - DNA, 80 bp, synthetic construct
  source 1..80: mol_type = other DNA
agcgactgctacgagaagaagattttgagcctgatgaacgttctgggattagtcccgcgcgagctcatgtttccgcggcc

SEQ ID NO: 141235 - DNA, 80 bp, synthetic construct
  source 1..80: mol_type = other DNA
atcaaggagaagaacctgtggatgtggactgtttttgcaggaacgtggatcgtgtctaccttgagtatgggagatgtgga

SEQ ID NO: 141236 - DNA, 80 bp, synthetic construct
  source 1..80: mol_type = other DNA
tgtggaggagcaccgctccggagctcaatttggtgttgagcgaaggagaggcgaatctgaccatcgtggtagacaagaca

SEQ ID NO: 141237 - DNA, 80 bp, synthetic construct
  source 1..80: mol_type = other DNA
cggatgtgctctgccccctcccactacggctccgacgcctcctcctaggaggcgtcgaactgtggtcttggaccagagca

SEQ ID NO: 141238 - DNA, 80 bp, synthetic construct
  source 1..80: mol_type = other DNA
acaagtgagatcggacagggtaatttgtttgccatggaaattaaccttcaagccaatctatggcgaagtttcctttattc

SEQ ID NO: 141239 - DNA, 80 bp, synthetic construct
  source 1..80: mol_type = other DNA
atgggcatccccggcctacaatcctcccctgctggagccctggaagagggatgactacgtaccaccagtagtccacggtt

SEQ ID NO: 141240 - DNA, 80 bp, synthetic construct
  source 1..80: mol_type = other DNA
gactcgtatagagtcccaatccaaggtcctcgtcctcgactccttcgaccccgtggtcgatgaggaggacgagcgcgagc

SEQ ID NO: 141241 - DNA, 80 bp, synthetic construct
  source 1..80: mol_type = other DNA
ggctgtggcacatggagccccagatgtggatgtggccatgctcataacgccaaatccaacaatggaaaacaatggaggtg

SEQ ID NO: 141242 - DNA, 80 bp, synthetic construct
  source 1..80: mol_type = other DNA
tgtgggcctcctagagtttgttgtggggtctcagctcccttgtgagccagagcctgacgtgaccgtagtcacgtcaatgc

SEQ ID NO: 141243 - DNA, 80 bp, synthetic construct
  source 1..80: mol_type = other DNA
cgcacattcgcagccaacccgcgggccgcgtcgacagccaaggccatgcgcgactgcgtgctgcgccaggaaaatctcat

SEQ ID NO: 141244 - DNA, 80 bp, synthetic construct
  source 1..80: mol_type = other DNA
tcggtgaccacaccccattccaacatagaggaggtcgccctgcctacgacgggagaaatacccttctatggcagggcgat

SEQ ID NO: 141245 - DNA, 80 bp, synthetic construct
  source 1..80: mol_type = other DNA
caagggtcaggatgtggctttttgaaaacggagaggaacggctgggacgcatggctgtcagcggtgatgattgcgtcgtc

SEQ ID NO: 141246 - DNA, 80 bp, synthetic construct
  source 1..80: mol_type = other DNA
cgagccggtcagcatctcgcagccccggaagataacgttgtccacgtacgtgctaaagggggcgccttcaaatgcctccc

SEQ ID NO: 141247 - DNA, 80 bp, synthetic construct
  source 1..80: mol_type = other DNA
aatgagtccgatctctactgtcccaccgactgcttcaggaaacatcccgaggccacatacagccggtgtggtgctgggcc

SEQ ID NO: 141248 - DNA, 80 bp, synthetic construct
  source 1..80: mol_type = other DNA
atgaattattacactctataagggagagactttacaaagtgacatggggtgcgtcataaactggaaaggaaaagagcacg

SEQ ID NO: 141249 - DNA, 80 bp, synthetic construct
  source 1..80: mol_type = other DNA
cttataaaagcttgctcgtaagcgtaatctggtggatgcagtactttatagcgcgtgcggaggcccttgtgcatgtctgg

SEQ ID NO: 141250 - DNA, 80 bp, synthetic construct
  source 1..80: mol_type = other DNA
tcttctcctgcttgacttgccccgcgtccagtctggagtacaggaatgcgtctggcctatatttgcttaccaacgactgc

SEQ ID NO: 141251 - DNA, 80 bp, synthetic construct
  source 1..80: mol_type = other DNA
caagacctcgggggggcggggggaggcgggagccgggaggtcccgctggcaggagtgccggttagactttcgtcctcgcc

SEQ ID NO: 141252 - DNA, 80 bp, synthetic construct
  source 1..80: mol_type = other DNA
ggatctcccattgtgaacagagagggaaaaatagtgggtctttatggaaatggagtggtgacaacaagtggaacctacgt

SEQ ID NO: 141253 - DNA, 80 bp, synthetic construct
  source 1..80: mol_type = other DNA
gcgctatcacgtactccacatacggggaattcttggccgatgggggatgttccggaggagcgtacgacatcatcatctgt

SEQ ID NO: 141254 - DNA, 80 bp, synthetic construct
  source 1..80: mol_type = other DNA
gtccgagctgtggaggacgggattaactacgcaacagggaatttacccggttgctccttttctatctttcttttagctat

SEQ ID NO: 141255 - DNA, 80 bp, synthetic construct
  source 1..80: mol_type = other DNA
gggggctagaaggggtggagcagagggaagcacccttggcgacatctggaagcaacggttgaactcatgcaccaaagagg

SEQ ID NO: 141256 - DNA, 80 bp, synthetic construct
  source 1..80: mol_type = other DNA
gggggggatgggattttttgccgggaaacccccccccgccagcctttaacaaaacccgcgccttttgcgtccacctctcg

SEQ ID NO: 141257 - DNA, 80 bp, synthetic construct
  source 1..80: mol_type = other DNA
ggatcaaatacacagatagaaaatggtgctttgatggagaacgtaataaccaaattttagaggagaacatggatgtggaa

SEQ ID NO: 141258 - DNA, 80 bp, synthetic construct
  source 1..80: mol_type = other DNA
ccgggcgacgggcgcgcgcacggcgggcgttgggcgcgcggccgcgggagcgggcgaggagccccacccacagacgtgga

SEQ ID NO: 141259 - DNA, 80 bp, synthetic construct
  source 1..80: mol_type = other DNA
gtggcaacaagaccttgcactgccccacggactgtttccgcaagcatcctgaagccacctatgctaagtgtggcgcaggc

SEQ ID NO: 141260 - DNA, 80 bp, synthetic construct
  source 1..80: mol_type = other DNA
cactgttcgtgggcttacgggcctctttacccctggagctgcccagcagctccagctggtgaacagcaatgggagttggc

SEQ ID NO: 141261 - DNA, 80 bp, synthetic construct
  source 1..80: mol_type = other DNA
gaaagcgtctagccatggcgttagtacgagtgtcgtgcagcctccaggaccccccctcccgggagtctaaggcctttcgc

SEQ ID NO: 141262 - DNA, 80 bp, synthetic construct
  source 1..80: mol_type = other DNA
atcggaaaatttttgaaggaaagcgtctagccaatcgcagtcacaaggtaagcttaaacacgtagcagccctgtggacac

SEQ ID NO: 141263 - DNA, 80 bp, synthetic construct
  source 1..80: mol_type = other DNA
gctctaatcaccaaccaaatggagaaagggcacagggccttggcattggccataatcaagtacacataccaaaacaaagt

SEQ ID NO: 141264 - DNA, 80 bp, synthetic construct
  source 1..80: mol_type = other DNA
cacccgagtctctgggggtagtgttgcccacaccacccagcgttttacttccatgtttagcgttggggctaggcagaatt

SEQ ID NO: 141265 - DNA, 80 bp, synthetic construct
  source 1..80: mol_type = other DNA
gagggaggcagtgcagtaccccagttcctccgtgctggggaaatctctctgccgggtacgggctccagacgaaggaccca

SEQ ID NO: 141266 - DNA, 80 bp, synthetic construct
  source 1..80: mol_type = other DNA
gggggggtccactggctcgccttcgcctggaacccgcgtaaccgcacctgctacctgttcgacccttttggtttctccga

SEQ ID NO: 141267 - DNA, 80 bp, synthetic construct
  source 1..80: mol_type = other DNA
gagataaaagcccgggcgtcaactgtgagcgcacggctcctcagtatcgaggaagcctgcgacctcacgccatcgcattc

SEQ ID NO: 141268 - DNA, 80 bp, synthetic construct
  source 1..80: mol_type = other DNA
ggtgctggtagtaagacccttgcggcgccaaaaggacctataattcagatgtacacaaacgtggataaggatttagtcgg

SEQ ID NO: 141269 - DNA, 80 bp, synthetic construct
  source 1..80: mol_type = other DNA
acgcatgccgttgtcaggcccaggacccgtcgcagcgtgtcgcgtacgacccctgccgccgtggtgtacgcgggcccgcg

SEQ ID NO: 141270 - DNA, 80 bp, synthetic construct
  source 1..80: mol_type = other DNA
ttgggactttggatcagttggaggggtgttcacctcagttgggaaggctgtccatcaagtgttcggaggagcattccgct

SEQ ID NO: 141271 - DNA, 80 bp, synthetic construct
  source 1..80: mol_type = other DNA
gacgcgctcatgacggggtttaccggcgactttgattctgtcatagactgcaacaccaccgtcacgcagacggtggattt

SEQ ID NO: 141272 - DNA, 80 bp, synthetic construct
  source 1..80: mol_type = other DNA
tggcgatccaatacgaacaggggcttggcctgctggcgcagcaggcacgcattggcttgggctccaacaccaagcgtttc

SEQ ID NO: 141273 - DNA, 80 bp, synthetic construct
  source 1..80: mol_type = other DNA
gcggcagatttggcaaacattatttttccagaaaggctcatgataaccttgcaaaatggtctgcctgactttatgagtca

SEQ ID NO: 141274 - DNA, 80 bp, synthetic construct
  source 1..80: mol_type = other DNA
aagctggaaaaactgcaacgaaagtatggaggcggcctggtcagagtccccctgtccaggaactcgacacatgaaatgta

SEQ ID NO: 141275 - DNA, 80 bp, synthetic construct
  source 1..80: mol_type = other DNA
aaccatgaaggctttcacagcttgcgttctgattagcataatcacacttagtttagcagcacctaaaccagaagtatata

SEQ ID NO: 141276 - DNA, 80 bp, synthetic construct
  source 1..80: mol_type = other DNA
ccgctctgcctgtgtgggcccgacctgattataacccgcctttgcttgagtcttggaaggcaccagactatgaccctccg

SEQ ID NO: 141277 - DNA, 80 bp, synthetic construct
  source 1..80: mol_type = other DNA
cttaaacccacagctagctttatttcctttgtcatgtatttttacagcgacggaacgtggaggaaaaactatcccgtgtt

SEQ ID NO: 141278 - DNA, 80 bp, synthetic construct
  source 1..80: mol_type = other DNA
catgcccgcattgtcaacgggtttaatacacctccaccaaaatatcgtggatgtccaatacctttatggcgttggatctg

SEQ ID NO: 141279 - DNA, 80 bp, synthetic construct
  source 1..80: mol_type = other DNA
gctgcaaggtcattagatatccgactcataagctgtgaaaatgcgtttagtccaatttcgttccagactcggctgtatac

SEQ ID NO: 141280 - DNA, 80 bp, synthetic construct
  source 1..80: mol_type = other DNA
accgaggggtttgttgtgcgcagggacgccagttggccgatatacttaccgaggtccatgtcgtacgcggggaacactat

SEQ ID NO: 141281 - DNA, 80 bp, synthetic construct
  source 1..80: mol_type = other DNA
gtttgttcccagcataaaagctggaaatgacattgcaaattgtttgaggaaatcgggaaagaaagtcatccaattgagca

SEQ ID NO: 141282 - DNA, 80 bp, synthetic construct
  source 1..80: mol_type = other DNA
cagcgctttatttacgtcttgttttttttgcgtttcctccgcgggtcccttcccaacacgcctgcccccgcctcaggggt

SEQ ID NO: 141283 - DNA, 80 bp, synthetic construct
  source 1..80: mol_type = other DNA
ggtggaacagcccctcccacagcgcggcgcggatttggccgagcccacccacccgcacgtcggggcccctccccacgcgc

SEQ ID NO: 141284 - DNA, 80 bp, synthetic construct
  source 1..80: mol_type = other DNA
ggggcaggtgttcaccttccagccgcgtcgccattggaccacgcaggattgtaattgctccatctataccggccatatca

SEQ ID NO: 141285 - DNA, 80 bp, synthetic construct
  source 1..80: mol_type = other DNA
cccccgccgcgagcttaccccaacccgaggcgcccggcgcggaggccggcgccttagttaacgccagcagcgcggcccac

SEQ ID NO: 141286 - DNA, 80 bp, synthetic construct
  source 1..80: mol_type = other DNA
gtggaagtactcgcgagcgcggtggggcagccataccgcgtaaagggtaatggcgctgacgctctcctccacccacacga

SEQ ID NO: 141287 - DNA, 80 bp, synthetic construct
  source 1..80: mol_type = other DNA
tatcacaaaggatggactgcaaataggaatagatgaaaacaaggaagaagatgaagaaggaagagaaattttcgcagtta

SEQ ID NO: 141288 - DNA, 80 bp, synthetic construct
  source 1..80: mol_type = other DNA
atcagcgcgcttcgcctcctggtggcggaggtgccccagagtgaggtgtaccagtccgggccagactactttttccaaac

SEQ ID NO: 141289 - DNA, 80 bp, synthetic construct
  source 1..80: mol_type = other DNA
gagcgggcgtgatggttgaaggtgttttccacaccctttggcatacaacaaaaggagccgctttgatgagcggagagggc

SEQ ID NO: 141290 - DNA, 80 bp, synthetic construct
  source 1..80: mol_type = other DNA
accaagtagccccgaggaggaaaagttaccaataaacccgctgagtaactcgcttatgcgataccacaacaaggtatact

SEQ ID NO: 141291 - DNA, 80 bp, synthetic construct
  source 1..80: mol_type = other DNA
gcatgtttgactccgtggtgctctgtgagtgttatgacgcaggcgctgcttggtacgagctaacgccggctgaaaccact

SEQ ID NO: 141292 - DNA, 80 bp, synthetic construct
  source 1..80: mol_type = other DNA
cgcgcgtgtacaacatcatccagctggtgcttttccacaacaacgaccaggcgcgccgcgagtacgtggccggcaccatc

SEQ ID NO: 141293 - DNA, 80 bp, synthetic construct
  source 1..80: mol_type = other DNA
cgcattgaaaggatccgcagtgagcacgcggaaacgtggttctttgacgagaaccacccatataggacatgggcttacca

SEQ ID NO: 141294 - DNA, 80 bp, synthetic construct
  source 1..80: mol_type = other DNA
ttgtggtggctatgctacctgttgactttggcggaagccttagtccaggagtgggtgccgcccatgcaagcgcggagagg

SEQ ID NO: 141295 - DNA, 80 bp, synthetic construct
  source 1..80: mol_type = other DNA
ggcagtaaagacgaagctcaaactcactccattgcccgccgcggccagactggatctttcaggatggtttacgacgggcg

SEQ ID NO: 141296 - DNA, 80 bp, synthetic construct
  source 1..80: mol_type = other DNA
gtcatctttttcatgtctcccaaaggcatcagtagaatgtctatggcgatgggcacaatggccggctgtggatatctcat

SEQ ID NO: 141297 - DNA, 80 bp, synthetic construct
  source 1..80: mol_type = other DNA
ccccctcccgcccctcgccccctcccgcccctcgccccctcccgcccctcgaataaacaacgctactgcaaaacttaatc

SEQ ID NO: 141298 - DNA, 80 bp, synthetic construct
  source 1..80: mol_type = other DNA
ctttggtggttggggtcatatgcgccgcgatcttacggcggcatatcggccctggcgaaggagccgtgcaatggatgaac

SEQ ID NO: 141299 - DNA, 80 bp, synthetic construct
  source 1..80: mol_type = other DNA
tctctcgtgcctcaccacccctgcctctgcggtgcactatgccaataggtctgacatctaccagctgaccaatgactgcc

SEQ ID NO: 141300 - DNA, 80 bp, synthetic construct
  source 1..80: mol_type = other DNA
acgaaattaaaccagtaagcgttttttccgttaaaacagctctggcgatttctggggcgtcaaaacccgcatgcaattcc

SEQ ID NO: 141301 - DNA, 80 bp, synthetic construct
  source 1..80: mol_type = other DNA
cctgtgaatgagctgccccatggctggaaagcctgggggaaatcgtactttgtcagagcagcaaagaccaacaacagttt

SEQ ID NO: 141302 - DNA, 80 bp, synthetic construct
  source 1..80: mol_type = other DNA
gcaggggcccaactcggccgcctgtggcctgttctgctgcatgtttctccacgccttcgccaactggccccaaactccca

SEQ ID NO: 141303 - DNA, 80 bp, synthetic construct
  source 1..80: mol_type = other DNA
ggatgtggcttgtttggtaaggggagcattgacacatgcgcaaagttcacctgctctaactcagctgcggggagacttat

SEQ ID NO: 141304 - DNA, 80 bp, synthetic construct
  source 1..80: mol_type = other DNA
acacagttgatttttgtttgaagtgttctaaaacactgtcagaaacacttggcgtgttaaacactgtacgcagaaagcag

SEQ ID NO: 141305 - DNA, 80 bp, synthetic construct
  source 1..80: mol_type = other DNA
ttaataaaaatgtgtattacgttactcatgtgtctccattacgcatcacagggggtatttatacccgataatatacaaaa

SEQ ID NO: 141306 - DNA, 80 bp, synthetic construct
  source 1..80: mol_type = other DNA
ggtttgttccaagcatcaaatcaggaaatgacattgccaactgtttaagaaagaatgggaaacgggtggtccaattgagc

SEQ ID NO: 141307 - DNA, 80 bp, synthetic construct
  source 1..80: mol_type = other DNA
agacgcggggcatcgtcagcatcttcactccgggggccagacagaacatccagttgattaattccaacggcagctggcac

SEQ ID NO: 141308 - DNA, 80 bp, synthetic construct
  source 1..80: mol_type = other DNA
caacagcaaatgtgtccctggcagctatagccaaccaggcggtggttctgatgggtttggacaaaggatggccaatatca

SEQ ID NO: 141309 - DNA, 80 bp, synthetic construct
  source 1..80: mol_type = other DNA
aaccagattgcctccgtgttttttgatgcgtttcttacctcgtgtttccatgaggcggtatccggcttcggtgacaaaca

SEQ ID NO: 141310 - DNA, 80 bp, synthetic construct
  source 1..80: mol_type = other DNA
ggatgaatgctacagggtttgtcaagacatgcggcgcaccaccatgcattacccgtcctacgaggggcaacaacaccttg

SEQ ID NO: 141311 - DNA, 80 bp, synthetic construct
  source 1..80: mol_type = other DNA
acgcaaccagcggccttgccggcctcttcacttctggcgctaagcagaacatccagctcattaacaccaatggcagttgg

SEQ ID NO: 141312 - DNA, 80 bp, synthetic construct
  source 1..80: mol_type = other DNA
tactatccgtaggggtaggcattttcctgctccccgctcggtaagcagggagcacaaagctacactccattagcttttct

SEQ ID NO: 141313 - DNA, 80 bp, synthetic construct
  source 1..80: mol_type = other DNA
tcggagatggccgcgtcgtgtggcggcgttgttcttgtcgggttaatggcactgactctgtcaccgtactacaagtgcta

SEQ ID NO: 141314 - DNA, 80 bp, synthetic construct
  source 1..80: mol_type = other DNA
gaaccggaatccgaactgtgacgaccggagagtctatcacctactccacatatggcaaattcctcgcagatggaggctgc

SEQ ID NO: 141315 - DNA, 80 bp, synthetic construct
  source 1..80: mol_type = other DNA
gtggatgaacggctcggggtatgtcaagacatgtggtgcccccccctgtcacatctacggagtgcgggaaggcaagtcca

SEQ ID NO: 141316 - DNA, 80 bp, synthetic construct
  source 1..80: mol_type = other DNA
tttgccctggagattaaccttaatgccaacctatggagaaatttcctctactccaacattgcactgtacctgcctgacaa

SEQ ID NO: 141317 - DNA, 80 bp, synthetic construct
  source 1..80: mol_type = other DNA
caaaagcttatgggcagatgtggctgctgagttacttccaccggcgcgacttgcgaacgcttggactcgccatctgctcg

SEQ ID NO: 141318 - DNA, 80 bp, synthetic construct
  source 1..80: mol_type = other DNA
cggggagcgttgtcgccgtcggtctgccggcccccgtccctcccttttttgaccaaccagcgccccccccccctcaccac

SEQ ID NO: 141319 - DNA, 80 bp, synthetic construct
  source 1..80: mol_type = other DNA
catacgcgtttgatggtgagacggcagggtccctaggttgtggtgccctgctcttgataaccatcttgacattgtctcct

SEQ ID NO: 141320 - DNA, 80 bp, synthetic construct
  source 1..80: mol_type = other DNA
ggccctgtcctatgtccatccggtcacgtcgtcggcctctttcgtgcggcagtctgcacaagaggcgttgctaaggcgat

SEQ ID NO: 141321 - DNA, 80 bp, synthetic construct
  source 1..80: mol_type = other DNA
aggaatgccccttacctcactaacattatgtaaggttaaactgttacactcagaaactgaagaattctcaggtccaaaca

SEQ ID NO: 141322 - DNA, 80 bp, synthetic construct
  source 1..80: mol_type = other DNA
attcagggcgctccagccaaagctcatgttggggatgatggaacccacgtgaccatcgtaccagatgcggcagtatatca

SEQ ID NO: 141323 - DNA, 80 bp, synthetic construct
  source 1..80: mol_type = other DNA
agggagctccattggcaagatgtttgagtccacgtacagaggtgcaaaacgaatggccattttaggtgaaacagcttggg

SEQ ID NO: 141324 - DNA, 80 bp, synthetic construct
  source 1..80: mol_type = other DNA
cctcttgcttaacatcttaggagggtgggtagcttcccaactggcgcccccttctgcctctaccgctttcgtagcgagtg

SEQ ID NO: 141325 - DNA, 80 bp, synthetic construct
  source 1..80: mol_type = other DNA
ctacctgacaagagaccccacaactcccttagcgcgcgccgcttgggagacagcaagacacactcctgtcaattcctggt

SEQ ID NO: 141326 - DNA, 80 bp, synthetic construct
  source 1..80: mol_type = other DNA
acagctcgtggcttcgcgacgtgtgggagtgggtttgcactgccctaacagacttcaaaaactggttggcctccaagctg

SEQ ID NO: 141327 - DNA, 80 bp, synthetic construct
  source 1..80: mol_type = other DNA
cagccactggaacaacggccatgtggggaggcattgttgtccttgcactgctcgtcactggtctggtaaagattgaaagc

SEQ ID NO: 141328 - DNA, 80 bp, synthetic construct
  source 1..80: mol_type = other DNA
ggttacggtgccaaggacgtccgtggtcataccggcagggccattaaccacatcaactccgtgtgggaggacctgttgga

SEQ ID NO: 141329 - DNA, 80 bp, synthetic construct
  source 1..80: mol_type = other DNA
cgccgtatacagcttgaagatcgccgggtggcacgggcccaaggccccatacacgagcaccctgctgcccccggagctgt

SEQ ID NO: 141330 - DNA, 80 bp, synthetic construct
  source 1..80: mol_type = other DNA
taataggactgcccttaactgcaatgattccctgcaaacgggtttcatagccggcctaatctatgcccacaaattcaact

SEQ ID NO: 141331 - DNA, 80 bp, synthetic construct
  source 1..80: mol_type = other DNA
aggggtgatacccggggtgcgctgctaagtcccagaccaatttccaccctcaagggatcctcaggcggtccgctgctgtg

SEQ ID NO: 141332 - DNA, 80 bp, synthetic construct
  source 1..80: mol_type = other DNA
cggactgaggagtccatttaccaatgctgccaactagaccccaaggctcggaaagtcatatcatcactcaccgagcggtt

SEQ ID NO: 141333 - DNA, 80 bp, synthetic construct
  source 1..80: mol_type = other DNA
cagcctatgcctcgcagggctataaggtactggtgctcaacccgtctgtggctgctacgctcggctttggtagttacatg

SEQ ID NO: 141334 - DNA, 80 bp, synthetic construct
  source 1..80: mol_type = other DNA
ggcattacgctcccaggccatgtaatgtggtgtctgccctcacagtgtgcggcccagtttactgcttcacgcccagccct

SEQ ID NO: 141335 - DNA, 80 bp, synthetic construct
  source 1..80: mol_type = other DNA
tacacctggggagctaacaagactgatgtcttcctgttatccagccagagacctccatcaggcgggtggtacggatgcac

SEQ ID NO: 141336 - DNA, 80 bp, synthetic construct
  source 1..80: mol_type = other DNA
tgctcaatgtcatactcgtggacgggggcgcttgtcacgccctgtgcggcagaagagccgaaactaccgatcagtccact

SEQ ID NO: 141337 - DNA, 80 bp, synthetic construct
  source 1..80: mol_type = other DNA
gcgtgtggcgattaaaagcctgaccgaacgtctgtatgtgggcggcccgctgaccaacagccgtggcgaaaactgcggct

SEQ ID NO: 141338 - DNA, 80 bp, synthetic construct
  source 1..80: mol_type = other DNA
gaaagttgacacgcgtacaccaaaagcgaaacgaggcacagcacaaattatggaggtgacagccaggtggttatggggtt

SEQ ID NO: 141339 - DNA, 80 bp, synthetic construct
  source 1..80: mol_type = other DNA
gtcgtaagccagcccgcctgattgtgtatcctgacctgggagtgcgtatctgcgagaagcgcgctctatatgatgtgata

SEQ ID NO: 141340 - DNA, 80 bp, synthetic construct
  source 1..80: mol_type = other DNA
ctcgccattcaaagcgcagtcgtcgttccatcacagtgcagactcatggtgaaagcactttggtcaacaaaaaggatgcc

SEQ ID NO: 141341 - DNA, 80 bp, synthetic construct
  source 1..80: mol_type = other DNA
atcatttgcttgacttgcatgttttgcttgacaagttccctgagaaggcgttcaccgcccaaggagagcaactcttgcaa

SEQ ID NO: 141342 - DNA, 80 bp, synthetic construct
  source 1..80: mol_type = other DNA
acccaccagggtcgttgctgctgagatgtctgaggccctgagaggacttcccatccggtaccaaacctcagcagtgcaca

SEQ ID NO: 141343 - DNA, 80 bp, synthetic construct
  source 1..80: mol_type = other DNA
caggaaagaacgtggtcaacgtccagacaaaaccgagcttgttcaaagtgaggaatgggggagaaatcggggctgtcgct

SEQ ID NO: 141344 - DNA, 80 bp, synthetic construct
  source 1..80: mol_type = other DNA
ccacgccgcctgctgtgcctcagacattccaagtggcgcatttgcacgcccccacggggagcggcaagagtaccaaggtc

SEQ ID NO: 141345 - DNA, 80 bp, synthetic construct
  source 1..80: mol_type = other DNA
ctcacacccccatggatcacaaccccaccatggatctgctcaccggagtgcccaacagcatgcttcacagcccccaggtc

SEQ ID NO: 141346 - DNA, 80 bp, synthetic construct
  source 1..80: mol_type = other DNA
atagctactctccaggtgaactcaatagggttggagcatgcctcaggaagcttggggcccctcccttacgagcctggaag

SEQ ID NO: 141347 - DNA, 80 bp, synthetic construct
  source 1..80: mol_type = other DNA
ggggagcttgctctccccccgacccatctcatacctgaaaggctcttcgggcggccctctgctttgcccctcgggacatg

SEQ ID NO: 141348 - DNA, 80 bp, synthetic construct
  source 1..80: mol_type = other DNA
cgtggtcttcatcagcctagcggtacttaccctgtcgccgtactacaaacagtacatggcccgcggcatctggtggctgc

SEQ ID NO: 141349 - DNA, 80 bp, synthetic construct
  source 1..80: mol_type = other DNA
catagtgcaatcacactggcagaaggcggaggcgttctggcaaaagcacatgtggaactttgtgagcgggattcagtatc

SEQ ID NO: 141350 - DNA, 80 bp, synthetic construct
  source 1..80: mol_type = other DNA
taaatgtaactgaggagctgagaagtgaccaccttaccctgtcttgcctgcggactgactatgagtcaagtgatgaagac

SEQ ID NO: 141351 - DNA, 80 bp, synthetic construct
  source 1..80: mol_type = other DNA
cacggaggctatgaccaggtactccgccccccccggggaccccccccaaccagagtacgacctggagctcataacatcgt

SEQ ID NO: 141352 - DNA, 80 bp, synthetic construct
  source 1..80: mol_type = other DNA
ccatgagcttcctcttggctggaggtctggtcttggccatgacccttggagtgggggcggatgttggctgcgctgtggac

SEQ ID NO: 141353 - DNA, 80 bp, synthetic construct
  source 1..80: mol_type = other DNA
cgggcggcaggggcggctggggcaggagcggctgaggcaggggcggctgtggcaggggcggctgtggcaggggcgcctgg

SEQ ID NO: 141354 - DNA, 80 bp, synthetic construct
  source 1..80: mol_type = other DNA
agagagggagcttcataaacaaggaaaatgtgccacgtgtgtctacaacatgatgggaaagagagagaaaaaattaggag

SEQ ID NO: 141355 - DNA, 80 bp, synthetic construct
  source 1..80: mol_type = other DNA
tatgataccccttgctttgactcaactgtcaccgagcgcgacatcaggactgaagctgacatctacctgagctgccaatt

SEQ ID NO: 141356 - DNA, 80 bp, synthetic construct
  source 1..80: mol_type = other DNA
gaaacttggagagtttggcaaagcaaaaggcagtagagctatatggtacatgtggttgggagccaggtaccttgagttcg

SEQ ID NO: 141357 - DNA, 80 bp, synthetic construct
  source 1..80: mol_type = other DNA
catgttcattttcttacctagcccaagaataaaaaaatactcacaaagaattattatcatattgtttattcttgttttac

SEQ ID NO: 141358 - DNA, 80 bp, synthetic construct
  source 1..80: mol_type = other DNA
gtacccgtggagtggctaaggcggtggacttcatccccgtagagagcctagagaccaccatgcggtccccggtgttcaca

SEQ ID NO: 141359 - DNA, 80 bp, synthetic construct
  source 1..80: mol_type = other DNA
tcttaggggccttacttctgtggatgggcatcaactcacgcgaccgctctatagccatgactttcttggctgttggcgga

SEQ ID NO: 141360 - DNA, 80 bp, synthetic construct
  source 1..80: mol_type = other DNA
agggccggcgcttttttcaactcctcgtaggtgagacagtccggcgaggagagacccagctccgcccgggcccagtcgga

SEQ ID NO: 141361 - DNA, 80 bp, synthetic construct
  source 1..80: mol_type = other DNA
tggacctaggcgccggaacaagacatgtggcagtggaacctgaggtagccaacctagatatcattggccagaggatagag

SEQ ID NO: 141362 - DNA, 80 bp, synthetic construct
  source 1..80: mol_type = other DNA
aaggtgaaaccagatcaagatggtgatgttgaaagcgagtgggataaagatgataccattgcaaggcagaatcaaatcgc

SEQ ID NO: 141363 - DNA, 80 bp, synthetic construct
  source 1..80: mol_type = other DNA
gaagtccaagtgctagcgttggaaccagggaaaaatcctagggccgtacaaacaaaacccggcatgttcaaaactgacac

SEQ ID NO: 141364 - DNA, 80 bp, synthetic construct
  source 1..80: mol_type = other DNA
ctagagaccaccatgagatccccggtattcacagacaattccagcccgccagccgtgccgcaaacctttcaggtggcgca

SEQ ID NO: 141365 - DNA, 80 bp, synthetic construct
  source 1..80: mol_type = other DNA
gcacaacaaactcgaggcttggtgggcaccatcgtcaccagtctcacgggccgcgacaagaacgtggtggaaggtgagat

SEQ ID NO: 141366 - DNA, 80 bp, synthetic construct
  source 1..80: mol_type = other DNA
ggcccttggacgggttggcctagccgtgggcctgtggggcctgctgtggttgggtgtggtcgtggtgctggccaatgcct

SEQ ID NO: 141367 - DNA, 80 bp, synthetic construct
  source 1..80: mol_type = other DNA
tagcggccagcccctggggagacaggtccacggagtccggaaccaccgtcggctgacccaggggccccaggctgtagtcc

SEQ ID NO: 141368 - DNA, 80 bp, synthetic construct
  source 1..80: mol_type = other DNA
cggtctatgcctcacggtgcacacatctggaaaacagggattttgttactggcactcaggggaccactcgtgtgactctg

SEQ ID NO: 141369 - DNA, 80 bp, synthetic construct
  source 1..80: mol_type = other DNA
gagatgcgcgactgccggtttcgggcgggcagggagctgcgcgagggcctggaccgccagcgcgtgctgcgcgacgatga

SEQ ID NO: 141370 - DNA, 80 bp, synthetic construct
  source 1..80: mol_type = other DNA
caactggttcaagaaaggaagttctatcggccaaatgtttgagacaacgatgagaggggcgaagagaatggccattttgg

SEQ ID NO: 141371 - DNA, 80 bp, synthetic construct
  source 1..80: mol_type = other DNA
ccggtcacgcagatgtactcgagtgctgagggggacttggtaggctggcccagcccccctgggaccaagtctttggagcc

SEQ ID NO: 141372 - DNA, 80 bp, synthetic construct
  source 1..80: mol_type = other DNA
gtgctgtctgtaagcactaatattcagtcgccagccgtcattgtcactgtaaagctgagcgatagaatgcctgatattga

SEQ ID NO: 141373 - DNA, 80 bp, synthetic construct
  source 1..80: mol_type = other DNA
gaagttggggagctcgataatggaacacatgcgcggcggcccggagcccgcggccgcgcgcgtccactcgcccccctcca

SEQ ID NO: 141374 - DNA, 80 bp, synthetic construct
  source 1..80: mol_type = other DNA
tgtattgcttcacgccgagtcctgtggtagtgggtaccactgaccggaaaggtaatccaacctacacctggggggagaac

SEQ ID NO: 141375 - DNA, 80 bp, synthetic construct
  source 1..80: mol_type = other DNA
cccacacatgaaaatcatggcttaaagacccggcaagaaaagtggatgactggaagaatgggcgagagacagctgcagaa

SEQ ID NO: 141376 - DNA, 80 bp, synthetic construct
  source 1..80: mol_type = other DNA
tggtgaccggcatccacggcgcggtagatctcgccaatcaagcggtgcagaaagagattgataggcgtttggaaaattcg

SEQ ID NO: 141377 - DNA, 80 bp, synthetic construct
  source 1..80: mol_type = other DNA
aaacaaacctcttacaaacaatcccccgtgtttactgctattggacgaacatatgaatccctcttatgttttatgggaac

SEQ ID NO: 141378 - DNA, 80 bp, synthetic construct
  source 1..80: mol_type = other DNA
agatgttcatctgtgtgaactttttgactcaggattgttggaagggattgaaagattaatacagtttgaacagtttttta

SEQ ID NO: 141379 - DNA, 80 bp, synthetic construct
  source 1..80: mol_type = other DNA
gccaaggttttgattctcatgctagtgttttccggcgtcgacgggaaaacccacgtgacagggatggtggccggtaaaaa

SEQ ID NO: 141380 - DNA, 80 bp, synthetic construct
  source 1..80: mol_type = other DNA
cgaaggcgctcgatttcattccggttgaaaacctggaaaccacgatgcgctcgcccgtgttcactgacaacagcacgcca

SEQ ID NO: 141381 - DNA, 80 bp, synthetic construct
  source 1..80: mol_type = other DNA
gtggcccgccccacctggtgctaagtcgcttacgccatgttgttgtggtgcatcagatttgtatcttgtgacaaggcacg

SEQ ID NO: 141382 - DNA, 80 bp, synthetic construct
  source 1..80: mol_type = other DNA
tcgggaggggcctatgacatcatcatatgtgacgagtgccactctgtagatgccacgagtgtcttgggaataggcaccgt

SEQ ID NO: 141383 - DNA, 80 bp, synthetic construct
  source 1..80: mol_type = other DNA
gcgattggtccaccccgtgctctggtacatggttacgtgacatttgggactgggtctgtacggtgctactagacttcaaa

SEQ ID NO: 141384 - DNA, 80 bp, synthetic construct
  source 1..80: mol_type = other DNA
agtggatgccaccacgaccgtcactggtgggtctgccgcgcatgccacgtctggctttgccaagctcttcagctccgggt

SEQ ID NO: 141385 - DNA, 80 bp, synthetic construct
  source 1..80: mol_type = other DNA
aacaaaactttcttcactgcttatttgcattgcggcatttgcggggtttcgtttgttgacctccattttttgataagact

SEQ ID NO: 141386 - DNA, 80 bp, synthetic construct
  source 1..80: mol_type = other DNA
aaacaactcagcaggcgtgggaacaatcagcacatcagcagcacatacgacattaatcgtgccgatacccaggttaggcg

SEQ ID NO: 141387 - DNA, 80 bp, synthetic construct
  source 1..80: mol_type = other DNA
ctgaaaacttgcttaacaatgatggatcgagcagaggagttggaataaacgtaagacttggaaaagatggaggtttatcc

SEQ ID NO: 141388 - DNA, 80 bp, synthetic construct
  source 1..80: mol_type = other DNA
gcggacaaggccgggtcccgtagccgccccgcgacagaaccggagtccgacggcacgcgcgacggggtctgcgaggctga

SEQ ID NO: 141389 - DNA, 80 bp, synthetic construct
  source 1..80: mol_type = other DNA
cgccatgccagatagtcccaggagattacaacagctctgctaatgagcttttgtgccccaccgattgcttccgtaaacat

SEQ ID NO: 141390 - DNA, 80 bp, synthetic construct
  source 1..80: mol_type = other DNA
tttcagcaagattagcacatgggtgaccgctgagctgaaggaaggtggcatggatttttacgtgcccagccaagagccca

SEQ ID NO: 141391 - DNA, 80 bp, synthetic construct
  source 1..80: mol_type = other DNA
cggtagtagcagggtgcgccctcccacccaccggccaggccccaataccccctccgcggaggaggctggctgtggtcctg

SEQ ID NO: 141392 - DNA, 80 bp, synthetic construct
  source 1..80: mol_type = other DNA
gtatttactggactcactcacatagacgcccacttcttgtcccagacaaagcaggcgggggacaacctcgcgtacctagt

SEQ ID NO: 141393 - DNA, 80 bp, synthetic construct
  source 1..80: mol_type = other DNA
ctcaccatcattggtctaatagcagccaacgagatggggctgatagaaaaaacaaaaacggattttgggttttaccaggt

SEQ ID NO: 141394 - DNA, 80 bp, synthetic construct
  source 1..80: mol_type = other DNA
cttgactgtgctccctgttgcggttgttgtccagaagaccccgacaccacgtgttgctgttgtccaacggatgccgacgt

SEQ ID NO: 141395 - DNA, 80 bp, synthetic construct
  source 1..80: mol_type = other DNA
gtcaggcgcagaaattttaaaatcacaattggggccagcgctaccgcgcgaattgcggtatacgggattagcacactgga

SEQ ID NO: 141396 - DNA, 80 bp, synthetic construct
  source 1..80: mol_type = other DNA
tgggcgacgacagcctatccccaaggctcgtcgttccgagggcaggtcctgggctcagcccgggtacccatggcccctct

SEQ ID NO: 141397 - DNA, 80 bp, synthetic construct
  source 1..80: mol_type = other DNA
acatatggatgaaattccgagaaggaagttcagaagtgtgtgaccatagattaatgtcggcggcaatcaaagatcagaaa

SEQ ID NO: 141398 - DNA, 80 bp, synthetic construct
  source 1..80: mol_type = other DNA
catctcttacgtcatgttaatattctttgtcctcatggtcgtcataattcccgaaccaggacagcagagatcaatccagg

SEQ ID NO: 141399 - DNA, 80 bp, synthetic construct
  source 1..80: mol_type = other DNA
gagcgcttgtcctcctgccgtaggctggacgactttcgtatcgggtggggaaccttggaatacgagactaatgtcaccaa

SEQ ID NO: 141400 - DNA, 80 bp, synthetic construct
  source 1..80: mol_type = other DNA
ttttcgacattgggaataataaaaacggcttttgcaactttaaaaactttatttatctcgattacgatacatatgtacca

SEQ ID NO: 141401 - DNA, 80 bp, synthetic construct
  source 1..80: mol_type = other DNA
caacacggtcctagaggacaacaatgaagtggaagtgataaccaaagtgggtgaaagaaagattctcaggccacggtggg

SEQ ID NO: 141402 - DNA, 80 bp, synthetic construct
  source 1..80: mol_type = other DNA
ctggccgcctgcgccgcgcgagggtctgacgcggctccgtcaggcccggtcctgccgctgtggccccaggtgtttgtcgg

SEQ ID NO: 141403 - DNA, 80 bp, synthetic construct
  source 1..80: mol_type = other DNA
caaaagaaggtgacttttgaccgcgtccaggtacttgaccaacattatcaggacgtgcttaaggagattaaggcccgagc

SEQ ID NO: 141404 - DNA, 80 bp, synthetic construct
  source 1..80: mol_type = other DNA
cgacaaaacctatcaaccagagcctcaagtgggtcaaacacagtggaacagtgaagttggcgccgctcaaaaggtagcgg

SEQ ID NO: 141405 - DNA, 80 bp, synthetic construct
  source 1..80: mol_type = other DNA
gctgcgagtaccttacttcgtgcgtgctcatgcgcttttgcgcatgtgcgctgccgtgcggggtcttgcgggaggtaggt

SEQ ID NO: 141406 - DNA, 80 bp, synthetic construct
  source 1..80: mol_type = other DNA
cggcctctgagtacgcggaggtgacgcagcacgggtcatactcctacataacaggactgactactgacaatttaaaagtc

SEQ ID NO: 141407 - DNA, 80 bp, synthetic construct
  source 1..80: mol_type = other DNA
actctactaccttgacctacgagaccgtgtctggaacgccgttggagactgcagcctccgccgccgcttcagccgctgca

SEQ ID NO: 141408 - DNA, 80 bp, synthetic construct
  source 1..80: mol_type = other DNA
ctcggaaacgagctccatatcctccatgcccccccttgaaggggagccggtggacccggatttggagtctgaaccggtgg

SEQ ID NO: 141409 - DNA, 80 bp, synthetic construct
  source 1..80: mol_type = other DNA
gagagtgcccccctcccctgtggagccactgctacttactacgacttgctaactacctagcttaccactcagaccttatg

SEQ ID NO: 141410 - DNA, 80 bp, synthetic construct
  source 1..80: mol_type = other DNA
agtaaaggcgaaaagcggccgcgaccggatctggaggaaaccctagttgtggaatcccgcgagcccccctcgtacgagca

SEQ ID NO: 141411 - DNA, 80 bp, synthetic construct
  source 1..80: mol_type = other DNA
aagaatcactgaggatgacctccaaaatgaggaactgatcacggaacagatggctccccaccacaagatcctagccaaag

SEQ ID NO: 141412 - DNA, 80 bp, synthetic construct
  source 1..80: mol_type = other DNA
tgtgtggatgaacagtacagggtttgtaaagacttgtggggctcccccttgcaacatctatggagggatgaaggacattg

SEQ ID NO: 141413 - DNA, 80 bp, synthetic construct
  source 1..80: mol_type = other DNA
tcacagacaacgtgcacacatggacagaacaatacaagttccaaccagaatccccttcaaaactagcttcagctatccag

SEQ ID NO: 141414 - DNA, 80 bp, synthetic construct
  source 1..80: mol_type = other DNA
tgcggagatgatctagtcgtggtggctgagagtggtggtgtcgacgaggatagagcagccctgagagccttcacggaggc

SEQ ID NO: 141415 - DNA, 80 bp, synthetic construct
  source 1..80: mol_type = other DNA
gtggattgaggagaacgaccacatggaagacaagaccccagttacgaaatggacagacattccctatttgggaaaaaggg

SEQ ID NO: 141416 - DNA, 80 bp, synthetic construct
  source 1..80: mol_type = other DNA
atcccaagatggagactctggctcggagacggggtcgctctcttcgatgcctcctctagaaggggaacctggtgaccccg

SEQ ID NO: 141417 - DNA, 80 bp, synthetic construct
  source 1..80: mol_type = other DNA
ggcgaccgccagccgcggtttaccgccaccagcatcgcgcgcgtcgacgtcgcgcctgggtgccggttgcggttcgttct

SEQ ID NO: 141418 - DNA, 80 bp, synthetic construct
  source 1..80: mol_type = other DNA
gaggtgcgcaacgtctcggggatctaccaggtcaccaatgattgcccaaacgccagcatcgtgtacgagacagacggagc

SEQ ID NO: 141419 - DNA, 80 bp, synthetic construct
  source 1..80: mol_type = other DNA
acttacatctagaaggaaaatgtgaatcctgtgtctacaacatgatggggaaaagggagaaaaaacttggagagttcgga

SEQ ID NO: 141420 - DNA, 80 bp, synthetic construct
  source 1..80: mol_type = other DNA
ataacaacccatccaataaccaaatacatcatgacctgtatgtctgcggatttggaggtcatcaccagcacatgggtcct

SEQ ID NO: 141421 - DNA, 80 bp, synthetic construct
  source 1..80: mol_type = other DNA
gactagcggttagaggagacccctcccatgacacaacgcagcagcggggcccgagcactgagggaagctgtacctccttg

SEQ ID NO: 141422 - DNA, 80 bp, synthetic construct
  source 1..80: mol_type = other DNA
ctttccaggagattacaagtgtcagccgcgcgctggggcaggaggacacgggcagcctggaggcaaccctgaactacctg

SEQ ID NO: 141423 - DNA, 80 bp, synthetic construct
  source 1..80: mol_type = other DNA
ttgatccgaacatcaggacgggtgtcaggaccattaccacgggtgcgtccatcacgtactctacatatgggaagttcctg

SEQ ID NO: 141424 - DNA, 80 bp, synthetic construct
  source 1..80: mol_type = other DNA
ggaagcccttgagaaagcacttgacttcgacatgtacggagtcacatactctatcactccattagatctacctgctatca

SEQ ID NO: 141425 - DNA, 80 bp, synthetic construct
  source 1..80: mol_type = other DNA
gaggacttgctggaagacaattctacacctattcctaccactattatggctaagaatgaagtgttctgcgtggacgcccg

SEQ ID NO: 141426 - DNA, 80 bp, synthetic construct
  source 1..80: mol_type = other DNA
aaaccggcagctacgtccatgtggagcaaggccgagcagttctgggcaaagcatatgtggaactttgtcagtgggatcca

SEQ ID NO: 141427 - DNA, 80 bp, synthetic construct
  source 1..80: mol_type = other DNA
gccccacgtcaagacgagcctggaatagcatggaagtcgaagactttggctttggattgacaagcacaaggatgttcatg

SEQ ID NO: 141428 - DNA, 80 bp, synthetic construct
  source 1..80: mol_type = other DNA
aagcttcacaattgggcttagccagctgtagcacctctaagcttagaggagggggaaaccttggtttccatcttccggct

SEQ ID NO: 141429 - DNA, 80 bp, synthetic construct
  source 1..80: mol_type = other DNA
cccgcggctctcgcccttcttggggcccaaacgacccccggcgtcggtcccgtaatttgggtaaggtcatcgataccctg

SEQ ID NO: 141430 - DNA, 80 bp, synthetic construct
  source 1..80: mol_type = other DNA
ggcctgaaacacgcggtcgttgccggccatgccgtagtatttgctgatgctgaggcccagcacgaccatcgggcgcgcgg

SEQ ID NO: 141431 - DNA, 80 bp, synthetic construct
  source 1..80: mol_type = other DNA
ggaagataaaactccaattacaacctgggaaaatgttccatacctagggaagagggaagaccaatggtgcggatcactta

SEQ ID NO: 141432 - DNA, 80 bp, synthetic construct
  source 1..80: mol_type = other DNA
ggaccagtatgccagatgtacaccaacgtggaccaagatctggtaggatggccggccccccagggggtcaagtccttgca

SEQ ID NO: 141433 - DNA, 80 bp, synthetic construct
  source 1..80: mol_type = other DNA
gacgggcccgagaccaaagaatgtcccgatgcaaaaagagcttggaacagccttgagattgaagactttggatttggcat

SEQ ID NO: 141434 - DNA, 80 bp, synthetic construct
  source 1..80: mol_type = other DNA
tcgttgtcgcccctgtgagtgtggagccaatcacatcaggttatatccagcaactctgaacgtgacggagcagctgcgca

SEQ ID NO: 141435 - DNA, 80 bp, synthetic construct
  source 1..80: mol_type = other DNA
agaagcataccaggtggggtatttacatgccccaactggtagcgggaagagcacgaaagtgccagcagcgtacgcctctc

SEQ ID NO: 141436 - DNA, 80 bp, synthetic construct
  source 1..80: mol_type = other DNA
tgcaagtgatcgtggtagaaccggggaagggcgcagtaaacatccagacaaaaccaggagtgtttcggactcccttcggg

SEQ ID NO: 141437 - DNA, 80 bp, synthetic construct
  source 1..80: mol_type = other DNA
tactacgtcacccgccccgttcccacgccccgcgccacgtcacaaactccaccccctcatcatcaataatataccttatt

SEQ ID NO: 141438 - DNA, 80 bp, synthetic construct
  source 1..80: mol_type = other DNA
gaaggttgtcaataggtggctattccgtcacttggccagagaaaagaaccccaggttgtgcacaaaggaggagtttatag

SEQ ID NO: 141439 - DNA, 80 bp, synthetic construct
  source 1..80: mol_type = other DNA
acaggagaatgaccaatacattttctcgggagagccattgcgcaatgacgaagatcatgcccactggacagaagcaaaaa

SEQ ID NO: 141440 - DNA, 80 bp, synthetic construct
  source 1..80: mol_type = other DNA
agaatcaatgaataaataaacgagcttgttgttgatttaaaatcaagtgttttttatttcatttttcgcgcacggtatgc

SEQ ID NO: 141441 - DNA, 80 bp, synthetic construct
  source 1..80: mol_type = other DNA
tctggaccatctcagcgcatccagctcataaacaccaacggcagctggcacgtcaacaggacggccctaaactgcaatga

SEQ ID NO: 141442 - DNA, 80 bp, synthetic construct
  source 1..80: mol_type = other DNA
gccaagggaggccgcaagcctgctcgcctcatcgtcttccctgacctgggggtgcgcgtctgtgagaaacgcgccctata

SEQ ID NO: 141443 - DNA, 80 bp, synthetic construct
  source 1..80: mol_type = other DNA
cgcagtgtctccagctttactgggctctttaggcttggatcccagcagaatgtgcagctcatcaacagcaacgggagctg

SEQ ID NO: 141444 - DNA, 80 bp, synthetic construct
  source 1..80: mol_type = other DNA
ggggccaacggcgcgtggaggagtggatgggcgaggtggccggaggaaggcgcccgctagcgagaacggccgttcccgga

SEQ ID NO: 141445 - DNA, 80 bp, synthetic construct
  source 1..80: mol_type = other DNA
gtccaaatgactaactccggagcgcaattagcgggcggcgccagacacgtcaggttcagagatcgaccctcgccctattc

SEQ ID NO: 141446 - DNA, 80 bp, synthetic construct
  source 1..80: mol_type = other DNA
ttgttctccccgaaccatcatcaccaagacacagattgtcggacaaggaggtggtgcatgtttcggaaaaaacatccgct

SEQ ID NO: 141447 - DNA, 80 bp, synthetic construct
  source 1..80: mol_type = other DNA
cagccaactctcggccccctcccttaaggctacttgcactacacaaggtcaccatccagacgcagacctcatagaggcta

SEQ ID NO: 141448 - DNA, 80 bp, synthetic construct
  source 1..80: mol_type = other DNA
taggactaaaaaatgacgtaacggttaaagtccacaaaaaacacccagaaaaccgcacgcgaacctacgcccagaaacga

SEQ ID NO: 141449 - DNA, 80 bp, synthetic construct
  source 1..80: mol_type = other DNA
gcttgagtccttacggagtcatgtggatttgatggtggaggccgccactgtctgctcgggtctttacatcggggacctgt

SEQ ID NO: 141450 - DNA, 80 bp, synthetic construct
  source 1..80: mol_type = other DNA
agatgcttggttcactacccttacaggctgtggcattacccttgcactgttaacttcaccatccacaaggtccgcatgta

SEQ ID NO: 141451 - DNA, 80 bp, synthetic construct
  source 1..80: mol_type = other DNA
ctcgttcagcgcatcaggctcattgttcccaccacgctgcgcggcgggtgtggggagtcgggcccctactcgccatccaa

SEQ ID NO: 141452 - DNA, 80 bp, synthetic construct
  source 1..80: mol_type = other DNA
ggaagggcgaatggatgacaacagaagacatgttgagtgtctggaaccgtgtgtggattgaagagaatgaatacatgaaa

SEQ ID NO: 141453 - DNA, 80 bp, synthetic construct
  source 1..80: mol_type = other DNA
tgctctaccgacagttcgacgagatggaagagtgctctaagcaccttccactggtcgagcatgggttattgctagcagag

SEQ ID NO: 141454 - DNA, 80 bp, synthetic construct
  source 1..80: mol_type = other DNA
gggccgggtgcggggcatgtgagctcccagcctcccccccgatatgaggagccagaacggcgtcggtcacggcataaggc

SEQ ID NO: 141455 - DNA, 80 bp, synthetic construct
  source 1..80: mol_type = other DNA
cccccttccactgttagctactttcacataaccggcggcgatgactgaccacctggacctcgagatggacggccaggcct

SEQ ID NO: 141456 - DNA, 80 bp, synthetic construct
  source 1..80: mol_type = other DNA
accgaacagctaagagccgctgacaaggagctggttattaagcccattaaggaagatgctagcaagagaagctataatgt

SEQ ID NO: 141457 - DNA, 80 bp, synthetic construct
  source 1..80: mol_type = other DNA
ggccggaagcctcaggaaacttggggtaccaccgttgagagcgtggagacatcgggcccgagcagtccgcgctaagctca

SEQ ID NO: 141458 - DNA, 80 bp, synthetic construct
  source 1..80: mol_type = other DNA
attaggtcaacaaccagaatggagaatttgtggaagcaaatagccaatgaactgaactacatattatgggaaaacaacat

SEQ ID NO: 141459 - DNA, 80 bp, synthetic construct
  source 1..80: mol_type = other DNA
ggccccacctccatcgtgggatcaaatgtggaagtgtctcatacggctaaagcctacgctgcacgggccaacgcccctgc

SEQ ID NO: 141460 - DNA, 80 bp, synthetic construct
  source 1..80: mol_type = other DNA
acagagaagactcttgcgtttctgataggcacctattggtcttactgacatccactttgcctttctctccacagatctca

SEQ ID NO: 141461 - DNA, 80 bp, synthetic construct
  source 1..80: mol_type = other DNA
cttttttacacccacaaattcaactcctccggctgcccagagcggatggctgcgtgtaagcccctcgcggaattccggca

SEQ ID NO: 141462 - DNA, 80 bp, synthetic construct
  source 1..80: mol_type = other DNA
gcgcatcaggttctcgaggagaatggggaagcgcctggtcacctcccccagccacgcgcgttggtcggggccaaagtcat

SEQ ID NO: 141463 - DNA, 80 bp, synthetic construct
  source 1..80: mol_type = other DNA
aacgggtcaccgtatggcttgggatatgatgatgaactggtctccaactggcgccttgatcatggcgcagctgctacgga

SEQ ID NO: 141464 - DNA, 80 bp, synthetic construct
  source 1..80: mol_type = other DNA
ggactgtctctggtttcaccggctttttcaacaaggggtctaagcaaaatatacagctcattaacagcaatgggagctgg

SEQ ID NO: 141465 - DNA, 80 bp, synthetic construct
  source 1..80: mol_type = other DNA
ctccggccgtaccgcagacattccaagtggcccatctacacgctcccactggcagcggcaagagcaccaaggtgccggct

SEQ ID NO: 141466 - DNA, 80 bp, synthetic construct
  source 1..80: mol_type = other DNA
gcagaggagctttttctgcccggggatgcgaccggtccccttatcggggccaacgaccacatccctcccccgtgtggcgc

SEQ ID NO: 141467 - DNA, 80 bp, synthetic construct
  source 1..80: mol_type = other DNA
tctccatccatattagctgcagggctcatggtgttcaaccccaataaaaggagggggtggccagccactgaagttctcac

SEQ ID NO: 141468 - DNA, 80 bp, synthetic construct
  source 1..80: mol_type = other DNA
ggggaggtccaagtcttgtccacggtcacccagaccttcctcgggacgacaatctcggtggttctctggaccgtcttcca

SEQ ID NO: 141469 - DNA, 80 bp, synthetic construct
  source 1..80: mol_type = other DNA
ctgacttctgccagcgcctgcactgcaaatttgatcaaacccagcttcagcttgcctgctccagagacgaccggctcaac

SEQ ID NO: 141470 - DNA, 80 bp, synthetic construct
  source 1..80: mol_type = other DNA
tagccatcctgacattcttccgatttacagctctacagccaactgaggcgctgaagcgcagatggagggctgtggacaaa

SEQ ID NO: 141471 - DNA, 80 bp, synthetic construct
  source 1..80: mol_type = other DNA
gggtttttggaaaaaaccaaggcggatctgtctgcggtgctgtggagcgagcatgaggaacaccggcaatggagtgagtg

SEQ ID NO: 141472 - DNA, 80 bp, synthetic construct
  source 1..80: mol_type = other DNA
tttctctcaaacatgtctgcgggttcctgcataaacacaaaataaaataacaaaaaaaaaacatttaaacattagaagcc

SEQ ID NO: 141473 - DNA, 80 bp, synthetic construct
  source 1..80: mol_type = other DNA
gtaaaaagccgggcgatgagcaagcgggtcatgcgcatgcatcgggggacggagtagttctccagaaaactcaacggccc

SEQ ID NO: 141474 - DNA, 80 bp, synthetic construct
  source 1..80: mol_type = other DNA
cccagtggatgaaccgcttgatagcctttgcgtcgcggggaaaccacgtatcgcccacacactatgtgcctgagacagat

SEQ ID NO: 141475 - DNA, 80 bp, synthetic construct
  source 1..80: mol_type = other DNA
ctgtgcgaggcatacgacataggatgtgcgtggtatgaactaacaccatcagagacgactgtccgactgcgagcatacct

SEQ ID NO: 141476 - DNA, 80 bp, synthetic construct
  source 1..80: mol_type = other DNA
caggtgcactcgtggcctttaaggtcatgagcggcgagatgccctccaccgaggacttggtcaacttgctccctgccatc

SEQ ID NO: 141477 - DNA, 80 bp, synthetic construct
  source 1..80: mol_type = other DNA
gccttgatgacattcttcaagttcaccgcgcttgccccgacgaaggccttgctaggccgttggaagcgcatcaacaagac

SEQ ID NO: 141478 - DNA, 80 bp, synthetic construct
  source 1..80: mol_type = other DNA
gtactcgcggacttcaaggcttggcttaaggccaagcttatgcccgcactgccgggggtccccttcctctcctgccagcg

SEQ ID NO: 141479 - DNA, 80 bp, synthetic construct
  source 1..80: mol_type = other DNA
ccttttggccctgctctcttgcctgactgtccccgcgtcagcctacgaagtgcgcaactcctcgggcctctaccatgtca

SEQ ID NO: 141480 - DNA, 80 bp, synthetic construct
  source 1..80: mol_type = other DNA
ggaacacactgtcattttgtaatgatgtatttaaacagaaattacaaaaatccgagtgtataaaactacgcgaagtacct

SEQ ID NO: 141481 - DNA, 80 bp, synthetic construct
  source 1..80: mol_type = other DNA
gaaaccgtactgctggcattatggccccaggctctgcaccaccgtcccggcgaaagacatttgcggacctgtctactgct

SEQ ID NO: 141482 - DNA, 80 bp, synthetic construct
  source 1..80: mol_type = other DNA
ctctactgctcctggtgttgcctaatcaggcttacgccttggatgcagctgagcagggccagatcggtctagtgttactg

SEQ ID NO: 141483 - DNA, 80 bp, synthetic construct
  source 1..80: mol_type = other DNA
ctgtagttgcagcagaactaatgccagttcatgctaaaagcttctacaacgagcaagccgtctactcacagcttattcgt

SEQ ID NO: 141484 - DNA, 80 bp, synthetic construct
  source 1..80: mol_type = other DNA
ccaacagcagcatcgtgtacgaggcggaagacatcattctacatctccctggttgtgtaccttgcgtcagaaatggcaac

SEQ ID NO: 141485 - DNA, 80 bp, synthetic construct
  source 1..80: mol_type = other DNA
tgagtgtcgtgcagcctcctgagtgttgtacagcctccacatttgcaattgtggctctgtcgtgcagcctcctgagtgtt

SEQ ID NO: 141486 - DNA, 80 bp, synthetic construct
  source 1..80: mol_type = other DNA
cccgaggttcccgtccctcttggggccccaatgacccccggcataggtcgcgcaacgtgggtaaggtcatcgatacccta

SEQ ID NO: 141487 - DNA, 80 bp, synthetic construct
  source 1..80: mol_type = other DNA
aacctcctgttgcagttttgccacaaccccagcaagctcttcgtgctgaccattagaaactctgtgtctcctctgccaat

SEQ ID NO: 141488 - DNA, 80 bp, synthetic construct
  source 1..80: mol_type = other DNA
cgctgacataacaattaagggtctgcaaattggtgttgacaaaactgaaaacaaaaatgagcctatctatgcaaacgaaa

SEQ ID NO: 141489 - DNA, 80 bp, synthetic construct
  source 1..80: mol_type = other DNA
gcgaacttcaaagccagtagggtgatagacagccggaagagtgtgaaaccaaccatcatcgctgatggggaaggcagagt

SEQ ID NO: 141490 - DNA, 80 bp, synthetic construct
  source 1..80: mol_type = other DNA
agcaacagtagcatcgtgtatgaggccggggatattatcctccacttgcctggctgcgttccctgcgtacgctctaacaa

SEQ ID NO: 141491 - DNA, 80 bp, synthetic construct
  source 1..80: mol_type = other DNA
ctctgagagccgaacctgatgacgccgagctctcggtggctgcagagtgcttcaagaaaccaccaaagtatcctccagcc

SEQ ID NO: 141492 - DNA, 80 bp, synthetic construct
  source 1..80: mol_type = other DNA
aggtgctttaccagcaatatgatgagatggaagagtgctcacaccgcattccctacctcgctgaaggacatcagatagcc

SEQ ID NO: 141493 - DNA, 80 bp, synthetic construct
  source 1..80: mol_type = other DNA
tacagtacagccttctgcgggtgccgtactatgtgcgtgcgcatgcgcttctccgcgtgtgcatgctcgtgcggcgcttg

SEQ ID NO: 141494 - DNA, 80 bp, synthetic construct
  source 1..80: mol_type = other DNA
gactcgtctttctgggctgctgggggcaagtcactcttaccacttttttgacagctggagtgctggcagttttgcactac

SEQ ID NO: 141495 - DNA, 80 bp, synthetic construct
  source 1..80: mol_type = other DNA
ggtgatgcccctgctttgtggcattggatgtgccatgcttcactggactctcatcctgcccggaataaaagcgcagcagt

SEQ ID NO: 141496 - DNA, 80 bp, synthetic construct
  source 1..80: mol_type = other DNA
cgtctgcgccacggacgccctcatgaccgggtacacaggtgatttcgactccgtcatagactgcaatgtgtcggtgacgc

SEQ ID NO: 141497 - DNA, 80 bp, synthetic construct
  source 1..80: mol_type = other DNA
gttcagatcaggcacgttgttcggccttaaatttagcggccgcctgcgaaagagcagtcacgggcttattacgaattcaa

SEQ ID NO: 141498 - DNA, 80 bp, synthetic construct
  source 1..80: mol_type = other DNA
accaccccaactgacacttcacagcctggcccccccccaacagacgggggctcggacaacgagtcttactcgtccatgcc

SEQ ID NO: 141499 - DNA, 80 bp, synthetic construct
  source 1..80: mol_type = other DNA
aacctcctcccctcgatcctgtcaccaggagcgctcgtggtcggtgtcgtgtgtgcagcgatactacgccgccacgtggg

SEQ ID NO: 141500 - DNA, 80 bp, synthetic construct
  source 1..80: mol_type = other DNA
ctggaccggggctctaataactccttgtagtcccgaagaggagaagttaccgattaaccccttgagcaactccctgttgc

SEQ ID NO: 141501 - DNA, 80 bp, synthetic construct
  source 1..80: mol_type = other DNA
gaagacagaccatactgctggcactacccacccagaccctgcgccacagtccaggcgttgagagtctgcgggcccgtcta

SEQ ID NO: 141502 - DNA, 80 bp, synthetic construct
  source 1..80: mol_type = other DNA
gtggcacacggatgataaccacccgtatagaacttggacttatcatgggagttatgaggtgaagccatcggggtcagcca

SEQ ID NO: 141503 - DNA, 80 bp, synthetic construct
  source 1..80: mol_type = other DNA
gccgagagcggctgcgcgcgcgcgggccttgtgtcgtttaactttctggtggccgcgtgcgccgccgcctacgatgcgcg

SEQ ID NO: 141504 - DNA, 80 bp, synthetic construct
  source 1..80: mol_type = other DNA
gagcgggccgccaaggagctcctcgatgccatcaacatccaccagtgcaagaagggcatcttctgcctggtcaaacaggc

SEQ ID NO: 141505 - DNA, 80 bp, synthetic construct
  source 1..80: mol_type = other DNA
tgattttaagacctggctatcttccaagttgctcccaaagatgcccggccttccctttatctcctgccaaaaggggtata

SEQ ID NO: 141506 - DNA, 80 bp, synthetic construct
  source 1..80: mol_type = other DNA
gggtagtgcctgcatccacagtgtgtggccctgtttactgtttcacgccgagtcctgtggtggtaggcaccaccgacaag

SEQ ID NO: 141507 - DNA, 80 bp, synthetic construct
  source 1..80: mol_type = other DNA
cggccggatgtccaagaccttcatgacggcgctggtcctgtccctgcagtcgtgcggccggctgtatgtgggccagcgcc

SEQ ID NO: 141508 - DNA, 80 bp, synthetic construct
  source 1..80: mol_type = other DNA
accagcgaccatactgctggcattatgccccacgcccctgcggggtggtgagagcgcagaccgtctgtgggccggtctat

SEQ ID NO: 141509 - DNA, 80 bp, synthetic construct
  source 1..80: mol_type = other DNA
gagagatcgtcgggttactggtgggtgaacggagacggcatccggacctgtctgagactcgtcgacagcgtcagtggcat

SEQ ID NO: 141510 - DNA, 80 bp, synthetic construct
  source 1..80: mol_type = other DNA
acagccttcagcatcagtctcctggtgcgtcgggcacagcaccgcatcctgatctctgccatgttctcacagtaagtgca

SEQ ID NO: 141511 - DNA, 80 bp, synthetic construct
  source 1..80: mol_type = other DNA
ggccaaggaggtccgcagcttgtccgggagggccgttaaccacatcaagtccgtgtggaaggacctcctggaagacccac

SEQ ID NO: 141512 - DNA, 80 bp, synthetic construct
  source 1..80: mol_type = other DNA
cttggactttggtgaagaacatggaaaagcccgggttgaagcgtggaggagcgaagggcagaacccttggagaggtgtgg

SEQ ID NO: 141513 - DNA, 80 bp, synthetic construct
  source 1..80: mol_type = other DNA
gttcagaacactctttggaggcatgtcctggataacccaggggctgatgggagcgctcctcctgtggatgggcgtcaatt

SEQ ID NO: 141514 - DNA, 80 bp, synthetic construct
  source 1..80: mol_type = other DNA
agacctatcaagtagcccacttgcatgcaccgacggggagcggcaagagcactaaagttccagccgcatatgcggctcag

SEQ ID NO: 141515 - DNA, 80 bp, synthetic construct
  source 1..80: mol_type = other DNA
tgtggatcttcttgtcggttcggcggcactctgttcagccctttacatcggggatctatgcggtggtgtcttcctagtgg

SEQ ID NO: 141516 - DNA, 80 bp, synthetic construct
  source 1..80: mol_type = other DNA
atgccattcaaataccagaagttccccaggaacccccggaagaaaccgacattccacccgaagagttaattcggcgtgta

SEQ ID NO: 141517 - DNA, 80 bp, synthetic construct
  source 1..80: mol_type = other DNA
ggcgacggaacgaaaaacaccccagacgggttaaagaaacagaaaccgcaacccccaccacccccgaaacggggaaaacg

SEQ ID NO: 141518 - DNA, 80 bp, synthetic construct
  source 1..80: mol_type = other DNA
cgcgaagtgggtctcccgcgcgtgggcttccccgttgcgggcgctgcggaggagagcggggtcgctggcgcaggtgagcg

SEQ ID NO: 141519 - DNA, 80 bp, synthetic construct
  source 1..80: mol_type = other DNA
agtactagataattccattactggattgactggattattgaatacacttgtggtattaactggaaggggaataggaacgg

SEQ ID NO: 141520 - DNA, 80 bp, synthetic construct
  source 1..80: mol_type = other DNA
gggaagaaacactcgcaacgtgcaaacgaagcccggagtgtttaagacccccgatggggagataggggccgtcacactgg

SEQ ID NO: 141521 - DNA, 80 bp, synthetic construct
  source 1..80: mol_type = other DNA
cgggagtgaagtccttggccccatgcacctgtggctcgtcggacctgttcctggttaccaggcacgccgacgtggtgccc

SEQ ID NO: 141522 - DNA, 80 bp, synthetic construct
  source 1..80: mol_type = other DNA
gcaaggcggtatttgctataccatgatggagtggcgattccaaggaatgtcctccattactaccgtcatctctacagccc

SEQ ID NO: 141523 - DNA, 80 bp, synthetic construct
  source 1..80: mol_type = other DNA
tactgcgtcgacacgtgggcccgggagagggggctgtgcagtggatgaaccggctgatagcgttcgcctcgcggtgtaac

SEQ ID NO: 141524 - DNA, 80 bp, synthetic construct
  source 1..80: mol_type = other DNA
ggctcgggccacctgaccttcgtaacctgcactcaggtcagagccccagaccccccgcgggcgcgggagacgtgccgcca

SEQ ID NO: 141525 - DNA, 80 bp, synthetic construct
  source 1..80: mol_type = other DNA
atggacgtgatctccagggaagaccagcgaggcagcggacaggtagtcacgtacgccttgaacacattcaccaatctggc

SEQ ID NO: 141526 - DNA, 80 bp, synthetic construct
  source 1..80: mol_type = other DNA
actatggaggacactactcacactacagtacagaatagtactgtgttggttaggtttttgttgagggaggaaagtactac

SEQ ID NO: 141527 - DNA, 80 bp, synthetic construct
  source 1..80: mol_type = other DNA
gggccaaggtgatagtcgtgctccttctgttcgcaggagttgatgccacaacaacagtcggttctgccctggccagccag

SEQ ID NO: 141528 - DNA, 80 bp, synthetic construct
  source 1..80: mol_type = other DNA
acaaggtatttggtaaaaacagaatcatggatcttgaggaaccctggatatgccctagtggcagccgtcattggttggat

SEQ ID NO: 141529 - DNA, 80 bp, synthetic construct
  source 1..80: mol_type = other DNA
gaccatcagcggcccgaaaggaccggtcaaccagatgtacaccaatgtcgaccaagacttggtgggttggcccgcacctc

SEQ ID NO: 141530 - DNA, 80 bp, synthetic construct
  source 1..80: mol_type = other DNA
cctgcctccggataacccactcccgattaacgtggaccaccgcgctggctgcgaggtggggcgggtgctggccgtggtcg

SEQ ID NO: 141531 - DNA, 80 bp, synthetic construct
  source 1..80: mol_type = other DNA
cagtgggaaacaaaagaaaagcaaaatgggggtagcggagctcagatagaaaaaaatgttacaaaaacatttggagtggc

SEQ ID NO: 141532 - DNA, 80 bp, synthetic construct
  source 1..80: mol_type = other DNA
aacaatgatgaagaccatgctcactggacagaagcaaaaatgttgctggataacatcaacactccagaaggaatcatacc

SEQ ID NO: 141533 - DNA, 80 bp, synthetic construct
  source 1..80: mol_type = other DNA
ttccagcaagggtcccaacaacacatccagctcatccgcagcaacggcagttggcacatcaatcgtacagctttgaactg

SEQ ID NO: 141534 - DNA, 80 bp, synthetic construct
  source 1..80: mol_type = other DNA
ctgcttgtctgtgggcagcgttgtcatcaccgggagggtcgttctatccgggcagccagcagtcatccctgatcgtgagg

SEQ ID NO: 141535 - DNA, 80 bp, synthetic construct
  source 1..80: mol_type = other DNA
atgaagagataaaaaacgcagacggaacaaacaaaggagttggattgcgtgtgagaatcgcagaagcaggtggcttaaca

SEQ ID NO: 141536 - DNA, 80 bp, synthetic construct
  source 1..80: mol_type = other DNA
ccgtgcacacagaacttcaccatccataaagtgcgcaccttcgtaggcggggttgagcacaggttcgatgccgcgtgcaa

SEQ ID NO: 141537 - DNA, 80 bp, synthetic construct
  source 1..80: mol_type = other DNA
tgcccatgtccgtaacggggttgcggacggtggccgtggccgcgacggcggtgtagcccacacccaggtccacgtttccg

SEQ ID NO: 141538 - DNA, 80 bp, synthetic construct
  source 1..80: mol_type = other DNA
tttttgcaaggtgaccctaacatggccatatcttttcagagcatttataatcatgcaatagaaggctactcattaaaatt

SEQ ID NO: 141539 - DNA, 80 bp, synthetic construct
  source 1..80: mol_type = other DNA
aactcatctcatgttagaaccggggatatccagacctaccttgccagagggtggtttgttgtggtgtttcaacccctgct

SEQ ID NO: 141540 - DNA, 80 bp, synthetic construct
  source 1..80: mol_type = other DNA
gagcggccattgggttccttgggggattcgcaggctccatcaagccgagctcgggaaggccaagcccctcccgcacaacg

SEQ ID NO: 141541 - DNA, 80 bp, synthetic construct
  source 1..80: mol_type = other DNA
taagctgtcaaacatgagaattggtcgagctagcatgcataacttcgtataatgtatgctatacgaagttatgtccggtc

SEQ ID NO: 141542 - DNA, 80 bp, synthetic construct
  source 1..80: mol_type = other DNA
tagacattggaaaattaaaccaaggtcaggattttgtggcggtggttaaggtaagcaatcttaaaaaccaagatgtgaat

SEQ ID NO: 141543 - DNA, 80 bp, synthetic construct
  source 1..80: mol_type = other DNA
gcccgggcggcgtggtgcgggtctctccggcgcacataaaggcccggcgcgaccgacgcccgcagacagcgccggccacg

SEQ ID NO: 141544 - DNA, 80 bp, synthetic construct
  source 1..80: mol_type = other DNA
ggcgaatactttaccaatgctattttaaatccacactggcttccccctcctggcttttatactggcgagtttgatttacc

SEQ ID NO: 141545 - DNA, 80 bp, synthetic construct
  source 1..80: mol_type = other DNA
gtggaccagaagcgctccctcctgagcgtgtttcgcgccaaccagtacccggacctacgtcgggtggagttggcgatcac

SEQ ID NO: 141546 - DNA, 80 bp, synthetic construct
  source 1..80: mol_type = other DNA
aatcacactagaagacttaaaaaatgaagaaatggtaacaaaccacatgaaaggagaacacaagaaactagccgaggcca

SEQ ID NO: 141547 - DNA, 80 bp, synthetic construct
  source 1..80: mol_type = other DNA
ccctgggccttcacccgaacttgggtggtggggtgaggaaaaggaagaaacgcgggcgtattggccccaatggagtctcg

SEQ ID NO: 141548 - DNA, 80 bp, synthetic construct
  source 1..80: mol_type = other DNA
atttcttttgtttcactaagccgaaactgcgtaaaccggttctgtaacccgataaagaagggaatgagatatgggttgat

SEQ ID NO: 141549 - DNA, 80 bp, synthetic construct
  source 1..80: mol_type = other DNA
acaagagccaaatgtctgtaaaaaaatgtgtgtttgaacgatgcattttggctatggtggtagaaggccaggcgcgaatt

SEQ ID NO: 141550 - DNA, 80 bp, synthetic construct
  source 1..80: mol_type = other DNA
aattaaggaaggcctcgacggagatattaatgatgattgggaaaaggatgataaggtgtcagctcagaaccaaatttgca

SEQ ID NO: 141551 - DNA, 80 bp, synthetic construct
  source 1..80: mol_type = other DNA
ggggccctatgttcaactcgcgcggccaaaactgcggttaccgtaggtgccgagcgagcggggttctccccaccagcatg

SEQ ID NO: 141552 - DNA, 80 bp, synthetic construct
  source 1..80: mol_type = other DNA
ttggcacctactacttatcccatgaccaagcctattctacccatggctaccagggtgtatgggaaaaatgaaaatgcgcc

SEQ ID NO: 141553 - DNA, 80 bp, synthetic construct
  source 1..80: mol_type = other DNA
agccacgttgtgctcagcactatacgtcggggacttctgcggggccgtgttccttgtgggacaagcattcaccttcaggc

SEQ ID NO: 141554 - DNA, 80 bp, synthetic construct
  source 1..80: mol_type = other DNA
ccccaccgtgcagtccagctggcagaagcttgagagcttctgggccaagcatatgtggaatttcatcagtgggatacagt

SEQ ID NO: 141555 - DNA, 80 bp, synthetic construct
  source 1..80: mol_type = other DNA
ttagtgcgcaacatcgtggggggtaaatatgtccaaatggctctactcacgttgggccggtggtgcggcacctacgtgta

SEQ ID NO: 141556 - DNA, 80 bp, synthetic construct
  source 1..80: mol_type = other DNA
ggtatcacaataaagtgtactccaccacatccaagagtgcatcgcagagggccaaaaaggtgacgtttgacagagtgcag

SEQ ID NO: 141557 - DNA, 80 bp, synthetic construct
  source 1..80: mol_type = other DNA
ctaatggtctgatggaaatccagatctaacgtggcacagcagatacacactttcatatacattttcatcacatgtttttc

SEQ ID NO: 141558 - DNA, 80 bp, synthetic construct
  source 1..80: mol_type = other DNA
ttttttcccgcgcccgcccccgcgcggcaggacggggactagcaggctcaggctcactcactcggctacctcgcggacca

SEQ ID NO: 141559 - DNA, 80 bp, synthetic construct
  source 1..80: mol_type = other DNA
agtcgcactttctaaaaagtgtacaaacatgtccatcttggtttcgccaagtaacaacacgggctggggattgggagctg

SEQ ID NO: 141560 - DNA, 80 bp, synthetic construct
  source 1..80: mol_type = other DNA
cagaagttgcccggcgcagtaatgggacccgcttatgggttccaatattcgcccaagcagagggtcgactatcttctcaa

SEQ ID NO: 141561 - DNA, 80 bp, synthetic construct
  source 1..80: mol_type = other DNA
ttctgtcactccaagaagaagtgcgacgagcttgccgcaaagctgtcaggcctcggaatcaatgctgtagcgtattaccg

SEQ ID NO: 141562 - DNA, 80 bp, synthetic construct
  source 1..80: mol_type = other DNA
cccgttccaagtttggatacggtgcgaaggacgtccgtggccatactagcaaagcccttaaccacatcaactccgtgtgg

SEQ ID NO: 141563 - DNA, 80 bp, synthetic construct
  source 1..80: mol_type = other DNA
aacagacttatcgcctttgcctccagaggaaatcatgttgcccccacccattacgtggcggaatctgacgcctcgcagcg

SEQ ID NO: 141564 - DNA, 80 bp, synthetic construct
  source 1..80: mol_type = other DNA
tggacgggagccttggtgaccccgtgcgccgcagaggagaccaagctgcccatcaatgcgctaagcaattcgcttttgcg

SEQ ID NO: 141565 - DNA, 80 bp, synthetic construct
  source 1..80: mol_type = other DNA
gtcgccaaggcgattgacttcataccagtggaacacatggagacctcaatgagatccccggtcttctctgacaactcatc

SEQ ID NO: 141566 - DNA, 80 bp, synthetic construct
  source 1..80: mol_type = other DNA
ggggtacgggtgtgcgagaagagagctttatatgacgtagtcaagaagctccctcaggccgtgatgggaggctcctacgg

SEQ ID NO: 141567 - DNA, 80 bp, synthetic construct
  source 1..80: mol_type = other DNA
gaggtgacagccaagtggttatggggtttcctttccagaaacaaacaacctagaatctgcacaagagaggagttcacaag

SEQ ID NO: 141568 - DNA, 80 bp, synthetic construct
  source 1..80: mol_type = other DNA
gctgatggttaaaaaggctaaaaaccagcctcccgagtacgaatggtttgagttcaccattcccgagggcaactattccg

SEQ ID NO: 141569 - DNA, 80 bp, synthetic construct
  source 1..80: mol_type = other DNA
ctgctgctggcagacgccagggtctgtgcatgtctttggatgatgctgctggtgtcgcaggttgaagcagccttggctaa

SEQ ID NO: 141570 - DNA, 80 bp, synthetic construct
  source 1..80: mol_type = other DNA
agatcatcatatggggtgcggacaccattgcctgcggcgacatactcgatggtctccccgtctctgcgcggaaagggaac

SEQ ID NO: 141571 - DNA, 80 bp, synthetic construct
  source 1..80: mol_type = other DNA
gccgcgcacgcgcgcctgtaccccgacgcgccgccgctgcgcctgtgccgcggcggcaacgtgcgctaccgcgtgcgcac

SEQ ID NO: 141572 - DNA, 80 bp, synthetic construct
  source 1..80: mol_type = other DNA
tcaggtggaggcggctctggagaacctggtggtgctcaacgcggcatcgttggctgggacgcacggtttgctccctttcc

SEQ ID NO: 141573 - DNA, 80 bp, synthetic construct
  source 1..80: mol_type = other DNA
gctcaggaaagttctcaattgataaagagatggcagaaacacagcatggaacgacagtggtaaaggtcaagtatgagggt

SEQ ID NO: 141574 - DNA, 80 bp, synthetic construct
  source 1..80: mol_type = other DNA
aatgtgggggacgcccttatggcgctggccgttaagagcttcggccaaccaccccccagcggcgactcaggccattctac

SEQ ID NO: 141575 - DNA, 80 bp, synthetic construct
  source 1..80: mol_type = other DNA
tctcgattttgtccctgtggagagcatgcaatccactgctcgctctccctccttctcagataacacatcccctcctgctg

SEQ ID NO: 141576 - DNA, 80 bp, synthetic construct
  source 1..80: mol_type = other DNA
cccaaccgcgccccccgacggcgttcggaacctcgagcgacgtcgagtttaactgcacggcggacaacctggccgtcgag

SEQ ID NO: 141577 - DNA, 80 bp, synthetic construct
  source 1..80: mol_type = other DNA
cactgattgcttccgtaaacacccaggagctacgtatgccaaatgcgggtctgggccctggctgacccccaggtgcatgg

SEQ ID NO: 141578 - DNA, 80 bp, synthetic construct
  source 1..80: mol_type = other DNA
gacgaaaaaaagctcgggttggccaagaatcccggccaagaggtcctggagggaggcgttgtggcggtcggccaacacga

SEQ ID NO: 141579 - DNA, 80 bp, synthetic construct
  source 1..80: mol_type = other DNA
acaggctggaagttgcttgcaactggacgcggggtgagcgttgcaatctggacgacagggacaggtccgagctcagcccg

SEQ ID NO: 141580 - DNA, 80 bp, synthetic construct
  source 1..80: mol_type = other DNA
catccatagatgccagcgccgatacaggcgcccccgcggccagatttacaaccccgggggcgtttcctgcgcggtcaacg

SEQ ID NO: 141581 - DNA, 80 bp, synthetic construct
  source 1..80: mol_type = other DNA
gagggcggaggccacgaccagaggccctattgctggcactatccccccagaccgtgcggcatcgtggacgcgagaactgt

SEQ ID NO: 141582 - DNA, 80 bp, synthetic construct
  source 1..80: mol_type = other DNA
caggttcgaagagagtcgggcgctctaccaagcgtcgggcgggctaaatggcgactccttccgagtaaccttttgtttat

SEQ ID NO: 141583 - DNA, 80 bp, synthetic construct
  source 1..80: mol_type = other DNA
acgaggtcgaggacttggaagaatgggaggaggagaaggcggacagcctagacgaggatccagaggaggaggaaggttcc

SEQ ID NO: 141584 - DNA, 80 bp, synthetic construct
  source 1..80: mol_type = other DNA
tggctcacgggacgctttgatcatccttacagtcctgtttcggccccacctagcttttgacattacaaaataccttttgg

SEQ ID NO: 141585 - DNA, 80 bp, synthetic construct
  source 1..80: mol_type = other DNA
tcccagggggggagggccgctatatgcggtaaatacctcttcaactggtcggtgaaaaccaaactcagactcactccatt

SEQ ID NO: 141586 - DNA, 80 bp, synthetic construct
  source 1..80: mol_type = other DNA
cttctgcctactcctactttgcgtaggagtaggcatctttttactccccgctcggtagagcggcacacactagcctacac

SEQ ID NO: 141587 - DNA, 80 bp, synthetic construct
  source 1..80: mol_type = other DNA
tccaacagccatttttctaacaaccctctcaagaaccaacaagaaaaggagctggccactaaatgaggctatcatggcag

SEQ ID NO: 141588 - DNA, 80 bp, synthetic construct
  source 1..80: mol_type = other DNA
aactgttcactttctcgccacgaagacaggactgcaattgttcaatctatcccggcagtgtatcaggtcatcgcatggcc

SEQ ID NO: 141589 - DNA, 80 bp, synthetic construct
  source 1..80: mol_type = other DNA
tgtaattaaagtaggccgacttaagacgacgaatggttgtaagaagcactgcgtcttttggaccggcttgttggatccgc

SEQ ID NO: 141590 - DNA, 80 bp, synthetic construct
  source 1..80: mol_type = other DNA
ttgcgccacatccgcggcgtgtggcaagacctacttgaggacaatgaaacaccaattgacaccaccatcatggcaaagtc

SEQ ID NO: 141591 - DNA, 80 bp, synthetic construct
  source 1..80: mol_type = other DNA
ctacacccatcgctaggctttgaggtcaccaaaatactgctagctcttatagccccgttatatctgcttcagaattgctt

SEQ ID NO: 141592 - DNA, 80 bp, synthetic construct
  source 1..80: mol_type = other DNA
ccagcccggtcgcgcgcctcccggacacgtgcgcccggagggcggcggtctcctcgtcgcccatgagcagtttccgaaac

SEQ ID NO: 141593 - DNA, 80 bp, synthetic construct
  source 1..80: mol_type = other DNA
gtacaaatgctcagtcattataatattggataccagggtttttacgttccagagagctacaaagaccgcatgtattcttt

SEQ ID NO: 141594 - DNA, 80 bp, synthetic construct
  source 1..80: mol_type = other DNA
gtcggcccgaagctgtgcagcaacacctggcacggaaccttccccatcaacgccacaacaacggggcccagtgtgcctgc

SEQ ID NO: 141595 - DNA, 80 bp, synthetic construct
  source 1..80: mol_type = other DNA
gaaaagaggatgacagttcagaagtaaatttgacacagcagtccatgcccaacaggcctaactacattggcttcagagac

SEQ ID NO: 141596 - DNA, 80 bp, synthetic construct
  source 1..80: mol_type = other DNA
tttacaatcaactccgcgtgcagctacgggcctatctaacacaagccgttcctgcagagtacgataccatggcccgaaaa

SEQ ID NO: 141597 - DNA, 80 bp, synthetic construct
  source 1..80: mol_type = other DNA
taactccagtcagtgggcgcagaaaaagactggtgaagacaatcaaactgaaacacgcacatttggtgtggccgctatgg

SEQ ID NO: 141598 - DNA, 80 bp, synthetic construct
  source 1..80: mol_type = other DNA
cgtttcggccgcccttgcgcagttggctgcaaagacttttgagacgcccagttcccctactacagggtatgggtcggatc

SEQ ID NO: 141599 - DNA, 80 bp, synthetic construct
  source 1..80: mol_type = other DNA
gcgttggggttgagcttgcgggcctcgttccagagagtcagctcgtggttctgcagctcgcaccacgcgacggcgatgcg

SEQ ID NO: 141600 - DNA, 80 bp, synthetic construct
  source 1..80: mol_type = other DNA
tgatggaaaaacagtcatggacgtcatttctagggaagatcagagggggagcggacaagttgtcacttacgcgctgaaca

SEQ ID NO: 141601 - DNA, 80 bp, synthetic construct
  source 1..80: mol_type = other DNA
acgagtgcggtcccgagacttatagggtgctaaagttcaccgccccctgcatcatgggccaggcctcggtggtgagctcc

SEQ ID NO: 141602 - DNA, 80 bp, synthetic construct
  source 1..80: mol_type = other DNA
cctcgatcaagcagagaccgcaggtgtcaggcttgtggtcttagccactgctacacctccgggatctgtgaccacccctc

SEQ ID NO: 141603 - DNA, 80 bp, synthetic construct
  source 1..80: mol_type = other DNA
aggcatttcagggcgtagagtttgggtgccaggaagacagattccggcgagtaagcgttggcaccgcactgtgcacacgt

SEQ ID NO: 141604 - DNA, 80 bp, synthetic construct
  source 1..80: mol_type = other DNA
tggtttgcgccactgacgcccttatgacggggttcaccggcaactttgactctgtgatagactgtaacacgtctgtcatt

SEQ ID NO: 141605 - DNA, 80 bp, synthetic construct
  source 1..80: mol_type = other DNA
ttggctgcaggtctcatgctctgcaatcccaatagaaagaggggctggcctgccactgaagtcatgaccgcggttggatt

SEQ ID NO: 141606 - DNA, 80 bp, synthetic construct
  source 1..80: mol_type = other DNA
aacgattggccagctgtcgccccctcactgatttcgatcaggggtgggggccaatcacctatgcggccgataattcaggt

SEQ ID NO: 141607 - DNA, 80 bp, synthetic construct
  source 1..80: mol_type = other DNA
tcaggtgatcatggacatcttcactggcggtcactggggcattctcgcgggcatactgtattacagtatggtggccaatt

SEQ ID NO: 141608 - DNA, 80 bp, synthetic construct
  source 1..80: mol_type = other DNA
ggaagtgagagcacagctgccttaatggatctcttggggaacttgagggaatttgacgtggttcgccgcttgctggagtt

SEQ ID NO: 141609 - DNA, 80 bp, synthetic construct
  source 1..80: mol_type = other DNA
catccccgcctactacgccgccgggcccgcgcaacgcggggtgatcggcgagtactgcatacaggattccctgctggtgg

SEQ ID NO: 141610 - DNA, 80 bp, synthetic construct
  source 1..80: mol_type = other DNA
cgaggtggctgtccagtggatgaaccgcctcatcgcctttgcgtcgcggggcaaccacgtttcccccacgcactacgtcc

SEQ ID NO: 141611 - DNA, 80 bp, synthetic construct
  source 1..80: mol_type = other DNA
cagtggcttgcaaaagacaccaatgctggcgatcaagcattaaaaacccacacacatggcgtagctgctatggggggaac

SEQ ID NO: 141612 - DNA, 80 bp, synthetic construct
  source 1..80: mol_type = other DNA
gtggcattgtttgtggtcctggaatgtatcattcggaggagaccttctacaggagtgacggtcgcatggggaggtgttgt

SEQ ID NO: 141613 - DNA, 80 bp, synthetic construct
  source 1..80: mol_type = other DNA
atgaaatagtggatgtgatgtgccacgccactctgacccatagactgatgtcaccgaacagagtgcccaactacaaccta

SEQ ID NO: 141614 - DNA, 80 bp, synthetic construct
  source 1..80: mol_type = other DNA
cagcaatcattcaacgactccatggcatggcagcattttcactccacggatactctccagttgagctcaatagggtaggg

SEQ ID NO: 141615 - DNA, 80 bp, synthetic construct
  source 1..80: mol_type = other DNA
tcacagaagagtgcaacaatagagggccatccctacgcacaacaacagcctcagggaagttgataacagaatggtgctgc

SEQ ID NO: 141616 - DNA, 80 bp, synthetic construct
  source 1..80: mol_type = other DNA
agacggtcagccattccccaaacttcgctttgacaccgtccaaggtccttgtagtagtcatgcatcaacctttccacatc

SEQ ID NO: 141617 - DNA, 80 bp, synthetic construct
  source 1..80: mol_type = other DNA
ggcttccatgtcggcagaatgcttaatgaattacaacagtactgcgatgagtggcagggcgtggcgtaatttttttaagg

SEQ ID NO: 141618 - DNA, 80 bp, synthetic construct
  source 1..80: mol_type = other DNA
caccggatggcatgggatatgatgatgaactggtcccctaccgcagccttggtgatgtcccaggtgctccgggtcccaca

SEQ ID NO: 141619 - DNA, 80 bp, synthetic construct
  source 1..80: mol_type = other DNA
tggtagtcattcaaggccataaatctgccttggtagccattaggaatcagcacgctcactctcaagtgaaccaaaaccac

SEQ ID NO: 141620 - DNA, 80 bp, synthetic construct
  source 1..80: mol_type = other DNA
cgtaaaacttctgaacggtcacagcctcgcggacggcgacagcctatccccaaggcgcgtcggagcgaaggccggtcctg

SEQ ID NO: 141621 - DNA, 80 bp, synthetic construct
  source 1..80: mol_type = other DNA
cctatggggttttcctatgacacccgttgctttgactcgacagtcactgaggctgatatccgtacggaggaagacctcta

SEQ ID NO: 141622 - DNA, 80 bp, synthetic construct
  source 1..80: mol_type = other DNA
aagcatgcgctaaaccaaggtggctatttttactgaaggaaaaattactttttttagcagcagggtgcccactgggtggc

SEQ ID NO: 141623 - DNA, 80 bp, synthetic construct
  source 1..80: mol_type = other DNA
ccggggttccgttcgattgcctagtccaccaaagcaaccgacggggcttccagcttacgttcaggaggtccaggattcgt

SEQ ID NO: 141624 - DNA, 80 bp, synthetic construct
  source 1..80: mol_type = other DNA
agtcacaggaatagccatgaccgacaccacaccgtatggtcagcaaagagttttcaaggaaaaagtggacactagggtgc

SEQ ID NO: 141625 - DNA, 80 bp, synthetic construct
  source 1..80: mol_type = other DNA
acaaacataccaagtgggctatctccatgcaccaacaggcagtgggaagagcacgaaagtgcctgctgcatatgcctccc

SEQ ID NO: 141626 - DNA, 80 bp, synthetic construct
  source 1..80: mol_type = other DNA
tatgatagagtttgccgattgttataaggaaagtgagaccgatttaatggtaagcgcgtacctgggggccgttttattgt

SEQ ID NO: 141627 - DNA, 80 bp, synthetic construct
  source 1..80: mol_type = other DNA
gatagacccgaacatcaggaccggcgtcagaaccgtcactacggggggagctatcacttactccacatatggcaagttcc

SEQ ID NO: 141628 - DNA, 80 bp, synthetic construct
  source 1..80: mol_type = other DNA
taaatcgcgactccaatttccgaagaagcccggagcataagtcatatgaagcccgttccctatttgaataaaacggttat

SEQ ID NO: 141629 - DNA, 80 bp, synthetic construct
  source 1..80: mol_type = other DNA
cagaccgcacagttgcaccaagcacccgcccgcccgcacacggttccccgccaccccctccctaccctcccctccatccc

SEQ ID NO: 141630 - DNA, 80 bp, synthetic construct
  source 1..80: mol_type = other DNA
gatgtggcgctcgaagaaaacacctatggggttctcatacgacacccgatgttttgattcaactgtgactgagcgcgata

SEQ ID NO: 141631 - DNA, 80 bp, synthetic construct
  source 1..80: mol_type = other DNA
gttcttgcgtgtggctgggggcttatatgtggggtcccggggacggaatgtggtttagcagcgggggggggcgcgccgga

SEQ ID NO: 141632 - DNA, 80 bp, synthetic construct
  source 1..80: mol_type = other DNA
ccgctgagacagctggtcgtcgtctcaagcgagggtccccaccatctttggctagctcgtctgccagccaattgtcagct

SEQ ID NO: 141633 - DNA, 80 bp, synthetic construct
  source 1..80: mol_type = other DNA
ggggttcctcccttacgagcctggaggcatcgggcaagggcggtccgagcgaagcttatcgcccaggttgggaaggccgc

SEQ ID NO: 141634 - DNA, 80 bp, synthetic construct
  source 1..80: mol_type = other DNA
ctcggttgttctctgtgagtgctatgacgcgggctgctcgtggtacgatctgcagcccgctgagaccacagtcagattga

SEQ ID NO: 141635 - DNA, 80 bp, synthetic construct
  source 1..80: mol_type = other DNA
cttccagggcaaagtgatgatgacagtcaatgcaaccgatgttactgacgtgattaccatcccaacagctgctgggaaaa

SEQ ID NO: 141636 - DNA, 80 bp, synthetic construct
  source 1..80: mol_type = other DNA
gatgaagacccagaaattgaaaactctagagagcagactaaaccaaaaacaaaaagcaaaagtgcccaaaagacaaacaa

SEQ ID NO: 141637 - DNA, 80 bp, synthetic construct
  source 1..80: mol_type = other DNA
ggctacccccctactatacagactgggtggtgtgcagaatgagatcaccctaacacacccaatcaccaagtacatcatgg

SEQ ID NO: 141638 - DNA, 80 bp, synthetic construct
  source 1..80: mol_type = other DNA
actatgctaacaagtctggcatctaccatctgactaatgactgccctaacagcagcatcgtgttcgaggccgagaacatg

SEQ ID NO: 141639 - DNA, 80 bp, synthetic construct
  source 1..80: mol_type = other DNA
caaaacagtaaaacctctgaaattcgctgacggcccaatcagcacccgagccccccgcccccatgatgaaccgggcgagc

SEQ ID NO: 141640 - DNA, 80 bp, synthetic construct
  source 1..80: mol_type = other DNA
cattggatacgggcaaactccggtcgtttgcacaattattcccaaagccgagatcatgacatgggaacagttaaatacga

SEQ ID NO: 141641 - DNA, 80 bp, synthetic construct
  source 1..80: mol_type = other DNA
ccttgtgtttctttctttcccccccgaatccgttctttcttcctcaccccccctccccacacacccacccaggactcgcc

SEQ ID NO: 141642 - DNA, 80 bp, synthetic construct
  source 1..80: mol_type = other DNA
caaacaagttcgcttttgccagactacgttttacatccttccattgtgcccacgcctgggtaccgtgggtcaacttttca

SEQ ID NO: 141643 - DNA, 80 bp, synthetic construct
  source 1..80: mol_type = other DNA
gtgggccttatacggagggagcacagtggttctcacgcccttgatcaaacatcttgtaacatcagaatacatcacaacat

SEQ ID NO: 141644 - DNA, 80 bp, synthetic construct
  source 1..80: mol_type = other DNA
attaccagggtagagtcagagaacaaggtggtcatactggactccttcgatccacttgtggcggaggaggatgaacggga

SEQ ID NO: 141645 - DNA, 80 bp, synthetic construct
  source 1..80: mol_type = other DNA
tcgtgatatctgggaaatcaacagatatgtggatcgagaggacggcggacatctcttgggaaagtgatgcggaaattaca

SEQ ID NO: 141646 - DNA, 80 bp, synthetic construct
  source 1..80: mol_type = other DNA
gtcccgaacggttcagtgccgattcatgggtttcgcggacacgtggaccttctcgtcggcgctgcagccttttgctccgc

SEQ ID NO: 141647 - DNA, 80 bp, synthetic construct
  source 1..80: mol_type = other DNA
aggcgtccactgtgaaggctacaatgctgaccgttgaggaagcttgtgacctgacgcccccccactcggccagatctaaa

SEQ ID NO: 141648 - DNA, 80 bp, synthetic construct
  source 1..80: mol_type = other DNA
gctgctggcccagggccgcatctagggcgtcgaagcgccgcagctcggccagacccgagctgcggcgcgcctgctggtcg

SEQ ID NO: 141649 - DNA, 80 bp, synthetic construct
  source 1..80: mol_type = other DNA
gagctattactttagcactagatgcagcgctgcctttgcaatatagagacaaccaacttcaactcagaattggctcaacg

SEQ ID NO: 141650 - DNA, 80 bp, synthetic construct
  source 1..80: mol_type = other DNA
tcgtggtactcaccatcttcaccctcagccctgcatacaagcagctgttgactcagtcagtatggtggatccagtactcc

SEQ ID NO: 141651 - DNA, 80 bp, synthetic construct
  source 1..80: mol_type = other DNA
gcaatgcattgtcaatgatgcctgaagcaatgacaacagtcatgctgtttgttctggccgggctgctgacgtctggaatg

SEQ ID NO: 141652 - DNA, 80 bp, synthetic construct
  source 1..80: mol_type = other DNA
gcccctacgggtggtaagggaaccctgccctgggactgcggttaagattgaccagagttgtgacaaaagggtggcgtcgc

SEQ ID NO: 141653 - DNA, 80 bp, synthetic construct
  source 1..80: mol_type = other DNA
gaagccagcggagaggccgcactggaagggtgaggttggggacataccggttcgttaccccgggagagaggccctccggc

SEQ ID NO: 141654 - DNA, 80 bp, synthetic construct
  source 1..80: mol_type = other DNA
tcgaagacggccatcgacacgatagactcgagggccagggcggcgtctccggccatgacggaggccaggcgctgttcgaa

SEQ ID NO: 141655 - DNA, 80 bp, synthetic construct
  source 1..80: mol_type = other DNA
tgtcgcgacacacggcgccgctctgcggtattcggggtggagtgggatccagtcggccccgcggagttcgtctcggacga

SEQ ID NO: 141656 - DNA, 80 bp, synthetic construct
  source 1..80: mol_type = other DNA
gcgcagcagacacggaggcttctcggcaccattgtaacaagcctcactggccgggacaggaatgaggttgaaggggagat

SEQ ID NO: 141657 - DNA, 80 bp, synthetic construct
  source 1..80: mol_type = other DNA
cccactctaatatagaggaggttgccctgccgacgacgggggaaatacccttctacggcaaggctatccccttagcttat

SEQ ID NO: 141658 - DNA, 80 bp, synthetic construct
  source 1..80: mol_type = other DNA
catccttggcgagccctcagcgatgacagccgctagcgctgctcaacggcgcgggcgcattggcagaaatccagcgcaag

SEQ ID NO: 141659 - DNA, 80 bp, synthetic construct
  source 1..80: mol_type = other DNA
ccatctttccttgtctgcggagacgacttagtcgtggtagctgagagccgtggtgtcgaggaggacaaagcagccctgag

SEQ ID NO: 141660 - DNA, 80 bp, synthetic construct
  source 1..80: mol_type = other DNA
catcatgacttgcatgtcagctgacctggaggtcgtcacgagtacctgggtgctcgttggcggcgttctggctgctttgg

SEQ ID NO: 141661 - DNA, 80 bp, synthetic construct
  source 1..80: mol_type = other DNA
cgactaggaagacttcagaacgatcccagcccaggggcagacgccaaccaataccgaaggagcgtcgcccccagggccgt

SEQ ID NO: 141662 - DNA, 80 bp, synthetic construct
  source 1..80: mol_type = other DNA
ccattaccttggcacgctggggcagacaccggaactccacactggaacaacaaagaagcactggtagagttcaaggacgc

SEQ ID NO: 141663 - DNA, 80 bp, synthetic construct
  source 1..80: mol_type = other DNA
tccactttttatttttagcttgaaagacacactcaaaaggagaagctggccactgaatgaaggggtgatggctgttgggc

SEQ ID NO: 141664 - DNA, 80 bp, synthetic construct
  source 1..80: mol_type = other DNA
tcaccaaatacatcatggcttgcatgtcagctgatctcgaggtagtgacaagtacgtgggtcttggtgggcggcgtcctg

SEQ ID NO: 141665 - DNA, 80 bp, synthetic construct
  source 1..80: mol_type = other DNA
cgtatgatacccgatgcttcgactcaaccgtcactgagagagacatcaggaccgaggagtccatataccaggcctgctcc

SEQ ID NO: 141666 - DNA, 80 bp, synthetic construct
  source 1..80: mol_type = other DNA
tacacgcggcccgttgccacgtccaccgtggattccgtgattgatagtgtggtggccaacgccaggcgttacgcgcaacg

SEQ ID NO: 141667 - DNA, 80 bp, synthetic construct
  source 1..80: mol_type = other DNA
gggccgtactcatcttctgctataaaaacaatacgcattagaggaaaaggtattcagctgaacgacgaggcaacatcgcc

SEQ ID NO: 141668 - DNA, 80 bp, synthetic construct
  source 1..80: mol_type = other DNA
tatgagaacctcaaatacaccgtcatcattacagtgcacacaggagaccaacaccaggtgggaaatgaaacgcagggagt

SEQ ID NO: 141669 - DNA, 80 bp, synthetic construct
  source 1..80: mol_type = other DNA
ggaggccattggggggtccttttcggcctggccgacttctctatgcaaggtgcgttggcgaaggtcgtggccatcctcct

SEQ ID NO: 141670 - DNA, 80 bp, synthetic construct
  source 1..80: mol_type = other DNA
ggcgctgctcaatggatgaataggctcatagcgtttgcgtcgcggggtaaccacgtatcccctacgcattacgtcccaga

SEQ ID NO: 141671 - DNA, 80 bp, synthetic construct
  source 1..80: mol_type = other DNA
gcggcggggcgcgggccggggccggggctcgctggtctgccgaagtaaagaaaagatcgccaccgtgtgttcgtctgtgt

SEQ ID NO: 141672 - DNA, 80 bp, synthetic construct
  source 1..80: mol_type = other DNA
ccgcgcctcgggcggcgtggccgcgaccgtcgcggcgaacggaggtcccgcctcccggccgccccccgtcccgagccccg

SEQ ID NO: 141673 - DNA, 80 bp, synthetic construct
  source 1..80: mol_type = other DNA
cacagtcaacatggtgcgcaggatcataggtgatgaagaaaagtacatggactacctatccacccaagttcgctacttgg

SEQ ID NO: 141674 - DNA, 80 bp, synthetic construct
  source 1..80: mol_type = other DNA
aataaaatgatatacacagacgcgtttggttggtttctgtttatgaacagcaacggatgcatagggttgcgataactgcg

SEQ ID NO: 141675 - DNA, 80 bp, synthetic construct
  source 1..80: mol_type = other DNA
gatgatactaaatacaaagactaccaacaggtgggcatcctacaccaacacaacaactctggatttgttggctaccttgc

SEQ ID NO: 141676 - DNA, 80 bp, synthetic construct
  source 1..80: mol_type = other DNA
ccgttgaacagtacgttgatttcagcctggaccccaccttttccattgagacccgcactgctccccaagacgcggtttcc

SEQ ID NO: 141677 - DNA, 80 bp, synthetic construct
  source 1..80: mol_type = other DNA
gtcacatactctatcactccactggatttaccagccataatacagagactccatggcttgagcgcattcactctgcacgg

SEQ ID NO: 141678 - DNA, 80 bp, synthetic construct
  source 1..80: mol_type = other DNA
aacgtgagtgggccatcctctgacaaaccctactgctggcactatccacctagaccttgcgaggttgttccagcgagaaa

SEQ ID NO: 141679 - DNA, 80 bp, synthetic construct
  source 1..80: mol_type = other DNA
gcccaggtgtctggtccactatgcttacaggctttggcattatccttgtaccgccaactacaccatgttcaaagtcagga

SEQ ID NO: 141680 - DNA, 80 bp, synthetic construct
  source 1..80: mol_type = other DNA
acggccagcgttaagcataatatgatttgcggcagcggcctgtgcccctcgcagctcttaacttgcgcagatggaaattg

SEQ ID NO: 141681 - DNA, 80 bp, synthetic construct
  source 1..80: mol_type = other DNA
ggctcgcgtctcaccggggtgcggatggagcgtccgcgagacggcttgtctctcaaaagcctacgggcagatgtggctgc

SEQ ID NO: 141682 - DNA, 80 bp, synthetic construct
  source 1..80: mol_type = other DNA
cgcccaggtcatgaggatcccaaccactctggtagacttactctctggaggccactggggtgtcctcgtggtggtggcct

SEQ ID NO: 141683 - DNA, 80 bp, synthetic construct
  source 1..80: mol_type = other DNA
ggaaacaaaggcacgcaacgccaacaccgaatgaacccctgttggtgctttattgtctgggtacggaagttttcactcga

SEQ ID NO: 141684 - DNA, 80 bp, synthetic construct
  source 1..80: mol_type = other DNA
cggaagctatgaccaggtattcagctcctcctggggaggcgccgcaggccgcgtatgaccttgagcttataacatcatgc

SEQ ID NO: 141685 - DNA, 80 bp, synthetic construct
  source 1..80: mol_type = other DNA
cccccatcatgggaccagcagtggaagtgtttacaacggctaaagcccacactccacgggcccactcctctgctttacag

SEQ ID NO: 141686 - DNA, 80 bp, synthetic construct
  source 1..80: mol_type = other DNA
atgatacgcgccagcgtctggcttagaacgccccccgacaggccgaccgcctcgcagagccgcccgtgcgtgtgctcgct

SEQ ID NO: 141687 - DNA, 80 bp, synthetic construct
  source 1..80: mol_type = other DNA
cttttttctccgcgcgctcacgggctcggcccccgccgacatcgcccgctgcgtcgtccacagtctgacgcaggtcctgg

SEQ ID NO: 141688 - DNA, 80 bp, synthetic construct
  source 1..80: mol_type = other DNA
agaccatggagaagaacgtcttggaagaatgcttgtgagcggcgatgactgcgtggtgaggccagtggatgataggttta

SEQ ID NO: 141689 - DNA, 80 bp, synthetic construct
  source 1..80: mol_type = other DNA
tggacgacgccgaagcactgttcagcaaatactgctcagcgtctcttaaagactaaaagacccgcgctttttccccctcg

SEQ ID NO: 141690 - DNA, 80 bp, synthetic construct
  source 1..80: mol_type = other DNA
gggggacggcatttgccataccacgtgcccatgcgggtcagagatcaccggacacgtcaaaaatgggaccatgaagattt

SEQ ID NO: 141691 - DNA, 80 bp, synthetic construct
  source 1..80: mol_type = other DNA
ctatgaccaggtattcggcccctcccggggacgcaccacgcccagaatacgacctggagcttattacatcttgctcctcc

SEQ ID NO: 141692 - DNA, 80 bp, synthetic construct
  source 1..80: mol_type = other DNA
ccgggctgcgtctcggggtcagcctcgagctggtcgacgacgggtacgatacagtcgaagaggctcgtgttgttttccga

SEQ ID NO: 141693 - DNA, 80 bp, synthetic construct
  source 1..80: mol_type = other DNA
cccggcggtcgataatcttggtcatgtaattgtgtgtgggttgctcgatggggtgcgggccgtcgcgggcaatcagcggc

SEQ ID NO: 141694 - DNA, 80 bp, synthetic construct
  source 1..80: mol_type = other DNA
actgactctggattagctatggacttaggagacggtcttgcattaggtggctctaagttaataatcaatcttggtccagg

SEQ ID NO: 141695 - DNA, 80 bp, synthetic construct
  source 1..80: mol_type = other DNA
cccccggtgatgccttgcccgacccgagcctgggtccccatcttaatcctttcttgctccatccatcacaaatgcacaac

SEQ ID NO: 141696 - DNA, 80 bp, synthetic construct
  source 1..80: mol_type = other DNA
gatcaaaacatcactttgattgatgtgaatgaaacctatgctggaacttattatggctctaacaatgacgaccatagaca

SEQ ID NO: 141697 - DNA, 80 bp, synthetic construct
  source 1..80: mol_type = other DNA
gacatagataagaaggatggagatctgatatatgctgatgacacagcaggctgggacacaagaatcactgaagatgacct

SEQ ID NO: 141698 - DNA, 80 bp, synthetic construct
  source 1..80: mol_type = other DNA
tcaaggccacttgcaccacgcacggccaaaatccggacgcggagctccttgaggccaatcttctgtggagacaatgtatg

SEQ ID NO: 141699 - DNA, 80 bp, synthetic construct
  source 1..80: mol_type = other DNA
atggccgctactattgcttgtcttggccctcccccagcgcgctttcgcttacgatcacgaaagcgcggcctctgtcgtgg

SEQ ID NO: 141700 - DNA, 80 bp, synthetic construct
  source 1..80: mol_type = other DNA
gatggaagagtgtgcggcgggcctgccctacattgagcaagggatgcagctggcagagcagttcaagcaaaaagcgctcg

SEQ ID NO: 141701 - DNA, 80 bp, synthetic construct
  source 1..80: mol_type = other DNA
tccagcaactctctgacgagactgcctcttcagacacgggatcactgtcctccatgcctccccttgagggagagccgtgg

SEQ ID NO: 141702 - DNA, 80 bp, synthetic construct
  source 1..80: mol_type = other DNA
ccgcctgatgaatgctcatccggaattccgtatggcaatgaaagacggtgagctggtgatatgggatagtgttcaccctt

SEQ ID NO: 141703 - DNA, 80 bp, synthetic construct
  source 1..80: mol_type = other DNA
ccaacctatctctagcagccattgccaaccaagcagctgtcctaatgggacttggaaaaggatggccgctccacagaatg

SEQ ID NO: 141704 - DNA, 80 bp, synthetic construct
  source 1..80: mol_type = other DNA
cctagtgggatggccggcgcctcctggggtcaagtctcttgtgccgtgcacttgcggcgcatcagacttgtacctcgtta

SEQ ID NO: 141705 - DNA, 80 bp, synthetic construct
  source 1..80: mol_type = other DNA
acgcggatgacacagccggctgggacacccggataaccagagccgatcttgacaacgaggccaaagttttggagctgatg

SEQ ID NO: 141706 - DNA, 80 bp, synthetic construct
  source 1..80: mol_type = other DNA
gtatgtgccacggacgccctcatgacaggttttaccggcgactttgactcagtgatagactgcaatacatctgtgataca

SEQ ID NO: 141707 - DNA, 80 bp, synthetic construct
  source 1..80: mol_type = other DNA
tgctcccaccacttcaacaagctccatctcaaggacgggaggtccattgtggttccctgccgccaccaagatgaactgat

SEQ ID NO: 141708 - DNA, 80 bp, synthetic construct
  source 1..80: mol_type = other DNA
agaactggaagaaggggtttataggatcaaacagcaaggaatttttgggaaaacccaagtaggggttggagtacagaaag

SEQ ID NO: 141709 - DNA, 80 bp, synthetic construct
  source 1..80: mol_type = other DNA
gggcacaggatggcgtgggatatgatgatgaactggtcccccacggtaggttatgtcatctctagtgttctgaggatacc

SEQ ID NO: 141710 - DNA, 80 bp, synthetic construct
  source 1..80: mol_type = other DNA
tgctcaagcgccttacatagggagctccatcactaaagatggcattcaagtgggaacaaataccgccaatcccccacaac

SEQ ID NO: 141711 - DNA, 80 bp, synthetic construct
  source 1..80: mol_type = other DNA
gacttcaaagtctggctcaaggccaaactcctgccgactctccccggagtgcctttctggtcatgccagagaggttatcg

SEQ ID NO: 141712 - DNA, 80 bp, synthetic construct
  source 1..80: mol_type = other DNA
attaagtaatgtaacactgacaggagctggaattaatactacatggacagggtattttaatgagggtccaaaaggaaaaa

SEQ ID NO: 141713 - DNA, 80 bp, synthetic construct
  source 1..80: mol_type = other DNA
tgtccttggcttccgtggtcgtcaacccatcagtgaggacagtgcgggaagcaggaatcttgacaacggcagcggcggtg

SEQ ID NO: 141714 - DNA, 80 bp, synthetic construct
  source 1..80: mol_type = other DNA
accgggataagtctggagacccgaacgcatcatgcgctttgtgctatatgaaacagactttcagctttatttacagtaag

SEQ ID NO: 141715 - DNA, 80 bp, synthetic construct
  source 1..80: mol_type = other DNA
aagatagtgggcggccagtacgtccagatggctctgttaaaggtgggagcattgaccggcacttacatctacaaccacct

SEQ ID NO: 141716 - DNA, 80 bp, synthetic construct
  source 1..80: mol_type = other DNA
tctgaggtgaagcaatatcaccccatgcggaggaatgtggaaagattcggggcaaaagaagatatatctattgctagccc

SEQ ID NO: 141717 - DNA, 80 bp, synthetic construct
  source 1..80: mol_type = other DNA
tggggggggcagtcggggaagtggctgtcgagcacgtagccctgcactaagatcttcttaaagttggggtggtggggctt

SEQ ID NO: 141718 - DNA, 80 bp, synthetic construct
  source 1..80: mol_type = other DNA
gaaaacacgacgcatactcccccaaataattaaagatgccatccaaaaaagactacgaacagctgttcttgcaccaacga

SEQ ID NO: 141719 - DNA, 80 bp, synthetic construct
  source 1..80: mol_type = other DNA
ccagaaaaaagtcacctttgaacgcaaccaggtcctggaccagtactatcatgatgctcttaaggaggtaaaggcccgag

SEQ ID NO: 141720 - DNA, 80 bp, synthetic construct
  source 1..80: mol_type = other DNA
gtgggcaccacctatgcaggtgcgcggtggccgtgatggcatcatatgggccgtcgccatattctacccaggtgtggtgt

SEQ ID NO: 141721 - DNA, 80 bp, synthetic construct
  source 1..80: mol_type = other DNA
ttcttctaccaaacaacctcacaagtggacttaccttctctgttagaagggcaaagctaattctctatcgccctatctta

SEQ ID NO: 141722 - DNA, 80 bp, synthetic construct
  source 1..80: mol_type = other DNA
gaaactcacagtggctgtgggattgcatttccatgagatgaacaatggaggagacgccatgtatatggcgttgattgctg

SEQ ID NO: 141723 - DNA, 80 bp, synthetic construct
  source 1..80: mol_type = other DNA
ccctggccgagcttgccaccaagagctttggcagctccacaacttccggaattacgagcgacaatacagcgacgtcctct

SEQ ID NO: 141724 - DNA, 80 bp, synthetic construct
  source 1..80: mol_type = other DNA
tcgacttgagtgtcgtggtggaaaaacaaaatgggatgtataaagcagcaccaaaacgtttggctgccaccaccgaaaaa

SEQ ID NO: 141725 - DNA, 80 bp, synthetic construct
  source 1..80: mol_type = other DNA
gactatttggcaaacatggacagacatgatctgcactgggagctcaagctagagagctcaataatctaaactagcacaac

SEQ ID NO: 141726 - DNA, 80 bp, synthetic construct
  source 1..80: mol_type = other DNA
ccgttcggtgcgggcccgccggggtggcgggtggccggcggcctccgctgctcctccttcacgccggcccctggcactat

SEQ ID NO: 141727 - DNA, 80 bp, synthetic construct
  source 1..80: mol_type = other DNA
gttctgttccaagctctgatgcctcgccctctctgggagaagacgacgccggctctgaggccggctcgttcagctcaatg

SEQ ID NO: 141728 - DNA, 80 bp, synthetic construct
  source 1..80: mol_type = other DNA
cgtcgccgtcccacgctctcccctgctgccatggattccgcggccccagccctctcccccgctctgacggcccttacggg

SEQ ID NO: 141729 - DNA, 80 bp, synthetic construct
  source 1..80: mol_type = other DNA
agcaacagcttgtaggcatgccacggcagtcccgtcggccgaatctattgcaaccgtgtgtaatgaattgaggcgcggtt

SEQ ID NO: 141730 - DNA, 80 bp, synthetic construct
  source 1..80: mol_type = other DNA
gaaacagatcctgctgctccaccacctgcagcgtgttcaaaacaacaagattcaataaggttctgccctccgccctgagc

SEQ ID NO: 141731 - DNA, 80 bp, synthetic construct
  source 1..80: mol_type = other DNA
tcgtgttggtcgtagtgtcatgccaaatggaacgccggacgtagtcatatttcctgaagcaaaaccaggtgcgggcgtga

SEQ ID NO: 141732 - DNA, 80 bp, synthetic construct
  source 1..80: mol_type = other DNA
tcccggtggacagagcgaccccaggtcgctgtccatggcccagcagtagatctggccgctggggaggtgccaccaggccc

SEQ ID NO: 141733 - DNA, 80 bp, synthetic construct
  source 1..80: mol_type = other DNA
cttgacgtcttctctctgcacacatactctccccacgaactcacgcgggtggcatctgctctcagaaagcttggagcgcc

SEQ ID NO: 141734 - DNA, 80 bp, synthetic construct
  source 1..80: mol_type = other DNA
gtccattgactcggagacgggttccatgtcctccatgccccccctggaggtggagcctggggaccccgacctggagccgg

SEQ ID NO: 141735 - DNA, 80 bp, synthetic construct
  source 1..80: mol_type = other DNA
acaccttattatgtcctaccgattgcttccgaaaacatccggaggccacctatgttaggtgtggttcgggcccttggctg

SEQ ID NO: 141736 - DNA, 80 bp, synthetic construct
  source 1..80: mol_type = other DNA
gggccccgctgacgaatacacatcaaaaggatggaggctcctcgcgcccatcaccgcatacgcccagcagactcgcggcc

SEQ ID NO: 141737 - DNA, 80 bp, synthetic construct
  source 1..80: mol_type = other DNA
tgaaaacatgtgaatggccaaagtcccacacattgtgggcagatggaatagaagagagtgatctgatcattcccaagtct

SEQ ID NO: 141738 - DNA, 80 bp, synthetic construct
  source 1..80: mol_type = other DNA
caaagatcggatttacgtcacatagaaacccaagcatctttaaatgatcacgtatatgaaaatataccacccaaggaagt

SEQ ID NO: 141739 - DNA, 80 bp, synthetic construct
  source 1..80: mol_type = other DNA
cgaacaataagagtgaatcaaaacactacagagtcaaggttttcaaagaaagaaaagatcaggcactattattcagaccg

SEQ ID NO: 141740 - DNA, 80 bp, synthetic construct
  source 1..80: mol_type = other DNA
cgcgctcgtcgttgtgcgccgcgctgggaagggccacgttgcggtactggtacttgggctgccacttaaactcggggatc

SEQ ID NO: 141741 - DNA, 80 bp, synthetic construct
  source 1..80: mol_type = other DNA
gtcgatggccgccgcggaaaagggcccggtgtccaaaagcccctccccacagggatccgggtgcgggttgcggtgtcctc

SEQ ID NO: 141742 - DNA, 80 bp, synthetic construct
  source 1..80: mol_type = other DNA
ctcgaaacagaccgcgcaggagtgggacgggtcgctaagctcagggtggacgataaggcccgaccccaccgcccccacca

SEQ ID NO: 141743 - DNA, 80 bp, synthetic construct
  source 1..80: mol_type = other DNA
cgtgtgtttctgatcgacgacgcgtggcggcccctgttggagcctgagctggcgaaccccttaaccgcccacctcctggc

SEQ ID NO: 141744 - DNA, 80 bp, synthetic construct
  source 1..80: mol_type = other DNA
cccagtgtcacgagggacagcgaaactcagatggttggttgaaagacgctttgtccagcccataggaaaagtagtggatc

SEQ ID NO: 141745 - DNA, 80 bp, synthetic construct
  source 1..80: mol_type = other DNA
tagagttgacgtgaaacttgatgatgacggaaacttccaacttatgaacgaccctggagcaccatggaagatctggatgc

SEQ ID NO: 141746 - DNA, 80 bp, synthetic construct
  source 1..80: mol_type = other DNA
cagcccgcttatgacctggagcacatagattcgtgctcatccaacgtctccgttgcccgggatagcaaggggaacagagt

SEQ ID NO: 141747 - DNA, 80 bp, synthetic construct
  source 1..80: mol_type = other DNA
gggacacccgagcctgtctctctgtgtatggtgacccagacaacaacaccgacacaagaggacaataatccgttagggga

SEQ ID NO: 141748 - DNA, 80 bp, synthetic construct
  source 1..80: mol_type = other DNA
ccgcctggtacctgaagggcaggtgggtccccggggcagtgtacgccttttacggtatgtggccactcctcctgctccta

SEQ ID NO: 141749 - DNA, 80 bp, synthetic construct
  source 1..80: mol_type = other DNA
cgcgaggtggggtccgatgaacgcaggcgctgtctccccggggcccgcgtaaccccgcgcatatccggtggcacgtagaa

SEQ ID NO: 141750 - DNA, 80 bp, synthetic construct
  source 1..80: mol_type = other DNA
gtcgatgcgcaaacctacaccacgggtggcgctacggctaggcaggcattgggggttgccagccttttccaactcggcgc

SEQ ID NO: 141751 - DNA, 80 bp, synthetic construct
  source 1..80: mol_type = other DNA
ctgccggccgctgctcgggtggcgcggggttgcggtgcgggaggcgcggaggcgccccggccatatgcgtgtaatacgtg

SEQ ID NO: 141752 - DNA, 80 bp, synthetic construct
  source 1..80: mol_type = other DNA
aacaccgtcatgacttccatgcccttctcccaggcagtcaccagcggcgcgctctcggggttcttcaccaacacggcggt

SEQ ID NO: 141753 - DNA, 80 bp, synthetic construct
  source 1..80: mol_type = other DNA
tcctccttcttgtcgcgggagtggatgcaggcacccgcgttgttggcgggtcggtggcccaaaccgctcggtggctcact

SEQ ID NO: 141754 - DNA, 80 bp, synthetic construct
  source 1..80: mol_type = other DNA
atgccaccctcactgcccgtcgcgcgtgtttgatgttaataaataacacataaatttggctggttgtttgttgtctttaa

SEQ ID NO: 141755 - DNA, 80 bp, synthetic construct
  source 1..80: mol_type = other DNA
ggggttgaccagtgacaaccttaaggtcccttgccaggtaccagctccagaattcttctcttgggtggacgtggtgcaaa

SEQ ID NO: 141756 - DNA, 80 bp, synthetic construct
  source 1..80: mol_type = other DNA
gtggcaggtacctcttcaactgggcagtgaaaacaaagctcaaactcactccaatagcggccgctagccagctggaccta

SEQ ID NO: 141757 - DNA, 80 bp, synthetic construct
  source 1..80: mol_type = other DNA
cgccgacgggcccgcggtgtcgcggcagcacgcctacctggcgtgcgagctgctgcccgccgtgcagtgcgccgtgcgct

SEQ ID NO: 141758 - DNA, 80 bp, synthetic construct
  source 1..80: mol_type = other DNA
tgccattgacatcggaaggcaagaactgagatgcgggagtggggtgttcattcacaatgacgtggaggcctggacggacc

SEQ ID NO: 141759 - DNA, 80 bp, synthetic construct
  source 1..80: mol_type = other DNA
cctaccttgacaagcaatcagacactcaatatgtctgcaaaagaacgttagtggacagaggctggggaaatggatgtgga

SEQ ID NO: 141760 - DNA, 80 bp, synthetic construct
  source 1..80: mol_type = other DNA
tcaattgcaatgacagcttgcagacgggctttatcgcttctctgttttacgtccgcaatttcaacagctctggctgcccc

SEQ ID NO: 141761 - DNA, 80 bp, synthetic construct
  source 1..80: mol_type = other DNA
gccgtctcccgcactcaacgccggggaagaactggcaggtggaagccaggcatctacagatttgcggcaccgggagagcg

SEQ ID NO: 141762 - DNA, 80 bp, synthetic construct
  source 1..80: mol_type = other DNA
accccgccggtatcatggggagcggctgggcgtcggaggaggtgcgcgcgcctctggtctattggtggctttcggagacc

SEQ ID NO: 141763 - DNA, 80 bp, synthetic construct
  source 1..80: mol_type = other DNA
gtcccgtgctgccagcagccttacgggcctcttttcgtctgggccgtctcaacgcatccagcttataaacaccaatggca

SEQ ID NO: 141764 - DNA, 80 bp, synthetic construct
  source 1..80: mol_type = other DNA
gttcggaccacacgctcgcgtcccagtccgacacggaggatgccccctcccccgttacgctggaaaccccagaaccccgc

SEQ ID NO: 141765 - DNA, 80 bp, synthetic construct
  source 1..80: mol_type = other DNA
acttggtgcacacgcacgccacggacaggccgagctccagaaagcgcacgagcgacagggtgttgcagtaggaccccagc

SEQ ID NO: 141766 - DNA, 80 bp, synthetic construct
  source 1..80: mol_type = other DNA
aggtttctgccctgaaggcttcctcccctcccaatgcggtttaaaacataaataaaaaccagactctgtttggattttga

SEQ ID NO: 141767 - DNA, 80 bp, synthetic construct
  source 1..80: mol_type = other DNA
cctgttgattattcgagcaacactgttaagcttacttcaggacatctgaaatgcagagtgaaaatggataagttgcagct

SEQ ID NO: 141768 - DNA, 80 bp, synthetic construct
  source 1..80: mol_type = other DNA
gcgccggcttcccggtatggtaattagaaacttttaataggcggtcccggccgccatccccgctcatggtaattagcaac

SEQ ID NO: 141769 - DNA, 80 bp, synthetic construct
  source 1..80: mol_type = other DNA
aagcctacaccgcgtatccagcgaagctatcgacagctacgacgtattaatactggatgaggtaatgtcagtgattggac

SEQ ID NO: 141770 - DNA, 80 bp, synthetic construct
  source 1..80: mol_type = other DNA
ggtgccccagggcttcgtggaagaggacctgcgtgttttcggggagcttcattttgtggtggcccaggtcccccacacaa

SEQ ID NO: 141771 - DNA, 80 bp, synthetic construct
  source 1..80: mol_type = other DNA
agttgaaggcttggaggcctcaatgcgctcgccgatattcactgacaactcagttccaccggccgttcctcaggagttcc

SEQ ID NO: 141772 - DNA, 80 bp, synthetic construct
  source 1..80: mol_type = other DNA
gggaaaacccctgctcaactcagacaccagtaaaatcaagaacaggattgaacgactcaggcgtgagtacagttcgacgt

SEQ ID NO: 141773 - DNA, 80 bp, synthetic construct
  source 1..80: mol_type = other DNA
cctgtgtgtacaacatgatgggaaagagggaaaagaaactctctgaatttggaaaggccaaagggagccgtgctatctgg

SEQ ID NO: 141774 - DNA, 80 bp, synthetic construct
  source 1..80: mol_type = other DNA
tcccactcccttgttgtacaggcttgggccagtccaaaatgaggttgtcaccactcacccaatcactaaatacatcatga

SEQ ID NO: 141775 - DNA, 80 bp, synthetic construct
  source 1..80: mol_type = other DNA
ctcaaccagaccaatccaaaccacaatctgactctggctatggtgctgctggcacggcgtcttcgtcaccaactgaagag

SEQ ID NO: 141776 - DNA, 80 bp, synthetic construct
  source 1..80: mol_type = other DNA
ttagtaaaatgcaacggcatggttaacgggaccatatccattaaagctctgaaaggcattttacttagacctacagctag

SEQ ID NO: 141777 - DNA, 80 bp, synthetic construct
  source 1..80: mol_type = other DNA
acttggacgtgggttggatatgaatttttcaaagcatgctacggtcgatatatgcgcatatcccgaagagagtttggatt

SEQ ID NO: 141778 - DNA, 80 bp, synthetic construct
  source 1..80: mol_type = other DNA
gactgccaaagatttgcatatactccacacccatgtaccagaagtatttacgtgtcaagatgcagccgcgcgtaacggag

SEQ ID NO: 141779 - DNA, 80 bp, synthetic construct
  source 1..80: mol_type = other DNA
tctggaactaattctacataccagggtgtgaaagttacaactaatgaaggagctttggaaagcgaatggggtaaagatga

SEQ ID NO: 141780 - DNA, 80 bp, synthetic construct
  source 1..80: mol_type = other DNA
ggtcacttattcagtcactcccctggatctaccacagatcattgagagactccacggcctggcggcattctcactccacg

SEQ ID NO: 141781 - DNA, 80 bp, synthetic construct
  source 1..80: mol_type = other DNA
tcgtgagcctgttctccgctggccccaagcaaaacctccagcttatccactccaacggaagctggcacattaacaggact

SEQ ID NO: 141782 - DNA, 80 bp, synthetic construct
  source 1..80: mol_type = other DNA
cgtatttcaacacgccaggcctcccggtgtgccaagaccatcttgaattctgggagagcgtctttacgggtttgacccat

SEQ ID NO: 141783 - DNA, 80 bp, synthetic construct
  source 1..80: mol_type = other DNA
acatgccagaaacagttttggagctaaccgatgcaatagcattgggaataatggtcctaaaaatggtgaggagcatggaa

SEQ ID NO: 141784 - DNA, 80 bp, synthetic construct
  source 1..80: mol_type = other DNA
acggcatccgagcccaccgaaaccagattctcttagaacaggcggcaatcaccgccacaccccggcgccaactcaacccg

SEQ ID NO: 141785 - DNA, 80 bp, synthetic construct
  source 1..80: mol_type = other DNA
actcatcaggatgtcccgaacgtatggctagttgcaaacctctgcatctctttgaccagggttgggggcctatctcatat

SEQ ID NO: 141786 - DNA, 80 bp, synthetic construct
  source 1..80: mol_type = other DNA
acagtggaaaaaccgtaaccccacggccacctgtgtcttcaaagtgctggccccgtaccgcccagaggtcatagaagcat

SEQ ID NO: 141787 - DNA, 80 bp, synthetic construct
  source 1..80: mol_type = other DNA
gttcagatgactaactcaggggcgcagcttgcgggcggctttcgtcacagggtgcggtcgcccgtgcagggtataactca

SEQ ID NO: 141788 - DNA, 80 bp, synthetic construct
  source 1..80: mol_type = other DNA
ttatgcccagtacatgaccttatgggactttcctacttggcagtacatctactattagtcatcgctattaccatggtgat

SEQ ID NO: 141789 - DNA, 80 bp, synthetic construct
  source 1..80: mol_type = other DNA
ccacagcgcggatggaggccggggtaggtgccgccggaccccctcgcgatgggaatggacgggagcgacggagccggcgc

SEQ ID NO: 141790 - DNA, 80 bp, synthetic construct
  source 1..80: mol_type = other DNA
actcctcagggtgtcccgagcgtcttagctcgtgtaagcccctagcggagtttgaccagggctggggtcccatcacatat

SEQ ID NO: 141791 - DNA, 80 bp, synthetic construct
  source 1..80: mol_type = other DNA
aggtagtcaccagcacgtgggtgttggtgggcggcgtccttgccgccttggccgcttactgtttgtctacaggatgcgtg

SEQ ID NO: 141792 - DNA, 80 bp, synthetic construct
  source 1..80: mol_type = other DNA
cgctcacactgtccagggcttcacaggactctttacgccgggtgcaagacaaaatctgcagttgatcaacaccaacgggt

SEQ ID NO: 141793 - DNA, 80 bp, synthetic construct
  source 1..80: mol_type = other DNA
ataaggggctgtaagttttatggctgctggatgggagtggtcggaagacccaagagcgagatgtctgtgaagcagtgtgt

SEQ ID NO: 141794 - DNA, 80 bp, synthetic construct
  source 1..80: mol_type = other DNA
catagattttgtgcctgtggagaatatggagaccactatgagatccccggtcttctctgacaactcatccccgccggccg

SEQ ID NO: 141795 - DNA, 80 bp, synthetic construct
  source 1..80: mol_type = other DNA
actgggtgccctttcgggcacctatatatataaccatctcaccccgctgcgggattgggcccacaacggccttcgtgacc

SEQ ID NO: 141796 - DNA, 80 bp, synthetic construct
  source 1..80: mol_type = other DNA
ggtgttgcctcagcaggcctacgccctggatgctgttgaacagagccagatcggcctagtgttactggcaaccttcacca

SEQ ID NO: 141797 - DNA, 80 bp, synthetic construct
  source 1..80: mol_type = other DNA
catgaggatcgtagggcctagaacctgcagcaacacgtggcacggaacgttccccatcaacgcatacaccacgggacctt

SEQ ID NO: 141798 - DNA, 80 bp, synthetic construct
  source 1..80: mol_type = other DNA
ttcgccctgagagtcagccaagtagcattttagcatcagctcatagcttagggcttcggctgcgtgtcctttggctcgaa

SEQ ID NO: 141799 - DNA, 80 bp, synthetic construct
  source 1..80: mol_type = other DNA
ttccgatttgggcgcggcctgactacaaccctcctctgcttgagacttggaagaaaccagactatgccccaccgctggtt

SEQ ID NO: 141800 - DNA, 80 bp, synthetic construct
  source 1..80: mol_type = other DNA
aacatcttactagtttcaaacgagaacttggaacactcattgacgccgtgaacaagcggggcagaaagcaaaacaaaaga

SEQ ID NO: 141801 - DNA, 80 bp, synthetic construct
  source 1..80: mol_type = other DNA
gggcaacatccccgctctcctgaatgtcaaggagtatctgaaggataaggaagaagctggcaaagcagatgcaaatacta

SEQ ID NO: 141802 - DNA, 80 bp, synthetic construct
  source 1..80: mol_type = other DNA
gcgcccatggctaccggagtgttgggccagcacacacctgtaacgctggacctgcctccccccgctgacacccagcagaa

SEQ ID NO: 141803 - DNA, 80 bp, synthetic construct
  source 1..80: mol_type = other DNA
gttgcacaggggacacgtgttgcgcaacggaatccaggtcttcatgcacgggatgcagaaggggtgcaggcagggaaaac

SEQ ID NO: 141804 - DNA, 80 bp, synthetic construct
  source 1..80: mol_type = other DNA
gcgaaggcggtggacttcgtgcccgttgagtctatggaaaccaccatgcggtccccggtctttacggacaattcatctcc

SEQ ID NO: 141805 - DNA, 80 bp, synthetic construct
  source 1..80: mol_type = other DNA
tgacccactagtcccagagtatgatgacagggagatatcaacggccgctgagtgtcacagaccaccaaggcctaagtatc

SEQ ID NO: 141806 - DNA, 80 bp, synthetic construct
  source 1..80: mol_type = other DNA
gacatgggctgcgtgatcaactggaagggcaaggagctgaagtgcggcagcggcatcttcgtgaccaacgaggtgcacac

SEQ ID NO: 141807 - DNA, 80 bp, synthetic construct
  source 1..80: mol_type = other DNA
ccctaaatccccaccctgcagaaaccgacatttcattttttgaaattaaatgtcgtgctaaatacctctttgatccagat

SEQ ID NO: 141808 - DNA, 80 bp, synthetic construct
  source 1..80: mol_type = other DNA
ataaccaaatacatcatgacctgtatgtccgcagatttggaggtcatcaccagcacatgggtcctcgtgggtggagtcct

SEQ ID NO: 141809 - DNA, 80 bp, synthetic construct
  source 1..80: mol_type = other DNA
tcaattgcaatgacagcttgaatacgggttttatcgctgccctgttttataccagaagtttcaacagttctggctgcccc

SEQ ID NO: 141810 - DNA, 80 bp, synthetic construct
  source 1..80: mol_type = other DNA
tcatcgacggccccaacacccccgagtgccccagcgccagcagagcctggaacgtgtgggaggtggaggactacggcttc

SEQ ID NO: 141811 - DNA, 80 bp, synthetic construct
  source 1..80: mol_type = other DNA
attggggtgacggacacttatcaagctattaaggctacaaatggaaatggaggcaacactacctgggctcaggacaatac

SEQ ID NO: 141812 - DNA, 80 bp, synthetic construct
  source 1..80: mol_type = other DNA
ctgtggaggcaggagatgggcggtaacatcacccgcgtggagtctgagaacaaagttgttgtcctcgactctttcgaccc

SEQ ID NO: 141813 - DNA, 80 bp, synthetic construct
  source 1..80: mol_type = other DNA
gtttttccgggatgaggtctcgttctgcgttgggcttaattcctatgctgtcgggtcccagcttccctgtgaacctgagc

SEQ ID NO: 141814 - DNA, 80 bp, synthetic construct
  source 1..80: mol_type = other DNA
gtatggaccgccatgacctgcactgggagctcagactggagagctcaataatctaaacccagactgtgacagagcaaaac

SEQ ID NO: 141815 - DNA, 80 bp, synthetic construct
  source 1..80: mol_type = other DNA
gggcctcttgggctgcataattaccagcctgaccggccgggacaaaaaccaggtggagggtgaggttcagattgtgtcaa

SEQ ID NO: 141816 - DNA, 80 bp, synthetic construct
  source 1..80: mol_type = other DNA
catactcagagacatatcaaagattccagggggaaatatgtatgcagatgacacagccggatgggacacaagaataacag

SEQ ID NO: 141817 - DNA, 80 bp, synthetic construct
  source 1..80: mol_type = other DNA
atacacgacacgccggcgatttttcaactgtatccgaacaggatccacgtcaatttccaccccaagggatttttttttat

SEQ ID NO: 141818 - DNA, 80 bp, synthetic construct
  source 1..80: mol_type = other DNA
ccttggcctcgtgtcttttgcaaactgcgatctccgccttggaaggcgacctgatggttctcatcaatggttttgctttg

SEQ ID NO: 141819 - DNA, 80 bp, synthetic construct
  source 1..80: mol_type = other DNA
cactaggggtagcctgctctctccgcggcccatctcatatctcaaagggtcctcgggcggcccactgttgtgccccgcgg

SEQ ID NO: 141820 - DNA, 80 bp, synthetic construct
  source 1..80: mol_type = other DNA
cttctcctgcctcgctgtgccaactacggccatcaactatggtaacaaatctggcttgtactaccttaccaatgattgcc

SEQ ID NO: 141821 - DNA, 80 bp, synthetic construct
  source 1..80: mol_type = other DNA
ggctgcggtactctgctcggctatgtacgtgggggatttgtgcggatccgttttcctcgtcggccaactgttcaccttct

SEQ ID NO: 141822 - DNA, 80 bp, synthetic construct
  source 1..80: mol_type = other DNA
aaaagggacaggataagtatgactcttggatcggaaacccgtcggactctgcacgtctagggcgcagtatccagggtttc

SEQ ID NO: 141823 - DNA, 80 bp, synthetic construct
  source 1..80: mol_type = other DNA
gctgagatactcatggaaaacttggggaaaagcgaaggtactatcaacagaactccaaaatcagactttcctcatagacg

SEQ ID NO: 141824 - DNA, 80 bp, synthetic construct
  source 1..80: mol_type = other DNA
ggccacagaatggcatgggacatgatgatgaactggtcgcccacccttacctatatagcctccagcgccttaagggtccc

SEQ ID NO: 141825 - DNA, 80 bp, synthetic construct
  source 1..80: mol_type = other DNA
cgggagttccgcccgctatgatgtggcactcagtgaacaaggggagttcaagctgctttctgaagagaaagtgccatggg

SEQ ID NO: 141826 - DNA, 80 bp, synthetic construct
  source 1..80: mol_type = other DNA
tttgatccatactcaggagcattttgtcccattaccaattttttagttaaacgaacacacctagccgtggtacaagactt

SEQ ID NO: 141827 - DNA, 80 bp, synthetic construct
  source 1..80: mol_type = other DNA
cggaagcgggggggacatatttcacagcgtgtcccaggctcggccccgcactttactcctgtgcctactcctacttgcgg

SEQ ID NO: 141828 - DNA, 80 bp, synthetic construct
  source 1..80: mol_type = other DNA
atccagaccacattacagcggagtcagcagctcggagactagctagggggtcaccaccatccctggccagttcttcagct

SEQ ID NO: 141829 - DNA, 80 bp, synthetic construct
  source 1..80: mol_type = other DNA
atctcggctggaactctgttggggcatttacatacacactacaaaacagttcaccagccttcacaccgcctccccgcaga

SEQ ID NO: 141830 - DNA, 80 bp, synthetic construct
  source 1..80: mol_type = other DNA
tttttgaatcatttccaggccatgataacagcgtagcactccctcttgctcggtgcagccgtgaagccaaatcgcgcaac

SEQ ID NO: 141831 - DNA, 80 bp, synthetic construct
  source 1..80: mol_type = other DNA
cctatagccctcgccggcataatgttgtgcaggactgcaactgttccatttacagtggccatatcaccggccaccggatg

SEQ ID NO: 141832 - DNA, 80 bp, synthetic construct
  source 1..80: mol_type = other DNA
aagttgtagtacttgactcctttgagctctacccgcttgagtatgaggagagggaaatttcagtatcagttgagtgccac

SEQ ID NO: 141833 - DNA, 80 bp, synthetic construct
  source 1..80: mol_type = other DNA
tgcatcccaagctggtgtactattaggtttgaccaatggaatgccattcactgctatggatctatcggtgccattattgg

SEQ ID NO: 141834 - DNA, 80 bp, synthetic construct
  source 1..80: mol_type = other DNA
aggcaggagatgggtggtaacatcacccgcgtggagtccgagaataaggtcgttattcttgattcctttgatcccctcgt

SEQ ID NO: 141835 - DNA, 80 bp, synthetic construct
  source 1..80: mol_type = other DNA
accccagtagaaagatggagtgatgttccctactcaggtaagagagaggacatctggtgtgggagcttgataggcacacg

SEQ ID NO: 141836 - DNA, 80 bp, synthetic construct
  source 1..80: mol_type = other DNA
tatcactgttgcctggagcccgaagcaccgttcccttactttttccattttgtgttcagtcatccattgtcaaacccttg

SEQ ID NO: 141837 - DNA, 80 bp, synthetic construct
  source 1..80: mol_type = other DNA
gggggggccgggtggtccgggttttcccacaacaccgcgaccgtggtcatggagatgtccacgagcaccagacacagcgt

SEQ ID NO: 141838 - DNA, 80 bp, synthetic construct
  source 1..80: mol_type = other DNA
tgcgctcaaacgctgcgctcggagcttggtcagatgaacaaaatcgctggtcaaatgctcgggaagcagtggaggacccc

SEQ ID NO: 141839 - DNA, 80 bp, synthetic construct
  source 1..80: mol_type = other DNA
gcggtcctatgctatgcccctccggccacgtcgcggggattttccgcgcggccgtgtgcaccaggggtgtggcgaaatcg

SEQ ID NO: 141840 - DNA, 80 bp, synthetic construct
  source 1..80: mol_type = other DNA
catgacatgctatctcaaggccagtgccgcagctgcggctgcaggcattcaaaaccctgatatgctcgtatgcggggatg

SEQ ID NO: 141841 - DNA, 80 bp, synthetic construct
  source 1..80: mol_type = other DNA
agctcgcagcagctcttcggggcatgggtgtcaatgccgtcgcttactacaggggtctcgacgtctccgttataccactt

SEQ ID NO: 141842 - DNA, 80 bp, synthetic construct
  source 1..80: mol_type = other DNA
tatggtttttgagatcaccaaacacttgctcgccctgctgggtcccctttatatacttcaggcctctctcctgcaggtcc

SEQ ID NO: 141843 - DNA, 80 bp, synthetic construct
  source 1..80: mol_type = other DNA
cagggccctactgggctgatgtcaaagaggacgttgtatgctacggcggagcctggagtcttgaggagaagtggaaaggt

SEQ ID NO: 141844 - DNA, 80 bp, synthetic construct
  source 1..80: mol_type = other DNA
tttctgggcttgcttttatttgttttatattggatcaatggagcgcccaaactcatctgtcgcagggttatactctggat

SEQ ID NO: 141845 - DNA, 80 bp, synthetic construct
  source 1..80: mol_type = other DNA
gtttcgaccccgtttgcccggggagttggactacctcagcgatcccctattgcgaccggcccggaaaaaaaattttccca

SEQ ID NO: 141846 - DNA, 80 bp, synthetic construct
  source 1..80: mol_type = other DNA
gccacgactgaatgtcttatggtgactcggctgagctcgctcggttgaggcacctagaccactgccgccgcctgcgctgc

SEQ ID NO: 141847 - DNA, 80 bp, synthetic construct
  source 1..80: mol_type = other DNA
ctaatacttcttaataaagacacaattggttggaaaagtcaaaagtgtttatttatttcttttgcggtaggccctggacc

SEQ ID NO: 141848 - DNA, 80 bp, synthetic construct
  source 1..80: mol_type = other DNA
gtgtcgttctcatttgtgtgatgatggctaccctatcaccgctgtacaaacgccgcatcgcccagtgcatatggtggctc

SEQ ID NO: 141849 - DNA, 80 bp, synthetic construct
  source 1..80: mol_type = other DNA
ggacagtctaccacggagctgggtcgaggacgcttgcctccagcaaacggcctgcattgcagatgtacaccaacgtggac

SEQ ID NO: 141850 - DNA, 80 bp, synthetic construct
  source 1..80: mol_type = other DNA
catagtggtgagtatgacggggcgtgacaggacagaacaggccggggaagtccaaatcctgtccacagtctctcagtcct

SEQ ID NO: 141851 - DNA, 80 bp, synthetic construct
  source 1..80: mol_type = other DNA
actgtagacctgccaggcggaggaacgttacacattacctgtaccaaaacctatgtaattattggcaaatatagcaaacc

SEQ ID NO: 141852 - DNA, 80 bp, synthetic construct
  source 1..80: mol_type = other DNA
aggcgaatatatataaaatgcctacctctgacaaacacactccccataaataacacttccttgggcatgccacaatttac

SEQ ID NO: 141853 - DNA, 80 bp, synthetic construct
  source 1..80: mol_type = other DNA
ggggacccacgacacgctgtaccgcagttggtacctgtcctatacctacggggaccccgagaaggtggtgcagtcgtgga

SEQ ID NO: 141854 - DNA, 80 bp, synthetic construct
  source 1..80: mol_type = other DNA
gcgtgggctaaggtcattggcatccttttgttaacagcgggggtggagacccaaacaacgacggtgtgtggcagggtcgt

SEQ ID NO: 141855 - DNA, 80 bp, synthetic construct
  source 1..80: mol_type = other DNA
tgtcccagaatatgatgacagagaaccatcgctgtcagctgaatgccaccggccgaataggccgaagtttccaccagcat

SEQ ID NO: 141856 - DNA, 80 bp, synthetic construct
  source 1..80: mol_type = other DNA
cacatcacatcttgctccgcaaatgtctccgtcgcccacgatgacacaggcacgagatattactacctcacacgtgaccc

SEQ ID NO: 141857 - DNA, 80 bp, synthetic construct
  source 1..80: mol_type = other DNA
aacggcctcggggaggtccgaccagcccgccggcagggaggcccgcagggtcgccaggacggccggacaggcctttagcc

SEQ ID NO: 141858 - DNA, 80 bp, synthetic construct
  source 1..80: mol_type = other DNA
aaccatgctttacccgcgtgtggtattcgatgtcaccaagtggctgctggcaatcctcggccccggctacctccttaggg

SEQ ID NO: 141859 - DNA, 80 bp, synthetic construct
  source 1..80: mol_type = other DNA
catccgggcccagctcggggcggtcatcgtggggaacaggtgtgcggcggtcctgcagaagcgctcctggctgtccaccg

SEQ ID NO: 141860 - DNA, 80 bp, synthetic construct
  source 1..80: mol_type = other DNA
aggcatttaagggcgtacagttttggagccaaaaaaacagattctggagaataagcatctgcgccacaataactacaaac

SEQ ID NO: 141861 - DNA, 80 bp, synthetic construct
  source 1..80: mol_type = other DNA
ccagcagggggtgacggtggacagcatcgggatgctgccccgcttcatccccgagaaccagcgcaccgtcgccgtataca

SEQ ID NO: 141862 - DNA, 80 bp, synthetic construct
  source 1..80: mol_type = other DNA
gccagactaccaaccgcccactgtcgcgggctgtgctctccccccccccaagaagaccccgacgccccccccaaggaagc

SEQ ID NO: 141863 - DNA, 80 bp, synthetic construct
  source 1..80: mol_type = other DNA
ccactccaagtggatggaggcttaaggaatcttcttttctcttttacagtatggtgatcagccatgattcctaggttttt

SEQ ID NO: 141864 - DNA, 80 bp, synthetic construct
  source 1..80: mol_type = other DNA
gtgacaagatagtgtacctgtgccccgtcctggtgtttgtcgcccaacggacgctccgcgtcagccgcgtgacccggctc

SEQ ID NO: 141865 - DNA, 80 bp, synthetic construct
  source 1..80: mol_type = other DNA
cgcaggcgctggctcaattggccgagaaggcttttcctgccacaccggacgaaccctcgaccggcccagaccccggcaaa

SEQ ID NO: 141866 - DNA, 80 bp, synthetic construct
  source 1..80: mol_type = other DNA
caacgtatcctgatcattacacccggataaaggcggaatatgaaggtccggttcgggatgaatcaaacacaatgtttgac

SEQ ID NO: 141867 - DNA, 80 bp, synthetic construct
  source 1..80: mol_type = other DNA
tggagaagagaagtatgtggattacatgagctccctgaggaggtatgaagacaccattgtagttgaggacactgttttgt

SEQ ID NO: 141868 - DNA, 80 bp, synthetic construct
  source 1..80: mol_type = other DNA
agacgtggcgctcgaagaagacacccatggggttctcctatgacactaggtgttttgattcaacagtgactgagcgtgac

SEQ ID NO: 141869 - DNA, 80 bp, synthetic construct
  source 1..80: mol_type = other DNA
ccgaacagaacccaggggtcaacctccatctccgtaatggcgcacatggggtcacagaacatgtgcttaaagatggcctc

SEQ ID NO: 141870 - DNA, 80 bp, synthetic construct
  source 1..80: mol_type = other DNA
ccggagcccaactaccgcagagcactgtggagggtggctgccgaggaatacgttgaggtcatgcgtgtcaacgaccatca

SEQ ID NO: 141871 - DNA, 80 bp, synthetic construct
  source 1..80: mol_type = other DNA
cgctgtcgccacattacaaacagtggctggcacggggagtgtggtggttgcaatattttattgccagagttgaggccctt

SEQ ID NO: 141872 - DNA, 80 bp, synthetic construct
  source 1..80: mol_type = other DNA
catggaaaaataccagctagcagtgaccgtcatggctatgctatgtattccaaatgttatgatactccagcatgcatgga

SEQ ID NO: 141873 - DNA, 80 bp, synthetic construct
  source 1..80: mol_type = other DNA
tgcggtctcgccgatctcatggggtacgtccctgtcttgggcggtcccttaggtggcgtcgccgcagctctggcacacgg

SEQ ID NO: 141874 - DNA, 80 bp, synthetic construct
  source 1..80: mol_type = other DNA
agaaaacttggggtacccccgttgagagcgtggagacatcgggcccgagcagtccgcgctaagctgatcgcccagtggtg

SEQ ID NO: 141875 - DNA, 80 bp, synthetic construct
  source 1..80: mol_type = other DNA
gacctacgcgaccgtggggacgagctcgtcgcttgacagcaccgccgcagccgcggcagccgcagccgccatgacagcga

SEQ ID NO: 141876 - DNA, 80 bp, synthetic construct
  source 1..80: mol_type = other DNA
cactgtccaccagcaccaccatcctcctgaacatcatgggaggatggttggcctcccagattgccccccctgccggagcc

SEQ ID NO: 141877 - DNA, 80 bp, synthetic construct
  source 1..80: mol_type = other DNA
cgccgcttctcggccaatcagcgttggctccgccccaaaaccgttaaaattcaaaagctcatttgcatattaacttttgt

SEQ ID NO: 141878 - DNA, 80 bp, synthetic construct
  source 1..80: mol_type = other DNA
gaaagggctgaccgggaacggtcgatttcggcggcgtagtatgcgcagacgcatgaagggtgtggtgctgccctttctaa

SEQ ID NO: 141879 - DNA, 80 bp, synthetic construct
  source 1..80: mol_type = other DNA
atggacttcccgtgtccgcccgactcggccaggagatcctcctcggcccagctgatggctacacctccaaggggtggaag

SEQ ID NO: 141880 - DNA, 80 bp, synthetic construct
  source 1..80: mol_type = other DNA
cgatgcccttatgaccggatacaccggtgactttgacagtgtcattgactgcaacacagctgtgactcaggtggtggact

SEQ ID NO: 141881 - DNA, 80 bp, synthetic construct
  source 1..80: mol_type = other DNA
tggcggcggctaacgccagcttcccgacctcgtcgattcgacgccatgtcgatctgctcgttgggactgcggcgttttgc

SEQ ID NO: 141882 - DNA, 80 bp, synthetic construct
  source 1..80: mol_type = other DNA
cgctcgccgcgacggcccggtgcttttgggggacagggcccccaggaggacggccagtacgatgtggctgctggtgatcg

SEQ ID NO: 141883 - DNA, 80 bp, synthetic construct
  source 1..80: mol_type = other DNA
aggatatgaggtattttgggcggatgcaaggaatggagtggaggtttcgattaccgtgtttttcacctaaatttccgcgt

SEQ ID NO: 141884 - DNA, 80 bp, synthetic construct
  source 1..80: mol_type = other DNA
cgacaagaaagacttctgaacggtcccagcccagaggcaggcgtcaacctatacctaagacgcgccgccaaacgggccgt

SEQ ID NO: 141885 - DNA, 80 bp, synthetic construct
  source 1..80: mol_type = other DNA
atgtggccccttttactgctcctcctggcattgcctcaaagggcgtatgcttatgaaggcgagcaagcagcctctattgg

SEQ ID NO: 141886 - DNA, 80 bp, synthetic construct
  source 1..80: mol_type = other DNA
ctcttgtcttgtatctctgtgccagtttccgctgtagaagtcagaaacaccagcagttcatacatggcgaccaacgattg

SEQ ID NO: 141887 - DNA, 80 bp, synthetic construct
  source 1..80: mol_type = other DNA
ccagcccagtggtagtgggcacgaccgacaggcttggagcgcccacttacacgtggagggagaatgagacagatgtcttc

SEQ ID NO: 141888 - DNA, 80 bp, synthetic construct
  source 1..80: mol_type = other DNA
cgttcacactccatagctactctccgcatgagctcaacagagtagcgggggcactcaggaaacttggtgcgcccccccta

SEQ ID NO: 141889 - DNA, 80 bp, synthetic construct
  source 1..80: mol_type = other DNA
taaaacattccagccggaaccacaaataggggaaaataattggcaggacactaatgttttctatggcggcagagctctta

SEQ ID NO: 141890 - DNA, 80 bp, synthetic construct
  source 1..80: mol_type = other DNA
gtctctgtagcccacgacgacactggcaaaaggtactactacctcacgcgtgacccaactactccacttgcccgcgccgc

SEQ ID NO: 141891 - DNA, 80 bp, synthetic construct
  source 1..80: mol_type = other DNA
acgaggagaatgtcaccaaccccgagaatatgaggccctattgctggcactacccgcccaaaccgtgtggtgtggtgcct

SEQ ID NO: 141892 - DNA, 80 bp, synthetic construct
  source 1..80: mol_type = other DNA
actgagatagatggcgtgaggatacaccgctatgcaccaaagtgcaagccacttctcagggatgaggtctcctttagtgt

SEQ ID NO: 141893 - DNA, 80 bp, synthetic construct
  source 1..80: mol_type = other DNA
aagaggtctatcagtgctgtgacctggagcccgaaacccgcaaggtaatatccgccctcactgagagactctatgtgggc

SEQ ID NO: 141894 - DNA, 80 bp, synthetic construct
  source 1..80: mol_type = other DNA
ttgttccctaagctacccggcctccccttcatctcttgtcaaaaggggtacaaggggacgtgggccggcactggcatcat

SEQ ID NO: 141895 - DNA, 80 bp, synthetic construct
  source 1..80: mol_type = other DNA
tgcgcaggggatcggtgggcggcagcatttggttggtggcgataaagtggaaaagcccgtccggactgaaggtctcgtgg

SEQ ID NO: 141896 - DNA, 80 bp, synthetic construct
  source 1..80: mol_type = other DNA
cttcaccgagctggatggagtcaggcttcatcgctacgctcctccatgtagacctctgctgagagatgaggtctccttct

SEQ ID NO: 141897 - DNA, 80 bp, synthetic construct
  source 1..80: mol_type = other DNA
caccgcttatgcccagcagacgcgcggcttgctgggtaccatagtggtgagcatgactgggcgcgacaggactgagcaag

SEQ ID NO: 141898 - DNA, 80 bp, synthetic construct
  source 1..80: mol_type = other DNA
catgaattctgccaccccgcaaacgcctttctccaataaaactttgcatgccaacaaacgtcatcttttccctccccgga

SEQ ID NO: 141899 - DNA, 80 bp, synthetic construct
  source 1..80: mol_type = other DNA
cggacttggaggtcattaccagcacgtgggttctggtggggggtgtcgtggcggccttagcggcctactgcttgacggtg

SEQ ID NO: 141900 - DNA, 80 bp, synthetic construct
  source 1..80: mol_type = other DNA
tttttttttttatcacgtcaaatcgattttaaaaagcctgccgctccatttggaatatatatattctgtgaaaagcccgc

SEQ ID NO: 141901 - DNA, 80 bp, synthetic construct
  source 1..80: mol_type = other DNA
atgacgagcccccgtagagggcataatccgactcgtcgtactggacgaaacggacctcgcccctctggcgcgagcgtgtc

SEQ ID NO: 141902 - DNA, 80 bp, synthetic construct
  source 1..80: mol_type = other DNA
gccatagcccaccagttcaaggaaaagatcctcggcctgctccagcgagctgcccaacaccaagctgacattcaaccagt

SEQ ID NO: 141903 - DNA, 80 bp, synthetic construct
  source 1..80: mol_type = other DNA
tccccgccgcatatgccagtcaggggtataaagtactcgtactaaatccatctgttgcggccacccttggttttgtggcc

SEQ ID NO: 141904 - DNA, 80 bp, synthetic construct
  source 1..80: mol_type = other DNA
tgctatccaccgccacgcagtccttcttgggtactgcggtcaacggcgtcatgtggaccgtgtaccacggagcgggcagc

SEQ ID NO: 141905 - DNA, 80 bp, synthetic construct
  source 1..80: mol_type = other DNA
cttctttcgtgcctgactgtccccgcttcggccgttaactatcgcaatgtctcgggcatctaccatgtcaccaatgactg

SEQ ID NO: 141906 - DNA, 80 bp, synthetic construct
  source 1..80: mol_type = other DNA
cttcagaaaacatcctgaggcgacttacatcaaatgtggggctgggccgtggttaacaccccgttgcctggtccactacc

SEQ ID NO: 141907 - DNA, 80 bp, synthetic construct
  source 1..80: mol_type = other DNA
gtttttatgtacccgaaagctacaaagatagaatgtattcctttttccgaaacttccagccaatgagtcgtcaggtggta

SEQ ID NO: 141908 - DNA, 80 bp, synthetic construct
  source 1..80: mol_type = other DNA
tcgctgcgtattgcttagcgaccgggtgtgtttccatcatcggccgcttgcacatcaaccagagagctgtcgttgcacca

SEQ ID NO: 141909 - DNA, 80 bp, synthetic construct
  source 1..80: mol_type = other DNA
aggtccatagctctcacgtttctcgcagttggaggagttctgctcttcctctccgtgaacgtgcatgctgacactgggtg

SEQ ID NO: 141910 - DNA, 80 bp, synthetic construct
  source 1..80: mol_type = other DNA
cacggacgctatgaccaggtactcagcccctcctggagacgagccacacccggaatacgacctagagcgcattacatcat

SEQ ID NO: 141911 - DNA, 80 bp, synthetic construct
  source 1..80: mol_type = other DNA
cacttggacagagcaatacaaatttcaagctgactccccaaagagactatcagcagccatcgggaaggcatgggaggagg

SEQ ID NO: 141912 - DNA, 80 bp, synthetic construct
  source 1..80: mol_type = other DNA
cgagacagacgacagagagatctcagtggctgctgaatgccatagaccacccagacccaaatatccacctgccctaccca

SEQ ID NO: 141913 - DNA, 80 bp, synthetic construct
  source 1..80: mol_type = other DNA
atatcaaatagagacttcgtagaaggggtttcaggaggaagttgggttgacatagtcttagaacatggaagttgtgtgac

SEQ ID NO: 141914 - DNA, 80 bp, synthetic construct
  source 1..80: mol_type = other DNA
gggacagggccgatctgagtcccctattgttcagcacaacggaacttgctatcttaccatgctccttcactccgatgccc

SEQ ID NO: 141915 - DNA, 80 bp, synthetic construct
  source 1..80: mol_type = other DNA
cgatgggctccagcgaacaggagctgcaggccattgttcacgacctgggctgcgggccctactttttgggcaccttcgac

SEQ ID NO: 141916 - DNA, 80 bp, synthetic construct
  source 1..80: mol_type = other DNA
ctgttactattaatgcaaacaacgaactttctctcttaatagacgccccacttaatgctgacacgggcactcttcgcctt

SEQ ID NO: 141917 - DNA, 80 bp, synthetic construct
  source 1..80: mol_type = other DNA
atgccaccgcttgagggtgaaccaggtgacccggaccttagttcggggtcatggtctacagtcagtgaggaaggcgacag

SEQ ID NO: 141918 - DNA, 80 bp, synthetic construct
  source 1..80: mol_type = other DNA
gcgccaagcccgacgcccgcgggcatggcggcgtcatcgtcgggcagcagatacgtgttttccatctggtccggttcggc

SEQ ID NO: 141919 - DNA, 80 bp, synthetic construct
  source 1..80: mol_type = other DNA
acgcagcccagggttacagcgtgttggtgttgaacccctctgtggctgctactctaggctttggcgcatacatgcgcact

SEQ ID NO: 141920 - DNA, 80 bp, synthetic construct
  source 1..80: mol_type = other DNA
tgaggctcattttaccgacccagctagcattgcagcaagaggttatatttccacaaaagtcgagctgggggaggcggcgg

SEQ ID NO: 141921 - DNA, 80 bp, synthetic construct
  source 1..80: mol_type = other DNA
cggcctcaactcctttgtggttggctctcagctcccttgtgatcctgagccagacacagaggtattggcgtcaatgctga

SEQ ID NO: 141922 - DNA, 80 bp, synthetic construct
  source 1..80: mol_type = other DNA
gatccgcttgtggcggaggaggacgagcgggagatctccgtacccgcagaaatcctgcggaagtctcggagattcgccca

SEQ ID NO: 141923 - DNA, 80 bp, synthetic construct
  source 1..80: mol_type = other DNA
accgggtttgtcaagacctgtggggcccccccctgcaatctaggccctacgggcaataacagccttaaatgccctactga

SEQ ID NO: 141924 - DNA, 80 bp, synthetic construct
  source 1..80: mol_type = other DNA
agataaaccaatgacactcactattacacttaatggaactgatgaaaatcaaaccactcccgccagtacatactcaattt

SEQ ID NO: 141925 - DNA, 80 bp, synthetic construct
  source 1..80: mol_type = other DNA
atattacaagcaaatcatcacaaaaatcatttggtggctccagtacttcctcacgagatcggaagcagagccgcgagtct

SEQ ID NO: 141926 - DNA, 80 bp, synthetic construct
  source 1..80: mol_type = other DNA
gaagaaggtcatcacatggggtgctgataccgctgcctgcggcgacatcatcgccggtcttcctgtcgctgctaggcgtg

SEQ ID NO: 141927 - DNA, 80 bp, synthetic construct
  source 1..80: mol_type = other DNA
gcccttacacgcggttggtgcattaacattccaagtccccgttcatattgcaacataacactgtcatgtattgataccac

SEQ ID NO: 141928 - DNA, 80 bp, synthetic construct
  source 1..80: mol_type = other DNA
actgccgagcccgtctggccccgcgcacgtggtgccgtttgctgcaggtgtccggcggaacctggggcatgcacctgcgc

SEQ ID NO: 141929 - DNA, 80 bp, synthetic construct
  source 1..80: mol_type = other DNA
tacaacagcacaaacgtgcagtccaacctggaccggctggtgacggacgtgcgcgaggccgtggcgcagcgcgagcggtt

SEQ ID NO: 141930 - DNA, 80 bp, synthetic construct
  source 1..80: mol_type = other DNA
gcgggaggaatgagagtggacggcgccaacttaattcttcatgtagcatacccctttgaagcaatcaaccaactaacact

SEQ ID NO: 141931 - DNA, 80 bp, synthetic construct
  source 1..80: mol_type = other DNA
tgatgacagtcaatgtcacagacatagcagacatcatcacgattccgactccggctgggaaaaaccagtgtgttgtgaga

SEQ ID NO: 141932 - DNA, 80 bp, synthetic construct
  source 1..80: mol_type = other DNA
cctctttttatggctatggagacaaaagtcatgcaaagcgatacagagtaaaagtaaatacaacaaattctaaaaatgta

SEQ ID NO: 141933 - DNA, 80 bp, synthetic construct
  source 1..80: mol_type = other DNA
gggaggacctgctagaggacaatgacacacctattcctaccaccatcatggccaagaatgaagtgttttgcgtggacatt

SEQ ID NO: 141934 - DNA, 80 bp, synthetic construct
  source 1..80: mol_type = other DNA
ctcagtaacaagactggagaatctgatgtggaaacaaataacaccagaactgaatcacattctaacagaaaatgaggtaa

SEQ ID NO: 141935 - DNA, 80 bp, synthetic construct
  source 1..80: mol_type = other DNA
ggaggtggacggtgtaaggttacacaggtatgccccagactgcaagcctctccttagggacgaggtgtcgttcagtgtgg

SEQ ID NO: 141936 - DNA, 80 bp, synthetic construct
  source 1..80: mol_type = other DNA
acgtggacctcttggtgggtgctgctgcgttctgttctgccatgtacgtgggcgacctgtgcggcgggctctttctcgtc

SEQ ID NO: 141937 - DNA, 80 bp, synthetic construct
  source 1..80: mol_type = other DNA
gaagttgaggactatggatttggattgttttcaacgaacatttggctacgtctcagagaaaagcaagacacactatgtga

SEQ ID NO: 141938 - DNA, 80 bp, synthetic construct
  source 1..80: mol_type = other DNA
cggtgatgaaggagctgctgttgcgcgcggcgcccgagatccggaagcaggcctggtccagcgccacgtccccggggacc

SEQ ID NO: 141939 - DNA, 80 bp, synthetic construct
  source 1..80: mol_type = other DNA
tcgtggtggctggtgccaccttctgctcggccatgtacgttggagacgtctgtggtgccgtcttcatcattggtcaggca

SEQ ID NO: 141940 - DNA, 80 bp, synthetic construct
  source 1..80: mol_type = other DNA
tctcgctggactgtctactttgccaggcaatcctgccattgcttccctcatgtcctttactgctgccgttacaagccctc

SEQ ID NO: 141941 - DNA, 80 bp, synthetic construct
  source 1..80: mol_type = other DNA
tccgcaacacccacgctggccatacctaatgcctcgttccctgtgattgggtttcgacgtcacgtcgacctcctcgtggg

SEQ ID NO: 141942 - DNA, 80 bp, synthetic construct
  source 1..80: mol_type = other DNA
ccggccgtggcgctccgggcgctttcgccgcgcgaggagctgacccaggagtcgaacggatacgcgtacatatgggcgtc

SEQ ID NO: 141943 - DNA, 80 bp, synthetic construct
  source 1..80: mol_type = other DNA
ctccaccgaggacctggttaatttactccctgccatcctctctcccggcgccctggttgtcggggtcgtgtgcgccgcaa

SEQ ID NO: 141944 - DNA, 80 bp, synthetic construct
  source 1..80: mol_type = other DNA
cagactctggtcatggcactaacggcgctgcatcgctaccatcagctgaagatgatgacgcctcagacgcagactcatat

SEQ ID NO: 141945 - DNA, 80 bp, synthetic construct
  source 1..80: mol_type = other DNA
tgaatcagctgctgctgaggcgctcgccgagatggcccggaaatcattcccattgaatccatcagagcctgaagagtctg

SEQ ID NO: 141946 - DNA, 80 bp, synthetic construct
  source 1..80: mol_type = other DNA
cctgcgggccatcaccagcaacgtcagtgccatcctcgcccgcaacgggggcatcgggctatgcgtgcaggcgtttaacg

SEQ ID NO: 141947 - DNA, 80 bp, synthetic construct
  source 1..80: mol_type = other DNA
gacagcaagcagcgccaaacagagcgaattacattgcattcagagataattttattggcctgatgtattacaacagcaca

SEQ ID NO: 141948 - DNA, 80 bp, synthetic construct
  source 1..80: mol_type = other DNA
ggaacacttcacgctgctggacatctctaacacccaccgtggctgccccctacgtcggcgcaccgtacgactccatccga

SEQ ID NO: 141949 - DNA, 80 bp, synthetic construct
  source 1..80: mol_type = other DNA
gctgacatcggtcgggggggccgtcgacagtctgcgcgtgtgtcccgcgtggagaaaggacaggcgcggagccgccagcc

SEQ ID NO: 141950 - DNA, 80 bp, synthetic construct
  source 1..80: mol_type = other DNA
ccaggctcctttgtctggagaaacaattacaaaaagcgggctacaaataggatcagacaatgcagaaacacaagctaaac

SEQ ID NO: 141951 - DNA, 80 bp, synthetic construct
  source 1..80: mol_type = other DNA
ccttgccatgtggtggttgcaatacttcatagctagagtggaggccgcgctgcatgtttatgcgccatcattcgagccac

SEQ ID NO: 141952 - DNA, 80 bp, synthetic construct
  source 1..80: mol_type = other DNA
ccgtctcagaggtgaggagaagaagaacttcttggagctgattagaacggctgacctcccagtatggctagcctacaagg

SEQ ID NO: 141953 - DNA, 80 bp, synthetic construct
  source 1..80: mol_type = other DNA
ccttttctatgcacacatactctcaccacgaactgacgcgggtggcttcagccctcagaaaacttggggcgccacccctc

SEQ ID NO: 141954 - DNA, 80 bp, synthetic construct
  source 1..80: mol_type = other DNA
accacgatctggccaattggacagaagcaaagatcctgttggataacatataccttccaaacgggctggtcgcacaaatg

SEQ ID NO: 141955 - DNA, 80 bp, synthetic construct
  source 1..80: mol_type = other DNA
acttctgccgataaagccttctgctttaccaaagcccccgagtccaaagtaacggcctccatacccgaagacccggatga

SEQ ID NO: 141956 - DNA, 80 bp, synthetic construct
  source 1..80: mol_type = other DNA
aaaaggttcaggctagtacatcgcctagtatgttaataagcacccttgccgaatccgggtttacaagattttcatgcaaa

SEQ ID NO: 141957 - DNA, 80 bp, synthetic construct
  source 1..80: mol_type = other DNA
cgggttcgtgtatttcctttccctgtccttataaaagccgtatgtggggcgctgacggaaccaccccgcgtgccatcacg

SEQ ID NO: 141958 - DNA, 80 bp, synthetic construct
  source 1..80: mol_type = other DNA
gtttggtctgtagaacgcttgatttgtataaacgtaaatttggactgacaccggaatgggttgcggactacgccatgtta

SEQ ID NO: 141959 - DNA, 80 bp, synthetic construct
  source 1..80: mol_type = other DNA
tagcggcatactgcttggcaacaggctgcgtgtctatcataggccgcctgcacataaattctaggactatcatctcccca

SEQ ID NO: 141960 - DNA, 80 bp, synthetic construct
  source 1..80: mol_type = other DNA
acgccgggcccgggcctgccgctgtggccccaggtgtttctcggaggccatgtggcggtggccctgacggagctgtgtca

SEQ ID NO: 141961 - DNA, 80 bp, synthetic construct
  source 1..80: mol_type = other DNA
gggcggcggggacgggaagccgagcgggcgcgggcccgtgcggtagcggcggcacgccccgcggctcggccccggtcggc

SEQ ID NO: 141962 - DNA, 80 bp, synthetic construct
  source 1..80: mol_type = other DNA
aacgagcgtatgcttggtcgggtgaagacagtgctaccctcggcgccgggatcttagccctcttcgggtttttcaccttg

SEQ ID NO: 141963 - DNA, 80 bp, synthetic construct
  source 1..80: mol_type = other DNA
gcccctcctggtgacgttccaagaccggagtatgacctggagctcataacatcttgttcctcaaatgtctccgtcgccca

SEQ ID NO: 141964 - DNA, 80 bp, synthetic construct
  source 1..80: mol_type = other DNA
acttatcaggctggttcgtggcaggctacgacgggggggacatttatcacagcgtgtcccaggcccgaccccgtttctta

SEQ ID NO: 141965 - DNA, 80 bp, synthetic construct
  source 1..80: mol_type = other DNA
ttcggggatgggactggcaccccggcggattttgttgggctggtacgcgttgcccaaccgagggccgcgtccacgggacg

SEQ ID NO: 141966 - DNA, 80 bp, synthetic construct
  source 1..80: mol_type = other DNA
tagcgtccgagtacgccagaagcacccagggcttagtgtccttctttgcacctggagcatctcagaagatccagctcata

SEQ ID NO: 141967 - DNA, 80 bp, synthetic construct
  source 1..80: mol_type = other DNA
atcccggttggatattttgtttcgtcgacccaccatcatttgagtccgaatcatccgaatttgacggggaaggggcgtgt

SEQ ID NO: 141968 - DNA, 80 bp, synthetic construct
  source 1..80: mol_type = other DNA
ctatcgtcccttggcctaaatgctgtagcctactataggggcttggacgtctcagtaataccaacatctggggacgttgt

SEQ ID NO: 141969 - DNA, 80 bp, synthetic construct
  source 1..80: mol_type = other DNA
agagcctgttgatttgtcagtgaaacgccctagatatgattagtggactttgcacacctgtgcaataaaggaagggtggt

SEQ ID NO: 141970 - DNA, 80 bp, synthetic construct
  source 1..80: mol_type = other DNA
gggtgcgcctacataggtacgcccccccctgcaaacccctgctacgggatgaggtgacgtttagcatcgggctcaatgaa

SEQ ID NO: 141971 - DNA, 80 bp, synthetic construct
  source 1..80: mol_type = other DNA
ccaggattgcccgtgtgccaggaccacctggaattttgggaaggtgttttcacaggccttacccacattgacgcacactt

SEQ ID NO: 141972 - DNA, 80 bp, synthetic construct
  source 1..80: mol_type = other DNA
agattctactcgtcttggccagcgtggcagcagtatgcgtgaaccccagaataactaccatccgtgaagctggaatactc

SEQ ID NO: 141973 - DNA, 80 bp, synthetic construct
  source 1..80: mol_type = other DNA
taatgccactgagcaacaagaagacgtggatttcactaacctgaagacgttattaaaactaaccccccctcccaaaacaa

SEQ ID NO: 141974 - DNA, 80 bp, synthetic construct
  source 1..80: mol_type = other DNA
cttagcccttattgcagccttcaaaatacaacctgggtttttggtgatgagtatgatgaagagtcattggactaatcagg

SEQ ID NO: 141975 - DNA, 80 bp, synthetic construct
  source 1..80: mol_type = other DNA
gacaactgaggtaagtgggtggagctaggtgggattataaaaggctggaagtcaactaaaaattgtttttgttcttttaa

SEQ ID NO: 141976 - DNA, 80 bp, synthetic construct
  source 1..80: mol_type = other DNA
tataacaatattagaaccttttacccgtacacaccccccagtacttttaccatctcacgtttctactatagattccctta

SEQ ID NO: 141977 - DNA, 80 bp, synthetic construct
  source 1..80: mol_type = other DNA
tgcccttctgggcatgtcgtggggctcttccgagcggcggtctgcacgcggggtgttgctaaggcgattgacttcgtgcc

SEQ ID NO: 141978 - DNA, 80 bp, synthetic construct
  source 1..80: mol_type = other DNA
ccatgagagagatcatactcaaggtggtcctgatgaccatctgtggcatgaacccaatagccataccctttgcagctgga

SEQ ID NO: 141979 - DNA, 80 bp, synthetic construct
  source 1..80: mol_type = other DNA
gctgcgcgagtgtcactggaccgccccgagccgatcccaggcccgccgggcggcccggcgggagcgcgccaactcgcgct

SEQ ID NO: 141980 - DNA, 80 bp, synthetic construct
  source 1..80: mol_type = other DNA
cgtgaagactgtagtcacgcagaaagcgtctagccatggcgttagtatgagtgtcgtacagcctccaggcccccccctcc

SEQ ID NO: 141981 - DNA, 80 bp, synthetic construct
  source 1..80: mol_type = other DNA
cctcaagtgccttcagcagcactgcaaatttaacttcgcttgcttggactaatgaaaccggagtatcattgatgcatggc

SEQ ID NO: 141982 - DNA, 80 bp, synthetic construct
  source 1..80: mol_type = other DNA
cacagattagaggtaggtttaagtagtgggcgtggctaaggtaagtataaaggcgggtgtcttacaagggtctttttgct

SEQ ID NO: 141983 - DNA, 80 bp, synthetic construct
  source 1..80: mol_type = other DNA
agcaggaagctccacagggccgggcttgcgtcgacggaagtccggggcagggcgttgttctggtccggcacgtcgaacct

SEQ ID NO: 141984 - DNA, 80 bp, synthetic construct
  source 1..80: mol_type = other DNA
gtgcatgagggtttaaatttaatacaagccgctaatgaagcagacctaggtgaaggagcatcggtatccaaacgtggaca

SEQ ID NO: 141985 - DNA, 80 bp, synthetic construct
  source 1..80: mol_type = other DNA
gatggggagagcccacatgcggaaagcaagaacaataaaggcggtggtatctagttgatatgcatctctgggtgtttttg

SEQ ID NO: 141986 - DNA, 80 bp, synthetic construct
  source 1..80: mol_type = other DNA
tcactatgtgataggtgtcaccgctggccatctgaagtgtccctgccaagtgccagcccctgaatttttcaccgaggtcg

SEQ ID NO: 141987 - DNA, 80 bp, synthetic construct
  source 1..80: mol_type = other DNA
gacacgggtcacggcactgtggtccttgaactgcagtacacgggatctgacggaccttgcaaaatcccaatttccattgt

SEQ ID NO: 141988 - DNA, 80 bp, synthetic construct
  source 1..80: mol_type = other DNA
gtggtcaggcccccattcccccgccccggaggaagagggtggtcgcgctcgacgggtccaacatctccaacgctctagcg

SEQ ID NO: 141989 - DNA, 80 bp, synthetic construct
  source 1..80: mol_type = other DNA
ccatcgttcatcggtggttttggagacctagcaagcttcgttccgagagagactgtctcgagggagcgatcggctcctgt

SEQ ID NO: 141990 - DNA, 80 bp, synthetic construct
  source 1..80: mol_type = other DNA
ttgtgggatccgctcggtaacaagattggagaacctaatgtggaaacaaataacaccagaattgaatcacattctagcag

SEQ ID NO: 141991 - DNA, 80 bp, synthetic construct
  source 1..80: mol_type = other DNA
atccaagtccctgcaacggtgattggttacatgacatttgggactgggtctgcacggtactcagtgacttcaaaacctgg

SEQ ID NO: 141992 - DNA, 80 bp, synthetic construct
  source 1..80: mol_type = other DNA
caacgagtctcggtgttggataccggtcacgcctaacatcgctgtaaagcagcgcggtgctctcaccagaggtttgcgga

SEQ ID NO: 141993 - DNA, 80 bp, synthetic construct
  source 1..80: mol_type = other DNA
ggagatgtaattggactgtatggtaatggagtcatcatgcccagtggatcttacatcagcgccattgtgcagggagagag

SEQ ID NO: 141994 - DNA, 80 bp, synthetic construct
  source 1..80: mol_type = other DNA
gtccactactgcattccaccactgagtgggcaatactgccatgttctttttccgacttgccggcgttgtctactggtcta

SEQ ID NO: 141995 - DNA, 80 bp, synthetic construct
  source 1..80: mol_type = other DNA
acaacggctcggcccatggctcctgcgacccgaaactgcttccgtattcggccccgcgtctggccccggcgagcgtatac

SEQ ID NO: 141996 - DNA, 80 bp, synthetic construct
  source 1..80: mol_type = other DNA
agagcagatctctgatgaacaaccaacggaaaaagacgggtcgaccgtctttcaatatgctgaaacgcgcgagaaaccgc

SEQ ID NO: 141997 - DNA, 80 bp, synthetic construct
  source 1..80: mol_type = other DNA
gtactgtttcacccccagcccagtcgtggtgggcaccaccgataggctcggggtgcctacctacacttgggtggagaacg

SEQ ID NO: 141998 - DNA, 80 bp, synthetic construct
  source 1..80: mol_type = other DNA
tcataaagtcttcacaaatagtagacacgtctgggtcggttggaattgaagcagaggccatggctgcaaaatatctgaca

SEQ ID NO: 141999 - DNA, 80 bp, synthetic construct
  source 1..80: mol_type = other DNA
tcctggttttgtgcgcagttcaactgttgttaatgagaacatcatgggccttgtgtgaagctctaactttagctacagga

SEQ ID NO: 142000 - DNA, 80 bp, synthetic construct
  source 1..80: mol_type = other DNA
agacagactggaagacgcggtaggaccgaacatcgaacacgaaaatcatacttggtttggagaagacgacgaagcgttac

SEQ ID NO: 142001 - DNA, 80 bp, synthetic construct
  source 1..80: mol_type = other DNA
gccacgtatagccggtgtggcgcgggcccttggttgacacctcgatgcttggtcgactatccataccggctttggcattt

SEQ ID NO: 142002 - DNA, 80 bp, synthetic construct
  source 1..80: mol_type = other DNA
agcgagttagacaggcaagcactactcgcctctgcacgcacatgcttgcctgtcaaactctaccaccccggcacgctctc

SEQ ID NO: 142003 - DNA, 80 bp, synthetic construct
  source 1..80: mol_type = other DNA
gtgaggtgggactggaaaaactcaagatgaagggtctcacctatacaatgtgcgacaaggcaaagttcacgtggaaaaga

SEQ ID NO: 142004 - DNA, 80 bp, synthetic construct
  source 1..80: mol_type = other DNA
tggcttacaaagtggctgctgaaggcatcaactacgcagacagaaggtggtgttttgatggaattaagaacaaccaaatc

SEQ ID NO: 142005 - DNA, 80 bp, synthetic construct
  source 1..80: mol_type = other DNA
atgttcgtgggaggagtagagcacaggttccaggctgcatgcaactggacacgggtggagccatgcgagctggaagaccg

SEQ ID NO: 142006 - DNA, 80 bp, synthetic construct
  source 1..80: mol_type = other DNA
gccgtcagggcgggcacggccgtggactttatctggacgggcaatcagcggttcgccccgcggtacctgaccctgtggtg

SEQ ID NO: 142007 - DNA, 80 bp, synthetic construct
  source 1..80: mol_type = other DNA
tatgtgacgcggctggtcaacgggttcaagccgctggtgagccggtccgctcgcctttaccgcatcctgggggttctggt

SEQ ID NO: 142008 - DNA, 80 bp, synthetic construct
  source 1..80: mol_type = other DNA
acgggaaagccatccccctggcacacatccgagggggaaggcacctgatcttctgccattcaaaaaagaaatgcgatgag

SEQ ID NO: 142009 - DNA, 80 bp, synthetic construct
  source 1..80: mol_type = other DNA
catgaggcggtatccggcttcggtgacaaacaagctgtctgtgtctccgtaaactgatttgagggtacgctgttccaacg

SEQ ID NO: 142010 - DNA, 80 bp, synthetic construct
  source 1..80: mol_type = other DNA
gtagctcttttttaatcattgcagtaatggaaaagtcctctaaatagttgactaatacaccaggtaccacaatgtggtag

SEQ ID NO: 142011 - DNA, 80 bp, synthetic construct
  source 1..80: mol_type = other DNA
tgaaatgtcctacagattgcttccgcaaacatccggacgcaacgtactcaaggtgcggatctgggccttggctcactccc

SEQ ID NO: 142012 - DNA, 80 bp, synthetic construct
  source 1..80: mol_type = other DNA
atggttgtggcttgtttggaaaaggaagcattgtggcatgtgccaagtttacctgtgccaaatccatgagtctatttgag

SEQ ID NO: 142013 - DNA, 80 bp, synthetic construct
  source 1..80: mol_type = other DNA
gggcgatgaaaaaaacggtttcgggtggaggattaataagctgggaggaaagcaggttccgcagaagctgggatttgccg

SEQ ID NO: 142014 - DNA, 80 bp, synthetic construct
  source 1..80: mol_type = other DNA
ccggctgcctacgcggcacagggatacaaggtgcttgtgctgaacccctctgttgcggcaaccctgggctttgtggcata

SEQ ID NO: 142015 - DNA, 80 bp, synthetic construct
  source 1..80: mol_type = other DNA
atcttgccctcagtagttggattttggataactctccaatacacaaagagaggaggcgtgttgtgggacactccctcacc

SEQ ID NO: 142016 - DNA, 80 bp, synthetic construct
  source 1..80: mol_type = other DNA
gaggacgccaaccaggaagcggttgatggtatgtttcccgagaggttgctgtccgaggctgagagcgctgcagagagcgg

SEQ ID NO: 142017 - DNA, 80 bp, synthetic construct
  source 1..80: mol_type = other DNA
atcacatacgcacaaacacacgggtagagtggaaccgaaaccggtcgacgtttattcaccacacagaaacacaagctaag

SEQ ID NO: 142018 - DNA, 80 bp, synthetic construct
  source 1..80: mol_type = other DNA
atttgaccccttcgtcgccgaggtggacgatagagagatctcaacggctgccgagtgccatcggcctcccaggtcgaagt

SEQ ID NO: 142019 - DNA, 80 bp, synthetic construct
  source 1..80: mol_type = other DNA
acagctacatcgcagagatggaaaaagatagctggatcgttgaccgccaatgggcacaggacttgacactgccatggcag

SEQ ID NO: 142020 - DNA, 80 bp, synthetic construct
  source 1..80: mol_type = other DNA
atcaaatgtacaccaatgttgaccaagacctggtgggatggccagcgcctcctggggtcaagtctcttgtgccgtgcact

SEQ ID NO: 142021 - DNA, 80 bp, synthetic construct
  source 1..80: mol_type = other DNA
ttttctgccgcctgtggtcttttctgctgcatgtttttgcatgcttttatacactggcccagtaatccaatggagcaaaa

SEQ ID NO: 142022 - DNA, 80 bp, synthetic construct
  source 1..80: mol_type = other DNA
agggaaattgtggatcttatgtgtcatgccacattcacgatgcgtctactgtctccagtaagagtgcccaactacaactt

SEQ ID NO: 142023 - DNA, 80 bp, synthetic construct
  source 1..80: mol_type = other DNA
cgcgcccatagccgacatgcaaactgagatacccgacagagcgtggaactctggttatgaatggattacagagtacacag

SEQ ID NO: 142024 - DNA, 80 bp, synthetic construct
  source 1..80: mol_type = other DNA
ggattttgagacatccaggctttaccataatggcagcaatcttggcatacaccataggaacgacacatttccaaagggcc

SEQ ID NO: 142025 - DNA, 80 bp, synthetic construct
  source 1..80: mol_type = other DNA
acgaggatgttggcgcacttgatatccaggtggctgatcccgcaggtggtgtttaaaaacacaacggcacgggccagctc

SEQ ID NO: 142026 - DNA, 80 bp, synthetic construct
  source 1..80: mol_type = other DNA
gagctgtgactctcacctgcattatgcttatcactctgagcccgttctacaagagactgcttgccaacatactgtggtgg

SEQ ID NO: 142027 - DNA, 80 bp, synthetic construct
  source 1..80: mol_type = other DNA
acccgctcaccatctgagctctcaccaagtccagggtagcggggcacaggcacactgacatacatctttttaaaattttt

SEQ ID NO: 142028 - DNA, 80 bp, synthetic construct
  source 1..80: mol_type = other DNA
tgttgttagtggcttagtaggggctgctgtgggaagcgtaggcctagggaagatactggtggatgtcttggctgggtacg

SEQ ID NO: 142029 - DNA, 80 bp, synthetic construct
  source 1..80: mol_type = other DNA
caacttgctgtggagacaagagatggggagtaacatcaccagggtagagtctgaaacgaaggtggtcatcctcgactcct

SEQ ID NO: 142030 - DNA, 80 bp, synthetic construct
  source 1..80: mol_type = other DNA
ccgccggcggcgggccatgcgcaggcgcctgagtggcggctttctgcccgcgctcatccccataatcgccgcggccatcg

SEQ ID NO: 142031 - DNA, 80 bp, synthetic construct
  source 1..80: mol_type = other DNA
cggaacttgctacaaagaccttcggcagctccggatcgtcggccgtcgacagcggtacggcgaccgccccctataaccag

SEQ ID NO: 142032 - DNA, 80 bp, synthetic construct
  source 1..80: mol_type = other DNA
aaaatggccgcttttctggattcatcgactgtggccggctgggtgtggcggaccgctatcaggacatagcgttggctacc

SEQ ID NO: 142033 - DNA, 80 bp, synthetic construct
  source 1..80: mol_type = other DNA
cactgccaggaaatcctgctgtggcatccctcatgtcctttaccgcagccttaaccagtccgctggcaacctcaaccacc

SEQ ID NO: 142034 - DNA, 80 bp, synthetic construct
  source 1..80: mol_type = other DNA
gtctttaaagagaaagtggacaccaggacacccaggtctatgccagggacaagaaaggttatggagatcacagcggaatg

SEQ ID NO: 142035 - DNA, 80 bp, synthetic construct
  source 1..80: mol_type = other DNA
gtggtggtggacaaactcgatcccacagattatcgaggcggcattcctggcttactaaaaaaggggaaagacataaaggt

SEQ ID NO: 142036 - DNA, 80 bp, synthetic construct
  source 1..80: mol_type = other DNA
cggacaccggatggcgtgggacatgatgatgaattggtcaccaaccgtcaccttggccttgtcttactttatgcgcatac

SEQ ID NO: 142037 - DNA, 80 bp, synthetic construct
  source 1..80: mol_type = other DNA
agatccatagctctgaccttcctcgccataggtggggtgctcctgttcctttccatcaacgtccacgcagacaccgggtg

SEQ ID NO: 142038 - DNA, 80 bp, synthetic construct
  source 1..80: mol_type = other DNA
ggcccgttctaaatacgccgcggccgcctgttgaatcttgtccacatatgcggtatgattgcgatcaataatgtcattaa

SEQ ID NO: 142039 - DNA, 80 bp, synthetic construct
  source 1..80: mol_type = other DNA
tgtggcccggtctattgtttcacacccagccccgtggtcgtgggaaccactgatgaggaaggtgttcccacttacaggtt

SEQ ID NO: 142040 - DNA, 80 bp, synthetic construct
  source 1..80: mol_type = other DNA
actccttgctgcgccaccataacatggtctatgccacaacatcccgcagcgcaagccaacggcagaagaaggtcaccttt

SEQ ID NO: 142041 - DNA, 80 bp, synthetic construct
  source 1..80: mol_type = other DNA
aacgcagtggcctactaccgtggcctcgacgtgtccgtcatcccaaccacaggagacgtcgttgttgtagcgaccgacgc

SEQ ID NO: 142042 - DNA, 80 bp, synthetic construct
  source 1..80: mol_type = other DNA
gtggaacttcatcagtgggatacagtacctggcgggtctctcgaccctaccgggcaatcccgccgttgcctccatgatgt

SEQ ID NO: 142043 - DNA, 80 bp, synthetic construct
  source 1..80: mol_type = other DNA
tggccggcgcggtcgccggacgcgagccagaatcgcaattcgctgatggcgtacaggccgggcgtggtggcctgaaacac

SEQ ID NO: 142044 - DNA, 80 bp, synthetic construct
  source 1..80: mol_type = other DNA
atggcccccggcaacgcccaccaggacccccatcaccacccacagaccggggcccatggtcgtccgtcccggctgccagt

SEQ ID NO: 142045 - DNA, 80 bp, synthetic construct
  source 1..80: mol_type = other DNA
ttaccttacgttattattaaataaaacatgtagacattattaataatcctaggaacaatcaaatccatatttgtaagtta

SEQ ID NO: 142046 - DNA, 80 bp, synthetic construct
  source 1..80: mol_type = other DNA
caattcgctcattagacatcacaacctagtctactccaccacctcacgcagcgcagcgctacgccagaagaaagtcactt

SEQ ID NO: 142047 - DNA, 80 bp, synthetic construct
  source 1..80: mol_type = other DNA
cgcctccaggaacgtgatgaccatactcagttccctcactgtcactagcctactccgtagattacatcaatggattaatg

SEQ ID NO: 142048 - DNA, 80 bp, synthetic construct
  source 1..80: mol_type = other DNA
agtggacaggttggaacatatggtatgaacacatttaccaacatggaagtacaactcatccgccaaatggaagctgaagg

SEQ ID NO: 142049 - DNA, 80 bp, synthetic construct
  source 1..80: mol_type = other DNA
agaaatggaaaatcaaattaaatggattagggagaacggattttcagacatacaaaaggagtggcataattgaagtggac

SEQ ID NO: 142050 - DNA, 80 bp, synthetic construct
  source 1..80: mol_type = other DNA
agacttcaccagtcaaagcatgttgcagaactttaggaactttatcctagagcgctcaggaattttgcccgccacctgct

SEQ ID NO: 142051 - DNA, 80 bp, synthetic construct
  source 1..80: mol_type = other DNA
cactgtaagcccacctctcaaaaaaaccaagtcaaacataaacctggaaatatctgcacccctcacagttacctcagaag

SEQ ID NO: 142052 - DNA, 80 bp, synthetic construct
  source 1..80: mol_type = other DNA
cgccgtgggtagcataggcctgggtaagatactggtggatgtgttggccgggtatggcgcgggtatctcggtggctctcg

SEQ ID NO: 142053 - DNA, 80 bp, synthetic construct
  source 1..80: mol_type = other DNA
cccattggccggcgtgcgggaccgccccaagggtgcggggccgccgggtaaaagaagtgagaacgcgaagcgttcgcact

SEQ ID NO: 142054 - DNA, 80 bp, synthetic construct
  source 1..80: mol_type = other DNA
agacttcgtggaaggactgtcaggagctacgtgggtggatgtggtactggagcatggaagttgcgtcactaccatggcaa

SEQ ID NO: 142055 - DNA, 80 bp, synthetic construct
  source 1..80: mol_type = other DNA
gctaggctaggcagagagatcttgcttggccctgccgatacggaggaagggaaggggtggaggctcctcgcccccatcac

SEQ ID NO: 142056 - DNA, 80 bp, synthetic construct
  source 1..80: mol_type = other DNA
tggacgaggggcccaaccatacagacccatcagagactctggtaccacacacccagaggaaagtccaactgatctcactc

SEQ ID NO: 142057 - DNA, 80 bp, synthetic construct
  source 1..80: mol_type = other DNA
gcagcctgtagagccgcagggctccgggactgttccatgctcgtgtgcggtgacgaccttgtcgttatctgtgagagtga

SEQ ID NO: 142058 - DNA, 80 bp, synthetic construct
  source 1..80: mol_type = other DNA
gaggcggttggtcatactatgccgcttccaggcccgccgtcatgggagtgaaggcctacacgataggagggaaaggtcat

SEQ ID NO: 142059 - DNA, 80 bp, synthetic construct
  source 1..80: mol_type = other DNA
acatgctaccttaaggcacaggcagccgctcgtgcagctaatctcaaggactatgacatgctggtctgcggagacgatct

SEQ ID NO: 142060 - DNA, 80 bp, synthetic construct
  source 1..80: mol_type = other DNA
tgatatgcagcgcggaggttggaggcttttggctcccatcactgcgtacgcacagcagacgaggggcctagttggcacca

SEQ ID NO: 142061 - DNA, 80 bp, synthetic construct
  source 1..80: mol_type = other DNA
ggtccgttactaagctctcgggcaagttcgccgtttcccagcctaagcagtattaacagcggtcgtacaacaagaccgaa

SEQ ID NO: 142062 - DNA, 80 bp, synthetic construct
  source 1..80: mol_type = other DNA
ccagctgtgccccaagcctatcaagtggggtacctacacgctcctaccggcatcgggaagagcaccaaggtccccgcggc

SEQ ID NO: 142063 - DNA, 80 bp, synthetic construct
  source 1..80: mol_type = other DNA
cagctcccccttgcggagagtccgtacccgccccagcgactggtacacggacaccatgtccggcccgtagttcatgggtt

SEQ ID NO: 142064 - DNA, 80 bp, synthetic construct
  source 1..80: mol_type = other DNA
agccaaactgaggtggttggttgaaagaagattcctggaaccgctaggcaaagtgattgacttgggctgtggaaggggtg

SEQ ID NO: 142065 - DNA, 80 bp, synthetic construct
  source 1..80: mol_type = other DNA
cattctacatgctggctgcctgcctcgcccacgctagctgtcccgaacgcgtcaacgcctctcactgggttccgcaagca

SEQ ID NO: 142066 - DNA, 80 bp, synthetic construct
  source 1..80: mol_type = other DNA
gagtttaagaggaaggtcaacagcaacgctgctttgggagccatgtttgaagagcagaaccaatggagcagtgccaggga

SEQ ID NO: 142067 - DNA, 80 bp, synthetic construct
  source 1..80: mol_type = other DNA
gtggagtccaaatggcgagcccttgaggccttctgggcgaagcacatgtggaatttcatcagcggggtacagtacttagc

SEQ ID NO: 142068 - DNA, 80 bp, synthetic construct
  source 1..80: mol_type = other DNA
acgaaccctgccgtcttgcgcaaactgtgcattgaagctaaaatatcaaacaccaccaccgattcaagatgtccaacaca

SEQ ID NO: 142069 - DNA, 80 bp, synthetic construct
  source 1..80: mol_type = other DNA
acgacccaccaataaaattatggtatcctatgccctcagaatctggacggacctggttactgctttttgcgccgcctttt

SEQ ID NO: 142070 - DNA, 80 bp, synthetic construct
  source 1..80: mol_type = other DNA
aacgagggttggtggggtccggcacggacccaaaataataaacacacaatcacgtgcgataaaaagaacacgcggtcccc

SEQ ID NO: 142071 - DNA, 80 bp, synthetic construct
  source 1..80: mol_type = other DNA
gaaacaacctcgactgggtctggcgttttggattgtcgtcgtagacgccgtccttcatggactcctccttcaagcgagga

SEQ ID NO: 142072 - DNA, 80 bp, synthetic construct
  source 1..80: mol_type = other DNA
ggtcttggtctaccgtgagcgaggaggctggtgagagcgtcgtctgctgctcaatgtcctacacatggacaggtgccctg

SEQ ID NO: 142073 - DNA, 80 bp, synthetic construct
  source 1..80: mol_type = other DNA
atgggtccgtatggtgatgatgacgcacttctttgcaatactccagtcccaagacgaactccataaagcactcgacttcg

SEQ ID NO: 142074 - DNA, 80 bp, synthetic construct
  source 1..80: mol_type = other DNA
agattgaaccgggtgtcttgaaagtacttcggacagaaaaacaatacttgggtgtgtacatttggaacatgcgcggctcc

SEQ ID NO: 142075 - DNA, 80 bp, synthetic construct
  source 1..80: mol_type = other DNA
gaaccatgctatgcagtcagggtggattatctttacgaccggcacttcccgatgaaggtattgtggaagaaactacacta

SEQ ID NO: 142076 - DNA, 80 bp, synthetic construct
  source 1..80: mol_type = other DNA
accaaactatcaagaagagtgggtgatgcataagaaggaagtcgtgctaaccgtgccgaccgaagggctcgaggtcacgt

SEQ ID NO: 142077 - DNA, 80 bp, synthetic construct
  source 1..80: mol_type = other DNA
acgcagccccgctggagctactatgacagctttagcgccgtcagcgaggataacctgggattcctgatgcacgcccccgc

SEQ ID NO: 142078 - DNA, 80 bp, synthetic construct
  source 1..80: mol_type = other DNA
gttcgcctatgggaagcggtcgcgcgaagaggagctcatctcgctgccgctggacgaaagcaatcccacgccgagcctga

SEQ ID NO: 142079 - DNA, 80 bp, synthetic construct
  source 1..80: mol_type = other DNA
gtgcaggaggcggacggcccacgtctcgatgtcggacgacacggcatcgcgcaaggcggcgtccggcccgcgagcgcgtg

SEQ ID NO: 142080 - DNA, 80 bp, synthetic construct
  source 1..80: mol_type = other DNA
gtgaagagccttttttgccggccgagaggggtcgctagatttaaaagcggtcgaaaaccccgccgggtagtggctcgcgc

SEQ ID NO: 142081 - DNA, 80 bp, synthetic construct
  source 1..80: mol_type = other DNA
ccacatcaccgccgaaacggcagcccggcgactaagaagggggtcgcccccgtcccttgccagctcatcagcaagccagc

SEQ ID NO: 142082 - DNA, 80 bp, synthetic construct
  source 1..80: mol_type = other DNA
ggggatgtagctccatcgtggccacggcttgagccatcgtgctgcctgtagctccatcgtggggatgtagctccatcgtg

SEQ ID NO: 142083 - DNA, 80 bp, synthetic construct
  source 1..80: mol_type = other DNA
ctgaagacattgattgctggtgcaacctcacatctacctgggtcatgtatgggacatgcacccagagcggagaacggaga

SEQ ID NO: 142084 - DNA, 80 bp, synthetic construct
  source 1..80: mol_type = other DNA
acatgttgaacaatgtaagccctcagaaccgtctcggaaggaggaccccacatgtgatccatgtaagccctcagaaccgt

SEQ ID NO: 142085 - DNA, 80 bp, synthetic construct
  source 1..80: mol_type = other DNA
gtacgtgatgcgcgtccccgaggtcatcatagacatcgttagcggggctcactggggcgtcatgttcggcttggcctact

SEQ ID NO: 142086 - DNA, 80 bp, synthetic construct
  source 1..80: mol_type = other DNA
gcagcgctcctaaaagtaggggcgtggacaggtacttacatctacgatcacctggcccctatttccacctgggcaagcga

SEQ ID NO: 142087 - DNA, 80 bp, synthetic construct
  source 1..80: mol_type = other DNA
cccggaggaaggaaagttgcctatcaatccactcagcaactccttgttgcggtaccacaacaaggtatactgtaccacat

SEQ ID NO: 142088 - DNA, 80 bp, synthetic construct
  source 1..80: mol_type = other DNA
cgcgactacatccgtggggacccagacgtccggggagttcctccacgggaacccaaggacccccgaaccccaaggaccac

SEQ ID NO: 142089 - DNA, 80 bp, synthetic construct
  source 1..80: mol_type = other DNA
gagatccttgcccagatgtacggaaaccaggactaccccatagaggacgaccccagcgcggatgccgcggacgatgtcga

SEQ ID NO: 142090 - DNA, 80 bp, synthetic construct
  source 1..80: mol_type = other DNA
ggaaaggggtggtgcgaggggggaggcccaaacggagaggtgggtggtagggggcggtcctagggagcggggagtaagaa

SEQ ID NO: 142091 - DNA, 80 bp, synthetic construct
  source 1..80: mol_type = other DNA
cttgtgggacaagcctttaatttcaggtctcgtcgccactggactgtccaggggtgcaattgttcaatatacccaggcca

SEQ ID NO: 142092 - DNA, 80 bp, synthetic construct
  source 1..80: mol_type = other DNA
ccgccagtttacctctctgacccacgtgttcaatcgctttcccgagaaccagattttggcgcgcccgccagcccccacca

SEQ ID NO: 142093 - DNA, 80 bp, synthetic construct
  source 1..80: mol_type = other DNA
gccctatgcacaacagcaagggagacctttgtgggtatcggagatgtcgcgcaaccggcgtctacaccaccagcttcggg

SEQ ID NO: 142094 - DNA, 80 bp, synthetic construct
  source 1..80: mol_type = other DNA
atgcctcaggaagcttggggttccgcccttgagagtctggagacaccgggccaggagcgttcgcgcgaggctattagccc

SEQ ID NO: 142095 - DNA, 80 bp, synthetic construct
  source 1..80: mol_type = other DNA
catggagattaggagggtgggagacttccactacgtgacgggcatgactgatgacaacctcaaatgcccgtgccaggttc

SEQ ID NO: 142096 - DNA, 80 bp, synthetic construct
  source 1..80: mol_type = other DNA
tacgctccggcgtgcaagcctctcctgcgggaggaggtcacattccaggtcgggctcaaccaatacctggttgggtcgca

SEQ ID NO: 142097 - DNA, 80 bp, synthetic construct
  source 1..80: mol_type = other DNA
actcaacggtctcgcaggcgttggccgaactggcagaaaagtctttccctcgcagttccgatgaatcggagggcgtggtg

SEQ ID NO: 142098 - DNA, 80 bp, synthetic construct
  source 1..80: mol_type = other DNA
gcaaacgaaagctgacatctcaggactcttcagacgcgaggaccagggagggattgcttgggacgcatggacgaacattg

SEQ ID NO: 142099 - DNA, 80 bp, synthetic construct
  source 1..80: mol_type = other DNA
gggctctctagccgacgattgaaggggcccagggtttggtgattgaatgggctcccgactcgatcttgatgttggctgtt

SEQ ID NO: 142100 - DNA, 80 bp, synthetic construct
  source 1..80: mol_type = other DNA
taagtggagtaaatgtaagagaggctaagtgcttaagacattactgtgctttacttgaacagctgtactaagtgtggttt

SEQ ID NO: 142101 - DNA, 80 bp, synthetic construct
  source 1..80: mol_type = other DNA
cctgtcgcgtcaggaggcccgggccgtcgctgctggccgcgcttagcgggtgcgtctcaaaggtacgctgggcatgttcc

SEQ ID NO: 142102 - DNA, 80 bp, synthetic construct
  source 1..80: mol_type = other DNA
aaggcagcagagccatatggtacatgtggcttggagcacgctttttagagtttgaagccctaggattcttgaatgaagat

SEQ ID NO: 142103 - DNA, 80 bp, synthetic construct
  source 1..80: mol_type = other DNA
taccagtagacaaagagcacagcaatacaagcaccaacagcaataactacttactgtgccagctcagtacttaaaggcag

SEQ ID NO: 142104 - DNA, 80 bp, synthetic construct
  source 1..80: mol_type = other DNA
gcttcgtttggtacgtacataaagccatttgtggtattaatggcggtgggtgttggaaacaattttagcttattctcgcg

SEQ ID NO: 142105 - DNA, 80 bp, synthetic construct
  source 1..80: mol_type = other DNA
gcccattatgactcagtcttaaaggacatcaagctagcggcttccaaggtcagcgcaaggctcctcaccttggaggaggc

SEQ ID NO: 142106 - DNA, 80 bp, synthetic construct
  source 1..80: mol_type = other DNA
tgggacagccgcgtttcgttccgctatgtacgtgggggacctctgcggatccgtcttccttgtcggccagctattcacct

SEQ ID NO: 142107 - DNA, 80 bp, synthetic construct
  source 1..80: mol_type = other DNA
tgcctaacgacaggtagtgctgtcatatgcggcaggatcataacctccgggaagcccgccgttatgcccgatcgcgaagt

SEQ ID NO: 142108 - DNA, 80 bp, synthetic construct
  source 1..80: mol_type = other DNA
acaacggggtggaaagcctggtagataagatgaatcgctggaaaacctacgcccaggagcagcgggaagagaggcagccc

SEQ ID NO: 142109 - DNA, 80 bp, synthetic construct
  source 1..80: mol_type = other DNA
tcaggccacggtttgtgcgcgggctcacgccccgcctccatcatgggacgaaacgtggaagtgtctcataaggctgaaac

SEQ ID NO: 142110 - DNA, 80 bp, synthetic construct
  source 1..80: mol_type = other DNA
gcttggcgacttcaaaaggtggctcgcagccaagctcatgcccaaaatgccgggtctccccttcctctcgtgtcagcgag

SEQ ID NO: 142111 - DNA, 80 bp, synthetic construct
  source 1..80: mol_type = other DNA
tggtatataagccaggaaaagaggatgagagttctgaaacaaatttgacacagcagtccatgcccaacagacctaactac

SEQ ID NO: 142112 - DNA, 80 bp, synthetic construct
  source 1..80: mol_type = other DNA
tccttcgcaagaggtggacggccagactaacgatccctgcggttttgggggccctacttgttctgatgcttggtggcatc

SEQ ID NO: 142113 - DNA, 80 bp, synthetic construct
  source 1..80: mol_type = other DNA
gtcaaacacactccagtgaactcctggttggggaacatcatactctacgcgcccacgatatgggcgcggatggtgttgat

SEQ ID NO: 142114 - DNA, 80 bp, synthetic construct
  source 1..80: mol_type = other DNA
gttccttgcgctttgcgttatcaccattttcacgctcaccccggcttacaagagtctgctcataagctcgctttggtgga

SEQ ID NO: 142115 - DNA, 80 bp, synthetic construct
  source 1..80: mol_type = other DNA
ccagtagttggcgctgctacggcggttgccactgctggtcaagtaaatatgattgacccctggattatgagtaattttgt

SEQ ID NO: 142116 - DNA, 80 bp, synthetic construct
  source 1..80: mol_type = other DNA
agctgtacgtgcgggagtacatgcgggagcaggaccgcaagccccggaatgccacgcccgcgccactgcgggaggcgccc

SEQ ID NO: 142117 - DNA, 80 bp, synthetic construct
  source 1..80: mol_type = other DNA
ggttgacgctgagacttacacatctgggggtgcggccgcccaaactacccgtggcttggttagcctatttggccctggac

SEQ ID NO: 142118 - DNA, 80 bp, synthetic construct
  source 1..80: mol_type = other DNA
gatgaccattaccaggacgtgcttaaggaggctaaggccaaggcgtccacagtgaaggctgatttgctctccgttgagga

SEQ ID NO: 142119 - DNA, 80 bp, synthetic construct
  source 1..80: mol_type = other DNA
ctcctgtcatgtctaacagtcccggcatcggcttatgaagtccgcaactccagtggggtctatcatctcaccaatgactg

SEQ ID NO: 142120 - DNA, 80 bp, synthetic construct
  source 1..80: mol_type = other DNA
tgaatagacgcggtttctgtacgttttggtggtacatgtatcggttgtttgttcagacctccaaagcgagggccaattgt

SEQ ID NO: 142121 - DNA, 80 bp, synthetic construct
  source 1..80: mol_type = other DNA
ccgcctgagcaacttgttgggcatccgcaagcggcaacccttccaggagggctttagaatcacctacgatgacctggagg

SEQ ID NO: 142122 - DNA, 80 bp, synthetic construct
  source 1..80: mol_type = other DNA
catggattgacctacaccactgggggaaccattgctcgggccacgtccacattcaccagtatattcagtgctggccccaa

SEQ ID NO: 142123 - DNA, 80 bp, synthetic construct
  source 1..80: mol_type = other DNA
tcaccccgggaccgcaacagcgtctgcagcttgtcaacagtaatggcagttggcatatcaaccgcactgccttgaattgc

SEQ ID NO: 142124 - DNA, 80 bp, synthetic construct
  source 1..80: mol_type = other DNA
gccgcaaggcgcccacggccgcgctaaggagcccctccggggtgtggagcagacacccgccgaagatgcgccgctcggga

SEQ ID NO: 142125 - DNA, 80 bp, synthetic construct
  source 1..80: mol_type = other DNA
atgagatgtgtgatattactatgtacatgagcaagcagtacaagttgtggcctccacaaaaatgtgtggaaaacactggc

SEQ ID NO: 142126 - DNA, 80 bp, synthetic construct
  source 1..80: mol_type = other DNA
gtgaagagcctttttgccggccaagtggggttgctagatttgaaagcggttaaaaaccccactgggtagtggctcgcgcc

SEQ ID NO: 142127 - DNA, 80 bp, synthetic construct
  source 1..80: mol_type = other DNA
agggagctactcagtggatgaaccgcttgatagctttcgcatcgaggggcaaccacgtgtcgcccacacattatgtgccc

SEQ ID NO: 142128 - DNA, 80 bp, synthetic construct
  source 1..80: mol_type = other DNA
tatgagccgccgacagtccatgggtgccccttgccaccagggcgtcccacgccggtacctcctcctcgcaagaagaggac

SEQ ID NO: 142129 - DNA, 80 bp, synthetic construct
  source 1..80: mol_type = other DNA
atgggtggatgaatatttgcacatggggcgatcctagatatgtgtgccatggaaatagcagtactattactaatcttaca

SEQ ID NO: 142130 - DNA, 80 bp, synthetic construct
  source 1..80: mol_type = other DNA
ctgcacctccctggttgcgtcccatgtgtcaaaacaggcaataaatctacctgttggctgccggccacgcccactctagc

SEQ ID NO: 142131 - DNA, 80 bp, synthetic construct
  source 1..80: mol_type = other DNA
tacgcttccggttggtttcccgtcctggacaaaaccggggaatttagcatcgcgactataactaccgccccaaatttaac

SEQ ID NO: 142132 - DNA, 80 bp, synthetic construct
  source 1..80: mol_type = other DNA
ctccttcctcttgtcctgcatctcttgcatctatcgctgcggcggcggcggagtttggccgtaggtggcgccctcttcct

SEQ ID NO: 142133 - DNA, 80 bp, synthetic construct
  source 1..80: mol_type = other DNA
ctgactcacacgacgggagggtcggaggcctataaaaccaacaagtttgtgagcctctttacgcgtgggccggcccaaaa

SEQ ID NO: 142134 - DNA, 80 bp, synthetic construct
  source 1..80: mol_type = other DNA
tccccatctgggcacggccagactacaatccaccactgatagagagttggaaatcgcctgagtatgagccccccatggta

SEQ ID NO: 142135 - DNA, 80 bp, synthetic construct
  source 1..80: mol_type = other DNA
tgacgtccatgctcactgatccctcccatataacagcggaagcggctggtaggaggttggctaggggatcccccccctct

SEQ ID NO: 142136 - DNA, 80 bp, synthetic construct
  source 1..80: mol_type = other DNA
tgactgcttcaagccgctcaaagaggaagaagatgacagagagatctccgtgtccgccgactgctttaagaagggaccgg

SEQ ID NO: 142137 - DNA, 80 bp, synthetic construct
  source 1..80: mol_type = other DNA
tttattgatggaatatcattagggttaatcttattaaaaatggtaacacattttgacaacactcaagtgggaaccttagc

SEQ ID NO: 142138 - DNA, 80 bp, synthetic construct
  source 1..80: mol_type = other DNA
atgtccgttcggttggcagaagctatgaaacgatatgggctgaatacaaatcacagaatcgtcgtatgcagtgaaaactc

SEQ ID NO: 142139 - DNA, 80 bp, synthetic construct
  source 1..80: mol_type = other DNA
caccgacaacctgaaagttccctgccagataccttctccagagttcttctcctgggtggatggagtgcagatccataggt

SEQ ID NO: 142140 - DNA, 80 bp, synthetic construct
  source 1..80: mol_type = other DNA
agggaagattaatcacatcaacccctactgccctggttccccaagcttcgtggggatatagacaaggccaatcagtgtct

SEQ ID NO: 142141 - DNA, 80 bp, synthetic construct
  source 1..80: mol_type = other DNA
tccagggttataaggtccttgtgctcaacccctctgtggcagccactcttgggtttgggtcgtacatgtccactgctcat

SEQ ID NO: 142142 - DNA, 80 bp, synthetic construct
  source 1..80: mol_type = other DNA
tgtggacgctcacggaaatgctgaggtcatcccgaaggtctgacctggttttctctggacaggggggtcgagagcgtggt

SEQ ID NO: 142143 - DNA, 80 bp, synthetic construct
  source 1..80: mol_type = other DNA
ctagcgcggaccggtcgatgcttgggtgggaaaaaggacagggacggccgatccccctcccgcgcttcgtccgcgtatcg

SEQ ID NO: 142144 - DNA, 80 bp, synthetic construct
  source 1..80: mol_type = other DNA
tgtcaggtgcggtgcagggcaaaactaccgcccgcttcacgagtctctttagccttggggcgtcgcagagggtccagctt

SEQ ID NO: 142145 - DNA, 80 bp, synthetic construct
  source 1..80: mol_type = other DNA
ctcagcttctcttactgagactcagtcactctcatttcagaaccatgaaggctttcacagcttgcgttctgattagcata

SEQ ID NO: 142146 - DNA, 80 bp, synthetic construct
  source 1..80: mol_type = other DNA
ccagtccaggacattccgaatgaggtgcctgatagggcttggagcagcggttttgagtggataacagagtatgcaggcaa

SEQ ID NO: 142147 - DNA, 80 bp, synthetic construct
  source 1..80: mol_type = other DNA
gttgtataatcacggctagtatcctcctatggtatgcacagatacaaccacactggatagcagcttcaataatactggag

SEQ ID NO: 142148 - DNA, 80 bp, synthetic construct
  source 1..80: mol_type = other DNA
gatttggagaccagcggggacctgccaaggttcccgaagtggatctggggactggcacacgctgtgtggtactggcagag

SEQ ID NO: 142149 - DNA, 80 bp, synthetic construct
  source 1..80: mol_type = other DNA
ccccacgaaaggcatgaccggggcgcggacggcgtggtgggtctggtgtgtgcaggtggcgacgtttgtggtctctgcgg

SEQ ID NO: 142150 - DNA, 80 bp, synthetic construct
  source 1..80: mol_type = other DNA
cacgccgaacgtggccgtggcccgacgtggagttctcactacgcgactgcggactcatattgacaccattgtgatgtctg

SEQ ID NO: 142151 - DNA, 80 bp, synthetic construct
  source 1..80: mol_type = other DNA
cggccccacccggagacgaaccacacccagagtacgacttggagcttataacatcttgctcctccaacgtttctgtagcc

SEQ ID NO: 142152 - DNA, 80 bp, synthetic construct
  source 1..80: mol_type = other DNA
agtacttcagtatatcgcgacagttgatcgtgggaatgtagcaggcgctaatatccaacacaatatcacagcccatcaac

SEQ ID NO: 142153 - DNA, 80 bp, synthetic construct
  source 1..80: mol_type = other DNA
aaagtgcaagtcacgaagatcacacctctccccaccgctgcgttggtgaaaaattacagccaagtcaaaaaagatgcgat

SEQ ID NO: 142154 - DNA, 80 bp, synthetic construct
  source 1..80: mol_type = other DNA
ctcctgtgcctactcctacttgccgtaggggtaggcatcttcctgctccccgcccgataggcgtggaggagaaataacac

SEQ ID NO: 142155 - DNA, 80 bp, synthetic construct
  source 1..80: mol_type = other DNA
cgacggctgcgtgccggatcccgccgccgaccccgccccctcctcgcccccggaggccaaggttccgatgagggcccgtg

SEQ ID NO: 142156 - DNA, 80 bp, synthetic construct
  source 1..80: mol_type = other DNA
cctttaccaacttggctgtccaactagtgagaatgatggaaggggaaggagtcataactccagatgacgttgaaaagctt

SEQ ID NO: 142157 - DNA, 80 bp, synthetic construct
  source 1..80: mol_type = other DNA
aggaggaggatgcacccgctgcggggtactgacgcctccgtaatatgtttttagatgtcccagcagcaagccccggaccc

SEQ ID NO: 142158 - DNA, 80 bp, synthetic construct
  source 1..80: mol_type = other DNA
ctcgatgtcttactcgtggacgggcgctttaatcacgccctgtgcctcagaggaagccaagctccctatcaacgcattga

SEQ ID NO: 142159 - DNA, 80 bp, synthetic construct
  source 1..80: mol_type = other DNA
ccatatgggcgaggcctgactacaatccaccgttggtggaggtctggaagtctccaacgtacgaccctcccctcgtgtcc

SEQ ID NO: 142160 - DNA, 80 bp, synthetic construct
  source 1..80: mol_type = other DNA
gcgtgtcaacagttcaacagttgacaaagagattctcattgggaatgctacaaggcaaaggaccgctgaagctgttcatg

SEQ ID NO: 142161 - DNA, 80 bp, synthetic construct
  source 1..80: mol_type = other DNA
gtatgtccagatggccataataacatttggcaggtggaccggcacctatatatatgatcacctctctcctatgtcaactt

SEQ ID NO: 142162 - DNA, 80 bp, synthetic construct
  source 1..80: mol_type = other DNA
tttcagtccaataacgctagctgcaggactaatggcctgtgacccaaaccggaagagggggtggcctgctaccgaagtga

SEQ ID NO: 142163 - DNA, 80 bp, synthetic construct
  source 1..80: mol_type = other DNA
tgcacgatgctcgtgtgcggagacgacctcgtcgttatctgtgagagcgcgggaacccaggaggacgcggcgagcctacg

SEQ ID NO: 142164 - DNA, 80 bp, synthetic construct
  source 1..80: mol_type = other DNA
tggtgacggcctacgagcagacggtgaagcaggagcgcaacttccaaaagagtttcaacaaccacgtgcgcaccctgatc

SEQ ID NO: 142165 - DNA, 80 bp, synthetic construct
  source 1..80: mol_type = other DNA
aagtgcgtatggcctcgccgggcttttcactcccggagcgcggcagaatttgcagctcatcaacaccaacgggagctggc

SEQ ID NO: 142166 - DNA, 80 bp, synthetic construct
  source 1..80: mol_type = other DNA
ctgctttgcctactcctactcaccgtaggggtaggcctttttctcctgccagctcggtgagctggtaagttaacacccca

SEQ ID NO: 142167 - DNA, 80 bp, synthetic construct
  source 1..80: mol_type = other DNA
atcccagagcccaattataagagggctctttggagggtggccgctgaggagtacgtcgagatcgcgagggtgtgtgatag

SEQ ID NO: 142168 - DNA, 80 bp, synthetic construct
  source 1..80: mol_type = other DNA
tggcgttactccacgggtccgtcccccccaatcgctccggctcccgacctagaggaggtcctgacgaacgtcaccgcccc

SEQ ID NO: 142169 - DNA, 80 bp, synthetic construct
  source 1..80: mol_type = other DNA
gttcgtgaccgggtacaacatcatcaacttcgactggcccttcgtcctgaccaagctgacggagatctacaaggtcccgc

SEQ ID NO: 142170 - DNA, 80 bp, synthetic construct
  source 1..80: mol_type = other DNA
ccccggtgtctagtgcactatgagtatcggctgtggcattatccctgcactgtcaactacactctgcacaaagtgcgcat

SEQ ID NO: 142171 - DNA, 80 bp, synthetic construct
  source 1..80: mol_type = other DNA
tatttcaccaacagctccggtggctggttatacccgtgacccaccagggtgtgaaagttggctgtggttagggcggtgtg

SEQ ID NO: 142172 - DNA, 80 bp, synthetic construct
  source 1..80: mol_type = other DNA
tccaaaaccttagcgggtccgaaagggcccgtgtgccaaatgtacaccaatgtagacaaggatttggtgggatggccagc

SEQ ID NO: 142173 - DNA, 80 bp, synthetic construct
  source 1..80: mol_type = other DNA
ggtacccttggcccctctatggcaatgagggcctggggtgggcaggatggctcctgtcaccccgaggctctcggcctaat

SEQ ID NO: 142174 - DNA, 80 bp, synthetic construct
  source 1..80: mol_type = other DNA
aacaactacgccgtgggctcgcagctcccttgcgagcccgagccagacgtggttgtcttaacaaccatgctcaccgatcc

SEQ ID NO: 142175 - DNA, 80 bp, synthetic construct
  source 1..80: mol_type = other DNA
ttgctccaccccgtgcgacgcatcctggttgcgagacatttgggattgggtctgcactgtgctgagtgactttaagacat

SEQ ID NO: 142176 - DNA, 80 bp, synthetic construct
  source 1..80: mol_type = other DNA
tacttgatatggctagttcctactttgacattagaggggtactagaccgcggtcccagtttcaagccgtattctggaacg

SEQ ID NO: 142177 - DNA, 80 bp, synthetic construct
  source 1..80: mol_type = other DNA
ctcaaacccgggccccagaaaagcgaagacggaggccagggctccgggtgcggcgtggaccgtggtatgccactgccgga

SEQ ID NO: 142178 - DNA, 80 bp, synthetic construct
  source 1..80: mol_type = other DNA
gggatgcgggtccggtcgcgccccctacccaccgtactcgtcaattccaagggcatcggtaaacatctgctcaaactcga

SEQ ID NO: 142179 - DNA, 80 bp, synthetic construct
  source 1..80: mol_type = other DNA
cagactctcttctaaaccaaaatcagccaaatgaggaacaggcagaaagcaatgaacaaaatgccgggttaaagaatgac

SEQ ID NO: 142180 - DNA, 80 bp, synthetic construct
  source 1..80: mol_type = other DNA
gggcggcgtgggagacagcacgacacactccagtcaactcctggctaggcaacatcatcatgtatgcccccacattgtgg

SEQ ID NO: 142181 - DNA, 80 bp, synthetic construct
  source 1..80: mol_type = other DNA
cgctaccttaggttttggggcgtatatgtctaaagcacatggtaccgaccctaacatcaggactggggtaaggaccatta

SEQ ID NO: 142182 - DNA, 80 bp, synthetic construct
  source 1..80: mol_type = other DNA
cacggtggctcggaacggccgtcagaaacccaggcggggcgacagcggcgcaccgcagacgacagagaacacgctttgga

SEQ ID NO: 142183 - DNA, 80 bp, synthetic construct
  source 1..80: mol_type = other DNA
ttgccagcgactctacaagggttgctaacgctggagaggtcagaggagacaattttgcaccaacacctgttccgactgca

SEQ ID NO: 142184 - DNA, 80 bp, synthetic construct
  source 1..80: mol_type = other DNA
ggagaagaaggttatcacatggggcgctgatactgttgcatgcggggacatcctcgccggcttaccagtgtctgcccgga

SEQ ID NO: 142185 - DNA, 80 bp, synthetic construct
  source 1..80: mol_type = other DNA
ccggaagccaaaagagggttttctggtggtcggcccgggccagcgcggtccggaggtcggcgttggtcgctgcggcgacg

SEQ ID NO: 142186 - DNA, 80 bp, synthetic construct
  source 1..80: mol_type = other DNA
gctgctgtttgctgtgcacctcgcagcgcatgtgccccgcgtcctggtcctggctctgcgagtagttggtgatgcggctg

SEQ ID NO: 142187 - DNA, 80 bp, synthetic construct
  source 1..80: mol_type = other DNA
acaggctccggaacggaggcggggaccgcggccccgacggaggttttgcctttggtggtggatttcttcttggttttggc

SEQ ID NO: 142188 - DNA, 80 bp, synthetic construct
  source 1..80: mol_type = other DNA
taagctgggccatcagatgggagtgggtagtcctcgttttcctactcctggcggacgcgcggatctgcgcctgcctttgg

SEQ ID NO: 142189 - DNA, 80 bp, synthetic construct
  source 1..80: mol_type = other DNA
atgcggcttgcagggccgcgcacatgtgctaacatgtggcacggtactttccccatcaatgagtacaccaccggacccag

SEQ ID NO: 142190 - DNA, 80 bp, synthetic construct
  source 1..80: mol_type = other DNA
gttcgactcagtcgtcctatgcgaggcttacgatacaggctgcgcgtggtatgagctaacaccagcggagaccaccgtga

SEQ ID NO: 142191 - DNA, 80 bp, synthetic construct
  source 1..80: mol_type = other DNA
ccaggatgccgtctcccgtactcaacgtcggggcaggactggtaggtggaagccaggcatctacagatttgtggcaccgg

SEQ ID NO: 142192 - DNA, 80 bp, synthetic construct
  source 1..80: mol_type = other DNA
tttcatatcacgttataaagttaagtcagcgtagaatataccatggaagaaccaatttgttatgatacacaaaaactttt

SEQ ID NO: 142193 - DNA, 80 bp, synthetic construct
  source 1..80: mol_type = other DNA
cttctgcatcccgtgcatgaaaacctggatgcaattgcgcaacacctgcccgctgtgcaacgccaagctggtgtacctga

SEQ ID NO: 142194 - DNA, 80 bp, synthetic construct
  source 1..80: mol_type = other DNA
ccggtactccatccccccctcccccgacccttcccacccccgcgtgccagagatcaccccggtccaccggcacccgccac

SEQ ID NO: 142195 - DNA, 80 bp, synthetic construct
  source 1..80: mol_type = other DNA
gttgagtcgtactcctccatgcccccccttgagggggagccgggggaccccgatctcagcgacgggtcctggtctaccgt

SEQ ID NO: 142196 - DNA, 80 bp, synthetic construct
  source 1..80: mol_type = other DNA
cttccggtcctggaccagctgaccgaccctccgggggtccggcgcgtgtaccacatccaggcgggcctaccggacccgtt

SEQ ID NO: 142197 - DNA, 80 bp, synthetic construct
  source 1..80: mol_type = other DNA
gcttaacgcggcgtcgttagccgggatgcatagcgtcttggctttctttatcttcttctgcgccgcgtggtacatcaagg

SEQ ID NO: 142198 - DNA, 80 bp, synthetic construct
  source 1..80: mol_type = other DNA
agctgtctgtgtctccgtaaactgatttgagggtacgctgttccaacggtgtgcctctgtcctctgcgtacaagatctcg

SEQ ID NO: 142199 - DNA, 80 bp, synthetic construct
  source 1..80: mol_type = other DNA
cgccgccgccctgcccggactgcggtggggtatccggtgcgagagggaccgtagcggctatgggcgtcggtgaggaggcg

SEQ ID NO: 142200 - DNA, 80 bp, synthetic construct
  source 1..80: mol_type = other DNA
ggagtcggagtgatggtagagggagtgttccacacactatggcacaccactaagggagctgctctcatgagtggtgaagg

SEQ ID NO: 142201 - DNA, 80 bp, synthetic construct
  source 1..80: mol_type = other DNA
cagactacgcgcatacctgaacactcctgggctacctgtatgccaagaccatcttgagttctgggagggagtgtttactg

SEQ ID NO: 142202 - DNA, 80 bp, synthetic construct
  source 1..80: mol_type = other DNA
agaggacatctaccaatgctgccaactagacccagtagcaaaacaggccatatctgcactcactgagcggctgtactgcg

SEQ ID NO: 142203 - DNA, 80 bp, synthetic construct
  source 1..80: mol_type = other DNA
attggaagacttgctacaggaagaacagacggaacctttggacctatccatgaaacgccctaagctgacctaagtgtgtt

SEQ ID NO: 142204 - DNA, 80 bp, synthetic construct
  source 1..80: mol_type = other DNA
tgcacagattccaactgcagtggggcggaggactggtgaggacccctttttcaaggaactcaacccatgagatgtattac

SEQ ID NO: 142205 - DNA, 80 bp, synthetic construct
  source 1..80: mol_type = other DNA
tggcccgaaagggcccgtcaaccaaatgtacaccaatgttgaccaggacctagtgggatggcccgcgcctccggtggtca

SEQ ID NO: 142206 - DNA, 80 bp, synthetic construct
  source 1..80: mol_type = other DNA
ccactggcggatgcatccagactggacttgtccagctggttcaccgctggatacagcggggtggacatatatcacagcgt

SEQ ID NO: 142207 - DNA, 80 bp, synthetic construct
  source 1..80: mol_type = other DNA
gtgggtaccaaccttgcaggtcaggggaggacgcgacgcggccatcctgctggcttgcctgttacatccgcatttggtgt

SEQ ID NO: 142208 - DNA, 80 bp, synthetic construct
  source 1..80: mol_type = other DNA
aggagacggcattatgcacactcgctgccactgtggagctgagatcactggacatgtcaaaaacgggacgatgaggatcg

SEQ ID NO: 142209 - DNA, 80 bp, synthetic construct
  source 1..80: mol_type = other DNA
acacccgcgcgcgtacaccaacaagcgcctggcccacctgacggtgtattacaagctcatggcccgccgcgcgcaggtcc

SEQ ID NO: 142210 - DNA, 80 bp, synthetic construct
  source 1..80: mol_type = other DNA
tgctggtcatgtggtggcttcagtatttcatagcccgagtggaggccatcatccacgtgtgggtgcccccgttgcaggtt

SEQ ID NO: 142211 - DNA, 80 bp, synthetic construct
  source 1..80: mol_type = other DNA
tgcatgtctacgttccaccatttgagccacgcggccctcgggactctgtgatcatccttctggtcctatttcaccctcat

SEQ ID NO: 142212 - DNA, 80 bp, synthetic construct
  source 1..80: mol_type = other DNA
gcaatcacctttcccacaacttctaccatcactatgccactgctggcgttgctggctccgggcatgagggctctctactt

SEQ ID NO: 142213 - DNA, 80 bp, synthetic construct
  source 1..80: mol_type = other DNA
gtgttgtgattaccatcttatccggcggtcattggggagtgctttttggcctggcctacttctccatggctggcaattgg

SEQ ID NO: 142214 - DNA, 80 bp, synthetic construct
  source 1..80: mol_type = other DNA
gtacaacagcaagggtctctaatgcggctatcgccgctgtcgcgccagtggcgtgctgcctactagtttcggcaatacag

SEQ ID NO: 142215 - DNA, 80 bp, synthetic construct
  source 1..80: mol_type = other DNA
tatgcctcgcatctcggaccagagaccttattgttggcactacgcgcctcaacggtgtggcattgtacccgcggcgcagg

SEQ ID NO: 142216 - DNA, 80 bp, synthetic construct
  source 1..80: mol_type = other DNA
cttaaaccaacactacatggtcctacccccctcctataccggttggggtctatccaaaatgaagtctgcttgacacaccc

SEQ ID NO: 142217 - DNA, 80 bp, synthetic construct
  source 1..80: mol_type = other DNA
tcgtaacgttctccattgcttattgcttgtgcgcttgcctccttactgctttactgtgcgtatgcatacacctgcttgta

SEQ ID NO: 142218 - DNA, 80 bp, synthetic construct
  source 1..80: mol_type = other DNA
gaagtgcatcccgttggagctcataaaggggggcaggcacttaattttctgccattccaagaagaaatgtgacgagctgg

SEQ ID NO: 142219 - DNA, 80 bp, synthetic construct
  source 1..80: mol_type = other DNA
ccaagaccatctcgagttctgggagggcgtctttacgggattaaccaatatagacgcccacttcctgtctcaaaccaagc

SEQ ID NO: 142220 - DNA, 80 bp, synthetic construct
  source 1..80: mol_type = other DNA
tgtttggaggccagacggtacggcccggagtgtgatcttagtaatctcgagattcatctcaacgcgacaagcgatgatga

SEQ ID NO: 142221 - DNA, 80 bp, synthetic construct
  source 1..80: mol_type = other DNA
tttctgtctctggcgccccggttcccccgcaagacgtttggtcttacgaatcctcggatcgggaccgctgatggatcgat

SEQ ID NO: 142222 - DNA, 80 bp, synthetic construct
  source 1..80: mol_type = other DNA
ggcaactccagtgggctataccatctcacaaatgactgccccaactccagtatcgtgctggaggcggatgccatgatttt

SEQ ID NO: 142223 - DNA, 80 bp, synthetic construct
  source 1..80: mol_type = other DNA
cttcccatctgggctcggccggattacaacccgccattgctcgagacgtggaaggctccaaattatgaaccacctgtggt

SEQ ID NO: 142224 - DNA, 80 bp, synthetic construct
  source 1..80: mol_type = other DNA
tgcgtcaatggcgtgtgttggactgtctatcatggtgccggctcaaagacccttgccggcccaaagggcccaatcaccca

SEQ ID NO: 142225 - DNA, 80 bp, synthetic construct
  source 1..80: mol_type = other DNA
ggccttactgctggcattacgcgcctaaaccgtgcactgtcatccccgcagccagcgtttgtggccctgtgtattgtttc

SEQ ID NO: 142226 - DNA, 80 bp, synthetic construct
  source 1..80: mol_type = other DNA
cggacgatggaaaaccagctgtaagcgacgaacagctatcaaggtggttggggacaaacgatagtaaggaactagaacat

SEQ ID NO: 142227 - DNA, 80 bp, synthetic construct
  source 1..80: mol_type = other DNA
cgagcttggagacatcgggcacgagcagtgcgcgctaagcttattgcccagggaggtaaggccaaaatatgtggccttta

SEQ ID NO: 142228 - DNA, 80 bp, synthetic construct
  source 1..80: mol_type = other DNA
aaggatcatccggtggacccgtgctctgccctaggggacacgctgtgggcctgttcagagcggccgtatgtaccagtggt

SEQ ID NO: 142229 - DNA, 80 bp, synthetic construct
  source 1..80: mol_type = other DNA
cctttcattatctagccccctggggacagcatccccccttacctccgcgggtgcaggatcttattgggcaaatccctcaa

SEQ ID NO: 142230 - DNA, 80 bp, synthetic construct
  source 1..80: mol_type = other DNA
cttaatagttcaacatagtagagataatgaaacttttagggatgcaatgcttaacatagctgaacctcagggtcggtggt

SEQ ID NO: 142231 - DNA, 80 bp, synthetic construct
  source 1..80: mol_type = other DNA
gcagcttgcccttggaggaggcgccgcacgaggggcagtgcatactccggaatcggtatttctcgcgcccaagctctacg

SEQ ID NO: 142232 - DNA, 80 bp, synthetic construct
  source 1..80: mol_type = other DNA
cggccgccgtgaaagacgtacacggacgagctgtagtgcgagggcgtcagtttcagggacaccgcggtacccccgagccc

SEQ ID NO: 142233 - DNA, 80 bp, synthetic construct
  source 1..80: mol_type = other DNA
aaaggggggtcgcaagccggcccgactgatcgtgttcccggacctgagcgtccgggtctgcgaaaagagagccttgtatg

SEQ ID NO: 142234 - DNA, 80 bp, synthetic construct
  source 1..80: mol_type = other DNA
tgccaccaaaagctttggcagctcctcaacttccggtattacgggtgacaatacaacagcgtcctctgagcctgccccct

SEQ ID NO: 142235 - DNA, 80 bp, synthetic construct
  source 1..80: mol_type = other DNA
ggcataggtcgcgcaacgtgggtaaggtcatcgataccctaacgtgcggctttgccgacctcatggggtacatccctgtc

SEQ ID NO: 142236 - DNA, 80 bp, synthetic construct
  source 1..80: mol_type = other DNA
acatgtctgcgggttcctgcataaacataaaataaaataacaaaaaaacatttaaacattagaagcctgtcttacaacag

SEQ ID NO: 142237 - DNA, 80 bp, synthetic construct
  source 1..80: mol_type = other DNA
cggacggcccacgtctcgatgtcggacgacacggcatcgcgcaaggcggcgtccggcccgcgagcgcgtgagtcaaacag

SEQ ID NO: 142238 - DNA, 80 bp, synthetic construct
  source 1..80: mol_type = other DNA
cggggacttctcggcaccatagtgaccagccttacaggccgagacaaaaatgaggttgaaggggagatacaagtagtttc

SEQ ID NO: 142239 - DNA, 80 bp, synthetic construct
  source 1..80: mol_type = other DNA
agacctaccgcgtcacgcacgaaggaggcgtaggagtcgcgcagcttgttgaccagctcggcggtgacctgcacgtctag

SEQ ID NO: 142240 - DNA, 80 bp, synthetic construct
  source 1..80: mol_type = other DNA
acctgtcctgtgtgcgaaaggccacgcggtaggaatcttccgtgccgcggtttgttccaggggtgtggccaaggccatag

SEQ ID NO: 142241 - DNA, 80 bp, synthetic construct
  source 1..80: mol_type = other DNA
aggcagactcgggccgccccctctccgcatcaccacagaagccccgcctacgttgcgacccccagggaccctccgtccgc

SEQ ID NO: 142242 - DNA, 80 bp, synthetic construct
  source 1..80: mol_type = other DNA
caagcagaggcactcagagctgctcagagaagaacagcggctggcataatgaagaatgctgtcgtggacggaatggtcgc

SEQ ID NO: 142243 - DNA, 80 bp, synthetic construct
  source 1..80: mol_type = other DNA
tctcacctggtgccctggtcgtgggcgtcgtctgtgctgccgtccttcggcgacacgttggcccgtctgaaggggccacc

SEQ ID NO: 142244 - DNA, 80 bp, synthetic construct
  source 1..80: mol_type = other DNA
cgctgtcggccatggccgctaggaaggccagggaggaggccgggtcgctggcggccgcgcccagggccgtcaccgcgtcg

SEQ ID NO: 142245 - DNA, 80 bp, synthetic construct
  source 1..80: mol_type = other DNA
ttgatttagtactaatagcaatttgaattatgattaattattttagatttaagatagcactatagttagtttagtgtaaa

SEQ ID NO: 142246 - DNA, 80 bp, synthetic construct
  source 1..80: mol_type = other DNA
cactcgcccgggctgcctgggaaacagttagacactcccctatcaattcatggctgggaaacatcatccagtatgctcca

SEQ ID NO: 142247 - DNA, 80 bp, synthetic construct
  source 1..80: mol_type = other DNA
cgggagagccatagtggtctgcggaaccggtgagtacaccggaattgccgggaagactgggtcctttcttggataaaccc

SEQ ID NO: 142248 - DNA, 80 bp, synthetic construct
  source 1..80: mol_type = other DNA
tggacactactcagacgaaatttaatcaccgcatcaactcttaaatggagtgtatctggacccgtcattccacctcagtg

SEQ ID NO: 142249 - DNA, 80 bp, synthetic construct
  source 1..80: mol_type = other DNA
gtatacgcctctatgttagcgccagaggaccaacgctcgaattgcagttattaccagcgctttcaagatggccactccct

SEQ ID NO: 142250 - DNA, 80 bp, synthetic construct
  source 1..80: mol_type = other DNA
tgactggttcgaagacctagccctgccttggaaacacaaagacaatcaggactggaacagtgtggagaaacttgtggagt

SEQ ID NO: 142251 - DNA, 80 bp, synthetic construct
  source 1..80: mol_type = other DNA
gtatcaacaatatgatgaaatggaagaatgttcccagtctgctccctacatcgagcaggcacaggccatcgctcaacagt

SEQ ID NO: 142252 - DNA, 80 bp, synthetic construct
  source 1..80: mol_type = other DNA
ggcattgtggtcctattgaccatattgacgctgtccccacactacaagcgctggttgagccgaataatatggtggttaca

SEQ ID NO: 142253 - DNA, 80 bp, synthetic construct
  source 1..80: mol_type = other DNA
aactcacatctcttgggctcaacgcagtagccttctacaggggcgttgacgtggcggtcattccgacttcaggcgacgtc

SEQ ID NO: 142254 - DNA, 80 bp, synthetic construct
  source 1..80: mol_type = other DNA
cgtgctaccttaaagccacagcagccaccagggccgctgggttaaaggactgcaccatgctggtgtgcggtgacgacctg

SEQ ID NO: 142255 - DNA, 80 bp, synthetic construct
  source 1..80: mol_type = other DNA
ggcccgcccgcgccccgtggcgctgtcgcgccggcccgccgagggccccgaccccctgggcggctggctgcggcagcccc

SEQ ID NO: 142256 - DNA, 80 bp, synthetic construct
  source 1..80: mol_type = other DNA
cgtccgtgtggaatagtcttggggtggagtggtgcaagtagtcccgcacgaccctgctggccaaaaatagcttgctcgct

SEQ ID NO: 142257 - DNA, 80 bp, synthetic construct
  source 1..80: mol_type = other DNA
ttggcagcaggcctcttggcttgcgacccaaatcgaaagcggggttggcctgctacagaggtgatgacagctgtgggttt

SEQ ID NO: 142258 - DNA, 80 bp, synthetic construct
  source 1..80: mol_type = other DNA
tacactccctttgccgtcaaaagtccacaaaaactccaaacgtccgaaaaacacgccacaggaacacttccgcatactgt

SEQ ID NO: 142259 - DNA, 80 bp, synthetic construct
  source 1..80: mol_type = other DNA
acattattggattgtatggaaacggagttgaacttggagatggctcatatgtaagcgccattgtgcagggtgaacgtcaa

SEQ ID NO: 142260 - DNA, 80 bp, synthetic construct
  source 1..80: mol_type = other DNA
cgacgtctgctaccctcctcctcaatatattggggtggtgggtggcctctcagttggcgccacccacggcgtcaactgcg

SEQ ID NO: 142261 - DNA, 80 bp, synthetic construct
  source 1..80: mol_type = other DNA
acaactggggcgagaatgagactgacgtttttatcctcagcagcctccggccccccaaagggtggtggtttgggtgcacg

SEQ ID NO: 142262 - DNA, 80 bp, synthetic construct
  source 1..80: mol_type = other DNA
gccagattaccaaccgcccaccgttgctggttgtgctctccccccccccaagaaggccccgacgcctcccccaaggagac

SEQ ID NO: 142263 - DNA, 80 bp, synthetic construct
  source 1..80: mol_type = other DNA
gaagaaccaaccgtaacaccaaccgtcgcccacaggacgtcaagttcccgggtggcggtcagatcgttggtggagtttac

SEQ ID NO: 142264 - DNA, 80 bp, synthetic construct
  source 1..80: mol_type = other DNA
gattccccttgacttcatcaaaggggggagacacttgatcttttgccattccaaaaagaagtgcgacgagcttgctaagc

SEQ ID NO: 142265 - DNA, 80 bp, synthetic construct
  source 1..80: mol_type = other DNA
tgaggaaccaagatgaagtgcggtggatgagaaaagtggctcgtctcacgaggagggtataaagcgagggccccatgttc

SEQ ID NO: 142266 - DNA, 80 bp, synthetic construct
  source 1..80: mol_type = other DNA
ctgcaccatgctcgtgtgcggcgacgaccttgtcgttatctgcgagagtgccggggtcgaggaggatgcggcgaacctga

SEQ ID NO: 142267 - DNA, 80 bp, synthetic construct
  source 1..80: mol_type = other DNA
cgtcggagtcgacaaagcgggccgggaggtcgtcgccgagcgggacgacccgccgcccccgaccgccccgtccccccagg

SEQ ID NO: 142268 - DNA, 80 bp, synthetic construct
  source 1..80: mol_type = other DNA
ttctcgcccggcccggcgcagcaactgcagctcgtcaactctaatggcagctggcatatcaatagaactgctctcaactg

SEQ ID NO: 142269 - DNA, 80 bp, synthetic construct
  source 1..80: mol_type = other DNA
caacaaacgcgtggattgctaggaacaattgtcactagccttaccgggcgggacagaaatgaggtcgaaggcgaggtgca

SEQ ID NO: 142270 - DNA, 80 bp, synthetic construct
  source 1..80: mol_type = other DNA
tgaagtagcggctttcgtccatggaccaacgacggtggatacacacagcaatttgagcgcccagagcgctgccgtgcagg

SEQ ID NO: 142271 - DNA, 80 bp, synthetic construct
  source 1..80: mol_type = other DNA
tgattcacaacgaccgccttcgggtaggtggttcgggtgcgtgtggatgaactccaccgggtttgtgaaaacgtgcggtg

SEQ ID NO: 142272 - DNA, 80 bp, synthetic construct
  source 1..80: mol_type = other DNA
tgaggaatcaaagctgccaattagccccctgagcaactcactgttacgccatcacaacatggtgtatgccacgactaccc

SEQ ID NO: 142273 - DNA, 80 bp, synthetic construct
  source 1..80: mol_type = other DNA
gttatctgtagtcggggaagctcaaaccgcaggttacttatccagacgagagttcgatgaattatcacgtacaattaaaa

SEQ ID NO: 142274 - DNA, 80 bp, synthetic construct
  source 1..80: mol_type = other DNA
aaaaaaactccacccaaatgacatgcgctccaacactatagccgcatgcccatcatacagcaagcgaatatacataatat

SEQ ID NO: 142275 - DNA, 80 bp, synthetic construct
  source 1..80: mol_type = other DNA
gaaaaccgattgggacagaacgtgctacactcaacactacgcgatgaagcacgcagagattacgtgcgagactgcattta

SEQ ID NO: 142276 - DNA, 80 bp, synthetic construct
  source 1..80: mol_type = other DNA
ccaaccggagcctcaagtggggcagacgcaatggaacattaatccaatgcaaaacgctgcgggaagaatactaaaacaaa

SEQ ID NO: 142277 - DNA, 80 bp, synthetic construct
  source 1..80: mol_type = other DNA
ctgcggtgtcgcccagcgcctcgtgctcggcccccacgaccgcggggcttcccaggtgcagggcgcgaaacagctcctcc

SEQ ID NO: 142278 - DNA, 80 bp, synthetic construct
  source 1..80: mol_type = other DNA
tttccagcaaggatggggtaagatccattatgctaaggtaaatcgctcctcggaagacagaccctactgctggcactacc

SEQ ID NO: 142279 - DNA, 80 bp, synthetic construct
  source 1..80: mol_type = other DNA
ttcataccagtagaaactatgagctcgcaggtcaggtctccatctttcagtgacaattccaccccccccgccgtgccaga

SEQ ID NO: 142280 - DNA, 80 bp, synthetic construct
  source 1..80: mol_type = other DNA
gtggggcagatgttcaccttcacgccgcgtcgccactggaccacgcaggattgtaactgttccatctatactggccacat

SEQ ID NO: 142281 - DNA, 80 bp, synthetic construct
  source 1..80: mol_type = other DNA
ccagtgcctatgtcaacatatggatggaacatagttaagttaatgagtggaaaggatgtgttctatcttccacctgaaaa

SEQ ID NO: 142282 - DNA, 80 bp, synthetic construct
  source 1..80: mol_type = other DNA
ttacagctatggccattactactccttatcctgatgttgccccaacgggcgtacgcttttgatcaggagcaggctgcctc

SEQ ID NO: 142283 - DNA, 80 bp, synthetic construct
  source 1..80: mol_type = other DNA
ggcgcggttttgctaaagtgatgtctgagtttggcgaactcttgggtaaggttggaattgtcgaggctgggtgtggcgga

SEQ ID NO: 142284 - DNA, 80 bp, synthetic construct
  source 1..80: mol_type = other DNA
tgccgcggaggaacaaaagttgcctatcaacgcactgagcaactcgttactgcgtcaccacaatctcgtgtattctacca

SEQ ID NO: 142285 - DNA, 80 bp, synthetic construct
  source 1..80: mol_type = other DNA
gcgtcaggtacaggaagatctcgcagaaaagggcacgctcggggtcggggtccggaagggccacctggcacagcggctcg

SEQ ID NO: 142286 - DNA, 80 bp, synthetic construct
  source 1..80: mol_type = other DNA
ccaatgttggccacttcttgtaagcttcacgtgccatggactttcttagactgctacaccaaagagacagattacatagg

SEQ ID NO: 142287 - DNA, 80 bp, synthetic construct
  source 1..80: mol_type = other DNA
gctccctttataggaacaaacataaataaagacaatgggattcagataggaacagatacaacaaatcagcctatttatgc

SEQ ID NO: 142288 - DNA, 80 bp, synthetic construct
  source 1..80: mol_type = other DNA
ccgccagtcaactctcagctccatctctcaaggcgacatgtaccactgctgccaaccatcctgatgctgaactaattgag

SEQ ID NO: 142289 - DNA, 80 bp, synthetic construct
  source 1..80: mol_type = other DNA
ggctagagtcaagagaatacacaaagcacctgatcaaggttgaaaattggatatttaggaaccccgggtttgcgctagtg

SEQ ID NO: 142290 - DNA, 80 bp, synthetic construct
  source 1..80: mol_type = other DNA
tccccgtaacggcggtacccgcccgtcccggtggcaacagcttttggtagaactggttcagggccgagttgacaccggtc

SEQ ID NO: 142291 - DNA, 80 bp, synthetic construct
  source 1..80: mol_type = other DNA
gtgtgatcatctggtcgctggggaatgaatcaggccacggcgctaatcacgacgcgctgtatcgctggatcaaatctgtc

SEQ ID NO: 142292 - DNA, 80 bp, synthetic construct
  source 1..80: mol_type = other DNA
ctactaacagtaggggtaggcatcttcctcctaccggctcggtgagctggtaggacaacactccatttctgtgttttttt

SEQ ID NO: 142293 - DNA, 80 bp, synthetic construct
  source 1..80: mol_type = other DNA
tattccgtcgcctgtgtggcggcaaatacgtgcaagcacttctcctgagactgggagcatggacaggcacatacatctat

SEQ ID NO: 142294 - DNA, 80 bp, synthetic construct
  source 1..80: mol_type = other DNA
tgaagaactaaaaaaggacgataaaatagttgggtctgctgtaaatgtaagacttgggcaagatggcggactggcatttg

SEQ ID NO: 142295 - DNA, 80 bp, synthetic construct
  source 1..80: mol_type = other DNA
caagtgggagtacgtggtccttgcatttctagtgttggcagatgcacgcatttgtgcgtgcttgtggttgatgatgctca

SEQ ID NO: 142296 - DNA, 80 bp, synthetic construct
  source 1..80: mol_type = other DNA
tgcagcaacacgtggcgtggaacattccccatcaacgtatacactacgggctcctgcacgccctccccggcgccgaacta

SEQ ID NO: 142297 - DNA, 80 bp, synthetic construct
  source 1..80: mol_type = other DNA
accaacagtacgacgagatggaagaatgctctcgccacctcccttacttagtggaaggacagcagatcgctgagcagttc

SEQ ID NO: 142298 - DNA, 80 bp, synthetic construct
  source 1..80: mol_type = other DNA
gaccaagctcatcacgtgggaggcagataccgccgcgtgcggtgacatcatcaacggcttgcccgtctctgcccgtaggg

SEQ ID NO: 142299 - DNA, 80 bp, synthetic construct
  source 1..80: mol_type = other DNA
caacttacacctgggaggagaacgacacggatgtgtttttactgaacagcacgcggcctccgcggggagcttggtttgga

SEQ ID NO: 142300 - DNA, 80 bp, synthetic construct
  source 1..80: mol_type = other DNA
ggtttggtttttatttccagtgtaatagctttacaaatgtatccgcgccttgattttgcatggaaacgatacactgatga

SEQ ID NO: 142301 - DNA, 80 bp, synthetic construct
  source 1..80: mol_type = other DNA
agggaaacagcttgcctaggcaaagcttatgcccagatgtggtcgcttatgtacttccacagaagggatctgcgtttagc

SEQ ID NO: 142302 - DNA, 80 bp, synthetic construct
  source 1..80: mol_type = other DNA
tcatgctcctcaaacgtttccgtagcccacgaccacaccggacagagatattactacctcacaaggaacccaaccacacc

SEQ ID NO: 142303 - DNA, 80 bp, synthetic construct
  source 1..80: mol_type = other DNA
cggccaccgcggcggtctcctgctgcaactcgcgccgcgccagcgcggtcaggttgctggcaaacgcgtccatggtggtc

SEQ ID NO: 142304 - DNA, 80 bp, synthetic construct
  source 1..80: mol_type = other DNA
gcgccaaggctctggcgcctccaccaagctgggacaccatgtggaagtgcctaattcgccttaagcccaccctgcacggg

SEQ ID NO: 142305 - DNA, 80 bp, synthetic construct
  source 1..80: mol_type = other DNA
gtactgctcacgtgtgtgctccacccgcacttgctctttgaaatcaccaagatcatgctggccattctcgggcctttgtg

SEQ ID NO: 142306 - DNA, 80 bp, synthetic construct
  source 1..80: mol_type = other DNA
cgggaatgagggactcggctgggcaggatggctcctgtccgcccgaggttcccgtccctcttggggccccaatgaccccc

SEQ ID NO: 142307 - DNA, 80 bp, synthetic construct
  source 1..80: mol_type = other DNA
tcgatcatcaagctgcaggactgtacaatgcccaagtaattttcatttctccactcgcgaatgatgtcgcggcaaatagt

SEQ ID NO: 142308 - DNA, 80 bp, synthetic construct
  source 1..80: mol_type = other DNA
agccaggcctggctatccggagaaacagcacacgacttggcgttctgtgtgtcgcgatgtctctgcgcgcagtctggcat

SEQ ID NO: 142309 - DNA, 80 bp, synthetic construct
  source 1..80: mol_type = other DNA
tagcactacaatcctccttaacatcatgggaggatggctggcatcccaaatagcccccccctctggggccactggcttcg

SEQ ID NO: 142310 - DNA, 80 bp, synthetic construct
  source 1..80: mol_type = other DNA
gggggtgtacagatttgtctcccaaggggagaggccttcgggtatgttcgacaccgttgttctgtgtgaggcttatgaca

SEQ ID NO: 142311 - DNA, 80 bp, synthetic construct
  source 1..80: mol_type = other DNA
tatatgtctaaagcgcacggcatagatcccaatatcaggactggagttaggactataaccacgggtggggcaactaccta

SEQ ID NO: 142312 - DNA, 80 bp, synthetic construct
  source 1..80: mol_type = other DNA
tgggggccgttccaggctgagggttcagtaacttaacaaacatataatgcggcaatacgcgggtttttgtaaaggtgttg

SEQ ID NO: 142313 - DNA, 80 bp, synthetic construct
  source 1..80: mol_type = other DNA
gacctcgtcggctggccggcgccccctggggcgcgttccttgacaccatgcacctgcggcagctcagacctttatttggt

SEQ ID NO: 142314 - DNA, 80 bp, synthetic construct
  source 1..80: mol_type = other DNA
agagtgtgttcaccggattgactcacatagatgctcacttcctgtcgcagacaaaacagcagggtcttaacttcccatac

SEQ ID NO: 142315 - DNA, 80 bp, synthetic construct
  source 1..80: mol_type = other DNA
cgcagcgcaagcttacggcagaagaaggtcacctttgacagactgcaagtcctggacgaccactaccgggacgtgctcaa

SEQ ID NO: 142316 - DNA, 80 bp, synthetic construct
  source 1..80: mol_type = other DNA
tccgttattgactatgcccgcatagacggaatatttcttcgctatcactgcccggggttggacacgtttttgtgggatag

SEQ ID NO: 142317 - DNA, 80 bp, synthetic construct
  source 1..80: mol_type = other DNA
ggactcattgcatgtgatcccaaccgtaaacgaggatggcccgcaactgaagtgatgactgctgtcggcctgatgtttgc

SEQ ID NO: 142318 - DNA, 80 bp, synthetic construct
  source 1..80: mol_type = other DNA
ttggatccggcgggagccacccgacaacagcccccgggttttcccacgccagacgccggtccgctgtgccatcgcgcccc

SEQ ID NO: 142319 - DNA, 80 bp, synthetic construct
  source 1..80: mol_type = other DNA
aaccccagaggccagagaggagccaactggcaaaacacgctgaacagcatcgtgggcctgggggtgaaaagcctgaaacg

SEQ ID NO: 142320 - DNA, 80 bp, synthetic construct
  source 1..80: mol_type = other DNA
acttccgaacggtcccagcccagaggcaggcgccagcccattccaaaggcgcgccgccagacgggccgtacctggggtca

SEQ ID NO: 142321 - DNA, 80 bp, synthetic construct
  source 1..80: mol_type = other DNA
ctctgtccagaaattctattcatgaaatgtactacgtttcaggagcaagaagtaacatcacattcacagttaaccagaca

SEQ ID NO: 142322 - DNA, 80 bp, synthetic construct
  source 1..80: mol_type = other DNA
gggaagacacaaagtgcctaggatgtgcacaagagatgaattcacaaacaaggttaggagcaatgcagccatgggagcag

SEQ ID NO: 142323 - DNA, 80 bp, synthetic construct
  source 1..80: mol_type = other DNA
cgttgttggaactgcttatgataatgcagtgcctttcatgcctaatctaaaagcatatccaaagaatactacaacatctt

SEQ ID NO: 142324 - DNA, 80 bp, synthetic construct
  source 1..80: mol_type = other DNA
atgagcaaggagattcccaccccttacatgtggagctatcagccccagatgggcctggccgcaggcgcctcccaggacta

SEQ ID NO: 142325 - DNA, 80 bp, synthetic construct
  source 1..80: mol_type = other DNA
tgccccaactccagcatcgtgctggaggcggatgccatgatcttgcatttgcctggatgcttgccttgtgtgagggtcaa

SEQ ID NO: 142326 - DNA, 80 bp, synthetic construct
  source 1..80: mol_type = other DNA
cagtgggctgcaaaagacgccaacactgctgatcaaacagttaaaacacacacacatggcgtagctgctatgggaggaac

SEQ ID NO: 142327 - DNA, 80 bp, synthetic construct
  source 1..80: mol_type = other DNA
actcatcgcacagggagggaaggcggccatatgtggccgctatctcttcaactgggcggtgaaaaccaagctcaaactca

SEQ ID NO: 142328 - DNA, 80 bp, synthetic construct
  source 1..80: mol_type = other DNA
gtgggcgaaggtcattgtcatccttctgctggccgctggggtggacgcgggcaccaccaccgttggaggcgctgttgcac

SEQ ID NO: 142329 - DNA, 80 bp, synthetic construct
  source 1..80: mol_type = other DNA
acgtcccggtgctgggtgcccatcacacccaccctggccgttccgaacgcgtcggccccgtttcatgcgtttcgccggca

SEQ ID NO: 142330 - DNA, 80 bp, synthetic construct
  source 1..80: mol_type = other DNA
cccagcacccagacgcctcgtccgacggagcggcagggccccaacgatcctcaaccagcgccccacagtgtgtggtcgcg

SEQ ID NO: 142331 - DNA, 80 bp, synthetic construct
  source 1..80: mol_type = other DNA
aaagattaactataatggacttgcaccctggagccggaaagacaaaaagaattctcccatcaatagtcagagaagctttg

SEQ ID NO: 142332 - DNA, 80 bp, synthetic construct
  source 1..80: mol_type = other DNA
tcctacgccattggatcccagcttccttgtgagcccgagccagacgtcatggttgttacatcaatgctgacagacccctc

SEQ ID NO: 142333 - DNA, 80 bp, synthetic construct
  source 1..80: mol_type = other DNA
tccatgacgaaccggtttttctacgtggcagtgccacaagacggctcaaagtcctaattttttattgtgtgctcagcccg

SEQ ID NO: 142334 - DNA, 80 bp, synthetic construct
  source 1..80: mol_type = other DNA
ggaccactgggcatccagggagaactcagggcgaggggttgaaggtatcggtctacaatatctaggctacgtgatcagag

SEQ ID NO: 142335 - DNA, 80 bp, synthetic construct
  source 1..80: mol_type = other DNA
atatgccaagatagccctgcgcccagattgcaagtacagggtgactaagaccgtgaatattaaacatgcctgctacatct

SEQ ID NO: 142336 - DNA, 80 bp, synthetic construct
  source 1..80: mol_type = other DNA
gaccggataaatgcccggaacgcctccggggaccggtgtgccatcaagtcctcgtacgcggaggccgtgtggtcgctggg

SEQ ID NO: 142337 - DNA, 80 bp, synthetic construct
  source 1..80: mol_type = other DNA
atgtgtacgacgctaacaagatagtgtacacagtcaaggttgagccacatacaggaaactatgtcgcggccaatgaaacc

SEQ ID NO: 142338 - DNA, 80 bp, synthetic construct
  source 1..80: mol_type = other DNA
tttgagggtatttaaacacagccagaacatcaagaggccactcttgagtgcgagcgagtagagttttctcctccattgct

SEQ ID NO: 142339 - DNA, 80 bp, synthetic construct
  source 1..80: mol_type = other DNA
ccaacaatcatggcagcaggccttatgatatgcaaccctaacaagaagagaggatggcccgccacagaggtgttaacagc

SEQ ID NO: 142340 - DNA, 80 bp, synthetic construct
  source 1..80: mol_type = other DNA
ccatgctggatttggaagagggcgagggtttggctcgcctgggagcaccctcccccgagcatcatccccgcgtacaactt

SEQ ID NO: 142341 - DNA, 80 bp, synthetic construct
  source 1..80: mol_type = other DNA
catatgacactcgctgctttgactcaacggtcacagagagagatatcagaacggaggagtccatatacctggcctgctca

SEQ ID NO: 142342 - DNA, 80 bp, synthetic construct
  source 1..80: mol_type = other DNA
gtgatggcatatgccataccacatgtgggtgcggtgccaacatcgttggccacgtgaaaaatgggaccatgaaaatcaat

SEQ ID NO: 142343 - DNA, 80 bp, synthetic construct
  source 1..80: mol_type = other DNA
cccggccctcaccgagccgatttccctgcggcagttcccgcaactggcgcccccccctccaaccgtggccgggatacgcg

SEQ ID NO: 142344 - DNA, 80 bp, synthetic construct
  source 1..80: mol_type = other DNA
ctcttacagacaggctgtattgcggtggtcccatgtacaactccaagggtcaatcatgtggataccgcagatgccgggcg

SEQ ID NO: 142345 - DNA, 80 bp, synthetic construct
  source 1..80: mol_type = other DNA
aattgtattatagttagtttagtgtaaataggttttattgagaatggaagtcaggccagattaatgctgccaccggaagt

SEQ ID NO: 142346 - DNA, 80 bp, synthetic construct
  source 1..80: mol_type = other DNA
acgccgcgacgtctcccgcggtcgcgaacgtctccaggctgcccaggagccgctcgccctcgcgccacgcgtactctagc

SEQ ID NO: 142347 - DNA, 80 bp, synthetic construct
  source 1..80: mol_type = other DNA
agccgacttctccagttacgggagcgagcccccttttttctttttgccagatgcatcccgtcctgcgccaaatgcgtccc

SEQ ID NO: 142348 - DNA, 80 bp, synthetic construct
  source 1..80: mol_type = other DNA
tgtggaccaggacctcgtcgggtggccagcacctccaggggctaagtctcttgaaccgtgctcctgcgggtctgcagact

SEQ ID NO: 142349 - DNA, 80 bp, synthetic construct
  source 1..80: mol_type = other DNA
gcatgtgactgctgaggccgcagcacggcgcctggcacgtgggtcacccccttcacttgctagctcgtcagccagtcagc

SEQ ID NO: 142350 - DNA, 80 bp, synthetic construct
  source 1..80: mol_type = other DNA
gcgtacatatgggcgtcccaccagcgctccagcctctgggtactagcgcgtcctataaagcggtatgcgcaaaattcggc

SEQ ID NO: 142351 - DNA, 80 bp, synthetic construct
  source 1..80: mol_type = other DNA
cccgtcaccaaatacatcatgacctgcatgtcagctgacttggaagtcacaacaagtacttgggtgctgttaggtggcgt

SEQ ID NO: 142352 - DNA, 80 bp, synthetic construct
  source 1..80: mol_type = other DNA
actttttgcccaccgccaatttttcgggggtcaccacgtaaaaggtacgttcgtcgtttccccaagtgtcccactgcaac

SEQ ID NO: 142353 - DNA, 80 bp, synthetic construct
  source 1..80: mol_type = other DNA
tttgtaaaggtgggcttgtatgttaaggtacattggcataagaccatctgtgggatgcaggtaggaccactgtagggctt

SEQ ID NO: 142354 - DNA, 80 bp, synthetic construct
  source 1..80: mol_type = other DNA
tccctgaggtcatcttggagatcattgctggagcaaattggggtgtaatgtttggcttggcctatttctccatgcaggtg

SEQ ID NO: 142355 - DNA, 80 bp, synthetic construct
  source 1..80: mol_type = other DNA
gggagtggatgacgacagaggacatgctaagagtgtggaacagggtatggatagaagaaaatgagtggatggaagataaa

SEQ ID NO: 142356 - DNA, 80 bp, synthetic construct
  source 1..80: mol_type = other DNA
ctggattgtcagatctacggggcctattactccattgagccgcttgacctacctcagatcattgaacgactccacggtct

SEQ ID NO: 142357 - DNA, 80 bp, synthetic construct
  source 1..80: mol_type = other DNA
gttcattaaagagatatgaagacacgactttggttgaggacacagtactgtaaatactttattaattgtaaatagacaat

SEQ ID NO: 142358 - DNA, 80 bp, synthetic construct
  source 1..80: mol_type = other DNA
tggcgcacggcgtccgggttctggaagacggcgtgaactatgcaacagggaatcttcctggttgctctttctctatcttc

SEQ ID NO: 142359 - DNA, 80 bp, synthetic construct
  source 1..80: mol_type = other DNA
atctgcctcttccatggacgacaggagcggatacatcagaggttcactggaattacaaagagagaatggtgacatttaag

SEQ ID NO: 142360 - DNA, 80 bp, synthetic construct
  source 1..80: mol_type = other DNA
ggcatcctctttctctttgcaggggtagacgctgagaccaccattacgggagtacaaaccggcagaaccctgaaagctgt

SEQ ID NO: 142361 - DNA, 80 bp, synthetic construct
  source 1..80: mol_type = other DNA
gtcgccgcgcgcccgctttccaagatggctaccccttcgatgatgccgcagtggtcttacatgcacatctcgggccagga

SEQ ID NO: 142362 - DNA, 80 bp, synthetic construct
  source 1..80: mol_type = other DNA
gggccccgaagatgccggacggacgagacggatcctgtgccgcgccgccgagcaggctattacccgtcgccgccgaaccc

SEQ ID NO: 142363 - DNA, 80 bp, synthetic construct
  source 1..80: mol_type = other DNA
cgatgtcatcccggcaaggcgcaggggcgacacgcgggccggcttgcttagcccaaggccactcagcaccctcaaaggat

SEQ ID NO: 142364 - DNA, 80 bp, synthetic construct
  source 1..80: mol_type = other DNA
ggaccggggtgcggaccattaccacaggggcccccattacatactccacctacggcaagttccttgctgacggtggttgt

SEQ ID NO: 142365 - DNA, 80 bp, synthetic construct
  source 1..80: mol_type = other DNA
ggtgctgccgcggccaaccatcaccatggaatttggggtccggcatgtggtctgcacggccggctgcgtccccgagggcg

SEQ ID NO: 142366 - DNA, 80 bp, synthetic construct
  source 1..80: mol_type = other DNA
catgggtctgtctgctcagtccagtcgtggacctgaccccacgcaacgcccaaaataataacccccacgaaccataaacc

SEQ ID NO: 142367 - DNA, 80 bp, synthetic construct
  source 1..80: mol_type = other DNA
ctgcgaggcatacgataccgggtgcgcgtggtacgacctaacgcctgcagaaaccactgtacggctgcgcgcgtacctca

SEQ ID NO: 142368 - DNA, 80 bp, synthetic construct
  source 1..80: mol_type = other DNA
cggcaccctgtggatggtcgtcggcgggctgacgatcggaggcagcgcgcgctactggtggatcggtgtgcccgccgcgg

SEQ ID NO: 142369 - DNA, 80 bp, synthetic construct
  source 1..80: mol_type = other DNA
tctcggatgtggtagaggcggctggtgttattacatggctacccagaagagggtacaggaagtgaaagggtacacgaaag

SEQ ID NO: 142370 - DNA, 80 bp, synthetic construct
  source 1..80: mol_type = other DNA
cgaggctctcgcccctcctggggccccactgacccccggcataggtcgcgcaacgtgggtaaagtcatcgacaccctaac

SEQ ID NO: 142371 - DNA, 80 bp, synthetic construct
  source 1..80: mol_type = other DNA
taggcgaggaggaggacgagctttcagaggaagaggcgaccgaagaaaaaccacctgcatccagcgcgccttctctgagc

SEQ ID NO: 142372 - DNA, 80 bp, synthetic construct
  source 1..80: mol_type = other DNA
tcaactgacggtcgttgtgggatctgtaaaaaaccccatgtggagagctccacagagattgcccgtgcctgtgaacgagc

SEQ ID NO: 142373 - DNA, 80 bp, synthetic construct
  source 1..80: mol_type = other DNA
aaagcccaagcggcctgtagagctgccaagctccaggactgcaccatgctcgtgtgtggcgacgacctggtcgttatctg

SEQ ID NO: 142374 - DNA, 80 bp, synthetic construct
  source 1..80: mol_type = other DNA
cggtgtggatcgggaccctgggtaacacctaggtgtctggtggattacgcttacaggttgtggcactacccctgcactgt

SEQ ID NO: 142375 - DNA, 80 bp, synthetic construct
  source 1..80: mol_type = other DNA
tgattttgtgccggtggaaaacatggagaccacaatgcgatccccggtcttcaccgataactcatttccacccgccgtgc

SEQ ID NO: 142376 - DNA, 80 bp, synthetic construct
  source 1..80: mol_type = other DNA
accagctgatagagaacactcctctcttaataatagcagcaactaagggtgcgcaggagcagaagccgctctcgtcgcac

SEQ ID NO: 142377 - DNA, 80 bp, synthetic construct
  source 1..80: mol_type = other DNA
actacggccctaccggcgcgacgccgagggcggtccctcgtctatgccggcgagctgacgccggttcagacggaacacgg

SEQ ID NO: 142378 - DNA, 80 bp, synthetic construct
  source 1..80: mol_type = other DNA
aggcccttgattgcgaaatctatggagcctgctactccatagaaccactagacctacctccaatcattcaaagactccat

SEQ ID NO: 142379 - DNA, 80 bp, synthetic construct
  source 1..80: mol_type = other DNA
cttttcgaatacgctctcggcgggcgtctctcttggaaaatcgcaacctgtacgattcgtcatgtgtctgatcatttctt

SEQ ID NO: 142380 - DNA, 80 bp, synthetic construct
  source 1..80: mol_type = other DNA
tccaaatggctcttttgaagatcggggccctgactggcacttacatctacaaccacctcaccccattgcaggactgggcc

SEQ ID NO: 142381 - DNA, 80 bp, synthetic construct
  source 1..80: mol_type = other DNA
accaccgccacgatcacgtccctcttctcaaccggtccgtctcagaagatccaacttgtaaacaccaatggcaggtggca

SEQ ID NO: 142382 - DNA, 80 bp, synthetic construct
  source 1..80: mol_type = other DNA
gaaaccgtcaactggatggtatgattggcagcaggttccattctgctcaaaccatttcactgaattgattatgaaagatg

SEQ ID NO: 142383 - DNA, 80 bp, synthetic construct
  source 1..80: mol_type = other DNA
gggtgtgctcttcctcctaagggtttaccacctgtaccaccgcccaggaggaagaaggttgtgaggcttaacgagtcctc

SEQ ID NO: 142384 - DNA, 80 bp, synthetic construct
  source 1..80: mol_type = other DNA
ggcgcctatcccacctcccaggcggaagagggcggcgatccagctctcggagtccacggtgtccacggccctggcggatc

SEQ ID NO: 142385 - DNA, 80 bp, synthetic construct
  source 1..80: mol_type = other DNA
agacgttgtggtttgcgccacagacgccctcatgactggctacaccggtgacttcgactcggtcatagactgcaacactt

SEQ ID NO: 142386 - DNA, 80 bp, synthetic construct
  source 1..80: mol_type = other DNA
aggggatggcatatgctacaccaaatgcccttgcggtgcggacatcactggccacgtaaagaatgggaccatgaagatca

SEQ ID NO: 142387 - DNA, 80 bp, synthetic construct
  source 1..80: mol_type = other DNA
tacagtatcacaagcacttgcacaactagccgagaagtcctttccgacaccatcgacatccacaactgatcctgactcgg

SEQ ID NO: 142388 - DNA, 80 bp, synthetic construct
  source 1..80: mol_type = other DNA
gactcccatgcgtatgtgacagggttgacagcagacaacctaaaggttccttgccagctgccatgtccggagtttttctc

SEQ ID NO: 142389 - DNA, 80 bp, synthetic construct
  source 1..80: mol_type = other DNA
ttaggggatggagttttactcgcttaaaaactaaggaaacaccgtcactgggctctggctttgacccgtactttgtgtac

SEQ ID NO: 142390 - DNA, 80 bp, synthetic construct
  source 1..80: mol_type = other DNA
gaaagttttggtggaacttgaaccaccgtttggagattcattcattgttgttgggagaggagacaagcagattaaccacc

SEQ ID NO: 142391 - DNA, 80 bp, synthetic construct
  source 1..80: mol_type = other DNA
ccctggtgaaccgcatcgagctgaagggcatcgacttcaaggaggacggcaacatcctggggcacaagctggagtacaac

SEQ ID NO: 142392 - DNA, 80 bp, synthetic construct
  source 1..80: mol_type = other DNA
aaccaaaacatggctactggaaccataaccagtgccaaaggcttcatgcccagcaccaccgcctatccatttacaatata

SEQ ID NO: 142393 - DNA, 80 bp, synthetic construct
  source 1..80: mol_type = other DNA
agcgcaggcgctgtgagattcgcgggccgccctgaagcgcggcccggatggcctggcccagggcccggaggcacgccaga

SEQ ID NO: 142394 - DNA, 80 bp, synthetic construct
  source 1..80: mol_type = other DNA
gcatagcttccgttgcgctgcaggcgtcgcagcgccgttgatgtgcgaataaagcctctttagactctgacacacctggt

SEQ ID NO: 142395 - DNA, 80 bp, synthetic construct
  source 1..80: mol_type = other DNA
cccctaggtgtttggtggattacccttatagactgtggcactacccttgcaccataaattacaccctacacaaggtccgg

SEQ ID NO: 142396 - DNA, 80 bp, synthetic construct
  source 1..80: mol_type = other DNA
aggatatgtgatcagagacctggctgcaatggatggtggtggattctacgcggatgacaccgctggatgggacacgcgca

SEQ ID NO: 142397 - DNA, 80 bp, synthetic construct
  source 1..80: mol_type = other DNA
gggatgtcaaattcctcctgtccctcaatcttcattttttatttctattagatgtccaaaaagcgcgcgcgggtggatga

SEQ ID NO: 142398 - DNA, 80 bp, synthetic construct
  source 1..80: mol_type = other DNA
agttgccatcatgggagctgcatatggctttcaatactcacccaaagagcgggtcgagtatcttctcaagatctggcgag

SEQ ID NO: 142399 - DNA, 80 bp, synthetic construct
  source 1..80: mol_type = other DNA
acggaggtgcggaggccatcgacgcggcgattcccaaaggtcccccggcccgccccgaggacgccggcacccccgaagcc

SEQ ID NO: 142400 - DNA, 80 bp, synthetic construct
  source 1..80: mol_type = other DNA
ccgcgtatgcgcagcagacgaggggcctagtcggcaccattgtgaccagcctaaccgggcgtgacaaaaatgaggtcgaa

SEQ ID NO: 142401 - DNA, 80 bp, synthetic construct
  source 1..80: mol_type = other DNA
tggctgaaaattagagaggaggacactgatgagtgtgatggagcaatcatagggacagctgttaaaggccatgtggcagt

SEQ ID NO: 142402 - DNA, 80 bp, synthetic construct
  source 1..80: mol_type = other DNA
atttcctcctgcgagcatggaaggaaaaacgggaccccatggggttctcatatgacactcgctgctttgactcaacggtc

SEQ ID NO: 142403 - DNA, 80 bp, synthetic construct
  source 1..80: mol_type = other DNA
gagtcagctttccgccccgtctctcaaggccacgtgtaccgctccccatgactcccctggtactgatctcctcgaggcta

SEQ ID NO: 142404 - DNA, 80 bp, synthetic construct
  source 1..80: mol_type = other DNA
gaaaagacataccgcagtgggaaccttcgaaaggatggaatgattggcagcaagtgcctttttgttcacaccatttccac

SEQ ID NO: 142405 - DNA, 80 bp, synthetic construct
  source 1..80: mol_type = other DNA
cagttgttacagccttaaccatccttactctcaccccgacctacaagcggctgctcacatggttgctatggtggaatcag

SEQ ID NO: 142406 - DNA, 80 bp, synthetic construct
  source 1..80: mol_type = other DNA
ttgcagatcttgtactatgcctccagtcagcttccatggaagcgatggttgttggtatcctatggagatcagacccatga

SEQ ID NO: 142407 - DNA, 80 bp, synthetic construct
  source 1..80: mol_type = other DNA
gggccaaggtctttgccgtcttgctcctctttgccggggttgatgccactactcacattggtagtagtgcgtctgctaca

SEQ ID NO: 142408 - DNA, 80 bp, synthetic construct
  source 1..80: mol_type = other DNA
tggctgatggaggttgttccggcggggcgtatgatattatcatatgtgacgagtgccattccactgaccctaccacagtc

SEQ ID NO: 142409 - DNA, 80 bp, synthetic construct
  source 1..80: mol_type = other DNA
ctcacgccgaggtgcatggtgcactatccgtaccggctgtggcactatccttgcaccgtcaactttaccatcttcaaggt

SEQ ID NO: 142410 - DNA, 80 bp, synthetic construct
  source 1..80: mol_type = other DNA
tgttttggagcacggaaagacgatgacggaaaaagagatcgtggattacgtcgccagtcaagtaacaaccgcgaaaaagt

SEQ ID NO: 142411 - DNA, 80 bp, synthetic construct
  source 1..80: mol_type = other DNA
cttggggaaaagagaagaccaatggtgcggctcattgattgggttaacaagcagggccacatgggcaaagaacatccaag

SEQ ID NO: 142412 - DNA, 80 bp, synthetic construct
  source 1..80: mol_type = other DNA
tcctccgcgtcctcctcctttccccccgccccgcgcgccccgaggactatatcagccaggcgacggggcgatcgtccaca

SEQ ID NO: 142413 - DNA, 80 bp, synthetic construct
  source 1..80: mol_type = other DNA
ttcgtcggcgcggcgtcgcgtggcgccgatgacctttcccagctcctgcagggcgcgcccgctggtggagtggtccccgg

SEQ ID NO: 142414 - DNA, 80 bp, synthetic construct
  source 1..80: mol_type = other DNA
ctcaaccgcaagtcctatgacacggagtatcccaaatgcaagaatggagactgggattttgtgataacaacagacatctc

SEQ ID NO: 142415 - DNA, 80 bp, synthetic construct
  source 1..80: mol_type = other DNA
ggagtgcgcctccacaggttcgcgcctccgtgcaagccattactgcgggaggaagtcacgttccaggtggggctcaacca

SEQ ID NO: 142416 - DNA, 80 bp, synthetic construct
  source 1..80: mol_type = other DNA
agcacgctgagtaattctctcatacgccatcacaacttggtgtattccactacatcgcgcagcgcttccctgcgccagaa

SEQ ID NO: 142417 - DNA, 80 bp, synthetic construct
  source 1..80: mol_type = other DNA
atctactcaggatatggcgttcgaagaaaacacccatgggtttttcctatgataccaggtgttttgattcaacagtgact

SEQ ID NO: 142418 - DNA, 80 bp, synthetic construct
  source 1..80: mol_type = other DNA
tacgtgctggaccccagtgacacccacagtggcagtcaggtacgccggagcaaccaccgcttcgatacgatcccatgtgg

SEQ ID NO: 142419 - DNA, 80 bp, synthetic construct
  source 1..80: mol_type = other DNA
gcggacttgtcagccgcccccacggacatgtacatctgcaggatggtggccatacacgtgtccgccaggcgccgcatctt

SEQ ID NO: 142420 - DNA, 80 bp, synthetic construct
  source 1..80: mol_type = other DNA
ctcagatgctaacctgctcggacggcaactgtcacctgctgaagaccattcacgtagccagccactctcgcaaggcctgg

SEQ ID NO: 142421 - DNA, 80 bp, synthetic construct
  source 1..80: mol_type = other DNA
caacactggggatctgggtgccgtatttgagggtccggggaggtcgtgatgctgtcatcttgctcacatgcttgttccat

SEQ ID NO: 142422 - DNA, 80 bp, synthetic construct
  source 1..80: mol_type = other DNA
tacaaattccaggctgactccccaaaaagactgtcagcagccattggaaaggcatgggaggagggcgtatgtgggattcg

SEQ ID NO: 142423 - DNA, 80 bp, synthetic construct
  source 1..80: mol_type = other DNA
agtactaaacccctcagtagccgccaccttagggtttggggcatacatgtccaaggcacatggaatcaatcccaacgtca

SEQ ID NO: 142424 - DNA, 80 bp, synthetic construct
  source 1..80: mol_type = other DNA
cgacgagttttgcgaggagctcgcgatccgcatatgctactacccacgaagccccggcgggtttgtccgcttcgtaactt

SEQ ID NO: 142425 - DNA, 80 bp, synthetic construct
  source 1..80: mol_type = other DNA
tgggggccgtgattttgtttgtcgtcatagtgggcctccatggggtccgcggcaaatatgccttggcggatgcctctctc

SEQ ID NO: 142426 - DNA, 80 bp, synthetic construct
  source 1..80: mol_type = other DNA
ggcacgcataaccacttgcgccaagttaagttccacgaagcgcgcgaacacaccgtagttgcgtaaacgctgaaacaggt

SEQ ID NO: 142427 - DNA, 80 bp, synthetic construct
  source 1..80: mol_type = other DNA
acatctatgggggtggggagaataaccgcagcaggctagacctcttctgccccacagactgcttcaggaaacatcctgcg

SEQ ID NO: 142428 - DNA, 80 bp, synthetic construct
  source 1..80: mol_type = other DNA
ccttcttcatctttttttgtgcagcttggtacctaaaaggcaagtgggcccctggactcgcctattccgtctatgggatg

SEQ ID NO: 142429 - DNA, 80 bp, synthetic construct
  source 1..80: mol_type = other DNA
ctgtagggcggcagggttacgagactgcacaatgctcgtgtgtggcgatgacctggtcgtcatttgtgagagcgacggtg

SEQ ID NO: 142430 - DNA, 80 bp, synthetic construct
  source 1..80: mol_type = other DNA
caatgaccgaacagaggttgcttgctgatcgcgctaggcgtcgccaacaggatcaaaaaaataaagagttacttgattta

SEQ ID NO: 142431 - DNA, 80 bp, synthetic construct
  source 1..80: mol_type = other DNA
tggcctcatttctcaaaacgagatggacaaaccaagagagcatactgctaatgttggcggcagctttctttcaaatggct

SEQ ID NO: 142432 - DNA, 80 bp, synthetic construct
  source 1..80: mol_type = other DNA
ccggaggcaaaaaataccctcccagttcacgttaagcgccgaggaggagaggattctgcgatacgtgcagcagtccgtga

SEQ ID NO: 142433 - DNA, 80 bp, synthetic construct
  source 1..80: mol_type = other DNA
gttggccctaaaacgtgcagcaacatctggcacgggacattccccatcaatgcctacactactggtccttgcacgcccac

SEQ ID NO: 142434 - DNA, 80 bp, synthetic construct
  source 1..80: mol_type = other DNA
taaacgggcgggtggtgccgccatctctagtagacacctatgtgaacattggcgccaggtggtctctggatgctatggac

SEQ ID NO: 142435 - DNA, 80 bp, synthetic construct
  source 1..80: mol_type = other DNA
acgcagccagcgccgaggaaggacaggcagggggaggtcaggcacgtataggtacgtcgcttccggtgagcgaccttcgg

SEQ ID NO: 142436 - DNA, 80 bp, synthetic construct
  source 1..80: mol_type = other DNA
ggtcctatctaccgccacgcaatccttcctgggtacagcggttaacggcgtgatgtggaccgtctaccacggggcgggta

SEQ ID NO: 142437 - DNA, 80 bp, synthetic construct
  source 1..80: mol_type = other DNA
ccggatcccgcaagctgttgtggacatggtggcgagggcccattggggagtcctagcgggcctggcctactactccatga

SEQ ID NO: 142438 - DNA, 80 bp, synthetic construct
  source 1..80: mol_type = other DNA
aaggccatgaatgggtcttctgaggacagaccttattgctggcactacgcgcccagggagtgcgatatagagccagcaca

SEQ ID NO: 142439 - DNA, 80 bp, synthetic construct
  source 1..80: mol_type = other DNA
gcatggctcgtggcaggtatgctcaagccatactgctgcgaattggagcatggactggaacatacatctatgaccatctt

SEQ ID NO: 142440 - DNA, 80 bp, synthetic construct
  source 1..80: mol_type = other DNA
accacacctgtgataaacaaaaccttacactgctgtttgtaaactttacacatgacggaggctatcttggattcaattac

SEQ ID NO: 142441 - DNA, 80 bp, synthetic construct
  source 1..80: mol_type = other DNA
atgtattttcacagaagagatcttagactggcatccaacgccatttgttcagcagtgccagtccattgggtccctacgag

SEQ ID NO: 142442 - DNA, 80 bp, synthetic construct
  source 1..80: mol_type = other DNA
tgcttgccatctttggtcctccatgggtccttcagagctgcttgctccaagtgccatacttcgtgcgtgcccagggtctg

SEQ ID NO: 142443 - DNA, 80 bp, synthetic construct
  source 1..80: mol_type = other DNA
tttcgattactgcccgggaacgaccgtcaccatcagcgccagctgtggacatagaggaccttccgtgcgaaccacgaccg

SEQ ID NO: 142444 - DNA, 80 bp, synthetic construct
  source 1..80: mol_type = other DNA
agcttctttgcgagcccgagccagacacggaagtgctagcttccatgctcactgacccgtctcatataacagcagaggct

SEQ ID NO: 142445 - DNA, 80 bp, synthetic construct
  source 1..80: mol_type = other DNA
agttaccaaagacaaaatcactgtttttaactattatccgttggaattttcctgcgctaacgtaaccttgtatttgtata

SEQ ID NO: 142446 - DNA, 80 bp, synthetic construct
  source 1..80: mol_type = other DNA
aggggccaagaaacagacacgccccaaacggtctcggtttccgcgaggaaggtgaagtcctgggacaccctccaccccca

SEQ ID NO: 142447 - DNA, 80 bp, synthetic construct
  source 1..80: mol_type = other DNA
gtaccacagttaatgaacagtttgctctgcatcaaggtaatgatgaaaccaatcaagatgatgaacaaattccatcaact

SEQ ID NO: 142448 - DNA, 80 bp, synthetic construct
  source 1..80: mol_type = other DNA
caaagcccacggtattgaccccaatattagaacaggggtcaggaccatcacgactggggcacccatcacttactctactt

SEQ ID NO: 142449 - DNA, 80 bp, synthetic construct
  source 1..80: mol_type = other DNA
gatatgctgacattataccttattatgtccccataaacgttcaaacagcaggttaaagccaactccaaccaagaaataca

SEQ ID NO: 142450 - DNA, 80 bp, synthetic construct
  source 1..80: mol_type = other DNA
ttcgacgcccgggaccccgtgaggcccggggagttccttctggggtgttttaatcaataaaagaccacaccaacgcacga

SEQ ID NO: 142451 - DNA, 80 bp, synthetic construct
  source 1..80: mol_type = other DNA
ttactctccgggtgaacttaatagagtggcatcctgcctcaggaagcttggggcaccaccgttaagagtctggagacacc

SEQ ID NO: 142452 - DNA, 80 bp, synthetic construct
  source 1..80: mol_type = other DNA
gttcggagccatgctagcaaggccattaaccacatccgctccgtgtgggaggacttgctagaagacaatgtgacacctat

SEQ ID NO: 142453 - DNA, 80 bp, synthetic construct
  source 1..80: mol_type = other DNA
cgcggtctttgtaggtctggtactcctgaccctgtcaccacactataaagtgttcctcgctcggctcatatggtggttac

SEQ ID NO: 142454 - DNA, 80 bp, synthetic construct
  source 1..80: mol_type = other DNA
caagaggctttaaccgctgtgaatggattattgcctgcacctctaacgttagaagacgtagtcgcttctgcagataatac

SEQ ID NO: 142455 - DNA, 80 bp, synthetic construct
  source 1..80: mol_type = other DNA
gccgacatcggttttctcccccgcaataagacacgatgcgataaaatctgtttgtaaaatttattaagggtacaaattgc

SEQ ID NO: 142456 - DNA, 80 bp, synthetic construct
  source 1..80: mol_type = other DNA
cagtccaccgcgcttacgcacatcttcaatcgttttcctgagaatcagatactagtgcgtccgcccgctccgaccattac

SEQ ID NO: 142457 - DNA, 80 bp, synthetic construct
  source 1..80: mol_type = other DNA
acgaggataatgtcaccaatccagaggatatgaggccgtactgctggcactaccccccaaagccgtgtggcgtagtcccc

SEQ ID NO: 142458 - DNA, 80 bp, synthetic construct
  source 1..80: mol_type = other DNA
gggttggtgtatggcaagtatgtccaaatggtcctgctcaggcttggtgccctaaccggcacctacatctatgaccacct

SEQ ID NO: 142459 - DNA, 80 bp, synthetic construct
  source 1..80: mol_type = other DNA
ccgtgcgaagagacaccacagcaaaacagcatattgacacctgggacagactaggagatcttctgctcttcacaaccagc

SEQ ID NO: 142460 - DNA, 80 bp, synthetic construct
  source 1..80: mol_type = other DNA
agcatacacccagcaaaccaggggtcttctcgggactattgtgaccagcttgactggcagggataagaatgtggtgaccg

SEQ ID NO: 142461 - DNA, 80 bp, synthetic construct
  source 1..80: mol_type = other DNA
tgccggtcgagcgcggagacgggccgcggctgcggccgcaacagctattgcaaacctagctgctccgcgacgaggaaacg

SEQ ID NO: 142462 - DNA, 80 bp, synthetic construct
  source 1..80: mol_type = other DNA
tgagatgaagccgtcctttgaaaaatcatccaagtgggcctcgcagtccaaggtcacagtctggtggaatgagaagaacg

SEQ ID NO: 142463 - DNA, 80 bp, synthetic construct
  source 1..80: mol_type = other DNA
aacatggtctacagcaccacgtcacgctctgcgtcacaaagagccaagaaagtgacatttgacagactgcaggttctaga

SEQ ID NO: 142464 - DNA, 80 bp, synthetic construct
  source 1..80: mol_type = other DNA
tagccccttcctggacgggagccatccctccagggctatctataaaagcataaagacattcagccatagcttagcccgct

SEQ ID NO: 142465 - DNA, 80 bp, synthetic construct
  source 1..80: mol_type = other DNA
tacccgtgaccctacaactcccttcgcgagagctgcgtgggagacagcaagacacactccaatcaattcctggctaggca

SEQ ID NO: 142466 - DNA, 80 bp, synthetic construct
  source 1..80: mol_type = other DNA
ttgcacatggactggagcaacatataaatgtcacaataatggaagcattactatttttgctttcaacattacatccggag

SEQ ID NO: 142467 - DNA, 80 bp, synthetic construct
  source 1..80: mol_type = other DNA
tggccaagacgtccaaggcccaggcaaacacgttgtacaggtcgccgttgggggccagcaactcggtggcccgaaacagg

SEQ ID NO: 142468 - DNA, 80 bp, synthetic construct
  source 1..80: mol_type = other DNA
ttggttgccctgttgcagaatggggagaataatagcagcagtcctctgcctaccacccccagtgagcaaattcccagatc

SEQ ID NO: 142469 - DNA, 80 bp, synthetic construct
  source 1..80: mol_type = other DNA
ccgattcgaccacatatgcaaccaaatcacccccagaggggaggttccatttttacgaggaggaggagtataatagagtc

SEQ ID NO: 142470 - DNA, 80 bp, synthetic construct
  source 1..80: mol_type = other DNA
aaaacaatatcagatctccagggtttagttggaaagcttgtagttttaactggagttggaattggtactgagacacttaa

SEQ ID NO: 142471 - DNA, 80 bp, synthetic construct
  source 1..80: mol_type = other DNA
gtggtgggcgtagtatgcgctgccattctgaggcgacacattggccctgctgaggtggctacccagtggatgaacaggct

SEQ ID NO: 142472 - DNA, 80 bp, synthetic construct
  source 1..80: mol_type = other DNA
tgtctggtcccccaggaatgggtgcagcacttctaccaagaggcagctccagcacaatctgatgtggctttgctgagatt

SEQ ID NO: 142473 - DNA, 80 bp, synthetic construct
  source 1..80: mol_type = other DNA
cagtcagctatcagcaccatctctgaaagccacatgcactgcacatccggaccatccggacgcggagctcttggaagcga

SEQ ID NO: 142474 - DNA, 80 bp, synthetic construct
  source 1..80: mol_type = other DNA
aggtctattggcggctaatgaattgggctatttggagagaacaaaagccgacattgcaggccttttcagatatgacaccc

SEQ ID NO: 142475 - DNA, 80 bp, synthetic construct
  source 1..80: mol_type = other DNA
ggaagggaccccaatacgaggaagatgtgaacttgggaagtggaaccagggcggtgggaaaacccctactcaactcagac

SEQ ID NO: 142476 - DNA, 80 bp, synthetic construct
  source 1..80: mol_type = other DNA
tccggtggtccctccccaaacggatcgtcgccgtgaaacgcccgctttcgggcgacgccggccgcccccgccgccgccgc

SEQ ID NO: 142477 - DNA, 80 bp, synthetic construct
  source 1..80: mol_type = other DNA
tcgatgaagacaaactggatacaaactccgtatatgagccttactaccattcagatcatgcggagtcttcatgggtaaat

SEQ ID NO: 142478 - DNA, 80 bp, synthetic construct
  source 1..80: mol_type = other DNA
tgattgcctttgcatccagagggaaccatgttgcccctacccactacgtggcggagtccgacgcctcacagcgcgtaact

SEQ ID NO: 142479 - DNA, 80 bp, synthetic construct
  source 1..80: mol_type = other DNA
ccgggcccgcgcctcctccgcctcgggcgccccccagaggccgtggcggctgtcgcccagcccgccgtacagcacgcgcc

SEQ ID NO: 142480 - DNA, 80 bp, synthetic construct
  source 1..80: mol_type = other DNA
agaacctctccgagctcagctactccatcagaaaaaacaccaccctccttacctgccgggaacgtacgagtgcgtcaccg

SEQ ID NO: 142481 - DNA, 80 bp, synthetic construct
  source 1..80: mol_type = other DNA
tcgccctttggatgatgctgatgatctcccaggcagaagcagcgatggagaatttgatcatgctaaacgccgtctccgtt

SEQ ID NO: 142482 - DNA, 80 bp, synthetic construct
  source 1..80: mol_type = other DNA
ggaagcggaacggggtatgtgatatgctaattaaatacatgccacgtacttatggtgtctgattggtccttgtctgtgcc

SEQ ID NO: 142483 - DNA, 80 bp, synthetic construct
  source 1..80: mol_type = other DNA
cgaggacgccccggacgacgtggcctatccggaggaatacgcagaggagctttttctgcccggggacgcgaccggtcccc

SEQ ID NO: 142484 - DNA, 80 bp, synthetic construct
  source 1..80: mol_type = other DNA
ttctgtgggacgacgtggacagcgatgttttttcacctctttctgatcatcgcgcgtggaaaaaggaaggcggcgataga

SEQ ID NO: 142485 - DNA, 80 bp, synthetic construct
  source 1..80: mol_type = other DNA
tgatggggggagtgtcggcccgtaccacctacgggcttacgtccctctttacaaggtggccgtcccaaaagatccagctc

SEQ ID NO: 142486 - DNA, 80 bp, synthetic construct
  source 1..80: mol_type = other DNA
actgttttagcacgagcggcttgggaaaccgctcgacacactccagtaaactcttggttgggaaacatcatcatgtacgc

SEQ ID NO: 142487 - DNA, 80 bp, synthetic construct
  source 1..80: mol_type = other DNA
tggatgggtgcggccccctacacccgtcgtgggtctcgctgatgccccccaagcaggtgcccgagacggtcgtggatgcg

SEQ ID NO: 142488 - DNA, 80 bp, synthetic construct
  source 1..80: mol_type = other DNA
ccaaattaacccaagacgacattaaacgtattctattaacaatagaatcggagactcgtggtcagggcgacaatgccatt

SEQ ID NO: 142489 - DNA, 80 bp, synthetic construct
  source 1..80: mol_type = other DNA
cataacggcggaagcggcgagccggagactagctcgagggtcaccgccctcattagctagttcctcggcgagccagctgt

SEQ ID NO: 142490 - DNA, 80 bp, synthetic construct
  source 1..80: mol_type = other DNA
gatcagtgaccacacctcactccaacatcgaggagatcgccttgtccacgacgggggaagtacccttctacgggaaagct

SEQ ID NO: 142491 - DNA, 80 bp, synthetic construct
  source 1..80: mol_type = other DNA
tgatagaggctggggcaatggctgtggcctatttgggaaagggagcattgtggcatgcgccaaattcacttgtgccaaat

SEQ ID NO: 142492 - DNA, 80 bp, synthetic construct
  source 1..80: mol_type = other DNA
catggtaatgatgacacacttcttctccatactccaatcccaggagatacttgatcgaccccttgactttgaaatgtacg

SEQ ID NO: 142493 - DNA, 80 bp, synthetic construct
  source 1..80: mol_type = other DNA
cgcagaaacagatgacagggaaatgtctgtggccgctgagtgccataggcctcccaggcctacttttccacctgcgctgc

SEQ ID NO: 142494 - DNA, 80 bp, synthetic construct
  source 1..80: mol_type = other DNA
accataggggtaggcatctttctgctgccagcccgataggctggtagctaacactccataacactcccttttcccgtgtt

SEQ ID NO: 142495 - DNA, 80 bp, synthetic construct
  source 1..80: mol_type = other DNA
gagtggatgcaggacaaaacccccattacaagctgggcggacgtgccctactcaggaaaaagagaagacatatggtgtgg

SEQ ID NO: 142496 - DNA, 80 bp, synthetic construct
  source 1..80: mol_type = other DNA
tcagggggtcggaggggcgtcagggggtcggaggggcgtcagagggtcggaaggtaggcgtaccttcccgctcggctcgt

SEQ ID NO: 142497 - DNA, 80 bp, synthetic construct
  source 1..80: mol_type = other DNA
tcaaggccaggcaactgtccttagaggaagcttgtgtgttaacaccaccccattccgcccgttccaaatacggatatggc

SEQ ID NO: 142498 - DNA, 80 bp, synthetic construct
  source 1..80: mol_type = other DNA
tctttcgtgcctcaccacccctgcatcagcgatccatgttaggaacgcatcaggaatctaccatcttaccaatgactgcc

SEQ ID NO: 142499 - DNA, 80 bp, synthetic construct
  source 1..80: mol_type = other DNA
gcccatttttgcaccaggggggtcctgagcgggacgtatctgcgtcaggtgcacggcctgatggagccggccccgactca

SEQ ID NO: 142500 - DNA, 80 bp, synthetic construct
  source 1..80: mol_type = other DNA
ggtgttgatgacccatttcttccagatactccaagcgcaggagcaattggatagggtacttgacttcgacatatacggag

SEQ ID NO: 142501 - DNA, 80 bp, synthetic construct
  source 1..80: mol_type = other DNA
catttcctctcacaggctaaacaaggaggggagaactttgcatatctcgtggcctaccaggccacggtgtgcgcgcgcgc

SEQ ID NO: 142502 - DNA, 80 bp, synthetic construct
  source 1..80: mol_type = other DNA
ctgtccccccgcggctctcggcctagctggggccccacagacccccggcgtaggtcgcgcaatttgggtaaggtcatcga

SEQ ID NO: 142503 - DNA, 80 bp, synthetic construct
  source 1..80: mol_type = other DNA
ggcgtatcttctaacccgtttaactcaccgaacagagacctatatgaaagtgattttagtgaaccttctgacggctatag

SEQ ID NO: 142504 - DNA, 80 bp, synthetic construct
  source 1..80: mol_type = other DNA
atgtgctgtcaaccatagaggtgtgtgcacaccgttgcatttttgatttttttaaacaaatacgatcagatgataacagc

SEQ ID NO: 142505 - DNA, 80 bp, synthetic construct
  source 1..80: mol_type = other DNA
gtcccattgcgcgtcgatacacaagcggctgccatttacgaatataactggccgactatcccaccccactgtgcggttcc

SEQ ID NO: 142506 - DNA, 80 bp, synthetic construct
  source 1..80: mol_type = other DNA
acagtgccacgtggggttatcgacaaggacagtctgccaacactaacgtttccaatgctgtagaatttatgcctagctct

SEQ ID NO: 142507 - DNA, 80 bp, synthetic construct
  source 1..80: mol_type = other DNA
gtcactgtacgctgtgacaacagcggtcctcactccactgctaaagcatttgatcacgtcagattacatcaacacctcat

SEQ ID NO: 142508 - DNA, 80 bp, synthetic construct
  source 1..80: mol_type = other DNA
tcgatgcggaaacaaatttgattgccggacagactgcgagggctgcatcagggctctcgagtttctttaatctagggcct

SEQ ID NO: 142509 - DNA, 80 bp, synthetic construct
  source 1..80: mol_type = other DNA
ggagaggtccaggtgctgtcttccgttacacagtcttttttgggcactaacatctctggggttctatggaccgttttcca

SEQ ID NO: 142510 - DNA, 80 bp, synthetic construct
  source 1..80: mol_type = other DNA
gcccgtcgcaggggcggccctggccgcgcctgttgtagggcagcataatgttattgacccctggattagaaataattttg

SEQ ID NO: 142511 - DNA, 80 bp, synthetic construct
  source 1..80: mol_type = other DNA
ttgcaatgttacatttaaatccgaagctaatgaatgcaccactcttataaaatgcaccacagaacatgaaaagcttatta

SEQ ID NO: 142512 - DNA, 80 bp, synthetic construct
  source 1..80: mol_type = other DNA
tacaccggaattgccaggaagaccgggtcctttcttggattaccccgctctatgcctggagatttgggcgtgcccccgcg

SEQ ID NO: 142513 - DNA, 80 bp, synthetic construct
  source 1..80: mol_type = other DNA
ccccgcggcgcagcagcgcgggggccgagggaggtttctcgtctctccccagcgccggacgcggacgcgacgctcccacc

SEQ ID NO: 142514 - DNA, 80 bp, synthetic construct
  source 1..80: mol_type = other DNA
gtaactccgcgaacaggtgttaaacgcgaaggtgaagatttgtatcccactatgcaactgatggtgcccaaacgccagaa

SEQ ID NO: 142515 - DNA, 80 bp, synthetic construct
  source 1..80: mol_type = other DNA
aacacaccaggcctgcccgtgtgtcaggaccatctggagttctgggaggcagtcttcaccggcctcacacacatagatgc

SEQ ID NO: 142516 - DNA, 80 bp, synthetic construct
  source 1..80: mol_type = other DNA
tacaccttccggggtgtgtgccttgtgtcagagtagacaacaaaacccaatgctggctttctgtttcaccaaccttggca

SEQ ID NO: 142517 - DNA, 80 bp, synthetic construct
  source 1..80: mol_type = other DNA
gtttttccgctttccaccgccgccgccaccccccccttccttcgcccgcccgcctcgccccggacccctccgccccgtgt

SEQ ID NO: 142518 - DNA, 80 bp, synthetic construct
  source 1..80: mol_type = other DNA
ctcagtggcttaataagggagatgaagaggatggggaagacgaccaacaagctacatacacttttggcaatgcgccagta

SEQ ID NO: 142519 - DNA, 80 bp, synthetic construct
  source 1..80: mol_type = other DNA
tggaagggttcttaaaaagactactcccatgaaaccatgctatggctcctatgccagacctaccaattctaacggaggtc

SEQ ID NO: 142520 - DNA, 80 bp, synthetic construct
  source 1..80: mol_type = other DNA
tgtggacctgatggtgggcgctgctgcgttttgttcagctatgtatgtaggtgacttgtgtggtggtgtctttctagtcg

SEQ ID NO: 142521 - DNA, 80 bp, synthetic construct
  source 1..80: mol_type = other DNA
attttctggtgtgcggcgatgatctggtggtggtggcggaaagcgatggcattgatgaagatcgtgcggcgctgcgtgcg

SEQ ID NO: 142522 - DNA, 80 bp, synthetic construct
  source 1..80: mol_type = other DNA
tggacctcccagccataattgaacggttgcatgggcttgacgccttctctctgcacacatactctcccaccgaactcacc

SEQ ID NO: 142523 - DNA, 80 bp, synthetic construct
  source 1..80: mol_type = other DNA
agggacgttcgacaccgtcatcctctgcgaggcctatgacaccggatgttcgtggtatgagctgacaccttcagaaacca

SEQ ID NO: 142524 - DNA, 80 bp, synthetic construct
  source 1..80: mol_type = other DNA
agaaaatggtgctttgatggacagcgcaacaatcaaattttagaggaaaacatggacgtggaaatctggacaaaggaagg

SEQ ID NO: 142525 - DNA, 80 bp, synthetic construct
  source 1..80: mol_type = other DNA
agtggagccaatagcttcatcatttgcccaatcggtgacttccaatgcaaagtcatccgaaggttcgtctggtagcaaat

SEQ ID NO: 142526 - DNA, 80 bp, synthetic construct
  source 1..80: mol_type = other DNA
caaggagcccggggatgaacagtggcaatgcaggatccagcgctcgtacccgctcaccatctgagctctcaccaagtcca

SEQ ID NO: 142527 - DNA, 80 bp, synthetic construct
  source 1..80: mol_type = other DNA
ttgacttcgcacaggcgggtaagagcaggctggaggtgcaggtaatacttaatttctagaggcgtgccgttggcagagtc

SEQ ID NO: 142528 - DNA, 80 bp, synthetic construct
  source 1..80: mol_type = other DNA
cacttctaatcttgagcatggtgattttggctggaggggtgacactcgtccggaaaaatcgatggctactcttgaatgtc

SEQ ID NO: 142529 - DNA, 80 bp, synthetic construct
  source 1..80: mol_type = other DNA
tggccatctgcacgccaaacagttcgccccagattatcttgaacagcgccaccgcgtggtccgtctcactaacggacccg

SEQ ID NO: 142530 - DNA, 80 bp, synthetic construct
  source 1..80: mol_type = other DNA
cgctgctattaccatcttcacactgactccagcatacaagacgatgcttgtgcatttcttgtggtggaatcagtatttca

SEQ ID NO: 142531 - DNA, 80 bp, synthetic construct
  source 1..80: mol_type = other DNA
gctatgatccagatgtcaggatcattgagaatcacggtgtggaggacgaacttccaaattattgcttcccattggatggt

SEQ ID NO: 142532 - DNA, 80 bp, synthetic construct
  source 1..80: mol_type = other DNA
gatgtactccagtgctgaggtggacttggtagggtggcctagcccccctgggactaaatctttggaaccgtgcacgtgtg

SEQ ID NO: 142533 - DNA, 80 bp, synthetic construct
  source 1..80: mol_type = other DNA
ttttagctgctaatgaagggttagaattagatccgcctttggacacttttgatactccaggggtaattgtggaaagcggt

SEQ ID NO: 142534 - DNA, 80 bp, synthetic construct
  source 1..80: mol_type = other DNA
ttcccaactgtcatacttgacagatttacaaatagcaaacttcctccaaaccttaaatggaatatcagattcttcctccc

SEQ ID NO: 142535 - DNA, 80 bp, synthetic construct
  source 1..80: mol_type = other DNA
ggattaccctatgccgtgtgcatccacatggcttagagagatttgggactgggtgtgtactgtactatctgacttcaaaa

SEQ ID NO: 142536 - DNA, 80 bp, synthetic construct
  source 1..80: mol_type = other DNA
ccatatgacacggaaaccggccctccaactgtgcctttccttacccctccctttgtgtcgccaaatgggttccaagaaag

SEQ ID NO: 142537 - DNA, 80 bp, synthetic construct
  source 1..80: mol_type = other DNA
gggccttaacgctgtcgcgtattacagaggtcttgacgtctccgttataccacctcaaggagacgtggtggttgtcgcca

SEQ ID NO: 142538 - DNA, 80 bp, synthetic construct
  source 1..80: mol_type = other DNA
tggtggaaccagtataccatcgcaagatgcgaggcatctctgcatgtctgggtcccccccctcctcgcgagaggagggag

SEQ ID NO: 142539 - DNA, 80 bp, synthetic construct
  source 1..80: mol_type = other DNA
aacctgatcatagcactgagtcttcagaacacgacagggatgatggggttgcatctgaagctgaatcctacagctctatg

SEQ ID NO: 142540 - DNA, 80 bp, synthetic construct
  source 1..80: mol_type = other DNA
gagccggcgtggctggcgctgtcgtcaccttcaagatcatgagtggcgaggtaccatcatcagaggacttggttaacctc

SEQ ID NO: 142541 - DNA, 80 bp, synthetic construct
  source 1..80: mol_type = other DNA
ctccttggcctactcctactttgcgtaggggtaggcattttcctactccccgctcggtagagcggcacacactagcctac

SEQ ID NO: 142542 - DNA, 80 bp, synthetic construct
  source 1..80: mol_type = other DNA
gagacggtgggaaagcaaggacacggcccgggaggtgcgagcgcgggccgggccgctcgtaagagccgcgacccgtccgc

SEQ ID NO: 142543 - DNA, 80 bp, synthetic construct
  source 1..80: mol_type = other DNA
gggggagatctatcagtgttgtgacctggaacccgaggcccgcaaggtaatagaagccctcacggagagactctatgtgg

SEQ ID NO: 142544 - DNA, 80 bp, synthetic construct
  source 1..80: mol_type = other DNA
aatggcaatgggggattcgggggcgggagaccttcgatggggttgcatttataaaaccaaaaaaagggggggcctgtgtt

SEQ ID NO: 142545 - DNA, 80 bp, synthetic construct
  source 1..80: mol_type = other DNA
gaagtccccgaaaatcgccggtccattgatacaatcgctgtctagccaagttccaatttactcctgtaatttcgccaata

SEQ ID NO: 142546 - DNA, 80 bp, synthetic construct
  source 1..80: mol_type = other DNA
cttaaaaagcctgtgatttcatttaccaccccagcacttggattacatgaagatctgtgttcttttttgtgtgctaagtt

SEQ ID NO: 142547 - DNA, 80 bp, synthetic construct
  source 1..80: mol_type = other DNA
agctgccttgtgaacccgagccggacgtagctgtactaacgtctatgctcacagacccatcacacatcaccgcagagact

SEQ ID NO: 142548 - DNA, 80 bp, synthetic construct
  source 1..80: mol_type = other DNA
acgccacaccttcgtgcagaattgcaattgctccatctacccgggccacatcacaggtcaccgcatggcctgggatatga

SEQ ID NO: 142549 - DNA, 80 bp, synthetic construct
  source 1..80: mol_type = other DNA
atccctacgaccatcatggcaaaaaatgaggttttctgcgtcgacgcctctaagggcggccgcaagcccgctaggctgat

SEQ ID NO: 142550 - DNA, 80 bp, synthetic construct
  source 1..80: mol_type = other DNA
gagcctggagacatcgggccagggcggtcagagctaaacttatcgcgcaggtggggaaggccgctgagtgcggcatgtac

SEQ ID NO: 142551 - DNA, 80 bp, synthetic construct
  source 1..80: mol_type = other DNA
gatttcttcttggttttggcagggggggccgagcgtttcgttttctcccccgaagtcaggtcttcgacgctggaaggcgt

SEQ ID NO: 142552 - DNA, 80 bp, synthetic construct
  source 1..80: mol_type = other DNA
gcggccccatgtataacagcaagggggacctatgcgggtaccgcaggtgccgcgcaagcggcgtattcaccaccagcttc

SEQ ID NO: 142553 - DNA, 80 bp, synthetic construct
  source 1..80: mol_type = other DNA
aataacacacccatacctactacaataatggccaaaaatgaggtgttctgtgtggagccctcaaagggtgggcggaagcc

SEQ ID NO: 142554 - DNA, 80 bp, synthetic construct
  source 1..80: mol_type = other DNA
tattgaatttttacaccagcacgggtagtcagtctcccaccaccagcccatttcacagtataaacaattctctcagcacg

SEQ ID NO: 142555 - DNA, 80 bp, synthetic construct
  source 1..80: mol_type = other DNA
tggtcctaagtcactgtcacagcataccgtgctgcgcgtagctacatcgcgactatggagccctcgcaggctgcaaactg

SEQ ID NO: 142556 - DNA, 80 bp, synthetic construct
  source 1..80: mol_type = other DNA
tctggctggagcaattccagtgtcgttcacgagtaacactgtgaaattgacttcaggacacctgaaatgtagagtgaaga

SEQ ID NO: 142557 - DNA, 80 bp, synthetic construct
  source 1..80: mol_type = other DNA
tcccgggccgtacgcggccttcgccccgtgaggggccgaacgaacgaaacatcccggcgacggaacgaaaaacaccccag

SEQ ID NO: 142558 - DNA, 80 bp, synthetic construct
  source 1..80: mol_type = other DNA
aggaactaccagacaccatagaaacattgatgcttctagctttgatagctgtgttgactggtggagtgacgctgttcttc

SEQ ID NO: 142559 - DNA, 80 bp, synthetic construct
  source 1..80: mol_type = other DNA
agtactgtctgcgttagagccccaggaggactgggaaaacaaaggtgcaacaacgccccacgcggccacaaccctggcaa

SEQ ID NO: 142560 - DNA, 80 bp, synthetic construct
  source 1..80: mol_type = other DNA
cctacgtagtggggtcacagttgccctgtgagccggagccggatgagctagtggtaacatccctcttgatggaccccagc

SEQ ID NO: 142561 - DNA, 80 bp, synthetic construct
  source 1..80: mol_type = other DNA
agcagcgacacgggcggtgtggtagcgtcgatgtgtagcgcgagggaggatgcccacgaagacaccccagacaaggagct

SEQ ID NO: 142562 - DNA, 80 bp, synthetic construct
  source 1..80: mol_type = other DNA
atcgcgcgtgccgcgagctccggcccgggaatccggccggggcaaggtccccggtggaccaggcggcgccaggtgccgcc

SEQ ID NO: 142563 - DNA, 80 bp, synthetic construct
  source 1..80: mol_type = other DNA
attcaacaagtgtgattttgttttccagcatggtagctgcatttctacttctcctctgtctacccatcattttcgtctct

SEQ ID NO: 142564 - DNA, 80 bp, synthetic construct
  source 1..80: mol_type = other DNA
gccgcggtcatagtgatcatcaccatcttcactcttaccccgacatacaagacactgctggtccaacttgtttggtggat

SEQ ID NO: 142565 - DNA, 80 bp, synthetic construct
  source 1..80: mol_type = other DNA
cctgggctctatgaggatcacagggcctaaaacctgcatgaacacctggcaggggacctttcctatcaattgctacacgg

SEQ ID NO: 142566 - DNA, 80 bp, synthetic construct
  source 1..80: mol_type = other DNA
aaccataccacctgcccatgcggagctaacatcacaggacatgtcaagaacgggtcaatgaggctcgtcggccctcggac

SEQ ID NO: 142567 - DNA, 80 bp, synthetic construct
  source 1..80: mol_type = other DNA
tggatgaagagagagagagacacctcgctgggagatgcgctcactgtgtgtataacatgatgggcaagagagaaaagaag

SEQ ID NO: 142568 - DNA, 80 bp, synthetic construct
  source 1..80: mol_type = other DNA
acacggggtcgtggccccccgcgctaacccggcagtcgcgatggcggtccagggccgcgcgccgcatcagggcgtcacag

SEQ ID NO: 142569 - DNA, 80 bp, synthetic construct
  source 1..80: mol_type = other DNA
ccggagcccactggggagtcctagcgggcctggcctactactccatggcaggcaattgggcgaaagcggtgatagtgctg

SEQ ID NO: 142570 - DNA, 80 bp, synthetic construct
  source 1..80: mol_type = other DNA
gacagtgagtcgtccagcagtgcggcctgttgccgtggctagcttacgaaacccacgatccagtaattggcaaagtaccc

SEQ ID NO: 142571 - DNA, 80 bp, synthetic construct
  source 1..80: mol_type = other DNA
tgtcgcctggagccctagtggtaggtgtggtatgcgctgcaatattgcggcgccatgctggacctagtgagggagcaact

SEQ ID NO: 142572 - DNA, 80 bp, synthetic construct
  source 1..80: mol_type = other DNA
cggtgacagcggcaacacttctgttctgccactatgcctacatggttccaggatggcaggccgaggcaatgcgctcagcc

SEQ ID NO: 142573 - DNA, 80 bp, synthetic construct
  source 1..80: mol_type = other DNA
cagcattaaagccggaaatgacatagcaaattgcctgcggaaaaacgggaaaaaggtcattcaacttagtaggaagactt

SEQ ID NO: 142574 - DNA, 80 bp, synthetic construct
  source 1..80: mol_type = other DNA
gcagtgagtgcccgctagagagaaggaaaacaggtgtcttcacggtggcagagtttggagttggcctgagaacaaaagta

SEQ ID NO: 142575 - DNA, 80 bp, synthetic construct
  source 1..80: mol_type = other DNA
actttttgtgaataacactttccagggaatatattatggcattagaaatgatggtagaggtatgaaacaaattcaactaa

SEQ ID NO: 142576 - DNA, 80 bp, synthetic construct
  source 1..80: mol_type = other DNA
ggtatggatgatggcggagcgaggtcgattgttcctcggtgctcattgtagtgcaccctctttcgtaccttgtcgtactt

SEQ ID NO: 142577 - DNA, 80 bp, synthetic construct
  source 1..80: mol_type = other DNA
gcagctctggaaatcatggtattgaccaaaaatcctaaaatgcgagaattggcacaggatctcgccaaagatctttccag

SEQ ID NO: 142578 - DNA, 80 bp, synthetic construct
  source 1..80: mol_type = other DNA
gtgcctgcgcctgaattcttcactgaggtcgatggcgtgaggatacaccgttacgcgccaccttgcaagcccttgctcag

SEQ ID NO: 142579 - DNA, 80 bp, synthetic construct
  source 1..80: mol_type = other DNA
ggcgacgcagggacaggactccgttacgacggaggagagccacagtgcgttggcggaatcgatgtggtgcggcgaggcgc

SEQ ID NO: 142580 - DNA, 80 bp, synthetic construct
  source 1..80: mol_type = other DNA
tggtggacaacttttttaacgaggtacccagtgatgatgatctttatgttccgtctctttacgaactgtatgatcttgat

SEQ ID NO: 142581 - DNA, 80 bp, synthetic construct
  source 1..80: mol_type = other DNA
atattctccaggcgaactcaatcgggtggcagcatgcctcaggaaacttggggcacctccattgagagcctggcgacatc

SEQ ID NO: 142582 - DNA, 80 bp, synthetic construct
  source 1..80: mol_type = other DNA
ggaatggatccctttgccgagaaacccaacgctactgataccccaatagaagaaattggcgactcacaaaacactgaacc

SEQ ID NO: 142583 - DNA, 80 bp, synthetic construct
  source 1..80: mol_type = other DNA
cctagctctgatggccacttttaaaatgagaccaatgtttgctgtaggactattattccgcagactaacatccagagaag

SEQ ID NO: 142584 - DNA, 80 bp, synthetic construct
  source 1..80: mol_type = other DNA
tctggtaccaatgctgcctaccaaggtgtaaaggttcaagatggtgaagacggggataaagaaactgaatgggaaaaaga

SEQ ID NO: 142585 - DNA, 80 bp, synthetic construct
  source 1..80: mol_type = other DNA
tcgcgcctcaatgtcagctgcaaaaagtcacttaagtcctgggccactacagctgacaattcagagccagggctaagcgt

SEQ ID NO: 142586 - DNA, 80 bp, synthetic construct
  source 1..80: mol_type = other DNA
ccggcgggagggacgtgattcacagcacgcccggggcccgtccccgctatttactcctttgcctactcctacttacggta

SEQ ID NO: 142587 - DNA, 80 bp, synthetic construct
  source 1..80: mol_type = other DNA
actgaaaaagactccaaacttactttagtccttactaaatgcggatctcaaattctagcaagtgtgtctttgcttgctgt

SEQ ID NO: 142588 - DNA, 80 bp, synthetic construct
  source 1..80: mol_type = other DNA
aatagcagcattgtgtacgaggcggaaactatggtgctccacttgcccggttgcgttccctgcgttcgcgctgggaacgt

SEQ ID NO: 142589 - DNA, 80 bp, synthetic construct
  source 1..80: mol_type = other DNA
cctaaagtcatgacggcggtcatggaccagttactcattaagcgcgcaagtcccctttcagaagacatgcatgacccaga

SEQ ID NO: 142590 - DNA, 80 bp, synthetic construct
  source 1..80: mol_type = other DNA
tcagctggcaaccgcgccgccattggaccacccaggactgcaactgctccatctataccggacacatcacaggccacagg

SEQ ID NO: 142591 - DNA, 80 bp, synthetic construct
  source 1..80: mol_type = other DNA
ggggacgacgggccgcaccctctacggcgttacgagcgtcttttcgcccggggcgtcccaaaacatccagcttataaaca

SEQ ID NO: 142592 - DNA, 80 bp, synthetic construct
  source 1..80: mol_type = other DNA
accaaacgcggagcgggccgtggcgctccttttggccctgcggcaccccaccgacctcccccacctggcccgccatcggg

SEQ ID NO: 142593 - DNA, 80 bp, synthetic construct
  source 1..80: mol_type = other DNA
accgtgtgtggccccgtatactgctttacacccagccctgtggtagtcgggacaaccgatcgccgtggggctccgacata

SEQ ID NO: 142594 - DNA, 80 bp, synthetic construct
  source 1..80: mol_type = other DNA
gttacagacgttgccgcgccagcggggtgctaaccactagcatgggtaacaccatcacatgctatgtgaaagccctagcg

SEQ ID NO: 142595 - DNA, 80 bp, synthetic construct
  source 1..80: mol_type = other DNA
atatgctctgctgttcccgtgagctgggttcccatgggccgtaccacgtggagtatccatgcgagtggtgaatggatgac

SEQ ID NO: 142596 - DNA, 80 bp, synthetic construct
  source 1..80: mol_type = other DNA
catgcgctgggacatggttgagagacgtgtgggattgggtttgctcgacgctagtggacttcaagaactggttgcaggcc

SEQ ID NO: 142597 - DNA, 80 bp, synthetic construct
  source 1..80: mol_type = other DNA
aacgtaacgggcccttccacggataggccctattgttggcactacgcccccagacaatgtgacatcgttccagcgcgaaa

SEQ ID NO: 142598 - DNA, 80 bp, synthetic construct
  source 1..80: mol_type = other DNA
ctcccgctgggactcaacacaacagagagcggtgttagctgcagccctagaaataatggtaaaattctcaccagaaccac

SEQ ID NO: 142599 - DNA, 80 bp, synthetic construct
  source 1..80: mol_type = other DNA
atacacactagaaagcagttcactagcctccacgccaccacccacaccgcctccccgcagaaatcagttccccatgattc

SEQ ID NO: 142600 - DNA, 80 bp, synthetic construct
  source 1..80: mol_type = other DNA
aaaacctgactttactgtcagttggctatggccatagaggtgattactatggttataggcatgataacacagacagagaa

SEQ ID NO: 142601 - DNA, 80 bp, synthetic construct
  source 1..80: mol_type = other DNA
ctgtgctgtattacagcatggctgccaattgggcgaaggtcctcctagtgttgctcctgttcgcgggagcagacgctacc

SEQ ID NO: 142602 - DNA, 80 bp, synthetic construct
  source 1..80: mol_type = other DNA
ggctgatgggggctgctccggaggcgcgtatgatatcatcatatgcgatgagtgtcattctacagaccccacaacggtcc

SEQ ID NO: 142603 - DNA, 80 bp, synthetic construct
  source 1..80: mol_type = other DNA
ggaagtcggggcccgggccccgccccctgcccgttcctcgttagcatgcggaacggaagcggaaaccgccggatcgggcg

SEQ ID NO: 142604 - DNA, 80 bp, synthetic construct
  source 1..80: mol_type = other DNA
gcacctaccttgcgccagggacagccctaccccgccaacttcccctacccgcttatcggacagaccgccgtgccctccgt

SEQ ID NO: 142605 - DNA, 80 bp, synthetic construct
  source 1..80: mol_type = other DNA
ggccgggattcccgttctagaacaccacggcagtcaccagcccccacccagggaccccaccgagcggcaggtgatcgagg

SEQ ID NO: 142606 - DNA, 80 bp, synthetic construct
  source 1..80: mol_type = other DNA
cgcttatatgattccaggatggcaggctgaagcgatgcgatcggcacaacgcaggacagcagctgggatcatgaagaatg

SEQ ID NO: 142607 - DNA, 80 bp, synthetic construct
  source 1..80: mol_type = other DNA
gccccgcgaggccgacgcagggtccgaagctgagtcgtactcctccatgccccccctagaggtggagcctggggatcccg

SEQ ID NO: 142608 - DNA, 80 bp, synthetic construct
  source 1..80: mol_type = other DNA
aagtcgagcttcgggcaatgtggtacactcagtgaacatgaccagccaggtgcttctgggaagaatggagaaaaggacct

SEQ ID NO: 142609 - DNA, 80 bp, synthetic construct
  source 1..80: mol_type = other DNA
gcgcttgccctcggtgcagtcgagcaggcgggcgcagtccttccagttcatcagggcggtggtgagtgagggttgcgttc

SEQ ID NO: 142610 - DNA, 80 bp, synthetic construct
  source 1..80: mol_type = other DNA
aggccatcgtatggcttgggacatgatgatgaattggtcccctgccttaacaatggtaatgtcccaagtgctgcgcttac

SEQ ID NO: 142611 - DNA, 80 bp, synthetic construct
  source 1..80: mol_type = other DNA
ccttgactaccggcctcatccacctccacccaaaaaccgtggacgtgcaatatttgtacggggtggggtcaagcattgtg

SEQ ID NO: 142612 - DNA, 80 bp, synthetic construct
  source 1..80: mol_type = other DNA
ccagctggctttgagccagaaatgctcaggaagaagcaaataaccgttcttgacctccatccaggggctggaaagacacg

SEQ ID NO: 142613 - DNA, 80 bp, synthetic construct
  source 1..80: mol_type = other DNA
gttccctcacccgctgccactcaaaaagccgcactgtccgaaggagtgtacaggatcatgcaaagagggttactcgggaa

SEQ ID NO: 142614 - DNA, 80 bp, synthetic construct
  source 1..80: mol_type = other DNA
cactggggcgagaggcggtaggtttgcttgtacagctcgatggtgcggcagaccagacagggccggtccagcgcgaaggt

SEQ ID NO: 142615 - DNA, 80 bp, synthetic construct
  source 1..80: mol_type = other DNA
gctagtccccgtcctgccgcgcgggtgcgtgcgcgggaaaaaaggcgcgcgcggtcgggcgcgggcaagcggccccgcgg

SEQ ID NO: 142616 - DNA, 80 bp, synthetic construct
  source 1..80: mol_type = other DNA
cggacggaggttgcgggggaggagcatatgacatcataatctgtgatgagtgccactctacagatgccacaacgatccta

SEQ ID NO: 142617 - DNA, 80 bp, synthetic construct
  source 1..80: mol_type = other DNA
tgagacagatgtcttcttgctgaacagcactaggcccccccaaggggcctggtttggctgtacttggatgaacggaacgg

SEQ ID NO: 142618 - DNA, 80 bp, synthetic construct
  source 1..80: mol_type = other DNA
atgcttatcttgttgggccaggctgaggccgcattggaaaagttgatcatcgtccatgctgctagcgctgctagctgcaa

SEQ ID NO: 142619 - DNA, 80 bp, synthetic construct
  source 1..80: mol_type = other DNA
ggagaagaaagtcatcacttggggcgccgacaccgccgcgtgcggtgacatcatcgaaggccttcccgtctcagctaggc

SEQ ID NO: 142620 - DNA, 80 bp, synthetic construct
  source 1..80: mol_type = other DNA
gtggatgaacgccacggggtatgtcaagacatgtggcgcccctccctgtcacatctatggagggcatggaggctcgctca

SEQ ID NO: 142621 - DNA, 80 bp, synthetic construct
  source 1..80: mol_type = other DNA
catttttgcgggccatctgaaatgccgcctgaaaatggaaaccgataaactggaactgaaaggcatggaaaccagctatg

SEQ ID NO: 142622 - DNA, 80 bp, synthetic construct
  source 1..80: mol_type = other DNA
accgccccgtttagccgttcaccccgcagccaatcaccgcacagcgcgcacttttttaaattacctcatttgcatattgg

SEQ ID NO: 142623 - DNA, 80 bp, synthetic construct
  source 1..80: mol_type = other DNA
ctcttgtggaggcaggaaatggggggaaacatcacgagggtggagtcagaaaataagatcgtcattttagactccttcga

SEQ ID NO: 142624 - DNA, 80 bp, synthetic construct
  source 1..80: mol_type = other DNA
ccagcatacaagagcctccttatatccacgctgtggtggatccagtacttcatcgcgcgtgctgaggctatgttgcacat

SEQ ID NO: 142625 - DNA, 80 bp, synthetic construct
  source 1..80: mol_type = other DNA
tggagggcggtgtggctcagacagagcctgagtccagggtgcccgttctggactttctcgagccaatggccgaggaagag

SEQ ID NO: 142626 - DNA, 80 bp, synthetic construct
  source 1..80: mol_type = other DNA
ccttgagatgtggtcgtcaaagaagacccccttggggttttcatacgacactcgttgctttgactccactgtcaccgaac

SEQ ID NO: 142627 - DNA, 80 bp, synthetic construct
  source 1..80: mol_type = other DNA
ggcccgaagacctgtagtaacacctggcaagggactttccccatcaacgcctacaccacgggtcccggcgtgcccgtccc

SEQ ID NO: 142628 - DNA, 80 bp, synthetic construct
  source 1..80: mol_type = other DNA
ccaagggtggaaagcggctatatgcggtaggtacctctttaattgggcggtgaagaccaaactaaaactcactccactgg

SEQ ID NO: 142629 - DNA, 80 bp, synthetic construct
  source 1..80: mol_type = other DNA
tgtttgatgtatgacgtcacatccaggccggcggaaaccggaacggcatatgcaaattggaaactgtcctgtcttggggc

SEQ ID NO: 142630 - DNA, 80 bp, synthetic construct
  source 1..80: mol_type = other DNA
agcggggggggctgccctttgctccgcgttatacgtcggagacgcgtgcgtggcagtgtttttggtaggtcaaatgttca

SEQ ID NO: 142631 - DNA, 80 bp, synthetic construct
  source 1..80: mol_type = other DNA
aatcgcttgacattgtcgcccggtcccccagcttcactgacaatggcacgcccccagcagtgcctcagacctaccaggta

SEQ ID NO: 142632 - DNA, 80 bp, synthetic construct
  source 1..80: mol_type = other DNA
cccggggctctcgcccttcatggggccccactgacccccggcataggtcgcggaatttgggtaaggtcatcgataccctt

SEQ ID NO: 142633 - DNA, 80 bp, synthetic construct
  source 1..80: mol_type = other DNA
cgcgctcctgtgggtgatcgctcaactgtctccagtctgttaacgccaaattctcgattattattgttgttaattgcccc

SEQ ID NO: 142634 - DNA, 80 bp, synthetic construct
  source 1..80: mol_type = other DNA
cgatggcgggactgtgggttgtcttgtgctaattgttcttacaatctttacacttacccctgggtacaaaaagaaggtag

SEQ ID NO: 142635 - DNA, 80 bp, synthetic construct
  source 1..80: mol_type = other DNA
gacagcctaaccgccccctctgagttcgccaccaccgcctccaccgatgccgccaacgcgcctaccaccttccccgtcga

SEQ ID NO: 142636 - DNA, 80 bp, synthetic construct
  source 1..80: mol_type = other DNA
cactattgattgtaaaaggtaaattccaaattttagatcataaggccaacactggccttagtaaagcttttgcaattaag

SEQ ID NO: 142637 - DNA, 80 bp, synthetic construct
  source 1..80: mol_type = other DNA
ggtggccacggacgtaccagagctggaaagaaccacgcccatcatgcagaagaaagtagggcaagtgatcctgatactgg

SEQ ID NO: 142638 - DNA, 80 bp, synthetic construct
  source 1..80: mol_type = other DNA
cgcccgactcggccaggagatcctcctcggcccagctgatggctacacctccaaggggtggaagctccttgctcccatca

SEQ ID NO: 142639 - DNA, 80 bp, synthetic construct
  source 1..80: mol_type = other DNA
accacggtgggctcgtccgtgtccagcaacgcctacaccctcgcgacgctcttcacccgtgggccaagccaaaacttgat

SEQ ID NO: 142640 - DNA, 80 bp, synthetic construct
  source 1..80: mol_type = other DNA
ttactttaagcgctgcggggaccagccgacgtatcgcggttttgcggtcgtcgtcctcacggccaacgaggaccacgtgc

SEQ ID NO: 142641 - DNA, 80 bp, synthetic construct
  source 1..80: mol_type = other DNA
tgcccatcaccagcgccgtgacgaggttggccccgttcaagaccatctcgccgtaggtcaccggcacgtcggcctcggtg

SEQ ID NO: 142642 - DNA, 80 bp, synthetic construct
  source 1..80: mol_type = other DNA
aggaatgcgcctctagggcggctctcatcgaagaggggcagcggatagccgagatgttgaagtccaagatccaaggcttg

SEQ ID NO: 142643 - DNA, 80 bp, synthetic construct
  source 1..80: mol_type = other DNA
atgccgcctcttgagggcgagccaggagaccctgatcttagctcagggtcttggtccacggttagtgacgaggacgagag

SEQ ID NO: 142644 - DNA, 80 bp, synthetic construct
  source 1..80: mol_type = other DNA
tgtagtgggtgttatctgcgcagctatcttgcggcgtcacgtgggacaaggcgagggcgcggtccagtggatgaataggc

SEQ ID NO: 142645 - DNA, 80 bp, synthetic construct
  source 1..80: mol_type = other DNA
ccgctccatctctcaaggcaacttgcaccgccaaccatgactcccctgacgccgagctcatagaggctaacctcctgtgg

SEQ ID NO: 142646 - DNA, 80 bp, synthetic construct
  source 1..80: mol_type = other DNA
ggctcctacagttccatgccccctcttgagggggaacctggagatcctgacctgagctccggctcgtggtcgacggtcag

SEQ ID NO: 142647 - DNA, 80 bp, synthetic construct
  source 1..80: mol_type = other DNA
cccctgcttataagtggctactgatgaacatcatgtggtggaaccagtattttatagcacggattgaagctgtgctgcaa

SEQ ID NO: 142648 - DNA, 80 bp, synthetic construct
  source 1..80: mol_type = other DNA
tggtgctcttgttcctgctgttggcggacgcgcgcgtctgtgcctgcttgtggatggtgttccttgtgtctcaggcggag

SEQ ID NO: 142649 - DNA, 80 bp, synthetic construct
  source 1..80: mol_type = other DNA
agggaagttgtttactcagaccatgaagggcgcagagcgtctggccgtcatgggagatgctgcctgggactttggttctg

SEQ ID NO: 142650 - DNA, 80 bp, synthetic construct
  source 1..80: mol_type = other DNA
cagacccgaggactactcggaaccatcgttaccagcttgacaggtagggataaaaatgtagtgactggtgaggtgcaggt

SEQ ID NO: 142651 - DNA, 80 bp, synthetic construct
  source 1..80: mol_type = other DNA
cgttgtgtgctgctcgatgtcgtattcttggacaggagcactcataacaccttgtgctgccgaagaagagaaattgccta

SEQ ID NO: 142652 - DNA, 80 bp, synthetic construct
  source 1..80: mol_type = other DNA
caccgaaagatcttgagccgctcgtccgcccgaacgacgcgccacacaaagacggagttgacaatgcgcgcgatagagtc

SEQ ID NO: 142653 - DNA, 80 bp, synthetic construct
  source 1..80: mol_type = other DNA
atgaacgggaccggcggggccttcgaagggaggcttttcagcccttatttgacaacccgcctgccgggatgtgccggagt

SEQ ID NO: 142654 - DNA, 80 bp, synthetic construct
  source 1..80: mol_type = other DNA
tttggagtatttgatatgtaagatgttatcgtttgacgcacgtcatcgaccatcggcagaggtgttgcttaaccactctg

SEQ ID NO: 142655 - DNA, 80 bp, synthetic construct
  source 1..80: mol_type = other DNA
actacagacatatctgaaatgggggctaactttagagctgggagagtgatagaccctagaagatgcctcaagccagttat

SEQ ID NO: 142656 - DNA, 80 bp, synthetic construct
  source 1..80: mol_type = other DNA
gagccgcttaaggcggatgacgacgacagagagatctctgtgtccgctgactgctttaggagaggaccggcgtttccccc

SEQ ID NO: 142657 - DNA, 80 bp, synthetic construct
  source 1..80: mol_type = other DNA
tgccccctaccacctcccaaaccaactccggtgccgccaccccggagaaagaggacagtggtgctggatgagtctacagt

SEQ ID NO: 142658 - DNA, 80 bp, synthetic construct
  source 1..80: mol_type = other DNA
agctcggcttatcgtatatcctgacctcggagtaagggtgtgcgagaaaagggccctgtacgacatcacgcagaagctcc

SEQ ID NO: 142659 - DNA, 80 bp, synthetic construct
  source 1..80: mol_type = other DNA
ataacattgatagaaaattttgtaaatatttaatgtaatatagtataggtaaaattttttgaaattaagtaaaattaagt

SEQ ID NO: 142660 - DNA, 80 bp, synthetic construct
  source 1..80: mol_type = other DNA
gactcgtccgcctgtgcatgttggtacgtaaggtcgcggggggccagtatgtgcggatggccctactcaaagtggtggct

SEQ ID NO: 142661 - DNA, 80 bp, synthetic construct
  source 1..80: mol_type = other DNA
tatgcagcgcggaggttggaagcttttggctcccatcaccgcgtatgcgcagcaaacgaggggcctagtcggcaccattg

SEQ ID NO: 142662 - DNA, 80 bp, synthetic construct
  source 1..80: mol_type = other DNA
ggagatgactgtgtggtgaagccactcgacgacaggttcgcaggagctttgcactttcttaatgccatgtccaaggttag

SEQ ID NO: 142663 - DNA, 80 bp, synthetic construct
  source 1..80: mol_type = other DNA
agcaactcccccaggcagcatcactgtgccacattctaacatcgaggaggtagccctgggctctgaaggtgagatccctt

SEQ ID NO: 142664 - DNA, 80 bp, synthetic construct
  source 1..80: mol_type = other DNA
gagctggccagcaagctcagagggatgggggtcaacgctgtggcgttctacagaggcctcgacgtgtccgtgatacctac

SEQ ID NO: 142665 - DNA, 80 bp, synthetic construct
  source 1..80: mol_type = other DNA
cggtcgtcgggccgctgggtcggcagcggctcatcatcgaagagctgaccctggagacccagggcatgtactactgggtg

SEQ ID NO: 142666 - DNA, 80 bp, synthetic construct
  source 1..80: mol_type = other DNA
ggacagcgggttgaattcctcgtgcaagcgtggaagtccaagaagaccccaatggggttttcatatgatacccgctgctt

SEQ ID NO: 142667 - DNA, 80 bp, synthetic construct
  source 1..80: mol_type = other DNA
atacgtctacatgctgggtgtctctcactcccactgtggctgcgccatacctgaatgctccgcttgagtctttgagacgt

SEQ ID NO: 142668 - DNA, 80 bp, synthetic construct
  source 1..80: mol_type = other DNA
ttttgtaaagatgagcctgtatattaaggtacattggcattaggccatctttgggatgaaggtaggaccattgaagggct

SEQ ID NO: 142669 - DNA, 80 bp, synthetic construct
  source 1..80: mol_type = other DNA
ataggccagctattcacatttcagccgcgtcgccattggaccacgcaggattgcaactgttccatctatactggtcacat

SEQ ID NO: 142670 - DNA, 80 bp, synthetic construct
  source 1..80: mol_type = other DNA
ttgaaattttgtgatggaagtacagttaagaatccacagatcagacatagttgtaatgaacaaaacttaactctgattca

SEQ ID NO: 142671 - DNA, 80 bp, synthetic construct
  source 1..80: mol_type = other DNA
caaagcctggatggtacataggcaatggttctttgacctacccctaccatggacatcaggagcaacaacagagacaccaa

SEQ ID NO: 142672 - DNA, 80 bp, synthetic construct
  source 1..80: mol_type = other DNA
cgcccgggagaacgccgaggggtgcgccggaccagggctgtggcgtcgaacgcagggatggccgaccccacgcccgccga

SEQ ID NO: 142673 - DNA, 80 bp, synthetic construct
  source 1..80: mol_type = other DNA
ccttccccatcaacgcctataccacggggccttgtaacccccttcctgcgccgaactatacgttcgcgctgtggagggtg

SEQ ID NO: 142674 - DNA, 80 bp, synthetic construct
  source 1..80: mol_type = other DNA
cccaggcgtggcctccgtggccttgcaagcagctcgcaaacaataaaagaaggcttaacactgacttcctggtcctgact

SEQ ID NO: 142675 - DNA, 80 bp, synthetic construct
  source 1..80: mol_type = other DNA
tacaaatttgccttgtggagggtaggcgctgcggactacgccgaggtgcgccgcgtggtggactaccattacattacggg

SEQ ID NO: 142676 - DNA, 80 bp, synthetic construct
  source 1..80: mol_type = other DNA
caaacatccggaagcgacgtatgccaaatgtggttctggcccttggcttacccctaggtgtcttgtggattatccataca

SEQ ID NO: 142677 - DNA, 80 bp, synthetic construct
  source 1..80: mol_type = other DNA
cagtggctgttatgggggatgcttacggcttccaatattcgcctcagcagcgagtggagcgtttgctcaaaatgtggaag

SEQ ID NO: 142678 - DNA, 80 bp, synthetic construct
  source 1..80: mol_type = other DNA
ttcgaggacacagagaacagaagggactgacctggattgtccctttggccgggctactcggaggagagggctctggagtc

SEQ ID NO: 142679 - DNA, 80 bp, synthetic construct
  source 1..80: mol_type = other DNA
acttgctacatcaaggcccgggcagcctgtcgagccgcagggctccaggactgcaccatgctcgtgtgtggcgacgactt

SEQ ID NO: 142680 - DNA, 80 bp, synthetic construct
  source 1..80: mol_type = other DNA
gtgctctatcggcagtttgatgagatggaggagtgctccaagcacatccctttgctcgagcatggcatgcagctcgccga

SEQ ID NO: 142681 - DNA, 80 bp, synthetic construct
  source 1..80: mol_type = other DNA
tccccccccccctcctacacaccaactccgccctcgccgtcttggccgtgcgcggccccgtgcgtccgtctcaataaagc

SEQ ID NO: 142682 - DNA, 80 bp, synthetic construct
  source 1..80: mol_type = other DNA
aggccagatcgttggtggagtgtacttgttgccgcgcaggggcccccggttgggtgtgcgcgcgacgaggaagacttctg

SEQ ID NO: 142683 - DNA, 80 bp, synthetic construct
  source 1..80: mol_type = other DNA
tcctcgccgtctaagtggagctcgtcccccaggctgacatcggtcgggggggccgtcgacagtctgcgcgtgtgtcccgc

SEQ ID NO: 142684 - DNA, 80 bp, synthetic construct
  source 1..80: mol_type = other DNA
atgagtagaatgtcaatggcaatgggtaccatggctggcagtggatatctcatgtttctgggtggagtaaaaccaaccca

SEQ ID NO: 142685 - DNA, 80 bp, synthetic construct
  source 1..80: mol_type = other DNA
agaacccgttcctgaagcgtacaacgcagacatgttaagaaagaagcagctgacagtgctggacctgcatccaggagcgg

SEQ ID NO: 142686 - DNA, 80 bp, synthetic construct
  source 1..80: mol_type = other DNA
tcggcctcaactcttttgtggtcggctctcagctcccttgtgagcccgagccggacacggaggtgttggcgtcgatgctg

SEQ ID NO: 142687 - DNA, 80 bp, synthetic construct
  source 1..80: mol_type = other DNA
atggtcgctatctgtgcaatggcaacagcagtactatttctaatcttacatttgtagcaagcagaaattcttctaacaga
